United States Patent Application Publication US 2012/0157512 A1 - sequence listing, part 5

SEQ ID NO: 130536 - DNA, 21 bp, Artificial sequence
  SiRNA target sequence
gttatagtttattaaaaaatt

SEQ ID NO: 130537 - DNA, 21 bp, Artificial sequence
  SiRNA target sequence
ttatagtttattaaaaaatta

SEQ ID NO: 130538 - DNA, 21 bp, Artificial sequence
  SiRNA target sequence
tatagtttattaaaaaattaa

SEQ ID NO: 130539 - DNA, 22 bp, Artificial sequence
  SiRNA target sequence
atggtgtataaggttttattta

SEQ ID NO: 130540 - DNA, 22 bp, Artificial sequence
  SiRNA target sequence
tggtgtataaggttttatttac

SEQ ID NO: 130541 - DNA, 22 bp, Artificial sequence
  SiRNA target sequence
ggtgtataaggttttatttaca

SEQ ID NO: 130542 - DNA, 22 bp, Artificial sequence
  SiRNA target sequence
gtgtataaggttttatttacag

SEQ ID NO: 130543 - DNA, 22 bp, Artificial sequence
  SiRNA target sequence
tgtataaggttttatttacagt

SEQ ID NO: 130544 - DNA, 22 bp, Artificial sequence
  SiRNA target sequence
gtataaggttttatttacagta

SEQ ID NO: 130545 - DNA, 22 bp, Artificial sequence
  SiRNA target sequence
tataaggttttatttacagtaa

SEQ ID NO: 130546 - DNA, 22 bp, Artificial sequence
  SiRNA target sequence
ataaggttttatttacagtaat

SEQ ID NO: 130547 - DNA, 22 bp, Artificial sequence
  SiRNA target sequence
taaggttttatttacagtaata

SEQ ID NO: 130548 - DNA, 22 bp, Artificial sequence
  SiRNA target sequence
aaggttttatttacagtaatag

SEQ ID NO: 130549 - DNA, 22 bp, Artificial sequence
  SiRNA target sequence
aggttttatttacagtaatagg

SEQ ID NO: 130550 - DNA, 22 bp, Artificial sequence
  SiRNA target sequence
ggttttatttacagtaatagga

SEQ ID NO: 130551 - DNA, 22 bp, Artificial sequence
  SiRNA target sequence
gttttatttacagtaataggat

SEQ ID NO: 130552 - DNA, 22 bp, Artificial sequence
  SiRNA target sequence
ttttatttacagtaataggatt

SEQ ID NO: 130553 - DNA, 22 bp, Artificial sequence
  SiRNA target sequence
tttatttacagtaataggatta

SEQ ID NO: 130554 - DNA, 22 bp, Artificial sequence
  SiRNA target sequence
ttatttacagtaataggattaa

SEQ ID NO: 130555 - DNA, 22 bp, Artificial sequence
  SiRNA target sequence
tatttacagtaataggattaat

SEQ ID NO: 130556 - DNA, 22 bp, Artificial sequence
  SiRNA target sequence
atttacagtaataggattaata

SEQ ID NO: 130557 - DNA, 22 bp, Artificial sequence
  SiRNA target sequence
tttacagtaataggattaatat

SEQ ID NO: 130558 - DNA, 22 bp, Artificial sequence
  SiRNA target sequence
ttacagtaataggattaatatg

SEQ ID NO: 130559 - DNA, 22 bp, Artificial sequence
  SiRNA target sequence
tacagtaataggattaatatgt

SEQ ID NO: 130560 - DNA, 22 bp, Artificial sequence
  SiRNA target sequence
acagtaataggattaatatgtg

SEQ ID NO: 130561 - DNA, 22 bp, Artificial sequence
  SiRNA target sequence
cagtaataggattaatatgtgg

SEQ ID NO: 130562 - DNA, 22 bp, Artificial sequence
  SiRNA target sequence
agtaataggattaatatgtggt

SEQ ID NO: 130563 - DNA, 22 bp, Artificial sequence
  SiRNA target sequence
gtaataggattaatatgtggta

SEQ ID NO: 130564 - DNA, 22 bp, Artificial sequence
  SiRNA target sequence
taataggattaatatgtggtat

SEQ ID NO: 130565 - DNA, 22 bp, Artificial sequence
  SiRNA target sequence
aataggattaatatgtggtata

SEQ ID NO: 130566 - DNA, 22 bp, Artificial sequence
  SiRNA target sequence
ataggattaatatgtggtatac

SEQ ID NO: 130567 - DNA, 22 bp, Artificial sequence
  SiRNA target sequence
taggattaatatgtggtatact

SEQ ID NO: 130568 - DNA, 22 bp, Artificial sequence
  SiRNA target sequence
aggattaatatgtggtatactt

SEQ ID NO: 130569 - DNA, 22 bp, Artificial sequence
  SiRNA target sequence
ggattaatatgtggtatactta

SEQ ID NO: 130570 - DNA, 22 bp, Artificial sequence
  SiRNA target sequence
gattaatatgtggtatacttac

SEQ ID NO: 130571 - DNA, 22 bp, Artificial sequence
  SiRNA target sequence
attaatatgtggtatacttaca

SEQ ID NO: 130572 - DNA, 22 bp, Artificial sequence
  SiRNA target sequence
ttaatatgtggtatacttacaa

SEQ ID NO: 130573 - DNA, 22 bp, Artificial sequence
  SiRNA target sequence
taatatgtggtatacttacaat

SEQ ID NO: 130574 - DNA, 22 bp, Artificial sequence
  SiRNA target sequence
aatatgtggtatacttacaata

SEQ ID NO: 130575 - DNA, 22 bp, Artificial sequence
  SiRNA target sequence
atatgtggtatacttacaataa

SEQ ID NO: 130576 - DNA, 22 bp, Artificial sequence
  SiRNA target sequence
tatgtggtatacttacaataat

SEQ ID NO: 130577 - DNA, 22 bp, Artificial sequence
  SiRNA target sequence
atgtggtatacttacaataatt

SEQ ID NO: 130578 - DNA, 22 bp, Artificial sequence
  SiRNA target sequence
tgtggtatacttacaataatta

SEQ ID NO: 130579 - DNA, 22 bp, Artificial sequence
  SiRNA target sequence
gtggtatacttacaataattaa

SEQ ID NO: 130580 - DNA, 22 bp, Artificial sequence
  SiRNA target sequence
tggtatacttacaataattaaa

SEQ ID NO: 130581 - DNA, 22 bp, Artificial sequence
  SiRNA target sequence
ggtatacttacaataattaaac

SEQ ID NO: 130582 - DNA, 22 bp, Artificial sequence
  SiRNA target sequence
gtatacttacaataattaaacg

SEQ ID NO: 130583 - DNA, 22 bp, Artificial sequence
  SiRNA target sequence
tatacttacaataattaaacga

SEQ ID NO: 130584 - DNA, 22 bp, Artificial sequence
  SiRNA target sequence
atacttacaataattaaacgat

SEQ ID NO: 130585 - DNA, 22 bp, Artificial sequence
  SiRNA target sequence
tacttacaataattaaacgata

SEQ ID NO: 130586 - DNA, 22 bp, Artificial sequence
  SiRNA target sequence
acttacaataattaaacgatac

SEQ ID NO: 130587 - DNA, 22 bp, Artificial sequence
  SiRNA target sequence
cttacaataattaaacgataca

SEQ ID NO: 130588 - DNA, 22 bp, Artificial sequence
  SiRNA target sequence
ttacaataattaaacgatacaa

SEQ ID NO: 130589 - DNA, 22 bp, Artificial sequence
  SiRNA target sequence
tacaataattaaacgatacaag

SEQ ID NO: 130590 - DNA, 22 bp, Artificial sequence
  SiRNA target sequence
acaataattaaacgatacaagt

SEQ ID NO: 130591 - DNA, 22 bp, Artificial sequence
  SiRNA target sequence
caataattaaacgatacaagta

SEQ ID NO: 130592 - DNA, 22 bp, Artificial sequence
  SiRNA target sequence
aataattaaacgatacaagtat

SEQ ID NO: 130593 - DNA, 22 bp, Artificial sequence
  SiRNA target sequence
ataattaaacgatacaagtatt

SEQ ID NO: 130594 - DNA, 22 bp, Artificial sequence
  SiRNA target sequence
taattaaacgatacaagtattt

SEQ ID NO: 130595 - DNA, 22 bp, Artificial sequence
  SiRNA target sequence
aattaaacgatacaagtatttt

SEQ ID NO: 130596 - DNA, 22 bp, Artificial sequence
  SiRNA target sequence
attaaacgatacaagtatttta

SEQ ID NO: 130597 - DNA, 22 bp, Artificial sequence
  SiRNA target sequence
ttaaacgatacaagtattttaa

SEQ ID NO: 130598 - DNA, 22 bp, Artificial sequence
  SiRNA target sequence
taaacgatacaagtattttaag

SEQ ID NO: 130599 - DNA, 22 bp, Artificial sequence
  SiRNA target sequence
aaacgatacaagtattttaaga

SEQ ID NO: 130600 - DNA, 22 bp, Artificial sequence
  SiRNA target sequence
aacgatacaagtattttaagat

SEQ ID NO: 130601 - DNA, 22 bp, Artificial sequence
  SiRNA target sequence
acgatacaagtattttaagata

SEQ ID NO: 130602 - DNA, 22 bp, Artificial sequence
  SiRNA target sequence
cgatacaagtattttaagataa

SEQ ID NO: 130603 - DNA, 22 bp, Artificial sequence
  SiRNA target sequence
gatacaagtattttaagataaa

SEQ ID NO: 130604 - DNA, 22 bp, Artificial sequence
  SiRNA target sequence
atacaagtattttaagataaaa

SEQ ID NO: 130605 - DNA, 22 bp, Artificial sequence
  SiRNA target sequence
tacaagtattttaagataaaaa

SEQ ID NO: 130606 - DNA, 22 bp, Artificial sequence
  SiRNA target sequence
acaagtattttaagataaaaaa

SEQ ID NO: 130607 - DNA, 22 bp, Artificial sequence
  SiRNA target sequence
caagtattttaagataaaaaaa

SEQ ID NO: 130608 - DNA, 22 bp, Artificial sequence
  SiRNA target sequence
aagtattttaagataaaaaaat

SEQ ID NO: 130609 - DNA, 22 bp, Artificial sequence
  SiRNA target sequence
agtattttaagataaaaaaatt

SEQ ID NO: 130610 - DNA, 22 bp, Artificial sequence
  SiRNA target sequence
gtattttaagataaaaaaattg

SEQ ID NO: 130611 - DNA, 22 bp, Artificial sequence
  SiRNA target sequence
tattttaagataaaaaaattgg

SEQ ID NO: 130612 - DNA, 22 bp, Artificial sequence
  SiRNA target sequence
attttaagataaaaaaattggc

SEQ ID NO: 130613 - DNA, 22 bp, Artificial sequence
  SiRNA target sequence
ttttaagataaaaaaattggcc

SEQ ID NO: 130614 - DNA, 22 bp, Artificial sequence
  SiRNA target sequence
tttaagataaaaaaattggcct

SEQ ID NO: 130615 - DNA, 22 bp, Artificial sequence
  SiRNA target sequence
ttaagataaaaaaattggcctt

SEQ ID NO: 130616 - DNA, 22 bp, Artificial sequence
  SiRNA target sequence
taagataaaaaaattggcctta

SEQ ID NO: 130617 - DNA, 22 bp, Artificial sequence
  SiRNA target sequence
aagataaaaaaattggccttaa

SEQ ID NO: 130618 - DNA, 22 bp, Artificial sequence
  SiRNA target sequence
agataaaaaaattggccttaac

SEQ ID NO: 130619 - DNA, 22 bp, Artificial sequence
  SiRNA target sequence
gataaaaaaattggccttaact

SEQ ID NO: 130620 - DNA, 22 bp, Artificial sequence
  SiRNA target sequence
ataaaaaaattggccttaactt

SEQ ID NO: 130621 - DNA, 22 bp, Artificial sequence
  SiRNA target sequence
taaaaaaattggccttaactta

SEQ ID NO: 130622 - DNA, 22 bp, Artificial sequence
  SiRNA target sequence
aaaaaaattggccttaacttac

SEQ ID NO: 130623 - DNA, 22 bp, Artificial sequence
  SiRNA target sequence
aaaaaattggccttaacttact

SEQ ID NO: 130624 - DNA, 22 bp, Artificial sequence
  SiRNA target sequence
aaaaattggccttaacttactt

SEQ ID NO: 130625 - DNA, 22 bp, Artificial sequence
  SiRNA target sequence
aaaattggccttaacttacttc

SEQ ID NO: 130626 - DNA, 22 bp, Artificial sequence
  SiRNA target sequence
aaattggccttaacttacttcg

SEQ ID NO: 130627 - DNA, 22 bp, Artificial sequence
  SiRNA target sequence
aattggccttaacttacttcgg

SEQ ID NO: 130628 - DNA, 22 bp, Artificial sequence
  SiRNA target sequence
attggccttaacttacttcggg

SEQ ID NO: 130629 - DNA, 22 bp, Artificial sequence
  SiRNA target sequence
ttggccttaacttacttcggga

SEQ ID NO: 130630 - DNA, 22 bp, Artificial sequence
  SiRNA target sequence
tggccttaacttacttcgggaa

SEQ ID NO: 130631 - DNA, 22 bp, Artificial sequence
  SiRNA target sequence
ggccttaacttacttcgggaaa

SEQ ID NO: 130632 - DNA, 22 bp, Artificial sequence
  SiRNA target sequence
gccttaacttacttcgggaaac

SEQ ID NO: 130633 - DNA, 22 bp, Artificial sequence
  SiRNA target sequence
ccttaacttacttcgggaaaca

SEQ ID NO: 130634 - DNA, 22 bp, Artificial sequence
  SiRNA target sequence
cttaacttacttcgggaaacaa

SEQ ID NO: 130635 - DNA, 22 bp, Artificial sequence
  SiRNA target sequence
ttaacttacttcgggaaacaag

SEQ ID NO: 130636 - DNA, 22 bp, Artificial sequence
  SiRNA target sequence
taacttacttcgggaaacaaga

SEQ ID NO: 130637 - DNA, 22 bp, Artificial sequence
  SiRNA target sequence
aacttacttcgggaaacaagac

SEQ ID NO: 130638 - DNA, 22 bp, Artificial sequence
  SiRNA target sequence
acttacttcgggaaacaagact

SEQ ID NO: 130639 - DNA, 22 bp, Artificial sequence
  SiRNA target sequence
cttacttcgggaaacaagactt

SEQ ID NO: 130640 - DNA, 22 bp, Artificial sequence
  SiRNA target sequence
ttacttcgggaaacaagacttg

SEQ ID NO: 130641 - DNA, 22 bp, Artificial sequence
  SiRNA target sequence
tacttcgggaaacaagacttgc

SEQ ID NO: 130642 - DNA, 22 bp, Artificial sequence
  SiRNA target sequence
acttcgggaaacaagacttgca

SEQ ID NO: 130643 - DNA, 22 bp, Artificial sequence
  SiRNA target sequence
cttcgggaaacaagacttgcaa

SEQ ID NO: 130644 - DNA, 22 bp, Artificial sequence
  SiRNA target sequence
ttcgggaaacaagacttgcaat

SEQ ID NO: 130645 - DNA, 22 bp, Artificial sequence
  SiRNA target sequence
tcgggaaacaagacttgcaatg

SEQ ID NO: 130646 - DNA, 22 bp, Artificial sequence
  SiRNA target sequence
cgggaaacaagacttgcaatgg

SEQ ID NO: 130647 - DNA, 22 bp, Artificial sequence
  SiRNA target sequence
gggaaacaagacttgcaatgga

SEQ ID NO: 130648 - DNA, 22 bp, Artificial sequence
  SiRNA target sequence
ggaaacaagacttgcaatggaa

SEQ ID NO: 130649 - DNA, 22 bp, Artificial sequence
  SiRNA target sequence
gaaacaagacttgcaatggaaa

SEQ ID NO: 130650 - DNA, 22 bp, Artificial sequence
  SiRNA target sequence
aaacaagacttgcaatggaaac

SEQ ID NO: 130651 - DNA, 22 bp, Artificial sequence
  SiRNA target sequence
aacaagacttgcaatggaaacc

SEQ ID NO: 130652 - DNA, 22 bp, Artificial sequence
  SiRNA target sequence
acaagacttgcaatggaaacct

SEQ ID NO: 130653 - DNA, 22 bp, Artificial sequence
  SiRNA target sequence
caagacttgcaatggaaaccta

SEQ ID NO: 130654 - DNA, 22 bp, Artificial sequence
  SiRNA target sequence
aagacttgcaatggaaacctaa

SEQ ID NO: 130655 - DNA, 22 bp, Artificial sequence
  SiRNA target sequence
agacttgcaatggaaacctaaa

SEQ ID NO: 130656 - DNA, 22 bp, Artificial sequence
  SiRNA target sequence
gacttgcaatggaaacctaaaa

SEQ ID NO: 130657 - DNA, 22 bp, Artificial sequence
  SiRNA target sequence
acttgcaatggaaacctaaaag

SEQ ID NO: 130658 - DNA, 22 bp, Artificial sequence
  SiRNA target sequence
cttgcaatggaaacctaaaagt

SEQ ID NO: 130659 - DNA, 22 bp, Artificial sequence
  SiRNA target sequence
ttgcaatggaaacctaaaagtc

SEQ ID NO: 130660 - DNA, 22 bp, Artificial sequence
  SiRNA target sequence
tgcaatggaaacctaaaagtcg

SEQ ID NO: 130661 - DNA, 22 bp, Artificial sequence
  SiRNA target sequence
gcaatggaaacctaaaagtcgg

SEQ ID NO: 130662 - DNA, 22 bp, Artificial sequence
  SiRNA target sequence
caatggaaacctaaaagtcggt

SEQ ID NO: 130663 - DNA, 22 bp, Artificial sequence
  SiRNA target sequence
aatggaaacctaaaagtcggtc

SEQ ID NO: 130664 - DNA, 22 bp, Artificial sequence
  SiRNA target sequence
atggaaacctaaaagtcggtca

SEQ ID NO: 130665 - DNA, 22 bp, Artificial sequence
  SiRNA target sequence
tggaaacctaaaagtcggtcag

SEQ ID NO: 130666 - DNA, 22 bp, Artificial sequence
  SiRNA target sequence
ggaaacctaaaagtcggtcaga

SEQ ID NO: 130667 - DNA, 22 bp, Artificial sequence
  SiRNA target sequence
gaaacctaaaagtcggtcagaa

SEQ ID NO: 130668 - DNA, 22 bp, Artificial sequence
  SiRNA target sequence
aaacctaaaagtcggtcagaaa

SEQ ID NO: 130669 - DNA, 22 bp, Artificial sequence
  SiRNA target sequence
aacctaaaagtcggtcagaaat

SEQ ID NO: 130670 - DNA, 22 bp, Artificial sequence
  SiRNA target sequence
acctaaaagtcggtcagaaatt

SEQ ID NO: 130671 - DNA, 22 bp, Artificial sequence
  SiRNA target sequence
cctaaaagtcggtcagaaatta

SEQ ID NO: 130672 - DNA, 22 bp, Artificial sequence
  SiRNA target sequence
ctaaaagtcggtcagaaattat

SEQ ID NO: 130673 - DNA, 22 bp, Artificial sequence
  SiRNA target sequence
taaaagtcggtcagaaattatt

SEQ ID NO: 130674 - DNA, 22 bp, Artificial sequence
  SiRNA target sequence
aaaagtcggtcagaaattatta

SEQ ID NO: 130675 - DNA, 22 bp, Artificial sequence
  SiRNA target sequence
aaagtcggtcagaaattattaa

SEQ ID NO: 130676 - DNA, 22 bp, Artificial sequence
  SiRNA target sequence
aagtcggtcagaaattattaac

SEQ ID NO: 130677 - DNA, 22 bp, Artificial sequence
  SiRNA target sequence
agtcggtcagaaattattaacg

SEQ ID NO: 130678 - DNA, 22 bp, Artificial sequence
  SiRNA target sequence
gtcggtcagaaattattaacga

SEQ ID NO: 130679 - DNA, 22 bp, Artificial sequence
  SiRNA target sequence
tcggtcagaaattattaacgat

SEQ ID NO: 130680 - DNA, 22 bp, Artificial sequence
  SiRNA target sequence
cggtcagaaattattaacgatt

SEQ ID NO: 130681 - DNA, 22 bp, Artificial sequence
  SiRNA target sequence
ggtcagaaattattaacgattt

SEQ ID NO: 130682 - DNA, 22 bp, Artificial sequence
  SiRNA target sequence
gtcagaaattattaacgattta

SEQ ID NO: 130683 - DNA, 22 bp, Artificial sequence
  SiRNA target sequence
tcagaaattattaacgatttaa

SEQ ID NO: 130684 - DNA, 22 bp, Artificial sequence
  SiRNA target sequence
cagaaattattaacgatttaaa

SEQ ID NO: 130685 - DNA, 22 bp, Artificial sequence
  SiRNA target sequence
agaaattattaacgatttaaaa

SEQ ID NO: 130686 - DNA, 22 bp, Artificial sequence
  SiRNA target sequence
gaaattattaacgatttaaaaa

SEQ ID NO: 130687 - DNA, 22 bp, Artificial sequence
  SiRNA target sequence
aaattattaacgatttaaaaaa

SEQ ID NO: 130688 - DNA, 22 bp, Artificial sequence
  SiRNA target sequence
aattattaacgatttaaaaaat

SEQ ID NO: 130689 - DNA, 22 bp, Artificial sequence
  SiRNA target sequence
attattaacgatttaaaaaata

SEQ ID NO: 130690 - DNA, 22 bp, Artificial sequence
  SiRNA target sequence
ttattaacgatttaaaaaatac

SEQ ID NO: 130691 - DNA, 22 bp, Artificial sequence
  SiRNA target sequence
tattaacgatttaaaaaataca

SEQ ID NO: 130692 - DNA, 22 bp, Artificial sequence
  SiRNA target sequence
attaacgatttaaaaaatacaa

SEQ ID NO: 130693 - DNA, 22 bp, Artificial sequence
  SiRNA target sequence
ttaacgatttaaaaaatacaaa

SEQ ID NO: 130694 - DNA, 22 bp, Artificial sequence
  SiRNA target sequence
taacgatttaaaaaatacaaac

SEQ ID NO: 130695 - DNA, 22 bp, Artificial sequence
  SiRNA target sequence
aacgatttaaaaaatacaaact

SEQ ID NO: 130696 - DNA, 22 bp, Artificial sequence
  SiRNA target sequence
acgatttaaaaaatacaaactt

SEQ ID NO: 130697 - DNA, 22 bp, Artificial sequence
  SiRNA target sequence
cgatttaaaaaatacaaacttt

SEQ ID NO: 130698 - DNA, 22 bp, Artificial sequence
  SiRNA target sequence
gatttaaaaaatacaaactttg

SEQ ID NO: 130699 - DNA, 22 bp, Artificial sequence
  SiRNA target sequence
atttaaaaaatacaaactttga

SEQ ID NO: 130700 - DNA, 22 bp, Artificial sequence
  SiRNA target sequence
tttaaaaaatacaaactttgac

SEQ ID NO: 130701 - DNA, 22 bp, Artificial sequence
  SiRNA target sequence
ttaaaaaatacaaactttgaca

SEQ ID NO: 130702 - DNA, 22 bp, Artificial sequence
  SiRNA target sequence
taaaaaatacaaactttgacat

SEQ ID NO: 130703 - DNA, 22 bp, Artificial sequence
  SiRNA target sequence
aaaaaatacaaactttgacata

SEQ ID NO: 130704 - DNA, 22 bp, Artificial sequence
  SiRNA target sequence
aaaaatacaaactttgacatat

SEQ ID NO: 130705 - DNA, 22 bp, Artificial sequence
  SiRNA target sequence
aaaatacaaactttgacatatt

SEQ ID NO: 130706 - DNA, 22 bp, Artificial sequence
  SiRNA target sequence
aaatacaaactttgacatattg

SEQ ID NO: 130707 - DNA, 22 bp, Artificial sequence
  SiRNA target sequence
aatacaaactttgacatattga

SEQ ID NO: 130708 - DNA, 22 bp, Artificial sequence
  SiRNA target sequence
atacaaactttgacatattgat

SEQ ID NO: 130709 - DNA, 22 bp, Artificial sequence
  SiRNA target sequence
tacaaactttgacatattgatt

SEQ ID NO: 130710 - DNA, 22 bp, Artificial sequence
  SiRNA target sequence
acaaactttgacatattgatta

SEQ ID NO: 130711 - DNA, 22 bp, Artificial sequence
  SiRNA target sequence
caaactttgacatattgattat

SEQ ID NO: 130712 - DNA, 22 bp, Artificial sequence
  SiRNA target sequence
aaactttgacatattgattatt

SEQ ID NO: 130713 - DNA, 22 bp, Artificial sequence
  SiRNA target sequence
aactttgacatattgattattg

SEQ ID NO: 130714 - DNA, 22 bp, Artificial sequence
  SiRNA target sequence
actttgacatattgattattgg

SEQ ID NO: 130715 - DNA, 22 bp, Artificial sequence
  SiRNA target sequence
ctttgacatattgattattggt

SEQ ID NO: 130716 - DNA, 22 bp, Artificial sequence
  SiRNA target sequence
tttgacatattgattattggtg

SEQ ID NO: 130717 - DNA, 22 bp, Artificial sequence
  SiRNA target sequence
ttgacatattgattattggtgg

SEQ ID NO: 130718 - DNA, 22 bp, Artificial sequence
  SiRNA target sequence
tgacatattgattattggtggc

SEQ ID NO: 130719 - DNA, 22 bp, Artificial sequence
  SiRNA target sequence
gacatattgattattggtggcg

SEQ ID NO: 130720 - DNA, 22 bp, Artificial sequence
  SiRNA target sequence
acatattgattattggtggcgg

SEQ ID NO: 130721 - DNA, 22 bp, Artificial sequence
  SiRNA target sequence
catattgattattggtggcggt

SEQ ID NO: 130722 - DNA, 22 bp, Artificial sequence
  SiRNA target sequence
atattgattattggtggcggtt

SEQ ID NO: 130723 - DNA, 22 bp, Artificial sequence
  SiRNA target sequence
tattgattattggtggcggttc

SEQ ID NO: 130724 - DNA, 22 bp, Artificial sequence
  SiRNA target sequence
attgattattggtggcggttca

SEQ ID NO: 130725 - DNA, 22 bp, Artificial sequence
  SiRNA target sequence
ttgattattggtggcggttcaa

SEQ ID NO: 130726 - DNA, 22 bp, Artificial sequence
  SiRNA target sequence
tgattattggtggcggttcaac

SEQ ID NO: 130727 - DNA, 22 bp, Artificial sequence
  SiRNA target sequence
gattattggtggcggttcaacg

SEQ ID NO: 130728 - DNA, 22 bp, Artificial sequence
  SiRNA target sequence
attattggtggcggttcaacgg

SEQ ID NO: 130729 - DNA, 22 bp, Artificial sequence
  SiRNA target sequence
ttattggtggcggttcaacggg

SEQ ID NO: 130730 - DNA, 22 bp, Artificial sequence
  SiRNA target sequence
tattggtggcggttcaacggga

SEQ ID NO: 130731 - DNA, 22 bp, Artificial sequence
  SiRNA target sequence
attggtggcggttcaacgggaa

SEQ ID NO: 130732 - DNA, 22 bp, Artificial sequence
  SiRNA target sequence
ttggtggcggttcaacgggaat

SEQ ID NO: 130733 - DNA, 22 bp, Artificial sequence
  SiRNA target sequence
tggtggcggttcaacgggaatg

SEQ ID NO: 130734 - DNA, 22 bp, Artificial sequence
  SiRNA target sequence
ggtggcggttcaacgggaatgg

SEQ ID NO: 130735 - DNA, 22 bp, Artificial sequence
  SiRNA target sequence
gtggcggttcaacgggaatggg

SEQ ID NO: 130736 - DNA, 22 bp, Artificial sequence
  SiRNA target sequence
tggcggttcaacgggaatggga

SEQ ID NO: 130737 - DNA, 22 bp, Artificial sequence
  SiRNA target sequence
ggcggttcaacgggaatgggat

SEQ ID NO: 130738 - DNA, 22 bp, Artificial sequence
  SiRNA target sequence
gcggttcaacgggaatgggatg

SEQ ID NO: 130739 - DNA, 22 bp, Artificial sequence
  SiRNA target sequence
cggttcaacgggaatgggatgt

SEQ ID NO: 130740 - DNA, 22 bp, Artificial sequence
  SiRNA target sequence
ggttcaacgggaatgggatgtg

SEQ ID NO: 130741 - DNA, 22 bp, Artificial sequence
  SiRNA target sequence
gttcaacgggaatgggatgtgc

SEQ ID NO: 130742 - DNA, 22 bp, Artificial sequence
  SiRNA target sequence
ttcaacgggaatgggatgtgca

SEQ ID NO: 130743 - DNA, 22 bp, Artificial sequence
  SiRNA target sequence
tcaacgggaatgggatgtgcaa

SEQ ID NO: 130744 - DNA, 22 bp, Artificial sequence
  SiRNA target sequence
caacgggaatgggatgtgcaat

SEQ ID NO: 130745 - DNA, 22 bp, Artificial sequence
  SiRNA target sequence
aacgggaatgggatgtgcaatc

SEQ ID NO: 130746 - DNA, 22 bp, Artificial sequence
  SiRNA target sequence
acgggaatgggatgtgcaatcg

SEQ ID NO: 130747 - DNA, 22 bp, Artificial sequence
  SiRNA target sequence
cgggaatgggatgtgcaatcga

SEQ ID NO: 130748 - DNA, 22 bp, Artificial sequence
  SiRNA target sequence
gggaatgggatgtgcaatcgaa

SEQ ID NO: 130749 - DNA, 22 bp, Artificial sequence
  SiRNA target sequence
ggaatgggatgtgcaatcgaag

SEQ ID NO: 130750 - DNA, 22 bp, Artificial sequence
  SiRNA target sequence
gaatgggatgtgcaatcgaagc

SEQ ID NO: 130751 - DNA, 22 bp, Artificial sequence
  SiRNA target sequence
aatgggatgtgcaatcgaagca

SEQ ID NO: 130752 - DNA, 22 bp, Artificial sequence
  SiRNA target sequence
atgggatgtgcaatcgaagcag

SEQ ID NO: 130753 - DNA, 22 bp, Artificial sequence
  SiRNA target sequence
tgggatgtgcaatcgaagcagc

SEQ ID NO: 130754 - DNA, 22 bp, Artificial sequence
  SiRNA target sequence
gggatgtgcaatcgaagcagct

SEQ ID NO: 130755 - DNA, 22 bp, Artificial sequence
  SiRNA target sequence
ggatgtgcaatcgaagcagcta

SEQ ID NO: 130756 - DNA, 22 bp, Artificial sequence
  SiRNA target sequence
gatgtgcaatcgaagcagctac

SEQ ID NO: 130757 - DNA, 22 bp, Artificial sequence
  SiRNA target sequence
atgtgcaatcgaagcagctaca

SEQ ID NO: 130758 - DNA, 22 bp, Artificial sequence
  SiRNA target sequence
tgtgcaatcgaagcagctacac

SEQ ID NO: 130759 - DNA, 22 bp, Artificial sequence
  SiRNA target sequence
gtgcaatcgaagcagctacacg

SEQ ID NO: 130760 - DNA, 22 bp, Artificial sequence
  SiRNA target sequence
tgcaatcgaagcagctacacga

SEQ ID NO: 130761 - DNA, 22 bp, Artificial sequence
  SiRNA target sequence
gcaatcgaagcagctacacgag

SEQ ID NO: 130762 - DNA, 22 bp, Artificial sequence
  SiRNA target sequence
caatcgaagcagctacacgagg

SEQ ID NO: 130763 - DNA, 22 bp, Artificial sequence
  SiRNA target sequence
aatcgaagcagctacacgaggt

SEQ ID NO: 130764 - DNA, 22 bp, Artificial sequence
  SiRNA target sequence
atcgaagcagctacacgaggta

SEQ ID NO: 130765 - DNA, 22 bp, Artificial sequence
  SiRNA target sequence
tcgaagcagctacacgaggtat

SEQ ID NO: 130766 - DNA, 22 bp, Artificial sequence
  SiRNA target sequence
cgaagcagctacacgaggtata

SEQ ID NO: 130767 - DNA, 22 bp, Artificial sequence
  SiRNA target sequence
gaagcagctacacgaggtataa

SEQ ID NO: 130768 - DNA, 22 bp, Artificial sequence
  SiRNA target sequence
aagcagctacacgaggtataag

SEQ ID NO: 130769 - DNA, 22 bp, Artificial sequence
  SiRNA target sequence
agcagctacacgaggtataagt

SEQ ID NO: 130770 - DNA, 22 bp, Artificial sequence
  SiRNA target sequence
gcagctacacgaggtataagtg

SEQ ID NO: 130771 - DNA, 22 bp, Artificial sequence
  SiRNA target sequence
cagctacacgaggtataagtgt

SEQ ID NO: 130772 - DNA, 22 bp, Artificial sequence
  SiRNA target sequence
agctacacgaggtataagtgtt

SEQ ID NO: 130773 - DNA, 22 bp, Artificial sequence
  SiRNA target sequence
gctacacgaggtataagtgttg

SEQ ID NO: 130774 - DNA, 22 bp, Artificial sequence
  SiRNA target sequence
ctacacgaggtataagtgttgg

SEQ ID NO: 130775 - DNA, 22 bp, Artificial sequence
  SiRNA target sequence
tacacgaggtataagtgttggc

SEQ ID NO: 130776 - DNA, 22 bp, Artificial sequence
  SiRNA target sequence
acacgaggtataagtgttggcc

SEQ ID NO: 130777 - DNA, 22 bp, Artificial sequence
  SiRNA target sequence
cacgaggtataagtgttggcct

SEQ ID NO: 130778 - DNA, 22 bp, Artificial sequence
  SiRNA target sequence
acgaggtataagtgttggcctg

SEQ ID NO: 130779 - DNA, 22 bp, Artificial sequence
  SiRNA target sequence
cgaggtataagtgttggcctga

SEQ ID NO: 130780 - DNA, 22 bp, Artificial sequence
  SiRNA target sequence
gaggtataagtgttggcctgat

SEQ ID NO: 130781 - DNA, 22 bp, Artificial sequence
  SiRNA target sequence
aggtataagtgttggcctgata

SEQ ID NO: 130782 - DNA, 22 bp, Artificial sequence
  SiRNA target sequence
ggtataagtgttggcctgatag

SEQ ID NO: 130783 - DNA, 22 bp, Artificial sequence
  SiRNA target sequence
gtataagtgttggcctgataga

SEQ ID NO: 130784 - DNA, 22 bp, Artificial sequence
  SiRNA target sequence
tataagtgttggcctgatagaa

SEQ ID NO: 130785 - DNA, 22 bp, Artificial sequence
  SiRNA target sequence
ataagtgttggcctgatagaag

SEQ ID NO: 130786 - DNA, 22 bp, Artificial sequence
  SiRNA target sequence
taagtgttggcctgatagaagc

SEQ ID NO: 130787 - DNA, 22 bp, Artificial sequence
  SiRNA target sequence
aagtgttggcctgatagaagca

SEQ ID NO: 130788 - DNA, 22 bp, Artificial sequence
  SiRNA target sequence
agtgttggcctgatagaagcac

SEQ ID NO: 130789 - DNA, 22 bp, Artificial sequence
  SiRNA target sequence
gtgttggcctgatagaagcaca

SEQ ID NO: 130790 - DNA, 22 bp, Artificial sequence
  SiRNA target sequence
tgttggcctgatagaagcacat

SEQ ID NO: 130791 - DNA, 22 bp, Artificial sequence
  SiRNA target sequence
gttggcctgatagaagcacatg

SEQ ID NO: 130792 - DNA, 22 bp, Artificial sequence
  SiRNA target sequence
ttggcctgatagaagcacatga

SEQ ID NO: 130793 - DNA, 22 bp, Artificial sequence
  SiRNA target sequence
tggcctgatagaagcacatgat

SEQ ID NO: 130794 - DNA, 22 bp, Artificial sequence
  SiRNA target sequence
ggcctgatagaagcacatgatt

SEQ ID NO: 130795 - DNA, 22 bp, Artificial sequence
  SiRNA target sequence
gcctgatagaagcacatgattt

SEQ ID NO: 130796 - DNA, 22 bp, Artificial sequence
  SiRNA target sequence
cctgatagaagcacatgatttt

SEQ ID NO: 130797 - DNA, 22 bp, Artificial sequence
  SiRNA target sequence
ctgatagaagcacatgattttg

SEQ ID NO: 130798 - DNA, 22 bp, Artificial sequence
  SiRNA target sequence
tgatagaagcacatgattttgg

SEQ ID NO: 130799 - DNA, 22 bp, Artificial sequence
  SiRNA target sequence
gatagaagcacatgattttggt

SEQ ID NO: 130800 - DNA, 22 bp, Artificial sequence
  SiRNA target sequence
atagaagcacatgattttggtt

SEQ ID NO: 130801 - DNA, 22 bp, Artificial sequence
  SiRNA target sequence
tagaagcacatgattttggttc

SEQ ID NO: 130802 - DNA, 22 bp, Artificial sequence
  SiRNA target sequence
agaagcacatgattttggttcg

SEQ ID NO: 130803 - DNA, 22 bp, Artificial sequence
  SiRNA target sequence
gaagcacatgattttggttcgg

SEQ ID NO: 130804 - DNA, 22 bp, Artificial sequence
  SiRNA target sequence
aagcacatgattttggttcggg

SEQ ID NO: 130805 - DNA, 22 bp, Artificial sequence
  SiRNA target sequence
agcacatgattttggttcgggc

SEQ ID NO: 130806 - DNA, 22 bp, Artificial sequence
  SiRNA target sequence
gcacatgattttggttcgggca

SEQ ID NO: 130807 - DNA, 22 bp, Artificial sequence
  SiRNA target sequence
cacatgattttggttcgggcac

SEQ ID NO: 130808 - DNA, 22 bp, Artificial sequence
  SiRNA target sequence
acatgattttggttcgggcacg

SEQ ID NO: 130809 - DNA, 22 bp, Artificial sequence
  SiRNA target sequence
catgattttggttcgggcacga

SEQ ID NO: 130810 - DNA, 22 bp, Artificial sequence
  SiRNA target sequence
atgattttggttcgggcacgag

SEQ ID NO: 130811 - DNA, 22 bp, Artificial sequence
  SiRNA target sequence
tgattttggttcgggcacgagt

SEQ ID NO: 130812 - DNA, 22 bp, Artificial sequence
  SiRNA target sequence
gattttggttcgggcacgagtt

SEQ ID NO: 130813 - DNA, 22 bp, Artificial sequence
  SiRNA target sequence
attttggttcgggcacgagttc

SEQ ID NO: 130814 - DNA, 22 bp, Artificial sequence
  SiRNA target sequence
ttttggttcgggcacgagttca

SEQ ID NO: 130815 - DNA, 22 bp, Artificial sequence
  SiRNA target sequence
tttggttcgggcacgagttcaa

SEQ ID NO: 130816 - DNA, 22 bp, Artificial sequence
  SiRNA target sequence
ttggttcgggcacgagttcaaa

SEQ ID NO: 130817 - DNA, 22 bp, Artificial sequence
  SiRNA target sequence
tggttcgggcacgagttcaaaa

SEQ ID NO: 130818 - DNA, 22 bp, Artificial sequence
  SiRNA target sequence
ggttcgggcacgagttcaaaat

SEQ ID NO: 130819 - DNA, 22 bp, Artificial sequence
  SiRNA target sequence
gttcgggcacgagttcaaaatc

SEQ ID NO: 130820 - DNA, 22 bp, Artificial sequence
  SiRNA target sequence
ttcgggcacgagttcaaaatct

SEQ ID NO: 130821 - DNA, 22 bp, Artificial sequence
  SiRNA target sequence
tcgggcacgagttcaaaatcta

SEQ ID NO: 130822 - DNA, 22 bp, Artificial sequence
  SiRNA target sequence
cgggcacgagttcaaaatctac

SEQ ID NO: 130823 - DNA, 22 bp, Artificial sequence
  SiRNA target sequence
gggcacgagttcaaaatctaca

SEQ ID NO: 130824 - DNA, 22 bp, Artificial sequence
  SiRNA target sequence
ggcacgagttcaaaatctacaa

SEQ ID NO: 130825 - DNA, 22 bp, Artificial sequence
  SiRNA target sequence
gcacgagttcaaaatctacaaa

SEQ ID NO: 130826 - DNA, 22 bp, Artificial sequence
  SiRNA target sequence
cacgagttcaaaatctacaaaa

SEQ ID NO: 130827 - DNA, 22 bp, Artificial sequence
  SiRNA target sequence
acgagttcaaaatctacaaaac

SEQ ID NO: 130828 - DNA, 22 bp, Artificial sequence
  SiRNA target sequence
cgagttcaaaatctacaaaact

SEQ ID NO: 130829 - DNA, 22 bp, Artificial sequence
  SiRNA target sequence
gagttcaaaatctacaaaactt

SEQ ID NO: 130830 - DNA, 22 bp, Artificial sequence
  SiRNA target sequence
agttcaaaatctacaaaacttt

SEQ ID NO: 130831 - DNA, 22 bp, Artificial sequence
  SiRNA target sequence
gttcaaaatctacaaaactttt

SEQ ID NO: 130832 - DNA, 22 bp, Artificial sequence
  SiRNA target sequence
ttcaaaatctacaaaacttttt

SEQ ID NO: 130833 - DNA, 22 bp, Artificial sequence
  SiRNA target sequence
tcaaaatctacaaaactttttc

SEQ ID NO: 130834 - DNA, 22 bp, Artificial sequence
  SiRNA target sequence
caaaatctacaaaactttttca

SEQ ID NO: 130835 - DNA, 22 bp, Artificial sequence
  SiRNA target sequence
aaaatctacaaaactttttcat

SEQ ID NO: 130836 - DNA, 22 bp, Artificial sequence
  SiRNA target sequence
aaatctacaaaactttttcatg

SEQ ID NO: 130837 - DNA, 22 bp, Artificial sequence
  SiRNA target sequence
aatctacaaaactttttcatgg

SEQ ID NO: 130838 - DNA, 22 bp, Artificial sequence
  SiRNA target sequence
atctacaaaactttttcatggc

SEQ ID NO: 130839 - DNA, 22 bp, Artificial sequence
  SiRNA target sequence
tctacaaaactttttcatggcg

SEQ ID NO: 130840 - DNA, 22 bp, Artificial sequence
  SiRNA target sequence
ctacaaaactttttcatggcgg

SEQ ID NO: 130841 - DNA, 22 bp, Artificial sequence
  SiRNA target sequence
tacaaaactttttcatggcggt

SEQ ID NO: 130842 - DNA, 22 bp, Artificial sequence
  SiRNA target sequence
acaaaactttttcatggcggtg

SEQ ID NO: 130843 - DNA, 22 bp, Artificial sequence
  SiRNA target sequence
caaaactttttcatggcggtgt

SEQ ID NO: 130844 - DNA, 22 bp, Artificial sequence
  SiRNA target sequence
aaaactttttcatggcggtgta

SEQ ID NO: 130845 - DNA, 22 bp, Artificial sequence
  SiRNA target sequence
aaactttttcatggcggtgtac

SEQ ID NO: 130846 - DNA, 22 bp, Artificial sequence
  SiRNA target sequence
aactttttcatggcggtgtacg

SEQ ID NO: 130847 - DNA, 22 bp, Artificial sequence
  SiRNA target sequence
actttttcatggcggtgtacgc

SEQ ID NO: 130848 - DNA, 22 bp, Artificial sequence
  SiRNA target sequence
ctttttcatggcggtgtacgct

SEQ ID NO: 130849 - DNA, 22 bp, Artificial sequence
  SiRNA target sequence
tttttcatggcggtgtacgcta

SEQ ID NO: 130850 - DNA, 22 bp, Artificial sequence
  SiRNA target sequence
ttttcatggcggtgtacgctac

SEQ ID NO: 130851 - DNA, 22 bp, Artificial sequence
  SiRNA target sequence
tttcatggcggtgtacgctacc

SEQ ID NO: 130852 - DNA, 22 bp, Artificial sequence
  SiRNA target sequence
ttcatggcggtgtacgctacct

SEQ ID NO: 130853 - DNA, 22 bp, Artificial sequence
  SiRNA target sequence
tcatggcggtgtacgctacctt

SEQ ID NO: 130854 - DNA, 22 bp, Artificial sequence
  SiRNA target sequence
catggcggtgtacgctaccttg

SEQ ID NO: 130855 - DNA, 22 bp, Artificial sequence
  SiRNA target sequence
atggcggtgtacgctaccttga

SEQ ID NO: 130856 - DNA, 22 bp, Artificial sequence
  SiRNA target sequence
tggcggtgtacgctaccttgaa

SEQ ID NO: 130857 - DNA, 22 bp, Artificial sequence
  SiRNA target sequence
ggcggtgtacgctaccttgaaa

SEQ ID NO: 130858 - DNA, 22 bp, Artificial sequence
  SiRNA target sequence
gcggtgtacgctaccttgaaaa

SEQ ID NO: 130859 - DNA, 22 bp, Artificial sequence
  SiRNA target sequence
cggtgtacgctaccttgaaaaa

SEQ ID NO: 130860 - DNA, 22 bp, Artificial sequence
  SiRNA target sequence
ggtgtacgctaccttgaaaaag

SEQ ID NO: 130861 - DNA, 22 bp, Artificial sequence
  SiRNA target sequence
gtgtacgctaccttgaaaaagc

SEQ ID NO: 130862 - DNA, 22 bp, Artificial sequence
  SiRNA target sequence
tgtacgctaccttgaaaaagct

SEQ ID NO: 130863 - DNA, 22 bp, Artificial sequence
  SiRNA target sequence
gtacgctaccttgaaaaagctg

SEQ ID NO: 130864 - DNA, 22 bp, Artificial sequence
  SiRNA target sequence
tacgctaccttgaaaaagctgt

SEQ ID NO: 130865 - DNA, 22 bp, Artificial sequence
  SiRNA target sequence
acgctaccttgaaaaagctgtt

SEQ ID NO: 130866 - DNA, 22 bp, Artificial sequence
  SiRNA target sequence
cgctaccttgaaaaagctgtta

SEQ ID NO: 130867 - DNA, 22 bp, Artificial sequence
  SiRNA target sequence
gctaccttgaaaaagctgttaa

SEQ ID NO: 130868 - DNA, 22 bp, Artificial sequence
  SiRNA target sequence
ctaccttgaaaaagctgttaat

SEQ ID NO: 130869 - DNA, 22 bp, Artificial sequence
  SiRNA target sequence
taccttgaaaaagctgttaatg

SEQ ID NO: 130870 - DNA, 22 bp, Artificial sequence
  SiRNA target sequence
accttgaaaaagctgttaatga

SEQ ID NO: 130871 - DNA, 22 bp, Artificial sequence
  SiRNA target sequence
ccttgaaaaagctgttaatgat

SEQ ID NO: 130872 - DNA, 22 bp, Artificial sequence
  SiRNA target sequence
cttgaaaaagctgttaatgatt

SEQ ID NO: 130873 - DNA, 22 bp, Artificial sequence
  SiRNA target sequence
ttgaaaaagctgttaatgattt

SEQ ID NO: 130874 - DNA, 22 bp, Artificial sequence
  SiRNA target sequence
tgaaaaagctgttaatgattta

SEQ ID NO: 130875 - DNA, 22 bp, Artificial sequence
  SiRNA target sequence
gaaaaagctgttaatgatttag

SEQ ID NO: 130876 - DNA, 22 bp, Artificial sequence
  SiRNA target sequence
aaaaagctgttaatgatttaga

SEQ ID NO: 130877 - DNA, 22 bp, Artificial sequence
  SiRNA target sequence
aaaagctgttaatgatttagat

SEQ ID NO: 130878 - DNA, 22 bp, Artificial sequence
  SiRNA target sequence
aaagctgttaatgatttagata

SEQ ID NO: 130879 - DNA, 22 bp, Artificial sequence
  SiRNA target sequence
aagctgttaatgatttagatag

SEQ ID NO: 130880 - DNA, 22 bp, Artificial sequence
  SiRNA target sequence
agctgttaatgatttagataga

SEQ ID NO: 130881 - DNA, 22 bp, Artificial sequence
  SiRNA target sequence
gctgttaatgatttagatagat

SEQ ID NO: 130882 - DNA, 22 bp, Artificial sequence
  SiRNA target sequence
ctgttaatgatttagatagatc

SEQ ID NO: 130883 - DNA, 22 bp, Artificial sequence
  SiRNA target sequence
tgttaatgatttagatagatct

SEQ ID NO: 130884 - DNA, 22 bp, Artificial sequence
  SiRNA target sequence
gttaatgatttagatagatctc

SEQ ID NO: 130885 - DNA, 22 bp, Artificial sequence
  SiRNA target sequence
ttaatgatttagatagatctca

SEQ ID NO: 130886 - DNA, 22 bp, Artificial sequence
  SiRNA target sequence
taatgatttagatagatctcag

SEQ ID NO: 130887 - DNA, 22 bp, Artificial sequence
  SiRNA target sequence
aatgatttagatagatctcagt

SEQ ID NO: 130888 - DNA, 22 bp, Artificial sequence
  SiRNA target sequence
atgatttagatagatctcagtt

SEQ ID NO: 130889 - DNA, 22 bp, Artificial sequence
  SiRNA target sequence
tgatttagatagatctcagttt

SEQ ID NO: 130890 - DNA, 22 bp, Artificial sequence
  SiRNA target sequence
gatttagatagatctcagtttg

SEQ ID NO: 130891 - DNA, 22 bp, Artificial sequence
  SiRNA target sequence
atttagatagatctcagtttga

SEQ ID NO: 130892 - DNA, 22 bp, Artificial sequence
  SiRNA target sequence
tttagatagatctcagtttgac

SEQ ID NO: 130893 - DNA, 22 bp, Artificial sequence
  SiRNA target sequence
ttagatagatctcagtttgact

SEQ ID NO: 130894 - DNA, 22 bp, Artificial sequence
  SiRNA target sequence
tagatagatctcagtttgactt

SEQ ID NO: 130895 - DNA, 22 bp, Artificial sequence
  SiRNA target sequence
agatagatctcagtttgacttg

SEQ ID NO: 130896 - DNA, 22 bp, Artificial sequence
  SiRNA target sequence
gatagatctcagtttgacttgg

SEQ ID NO: 130897 - DNA, 22 bp, Artificial sequence
  SiRNA target sequence
atagatctcagtttgacttggt

SEQ ID NO: 130898 - DNA, 22 bp, Artificial sequence
  SiRNA target sequence
tagatctcagtttgacttggta

SEQ ID NO: 130899 - DNA, 22 bp, Artificial sequence
  SiRNA target sequence
agatctcagtttgacttggtat

SEQ ID NO: 130900 - DNA, 22 bp, Artificial sequence
  SiRNA target sequence
gatctcagtttgacttggtatc

SEQ ID NO: 130901 - DNA, 22 bp, Artificial sequence
  SiRNA target sequence
atctcagtttgacttggtatct

SEQ ID NO: 130902 - DNA, 22 bp, Artificial sequence
  SiRNA target sequence
tctcagtttgacttggtatctg

SEQ ID NO: 130903 - DNA, 22 bp, Artificial sequence
  SiRNA target sequence
ctcagtttgacttggtatctga

SEQ ID NO: 130904 - DNA, 22 bp, Artificial sequence
  SiRNA target sequence
tcagtttgacttggtatctgaa

SEQ ID NO: 130905 - DNA, 22 bp, Artificial sequence
  SiRNA target sequence
cagtttgacttggtatctgaag

SEQ ID NO: 130906 - DNA, 22 bp, Artificial sequence
  SiRNA target sequence
agtttgacttggtatctgaagc

SEQ ID NO: 130907 - DNA, 22 bp, Artificial sequence
  SiRNA target sequence
gtttgacttggtatctgaagca

SEQ ID NO: 130908 - DNA, 22 bp, Artificial sequence
  SiRNA target sequence
tttgacttggtatctgaagcat

SEQ ID NO: 130909 - DNA, 22 bp, Artificial sequence
  SiRNA target sequence
ttgacttggtatctgaagcatt

SEQ ID NO: 130910 - DNA, 22 bp, Artificial sequence
  SiRNA target sequence
tgacttggtatctgaagcatta

SEQ ID NO: 130911 - DNA, 22 bp, Artificial sequence
  SiRNA target sequence
gacttggtatctgaagcattaa

SEQ ID NO: 130912 - DNA, 22 bp, Artificial sequence
  SiRNA target sequence
acttggtatctgaagcattaag

SEQ ID NO: 130913 - DNA, 22 bp, Artificial sequence
  SiRNA target sequence
cttggtatctgaagcattaagt

SEQ ID NO: 130914 - DNA, 22 bp, Artificial sequence
  SiRNA target sequence
ttggtatctgaagcattaagtg

SEQ ID NO: 130915 - DNA, 22 bp, Artificial sequence
  SiRNA target sequence
tggtatctgaagcattaagtga

SEQ ID NO: 130916 - DNA, 22 bp, Artificial sequence
  SiRNA target sequence
ggtatctgaagcattaagtgaa

SEQ ID NO: 130917 - DNA, 22 bp, Artificial sequence
  SiRNA target sequence
gtatctgaagcattaagtgaac

SEQ ID NO: 130918 - DNA, 22 bp, Artificial sequence
  SiRNA target sequence
tatctgaagcattaagtgaacg

SEQ ID NO: 130919 - DNA, 22 bp, Artificial sequence
  SiRNA target sequence
atctgaagcattaagtgaacga

SEQ ID NO: 130920 - DNA, 22 bp, Artificial sequence
  SiRNA target sequence
tctgaagcattaagtgaacgaa

SEQ ID NO: 130921 - DNA, 22 bp, Artificial sequence
  SiRNA target sequence
ctgaagcattaagtgaacgaaa

SEQ ID NO: 130922 - DNA, 22 bp, Artificial sequence
  SiRNA target sequence
tgaagcattaagtgaacgaaaa

SEQ ID NO: 130923 - DNA, 22 bp, Artificial sequence
  SiRNA target sequence
gaagcattaagtgaacgaaaaa

SEQ ID NO: 130924 - DNA, 22 bp, Artificial sequence
  SiRNA target sequence
aagcattaagtgaacgaaaaat

SEQ ID NO: 130925 - DNA, 22 bp, Artificial sequence
  SiRNA target sequence
agcattaagtgaacgaaaaatt

SEQ ID NO: 130926 - DNA, 22 bp, Artificial sequence
  SiRNA target sequence
gcattaagtgaacgaaaaattg

SEQ ID NO: 130927 - DNA, 22 bp, Artificial sequence
  SiRNA target sequence
cattaagtgaacgaaaaattgt

SEQ ID NO: 130928 - DNA, 22 bp, Artificial sequence
  SiRNA target sequence
attaagtgaacgaaaaattgtt

SEQ ID NO: 130929 - DNA, 22 bp, Artificial sequence
  SiRNA target sequence
ttaagtgaacgaaaaattgtta

SEQ ID NO: 130930 - DNA, 22 bp, Artificial sequence
  SiRNA target sequence
taagtgaacgaaaaattgttat

SEQ ID NO: 130931 - DNA, 22 bp, Artificial sequence
  SiRNA target sequence
aagtgaacgaaaaattgttatg

SEQ ID NO: 130932 - DNA, 22 bp, Artificial sequence
  SiRNA target sequence
agtgaacgaaaaattgttatga

SEQ ID NO: 130933 - DNA, 22 bp, Artificial sequence
  SiRNA target sequence
gtgaacgaaaaattgttatgaa

SEQ ID NO: 130934 - DNA, 22 bp, Artificial sequence
  SiRNA target sequence
tgaacgaaaaattgttatgaat

SEQ ID NO: 130935 - DNA, 22 bp, Artificial sequence
  SiRNA target sequence
gaacgaaaaattgttatgaata

SEQ ID NO: 130936 - DNA, 22 bp, Artificial sequence
  SiRNA target sequence
aacgaaaaattgttatgaatat

SEQ ID NO: 130937 - DNA, 22 bp, Artificial sequence
  SiRNA target sequence
acgaaaaattgttatgaatatg

SEQ ID NO: 130938 - DNA, 22 bp, Artificial sequence
  SiRNA target sequence
cgaaaaattgttatgaatatgt

SEQ ID NO: 130939 - DNA, 22 bp, Artificial sequence
  SiRNA target sequence
gaaaaattgttatgaatatgtg

SEQ ID NO: 130940 - DNA, 22 bp, Artificial sequence
  SiRNA target sequence
aaaaattgttatgaatatgtgt

SEQ ID NO: 130941 - DNA, 22 bp, Artificial sequence
  SiRNA target sequence
aaaattgttatgaatatgtgtc

SEQ ID NO: 130942 - DNA, 22 bp, Artificial sequence
  SiRNA target sequence
aaattgttatgaatatgtgtcc

SEQ ID NO: 130943 - DNA, 22 bp, Artificial sequence
  SiRNA target sequence
aattgttatgaatatgtgtcct

SEQ ID NO: 130944 - DNA, 22 bp, Artificial sequence
  SiRNA target sequence
attgttatgaatatgtgtcctt

SEQ ID NO: 130945 - DNA, 22 bp, Artificial sequence
  SiRNA target sequence
ttgttatgaatatgtgtccttt

SEQ ID NO: 130946 - DNA, 22 bp, Artificial sequence
  SiRNA target sequence
tgttatgaatatgtgtcctttt

SEQ ID NO: 130947 - DNA, 22 bp, Artificial sequence
  SiRNA target sequence
gttatgaatatgtgtccttttc

SEQ ID NO: 130948 - DNA, 22 bp, Artificial sequence
  SiRNA target sequence
ttatgaatatgtgtccttttct

SEQ ID NO: 130949 - DNA, 22 bp, Artificial sequence
  SiRNA target sequence
tatgaatatgtgtccttttcta

SEQ ID NO: 130950 - DNA, 22 bp, Artificial sequence
  SiRNA target sequence
atgaatatgtgtccttttctag

SEQ ID NO: 130951 - DNA, 22 bp, Artificial sequence
  SiRNA target sequence
tgaatatgtgtccttttctagt

SEQ ID NO: 130952 - DNA, 22 bp, Artificial sequence
  SiRNA target sequence
gaatatgtgtccttttctagta

SEQ ID NO: 130953 - DNA, 22 bp, Artificial sequence
  SiRNA target sequence
aatatgtgtccttttctagtaa

SEQ ID NO: 130954 - DNA, 22 bp, Artificial sequence
  SiRNA target sequence
atatgtgtccttttctagtaag

SEQ ID NO: 130955 - DNA, 22 bp, Artificial sequence
  SiRNA target sequence
tatgtgtccttttctagtaagg

SEQ ID NO: 130956 - DNA, 22 bp, Artificial sequence
  SiRNA target sequence
atgtgtccttttctagtaaggt

SEQ ID NO: 130957 - DNA, 22 bp, Artificial sequence
  SiRNA target sequence
tgtgtccttttctagtaaggtc

SEQ ID NO: 130958 - DNA, 22 bp, Artificial sequence
  SiRNA target sequence
gtgtccttttctagtaaggtcg

SEQ ID NO: 130959 - DNA, 22 bp, Artificial sequence
  SiRNA target sequence
tgtccttttctagtaaggtcga

SEQ ID NO: 130960 - DNA, 22 bp, Artificial sequence
  SiRNA target sequence
gtccttttctagtaaggtcgat

SEQ ID NO: 130961 - DNA, 22 bp, Artificial sequence
  SiRNA target sequence
tccttttctagtaaggtcgatg

SEQ ID NO: 130962 - DNA, 22 bp, Artificial sequence
  SiRNA target sequence
ccttttctagtaaggtcgatgg

SEQ ID NO: 130963 - DNA, 22 bp, Artificial sequence
  SiRNA target sequence
cttttctagtaaggtcgatgga

SEQ ID NO: 130964 - DNA, 22 bp, Artificial sequence
  SiRNA target sequence
ttttctagtaaggtcgatggaa

SEQ ID NO: 130965 - DNA, 22 bp, Artificial sequence
  SiRNA target sequence
tttctagtaaggtcgatggaaa

SEQ ID NO: 130966 - DNA, 22 bp, Artificial sequence
  SiRNA target sequence
ttctagtaaggtcgatggaaat

SEQ ID NO: 130967 - DNA, 22 bp, Artificial sequence
  SiRNA target sequence
tctagtaaggtcgatggaaata

SEQ ID NO: 130968 - DNA, 22 bp, Artificial sequence
  SiRNA target sequence
ctagtaaggtcgatggaaatat

SEQ ID NO: 130969 - DNA, 22 bp, Artificial sequence
  SiRNA target sequence
tagtaaggtcgatggaaatatt

SEQ ID NO: 130970 - DNA, 22 bp, Artificial sequence
  SiRNA target sequence
agtaaggtcgatggaaatatta

SEQ ID NO: 130971 - DNA, 22 bp, Artificial sequence
  SiRNA target sequence
gtaaggtcgatggaaatattat

SEQ ID NO: 130972 - DNA, 22 bp, Artificial sequence
  SiRNA target sequence
taaggtcgatggaaatattatt

SEQ ID NO: 130973 - DNA, 22 bp, Artificial sequence
  SiRNA target sequence
aaggtcgatggaaatattattt

SEQ ID NO: 130974 - DNA, 22 bp, Artificial sequence
  SiRNA target sequence
aggtcgatggaaatattatttc

SEQ ID NO: 130975 - DNA, 22 bp, Artificial sequence
  SiRNA target sequence
ggtcgatggaaatattatttcc

SEQ ID NO: 130976 - DNA, 22 bp, Artificial sequence
  SiRNA target sequence
gtcgatggaaatattatttccg

SEQ ID NO: 130977 - DNA, 22 bp, Artificial sequence
  SiRNA target sequence
tcgatggaaatattatttccgg

SEQ ID NO: 130978 - DNA, 22 bp, Artificial sequence
  SiRNA target sequence
cgatggaaatattatttccggt

SEQ ID NO: 130979 - DNA, 22 bp, Artificial sequence
  SiRNA target sequence
gatggaaatattatttccggtt

SEQ ID NO: 130980 - DNA, 22 bp, Artificial sequence
  SiRNA target sequence
atggaaatattatttccggttt

SEQ ID NO: 130981 - DNA, 22 bp, Artificial sequence
  SiRNA target sequence
tggaaatattatttccggttta

SEQ ID NO: 130982 - DNA, 22 bp, Artificial sequence
  SiRNA target sequence
ggaaatattatttccggtttat

SEQ ID NO: 130983 - DNA, 22 bp, Artificial sequence
  SiRNA target sequence
gaaatattatttccggtttata

SEQ ID NO: 130984 - DNA, 22 bp, Artificial sequence
  SiRNA target sequence
aaatattatttccggtttataa

SEQ ID NO: 130985 - DNA, 22 bp, Artificial sequence
  SiRNA target sequence
aatattatttccggtttataaa

SEQ ID NO: 130986 - DNA, 22 bp, Artificial sequence
  SiRNA target sequence
atattatttccggtttataaaa

SEQ ID NO: 130987 - DNA, 22 bp, Artificial sequence
  SiRNA target sequence
tattatttccggtttataaaag

SEQ ID NO: 130988 - DNA, 22 bp, Artificial sequence
  SiRNA target sequence
attatttccggtttataaaagg

SEQ ID NO: 130989 - DNA, 22 bp, Artificial sequence
  SiRNA target sequence
ttatttccggtttataaaaggc

SEQ ID NO: 130990 - DNA, 22 bp, Artificial sequence
  SiRNA target sequence
tatttccggtttataaaaggct

SEQ ID NO: 130991 - DNA, 22 bp, Artificial sequence
  SiRNA target sequence
atttccggtttataaaaggctt

SEQ ID NO: 130992 - DNA, 22 bp, Artificial sequence
  SiRNA target sequence
tttccggtttataaaaggcttt

SEQ ID NO: 130993 - DNA, 22 bp, Artificial sequence
  SiRNA target sequence
ttccggtttataaaaggctttt

SEQ ID NO: 130994 - DNA, 22 bp, Artificial sequence
  SiRNA target sequence
tccggtttataaaaggctttta

SEQ ID NO: 130995 - DNA, 22 bp, Artificial sequence
  SiRNA target sequence
ccggtttataaaaggcttttaa

SEQ ID NO: 130996 - DNA, 22 bp, Artificial sequence
  SiRNA target sequence
cggtttataaaaggcttttaat

SEQ ID NO: 130997 - DNA, 22 bp, Artificial sequence
  SiRNA target sequence
ggtttataaaaggcttttaatt

SEQ ID NO: 130998 - DNA, 22 bp, Artificial sequence
  SiRNA target sequence
gtttataaaaggcttttaattc

SEQ ID NO: 130999 - DNA, 22 bp, Artificial sequence
  SiRNA target sequence
tttataaaaggcttttaattcc

SEQ ID NO: 131000 - DNA, 22 bp, Artificial sequence
  SiRNA target sequence
ttataaaaggcttttaattcct

SEQ ID NO: 131001 - DNA, 22 bp, Artificial sequence
  SiRNA target sequence
tataaaaggcttttaattcctt

SEQ ID NO: 131002 - DNA, 22 bp, Artificial sequence
  SiRNA target sequence
ataaaaggcttttaattcctta

SEQ ID NO: 131003 - DNA, 22 bp, Artificial sequence
  SiRNA target sequence
taaaaggcttttaattccttac

SEQ ID NO: 131004 - DNA, 22 bp, Artificial sequence
  SiRNA target sequence
aaaaggcttttaattccttact

SEQ ID NO: 131005 - DNA, 22 bp, Artificial sequence
  SiRNA target sequence
aaaggcttttaattccttacta

SEQ ID NO: 131006 - DNA, 22 bp, Artificial sequence
  SiRNA target sequence
aaggcttttaattccttactac

SEQ ID NO: 131007 - DNA, 22 bp, Artificial sequence
  SiRNA target sequence
aggcttttaattccttactact

SEQ ID NO: 131008 - DNA, 22 bp, Artificial sequence
  SiRNA target sequence
ggcttttaattccttactacta

SEQ ID NO: 131009 - DNA, 22 bp, Artificial sequence
  SiRNA target sequence
gcttttaattccttactactat

SEQ ID NO: 131010 - DNA, 22 bp, Artificial sequence
  SiRNA target sequence
cttttaattccttactactata

SEQ ID NO: 131011 - DNA, 22 bp, Artificial sequence
  SiRNA target sequence
ttttaattccttactactatat

SEQ ID NO: 131012 - DNA, 22 bp, Artificial sequence
  SiRNA target sequence
tttaattccttactactatatt

SEQ ID NO: 131013 - DNA, 22 bp, Artificial sequence
  SiRNA target sequence
ttaattccttactactatattg

SEQ ID NO: 131014 - DNA, 22 bp, Artificial sequence
  SiRNA target sequence
taattccttactactatattgg

SEQ ID NO: 131015 - DNA, 22 bp, Artificial sequence
  SiRNA target sequence
aattccttactactatattggc

SEQ ID NO: 131016 - DNA, 22 bp, Artificial sequence
  SiRNA target sequence
attccttactactatattggcc

SEQ ID NO: 131017 - DNA, 22 bp, Artificial sequence
  SiRNA target sequence
ttccttactactatattggcct

SEQ ID NO: 131018 - DNA, 22 bp, Artificial sequence
  SiRNA target sequence
tccttactactatattggcctt

SEQ ID NO: 131019 - DNA, 22 bp, Artificial sequence
  SiRNA target sequence
ccttactactatattggcctta

SEQ ID NO: 131020 - DNA, 22 bp, Artificial sequence
  SiRNA target sequence
cttactactatattggccttaa

SEQ ID NO: 131021 - DNA, 22 bp, Artificial sequence
  SiRNA target sequence
ttactactatattggccttaaa

SEQ ID NO: 131022 - DNA, 22 bp, Artificial sequence
  SiRNA target sequence
tactactatattggccttaaat

SEQ ID NO: 131023 - DNA, 22 bp, Artificial sequence
  SiRNA target sequence
actactatattggccttaaatt

SEQ ID NO: 131024 - DNA, 22 bp, Artificial sequence
  SiRNA target sequence
ctactatattggccttaaattt

SEQ ID NO: 131025 - DNA, 22 bp, Artificial sequence
  SiRNA target sequence
tactatattggccttaaatttt

SEQ ID NO: 131026 - DNA, 22 bp, Artificial sequence
  SiRNA target sequence
actatattggccttaaatttta

SEQ ID NO: 131027 - DNA, 22 bp, Artificial sequence
  SiRNA target sequence
ctatattggccttaaattttat

SEQ ID NO: 131028 - DNA, 22 bp, Artificial sequence
  SiRNA target sequence
tatattggccttaaattttatg

SEQ ID NO: 131029 - DNA, 22 bp, Artificial sequence
  SiRNA target sequence
atattggccttaaattttatga

SEQ ID NO: 131030 - DNA, 22 bp, Artificial sequence
  SiRNA target sequence
tattggccttaaattttatgat

SEQ ID NO: 131031 - DNA, 22 bp, Artificial sequence
  SiRNA target sequence
attggccttaaattttatgatt

SEQ ID NO: 131032 - DNA, 22 bp, Artificial sequence
  SiRNA target sequence
ttggccttaaattttatgattg

SEQ ID NO: 131033 - DNA, 22 bp, Artificial sequence
  SiRNA target sequence
tggccttaaattttatgattgg

SEQ ID NO: 131034 - DNA, 22 bp, Artificial sequence
  SiRNA target sequence
ggccttaaattttatgattgga

SEQ ID NO: 131035 - DNA, 22 bp, Artificial sequence
  SiRNA target sequence
gccttaaattttatgattggat

SEQ ID NO: 131036 - DNA, 22 bp, Artificial sequence
  SiRNA target sequence
ccttaaattttatgattggatt

SEQ ID NO: 131037 - DNA, 22 bp, Artificial sequence
  SiRNA target sequence
cttaaattttatgattggattt

SEQ ID NO: 131038 - DNA, 22 bp, Artificial sequence
  SiRNA target sequence
ttaaattttatgattggatttc

SEQ ID NO: 131039 - DNA, 22 bp, Artificial sequence
  SiRNA target sequence
taaattttatgattggatttct

SEQ ID NO: 131040 - DNA, 22 bp, Artificial sequence
  SiRNA target sequence
aaattttatgattggatttctg

SEQ ID NO: 131041 - DNA, 22 bp, Artificial sequence
  SiRNA target sequence
aattttatgattggatttctgg

SEQ ID NO: 131042 - DNA, 22 bp, Artificial sequence
  SiRNA target sequence
attttatgattggatttctggg

SEQ ID NO: 131043 - DNA, 22 bp, Artificial sequence
  SiRNA target sequence
ttttatgattggatttctgggc

SEQ ID NO: 131044 - DNA, 22 bp, Artificial sequence
  SiRNA target sequence
tttatgattggatttctgggca

SEQ ID NO: 131045 - DNA, 22 bp, Artificial sequence
  SiRNA target sequence
ttatgattggatttctgggcaa

SEQ ID NO: 131046 - DNA, 22 bp, Artificial sequence
  SiRNA target sequence
tatgattggatttctgggcaac

SEQ ID NO: 131047 - DNA, 22 bp, Artificial sequence
  SiRNA target sequence
atgattggatttctgggcaacg

SEQ ID NO: 131048 - DNA, 22 bp, Artificial sequence
  SiRNA target sequence
tgattggatttctgggcaacgg

SEQ ID NO: 131049 - DNA, 22 bp, Artificial sequence
  SiRNA target sequence
gattggatttctgggcaacggt

SEQ ID NO: 131050 - DNA, 22 bp, Artificial sequence
  SiRNA target sequence
attggatttctgggcaacggtc

SEQ ID NO: 131051 - DNA, 22 bp, Artificial sequence
  SiRNA target sequence
ttggatttctgggcaacggtcc

SEQ ID NO: 131052 - DNA, 22 bp, Artificial sequence
  SiRNA target sequence
tggatttctgggcaacggtccc

SEQ ID NO: 131053 - DNA, 22 bp, Artificial sequence
  SiRNA target sequence
ggatttctgggcaacggtccct

SEQ ID NO: 131054 - DNA, 22 bp, Artificial sequence
  SiRNA target sequence
gatttctgggcaacggtccctt

SEQ ID NO: 131055 - DNA, 22 bp, Artificial sequence
  SiRNA target sequence
atttctgggcaacggtcccttg

SEQ ID NO: 131056 - DNA, 22 bp, Artificial sequence
  SiRNA target sequence
tttctgggcaacggtcccttgg

SEQ ID NO: 131057 - DNA, 22 bp, Artificial sequence
  SiRNA target sequence
ttctgggcaacggtcccttggg

SEQ ID NO: 131058 - DNA, 22 bp, Artificial sequence
  SiRNA target sequence
tctgggcaacggtcccttgggc

SEQ ID NO: 131059 - DNA, 22 bp, Artificial sequence
  SiRNA target sequence
ctgggcaacggtcccttgggcg

SEQ ID NO: 131060 - DNA, 22 bp, Artificial sequence
  SiRNA target sequence
tgggcaacggtcccttgggcga

SEQ ID NO: 131061 - DNA, 22 bp, Artificial sequence
  SiRNA target sequence
gggcaacggtcccttgggcgaa

SEQ ID NO: 131062 - DNA, 22 bp, Artificial sequence
  SiRNA target sequence
ggcaacggtcccttgggcgaag

SEQ ID NO: 131063 - DNA, 22 bp, Artificial sequence
  SiRNA target sequence
gcaacggtcccttgggcgaagt

SEQ ID NO: 131064 - DNA, 22 bp, Artificial sequence
  SiRNA target sequence
caacggtcccttgggcgaagta

SEQ ID NO: 131065 - DNA, 22 bp, Artificial sequence
  SiRNA target sequence
aacggtcccttgggcgaagtaa

SEQ ID NO: 131066 - DNA, 22 bp, Artificial sequence
  SiRNA target sequence
acggtcccttgggcgaagtaaa

SEQ ID NO: 131067 - DNA, 22 bp, Artificial sequence
  SiRNA target sequence
cggtcccttgggcgaagtaaat

SEQ ID NO: 131068 - DNA, 22 bp, Artificial sequence
  SiRNA target sequence
ggtcccttgggcgaagtaaatt

SEQ ID NO: 131069 - DNA, 22 bp, Artificial sequence
  SiRNA target sequence
gtcccttgggcgaagtaaattt

SEQ ID NO: 131070 - DNA, 22 bp, Artificial sequence
  SiRNA target sequence
tcccttgggcgaagtaaatttt

SEQ ID NO: 131071 - DNA, 22 bp, Artificial sequence
  SiRNA target sequence
cccttgggcgaagtaaattttt

SEQ ID NO: 131072 - DNA, 22 bp, Artificial sequence
  SiRNA target sequence
ccttgggcgaagtaaatttttg

SEQ ID NO: 131073 - DNA, 22 bp, Artificial sequence
  SiRNA target sequence
cttgggcgaagtaaatttttgt

SEQ ID NO: 131074 - DNA, 22 bp, Artificial sequence
  SiRNA target sequence
ttgggcgaagtaaatttttgtc

SEQ ID NO: 131075 - DNA, 22 bp, Artificial sequence
  SiRNA target sequence
tgggcgaagtaaatttttgtcg

SEQ ID NO: 131076 - DNA, 22 bp, Artificial sequence
  SiRNA target sequence
gggcgaagtaaatttttgtcgc

SEQ ID NO: 131077 - DNA, 22 bp, Artificial sequence
  SiRNA target sequence
ggcgaagtaaatttttgtcgcg

SEQ ID NO: 131078 - DNA, 22 bp, Artificial sequence
  SiRNA target sequence
gcgaagtaaatttttgtcgcgg

SEQ ID NO: 131079 - DNA, 22 bp, Artificial sequence
  SiRNA target sequence
cgaagtaaatttttgtcgcggc

SEQ ID NO: 131080 - DNA, 22 bp, Artificial sequence
  SiRNA target sequence
gaagtaaatttttgtcgcggca

SEQ ID NO: 131081 - DNA, 22 bp, Artificial sequence
  SiRNA target sequence
aagtaaatttttgtcgcggcaa

SEQ ID NO: 131082 - DNA, 22 bp, Artificial sequence
  SiRNA target sequence
agtaaatttttgtcgcggcaac

SEQ ID NO: 131083 - DNA, 22 bp, Artificial sequence
  SiRNA target sequence
gtaaatttttgtcgcggcaaca

SEQ ID NO: 131084 - DNA, 22 bp, Artificial sequence
  SiRNA target sequence
taaatttttgtcgcggcaacaa

SEQ ID NO: 131085 - DNA, 22 bp, Artificial sequence
  SiRNA target sequence
aaatttttgtcgcggcaacaaa

SEQ ID NO: 131086 - DNA, 22 bp, Artificial sequence
  SiRNA target sequence
aatttttgtcgcggcaacaaac

SEQ ID NO: 131087 - DNA, 22 bp, Artificial sequence
  SiRNA target sequence
atttttgtcgcggcaacaaact

SEQ ID NO: 131088 - DNA, 22 bp, Artificial sequence
  SiRNA target sequence
tttttgtcgcggcaacaaacta

SEQ ID NO: 131089 - DNA, 22 bp, Artificial sequence
  SiRNA target sequence
ttttgtcgcggcaacaaactat

SEQ ID NO: 131090 - DNA, 22 bp, Artificial sequence
  SiRNA target sequence
tttgtcgcggcaacaaactatt

SEQ ID NO: 131091 - DNA, 22 bp, Artificial sequence
  SiRNA target sequence
ttgtcgcggcaacaaactatta

SEQ ID NO: 131092 - DNA, 22 bp, Artificial sequence
  SiRNA target sequence
tgtcgcggcaacaaactattac

SEQ ID NO: 131093 - DNA, 22 bp, Artificial sequence
  SiRNA target sequence
gtcgcggcaacaaactattaca

SEQ ID NO: 131094 - DNA, 22 bp, Artificial sequence
  SiRNA target sequence
tcgcggcaacaaactattacaa

SEQ ID NO: 131095 - DNA, 22 bp, Artificial sequence
  SiRNA target sequence
cgcggcaacaaactattacaaa

SEQ ID NO: 131096 - DNA, 22 bp, Artificial sequence
  SiRNA target sequence
gcggcaacaaactattacaaaa

SEQ ID NO: 131097 - DNA, 22 bp, Artificial sequence
  SiRNA target sequence
cggcaacaaactattacaaaat

SEQ ID NO: 131098 - DNA, 22 bp, Artificial sequence
  SiRNA target sequence
ggcaacaaactattacaaaatt

SEQ ID NO: 131099 - DNA, 22 bp, Artificial sequence
  SiRNA target sequence
gcaacaaactattacaaaattt

SEQ ID NO: 131100 - DNA, 22 bp, Artificial sequence
  SiRNA target sequence
caacaaactattacaaaatttc

SEQ ID NO: 131101 - DNA, 22 bp, Artificial sequence
  SiRNA target sequence
aacaaactattacaaaatttcc

SEQ ID NO: 131102 - DNA, 22 bp, Artificial sequence
  SiRNA target sequence
acaaactattacaaaatttcct

SEQ ID NO: 131103 - DNA, 22 bp, Artificial sequence
  SiRNA target sequence
caaactattacaaaatttccta

SEQ ID NO: 131104 - DNA, 22 bp, Artificial sequence
  SiRNA target sequence
aaactattacaaaatttcctaa

SEQ ID NO: 131105 - DNA, 22 bp, Artificial sequence
  SiRNA target sequence
aactattacaaaatttcctaat

SEQ ID NO: 131106 - DNA, 22 bp, Artificial sequence
  SiRNA target sequence
actattacaaaatttcctaatg

SEQ ID NO: 131107 - DNA, 22 bp, Artificial sequence
  SiRNA target sequence
ctattacaaaatttcctaatgt

SEQ ID NO: 131108 - DNA, 22 bp, Artificial sequence
  SiRNA target sequence
tattacaaaatttcctaatgtg

SEQ ID NO: 131109 - DNA, 22 bp, Artificial sequence
  SiRNA target sequence
attacaaaatttcctaatgtga

SEQ ID NO: 131110 - DNA, 22 bp, Artificial sequence
  SiRNA target sequence
ttacaaaatttcctaatgtgag

SEQ ID NO: 131111 - DNA, 22 bp, Artificial sequence
  SiRNA target sequence
tacaaaatttcctaatgtgaga

SEQ ID NO: 131112 - DNA, 22 bp, Artificial sequence
  SiRNA target sequence
acaaaatttcctaatgtgagaa

SEQ ID NO: 131113 - DNA, 22 bp, Artificial sequence
  SiRNA target sequence
caaaatttcctaatgtgagaaa

SEQ ID NO: 131114 - DNA, 22 bp, Artificial sequence
  SiRNA target sequence
aaaatttcctaatgtgagaaaa

SEQ ID NO: 131115 - DNA, 22 bp, Artificial sequence
  SiRNA target sequence
aaatttcctaatgtgagaaaaa

SEQ ID NO: 131116 - DNA, 22 bp, Artificial sequence
  SiRNA target sequence
aatttcctaatgtgagaaaaat

SEQ ID NO: 131117 - DNA, 22 bp, Artificial sequence
  SiRNA target sequence
atttcctaatgtgagaaaaatc

SEQ ID NO: 131118 - DNA, 22 bp, Artificial sequence
  SiRNA target sequence
tttcctaatgtgagaaaaatcg

SEQ ID NO: 131119 - DNA, 22 bp, Artificial sequence
  SiRNA target sequence
ttcctaatgtgagaaaaatcga

SEQ ID NO: 131120 - DNA, 22 bp, Artificial sequence
  SiRNA target sequence
tcctaatgtgagaaaaatcgac

SEQ ID NO: 131121 - DNA, 22 bp, Artificial sequence
  SiRNA target sequence
cctaatgtgagaaaaatcgacc

SEQ ID NO: 131122 - DNA, 22 bp, Artificial sequence
  SiRNA target sequence
ctaatgtgagaaaaatcgacct

SEQ ID NO: 131123 - DNA, 22 bp, Artificial sequence
  SiRNA target sequence
taatgtgagaaaaatcgacctt

SEQ ID NO: 131124 - DNA, 22 bp, Artificial sequence
  SiRNA target sequence
aatgtgagaaaaatcgaccttg

SEQ ID NO: 131125 - DNA, 22 bp, Artificial sequence
  SiRNA target sequence
atgtgagaaaaatcgaccttgt

SEQ ID NO: 131126 - DNA, 22 bp, Artificial sequence
  SiRNA target sequence
tgtgagaaaaatcgaccttgta

SEQ ID NO: 131127 - DNA, 22 bp, Artificial sequence
  SiRNA target sequence
gtgagaaaaatcgaccttgtag

SEQ ID NO: 131128 - DNA, 22 bp, Artificial sequence
  SiRNA target sequence
tgagaaaaatcgaccttgtagg

SEQ ID NO: 131129 - DNA, 22 bp, Artificial sequence
  SiRNA target sequence
gagaaaaatcgaccttgtagga

SEQ ID NO: 131130 - DNA, 22 bp, Artificial sequence
  SiRNA target sequence
agaaaaatcgaccttgtaggat

SEQ ID NO: 131131 - DNA, 22 bp, Artificial sequence
  SiRNA target sequence
gaaaaatcgaccttgtaggatc

SEQ ID NO: 131132 - DNA, 22 bp, Artificial sequence
  SiRNA target sequence
aaaaatcgaccttgtaggatcc

SEQ ID NO: 131133 - DNA, 22 bp, Artificial sequence
  SiRNA target sequence
aaaatcgaccttgtaggatccg

SEQ ID NO: 131134 - DNA, 22 bp, Artificial sequence
  SiRNA target sequence
aaatcgaccttgtaggatccgt

SEQ ID NO: 131135 - DNA, 22 bp, Artificial sequence
  SiRNA target sequence
aatcgaccttgtaggatccgtt

SEQ ID NO: 131136 - DNA, 22 bp, Artificial sequence
  SiRNA target sequence
atcgaccttgtaggatccgttt

SEQ ID NO: 131137 - DNA, 22 bp, Artificial sequence
  SiRNA target sequence
tcgaccttgtaggatccgtttc

SEQ ID NO: 131138 - DNA, 22 bp, Artificial sequence
  SiRNA target sequence
cgaccttgtaggatccgtttcg

SEQ ID NO: 131139 - DNA, 22 bp, Artificial sequence
  SiRNA target sequence
gaccttgtaggatccgtttcgt

SEQ ID NO: 131140 - DNA, 22 bp, Artificial sequence
  SiRNA target sequence
accttgtaggatccgtttcgta

SEQ ID NO: 131141 - DNA, 22 bp, Artificial sequence
  SiRNA target sequence
ccttgtaggatccgtttcgtat

SEQ ID NO: 131142 - DNA, 22 bp, Artificial sequence
  SiRNA target sequence
cttgtaggatccgtttcgtatc

SEQ ID NO: 131143 - DNA, 22 bp, Artificial sequence
  SiRNA target sequence
ttgtaggatccgtttcgtatcg

SEQ ID NO: 131144 - DNA, 22 bp, Artificial sequence
  SiRNA target sequence
tgtaggatccgtttcgtatcgt

SEQ ID NO: 131145 - DNA, 22 bp, Artificial sequence
  SiRNA target sequence
gtaggatccgtttcgtatcgtg

SEQ ID NO: 131146 - DNA, 22 bp, Artificial sequence
  SiRNA target sequence
taggatccgtttcgtatcgtga

SEQ ID NO: 131147 - DNA, 22 bp, Artificial sequence
  SiRNA target sequence
aggatccgtttcgtatcgtgat

SEQ ID NO: 131148 - DNA, 22 bp, Artificial sequence
  SiRNA target sequence
ggatccgtttcgtatcgtgatg

SEQ ID NO: 131149 - DNA, 22 bp, Artificial sequence
  SiRNA target sequence
gatccgtttcgtatcgtgatgg

SEQ ID NO: 131150 - DNA, 22 bp, Artificial sequence
  SiRNA target sequence
atccgtttcgtatcgtgatggc

SEQ ID NO: 131151 - DNA, 22 bp, Artificial sequence
  SiRNA target sequence
tccgtttcgtatcgtgatggcc

SEQ ID NO: 131152 - DNA, 22 bp, Artificial sequence
  SiRNA target sequence
ccgtttcgtatcgtgatggcca

SEQ ID NO: 131153 - DNA, 22 bp, Artificial sequence
  SiRNA target sequence
cgtttcgtatcgtgatggccaa

SEQ ID NO: 131154 - DNA, 22 bp, Artificial sequence
  SiRNA target sequence
gtttcgtatcgtgatggccaat

SEQ ID NO: 131155 - DNA, 22 bp, Artificial sequence
  SiRNA target sequence
tttcgtatcgtgatggccaatt

SEQ ID NO: 131156 - DNA, 22 bp, Artificial sequence
  SiRNA target sequence
ttcgtatcgtgatggccaattt

SEQ ID NO: 131157 - DNA, 22 bp, Artificial sequence
  SiRNA target sequence
tcgtatcgtgatggccaatttt

SEQ ID NO: 131158 - DNA, 22 bp, Artificial sequence
  SiRNA target sequence
cgtatcgtgatggccaatttta

SEQ ID NO: 131159 - DNA, 22 bp, Artificial sequence
  SiRNA target sequence
gtatcgtgatggccaattttat

SEQ ID NO: 131160 - DNA, 22 bp, Artificial sequence
  SiRNA target sequence
tatcgtgatggccaattttatg

SEQ ID NO: 131161 - DNA, 22 bp, Artificial sequence
  SiRNA target sequence
atcgtgatggccaattttatga

SEQ ID NO: 131162 - DNA, 22 bp, Artificial sequence
  SiRNA target sequence
tcgtgatggccaattttatgat

SEQ ID NO: 131163 - DNA, 22 bp, Artificial sequence
  SiRNA target sequence
cgtgatggccaattttatgatg

SEQ ID NO: 131164 - DNA, 22 bp, Artificial sequence
  SiRNA target sequence
gtgatggccaattttatgatgc

SEQ ID NO: 131165 - DNA, 22 bp, Artificial sequence
  SiRNA target sequence
tgatggccaattttatgatgct

SEQ ID NO: 131166 - DNA, 22 bp, Artificial sequence
  SiRNA target sequence
gatggccaattttatgatgcta

SEQ ID NO: 131167 - DNA, 22 bp, Artificial sequence
  SiRNA target sequence
atggccaattttatgatgctaa

SEQ ID NO: 131168 - DNA, 22 bp, Artificial sequence
  SiRNA target sequence
tggccaattttatgatgctaaa

SEQ ID NO: 131169 - DNA, 22 bp, Artificial sequence
  SiRNA target sequence
ggccaattttatgatgctaaat

SEQ ID NO: 131170 - DNA, 22 bp, Artificial sequence
  SiRNA target sequence
gccaattttatgatgctaaata

SEQ ID NO: 131171 - DNA, 22 bp, Artificial sequence
  SiRNA target sequence
ccaattttatgatgctaaatac

SEQ ID NO: 131172 - DNA, 22 bp, Artificial sequence
  SiRNA target sequence
caattttatgatgctaaataca

SEQ ID NO: 131173 - DNA, 22 bp, Artificial sequence
  SiRNA target sequence
aattttatgatgctaaatacaa

SEQ ID NO: 131174 - DNA, 22 bp, Artificial sequence
  SiRNA target sequence
attttatgatgctaaatacaat

SEQ ID NO: 131175 - DNA, 22 bp, Artificial sequence
  SiRNA target sequence
ttttatgatgctaaatacaatg

SEQ ID NO: 131176 - DNA, 22 bp, Artificial sequence
  SiRNA target sequence
tttatgatgctaaatacaatgt

SEQ ID NO: 131177 - DNA, 22 bp, Artificial sequence
  SiRNA target sequence
ttatgatgctaaatacaatgtt

SEQ ID NO: 131178 - DNA, 22 bp, Artificial sequence
  SiRNA target sequence
tatgatgctaaatacaatgttc

SEQ ID NO: 131179 - DNA, 22 bp, Artificial sequence
  SiRNA target sequence
atgatgctaaatacaatgttct

SEQ ID NO: 131180 - DNA, 22 bp, Artificial sequence
  SiRNA target sequence
tgatgctaaatacaatgttcta

SEQ ID NO: 131181 - DNA, 22 bp, Artificial sequence
  SiRNA target sequence
gatgctaaatacaatgttctat

SEQ ID NO: 131182 - DNA, 22 bp, Artificial sequence
  SiRNA target sequence
atgctaaatacaatgttctatt

SEQ ID NO: 131183 - DNA, 22 bp, Artificial sequence
  SiRNA target sequence
tgctaaatacaatgttctattg

SEQ ID NO: 131184 - DNA, 22 bp, Artificial sequence
  SiRNA target sequence
gctaaatacaatgttctattgg

SEQ ID NO: 131185 - DNA, 22 bp, Artificial sequence
  SiRNA target sequence
ctaaatacaatgttctattggg

SEQ ID NO: 131186 - DNA, 22 bp, Artificial sequence
  SiRNA target sequence
taaatacaatgttctattgggt

SEQ ID NO: 131187 - DNA, 22 bp, Artificial sequence
  SiRNA target sequence
aaatacaatgttctattgggtg

SEQ ID NO: 131188 - DNA, 22 bp, Artificial sequence
  SiRNA target sequence
aatacaatgttctattgggtgt

SEQ ID NO: 131189 - DNA, 22 bp, Artificial sequence
  SiRNA target sequence
atacaatgttctattgggtgtc

SEQ ID NO: 131190 - DNA, 22 bp, Artificial sequence
  SiRNA target sequence
tacaatgttctattgggtgtca

SEQ ID NO: 131191 - DNA, 22 bp, Artificial sequence
  SiRNA target sequence
acaatgttctattgggtgtcac

SEQ ID NO: 131192 - DNA, 22 bp, Artificial sequence
  SiRNA target sequence
caatgttctattgggtgtcaca

SEQ ID NO: 131193 - DNA, 22 bp, Artificial sequence
  SiRNA target sequence
aatgttctattgggtgtcacag

SEQ ID NO: 131194 - DNA, 22 bp, Artificial sequence
  SiRNA target sequence
atgttctattgggtgtcacagc

SEQ ID NO: 131195 - DNA, 22 bp, Artificial sequence
  SiRNA target sequence
tgttctattgggtgtcacagct

SEQ ID NO: 131196 - DNA, 22 bp, Artificial sequence
  SiRNA target sequence
gttctattgggtgtcacagcta

SEQ ID NO: 131197 - DNA, 22 bp, Artificial sequence
  SiRNA target sequence
ttctattgggtgtcacagctac

SEQ ID NO: 131198 - DNA, 22 bp, Artificial sequence
  SiRNA target sequence
tctattgggtgtcacagctacc

SEQ ID NO: 131199 - DNA, 22 bp, Artificial sequence
  SiRNA target sequence
ctattgggtgtcacagctacct

SEQ ID NO: 131200 - DNA, 22 bp, Artificial sequence
  SiRNA target sequence
tattgggtgtcacagctaccta

SEQ ID NO: 131201 - DNA, 22 bp, Artificial sequence
  SiRNA target sequence
attgggtgtcacagctacctac

SEQ ID NO: 131202 - DNA, 22 bp, Artificial sequence
  SiRNA target sequence
ttgggtgtcacagctacctact

SEQ ID NO: 131203 - DNA, 22 bp, Artificial sequence
  SiRNA target sequence
tgggtgtcacagctacctacta

SEQ ID NO: 131204 - DNA, 22 bp, Artificial sequence
  SiRNA target sequence
gggtgtcacagctacctactat

SEQ ID NO: 131205 - DNA, 22 bp, Artificial sequence
  SiRNA target sequence
ggtgtcacagctacctactatg

SEQ ID NO: 131206 - DNA, 22 bp, Artificial sequence
  SiRNA target sequence
gtgtcacagctacctactatgg

SEQ ID NO: 131207 - DNA, 22 bp, Artificial sequence
  SiRNA target sequence
tgtcacagctacctactatgga

SEQ ID NO: 131208 - DNA, 22 bp, Artificial sequence
  SiRNA target sequence
gtcacagctacctactatggag

SEQ ID NO: 131209 - DNA, 22 bp, Artificial sequence
  SiRNA target sequence
tcacagctacctactatggagc

SEQ ID NO: 131210 - DNA, 22 bp, Artificial sequence
  SiRNA target sequence
cacagctacctactatggagct

SEQ ID NO: 131211 - DNA, 22 bp, Artificial sequence
  SiRNA target sequence
acagctacctactatggagctg

SEQ ID NO: 131212 - DNA, 22 bp, Artificial sequence
  SiRNA target sequence
cagctacctactatggagctgt

SEQ ID NO: 131213 - DNA, 22 bp, Artificial sequence
  SiRNA target sequence
agctacctactatggagctgtt

SEQ ID NO: 131214 - DNA, 22 bp, Artificial sequence
  SiRNA target sequence
gctacctactatggagctgttg

SEQ ID NO: 131215 - DNA, 22 bp, Artificial sequence
  SiRNA target sequence
ctacctactatggagctgttgt

SEQ ID NO: 131216 - DNA, 22 bp, Artificial sequence
  SiRNA target sequence
tacctactatggagctgttgta

SEQ ID NO: 131217 - DNA, 22 bp, Artificial sequence
  SiRNA target sequence
acctactatggagctgttgtat

SEQ ID NO: 131218 - DNA, 22 bp, Artificial sequence
  SiRNA target sequence
cctactatggagctgttgtatt

SEQ ID NO: 131219 - DNA, 22 bp, Artificial sequence
  SiRNA target sequence
ctactatggagctgttgtatta

SEQ ID NO: 131220 - DNA, 22 bp, Artificial sequence
  SiRNA target sequence
tactatggagctgttgtattaa

SEQ ID NO: 131221 - DNA, 22 bp, Artificial sequence
  SiRNA target sequence
actatggagctgttgtattaaa

SEQ ID NO: 131222 - DNA, 22 bp, Artificial sequence
  SiRNA target sequence
ctatggagctgttgtattaaat

SEQ ID NO: 131223 - DNA, 22 bp, Artificial sequence
  SiRNA target sequence
tatggagctgttgtattaaatc

SEQ ID NO: 131224 - DNA, 22 bp, Artificial sequence
  SiRNA target sequence
atggagctgttgtattaaatca

SEQ ID NO: 131225 - DNA, 22 bp, Artificial sequence
  SiRNA target sequence
tggagctgttgtattaaatcat

SEQ ID NO: 131226 - DNA, 22 bp, Artificial sequence
  SiRNA target sequence
ggagctgttgtattaaatcatg

SEQ ID NO: 131227 - DNA, 22 bp, Artificial sequence
  SiRNA target sequence
gagctgttgtattaaatcatgc

SEQ ID NO: 131228 - DNA, 22 bp, Artificial sequence
  SiRNA target sequence
agctgttgtattaaatcatgca

SEQ ID NO: 131229 - DNA, 22 bp, Artificial sequence
  SiRNA target sequence
gctgttgtattaaatcatgcaa

SEQ ID NO: 131230 - DNA, 22 bp, Artificial sequence
  SiRNA target sequence
ctgttgtattaaatcatgcaaa

SEQ ID NO: 131231 - DNA, 22 bp, Artificial sequence
  SiRNA target sequence
tgttgtattaaatcatgcaaaa

SEQ ID NO: 131232 - DNA, 22 bp, Artificial sequence
  SiRNA target sequence
gttgtattaaatcatgcaaaat

SEQ ID NO: 131233 - DNA, 22 bp, Artificial sequence
  SiRNA target sequence
ttgtattaaatcatgcaaaatt

SEQ ID NO: 131234 - DNA, 22 bp, Artificial sequence
  SiRNA target sequence
tgtattaaatcatgcaaaattc

SEQ ID NO: 131235 - DNA, 22 bp, Artificial sequence
  SiRNA target sequence
gtattaaatcatgcaaaattct

SEQ ID NO: 131236 - DNA, 22 bp, Artificial sequence
  SiRNA target sequence
tattaaatcatgcaaaattctt

SEQ ID NO: 131237 - DNA, 22 bp, Artificial sequence
  SiRNA target sequence
attaaatcatgcaaaattcttg

SEQ ID NO: 131238 - DNA, 22 bp, Artificial sequence
  SiRNA target sequence
ttaaatcatgcaaaattcttgt

SEQ ID NO: 131239 - DNA, 22 bp, Artificial sequence
  SiRNA target sequence
taaatcatgcaaaattcttgtc

SEQ ID NO: 131240 - DNA, 22 bp, Artificial sequence
  SiRNA target sequence
aaatcatgcaaaattcttgtca

SEQ ID NO: 131241 - DNA, 22 bp, Artificial sequence
  SiRNA target sequence
aatcatgcaaaattcttgtcag

SEQ ID NO: 131242 - DNA, 22 bp, Artificial sequence
  SiRNA target sequence
atcatgcaaaattcttgtcagt

SEQ ID NO: 131243 - DNA, 22 bp, Artificial sequence
  SiRNA target sequence
tcatgcaaaattcttgtcagta

SEQ ID NO: 131244 - DNA, 22 bp, Artificial sequence
  SiRNA target sequence
catgcaaaattcttgtcagtaa

SEQ ID NO: 131245 - DNA, 22 bp, Artificial sequence
  SiRNA target sequence
atgcaaaattcttgtcagtaac

SEQ ID NO: 131246 - DNA, 22 bp, Artificial sequence
  SiRNA target sequence
tgcaaaattcttgtcagtaaca

SEQ ID NO: 131247 - DNA, 22 bp, Artificial sequence
  SiRNA target sequence
gcaaaattcttgtcagtaacaa

SEQ ID NO: 131248 - DNA, 22 bp, Artificial sequence
  SiRNA target sequence
caaaattcttgtcagtaacaaa

SEQ ID NO: 131249 - DNA, 22 bp, Artificial sequence
  SiRNA target sequence
aaaattcttgtcagtaacaaaa

SEQ ID NO: 131250 - DNA, 22 bp, Artificial sequence
  SiRNA target sequence
aaattcttgtcagtaacaaaag

SEQ ID NO: 131251 - DNA, 22 bp, Artificial sequence
  SiRNA target sequence
aattcttgtcagtaacaaaaga

SEQ ID NO: 131252 - DNA, 22 bp, Artificial sequence
  SiRNA target sequence
attcttgtcagtaacaaaagat

SEQ ID NO: 131253 - DNA, 22 bp, Artificial sequence
  SiRNA target sequence
ttcttgtcagtaacaaaagatg

SEQ ID NO: 131254 - DNA, 22 bp, Artificial sequence
  SiRNA target sequence
tcttgtcagtaacaaaagatgg

SEQ ID NO: 131255 - DNA, 22 bp, Artificial sequence
  SiRNA target sequence
cttgtcagtaacaaaagatggc

SEQ ID NO: 131256 - DNA, 22 bp, Artificial sequence
  SiRNA target sequence
ttgtcagtaacaaaagatggcg

SEQ ID NO: 131257 - DNA, 22 bp, Artificial sequence
  SiRNA target sequence
tgtcagtaacaaaagatggcga

SEQ ID NO: 131258 - DNA, 22 bp, Artificial sequence
  SiRNA target sequence
gtcagtaacaaaagatggcgat

SEQ ID NO: 131259 - DNA, 22 bp, Artificial sequence
  SiRNA target sequence
tcagtaacaaaagatggcgata

SEQ ID NO: 131260 - DNA, 22 bp, Artificial sequence
  SiRNA target sequence
cagtaacaaaagatggcgataa

SEQ ID NO: 131261 - DNA, 22 bp, Artificial sequence
  SiRNA target sequence
agtaacaaaagatggcgataaa

SEQ ID NO: 131262 - DNA, 22 bp, Artificial sequence
  SiRNA target sequence
gtaacaaaagatggcgataaaa

SEQ ID NO: 131263 - DNA, 22 bp, Artificial sequence
  SiRNA target sequence
taacaaaagatggcgataaaat

SEQ ID NO: 131264 - DNA, 22 bp, Artificial sequence
  SiRNA target sequence
aacaaaagatggcgataaaatt

SEQ ID NO: 131265 - DNA, 22 bp, Artificial sequence
  SiRNA target sequence
acaaaagatggcgataaaatta

SEQ ID NO: 131266 - DNA, 22 bp, Artificial sequence
  SiRNA target sequence
caaaagatggcgataaaattaa

SEQ ID NO: 131267 - DNA, 22 bp, Artificial sequence
  SiRNA target sequence
aaaagatggcgataaaattaat

SEQ ID NO: 131268 - DNA, 22 bp, Artificial sequence
  SiRNA target sequence
aaagatggcgataaaattaatg

SEQ ID NO: 131269 - DNA, 22 bp, Artificial sequence
  SiRNA target sequence
aagatggcgataaaattaatgg

SEQ ID NO: 131270 - DNA, 22 bp, Artificial sequence
  SiRNA target sequence
agatggcgataaaattaatgga

SEQ ID NO: 131271 - DNA, 22 bp, Artificial sequence
  SiRNA target sequence
gatggcgataaaattaatggaa

SEQ ID NO: 131272 - DNA, 22 bp, Artificial sequence
  SiRNA target sequence
atggcgataaaattaatggaat

SEQ ID NO: 131273 - DNA, 22 bp, Artificial sequence
  SiRNA target sequence
tggcgataaaattaatggaatt

SEQ ID NO: 131274 - DNA, 22 bp, Artificial sequence
  SiRNA target sequence
ggcgataaaattaatggaatta

SEQ ID NO: 131275 - DNA, 22 bp, Artificial sequence
  SiRNA target sequence
gcgataaaattaatggaattaa

SEQ ID NO: 131276 - DNA, 22 bp, Artificial sequence
  SiRNA target sequence
cgataaaattaatggaattaaa

SEQ ID NO: 131277 - DNA, 22 bp, Artificial sequence
  SiRNA target sequence
gataaaattaatggaattaaat

SEQ ID NO: 131278 - DNA, 22 bp, Artificial sequence
  SiRNA target sequence
ataaaattaatggaattaaatg

SEQ ID NO: 131279 - DNA, 22 bp, Artificial sequence
  SiRNA target sequence
taaaattaatggaattaaatgt

SEQ ID NO: 131280 - DNA, 22 bp, Artificial sequence
  SiRNA target sequence
aaaattaatggaattaaatgtc

SEQ ID NO: 131281 - DNA, 22 bp, Artificial sequence
  SiRNA target sequence
aaattaatggaattaaatgtca

SEQ ID NO: 131282 - DNA, 22 bp, Artificial sequence
  SiRNA target sequence
aattaatggaattaaatgtcaa

SEQ ID NO: 131283 - DNA, 22 bp, Artificial sequence
  SiRNA target sequence
attaatggaattaaatgtcaag

SEQ ID NO: 131284 - DNA, 22 bp, Artificial sequence
  SiRNA target sequence
ttaatggaattaaatgtcaaga

SEQ ID NO: 131285 - DNA, 22 bp, Artificial sequence
  SiRNA target sequence
taatggaattaaatgtcaagat

SEQ ID NO: 131286 - DNA, 22 bp, Artificial sequence
  SiRNA target sequence
aatggaattaaatgtcaagatt

SEQ ID NO: 131287 - DNA, 22 bp, Artificial sequence
  SiRNA target sequence
atggaattaaatgtcaagattc

SEQ ID NO: 131288 - DNA, 22 bp, Artificial sequence
  SiRNA target sequence
tggaattaaatgtcaagattca

SEQ ID NO: 131289 - DNA, 22 bp, Artificial sequence
  SiRNA target sequence
ggaattaaatgtcaagattcaa

SEQ ID NO: 131290 - DNA, 22 bp, Artificial sequence
  SiRNA target sequence
gaattaaatgtcaagattcaat

SEQ ID NO: 131291 - DNA, 22 bp, Artificial sequence
  SiRNA target sequence
aattaaatgtcaagattcaata

SEQ ID NO: 131292 - DNA, 22 bp, Artificial sequence
  SiRNA target sequence
attaaatgtcaagattcaataa

SEQ ID NO: 131293 - DNA, 22 bp, Artificial sequence
  SiRNA target sequence
ttaaatgtcaagattcaataaa

SEQ ID NO: 131294 - DNA, 22 bp, Artificial sequence
  SiRNA target sequence
taaatgtcaagattcaataaat

SEQ ID NO: 131295 - DNA, 22 bp, Artificial sequence
  SiRNA target sequence
aaatgtcaagattcaataaata

SEQ ID NO: 131296 - DNA, 22 bp, Artificial sequence
  SiRNA target sequence
aatgtcaagattcaataaataa

SEQ ID NO: 131297 - DNA, 22 bp, Artificial sequence
  SiRNA target sequence
atgtcaagattcaataaataat

SEQ ID NO: 131298 - DNA, 22 bp, Artificial sequence
  SiRNA target sequence
tgtcaagattcaataaataatg

SEQ ID NO: 131299 - DNA, 22 bp, Artificial sequence
  SiRNA target sequence
gtcaagattcaataaataatga

SEQ ID NO: 131300 - DNA, 22 bp, Artificial sequence
  SiRNA target sequence
tcaagattcaataaataatgaa

SEQ ID NO: 131301 - DNA, 22 bp, Artificial sequence
  SiRNA target sequence
caagattcaataaataatgaaa

SEQ ID NO: 131302 - DNA, 22 bp, Artificial sequence
  SiRNA target sequence
aagattcaataaataatgaaaa

SEQ ID NO: 131303 - DNA, 22 bp, Artificial sequence
  SiRNA target sequence
agattcaataaataatgaaaaa

SEQ ID NO: 131304 - DNA, 22 bp, Artificial sequence
  SiRNA target sequence
gattcaataaataatgaaaaat

SEQ ID NO: 131305 - DNA, 22 bp, Artificial sequence
  SiRNA target sequence
attcaataaataatgaaaaatt

SEQ ID NO: 131306 - DNA, 22 bp, Artificial sequence
  SiRNA target sequence
ttcaataaataatgaaaaattt

SEQ ID NO: 131307 - DNA, 22 bp, Artificial sequence
  SiRNA target sequence
tcaataaataatgaaaaatttt

SEQ ID NO: 131308 - DNA, 22 bp, Artificial sequence
  SiRNA target sequence
caataaataatgaaaaattttt

SEQ ID NO: 131309 - DNA, 22 bp, Artificial sequence
  SiRNA target sequence
aataaataatgaaaaattttta

SEQ ID NO: 131310 - DNA, 22 bp, Artificial sequence
  SiRNA target sequence
ataaataatgaaaaatttttaa

SEQ ID NO: 131311 - DNA, 22 bp, Artificial sequence
  SiRNA target sequence
taaataatgaaaaatttttaat

SEQ ID NO: 131312 - DNA, 22 bp, Artificial sequence
  SiRNA target sequence
aaataatgaaaaatttttaatt

SEQ ID NO: 131313 - DNA, 22 bp, Artificial sequence
  SiRNA target sequence
aataatgaaaaatttttaatta

SEQ ID NO: 131314 - DNA, 22 bp, Artificial sequence
  SiRNA target sequence
ataatgaaaaatttttaattag

SEQ ID NO: 131315 - DNA, 22 bp, Artificial sequence
  SiRNA target sequence
taatgaaaaatttttaattagg

SEQ ID NO: 131316 - DNA, 22 bp, Artificial sequence
  SiRNA target sequence
aatgaaaaatttttaattaggt

SEQ ID NO: 131317 - DNA, 22 bp, Artificial sequence
  SiRNA target sequence
atgaaaaatttttaattaggtg

SEQ ID NO: 131318 - DNA, 22 bp, Artificial sequence
  SiRNA target sequence
tgaaaaatttttaattaggtgt

SEQ ID NO: 131319 - DNA, 22 bp, Artificial sequence
  SiRNA target sequence
gaaaaatttttaattaggtgta

SEQ ID NO: 131320 - DNA, 22 bp, Artificial sequence
  SiRNA target sequence
aaaaatttttaattaggtgtaa

SEQ ID NO: 131321 - DNA, 22 bp, Artificial sequence
  SiRNA target sequence
aaaatttttaattaggtgtaaa

SEQ ID NO: 131322 - DNA, 22 bp, Artificial sequence
  SiRNA target sequence
aaatttttaattaggtgtaaag

SEQ ID NO: 131323 - DNA, 22 bp, Artificial sequence
  SiRNA target sequence
aatttttaattaggtgtaaagt

SEQ ID NO: 131324 - DNA, 22 bp, Artificial sequence
  SiRNA target sequence
atttttaattaggtgtaaagtt

SEQ ID NO: 131325 - DNA, 22 bp, Artificial sequence
  SiRNA target sequence
tttttaattaggtgtaaagttt

SEQ ID NO: 131326 - DNA, 22 bp, Artificial sequence
  SiRNA target sequence
ttttaattaggtgtaaagtttt

SEQ ID NO: 131327 - DNA, 22 bp, Artificial sequence
  SiRNA target sequence
tttaattaggtgtaaagtttta

SEQ ID NO: 131328 - DNA, 22 bp, Artificial sequence
  SiRNA target sequence
ttaattaggtgtaaagttttaa

SEQ ID NO: 131329 - DNA, 22 bp, Artificial sequence
  SiRNA target sequence
taattaggtgtaaagttttaat

SEQ ID NO: 131330 - DNA, 22 bp, Artificial sequence
  SiRNA target sequence
aattaggtgtaaagttttaata

SEQ ID NO: 131331 - DNA, 22 bp, Artificial sequence
  SiRNA target sequence
attaggtgtaaagttttaataa

SEQ ID NO: 131332 - DNA, 22 bp, Artificial sequence
  SiRNA target sequence
ttaggtgtaaagttttaataaa

SEQ ID NO: 131333 - DNA, 22 bp, Artificial sequence
  SiRNA target sequence
taggtgtaaagttttaataaat

SEQ ID NO: 131334 - DNA, 22 bp, Artificial sequence
  SiRNA target sequence
aggtgtaaagttttaataaata

SEQ ID NO: 131335 - DNA, 22 bp, Artificial sequence
  SiRNA target sequence
ggtgtaaagttttaataaatac

SEQ ID NO: 131336 - DNA, 22 bp, Artificial sequence
  SiRNA target sequence
gtgtaaagttttaataaatact

SEQ ID NO: 131337 - DNA, 22 bp, Artificial sequence
  SiRNA target sequence
tgtaaagttttaataaatactt

SEQ ID NO: 131338 - DNA, 22 bp, Artificial sequence
  SiRNA target sequence
gtaaagttttaataaatacttc

SEQ ID NO: 131339 - DNA, 22 bp, Artificial sequence
  SiRNA target sequence
taaagttttaataaatacttct

SEQ ID NO: 131340 - DNA, 22 bp, Artificial sequence
  SiRNA target sequence
aaagttttaataaatacttctg

SEQ ID NO: 131341 - DNA, 22 bp, Artificial sequence
  SiRNA target sequence
aagttttaataaatacttctgg

SEQ ID NO: 131342 - DNA, 22 bp, Artificial sequence
  SiRNA target sequence
agttttaataaatacttctggc

SEQ ID NO: 131343 - DNA, 22 bp, Artificial sequence
  SiRNA target sequence
gttttaataaatacttctggcc

SEQ ID NO: 131344 - DNA, 22 bp, Artificial sequence
  SiRNA target sequence
ttttaataaatacttctggccc

SEQ ID NO: 131345 - DNA, 22 bp, Artificial sequence
  SiRNA target sequence
tttaataaatacttctggccct

SEQ ID NO: 131346 - DNA, 22 bp, Artificial sequence
  SiRNA target sequence
ttaataaatacttctggccctt

SEQ ID NO: 131347 - DNA, 22 bp, Artificial sequence
  SiRNA target sequence
taataaatacttctggcccttt

SEQ ID NO: 131348 - DNA, 22 bp, Artificial sequence
  SiRNA target sequence
aataaatacttctggccctttt

SEQ ID NO: 131349 - DNA, 22 bp, Artificial sequence
  SiRNA target sequence
ataaatacttctggcccttttg

SEQ ID NO: 131350 - DNA, 22 bp, Artificial sequence
  SiRNA target sequence
taaatacttctggcccttttgc

SEQ ID NO: 131351 - DNA, 22 bp, Artificial sequence
  SiRNA target sequence
aaatacttctggcccttttgct

SEQ ID NO: 131352 - DNA, 22 bp, Artificial sequence
  SiRNA target sequence
aatacttctggcccttttgctg

SEQ ID NO: 131353 - DNA, 22 bp, Artificial sequence
  SiRNA target sequence
atacttctggcccttttgctga

SEQ ID NO: 131354 - DNA, 22 bp, Artificial sequence
  SiRNA target sequence
tacttctggcccttttgctgac

SEQ ID NO: 131355 - DNA, 22 bp, Artificial sequence
  SiRNA target sequence
acttctggcccttttgctgacg

SEQ ID NO: 131356 - DNA, 22 bp, Artificial sequence
  SiRNA target sequence
cttctggcccttttgctgacga

SEQ ID NO: 131357 - DNA, 22 bp, Artificial sequence
  SiRNA target sequence
ttctggcccttttgctgacgag

SEQ ID NO: 131358 - DNA, 22 bp, Artificial sequence
  SiRNA target sequence
tctggcccttttgctgacgagg

SEQ ID NO: 131359 - DNA, 22 bp, Artificial sequence
  SiRNA target sequence
ctggcccttttgctgacgaggt

SEQ ID NO: 131360 - DNA, 22 bp, Artificial sequence
  SiRNA target sequence
tggcccttttgctgacgaggtt

SEQ ID NO: 131361 - DNA, 22 bp, Artificial sequence
  SiRNA target sequence
ggcccttttgctgacgaggttc

SEQ ID NO: 131362 - DNA, 22 bp, Artificial sequence
  SiRNA target sequence
gcccttttgctgacgaggttcg

SEQ ID NO: 131363 - DNA, 22 bp, Artificial sequence
  SiRNA target sequence
cccttttgctgacgaggttcga

SEQ ID NO: 131364 - DNA, 22 bp, Artificial sequence
  SiRNA target sequence
ccttttgctgacgaggttcgaa

SEQ ID NO: 131365 - DNA, 22 bp, Artificial sequence
  SiRNA target sequence
cttttgctgacgaggttcgaaa

SEQ ID NO: 131366 - DNA, 22 bp, Artificial sequence
  SiRNA target sequence
ttttgctgacgaggttcgaaat

SEQ ID NO: 131367 - DNA, 22 bp, Artificial sequence
  SiRNA target sequence
tttgctgacgaggttcgaaata

SEQ ID NO: 131368 - DNA, 22 bp, Artificial sequence
  SiRNA target sequence
ttgctgacgaggttcgaaatac

SEQ ID NO: 131369 - DNA, 22 bp, Artificial sequence
  SiRNA target sequence
tgctgacgaggttcgaaataca

SEQ ID NO: 131370 - DNA, 22 bp, Artificial sequence
  SiRNA target sequence
gctgacgaggttcgaaatacat

SEQ ID NO: 131371 - DNA, 22 bp, Artificial sequence
  SiRNA target sequence
ctgacgaggttcgaaatacatc

SEQ ID NO: 131372 - DNA, 22 bp, Artificial sequence
  SiRNA target sequence
tgacgaggttcgaaatacatca

SEQ ID NO: 131373 - DNA, 22 bp, Artificial sequence
  SiRNA target sequence
gacgaggttcgaaatacatcaa

SEQ ID NO: 131374 - DNA, 22 bp, Artificial sequence
  SiRNA target sequence
acgaggttcgaaatacatcaat

SEQ ID NO: 131375 - DNA, 22 bp, Artificial sequence
  SiRNA target sequence
cgaggttcgaaatacatcaatt

SEQ ID NO: 131376 - DNA, 22 bp, Artificial sequence
  SiRNA target sequence
gaggttcgaaatacatcaattg

SEQ ID NO: 131377 - DNA, 22 bp, Artificial sequence
  SiRNA target sequence
aggttcgaaatacatcaattga

SEQ ID NO: 131378 - DNA, 22 bp, Artificial sequence
  SiRNA target sequence
ggttcgaaatacatcaattgaa

SEQ ID NO: 131379 - DNA, 22 bp, Artificial sequence
  SiRNA target sequence
gttcgaaatacatcaattgaaa

SEQ ID NO: 131380 - DNA, 22 bp, Artificial sequence
  SiRNA target sequence
ttcgaaatacatcaattgaaaa

SEQ ID NO: 131381 - DNA, 22 bp, Artificial sequence
  SiRNA target sequence
tcgaaatacatcaattgaaaac

SEQ ID NO: 131382 - DNA, 22 bp, Artificial sequence
  SiRNA target sequence
cgaaatacatcaattgaaaact

SEQ ID NO: 131383 - DNA, 22 bp, Artificial sequence
  SiRNA target sequence
gaaatacatcaattgaaaactg

SEQ ID NO: 131384 - DNA, 22 bp, Artificial sequence
  SiRNA target sequence
aaatacatcaattgaaaactgt

SEQ ID NO: 131385 - DNA, 22 bp, Artificial sequence
  SiRNA target sequence
aatacatcaattgaaaactgtc

SEQ ID NO: 131386 - DNA, 22 bp, Artificial sequence
  SiRNA target sequence
atacatcaattgaaaactgtca

SEQ ID NO: 131387 - DNA, 22 bp, Artificial sequence
  SiRNA target sequence
tacatcaattgaaaactgtcaa

SEQ ID NO: 131388 - DNA, 22 bp, Artificial sequence
  SiRNA target sequence
acatcaattgaaaactgtcaac

SEQ ID NO: 131389 - DNA, 22 bp, Artificial sequence
  SiRNA target sequence
catcaattgaaaactgtcaacc

SEQ ID NO: 131390 - DNA, 22 bp, Artificial sequence
  SiRNA target sequence
atcaattgaaaactgtcaacca

SEQ ID NO: 131391 - DNA, 22 bp, Artificial sequence
  SiRNA target sequence
tcaattgaaaactgtcaaccaa

SEQ ID NO: 131392 - DNA, 22 bp, Artificial sequence
  SiRNA target sequence
caattgaaaactgtcaaccaat

SEQ ID NO: 131393 - DNA, 22 bp, Artificial sequence
  SiRNA target sequence
aattgaaaactgtcaaccaata

SEQ ID NO: 131394 - DNA, 22 bp, Artificial sequence
  SiRNA target sequence
attgaaaactgtcaaccaatac

SEQ ID NO: 131395 - DNA, 22 bp, Artificial sequence
  SiRNA target sequence
ttgaaaactgtcaaccaatact

SEQ ID NO: 131396 - DNA, 22 bp, Artificial sequence
  SiRNA target sequence
tgaaaactgtcaaccaatactc

SEQ ID NO: 131397 - DNA, 22 bp, Artificial sequence
  SiRNA target sequence
gaaaactgtcaaccaatactcc

SEQ ID NO: 131398 - DNA, 22 bp, Artificial sequence
  SiRNA target sequence
aaaactgtcaaccaatactcca

SEQ ID NO: 131399 - DNA, 22 bp, Artificial sequence
  SiRNA target sequence
aaactgtcaaccaatactccaa

SEQ ID NO: 131400 - DNA, 22 bp, Artificial sequence
  SiRNA target sequence
aactgtcaaccaatactccaac

SEQ ID NO: 131401 - DNA, 22 bp, Artificial sequence
  SiRNA target sequence
actgtcaaccaatactccaaca

SEQ ID NO: 131402 - DNA, 22 bp, Artificial sequence
  SiRNA target sequence
ctgtcaaccaatactccaacat

SEQ ID NO: 131403 - DNA, 22 bp, Artificial sequence
  SiRNA target sequence
tgtcaaccaatactccaacata

SEQ ID NO: 131404 - DNA, 22 bp, Artificial sequence
  SiRNA target sequence
gtcaaccaatactccaacatag

SEQ ID NO: 131405 - DNA, 22 bp, Artificial sequence
  SiRNA target sequence
tcaaccaatactccaacatagt

SEQ ID NO: 131406 - DNA, 22 bp, Artificial sequence
  SiRNA target sequence
caaccaatactccaacatagtt

SEQ ID NO: 131407 - DNA, 22 bp, Artificial sequence
  SiRNA target sequence
aaccaatactccaacatagtta

SEQ ID NO: 131408 - DNA, 22 bp, Artificial sequence
  SiRNA target sequence
accaatactccaacatagttat

SEQ ID NO: 131409 - DNA, 22 bp, Artificial sequence
  SiRNA target sequence
ccaatactccaacatagttatg

SEQ ID NO: 131410 - DNA, 22 bp, Artificial sequence
  SiRNA target sequence
caatactccaacatagttatgg

SEQ ID NO: 131411 - DNA, 22 bp, Artificial sequence
  SiRNA target sequence
aatactccaacatagttatggt

SEQ ID NO: 131412 - DNA, 22 bp, Artificial sequence
  SiRNA target sequence
atactccaacatagttatggta

SEQ ID NO: 131413 - DNA, 22 bp, Artificial sequence
  SiRNA target sequence
tactccaacatagttatggtac

SEQ ID NO: 131414 - DNA, 22 bp, Artificial sequence
  SiRNA target sequence
actccaacatagttatggtaca

SEQ ID NO: 131415 - DNA, 22 bp, Artificial sequence
  SiRNA target sequence
ctccaacatagttatggtacac

SEQ ID NO: 131416 - DNA, 22 bp, Artificial sequence
  SiRNA target sequence
tccaacatagttatggtacaca

SEQ ID NO: 131417 - DNA, 22 bp, Artificial sequence
  SiRNA target sequence
ccaacatagttatggtacacat

SEQ ID NO: 131418 - DNA, 22 bp, Artificial sequence
  SiRNA target sequence
caacatagttatggtacacata

SEQ ID NO: 131419 - DNA, 22 bp, Artificial sequence
  SiRNA target sequence
aacatagttatggtacacatat

SEQ ID NO: 131420 - DNA, 22 bp, Artificial sequence
  SiRNA target sequence
acatagttatggtacacatatt

SEQ ID NO: 131421 - DNA, 22 bp, Artificial sequence
  SiRNA target sequence
catagttatggtacacatattg

SEQ ID NO: 131422 - DNA, 22 bp, Artificial sequence
  SiRNA target sequence
atagttatggtacacatattgt

SEQ ID NO: 131423 - DNA, 22 bp, Artificial sequence
  SiRNA target sequence
tagttatggtacacatattgta

SEQ ID NO: 131424 - DNA, 22 bp, Artificial sequence
  SiRNA target sequence
agttatggtacacatattgtag

SEQ ID NO: 131425 - DNA, 22 bp, Artificial sequence
  SiRNA target sequence
gttatggtacacatattgtagt

SEQ ID NO: 131426 - DNA, 22 bp, Artificial sequence
  SiRNA target sequence
ttatggtacacatattgtagtt

SEQ ID NO: 131427 - DNA, 22 bp, Artificial sequence
  SiRNA target sequence
tatggtacacatattgtagttc

SEQ ID NO: 131428 - DNA, 22 bp, Artificial sequence
  SiRNA target sequence
atggtacacatattgtagttcc

SEQ ID NO: 131429 - DNA, 22 bp, Artificial sequence
  SiRNA target sequence
tggtacacatattgtagttcct

SEQ ID NO: 131430 - DNA, 22 bp, Artificial sequence
  SiRNA target sequence
ggtacacatattgtagttcctg

SEQ ID NO: 131431 - DNA, 22 bp, Artificial sequence
  SiRNA target sequence
gtacacatattgtagttcctgc

SEQ ID NO: 131432 - DNA, 22 bp, Artificial sequence
  SiRNA target sequence
tacacatattgtagttcctgcg

SEQ ID NO: 131433 - DNA, 22 bp, Artificial sequence
  SiRNA target sequence
acacatattgtagttcctgcga

SEQ ID NO: 131434 - DNA, 22 bp, Artificial sequence
  SiRNA target sequence
cacatattgtagttcctgcgat

SEQ ID NO: 131435 - DNA, 22 bp, Artificial sequence
  SiRNA target sequence
acatattgtagttcctgcgata

SEQ ID NO: 131436 - DNA, 22 bp, Artificial sequence
  SiRNA target sequence
catattgtagttcctgcgatat

SEQ ID NO: 131437 - DNA, 22 bp, Artificial sequence
  SiRNA target sequence
atattgtagttcctgcgatatt

SEQ ID NO: 131438 - DNA, 22 bp, Artificial sequence
  SiRNA target sequence
tattgtagttcctgcgatattt

SEQ ID NO: 131439 - DNA, 22 bp, Artificial sequence
  SiRNA target sequence
attgtagttcctgcgatatttt

SEQ ID NO: 131440 - DNA, 22 bp, Artificial sequence
  SiRNA target sequence
ttgtagttcctgcgatattttc

SEQ ID NO: 131441 - DNA, 22 bp, Artificial sequence
  SiRNA target sequence
tgtagttcctgcgatattttcg

SEQ ID NO: 131442 - DNA, 22 bp, Artificial sequence
  SiRNA target sequence
gtagttcctgcgatattttcgc

SEQ ID NO: 131443 - DNA, 22 bp, Artificial sequence
  SiRNA target sequence
tagttcctgcgatattttcgcc

SEQ ID NO: 131444 - DNA, 22 bp, Artificial sequence
  SiRNA target sequence
agttcctgcgatattttcgcct

SEQ ID NO: 131445 - DNA, 22 bp, Artificial sequence
  SiRNA target sequence
gttcctgcgatattttcgccta

SEQ ID NO: 131446 - DNA, 22 bp, Artificial sequence
  SiRNA target sequence
ttcctgcgatattttcgcctaa

SEQ ID NO: 131447 - DNA, 22 bp, Artificial sequence
  SiRNA target sequence
tcctgcgatattttcgcctaaa

SEQ ID NO: 131448 - DNA, 22 bp, Artificial sequence
  SiRNA target sequence
cctgcgatattttcgcctaaaa

SEQ ID NO: 131449 - DNA, 22 bp, Artificial sequence
  SiRNA target sequence
ctgcgatattttcgcctaaaaa

SEQ ID NO: 131450 - DNA, 22 bp, Artificial sequence
  SiRNA target sequence
tgcgatattttcgcctaaaaat

SEQ ID NO: 131451 - DNA, 22 bp, Artificial sequence
  SiRNA target sequence
gcgatattttcgcctaaaaata

SEQ ID NO: 131452 - DNA, 22 bp, Artificial sequence
  SiRNA target sequence
cgatattttcgcctaaaaatat

SEQ ID NO: 131453 - DNA, 22 bp, Artificial sequence
  SiRNA target sequence
gatattttcgcctaaaaatatg

SEQ ID NO: 131454 - DNA, 22 bp, Artificial sequence
  SiRNA target sequence
atattttcgcctaaaaatatgg

SEQ ID NO: 131455 - DNA, 22 bp, Artificial sequence
  SiRNA target sequence
tattttcgcctaaaaatatggg

SEQ ID NO: 131456 - DNA, 22 bp, Artificial sequence
  SiRNA target sequence
attttcgcctaaaaatatgggc

SEQ ID NO: 131457 - DNA, 22 bp, Artificial sequence
  SiRNA target sequence
ttttcgcctaaaaatatgggct

SEQ ID NO: 131458 - DNA, 22 bp, Artificial sequence
  SiRNA target sequence
tttcgcctaaaaatatgggctt

SEQ ID NO: 131459 - DNA, 22 bp, Artificial sequence
  SiRNA target sequence
ttcgcctaaaaatatgggcttt

SEQ ID NO: 131460 - DNA, 22 bp, Artificial sequence
  SiRNA target sequence
tcgcctaaaaatatgggctttg

SEQ ID NO: 131461 - DNA, 22 bp, Artificial sequence
  SiRNA target sequence
cgcctaaaaatatgggctttgt

SEQ ID NO: 131462 - DNA, 22 bp, Artificial sequence
  SiRNA target sequence
gcctaaaaatatgggctttgtt

SEQ ID NO: 131463 - DNA, 22 bp, Artificial sequence
  SiRNA target sequence
cctaaaaatatgggctttgttg

SEQ ID NO: 131464 - DNA, 22 bp, Artificial sequence
  SiRNA target sequence
ctaaaaatatgggctttgttga

SEQ ID NO: 131465 - DNA, 22 bp, Artificial sequence
  SiRNA target sequence
taaaaatatgggctttgttgat

SEQ ID NO: 131466 - DNA, 22 bp, Artificial sequence
  SiRNA target sequence
aaaaatatgggctttgttgatc

SEQ ID NO: 131467 - DNA, 22 bp, Artificial sequence
  SiRNA target sequence
aaaatatgggctttgttgatcc

SEQ ID NO: 131468 - DNA, 22 bp, Artificial sequence
  SiRNA target sequence
aaatatgggctttgttgatcca

SEQ ID NO: 131469 - DNA, 22 bp, Artificial sequence
  SiRNA target sequence
aatatgggctttgttgatccaa

SEQ ID NO: 131470 - DNA, 22 bp, Artificial sequence
  SiRNA target sequence
atatgggctttgttgatccaag

SEQ ID NO: 131471 - DNA, 22 bp, Artificial sequence
  SiRNA target sequence
tatgggctttgttgatccaagc

SEQ ID NO: 131472 - DNA, 22 bp, Artificial sequence
  SiRNA target sequence
atgggctttgttgatccaagca

SEQ ID NO: 131473 - DNA, 22 bp, Artificial sequence
  SiRNA target sequence
tgggctttgttgatccaagcac

SEQ ID NO: 131474 - DNA, 22 bp, Artificial sequence
  SiRNA target sequence
gggctttgttgatccaagcacg

SEQ ID NO: 131475 - DNA, 22 bp, Artificial sequence
  SiRNA target sequence
ggctttgttgatccaagcacga

SEQ ID NO: 131476 - DNA, 22 bp, Artificial sequence
  SiRNA target sequence
gctttgttgatccaagcacgag

SEQ ID NO: 131477 - DNA, 22 bp, Artificial sequence
  SiRNA target sequence
ctttgttgatccaagcacgagt

SEQ ID NO: 131478 - DNA, 22 bp, Artificial sequence
  SiRNA target sequence
tttgttgatccaagcacgagtg

SEQ ID NO: 131479 - DNA, 22 bp, Artificial sequence
  SiRNA target sequence
ttgttgatccaagcacgagtga

SEQ ID NO: 131480 - DNA, 22 bp, Artificial sequence
  SiRNA target sequence
tgttgatccaagcacgagtgat

SEQ ID NO: 131481 - DNA, 22 bp, Artificial sequence
  SiRNA target sequence
gttgatccaagcacgagtgatg

SEQ ID NO: 131482 - DNA, 22 bp, Artificial sequence
  SiRNA target sequence
ttgatccaagcacgagtgatgg

SEQ ID NO: 131483 - DNA, 22 bp, Artificial sequence
  SiRNA target sequence
tgatccaagcacgagtgatgga

SEQ ID NO: 131484 - DNA, 22 bp, Artificial sequence
  SiRNA target sequence
gatccaagcacgagtgatggaa

SEQ ID NO: 131485 - DNA, 22 bp, Artificial sequence
  SiRNA target sequence
atccaagcacgagtgatggaag

SEQ ID NO: 131486 - DNA, 22 bp, Artificial sequence
  SiRNA target sequence
tccaagcacgagtgatggaaga

SEQ ID NO: 131487 - DNA, 22 bp, Artificial sequence
  SiRNA target sequence
ccaagcacgagtgatggaagaa

SEQ ID NO: 131488 - DNA, 22 bp, Artificial sequence
  SiRNA target sequence
caagcacgagtgatggaagaat

SEQ ID NO: 131489 - DNA, 22 bp, Artificial sequence
  SiRNA target sequence
aagcacgagtgatggaagaatc

SEQ ID NO: 131490 - DNA, 22 bp, Artificial sequence
  SiRNA target sequence
agcacgagtgatggaagaatcg

SEQ ID NO: 131491 - DNA, 22 bp, Artificial sequence
  SiRNA target sequence
gcacgagtgatggaagaatcgc

SEQ ID NO: 131492 - DNA, 22 bp, Artificial sequence
  SiRNA target sequence
cacgagtgatggaagaatcgca

SEQ ID NO: 131493 - DNA, 22 bp, Artificial sequence
  SiRNA target sequence
acgagtgatggaagaatcgcat

SEQ ID NO: 131494 - DNA, 22 bp, Artificial sequence
  SiRNA target sequence
cgagtgatggaagaatcgcatt

SEQ ID NO: 131495 - DNA, 22 bp, Artificial sequence
  SiRNA target sequence
gagtgatggaagaatcgcattt

SEQ ID NO: 131496 - DNA, 22 bp, Artificial sequence
  SiRNA target sequence
agtgatggaagaatcgcatttt

SEQ ID NO: 131497 - DNA, 22 bp, Artificial sequence
  SiRNA target sequence
gtgatggaagaatcgcattttt

SEQ ID NO: 131498 - DNA, 22 bp, Artificial sequence
  SiRNA target sequence
tgatggaagaatcgcatttttt

SEQ ID NO: 131499 - DNA, 22 bp, Artificial sequence
  SiRNA target sequence
gatggaagaatcgcatttttta

SEQ ID NO: 131500 - DNA, 22 bp, Artificial sequence
  SiRNA target sequence
atggaagaatcgcattttttat

SEQ ID NO: 131501 - DNA, 22 bp, Artificial sequence
  SiRNA target sequence
tggaagaatcgcattttttatg

SEQ ID NO: 131502 - DNA, 22 bp, Artificial sequence
  SiRNA target sequence
ggaagaatcgcattttttatga

SEQ ID NO: 131503 - DNA, 22 bp, Artificial sequence
  SiRNA target sequence
gaagaatcgcattttttatgaa

SEQ ID NO: 131504 - DNA, 22 bp, Artificial sequence
  SiRNA target sequence
aagaatcgcattttttatgaat

SEQ ID NO: 131505 - DNA, 22 bp, Artificial sequence
  SiRNA target sequence
agaatcgcattttttatgaatt

SEQ ID NO: 131506 - DNA, 22 bp, Artificial sequence
  SiRNA target sequence
gaatcgcattttttatgaattt

SEQ ID NO: 131507 - DNA, 22 bp, Artificial sequence
  SiRNA target sequence
aatcgcattttttatgaatttt

SEQ ID NO: 131508 - DNA, 22 bp, Artificial sequence
  SiRNA target sequence
atcgcattttttatgaatttta

SEQ ID NO: 131509 - DNA, 22 bp, Artificial sequence
  SiRNA target sequence
tcgcattttttatgaattttaa

SEQ ID NO: 131510 - DNA, 22 bp, Artificial sequence
  SiRNA target sequence
cgcattttttatgaattttaaa

SEQ ID NO: 131511 - DNA, 22 bp, Artificial sequence
  SiRNA target sequence
gcattttttatgaattttaaag

SEQ ID NO: 131512 - DNA, 22 bp, Artificial sequence
  SiRNA target sequence
cattttttatgaattttaaagg

SEQ ID NO: 131513 - DNA, 22 bp, Artificial sequence
  SiRNA target sequence
attttttatgaattttaaaggt

SEQ ID NO: 131514 - DNA, 22 bp, Artificial sequence
  SiRNA target sequence
ttttttatgaattttaaaggta

SEQ ID NO: 131515 - DNA, 22 bp, Artificial sequence
  SiRNA target sequence
tttttatgaattttaaaggtaa

SEQ ID NO: 131516 - DNA, 22 bp, Artificial sequence
  SiRNA target sequence
ttttatgaattttaaaggtaaa

SEQ ID NO: 131517 - DNA, 22 bp, Artificial sequence
  SiRNA target sequence
tttatgaattttaaaggtaaaa

SEQ ID NO: 131518 - DNA, 22 bp, Artificial sequence
  SiRNA target sequence
ttatgaattttaaaggtaaaac

SEQ ID NO: 131519 - DNA, 22 bp, Artificial sequence
  SiRNA target sequence
tatgaattttaaaggtaaaaca

SEQ ID NO: 131520 - DNA, 22 bp, Artificial sequence
  SiRNA target sequence
atgaattttaaaggtaaaacat

SEQ ID NO: 131521 - DNA, 22 bp, Artificial sequence
  SiRNA target sequence
tgaattttaaaggtaaaacatt

SEQ ID NO: 131522 - DNA, 22 bp, Artificial sequence
  SiRNA target sequence
gaattttaaaggtaaaacattg

SEQ ID NO: 131523 - DNA, 22 bp, Artificial sequence
  SiRNA target sequence
aattttaaaggtaaaacattga

SEQ ID NO: 131524 - DNA, 22 bp, Artificial sequence
  SiRNA target sequence
attttaaaggtaaaacattgat

SEQ ID NO: 131525 - DNA, 22 bp, Artificial sequence
  SiRNA target sequence
ttttaaaggtaaaacattgatt

SEQ ID NO: 131526 - DNA, 22 bp, Artificial sequence
  SiRNA target sequence
tttaaaggtaaaacattgattg

SEQ ID NO: 131527 - DNA, 22 bp, Artificial sequence
  SiRNA target sequence
ttaaaggtaaaacattgattgg

SEQ ID NO: 131528 - DNA, 22 bp, Artificial sequence
  SiRNA target sequence
taaaggtaaaacattgattgga

SEQ ID NO: 131529 - DNA, 22 bp, Artificial sequence
  SiRNA target sequence
aaaggtaaaacattgattggag

SEQ ID NO: 131530 - DNA, 22 bp, Artificial sequence
  SiRNA target sequence
aaggtaaaacattgattggagg

SEQ ID NO: 131531 - DNA, 22 bp, Artificial sequence
  SiRNA target sequence
aggtaaaacattgattggagga

SEQ ID NO: 131532 - DNA, 22 bp, Artificial sequence
  SiRNA target sequence
ggtaaaacattgattggaggaa

SEQ ID NO: 131533 - DNA, 22 bp, Artificial sequence
  SiRNA target sequence
gtaaaacattgattggaggaac

SEQ ID NO: 131534 - DNA, 22 bp, Artificial sequence
  SiRNA target sequence
taaaacattgattggaggaaca

SEQ ID NO: 131535 - DNA, 22 bp, Artificial sequence
  SiRNA target sequence
aaaacattgattggaggaacag

SEQ ID NO: 131536 - DNA, 22 bp, Artificial sequence
  SiRNA target sequence
aaacattgattggaggaacaga

SEQ ID NO: 131537 - DNA, 22 bp, Artificial sequence
  SiRNA target sequence
aacattgattggaggaacagat

SEQ ID NO: 131538 - DNA, 22 bp, Artificial sequence
  SiRNA target sequence
acattgattggaggaacagatg

SEQ ID NO: 131539 - DNA, 22 bp, Artificial sequence
  SiRNA target sequence
cattgattggaggaacagatgt

SEQ ID NO: 131540 - DNA, 22 bp, Artificial sequence
  SiRNA target sequence
attgattggaggaacagatgtt

SEQ ID NO: 131541 - DNA, 22 bp, Artificial sequence
  SiRNA target sequence
ttgattggaggaacagatgtta

SEQ ID NO: 131542 - DNA, 22 bp, Artificial sequence
  SiRNA target sequence
tgattggaggaacagatgttaa

SEQ ID NO: 131543 - DNA, 22 bp, Artificial sequence
  SiRNA target sequence
gattggaggaacagatgttaag

SEQ ID NO: 131544 - DNA, 22 bp, Artificial sequence
  SiRNA target sequence
attggaggaacagatgttaagt

SEQ ID NO: 131545 - DNA, 22 bp, Artificial sequence
  SiRNA target sequence
ttggaggaacagatgttaagtg

SEQ ID NO: 131546 - DNA, 22 bp, Artificial sequence
  SiRNA target sequence
tggaggaacagatgttaagtgt

SEQ ID NO: 131547 - DNA, 22 bp, Artificial sequence
  SiRNA target sequence
ggaggaacagatgttaagtgta

SEQ ID NO: 131548 - DNA, 22 bp, Artificial sequence
  SiRNA target sequence
gaggaacagatgttaagtgtaa

SEQ ID NO: 131549 - DNA, 22 bp, Artificial sequence
  SiRNA target sequence
aggaacagatgttaagtgtaaa

SEQ ID NO: 131550 - DNA, 22 bp, Artificial sequence
  SiRNA target sequence
ggaacagatgttaagtgtaaag

SEQ ID NO: 131551 - DNA, 22 bp, Artificial sequence
  SiRNA target sequence
gaacagatgttaagtgtaaagt

SEQ ID NO: 131552 - DNA, 22 bp, Artificial sequence
  SiRNA target sequence
aacagatgttaagtgtaaagtt

SEQ ID NO: 131553 - DNA, 22 bp, Artificial sequence
  SiRNA target sequence
acagatgttaagtgtaaagttg

SEQ ID NO: 131554 - DNA, 22 bp, Artificial sequence
  SiRNA target sequence
cagatgttaagtgtaaagttga

SEQ ID NO: 131555 - DNA, 22 bp, Artificial sequence
  SiRNA target sequence
agatgttaagtgtaaagttgaa

SEQ ID NO: 131556 - DNA, 22 bp, Artificial sequence
  SiRNA target sequence
gatgttaagtgtaaagttgaag

SEQ ID NO: 131557 - DNA, 22 bp, Artificial sequence
  SiRNA target sequence
atgttaagtgtaaagttgaaga

SEQ ID NO: 131558 - DNA, 22 bp, Artificial sequence
  SiRNA target sequence
tgttaagtgtaaagttgaagat

SEQ ID NO: 131559 - DNA, 22 bp, Artificial sequence
  SiRNA target sequence
gttaagtgtaaagttgaagatt

SEQ ID NO: 131560 - DNA, 22 bp, Artificial sequence
  SiRNA target sequence
ttaagtgtaaagttgaagattt

SEQ ID NO: 131561 - DNA, 22 bp, Artificial sequence
  SiRNA target sequence
taagtgtaaagttgaagattta

SEQ ID NO: 131562 - DNA, 22 bp, Artificial sequence
  SiRNA target sequence
aagtgtaaagttgaagatttaa

SEQ ID NO: 131563 - DNA, 22 bp, Artificial sequence
  SiRNA target sequence
agtgtaaagttgaagatttaat

SEQ ID NO: 131564 - DNA, 22 bp, Artificial sequence
  SiRNA target sequence
gtgtaaagttgaagatttaata

SEQ ID NO: 131565 - DNA, 22 bp, Artificial sequence
  SiRNA target sequence
tgtaaagttgaagatttaataa

SEQ ID NO: 131566 - DNA, 22 bp, Artificial sequence
  SiRNA target sequence
gtaaagttgaagatttaataaa

SEQ ID NO: 131567 - DNA, 22 bp, Artificial sequence
  SiRNA target sequence
taaagttgaagatttaataaaa

SEQ ID NO: 131568 - DNA, 22 bp, Artificial sequence
  SiRNA target sequence
aaagttgaagatttaataaaac

SEQ ID NO: 131569 - DNA, 22 bp, Artificial sequence
  SiRNA target sequence
aagttgaagatttaataaaacc

SEQ ID NO: 131570 - DNA, 22 bp, Artificial sequence
  SiRNA target sequence
agttgaagatttaataaaaccg

SEQ ID NO: 131571 - DNA, 22 bp, Artificial sequence
  SiRNA target sequence
gttgaagatttaataaaaccga

SEQ ID NO: 131572 - DNA, 22 bp, Artificial sequence
  SiRNA target sequence
ttgaagatttaataaaaccgac

SEQ ID NO: 131573 - DNA, 22 bp, Artificial sequence
  SiRNA target sequence
tgaagatttaataaaaccgact

SEQ ID NO: 131574 - DNA, 22 bp, Artificial sequence
  SiRNA target sequence
gaagatttaataaaaccgactg

SEQ ID NO: 131575 - DNA, 22 bp, Artificial sequence
  SiRNA target sequence
aagatttaataaaaccgactga

SEQ ID NO: 131576 - DNA, 22 bp, Artificial sequence
  SiRNA target sequence
agatttaataaaaccgactgaa

SEQ ID NO: 131577 - DNA, 22 bp, Artificial sequence
  SiRNA target sequence
gatttaataaaaccgactgaag

SEQ ID NO: 131578 - DNA, 22 bp, Artificial sequence
  SiRNA target sequence
atttaataaaaccgactgaaga

SEQ ID NO: 131579 - DNA, 22 bp, Artificial sequence
  SiRNA target sequence
tttaataaaaccgactgaagaa

SEQ ID NO: 131580 - DNA, 22 bp, Artificial sequence
  SiRNA target sequence
ttaataaaaccgactgaagaag

SEQ ID NO: 131581 - DNA, 22 bp, Artificial sequence
  SiRNA target sequence
taataaaaccgactgaagaaga

SEQ ID NO: 131582 - DNA, 22 bp, Artificial sequence
  SiRNA target sequence
aataaaaccgactgaagaagat

SEQ ID NO: 131583 - DNA, 22 bp, Artificial sequence
  SiRNA target sequence
ataaaaccgactgaagaagatc

SEQ ID NO: 131584 - DNA, 22 bp, Artificial sequence
  SiRNA target sequence
taaaaccgactgaagaagatct

SEQ ID NO: 131585 - DNA, 22 bp, Artificial sequence
  SiRNA target sequence
aaaaccgactgaagaagatcta

SEQ ID NO: 131586 - DNA, 22 bp, Artificial sequence
  SiRNA target sequence
aaaccgactgaagaagatctaa

SEQ ID NO: 131587 - DNA, 22 bp, Artificial sequence
  SiRNA target sequence
aaccgactgaagaagatctaaa

SEQ ID NO: 131588 - DNA, 22 bp, Artificial sequence
  SiRNA target sequence
accgactgaagaagatctaaac

SEQ ID NO: 131589 - DNA, 22 bp, Artificial sequence
  SiRNA target sequence
ccgactgaagaagatctaaact

SEQ ID NO: 131590 - DNA, 22 bp, Artificial sequence
  SiRNA target sequence
cgactgaagaagatctaaactt

SEQ ID NO: 131591 - DNA, 22 bp, Artificial sequence
  SiRNA target sequence
gactgaagaagatctaaacttt

SEQ ID NO: 131592 - DNA, 22 bp, Artificial sequence
  SiRNA target sequence
actgaagaagatctaaactttc

SEQ ID NO: 131593 - DNA, 22 bp, Artificial sequence
  SiRNA target sequence
ctgaagaagatctaaactttct

SEQ ID NO: 131594 - DNA, 22 bp, Artificial sequence
  SiRNA target sequence
tgaagaagatctaaactttctt

SEQ ID NO: 131595 - DNA, 22 bp, Artificial sequence
  SiRNA target sequence
gaagaagatctaaactttctta

SEQ ID NO: 131596 - DNA, 22 bp, Artificial sequence
  SiRNA target sequence
aagaagatctaaactttcttat

SEQ ID NO: 131597 - DNA, 22 bp, Artificial sequence
  SiRNA target sequence
agaagatctaaactttcttatt

SEQ ID NO: 131598 - DNA, 22 bp, Artificial sequence
  SiRNA target sequence
gaagatctaaactttcttattc

SEQ ID NO: 131599 - DNA, 22 bp, Artificial sequence
  SiRNA target sequence
aagatctaaactttcttattca

SEQ ID NO: 131600 - DNA, 22 bp, Artificial sequence
  SiRNA target sequence
agatctaaactttcttattcac

SEQ ID NO: 131601 - DNA, 22 bp, Artificial sequence
  SiRNA target sequence
gatctaaactttcttattcacg

SEQ ID NO: 131602 - DNA, 22 bp, Artificial sequence
  SiRNA target sequence
atctaaactttcttattcacga

SEQ ID NO: 131603 - DNA, 22 bp, Artificial sequence
  SiRNA target sequence
tctaaactttcttattcacgag

SEQ ID NO: 131604 - DNA, 22 bp, Artificial sequence
  SiRNA target sequence
ctaaactttcttattcacgagg

SEQ ID NO: 131605 - DNA, 22 bp, Artificial sequence
  SiRNA target sequence
taaactttcttattcacgaggc

SEQ ID NO: 131606 - DNA, 22 bp, Artificial sequence
  SiRNA target sequence
aaactttcttattcacgaggcc

SEQ ID NO: 131607 - DNA, 22 bp, Artificial sequence
  SiRNA target sequence
aactttcttattcacgaggcca

SEQ ID NO: 131608 - DNA, 22 bp, Artificial sequence
  SiRNA target sequence
actttcttattcacgaggccaa

SEQ ID NO: 131609 - DNA, 22 bp, Artificial sequence
  SiRNA target sequence
ctttcttattcacgaggccaat

SEQ ID NO: 131610 - DNA, 22 bp, Artificial sequence
  SiRNA target sequence
tttcttattcacgaggccaatt

SEQ ID NO: 131611 - DNA, 22 bp, Artificial sequence
  SiRNA target sequence
ttcttattcacgaggccaatta

SEQ ID NO: 131612 - DNA, 22 bp, Artificial sequence
  SiRNA target sequence
tcttattcacgaggccaattat

SEQ ID NO: 131613 - DNA, 22 bp, Artificial sequence
  SiRNA target sequence
cttattcacgaggccaattatt

SEQ ID NO: 131614 - DNA, 22 bp, Artificial sequence
  SiRNA target sequence
ttattcacgaggccaattattt

SEQ ID NO: 131615 - DNA, 22 bp, Artificial sequence
  SiRNA target sequence
tattcacgaggccaattatttt

SEQ ID NO: 131616 - DNA, 22 bp, Artificial sequence
  SiRNA target sequence
attcacgaggccaattatttta

SEQ ID NO: 131617 - DNA, 22 bp, Artificial sequence
  SiRNA target sequence
ttcacgaggccaattattttac

SEQ ID NO: 131618 - DNA, 22 bp, Artificial sequence
  SiRNA target sequence
tcacgaggccaattattttaca

SEQ ID NO: 131619 - DNA, 22 bp, Artificial sequence
  SiRNA target sequence
cacgaggccaattattttacag

SEQ ID NO: 131620 - DNA, 22 bp, Artificial sequence
  SiRNA target sequence
acgaggccaattattttacaga

SEQ ID NO: 131621 - DNA, 22 bp, Artificial sequence
  SiRNA target sequence
cgaggccaattattttacagat

SEQ ID NO: 131622 - DNA, 22 bp, Artificial sequence
  SiRNA target sequence
gaggccaattattttacagatc

SEQ ID NO: 131623 - DNA, 22 bp, Artificial sequence
  SiRNA target sequence
aggccaattattttacagatca

SEQ ID NO: 131624 - DNA, 22 bp, Artificial sequence
  SiRNA target sequence
ggccaattattttacagatcac

SEQ ID NO: 131625 - DNA, 22 bp, Artificial sequence
  SiRNA target sequence
gccaattattttacagatcaca

SEQ ID NO: 131626 - DNA, 22 bp, Artificial sequence
  SiRNA target sequence
ccaattattttacagatcacaa

SEQ ID NO: 131627 - DNA, 22 bp, Artificial sequence
  SiRNA target sequence
caattattttacagatcacaat

SEQ ID NO: 131628 - DNA, 22 bp, Artificial sequence
  SiRNA target sequence
aattattttacagatcacaatt

SEQ ID NO: 131629 - DNA, 22 bp, Artificial sequence
  SiRNA target sequence
attattttacagatcacaattt

SEQ ID NO: 131630 - DNA, 22 bp, Artificial sequence
  SiRNA target sequence
ttattttacagatcacaattta

SEQ ID NO: 131631 - DNA, 22 bp, Artificial sequence
  SiRNA target sequence
tattttacagatcacaatttaa

SEQ ID NO: 131632 - DNA, 22 bp, Artificial sequence
  SiRNA target sequence
attttacagatcacaatttaaa

SEQ ID NO: 131633 - DNA, 22 bp, Artificial sequence
  SiRNA target sequence
ttttacagatcacaatttaaaa

SEQ ID NO: 131634 - DNA, 22 bp, Artificial sequence
  SiRNA target sequence
tttacagatcacaatttaaaat

SEQ ID NO: 131635 - DNA, 22 bp, Artificial sequence
  SiRNA target sequence
ttacagatcacaatttaaaatt

SEQ ID NO: 131636 - DNA, 22 bp, Artificial sequence
  SiRNA target sequence
tacagatcacaatttaaaatta

SEQ ID NO: 131637 - DNA, 22 bp, Artificial sequence
  SiRNA target sequence
acagatcacaatttaaaattaa

SEQ ID NO: 131638 - DNA, 22 bp, Artificial sequence
  SiRNA target sequence
cagatcacaatttaaaattaac

SEQ ID NO: 131639 - DNA, 22 bp, Artificial sequence
  SiRNA target sequence
agatcacaatttaaaattaaca

SEQ ID NO: 131640 - DNA, 22 bp, Artificial sequence
  SiRNA target sequence
gatcacaatttaaaattaacaa

SEQ ID NO: 131641 - DNA, 22 bp, Artificial sequence
  SiRNA target sequence
atcacaatttaaaattaacaaa

SEQ ID NO: 131642 - DNA, 22 bp, Artificial sequence
  SiRNA target sequence
tcacaatttaaaattaacaaaa

SEQ ID NO: 131643 - DNA, 22 bp, Artificial sequence
  SiRNA target sequence
cacaatttaaaattaacaaaaa

SEQ ID NO: 131644 - DNA, 22 bp, Artificial sequence
  SiRNA target sequence
acaatttaaaattaacaaaaaa

SEQ ID NO: 131645 - DNA, 22 bp, Artificial sequence
  SiRNA target sequence
caatttaaaattaacaaaaaaa

SEQ ID NO: 131646 - DNA, 22 bp, Artificial sequence
  SiRNA target sequence
aatttaaaattaacaaaaaaag

SEQ ID NO: 131647 - DNA, 22 bp, Artificial sequence
  SiRNA target sequence
atttaaaattaacaaaaaaaga

SEQ ID NO: 131648 - DNA, 22 bp, Artificial sequence
  SiRNA target sequence
tttaaaattaacaaaaaaagat

SEQ ID NO: 131649 - DNA, 22 bp, Artificial sequence
  SiRNA target sequence
ttaaaattaacaaaaaaagatg

SEQ ID NO: 131650 - DNA, 22 bp, Artificial sequence
  SiRNA target sequence
taaaattaacaaaaaaagatgt

SEQ ID NO: 131651 - DNA, 22 bp, Artificial sequence
  SiRNA target sequence
aaaattaacaaaaaaagatgtt

SEQ ID NO: 131652 - DNA, 22 bp, Artificial sequence
  SiRNA target sequence
aaattaacaaaaaaagatgttt

SEQ ID NO: 131653 - DNA, 22 bp, Artificial sequence
  SiRNA target sequence
aattaacaaaaaaagatgtttt

SEQ ID NO: 131654 - DNA, 22 bp, Artificial sequence
  SiRNA target sequence
attaacaaaaaaagatgttttg

SEQ ID NO: 131655 - DNA, 22 bp, Artificial sequence
  SiRNA target sequence
ttaacaaaaaaagatgttttgt

SEQ ID NO: 131656 - DNA, 22 bp, Artificial sequence
  SiRNA target sequence
taacaaaaaaagatgttttgtc

SEQ ID NO: 131657 - DNA, 22 bp, Artificial sequence
  SiRNA target sequence
aacaaaaaaagatgttttgtct

SEQ ID NO: 131658 - DNA, 22 bp, Artificial sequence
  SiRNA target sequence
acaaaaaaagatgttttgtctg

SEQ ID NO: 131659 - DNA, 22 bp, Artificial sequence
  SiRNA target sequence
caaaaaaagatgttttgtctgt

SEQ ID NO: 131660 - DNA, 22 bp, Artificial sequence
  SiRNA target sequence
aaaaaaagatgttttgtctgtt

SEQ ID NO: 131661 - DNA, 22 bp, Artificial sequence
  SiRNA target sequence
aaaaaagatgttttgtctgttt

SEQ ID NO: 131662 - DNA, 22 bp, Artificial sequence
  SiRNA target sequence
aaaaagatgttttgtctgtttg

SEQ ID NO: 131663 - DNA, 22 bp, Artificial sequence
  SiRNA target sequence
aaaagatgttttgtctgtttgg

SEQ ID NO: 131664 - DNA, 22 bp, Artificial sequence
  SiRNA target sequence
aaagatgttttgtctgtttgga

SEQ ID NO: 131665 - DNA, 22 bp, Artificial sequence
  SiRNA target sequence
aagatgttttgtctgtttggac

SEQ ID NO: 131666 - DNA, 22 bp, Artificial sequence
  SiRNA target sequence
agatgttttgtctgtttggaca

SEQ ID NO: 131667 - DNA, 22 bp, Artificial sequence
  SiRNA target sequence
gatgttttgtctgtttggacag

SEQ ID NO: 131668 - DNA, 22 bp, Artificial sequence
  SiRNA target sequence
atgttttgtctgtttggacagg

SEQ ID NO: 131669 - DNA, 22 bp, Artificial sequence
  SiRNA target sequence
tgttttgtctgtttggacaggt

SEQ ID NO: 131670 - DNA, 22 bp, Artificial sequence
  SiRNA target sequence
gttttgtctgtttggacaggta

SEQ ID NO: 131671 - DNA, 22 bp, Artificial sequence
  SiRNA target sequence
ttttgtctgtttggacaggtat

SEQ ID NO: 131672 - DNA, 22 bp, Artificial sequence
  SiRNA target sequence
tttgtctgtttggacaggtatt

SEQ ID NO: 131673 - DNA, 22 bp, Artificial sequence
  SiRNA target sequence
ttgtctgtttggacaggtatta

SEQ ID NO: 131674 - DNA, 22 bp, Artificial sequence
  SiRNA target sequence
tgtctgtttggacaggtattag

SEQ ID NO: 131675 - DNA, 22 bp, Artificial sequence
  SiRNA target sequence
gtctgtttggacaggtattaga

SEQ ID NO: 131676 - DNA, 22 bp, Artificial sequence
  SiRNA target sequence
tctgtttggacaggtattagac

SEQ ID NO: 131677 - DNA, 22 bp, Artificial sequence
  SiRNA target sequence
ctgtttggacaggtattagacc

SEQ ID NO: 131678 - DNA, 22 bp, Artificial sequence
  SiRNA target sequence
tgtttggacaggtattagaccg

SEQ ID NO: 131679 - DNA, 22 bp, Artificial sequence
  SiRNA target sequence
gtttggacaggtattagaccgt

SEQ ID NO: 131680 - DNA, 22 bp, Artificial sequence
  SiRNA target sequence
tttggacaggtattagaccgtt

SEQ ID NO: 131681 - DNA, 22 bp, Artificial sequence
  SiRNA target sequence
ttggacaggtattagaccgtta

SEQ ID NO: 131682 - DNA, 22 bp, Artificial sequence
  SiRNA target sequence
tggacaggtattagaccgttag

SEQ ID NO: 131683 - DNA, 22 bp, Artificial sequence
  SiRNA target sequence
ggacaggtattagaccgttagt

SEQ ID NO: 131684 - DNA, 22 bp, Artificial sequence
  SiRNA target sequence
gacaggtattagaccgttagtc

SEQ ID NO: 131685 - DNA, 22 bp, Artificial sequence
  SiRNA target sequence
acaggtattagaccgttagtca

SEQ ID NO: 131686 - DNA, 22 bp, Artificial sequence
  SiRNA target sequence
caggtattagaccgttagtcaa

SEQ ID NO: 131687 - DNA, 22 bp, Artificial sequence
  SiRNA target sequence
aggtattagaccgttagtcaag

SEQ ID NO: 131688 - DNA, 22 bp, Artificial sequence
  SiRNA target sequence
ggtattagaccgttagtcaagg

SEQ ID NO: 131689 - DNA, 22 bp, Artificial sequence
  SiRNA target sequence
gtattagaccgttagtcaagga

SEQ ID NO: 131690 - DNA, 22 bp, Artificial sequence
  SiRNA target sequence
tattagaccgttagtcaaggat

SEQ ID NO: 131691 - DNA, 22 bp, Artificial sequence
  SiRNA target sequence
attagaccgttagtcaaggatt

SEQ ID NO: 131692 - DNA, 22 bp, Artificial sequence
  SiRNA target sequence
ttagaccgttagtcaaggattt

SEQ ID NO: 131693 - DNA, 22 bp, Artificial sequence
  SiRNA target sequence
tagaccgttagtcaaggattta

SEQ ID NO: 131694 - DNA, 22 bp, Artificial sequence
  SiRNA target sequence
agaccgttagtcaaggatttat

SEQ ID NO: 131695 - DNA, 22 bp, Artificial sequence
  SiRNA target sequence
gaccgttagtcaaggatttatc

SEQ ID NO: 131696 - DNA, 22 bp, Artificial sequence
  SiRNA target sequence
accgttagtcaaggatttatcg

SEQ ID NO: 131697 - DNA, 22 bp, Artificial sequence
  SiRNA target sequence
ccgttagtcaaggatttatcga

SEQ ID NO: 131698 - DNA, 22 bp, Artificial sequence
  SiRNA target sequence
cgttagtcaaggatttatcgaa

SEQ ID NO: 131699 - DNA, 22 bp, Artificial sequence
  SiRNA target sequence
gttagtcaaggatttatcgaaa

SEQ ID NO: 131700 - DNA, 22 bp, Artificial sequence
  SiRNA target sequence
ttagtcaaggatttatcgaaaa

SEQ ID NO: 131701 - DNA, 22 bp, Artificial sequence
  SiRNA target sequence
tagtcaaggatttatcgaaaag

SEQ ID NO: 131702 - DNA, 22 bp, Artificial sequence
  SiRNA target sequence
agtcaaggatttatcgaaaagt

SEQ ID NO: 131703 - DNA, 22 bp, Artificial sequence
  SiRNA target sequence
gtcaaggatttatcgaaaagtt

SEQ ID NO: 131704 - DNA, 22 bp, Artificial sequence
  SiRNA target sequence
tcaaggatttatcgaaaagttc

SEQ ID NO: 131705 - DNA, 22 bp, Artificial sequence
  SiRNA target sequence
caaggatttatcgaaaagttca

SEQ ID NO: 131706 - DNA, 22 bp, Artificial sequence
  SiRNA target sequence
aaggatttatcgaaaagttcaa

SEQ ID NO: 131707 - DNA, 22 bp, Artificial sequence
  SiRNA target sequence
aggatttatcgaaaagttcaac

SEQ ID NO: 131708 - DNA, 22 bp, Artificial sequence
  SiRNA target sequence
ggatttatcgaaaagttcaaca

SEQ ID NO: 131709 - DNA, 22 bp, Artificial sequence
  SiRNA target sequence
gatttatcgaaaagttcaacag

SEQ ID NO: 131710 - DNA, 22 bp, Artificial sequence
  SiRNA target sequence
atttatcgaaaagttcaacaga

SEQ ID NO: 131711 - DNA, 22 bp, Artificial sequence
  SiRNA target sequence
tttatcgaaaagttcaacagaa

SEQ ID NO: 131712 - DNA, 22 bp, Artificial sequence
  SiRNA target sequence
ttatcgaaaagttcaacagaaa

SEQ ID NO: 131713 - DNA, 22 bp, Artificial sequence
  SiRNA target sequence
tatcgaaaagttcaacagaaaa

SEQ ID NO: 131714 - DNA, 22 bp, Artificial sequence
  SiRNA target sequence
atcgaaaagttcaacagaaaag

SEQ ID NO: 131715 - DNA, 22 bp, Artificial sequence
  SiRNA target sequence
tcgaaaagttcaacagaaaaga

SEQ ID NO: 131716 - DNA, 22 bp, Artificial sequence
  SiRNA target sequence
cgaaaagttcaacagaaaagat

SEQ ID NO: 131717 - DNA, 22 bp, Artificial sequence
  SiRNA target sequence
gaaaagttcaacagaaaagata

SEQ ID NO: 131718 - DNA, 22 bp, Artificial sequence
  SiRNA target sequence
aaaagttcaacagaaaagatat

SEQ ID NO: 131719 - DNA, 22 bp, Artificial sequence
  SiRNA target sequence
aaagttcaacagaaaagatatg

SEQ ID NO: 131720 - DNA, 22 bp, Artificial sequence
  SiRNA target sequence
aagttcaacagaaaagatatgt

SEQ ID NO: 131721 - DNA, 22 bp, Artificial sequence
  SiRNA target sequence
agttcaacagaaaagatatgta

SEQ ID NO: 131722 - DNA, 22 bp, Artificial sequence
  SiRNA target sequence
gttcaacagaaaagatatgtag

SEQ ID NO: 131723 - DNA, 22 bp, Artificial sequence
  SiRNA target sequence
ttcaacagaaaagatatgtaga

SEQ ID NO: 131724 - DNA, 22 bp, Artificial sequence
  SiRNA target sequence
tcaacagaaaagatatgtagaa

SEQ ID NO: 131725 - DNA, 22 bp, Artificial sequence
  SiRNA target sequence
caacagaaaagatatgtagaaa

SEQ ID NO: 131726 - DNA, 22 bp, Artificial sequence
  SiRNA target sequence
aacagaaaagatatgtagaaaa

SEQ ID NO: 131727 - DNA, 22 bp, Artificial sequence
  SiRNA target sequence
acagaaaagatatgtagaaaac

SEQ ID NO: 131728 - DNA, 22 bp, Artificial sequence
  SiRNA target sequence
cagaaaagatatgtagaaaaca

SEQ ID NO: 131729 - DNA, 22 bp, Artificial sequence
  SiRNA target sequence
agaaaagatatgtagaaaacat

SEQ ID NO: 131730 - DNA, 22 bp, Artificial sequence
  SiRNA target sequence
gaaaagatatgtagaaaacata

SEQ ID NO: 131731 - DNA, 22 bp, Artificial sequence
  SiRNA target sequence
aaaagatatgtagaaaacatac

SEQ ID NO: 131732 - DNA, 22 bp, Artificial sequence
  SiRNA target sequence
aaagatatgtagaaaacatact

SEQ ID NO: 131733 - DNA, 22 bp, Artificial sequence
  SiRNA target sequence
aagatatgtagaaaacatacta

SEQ ID NO: 131734 - DNA, 22 bp, Artificial sequence
  SiRNA target sequence
agatatgtagaaaacatactat

SEQ ID NO: 131735 - DNA, 22 bp, Artificial sequence
  SiRNA target sequence
gatatgtagaaaacatactata

SEQ ID NO: 131736 - DNA, 22 bp, Artificial sequence
  SiRNA target sequence
atatgtagaaaacatactataa

SEQ ID NO: 131737 - DNA, 22 bp, Artificial sequence
  SiRNA target sequence
tatgtagaaaacatactataag

SEQ ID NO: 131738 - DNA, 22 bp, Artificial sequence
  SiRNA target sequence
atgtagaaaacatactataaga

SEQ ID NO: 131739 - DNA, 22 bp, Artificial sequence
  SiRNA target sequence
tgtagaaaacatactataagaa

SEQ ID NO: 131740 - DNA, 22 bp, Artificial sequence
  SiRNA target sequence
gtagaaaacatactataagaat

SEQ ID NO: 131741 - DNA, 22 bp, Artificial sequence
  SiRNA target sequence
tagaaaacatactataagaata

SEQ ID NO: 131742 - DNA, 22 bp, Artificial sequence
  SiRNA target sequence
agaaaacatactataagaatag

SEQ ID NO: 131743 - DNA, 22 bp, Artificial sequence
  SiRNA target sequence
gaaaacatactataagaataga

SEQ ID NO: 131744 - DNA, 22 bp, Artificial sequence
  SiRNA target sequence
aaaacatactataagaatagat

SEQ ID NO: 131745 - DNA, 22 bp, Artificial sequence
  SiRNA target sequence
aaacatactataagaatagata

SEQ ID NO: 131746 - DNA, 22 bp, Artificial sequence
  SiRNA target sequence
aacatactataagaatagataa

SEQ ID NO: 131747 - DNA, 22 bp, Artificial sequence
  SiRNA target sequence
acatactataagaatagataaa

SEQ ID NO: 131748 - DNA, 22 bp, Artificial sequence
  SiRNA target sequence
catactataagaatagataaag

SEQ ID NO: 131749 - DNA, 22 bp, Artificial sequence
  SiRNA target sequence
atactataagaatagataaaga

SEQ ID NO: 131750 - DNA, 22 bp, Artificial sequence
  SiRNA target sequence
tactataagaatagataaagac

SEQ ID NO: 131751 - DNA, 22 bp, Artificial sequence
  SiRNA target sequence
actataagaatagataaagaca

SEQ ID NO: 131752 - DNA, 22 bp, Artificial sequence
  SiRNA target sequence
ctataagaatagataaagacaa

SEQ ID NO: 131753 - DNA, 22 bp, Artificial sequence
  SiRNA target sequence
tataagaatagataaagacaat

SEQ ID NO: 131754 - DNA, 22 bp, Artificial sequence
  SiRNA target sequence
ataagaatagataaagacaata

SEQ ID NO: 131755 - DNA, 22 bp, Artificial sequence
  SiRNA target sequence
taagaatagataaagacaatat

SEQ ID NO: 131756 - DNA, 22 bp, Artificial sequence
  SiRNA target sequence
aagaatagataaagacaatatg

SEQ ID NO: 131757 - DNA, 22 bp, Artificial sequence
  SiRNA target sequence
agaatagataaagacaatatgg

SEQ ID NO: 131758 - DNA, 22 bp, Artificial sequence
  SiRNA target sequence
gaatagataaagacaatatggt

SEQ ID NO: 131759 - DNA, 22 bp, Artificial sequence
  SiRNA target sequence
aatagataaagacaatatggta

SEQ ID NO: 131760 - DNA, 22 bp, Artificial sequence
  SiRNA target sequence
atagataaagacaatatggtaa

SEQ ID NO: 131761 - DNA, 22 bp, Artificial sequence
  SiRNA target sequence
tagataaagacaatatggtaac

SEQ ID NO: 131762 - DNA, 22 bp, Artificial sequence
  SiRNA target sequence
agataaagacaatatggtaact

SEQ ID NO: 131763 - DNA, 22 bp, Artificial sequence
  SiRNA target sequence
gataaagacaatatggtaactg

SEQ ID NO: 131764 - DNA, 22 bp, Artificial sequence
  SiRNA target sequence
ataaagacaatatggtaactgt

SEQ ID NO: 131765 - DNA, 22 bp, Artificial sequence
  SiRNA target sequence
taaagacaatatggtaactgta

SEQ ID NO: 131766 - DNA, 22 bp, Artificial sequence
  SiRNA target sequence
aaagacaatatggtaactgtaa

SEQ ID NO: 131767 - DNA, 22 bp, Artificial sequence
  SiRNA target sequence
aagacaatatggtaactgtaac

SEQ ID NO: 131768 - DNA, 22 bp, Artificial sequence
  SiRNA target sequence
agacaatatggtaactgtaaca

SEQ ID NO: 131769 - DNA, 22 bp, Artificial sequence
  SiRNA target sequence
gacaatatggtaactgtaacag

SEQ ID NO: 131770 - DNA, 22 bp, Artificial sequence
  SiRNA target sequence
acaatatggtaactgtaacagg

SEQ ID NO: 131771 - DNA, 22 bp, Artificial sequence
  SiRNA target sequence
caatatggtaactgtaacaggt

SEQ ID NO: 131772 - DNA, 22 bp, Artificial sequence
  SiRNA target sequence
aatatggtaactgtaacaggtg

SEQ ID NO: 131773 - DNA, 22 bp, Artificial sequence
  SiRNA target sequence
atatggtaactgtaacaggtgg

SEQ ID NO: 131774 - DNA, 22 bp, Artificial sequence
  SiRNA target sequence
tatggtaactgtaacaggtggt

SEQ ID NO: 131775 - DNA, 22 bp, Artificial sequence
  SiRNA target sequence
atggtaactgtaacaggtggta

SEQ ID NO: 131776 - DNA, 22 bp, Artificial sequence
  SiRNA target sequence
tggtaactgtaacaggtggtaa

SEQ ID NO: 131777 - DNA, 22 bp, Artificial sequence
  SiRNA target sequence
ggtaactgtaacaggtggtaag

SEQ ID NO: 131778 - DNA, 22 bp, Artificial sequence
  SiRNA target sequence
gtaactgtaacaggtggtaagt

SEQ ID NO: 131779 - DNA, 22 bp, Artificial sequence
  SiRNA target sequence
taactgtaacaggtggtaagtg

SEQ ID NO: 131780 - DNA, 22 bp, Artificial sequence
  SiRNA target sequence
aactgtaacaggtggtaagtgg

SEQ ID NO: 131781 - DNA, 22 bp, Artificial sequence
  SiRNA target sequence
actgtaacaggtggtaagtgga

SEQ ID NO: 131782 - DNA, 22 bp, Artificial sequence
  SiRNA target sequence
ctgtaacaggtggtaagtggac

SEQ ID NO: 131783 - DNA, 22 bp, Artificial sequence
  SiRNA target sequence
tgtaacaggtggtaagtggaca

SEQ ID NO: 131784 - DNA, 22 bp, Artificial sequence
  SiRNA target sequence
gtaacaggtggtaagtggacaa

SEQ ID NO: 131785 - DNA, 22 bp, Artificial sequence
  SiRNA target sequence
taacaggtggtaagtggacaat

SEQ ID NO: 131786 - DNA, 22 bp, Artificial sequence
  SiRNA target sequence
aacaggtggtaagtggacaatt

SEQ ID NO: 131787 - DNA, 22 bp, Artificial sequence
  SiRNA target sequence
acaggtggtaagtggacaattt

SEQ ID NO: 131788 - DNA, 22 bp, Artificial sequence
  SiRNA target sequence
caggtggtaagtggacaatttt

SEQ ID NO: 131789 - DNA, 22 bp, Artificial sequence
  SiRNA target sequence
aggtggtaagtggacaattttt

SEQ ID NO: 131790 - DNA, 22 bp, Artificial sequence
  SiRNA target sequence
ggtggtaagtggacaatttttc

SEQ ID NO: 131791 - DNA, 22 bp, Artificial sequence
  SiRNA target sequence
gtggtaagtggacaatttttcg

SEQ ID NO: 131792 - DNA, 22 bp, Artificial sequence
  SiRNA target sequence
tggtaagtggacaatttttcga

SEQ ID NO: 131793 - DNA, 22 bp, Artificial sequence
  SiRNA target sequence
ggtaagtggacaatttttcgac

SEQ ID NO: 131794 - DNA, 22 bp, Artificial sequence
  SiRNA target sequence
gtaagtggacaatttttcgact

SEQ ID NO: 131795 - DNA, 22 bp, Artificial sequence
  SiRNA target sequence
taagtggacaatttttcgactt

SEQ ID NO: 131796 - DNA, 22 bp, Artificial sequence
  SiRNA target sequence
aagtggacaatttttcgactta

SEQ ID NO: 131797 - DNA, 22 bp, Artificial sequence
  SiRNA target sequence
agtggacaatttttcgacttat

SEQ ID NO: 131798 - DNA, 22 bp, Artificial sequence
  SiRNA target sequence
gtggacaatttttcgacttatg

SEQ ID NO: 131799 - DNA, 22 bp, Artificial sequence
  SiRNA target sequence
tggacaatttttcgacttatgg

SEQ ID NO: 131800 - DNA, 22 bp, Artificial sequence
  SiRNA target sequence
ggacaatttttcgacttatggg

SEQ ID NO: 131801 - DNA, 22 bp, Artificial sequence
  SiRNA target sequence
gacaatttttcgacttatggga

SEQ ID NO: 131802 - DNA, 22 bp, Artificial sequence
  SiRNA target sequence
acaatttttcgacttatgggag

SEQ ID NO: 131803 - DNA, 22 bp, Artificial sequence
  SiRNA target sequence
caatttttcgacttatgggaga

SEQ ID NO: 131804 - DNA, 22 bp, Artificial sequence
  SiRNA target sequence
aatttttcgacttatgggagaa

SEQ ID NO: 131805 - DNA, 22 bp, Artificial sequence
  SiRNA target sequence
atttttcgacttatgggagaac

SEQ ID NO: 131806 - DNA, 22 bp, Artificial sequence
  SiRNA target sequence
tttttcgacttatgggagaaca

SEQ ID NO: 131807 - DNA, 22 bp, Artificial sequence
  SiRNA target sequence
ttttcgacttatgggagaacag

SEQ ID NO: 131808 - DNA, 22 bp, Artificial sequence
  SiRNA target sequence
tttcgacttatgggagaacaga

SEQ ID NO: 131809 - DNA, 22 bp, Artificial sequence
  SiRNA target sequence
ttcgacttatgggagaacagac

SEQ ID NO: 131810 - DNA, 22 bp, Artificial sequence
  SiRNA target sequence
tcgacttatgggagaacagaca

SEQ ID NO: 131811 - DNA, 22 bp, Artificial sequence
  SiRNA target sequence
cgacttatgggagaacagacaa

SEQ ID NO: 131812 - DNA, 22 bp, Artificial sequence
  SiRNA target sequence
gacttatgggagaacagacaat

SEQ ID NO: 131813 - DNA, 22 bp, Artificial sequence
  SiRNA target sequence
acttatgggagaacagacaata

SEQ ID NO: 131814 - DNA, 22 bp, Artificial sequence
  SiRNA target sequence
cttatgggagaacagacaataa

SEQ ID NO: 131815 - DNA, 22 bp, Artificial sequence
  SiRNA target sequence
ttatgggagaacagacaataaa

SEQ ID NO: 131816 - DNA, 22 bp, Artificial sequence
  SiRNA target sequence
tatgggagaacagacaataaat

SEQ ID NO: 131817 - DNA, 22 bp, Artificial sequence
  SiRNA target sequence
atgggagaacagacaataaatc

SEQ ID NO: 131818 - DNA, 22 bp, Artificial sequence
  SiRNA target sequence
tgggagaacagacaataaatca

SEQ ID NO: 131819 - DNA, 22 bp, Artificial sequence
  SiRNA target sequence
gggagaacagacaataaatcaa

SEQ ID NO: 131820 - DNA, 22 bp, Artificial sequence
  SiRNA target sequence
ggagaacagacaataaatcaaa

SEQ ID NO: 131821 - DNA, 22 bp, Artificial sequence
  SiRNA target sequence
gagaacagacaataaatcaaat

SEQ ID NO: 131822 - DNA, 22 bp, Artificial sequence
  SiRNA target sequence
agaacagacaataaatcaaatt

SEQ ID NO: 131823 - DNA, 22 bp, Artificial sequence
  SiRNA target sequence
gaacagacaataaatcaaatta

SEQ ID NO: 131824 - DNA, 22 bp, Artificial sequence
  SiRNA target sequence
aacagacaataaatcaaattat

SEQ ID NO: 131825 - DNA, 22 bp, Artificial sequence
  SiRNA target sequence
acagacaataaatcaaattata

SEQ ID NO: 131826 - DNA, 22 bp, Artificial sequence
  SiRNA target sequence
cagacaataaatcaaattataa

SEQ ID NO: 131827 - DNA, 22 bp, Artificial sequence
  SiRNA target sequence
agacaataaatcaaattataaa

SEQ ID NO: 131828 - DNA, 22 bp, Artificial sequence
  SiRNA target sequence
gacaataaatcaaattataaaa

SEQ ID NO: 131829 - DNA, 22 bp, Artificial sequence
  SiRNA target sequence
acaataaatcaaattataaaag

SEQ ID NO: 131830 - DNA, 22 bp, Artificial sequence
  SiRNA target sequence
caataaatcaaattataaaagt

SEQ ID NO: 131831 - DNA, 22 bp, Artificial sequence
  SiRNA target sequence
aataaatcaaattataaaagtt

SEQ ID NO: 131832 - DNA, 22 bp, Artificial sequence
  SiRNA target sequence
ataaatcaaattataaaagttt

SEQ ID NO: 131833 - DNA, 22 bp, Artificial sequence
  SiRNA target sequence
taaatcaaattataaaagtttt

SEQ ID NO: 131834 - DNA, 22 bp, Artificial sequence
  SiRNA target sequence
aaatcaaattataaaagttttt

SEQ ID NO: 131835 - DNA, 22 bp, Artificial sequence
  SiRNA target sequence
aatcaaattataaaagttttta

SEQ ID NO: 131836 - DNA, 22 bp, Artificial sequence
  SiRNA target sequence
atcaaattataaaagtttttaa

SEQ ID NO: 131837 - DNA, 22 bp, Artificial sequence
  SiRNA target sequence
tcaaattataaaagtttttaat

SEQ ID NO: 131838 - DNA, 22 bp, Artificial sequence
  SiRNA target sequence
caaattataaaagtttttaata

SEQ ID NO: 131839 - DNA, 22 bp, Artificial sequence
  SiRNA target sequence
aaattataaaagtttttaatat

SEQ ID NO: 131840 - DNA, 22 bp, Artificial sequence
  SiRNA target sequence
aattataaaagtttttaatata

SEQ ID NO: 131841 - DNA, 22 bp, Artificial sequence
  SiRNA target sequence
attataaaagtttttaatataa

SEQ ID NO: 131842 - DNA, 22 bp, Artificial sequence
  SiRNA target sequence
ttataaaagtttttaatataaa

SEQ ID NO: 131843 - DNA, 22 bp, Artificial sequence
  SiRNA target sequence
tataaaagtttttaatataaag

SEQ ID NO: 131844 - DNA, 22 bp, Artificial sequence
  SiRNA target sequence
ataaaagtttttaatataaagt

SEQ ID NO: 131845 - DNA, 22 bp, Artificial sequence
  SiRNA target sequence
taaaagtttttaatataaagtc

SEQ ID NO: 131846 - DNA, 22 bp, Artificial sequence
  SiRNA target sequence
aaaagtttttaatataaagtct

SEQ ID NO: 131847 - DNA, 22 bp, Artificial sequence
  SiRNA target sequence
aaagtttttaatataaagtcta

SEQ ID NO: 131848 - DNA, 22 bp, Artificial sequence
  SiRNA target sequence
aagtttttaatataaagtctaa

SEQ ID NO: 131849 - DNA, 22 bp, Artificial sequence
  SiRNA target sequence
agtttttaatataaagtctaat

SEQ ID NO: 131850 - DNA, 22 bp, Artificial sequence
  SiRNA target sequence
gtttttaatataaagtctaata

SEQ ID NO: 131851 - DNA, 22 bp, Artificial sequence
  SiRNA target sequence
tttttaatataaagtctaataa

SEQ ID NO: 131852 - DNA, 22 bp, Artificial sequence
  SiRNA target sequence
ttttaatataaagtctaataaa

SEQ ID NO: 131853 - DNA, 22 bp, Artificial sequence
  SiRNA target sequence
tttaatataaagtctaataaac

SEQ ID NO: 131854 - DNA, 22 bp, Artificial sequence
  SiRNA target sequence
ttaatataaagtctaataaacc

SEQ ID NO: 131855 - DNA, 22 bp, Artificial sequence
  SiRNA target sequence
taatataaagtctaataaacca

SEQ ID NO: 131856 - DNA, 22 bp, Artificial sequence
  SiRNA target sequence
aatataaagtctaataaaccaa

SEQ ID NO: 131857 - DNA, 22 bp, Artificial sequence
  SiRNA target sequence
atataaagtctaataaaccaag

SEQ ID NO: 131858 - DNA, 22 bp, Artificial sequence
  SiRNA target sequence
tataaagtctaataaaccaagt

SEQ ID NO: 131859 - DNA, 22 bp, Artificial sequence
  SiRNA target sequence
ataaagtctaataaaccaagta

SEQ ID NO: 131860 - DNA, 22 bp, Artificial sequence
  SiRNA target sequence
taaagtctaataaaccaagtat

SEQ ID NO: 131861 - DNA, 22 bp, Artificial sequence
  SiRNA target sequence
aaagtctaataaaccaagtata

SEQ ID NO: 131862 - DNA, 22 bp, Artificial sequence
  SiRNA target sequence
aagtctaataaaccaagtataa

SEQ ID NO: 131863 - DNA, 22 bp, Artificial sequence
  SiRNA target sequence
agtctaataaaccaagtataac

SEQ ID NO: 131864 - DNA, 22 bp, Artificial sequence
  SiRNA target sequence
gtctaataaaccaagtataaca

SEQ ID NO: 131865 - DNA, 22 bp, Artificial sequence
  SiRNA target sequence
tctaataaaccaagtataacac

SEQ ID NO: 131866 - DNA, 22 bp, Artificial sequence
  SiRNA target sequence
ctaataaaccaagtataacaca

SEQ ID NO: 131867 - DNA, 22 bp, Artificial sequence
  SiRNA target sequence
taataaaccaagtataacacaa

SEQ ID NO: 131868 - DNA, 22 bp, Artificial sequence
  SiRNA target sequence
aataaaccaagtataacacaat

SEQ ID NO: 131869 - DNA, 22 bp, Artificial sequence
  SiRNA target sequence
ataaaccaagtataacacaata

SEQ ID NO: 131870 - DNA, 22 bp, Artificial sequence
  SiRNA target sequence
taaaccaagtataacacaatat

SEQ ID NO: 131871 - DNA, 22 bp, Artificial sequence
  SiRNA target sequence
aaaccaagtataacacaatatc

SEQ ID NO: 131872 - DNA, 22 bp, Artificial sequence
  SiRNA target sequence
aaccaagtataacacaatatct

SEQ ID NO: 131873 - DNA, 22 bp, Artificial sequence
  SiRNA target sequence
accaagtataacacaatatctt

SEQ ID NO: 131874 - DNA, 22 bp, Artificial sequence
  SiRNA target sequence
ccaagtataacacaatatcttc

SEQ ID NO: 131875 - DNA, 22 bp, Artificial sequence
  SiRNA target sequence
caagtataacacaatatcttcc

SEQ ID NO: 131876 - DNA, 22 bp, Artificial sequence
  SiRNA target sequence
aagtataacacaatatcttcct

SEQ ID NO: 131877 - DNA, 22 bp, Artificial sequence
  SiRNA target sequence
agtataacacaatatcttcctg

SEQ ID NO: 131878 - DNA, 22 bp, Artificial sequence
  SiRNA target sequence
gtataacacaatatcttcctgt

SEQ ID NO: 131879 - DNA, 22 bp, Artificial sequence
  SiRNA target sequence
tataacacaatatcttcctgtt

SEQ ID NO: 131880 - DNA, 22 bp, Artificial sequence
  SiRNA target sequence
ataacacaatatcttcctgttt

SEQ ID NO: 131881 - DNA, 22 bp, Artificial sequence
  SiRNA target sequence
taacacaatatcttcctgtttt

SEQ ID NO: 131882 - DNA, 22 bp, Artificial sequence
  SiRNA target sequence
aacacaatatcttcctgttttg

SEQ ID NO: 131883 - DNA, 22 bp, Artificial sequence
  SiRNA target sequence
acacaatatcttcctgttttgg

SEQ ID NO: 131884 - DNA, 22 bp, Artificial sequence
  SiRNA target sequence
cacaatatcttcctgttttggg

SEQ ID NO: 131885 - DNA, 22 bp, Artificial sequence
  SiRNA target sequence
acaatatcttcctgttttggga

SEQ ID NO: 131886 - DNA, 22 bp, Artificial sequence
  SiRNA target sequence
caatatcttcctgttttgggat

SEQ ID NO: 131887 - DNA, 22 bp, Artificial sequence
  SiRNA target sequence
aatatcttcctgttttgggatc

SEQ ID NO: 131888 - DNA, 22 bp, Artificial sequence
  SiRNA target sequence
atatcttcctgttttgggatca

SEQ ID NO: 131889 - DNA, 22 bp, Artificial sequence
  SiRNA target sequence
tatcttcctgttttgggatcac

SEQ ID NO: 131890 - DNA, 22 bp, Artificial sequence
  SiRNA target sequence
atcttcctgttttgggatcaca

SEQ ID NO: 131891 - DNA, 22 bp, Artificial sequence
  SiRNA target sequence
tcttcctgttttgggatcacag

SEQ ID NO: 131892 - DNA, 22 bp, Artificial sequence
  SiRNA target sequence
cttcctgttttgggatcacagg

SEQ ID NO: 131893 - DNA, 22 bp, Artificial sequence
  SiRNA target sequence
ttcctgttttgggatcacaggg

SEQ ID NO: 131894 - DNA, 22 bp, Artificial sequence
  SiRNA target sequence
tcctgttttgggatcacaggga

SEQ ID NO: 131895 - DNA, 22 bp, Artificial sequence
  SiRNA target sequence
cctgttttgggatcacagggat

SEQ ID NO: 131896 - DNA, 22 bp, Artificial sequence
  SiRNA target sequence
ctgttttgggatcacagggata

SEQ ID NO: 131897 - DNA, 22 bp, Artificial sequence
  SiRNA target sequence
tgttttgggatcacagggatat

SEQ ID NO: 131898 - DNA, 22 bp, Artificial sequence
  SiRNA target sequence
gttttgggatcacagggatata

SEQ ID NO: 131899 - DNA, 22 bp, Artificial sequence
  SiRNA target sequence
ttttgggatcacagggatatac

SEQ ID NO: 131900 - DNA, 22 bp, Artificial sequence
  SiRNA target sequence
tttgggatcacagggatatact

SEQ ID NO: 131901 - DNA, 22 bp, Artificial sequence
  SiRNA target sequence
ttgggatcacagggatatacta

SEQ ID NO: 131902 - DNA, 22 bp, Artificial sequence
  SiRNA target sequence
tgggatcacagggatatactaa

SEQ ID NO: 131903 - DNA, 22 bp, Artificial sequence
  SiRNA target sequence
gggatcacagggatatactaaa

SEQ ID NO: 131904 - DNA, 22 bp, Artificial sequence
  SiRNA target sequence
ggatcacagggatatactaaag

SEQ ID NO: 131905 - DNA, 22 bp, Artificial sequence
  SiRNA target sequence
gatcacagggatatactaaagc

SEQ ID NO: 131906 - DNA, 22 bp, Artificial sequence
  SiRNA target sequence
atcacagggatatactaaagct

SEQ ID NO: 131907 - DNA, 22 bp, Artificial sequence
  SiRNA target sequence
tcacagggatatactaaagcta

SEQ ID NO: 131908 - DNA, 22 bp, Artificial sequence
  SiRNA target sequence
cacagggatatactaaagctac

SEQ ID NO: 131909 - DNA, 22 bp, Artificial sequence
  SiRNA target sequence
acagggatatactaaagctaca

SEQ ID NO: 131910 - DNA, 22 bp, Artificial sequence
  SiRNA target sequence
cagggatatactaaagctacag

SEQ ID NO: 131911 - DNA, 22 bp, Artificial sequence
  SiRNA target sequence
agggatatactaaagctacaga

SEQ ID NO: 131912 - DNA, 22 bp, Artificial sequence
  SiRNA target sequence
gggatatactaaagctacagaa

SEQ ID NO: 131913 - DNA, 22 bp, Artificial sequence
  SiRNA target sequence
ggatatactaaagctacagaat

SEQ ID NO: 131914 - DNA, 22 bp, Artificial sequence
  SiRNA target sequence
gatatactaaagctacagaatt

SEQ ID NO: 131915 - DNA, 22 bp, Artificial sequence
  SiRNA target sequence
atatactaaagctacagaattt

SEQ ID NO: 131916 - DNA, 22 bp, Artificial sequence
  SiRNA target sequence
tatactaaagctacagaatttg

SEQ ID NO: 131917 - DNA, 22 bp, Artificial sequence
  SiRNA target sequence
atactaaagctacagaatttga

SEQ ID NO: 131918 - DNA, 22 bp, Artificial sequence
  SiRNA target sequence
tactaaagctacagaatttgat

SEQ ID NO: 131919 - DNA, 22 bp, Artificial sequence
  SiRNA target sequence
actaaagctacagaatttgatt

SEQ ID NO: 131920 - DNA, 22 bp, Artificial sequence
  SiRNA target sequence
ctaaagctacagaatttgattt

SEQ ID NO: 131921 - DNA, 22 bp, Artificial sequence
  SiRNA target sequence
taaagctacagaatttgatttg

SEQ ID NO: 131922 - DNA, 22 bp, Artificial sequence
  SiRNA target sequence
aaagctacagaatttgatttgg

SEQ ID NO: 131923 - DNA, 22 bp, Artificial sequence
  SiRNA target sequence
aagctacagaatttgatttggc

SEQ ID NO: 131924 - DNA, 22 bp, Artificial sequence
  SiRNA target sequence
agctacagaatttgatttggca

SEQ ID NO: 131925 - DNA, 22 bp, Artificial sequence
  SiRNA target sequence
gctacagaatttgatttggcac

SEQ ID NO: 131926 - DNA, 22 bp, Artificial sequence
  SiRNA target sequence
ctacagaatttgatttggcact

SEQ ID NO: 131927 - DNA, 22 bp, Artificial sequence
  SiRNA target sequence
tacagaatttgatttggcactt

SEQ ID NO: 131928 - DNA, 22 bp, Artificial sequence
  SiRNA target sequence
acagaatttgatttggcactta

SEQ ID NO: 131929 - DNA, 22 bp, Artificial sequence
  SiRNA target sequence
cagaatttgatttggcacttac

SEQ ID NO: 131930 - DNA, 22 bp, Artificial sequence
  SiRNA target sequence
agaatttgatttggcacttact

SEQ ID NO: 131931 - DNA, 22 bp, Artificial sequence
  SiRNA target sequence
gaatttgatttggcacttactt

SEQ ID NO: 131932 - DNA, 22 bp, Artificial sequence
  SiRNA target sequence
aatttgatttggcacttacttt

SEQ ID NO: 131933 - DNA, 22 bp, Artificial sequence
  SiRNA target sequence
atttgatttggcacttacttta

SEQ ID NO: 131934 - DNA, 22 bp, Artificial sequence
  SiRNA target sequence
tttgatttggcacttactttaa

SEQ ID NO: 131935 - DNA, 22 bp, Artificial sequence
  SiRNA target sequence
ttgatttggcacttactttaaa

SEQ ID NO: 131936 - DNA, 22 bp, Artificial sequence
  SiRNA target sequence
tgatttggcacttactttaaat

SEQ ID NO: 131937 - DNA, 22 bp, Artificial sequence
  SiRNA target sequence
gatttggcacttactttaaata

SEQ ID NO: 131938 - DNA, 22 bp, Artificial sequence
  SiRNA target sequence
atttggcacttactttaaatat

SEQ ID NO: 131939 - DNA, 22 bp, Artificial sequence
  SiRNA target sequence
tttggcacttactttaaatatt

SEQ ID NO: 131940 - DNA, 22 bp, Artificial sequence
  SiRNA target sequence
ttggcacttactttaaatattc

SEQ ID NO: 131941 - DNA, 22 bp, Artificial sequence
  SiRNA target sequence
tggcacttactttaaatattcc

SEQ ID NO: 131942 - DNA, 22 bp, Artificial sequence
  SiRNA target sequence
ggcacttactttaaatattcca

SEQ ID NO: 131943 - DNA, 22 bp, Artificial sequence
  SiRNA target sequence
gcacttactttaaatattccag

SEQ ID NO: 131944 - DNA, 22 bp, Artificial sequence
  SiRNA target sequence
cacttactttaaatattccaga

SEQ ID NO: 131945 - DNA, 22 bp, Artificial sequence
  SiRNA target sequence
acttactttaaatattccagaa

SEQ ID NO: 131946 - DNA, 22 bp, Artificial sequence
  SiRNA target sequence
cttactttaaatattccagaag

SEQ ID NO: 131947 - DNA, 22 bp, Artificial sequence
  SiRNA target sequence
ttactttaaatattccagaaga

SEQ ID NO: 131948 - DNA, 22 bp, Artificial sequence
  SiRNA target sequence
tactttaaatattccagaagat

SEQ ID NO: 131949 - DNA, 22 bp, Artificial sequence
  SiRNA target sequence
actttaaatattccagaagata

SEQ ID NO: 131950 - DNA, 22 bp, Artificial sequence
  SiRNA target sequence
ctttaaatattccagaagatat

SEQ ID NO: 131951 - DNA, 22 bp, Artificial sequence
  SiRNA target sequence
tttaaatattccagaagatata

SEQ ID NO: 131952 - DNA, 22 bp, Artificial sequence
  SiRNA target sequence
ttaaatattccagaagatatag

SEQ ID NO: 131953 - DNA, 22 bp, Artificial sequence
  SiRNA target sequence
taaatattccagaagatatagc

SEQ ID NO: 131954 - DNA, 22 bp, Artificial sequence
  SiRNA target sequence
aaatattccagaagatatagct

SEQ ID NO: 131955 - DNA, 22 bp, Artificial sequence
  SiRNA target sequence
aatattccagaagatatagcta

SEQ ID NO: 131956 - DNA, 22 bp, Artificial sequence
  SiRNA target sequence
atattccagaagatatagctaa

SEQ ID NO: 131957 - DNA, 22 bp, Artificial sequence
  SiRNA target sequence
tattccagaagatatagctaag

SEQ ID NO: 131958 - DNA, 22 bp, Artificial sequence
  SiRNA target sequence
attccagaagatatagctaagc

SEQ ID NO: 131959 - DNA, 22 bp, Artificial sequence
  SiRNA target sequence
ttccagaagatatagctaagca

SEQ ID NO: 131960 - DNA, 22 bp, Artificial sequence
  SiRNA target sequence
tccagaagatatagctaagcat

SEQ ID NO: 131961 - DNA, 22 bp, Artificial sequence
  SiRNA target sequence
ccagaagatatagctaagcatt

SEQ ID NO: 131962 - DNA, 22 bp, Artificial sequence
  SiRNA target sequence
cagaagatatagctaagcattt

SEQ ID NO: 131963 - DNA, 22 bp, Artificial sequence
  SiRNA target sequence
agaagatatagctaagcattta

SEQ ID NO: 131964 - DNA, 22 bp, Artificial sequence
  SiRNA target sequence
gaagatatagctaagcatttag

SEQ ID NO: 131965 - DNA, 22 bp, Artificial sequence
  SiRNA target sequence
aagatatagctaagcatttagc

SEQ ID NO: 131966 - DNA, 22 bp, Artificial sequence
  SiRNA target sequence
agatatagctaagcatttagct

SEQ ID NO: 131967 - DNA, 22 bp, Artificial sequence
  SiRNA target sequence
gatatagctaagcatttagcta

SEQ ID NO: 131968 - DNA, 22 bp, Artificial sequence
  SiRNA target sequence
atatagctaagcatttagctac

SEQ ID NO: 131969 - DNA, 22 bp, Artificial sequence
  SiRNA target sequence
tatagctaagcatttagctaca

SEQ ID NO: 131970 - DNA, 22 bp, Artificial sequence
  SiRNA target sequence
atagctaagcatttagctacaa

SEQ ID NO: 131971 - DNA, 22 bp, Artificial sequence
  SiRNA target sequence
tagctaagcatttagctacaac

SEQ ID NO: 131972 - DNA, 22 bp, Artificial sequence
  SiRNA target sequence
agctaagcatttagctacaact

SEQ ID NO: 131973 - DNA, 22 bp, Artificial sequence
  SiRNA target sequence
gctaagcatttagctacaactt

SEQ ID NO: 131974 - DNA, 22 bp, Artificial sequence
  SiRNA target sequence
ctaagcatttagctacaactta

SEQ ID NO: 131975 - DNA, 22 bp, Artificial sequence
  SiRNA target sequence
taagcatttagctacaacttat

SEQ ID NO: 131976 - DNA, 22 bp, Artificial sequence
  SiRNA target sequence
aagcatttagctacaacttatg

SEQ ID NO: 131977 - DNA, 22 bp, Artificial sequence
  SiRNA target sequence
agcatttagctacaacttatgg

SEQ ID NO: 131978 - DNA, 22 bp, Artificial sequence
  SiRNA target sequence
gcatttagctacaacttatggt

SEQ ID NO: 131979 - DNA, 22 bp, Artificial sequence
  SiRNA target sequence
catttagctacaacttatggta

SEQ ID NO: 131980 - DNA, 22 bp, Artificial sequence
  SiRNA target sequence
atttagctacaacttatggtac

SEQ ID NO: 131981 - DNA, 22 bp, Artificial sequence
  SiRNA target sequence
tttagctacaacttatggtacc

SEQ ID NO: 131982 - DNA, 22 bp, Artificial sequence
  SiRNA target sequence
ttagctacaacttatggtacca

SEQ ID NO: 131983 - DNA, 22 bp, Artificial sequence
  SiRNA target sequence
tagctacaacttatggtaccaa

SEQ ID NO: 131984 - DNA, 22 bp, Artificial sequence
  SiRNA target sequence
agctacaacttatggtaccaaa

SEQ ID NO: 131985 - DNA, 22 bp, Artificial sequence
  SiRNA target sequence
gctacaacttatggtaccaaag

SEQ ID NO: 131986 - DNA, 22 bp, Artificial sequence
  SiRNA target sequence
ctacaacttatggtaccaaagc

SEQ ID NO: 131987 - DNA, 22 bp, Artificial sequence
  SiRNA target sequence
tacaacttatggtaccaaagct

SEQ ID NO: 131988 - DNA, 22 bp, Artificial sequence
  SiRNA target sequence
acaacttatggtaccaaagctt

SEQ ID NO: 131989 - DNA, 22 bp, Artificial sequence
  SiRNA target sequence
caacttatggtaccaaagctta

SEQ ID NO: 131990 - DNA, 22 bp, Artificial sequence
  SiRNA target sequence
aacttatggtaccaaagcttac

SEQ ID NO: 131991 - DNA, 22 bp, Artificial sequence
  SiRNA target sequence
acttatggtaccaaagcttaca

SEQ ID NO: 131992 - DNA, 22 bp, Artificial sequence
  SiRNA target sequence
cttatggtaccaaagcttacaa

SEQ ID NO: 131993 - DNA, 22 bp, Artificial sequence
  SiRNA target sequence
ttatggtaccaaagcttacaat

SEQ ID NO: 131994 - DNA, 22 bp, Artificial sequence
  SiRNA target sequence
tatggtaccaaagcttacaatt

SEQ ID NO: 131995 - DNA, 22 bp, Artificial sequence
  SiRNA target sequence
atggtaccaaagcttacaattt

SEQ ID NO: 131996 - DNA, 22 bp, Artificial sequence
  SiRNA target sequence
tggtaccaaagcttacaatttc

SEQ ID NO: 131997 - DNA, 22 bp, Artificial sequence
  SiRNA target sequence
ggtaccaaagcttacaatttct

SEQ ID NO: 131998 - DNA, 22 bp, Artificial sequence
  SiRNA target sequence
gtaccaaagcttacaatttctc

SEQ ID NO: 131999 - DNA, 22 bp, Artificial sequence
  SiRNA target sequence
taccaaagcttacaatttctct

SEQ ID NO: 132000 - DNA, 22 bp, Artificial sequence
  SiRNA target sequence
accaaagcttacaatttctctg

SEQ ID NO: 132001 - DNA, 22 bp, Artificial sequence
  SiRNA target sequence
ccaaagcttacaatttctctga

SEQ ID NO: 132002 - DNA, 22 bp, Artificial sequence
  SiRNA target sequence
caaagcttacaatttctctgaa

SEQ ID NO: 132003 - DNA, 22 bp, Artificial sequence
  SiRNA target sequence
aaagcttacaatttctctgaat

SEQ ID NO: 132004 - DNA, 22 bp, Artificial sequence
  SiRNA target sequence
aagcttacaatttctctgaata

SEQ ID NO: 132005 - DNA, 22 bp, Artificial sequence
  SiRNA target sequence
agcttacaatttctctgaatac

SEQ ID NO: 132006 - DNA, 22 bp, Artificial sequence
  SiRNA target sequence
gcttacaatttctctgaatact

SEQ ID NO: 132007 - DNA, 22 bp, Artificial sequence
  SiRNA target sequence
cttacaatttctctgaatactt

SEQ ID NO: 132008 - DNA, 22 bp, Artificial sequence
  SiRNA target sequence
ttacaatttctctgaatacttt

SEQ ID NO: 132009 - DNA, 22 bp, Artificial sequence
  SiRNA target sequence
tacaatttctctgaatacttta

SEQ ID NO: 132010 - DNA, 22 bp, Artificial sequence
  SiRNA target sequence
acaatttctctgaatactttaa

SEQ ID NO: 132011 - DNA, 22 bp, Artificial sequence
  SiRNA target sequence
caatttctctgaatactttaat

SEQ ID NO: 132012 - DNA, 22 bp, Artificial sequence
  SiRNA target sequence
aatttctctgaatactttaatg

SEQ ID NO: 132013 - DNA, 22 bp, Artificial sequence
  SiRNA target sequence
atttctctgaatactttaatgg

SEQ ID NO: 132014 - DNA, 22 bp, Artificial sequence
  SiRNA target sequence
tttctctgaatactttaatggg

SEQ ID NO: 132015 - DNA, 22 bp, Artificial sequence
  SiRNA target sequence
ttctctgaatactttaatgggt

SEQ ID NO: 132016 - DNA, 22 bp, Artificial sequence
  SiRNA target sequence
tctctgaatactttaatgggtc

SEQ ID NO: 132017 - DNA, 22 bp, Artificial sequence
  SiRNA target sequence
ctctgaatactttaatgggtca

SEQ ID NO: 132018 - DNA, 22 bp, Artificial sequence
  SiRNA target sequence
tctgaatactttaatgggtcat

SEQ ID NO: 132019 - DNA, 22 bp, Artificial sequence
  SiRNA target sequence
ctgaatactttaatgggtcata

SEQ ID NO: 132020 - DNA, 22 bp, Artificial sequence
  SiRNA target sequence
tgaatactttaatgggtcatac

SEQ ID NO: 132021 - DNA, 22 bp, Artificial sequence
  SiRNA target sequence
gaatactttaatgggtcataca

SEQ ID NO: 132022 - DNA, 22 bp, Artificial sequence
  SiRNA target sequence
aatactttaatgggtcatacac

SEQ ID NO: 132023 - DNA, 22 bp, Artificial sequence
  SiRNA target sequence
atactttaatgggtcatacacc

SEQ ID NO: 132024 - DNA, 22 bp, Artificial sequence
  SiRNA target sequence
tactttaatgggtcatacacca

SEQ ID NO: 132025 - DNA, 22 bp, Artificial sequence
  SiRNA target sequence
actttaatgggtcatacaccag

SEQ ID NO: 132026 - DNA, 22 bp, Artificial sequence
  SiRNA target sequence
ctttaatgggtcatacaccaga

SEQ ID NO: 132027 - DNA, 22 bp, Artificial sequence
  SiRNA target sequence
tttaatgggtcatacaccagac

SEQ ID NO: 132028 - DNA, 22 bp, Artificial sequence
  SiRNA target sequence
ttaatgggtcatacaccagact

SEQ ID NO: 132029 - DNA, 22 bp, Artificial sequence
  SiRNA target sequence
taatgggtcatacaccagactt

SEQ ID NO: 132030 - DNA, 22 bp, Artificial sequence
  SiRNA target sequence
aatgggtcatacaccagactta

SEQ ID NO: 132031 - DNA, 22 bp, Artificial sequence
  SiRNA target sequence
atgggtcatacaccagacttac

SEQ ID NO: 132032 - DNA, 22 bp, Artificial sequence
  SiRNA target sequence
tgggtcatacaccagacttaca

SEQ ID NO: 132033 - DNA, 22 bp, Artificial sequence
  SiRNA target sequence
gggtcatacaccagacttacag

SEQ ID NO: 132034 - DNA, 22 bp, Artificial sequence
  SiRNA target sequence
ggtcatacaccagacttacaga

SEQ ID NO: 132035 - DNA, 22 bp, Artificial sequence
  SiRNA target sequence
gtcatacaccagacttacagat

SEQ ID NO: 132036 - DNA, 22 bp, Artificial sequence
  SiRNA target sequence
tcatacaccagacttacagatg

SEQ ID NO: 132037 - DNA, 22 bp, Artificial sequence
  SiRNA target sequence
catacaccagacttacagatgg

SEQ ID NO: 132038 - DNA, 22 bp, Artificial sequence
  SiRNA target sequence
atacaccagacttacagatggt

SEQ ID NO: 132039 - DNA, 22 bp, Artificial sequence
  SiRNA target sequence
tacaccagacttacagatggtt

SEQ ID NO: 132040 - DNA, 22 bp, Artificial sequence
  SiRNA target sequence
acaccagacttacagatggtta

SEQ ID NO: 132041 - DNA, 22 bp, Artificial sequence
  SiRNA target sequence
caccagacttacagatggttat

SEQ ID NO: 132042 - DNA, 22 bp, Artificial sequence
  SiRNA target sequence
accagacttacagatggttatc

SEQ ID NO: 132043 - DNA, 22 bp, Artificial sequence
  SiRNA target sequence
ccagacttacagatggttatcc

SEQ ID NO: 132044 - DNA, 22 bp, Artificial sequence
  SiRNA target sequence
cagacttacagatggttatcct

SEQ ID NO: 132045 - DNA, 22 bp, Artificial sequence
  SiRNA target sequence
agacttacagatggttatcctt

SEQ ID NO: 132046 - DNA, 22 bp, Artificial sequence
  SiRNA target sequence
gacttacagatggttatcctta

SEQ ID NO: 132047 - DNA, 22 bp, Artificial sequence
  SiRNA target sequence
acttacagatggttatccttat

SEQ ID NO: 132048 - DNA, 22 bp, Artificial sequence
  SiRNA target sequence
cttacagatggttatccttata

SEQ ID NO: 132049 - DNA, 22 bp, Artificial sequence
  SiRNA target sequence
ttacagatggttatccttatac

SEQ ID NO: 132050 - DNA, 22 bp, Artificial sequence
  SiRNA target sequence
tacagatggttatccttataca

SEQ ID NO: 132051 - DNA, 22 bp, Artificial sequence
  SiRNA target sequence
acagatggttatccttatacaa

SEQ ID NO: 132052 - DNA, 22 bp, Artificial sequence
  SiRNA target sequence
cagatggttatccttatacaaa

SEQ ID NO: 132053 - DNA, 22 bp, Artificial sequence
  SiRNA target sequence
agatggttatccttatacaaaa

SEQ ID NO: 132054 - DNA, 22 bp, Artificial sequence
  SiRNA target sequence
gatggttatccttatacaaaag

SEQ ID NO: 132055 - DNA, 22 bp, Artificial sequence
  SiRNA target sequence
atggttatccttatacaaaaga

SEQ ID NO: 132056 - DNA, 22 bp, Artificial sequence
  SiRNA target sequence
tggttatccttatacaaaagaa

SEQ ID NO: 132057 - DNA, 22 bp, Artificial sequence
  SiRNA target sequence
ggttatccttatacaaaagaag

SEQ ID NO: 132058 - DNA, 22 bp, Artificial sequence
  SiRNA target sequence
gttatccttatacaaaagaaga

SEQ ID NO: 132059 - DNA, 22 bp, Artificial sequence
  SiRNA target sequence
ttatccttatacaaaagaagaa

SEQ ID NO: 132060 - DNA, 22 bp, Artificial sequence
  SiRNA target sequence
tatccttatacaaaagaagaaa

SEQ ID NO: 132061 - DNA, 22 bp, Artificial sequence
  SiRNA target sequence
atccttatacaaaagaagaaat

SEQ ID NO: 132062 - DNA, 22 bp, Artificial sequence
  SiRNA target sequence
tccttatacaaaagaagaaata

SEQ ID NO: 132063 - DNA, 22 bp, Artificial sequence
  SiRNA target sequence
ccttatacaaaagaagaaatag

SEQ ID NO: 132064 - DNA, 22 bp, Artificial sequence
  SiRNA target sequence
cttatacaaaagaagaaatagt

SEQ ID NO: 132065 - DNA, 22 bp, Artificial sequence
  SiRNA target sequence
ttatacaaaagaagaaatagta

SEQ ID NO: 132066 - DNA, 22 bp, Artificial sequence
  SiRNA target sequence
tatacaaaagaagaaatagtat

SEQ ID NO: 132067 - DNA, 22 bp, Artificial sequence
  SiRNA target sequence
atacaaaagaagaaatagtata

SEQ ID NO: 132068 - DNA, 22 bp, Artificial sequence
  SiRNA target sequence
tacaaaagaagaaatagtatat

SEQ ID NO: 132069 - DNA, 22 bp, Artificial sequence
  SiRNA target sequence
acaaaagaagaaatagtatatt

SEQ ID NO: 132070 - DNA, 22 bp, Artificial sequence
  SiRNA target sequence
caaaagaagaaatagtatattg

SEQ ID NO: 132071 - DNA, 22 bp, Artificial sequence
  SiRNA target sequence
aaaagaagaaatagtatattgt

SEQ ID NO: 132072 - DNA, 22 bp, Artificial sequence
  SiRNA target sequence
aaagaagaaatagtatattgta

SEQ ID NO: 132073 - DNA, 22 bp, Artificial sequence
  SiRNA target sequence
aagaagaaatagtatattgtat

SEQ ID NO: 132074 - DNA, 22 bp, Artificial sequence
  SiRNA target sequence
agaagaaatagtatattgtatc

SEQ ID NO: 132075 - DNA, 22 bp, Artificial sequence
  SiRNA target sequence
gaagaaatagtatattgtatcg

SEQ ID NO: 132076 - DNA, 22 bp, Artificial sequence
  SiRNA target sequence
aagaaatagtatattgtatcga

SEQ ID NO: 132077 - DNA, 22 bp, Artificial sequence
  SiRNA target sequence
agaaatagtatattgtatcgaa

SEQ ID NO: 132078 - DNA, 22 bp, Artificial sequence
  SiRNA target sequence
gaaatagtatattgtatcgaac

SEQ ID NO: 132079 - DNA, 22 bp, Artificial sequence
  SiRNA target sequence
aaatagtatattgtatcgaaca

SEQ ID NO: 132080 - DNA, 22 bp, Artificial sequence
  SiRNA target sequence
aatagtatattgtatcgaacat

SEQ ID NO: 132081 - DNA, 22 bp, Artificial sequence
  SiRNA target sequence
atagtatattgtatcgaacatg

SEQ ID NO: 132082 - DNA, 22 bp, Artificial sequence
  SiRNA target sequence
tagtatattgtatcgaacatga

SEQ ID NO: 132083 - DNA, 22 bp, Artificial sequence
  SiRNA target sequence
agtatattgtatcgaacatgaa

SEQ ID NO: 132084 - DNA, 22 bp, Artificial sequence
  SiRNA target sequence
gtatattgtatcgaacatgaat

SEQ ID NO: 132085 - DNA, 22 bp, Artificial sequence
  SiRNA target sequence
tatattgtatcgaacatgaatt

SEQ ID NO: 132086 - DNA, 22 bp, Artificial sequence
  SiRNA target sequence
atattgtatcgaacatgaattg

SEQ ID NO: 132087 - DNA, 22 bp, Artificial sequence
  SiRNA target sequence
tattgtatcgaacatgaattgg

SEQ ID NO: 132088 - DNA, 22 bp, Artificial sequence
  SiRNA target sequence
attgtatcgaacatgaattggc

SEQ ID NO: 132089 - DNA, 22 bp, Artificial sequence
  SiRNA target sequence
ttgtatcgaacatgaattggct

SEQ ID NO: 132090 - DNA, 22 bp, Artificial sequence
  SiRNA target sequence
tgtatcgaacatgaattggctt

SEQ ID NO: 132091 - DNA, 22 bp, Artificial sequence
  SiRNA target sequence
gtatcgaacatgaattggctta

SEQ ID NO: 132092 - DNA, 22 bp, Artificial sequence
  SiRNA target sequence
tatcgaacatgaattggcttat

SEQ ID NO: 132093 - DNA, 22 bp, Artificial sequence
  SiRNA target sequence
atcgaacatgaattggcttatc

SEQ ID NO: 132094 - DNA, 22 bp, Artificial sequence
  SiRNA target sequence
tcgaacatgaattggcttatcg

SEQ ID NO: 132095 - DNA, 22 bp, Artificial sequence
  SiRNA target sequence
cgaacatgaattggcttatcgc

SEQ ID NO: 132096 - DNA, 22 bp, Artificial sequence
  SiRNA target sequence
gaacatgaattggcttatcgca

SEQ ID NO: 132097 - DNA, 22 bp, Artificial sequence
  SiRNA target sequence
aacatgaattggcttatcgcat

SEQ ID NO: 132098 - DNA, 22 bp, Artificial sequence
  SiRNA target sequence
acatgaattggcttatcgcatc

SEQ ID NO: 132099 - DNA, 22 bp, Artificial sequence
  SiRNA target sequence
catgaattggcttatcgcatca

SEQ ID NO: 132100 - DNA, 22 bp, Artificial sequence
  SiRNA target sequence
atgaattggcttatcgcatcag

SEQ ID NO: 132101 - DNA, 22 bp, Artificial sequence
  SiRNA target sequence
tgaattggcttatcgcatcagt

SEQ ID NO: 132102 - DNA, 22 bp, Artificial sequence
  SiRNA target sequence
gaattggcttatcgcatcagtg

SEQ ID NO: 132103 - DNA, 22 bp, Artificial sequence
  SiRNA target sequence
aattggcttatcgcatcagtga

SEQ ID NO: 132104 - DNA, 22 bp, Artificial sequence
  SiRNA target sequence
attggcttatcgcatcagtgat

SEQ ID NO: 132105 - DNA, 22 bp, Artificial sequence
  SiRNA target sequence
ttggcttatcgcatcagtgata

SEQ ID NO: 132106 - DNA, 22 bp, Artificial sequence
  SiRNA target sequence
tggcttatcgcatcagtgatat

SEQ ID NO: 132107 - DNA, 22 bp, Artificial sequence
  SiRNA target sequence
ggcttatcgcatcagtgatata

SEQ ID NO: 132108 - DNA, 22 bp, Artificial sequence
  SiRNA target sequence
gcttatcgcatcagtgatatat

SEQ ID NO: 132109 - DNA, 22 bp, Artificial sequence
  SiRNA target sequence
cttatcgcatcagtgatatatt

SEQ ID NO: 132110 - DNA, 22 bp, Artificial sequence
  SiRNA target sequence
ttatcgcatcagtgatatatta

SEQ ID NO: 132111 - DNA, 22 bp, Artificial sequence
  SiRNA target sequence
tatcgcatcagtgatatattat

SEQ ID NO: 132112 - DNA, 22 bp, Artificial sequence
  SiRNA target sequence
atcgcatcagtgatatattatt

SEQ ID NO: 132113 - DNA, 22 bp, Artificial sequence
  SiRNA target sequence
tcgcatcagtgatatattattt

SEQ ID NO: 132114 - DNA, 22 bp, Artificial sequence
  SiRNA target sequence
cgcatcagtgatatattattta

SEQ ID NO: 132115 - DNA, 22 bp, Artificial sequence
  SiRNA target sequence
gcatcagtgatatattatttaa

SEQ ID NO: 132116 - DNA, 22 bp, Artificial sequence
  SiRNA target sequence
catcagtgatatattatttaat

SEQ ID NO: 132117 - DNA, 22 bp, Artificial sequence
  SiRNA target sequence
atcagtgatatattatttaata

SEQ ID NO: 132118 - DNA, 22 bp, Artificial sequence
  SiRNA target sequence
tcagtgatatattatttaatag

SEQ ID NO: 132119 - DNA, 22 bp, Artificial sequence
  SiRNA target sequence
cagtgatatattatttaatagg

SEQ ID NO: 132120 - DNA, 22 bp, Artificial sequence
  SiRNA target sequence
agtgatatattatttaatagga

SEQ ID NO: 132121 - DNA, 22 bp, Artificial sequence
  SiRNA target sequence
gtgatatattatttaataggat

SEQ ID NO: 132122 - DNA, 22 bp, Artificial sequence
  SiRNA target sequence
tgatatattatttaataggatg

SEQ ID NO: 132123 - DNA, 22 bp, Artificial sequence
  SiRNA target sequence
gatatattatttaataggatga

SEQ ID NO: 132124 - DNA, 22 bp, Artificial sequence
  SiRNA target sequence
atatattatttaataggatgat

SEQ ID NO: 132125 - DNA, 22 bp, Artificial sequence
  SiRNA target sequence
tatattatttaataggatgatg

SEQ ID NO: 132126 - DNA, 22 bp, Artificial sequence
  SiRNA target sequence
atattatttaataggatgatga

SEQ ID NO: 132127 - DNA, 22 bp, Artificial sequence
  SiRNA target sequence
tattatttaataggatgatgat

SEQ ID NO: 132128 - DNA, 22 bp, Artificial sequence
  SiRNA target sequence
attatttaataggatgatgata

SEQ ID NO: 132129 - DNA, 22 bp, Artificial sequence
  SiRNA target sequence
ttatttaataggatgatgatag

SEQ ID NO: 132130 - DNA, 22 bp, Artificial sequence
  SiRNA target sequence
tatttaataggatgatgatagg

SEQ ID NO: 132131 - DNA, 22 bp, Artificial sequence
  SiRNA target sequence
atttaataggatgatgatagga

SEQ ID NO: 132132 - DNA, 22 bp, Artificial sequence
  SiRNA target sequence
tttaataggatgatgataggat

SEQ ID NO: 132133 - DNA, 22 bp, Artificial sequence
  SiRNA target sequence
ttaataggatgatgataggata

SEQ ID NO: 132134 - DNA, 22 bp, Artificial sequence
  SiRNA target sequence
taataggatgatgataggatac

SEQ ID NO: 132135 - DNA, 22 bp, Artificial sequence
  SiRNA target sequence
aataggatgatgataggataca

SEQ ID NO: 132136 - DNA, 22 bp, Artificial sequence
  SiRNA target sequence
ataggatgatgataggatacat

SEQ ID NO: 132137 - DNA, 22 bp, Artificial sequence
  SiRNA target sequence
taggatgatgataggatacatt

SEQ ID NO: 132138 - DNA, 22 bp, Artificial sequence
  SiRNA target sequence
aggatgatgataggatacattg

SEQ ID NO: 132139 - DNA, 22 bp, Artificial sequence
  SiRNA target sequence
ggatgatgataggatacattga

SEQ ID NO: 132140 - DNA, 22 bp, Artificial sequence
  SiRNA target sequence
gatgatgataggatacattgac

SEQ ID NO: 132141 - DNA, 22 bp, Artificial sequence
  SiRNA target sequence
atgatgataggatacattgacg

SEQ ID NO: 132142 - DNA, 22 bp, Artificial sequence
  SiRNA target sequence
tgatgataggatacattgacgt

SEQ ID NO: 132143 - DNA, 22 bp, Artificial sequence
  SiRNA target sequence
gatgataggatacattgacgtc

SEQ ID NO: 132144 - DNA, 22 bp, Artificial sequence
  SiRNA target sequence
atgataggatacattgacgtca

SEQ ID NO: 132145 - DNA, 22 bp, Artificial sequence
  SiRNA target sequence
tgataggatacattgacgtcag

SEQ ID NO: 132146 - DNA, 22 bp, Artificial sequence
  SiRNA target sequence
gataggatacattgacgtcaga

SEQ ID NO: 132147 - DNA, 22 bp, Artificial sequence
  SiRNA target sequence
ataggatacattgacgtcagaa

SEQ ID NO: 132148 - DNA, 22 bp, Artificial sequence
  SiRNA target sequence
taggatacattgacgtcagaag

SEQ ID NO: 132149 - DNA, 22 bp, Artificial sequence
  SiRNA target sequence
aggatacattgacgtcagaaga

SEQ ID NO: 132150 - DNA, 22 bp, Artificial sequence
  SiRNA target sequence
ggatacattgacgtcagaagag

SEQ ID NO: 132151 - DNA, 22 bp, Artificial sequence
  SiRNA target sequence
gatacattgacgtcagaagagc

SEQ ID NO: 132152 - DNA, 22 bp, Artificial sequence
  SiRNA target sequence
atacattgacgtcagaagagca

SEQ ID NO: 132153 - DNA, 22 bp, Artificial sequence
  SiRNA target sequence
tacattgacgtcagaagagcat

SEQ ID NO: 132154 - DNA, 22 bp, Artificial sequence
  SiRNA target sequence
acattgacgtcagaagagcatt

SEQ ID NO: 132155 - DNA, 22 bp, Artificial sequence
  SiRNA target sequence
cattgacgtcagaagagcattt

SEQ ID NO: 132156 - DNA, 22 bp, Artificial sequence
  SiRNA target sequence
attgacgtcagaagagcatttg

SEQ ID NO: 132157 - DNA, 22 bp, Artificial sequence
  SiRNA target sequence
ttgacgtcagaagagcatttga

SEQ ID NO: 132158 - DNA, 22 bp, Artificial sequence
  SiRNA target sequence
tgacgtcagaagagcatttgat

SEQ ID NO: 132159 - DNA, 22 bp, Artificial sequence
  SiRNA target sequence
gacgtcagaagagcatttgatt

SEQ ID NO: 132160 - DNA, 22 bp, Artificial sequence
  SiRNA target sequence
acgtcagaagagcatttgattt

SEQ ID NO: 132161 - DNA, 22 bp, Artificial sequence
  SiRNA target sequence
cgtcagaagagcatttgattta

SEQ ID NO: 132162 - DNA, 22 bp, Artificial sequence
  SiRNA target sequence
gtcagaagagcatttgatttaa

SEQ ID NO: 132163 - DNA, 22 bp, Artificial sequence
  SiRNA target sequence
tcagaagagcatttgatttaat

SEQ ID NO: 132164 - DNA, 22 bp, Artificial sequence
  SiRNA target sequence
cagaagagcatttgatttaatt

SEQ ID NO: 132165 - DNA, 22 bp, Artificial sequence
  SiRNA target sequence
agaagagcatttgatttaattg

SEQ ID NO: 132166 - DNA, 22 bp, Artificial sequence
  SiRNA target sequence
gaagagcatttgatttaattgg

SEQ ID NO: 132167 - DNA, 22 bp, Artificial sequence
  SiRNA target sequence
aagagcatttgatttaattggt

SEQ ID NO: 132168 - DNA, 22 bp, Artificial sequence
  SiRNA target sequence
agagcatttgatttaattggta

SEQ ID NO: 132169 - DNA, 22 bp, Artificial sequence
  SiRNA target sequence
gagcatttgatttaattggtat

SEQ ID NO: 132170 - DNA, 22 bp, Artificial sequence
  SiRNA target sequence
agcatttgatttaattggtata

SEQ ID NO: 132171 - DNA, 22 bp, Artificial sequence
  SiRNA target sequence
gcatttgatttaattggtatag

SEQ ID NO: 132172 - DNA, 22 bp, Artificial sequence
  SiRNA target sequence
catttgatttaattggtatagt

SEQ ID NO: 132173 - DNA, 22 bp, Artificial sequence
  SiRNA target sequence
atttgatttaattggtatagta

SEQ ID NO: 132174 - DNA, 22 bp, Artificial sequence
  SiRNA target sequence
tttgatttaattggtatagtag

SEQ ID NO: 132175 - DNA, 22 bp, Artificial sequence
  SiRNA target sequence
ttgatttaattggtatagtagc

SEQ ID NO: 132176 - DNA, 22 bp, Artificial sequence
  SiRNA target sequence
tgatttaattggtatagtagct

SEQ ID NO: 132177 - DNA, 22 bp, Artificial sequence
  SiRNA target sequence
gatttaattggtatagtagctg

SEQ ID NO: 132178 - DNA, 22 bp, Artificial sequence
  SiRNA target sequence
atttaattggtatagtagctga

SEQ ID NO: 132179 - DNA, 22 bp, Artificial sequence
  SiRNA target sequence
tttaattggtatagtagctgaa

SEQ ID NO: 132180 - DNA, 22 bp, Artificial sequence
  SiRNA target sequence
ttaattggtatagtagctgaag

SEQ ID NO: 132181 - DNA, 22 bp, Artificial sequence
  SiRNA target sequence
taattggtatagtagctgaagt

SEQ ID NO: 132182 - DNA, 22 bp, Artificial sequence
  SiRNA target sequence
aattggtatagtagctgaagta

SEQ ID NO: 132183 - DNA, 22 bp, Artificial sequence
  SiRNA target sequence
attggtatagtagctgaagtaa

SEQ ID NO: 132184 - DNA, 22 bp, Artificial sequence
  SiRNA target sequence
ttggtatagtagctgaagtaat

SEQ ID NO: 132185 - DNA, 22 bp, Artificial sequence
  SiRNA target sequence
tggtatagtagctgaagtaatg

SEQ ID NO: 132186 - DNA, 22 bp, Artificial sequence
  SiRNA target sequence
ggtatagtagctgaagtaatga

SEQ ID NO: 132187 - DNA, 22 bp, Artificial sequence
  SiRNA target sequence
gtatagtagctgaagtaatgaa

SEQ ID NO: 132188 - DNA, 22 bp, Artificial sequence
  SiRNA target sequence
tatagtagctgaagtaatgaaa

SEQ ID NO: 132189 - DNA, 22 bp, Artificial sequence
  SiRNA target sequence
atagtagctgaagtaatgaaag

SEQ ID NO: 132190 - DNA, 22 bp, Artificial sequence
  SiRNA target sequence
tagtagctgaagtaatgaaaga

SEQ ID NO: 132191 - DNA, 22 bp, Artificial sequence
  SiRNA target sequence
agtagctgaagtaatgaaagac

SEQ ID NO: 132192 - DNA, 22 bp, Artificial sequence
  SiRNA target sequence
gtagctgaagtaatgaaagact

SEQ ID NO: 132193 - DNA, 22 bp, Artificial sequence
  SiRNA target sequence
tagctgaagtaatgaaagacta

SEQ ID NO: 132194 - DNA, 22 bp, Artificial sequence
  SiRNA target sequence
agctgaagtaatgaaagactat

SEQ ID NO: 132195 - DNA, 22 bp, Artificial sequence
  SiRNA target sequence
gctgaagtaatgaaagactatt

SEQ ID NO: 132196 - DNA, 22 bp, Artificial sequence
  SiRNA target sequence
ctgaagtaatgaaagactatta

SEQ ID NO: 132197 - DNA, 22 bp, Artificial sequence
  SiRNA target sequence
tgaagtaatgaaagactattac

SEQ ID NO: 132198 - DNA, 22 bp, Artificial sequence
  SiRNA target sequence
gaagtaatgaaagactattacg

SEQ ID NO: 132199 - DNA, 22 bp, Artificial sequence
  SiRNA target sequence
aagtaatgaaagactattacgg

SEQ ID NO: 132200 - DNA, 22 bp, Artificial sequence
  SiRNA target sequence
agtaatgaaagactattacgga

SEQ ID NO: 132201 - DNA, 22 bp, Artificial sequence
  SiRNA target sequence
gtaatgaaagactattacggat

SEQ ID NO: 132202 - DNA, 22 bp, Artificial sequence
  SiRNA target sequence
taatgaaagactattacggatg

SEQ ID NO: 132203 - DNA, 22 bp, Artificial sequence
  SiRNA target sequence
aatgaaagactattacggatgg

SEQ ID NO: 132204 - DNA, 22 bp, Artificial sequence
  SiRNA target sequence
atgaaagactattacggatggg

SEQ ID NO: 132205 - DNA, 22 bp, Artificial sequence
  SiRNA target sequence
tgaaagactattacggatggga

SEQ ID NO: 132206 - DNA, 22 bp, Artificial sequence
  SiRNA target sequence
gaaagactattacggatgggat

SEQ ID NO: 132207 - DNA, 22 bp, Artificial sequence
  SiRNA target sequence
aaagactattacggatgggatc

SEQ ID NO: 132208 - DNA, 22 bp, Artificial sequence
  SiRNA target sequence
aagactattacggatgggatca

SEQ ID NO: 132209 - DNA, 22 bp, Artificial sequence
  SiRNA target sequence
agactattacggatgggatcag

SEQ ID NO: 132210 - DNA, 22 bp, Artificial sequence
  SiRNA target sequence
gactattacggatgggatcagc

SEQ ID NO: 132211 - DNA, 22 bp, Artificial sequence
  SiRNA target sequence
actattacggatgggatcagca

SEQ ID NO: 132212 - DNA, 22 bp, Artificial sequence
  SiRNA target sequence
ctattacggatgggatcagcaa

SEQ ID NO: 132213 - DNA, 22 bp, Artificial sequence
  SiRNA target sequence
tattacggatgggatcagcaaa

SEQ ID NO: 132214 - DNA, 22 bp, Artificial sequence
  SiRNA target sequence
attacggatgggatcagcaaag

SEQ ID NO: 132215 - DNA, 22 bp, Artificial sequence
  SiRNA target sequence
ttacggatgggatcagcaaaga

SEQ ID NO: 132216 - DNA, 22 bp, Artificial sequence
  SiRNA target sequence
tacggatgggatcagcaaagat

SEQ ID NO: 132217 - DNA, 22 bp, Artificial sequence
  SiRNA target sequence
acggatgggatcagcaaagata

SEQ ID NO: 132218 - DNA, 22 bp, Artificial sequence
  SiRNA target sequence
cggatgggatcagcaaagatat

SEQ ID NO: 132219 - DNA, 22 bp, Artificial sequence
  SiRNA target sequence
ggatgggatcagcaaagatata

SEQ ID NO: 132220 - DNA, 22 bp, Artificial sequence
  SiRNA target sequence
gatgggatcagcaaagatataa

SEQ ID NO: 132221 - DNA, 22 bp, Artificial sequence
  SiRNA target sequence
atgggatcagcaaagatataat

SEQ ID NO: 132222 - DNA, 22 bp, Artificial sequence
  SiRNA target sequence
tgggatcagcaaagatataatg

SEQ ID NO: 132223 - DNA, 22 bp, Artificial sequence
  SiRNA target sequence
gggatcagcaaagatataatga

SEQ ID NO: 132224 - DNA, 22 bp, Artificial sequence
  SiRNA target sequence
ggatcagcaaagatataatgaa

SEQ ID NO: 132225 - DNA, 22 bp, Artificial sequence
  SiRNA target sequence
gatcagcaaagatataatgaag

SEQ ID NO: 132226 - DNA, 22 bp, Artificial sequence
  SiRNA target sequence
atcagcaaagatataatgaaga

SEQ ID NO: 132227 - DNA, 22 bp, Artificial sequence
  SiRNA target sequence
tcagcaaagatataatgaagaa

SEQ ID NO: 132228 - DNA, 22 bp, Artificial sequence
  SiRNA target sequence
cagcaaagatataatgaagaaa

SEQ ID NO: 132229 - DNA, 22 bp, Artificial sequence
  SiRNA target sequence
agcaaagatataatgaagaaac

SEQ ID NO: 132230 - DNA, 22 bp, Artificial sequence
  SiRNA target sequence
gcaaagatataatgaagaaaca

SEQ ID NO: 132231 - DNA, 22 bp, Artificial sequence
  SiRNA target sequence
caaagatataatgaagaaacaa

SEQ ID NO: 132232 - DNA, 22 bp, Artificial sequence
  SiRNA target sequence
aaagatataatgaagaaacaaa

SEQ ID NO: 132233 - DNA, 22 bp, Artificial sequence
  SiRNA target sequence
aagatataatgaagaaacaaaa

SEQ ID NO: 132234 - DNA, 22 bp, Artificial sequence
  SiRNA target sequence
agatataatgaagaaacaaaat

SEQ ID NO: 132235 - DNA, 22 bp, Artificial sequence
  SiRNA target sequence
gatataatgaagaaacaaaatt

SEQ ID NO: 132236 - DNA, 22 bp, Artificial sequence
  SiRNA target sequence
atataatgaagaaacaaaatta

SEQ ID NO: 132237 - DNA, 22 bp, Artificial sequence
  SiRNA target sequence
tataatgaagaaacaaaattat

SEQ ID NO: 132238 - DNA, 22 bp, Artificial sequence
  SiRNA target sequence
ataatgaagaaacaaaattatg

SEQ ID NO: 132239 - DNA, 22 bp, Artificial sequence
  SiRNA target sequence
taatgaagaaacaaaattatgc

SEQ ID NO: 132240 - DNA, 22 bp, Artificial sequence
  SiRNA target sequence
aatgaagaaacaaaattatgca

SEQ ID NO: 132241 - DNA, 22 bp, Artificial sequence
  SiRNA target sequence
atgaagaaacaaaattatgcat

SEQ ID NO: 132242 - DNA, 22 bp, Artificial sequence
  SiRNA target sequence
tgaagaaacaaaattatgcatg

SEQ ID NO: 132243 - DNA, 22 bp, Artificial sequence
  SiRNA target sequence
gaagaaacaaaattatgcatgg

SEQ ID NO: 132244 - DNA, 22 bp, Artificial sequence
  SiRNA target sequence
aagaaacaaaattatgcatgga

SEQ ID NO: 132245 - DNA, 22 bp, Artificial sequence
  SiRNA target sequence
agaaacaaaattatgcatggaa

SEQ ID NO: 132246 - DNA, 22 bp, Artificial sequence
  SiRNA target sequence
gaaacaaaattatgcatggaaa

SEQ ID NO: 132247 - DNA, 22 bp, Artificial sequence
  SiRNA target sequence
aaacaaaattatgcatggaaat

SEQ ID NO: 132248 - DNA, 22 bp, Artificial sequence
  SiRNA target sequence
aacaaaattatgcatggaaatg

SEQ ID NO: 132249 - DNA, 22 bp, Artificial sequence
  SiRNA target sequence
acaaaattatgcatggaaatga

SEQ ID NO: 132250 - DNA, 22 bp, Artificial sequence
  SiRNA target sequence
caaaattatgcatggaaatgat

SEQ ID NO: 132251 - DNA, 22 bp, Artificial sequence
  SiRNA target sequence
aaaattatgcatggaaatgatg

SEQ ID NO: 132252 - DNA, 22 bp, Artificial sequence
  SiRNA target sequence
aaattatgcatggaaatgatgg

SEQ ID NO: 132253 - DNA, 22 bp, Artificial sequence
  SiRNA target sequence
aattatgcatggaaatgatgga

SEQ ID NO: 132254 - DNA, 22 bp, Artificial sequence
  SiRNA target sequence
attatgcatggaaatgatggaa

SEQ ID NO: 132255 - DNA, 22 bp, Artificial sequence
  SiRNA target sequence
ttatgcatggaaatgatggaaa

SEQ ID NO: 132256 - DNA, 22 bp, Artificial sequence
  SiRNA target sequence
tatgcatggaaatgatggaaac

SEQ ID NO: 132257 - DNA, 22 bp, Artificial sequence
  SiRNA target sequence
atgcatggaaatgatggaaact

SEQ ID NO: 132258 - DNA, 22 bp, Artificial sequence
  SiRNA target sequence
tgcatggaaatgatggaaactt

SEQ ID NO: 132259 - DNA, 22 bp, Artificial sequence
  SiRNA target sequence
gcatggaaatgatggaaacttg

SEQ ID NO: 132260 - DNA, 22 bp, Artificial sequence
  SiRNA target sequence
catggaaatgatggaaacttgt

SEQ ID NO: 132261 - DNA, 22 bp, Artificial sequence
  SiRNA target sequence
atggaaatgatggaaacttgtg

SEQ ID NO: 132262 - DNA, 22 bp, Artificial sequence
  SiRNA target sequence
tggaaatgatggaaacttgtgg

SEQ ID NO: 132263 - DNA, 22 bp, Artificial sequence
  SiRNA target sequence
ggaaatgatggaaacttgtggt

SEQ ID NO: 132264 - DNA, 22 bp, Artificial sequence
  SiRNA target sequence
gaaatgatggaaacttgtggtt

SEQ ID NO: 132265 - DNA, 22 bp, Artificial sequence
  SiRNA target sequence
aaatgatggaaacttgtggtta

SEQ ID NO: 132266 - DNA, 22 bp, Artificial sequence
  SiRNA target sequence
aatgatggaaacttgtggttat

SEQ ID NO: 132267 - DNA, 22 bp, Artificial sequence
  SiRNA target sequence
atgatggaaacttgtggttata

SEQ ID NO: 132268 - DNA, 22 bp, Artificial sequence
  SiRNA target sequence
tgatggaaacttgtggttatag

SEQ ID NO: 132269 - DNA, 22 bp, Artificial sequence
  SiRNA target sequence
gatggaaacttgtggttatagt

SEQ ID NO: 132270 - DNA, 22 bp, Artificial sequence
  SiRNA target sequence
atggaaacttgtggttatagtt

SEQ ID NO: 132271 - DNA, 22 bp, Artificial sequence
  SiRNA target sequence
tggaaacttgtggttatagttt

SEQ ID NO: 132272 - DNA, 22 bp, Artificial sequence
  SiRNA target sequence
ggaaacttgtggttatagttta

SEQ ID NO: 132273 - DNA, 22 bp, Artificial sequence
  SiRNA target sequence
gaaacttgtggttatagtttat

SEQ ID NO: 132274 - DNA, 22 bp, Artificial sequence
  SiRNA target sequence
aaacttgtggttatagtttatt

SEQ ID NO: 132275 - DNA, 22 bp, Artificial sequence
  SiRNA target sequence
aacttgtggttatagtttatta

SEQ ID NO: 132276 - DNA, 22 bp, Artificial sequence
  SiRNA target sequence
acttgtggttatagtttattaa

SEQ ID NO: 132277 - DNA, 22 bp, Artificial sequence
  SiRNA target sequence
cttgtggttatagtttattaaa

SEQ ID NO: 132278 - DNA, 22 bp, Artificial sequence
  SiRNA target sequence
ttgtggttatagtttattaaaa

SEQ ID NO: 132279 - DNA, 22 bp, Artificial sequence
  SiRNA target sequence
tgtggttatagtttattaaaaa

SEQ ID NO: 132280 - DNA, 22 bp, Artificial sequence
  SiRNA target sequence
gtggttatagtttattaaaaaa

SEQ ID NO: 132281 - DNA, 22 bp, Artificial sequence
  SiRNA target sequence
tggttatagtttattaaaaaat

SEQ ID NO: 132282 - DNA, 22 bp, Artificial sequence
  SiRNA target sequence
ggttatagtttattaaaaaatt

SEQ ID NO: 132283 - DNA, 22 bp, Artificial sequence
  SiRNA target sequence
gttatagtttattaaaaaatta

SEQ ID NO: 132284 - DNA, 22 bp, Artificial sequence
  SiRNA target sequence
ttatagtttattaaaaaattaa

SEQ ID NO: 132285 - DNA, 23 bp, Artificial sequence
  SiRNA target sequence
atggtgtataaggttttatttac

SEQ ID NO: 132286 - DNA, 23 bp, Artificial sequence
  SiRNA target sequence
tggtgtataaggttttatttaca

SEQ ID NO: 132287 - DNA, 23 bp, Artificial sequence
  SiRNA target sequence
ggtgtataaggttttatttacag

SEQ ID NO: 132288 - DNA, 23 bp, Artificial sequence
  SiRNA target sequence
gtgtataaggttttatttacagt

SEQ ID NO: 132289 - DNA, 23 bp, Artificial sequence
  SiRNA target sequence
tgtataaggttttatttacagta

SEQ ID NO: 132290 - DNA, 23 bp, Artificial sequence
  SiRNA target sequence
gtataaggttttatttacagtaa

SEQ ID NO: 132291 - DNA, 23 bp, Artificial sequence
  SiRNA target sequence
tataaggttttatttacagtaat

SEQ ID NO: 132292 - DNA, 23 bp, Artificial sequence
  SiRNA target sequence
ataaggttttatttacagtaata

SEQ ID NO: 132293 - DNA, 23 bp, Artificial sequence
  SiRNA target sequence
taaggttttatttacagtaatag

SEQ ID NO: 132294 - DNA, 23 bp, Artificial sequence
  SiRNA target sequence
aaggttttatttacagtaatagg

SEQ ID NO: 132295 - DNA, 23 bp, Artificial sequence
  SiRNA target sequence
aggttttatttacagtaatagga

SEQ ID NO: 132296 - DNA, 23 bp, Artificial sequence
  SiRNA target sequence
ggttttatttacagtaataggat

SEQ ID NO: 132297 - DNA, 23 bp, Artificial sequence
  SiRNA target sequence
gttttatttacagtaataggatt

SEQ ID NO: 132298 - DNA, 23 bp, Artificial sequence
  SiRNA target sequence
ttttatttacagtaataggatta

SEQ ID NO: 132299 - DNA, 23 bp, Artificial sequence
  SiRNA target sequence
tttatttacagtaataggattaa

SEQ ID NO: 132300 - DNA, 23 bp, Artificial sequence
  SiRNA target sequence
ttatttacagtaataggattaat

SEQ ID NO: 132301 - DNA, 23 bp, Artificial sequence
  SiRNA target sequence
tatttacagtaataggattaata

SEQ ID NO: 132302 - DNA, 23 bp, Artificial sequence
  SiRNA target sequence
atttacagtaataggattaatat

SEQ ID NO: 132303 - DNA, 23 bp, Artificial sequence
  SiRNA target sequence
tttacagtaataggattaatatg

SEQ ID NO: 132304 - DNA, 23 bp, Artificial sequence
  SiRNA target sequence
ttacagtaataggattaatatgt

SEQ ID NO: 132305 - DNA, 23 bp, Artificial sequence
  SiRNA target sequence
tacagtaataggattaatatgtg

SEQ ID NO: 132306 - DNA, 23 bp, Artificial sequence
  SiRNA target sequence
acagtaataggattaatatgtgg

SEQ ID NO: 132307 - DNA, 23 bp, Artificial sequence
  SiRNA target sequence
cagtaataggattaatatgtggt

SEQ ID NO: 132308 - DNA, 23 bp, Artificial sequence
  SiRNA target sequence
agtaataggattaatatgtggta

SEQ ID NO: 132309 - DNA, 23 bp, Artificial sequence
  SiRNA target sequence
gtaataggattaatatgtggtat

SEQ ID NO: 132310 - DNA, 23 bp, Artificial sequence
  SiRNA target sequence
taataggattaatatgtggtata

SEQ ID NO: 132311 - DNA, 23 bp, Artificial sequence
  SiRNA target sequence
aataggattaatatgtggtatac

SEQ ID NO: 132312 - DNA, 23 bp, Artificial sequence
  SiRNA target sequence
ataggattaatatgtggtatact

SEQ ID NO: 132313 - DNA, 23 bp, Artificial sequence
  SiRNA target sequence
taggattaatatgtggtatactt

SEQ ID NO: 132314 - DNA, 23 bp, Artificial sequence
  SiRNA target sequence
aggattaatatgtggtatactta

SEQ ID NO: 132315 - DNA, 23 bp, Artificial sequence
  SiRNA target sequence
ggattaatatgtggtatacttac

SEQ ID NO: 132316 - DNA, 23 bp, Artificial sequence
  SiRNA target sequence
gattaatatgtggtatacttaca

SEQ ID NO: 132317 - DNA, 23 bp, Artificial sequence
  SiRNA target sequence
attaatatgtggtatacttacaa

SEQ ID NO: 132318 - DNA, 23 bp, Artificial sequence
  SiRNA target sequence
ttaatatgtggtatacttacaat

SEQ ID NO: 132319 - DNA, 23 bp, Artificial sequence
  SiRNA target sequence
taatatgtggtatacttacaata

SEQ ID NO: 132320 - DNA, 23 bp, Artificial sequence
  SiRNA target sequence
aatatgtggtatacttacaataa

SEQ ID NO: 132321 - DNA, 23 bp, Artificial sequence
  SiRNA target sequence
atatgtggtatacttacaataat

SEQ ID NO: 132322 - DNA, 23 bp, Artificial sequence
  SiRNA target sequence
tatgtggtatacttacaataatt

SEQ ID NO: 132323 - DNA, 23 bp, Artificial sequence
  SiRNA target sequence
atgtggtatacttacaataatta

SEQ ID NO: 132324 - DNA, 23 bp, Artificial sequence
  SiRNA target sequence
tgtggtatacttacaataattaa

SEQ ID NO: 132325 - DNA, 23 bp, Artificial sequence
  SiRNA target sequence
gtggtatacttacaataattaaa

SEQ ID NO: 132326 - DNA, 23 bp, Artificial sequence
  SiRNA target sequence
tggtatacttacaataattaaac

SEQ ID NO: 132327 - DNA, 23 bp, Artificial sequence
  SiRNA target sequence
ggtatacttacaataattaaacg

SEQ ID NO: 132328 - DNA, 23 bp, Artificial sequence
  SiRNA target sequence
gtatacttacaataattaaacga

SEQ ID NO: 132329 - DNA, 23 bp, Artificial sequence
  SiRNA target sequence
tatacttacaataattaaacgat

SEQ ID NO: 132330 - DNA, 23 bp, Artificial sequence
  SiRNA target sequence
atacttacaataattaaacgata

SEQ ID NO: 132331 - DNA, 23 bp, Artificial sequence
  SiRNA target sequence
tacttacaataattaaacgatac

SEQ ID NO: 132332 - DNA, 23 bp, Artificial sequence
  SiRNA target sequence
acttacaataattaaacgataca

SEQ ID NO: 132333 - DNA, 23 bp, Artificial sequence
  SiRNA target sequence
cttacaataattaaacgatacaa

SEQ ID NO: 132334 - DNA, 23 bp, Artificial sequence
  SiRNA target sequence
ttacaataattaaacgatacaag

SEQ ID NO: 132335 - DNA, 23 bp, Artificial sequence
  SiRNA target sequence
tacaataattaaacgatacaagt

SEQ ID NO: 132336 - DNA, 23 bp, Artificial sequence
  SiRNA target sequence
acaataattaaacgatacaagta

SEQ ID NO: 132337 - DNA, 23 bp, Artificial sequence
  SiRNA target sequence
caataattaaacgatacaagtat

SEQ ID NO: 132338 - DNA, 23 bp, Artificial sequence
  SiRNA target sequence
aataattaaacgatacaagtatt

SEQ ID NO: 132339 - DNA, 23 bp, Artificial sequence
  SiRNA target sequence
ataattaaacgatacaagtattt

SEQ ID NO: 132340 - DNA, 23 bp, Artificial sequence
  SiRNA target sequence
taattaaacgatacaagtatttt

SEQ ID NO: 132341 - DNA, 23 bp, Artificial sequence
  SiRNA target sequence
aattaaacgatacaagtatttta

SEQ ID NO: 132342 - DNA, 23 bp, Artificial sequence
  SiRNA target sequence
attaaacgatacaagtattttaa

SEQ ID NO: 132343 - DNA, 23 bp, Artificial sequence
  SiRNA target sequence
ttaaacgatacaagtattttaag

SEQ ID NO: 132344 - DNA, 23 bp, Artificial sequence
  SiRNA target sequence
taaacgatacaagtattttaaga

SEQ ID NO: 132345 - DNA, 23 bp, Artificial sequence
  SiRNA target sequence
aaacgatacaagtattttaagat

SEQ ID NO: 132346 - DNA, 23 bp, Artificial sequence
  SiRNA target sequence
aacgatacaagtattttaagata

SEQ ID NO: 132347 - DNA, 23 bp, Artificial sequence
  SiRNA target sequence
acgatacaagtattttaagataa

SEQ ID NO: 132348 - DNA, 23 bp, Artificial sequence
  SiRNA target sequence
cgatacaagtattttaagataaa

SEQ ID NO: 132349 - DNA, 23 bp, Artificial sequence
  SiRNA target sequence
gatacaagtattttaagataaaa

SEQ ID NO: 132350 - DNA, 23 bp, Artificial sequence
  SiRNA target sequence
atacaagtattttaagataaaaa

SEQ ID NO: 132351 - DNA, 23 bp, Artificial sequence
  SiRNA target sequence
tacaagtattttaagataaaaaa

SEQ ID NO: 132352 - DNA, 23 bp, Artificial sequence
  SiRNA target sequence
acaagtattttaagataaaaaaa

SEQ ID NO: 132353 - DNA, 23 bp, Artificial sequence
  SiRNA target sequence
caagtattttaagataaaaaaat

SEQ ID NO: 132354 - DNA, 23 bp, Artificial sequence
  SiRNA target sequence
aagtattttaagataaaaaaatt

SEQ ID NO: 132355 - DNA, 23 bp, Artificial sequence
  SiRNA target sequence
agtattttaagataaaaaaattg

SEQ ID NO: 132356 - DNA, 23 bp, Artificial sequence
  SiRNA target sequence
gtattttaagataaaaaaattgg

SEQ ID NO: 132357 - DNA, 23 bp, Artificial sequence
  SiRNA target sequence
tattttaagataaaaaaattggc

SEQ ID NO: 132358 - DNA, 23 bp, Artificial sequence
  SiRNA target sequence
attttaagataaaaaaattggcc

SEQ ID NO: 132359 - DNA, 23 bp, Artificial sequence
  SiRNA target sequence
ttttaagataaaaaaattggcct

SEQ ID NO: 132360 - DNA, 23 bp, Artificial sequence
  SiRNA target sequence
tttaagataaaaaaattggcctt

SEQ ID NO: 132361 - DNA, 23 bp, Artificial sequence
  SiRNA target sequence
ttaagataaaaaaattggcctta

SEQ ID NO: 132362 - DNA, 23 bp, Artificial sequence
  SiRNA target sequence
taagataaaaaaattggccttaa

SEQ ID NO: 132363 - DNA, 23 bp, Artificial sequence
  SiRNA target sequence
aagataaaaaaattggccttaac

SEQ ID NO: 132364 - DNA, 23 bp, Artificial sequence
  SiRNA target sequence
agataaaaaaattggccttaact

SEQ ID NO: 132365 - DNA, 23 bp, Artificial sequence
  SiRNA target sequence
gataaaaaaattggccttaactt

SEQ ID NO: 132366 - DNA, 23 bp, Artificial sequence
  SiRNA target sequence
ataaaaaaattggccttaactta

SEQ ID NO: 132367 - DNA, 23 bp, Artificial sequence
  SiRNA target sequence
taaaaaaattggccttaacttac

SEQ ID NO: 132368 - DNA, 23 bp, Artificial sequence
  SiRNA target sequence
aaaaaaattggccttaacttact

SEQ ID NO: 132369 - DNA, 23 bp, Artificial sequence
  SiRNA target sequence
aaaaaattggccttaacttactt

SEQ ID NO: 132370 - DNA, 23 bp, Artificial sequence
  SiRNA target sequence
aaaaattggccttaacttacttc

SEQ ID NO: 132371 - DNA, 23 bp, Artificial sequence
  SiRNA target sequence
aaaattggccttaacttacttcg

SEQ ID NO: 132372 - DNA, 23 bp, Artificial sequence
  SiRNA target sequence
aaattggccttaacttacttcgg

SEQ ID NO: 132373 - DNA, 23 bp, Artificial sequence
  SiRNA target sequence
aattggccttaacttacttcggg

SEQ ID NO: 132374 - DNA, 23 bp, Artificial sequence
  SiRNA target sequence
attggccttaacttacttcggga

SEQ ID NO: 132375 - DNA, 23 bp, Artificial sequence
  SiRNA target sequence
ttggccttaacttacttcgggaa

SEQ ID NO: 132376 - DNA, 23 bp, Artificial sequence
  SiRNA target sequence
tggccttaacttacttcgggaaa

SEQ ID NO: 132377 - DNA, 23 bp, Artificial sequence
  SiRNA target sequence
ggccttaacttacttcgggaaac

SEQ ID NO: 132378 - DNA, 23 bp, Artificial sequence
  SiRNA target sequence
gccttaacttacttcgggaaaca

SEQ ID NO: 132379 - DNA, 23 bp, Artificial sequence
  SiRNA target sequence
ccttaacttacttcgggaaacaa

SEQ ID NO: 132380 - DNA, 23 bp, Artificial sequence
  SiRNA target sequence
cttaacttacttcgggaaacaag

SEQ ID NO: 132381 - DNA, 23 bp, Artificial sequence
  SiRNA target sequence
ttaacttacttcgggaaacaaga

SEQ ID NO: 132382 - DNA, 23 bp, Artificial sequence
  SiRNA target sequence
taacttacttcgggaaacaagac

SEQ ID NO: 132383 - DNA, 23 bp, Artificial sequence
  SiRNA target sequence
aacttacttcgggaaacaagact

SEQ ID NO: 132384 - DNA, 23 bp, Artificial sequence
  SiRNA target sequence
acttacttcgggaaacaagactt

SEQ ID NO: 132385 - DNA, 23 bp, Artificial sequence
  SiRNA target sequence
cttacttcgggaaacaagacttg

SEQ ID NO: 132386 - DNA, 23 bp, Artificial sequence
  SiRNA target sequence
ttacttcgggaaacaagacttgc

SEQ ID NO: 132387 - DNA, 23 bp, Artificial sequence
  SiRNA target sequence
tacttcgggaaacaagacttgca

SEQ ID NO: 132388 - DNA, 23 bp, Artificial sequence
  SiRNA target sequence
acttcgggaaacaagacttgcaa

SEQ ID NO: 132389 - DNA, 23 bp, Artificial sequence
  SiRNA target sequence
cttcgggaaacaagacttgcaat

SEQ ID NO: 132390 - DNA, 23 bp, Artificial sequence
  SiRNA target sequence
ttcgggaaacaagacttgcaatg

SEQ ID NO: 132391 - DNA, 23 bp, Artificial sequence
  SiRNA target sequence
tcgggaaacaagacttgcaatgg

SEQ ID NO: 132392 - DNA, 23 bp, Artificial sequence
  SiRNA target sequence
cgggaaacaagacttgcaatgga

SEQ ID NO: 132393 - DNA, 23 bp, Artificial sequence
  SiRNA target sequence
gggaaacaagacttgcaatggaa

SEQ ID NO: 132394 - DNA, 23 bp, Artificial sequence
  SiRNA target sequence
ggaaacaagacttgcaatggaaa

SEQ ID NO: 132395 - DNA, 23 bp, Artificial sequence
  SiRNA target sequence
gaaacaagacttgcaatggaaac

SEQ ID NO: 132396 - DNA, 23 bp, Artificial sequence
  SiRNA target sequence
aaacaagacttgcaatggaaacc

SEQ ID NO: 132397 - DNA, 23 bp, Artificial sequence
  SiRNA target sequence
aacaagacttgcaatggaaacct

SEQ ID NO: 132398 - DNA, 23 bp, Artificial sequence
  SiRNA target sequence
acaagacttgcaatggaaaccta

SEQ ID NO: 132399 - DNA, 23 bp, Artificial sequence
  SiRNA target sequence
caagacttgcaatggaaacctaa

SEQ ID NO: 132400 - DNA, 23 bp, Artificial sequence
  SiRNA target sequence
aagacttgcaatggaaacctaaa

SEQ ID NO: 132401 - DNA, 23 bp, Artificial sequence
  SiRNA target sequence
agacttgcaatggaaacctaaaa

SEQ ID NO: 132402 - DNA, 23 bp, Artificial sequence
  SiRNA target sequence
gacttgcaatggaaacctaaaag

SEQ ID NO: 132403 - DNA, 23 bp, Artificial sequence
  SiRNA target sequence
acttgcaatggaaacctaaaagt

SEQ ID NO: 132404 - DNA, 23 bp, Artificial sequence
  SiRNA target sequence
cttgcaatggaaacctaaaagtc

SEQ ID NO: 132405 - DNA, 23 bp, Artificial sequence
  SiRNA target sequence
ttgcaatggaaacctaaaagtcg

SEQ ID NO: 132406 - DNA, 23 bp, Artificial sequence
  SiRNA target sequence
tgcaatggaaacctaaaagtcgg

SEQ ID NO: 132407 - DNA, 23 bp, Artificial sequence
  SiRNA target sequence
gcaatggaaacctaaaagtcggt

SEQ ID NO: 132408 - DNA, 23 bp, Artificial sequence
  SiRNA target sequence
caatggaaacctaaaagtcggtc

SEQ ID NO: 132409 - DNA, 23 bp, Artificial sequence
  SiRNA target sequence
aatggaaacctaaaagtcggtca

SEQ ID NO: 132410 - DNA, 23 bp, Artificial sequence
  SiRNA target sequence
atggaaacctaaaagtcggtcag

SEQ ID NO: 132411 - DNA, 23 bp, Artificial sequence
  SiRNA target sequence
tggaaacctaaaagtcggtcaga

SEQ ID NO: 132412 - DNA, 23 bp, Artificial sequence
  SiRNA target sequence
ggaaacctaaaagtcggtcagaa

SEQ ID NO: 132413 - DNA, 23 bp, Artificial sequence
  SiRNA target sequence
gaaacctaaaagtcggtcagaaa

SEQ ID NO: 132414 - DNA, 23 bp, Artificial sequence
  SiRNA target sequence
aaacctaaaagtcggtcagaaat

SEQ ID NO: 132415 - DNA, 23 bp, Artificial sequence
  SiRNA target sequence
aacctaaaagtcggtcagaaatt

SEQ ID NO: 132416 - DNA, 23 bp, Artificial sequence
  SiRNA target sequence
acctaaaagtcggtcagaaatta

SEQ ID NO: 132417 - DNA, 23 bp, Artificial sequence
  SiRNA target sequence
cctaaaagtcggtcagaaattat

SEQ ID NO: 132418 - DNA, 23 bp, Artificial sequence
  SiRNA target sequence
ctaaaagtcggtcagaaattatt

SEQ ID NO: 132419 - DNA, 23 bp, Artificial sequence
  SiRNA target sequence
taaaagtcggtcagaaattatta

SEQ ID NO: 132420 - DNA, 23 bp, Artificial sequence
  SiRNA target sequence
aaaagtcggtcagaaattattaa

SEQ ID NO: 132421 - DNA, 23 bp, Artificial sequence
  SiRNA target sequence
aaagtcggtcagaaattattaac

SEQ ID NO: 132422 - DNA, 23 bp, Artificial sequence
  SiRNA target sequence
aagtcggtcagaaattattaacg

SEQ ID NO: 132423 - DNA, 23 bp, Artificial sequence
  SiRNA target sequence
agtcggtcagaaattattaacga

SEQ ID NO: 132424 - DNA, 23 bp, Artificial sequence
  SiRNA target sequence
gtcggtcagaaattattaacgat

SEQ ID NO: 132425 - DNA, 23 bp, Artificial sequence
  SiRNA target sequence
tcggtcagaaattattaacgatt

SEQ ID NO: 132426 - DNA, 23 bp, Artificial sequence
  SiRNA target sequence
cggtcagaaattattaacgattt

SEQ ID NO: 132427 - DNA, 23 bp, Artificial sequence
  SiRNA target sequence
ggtcagaaattattaacgattta

SEQ ID NO: 132428 - DNA, 23 bp, Artificial sequence
  SiRNA target sequence
gtcagaaattattaacgatttaa

SEQ ID NO: 132429 - DNA, 23 bp, Artificial sequence
  SiRNA target sequence
tcagaaattattaacgatttaaa

SEQ ID NO: 132430 - DNA, 23 bp, Artificial sequence
  SiRNA target sequence
cagaaattattaacgatttaaaa

SEQ ID NO: 132431 - DNA, 23 bp, Artificial sequence
  SiRNA target sequence
agaaattattaacgatttaaaaa

SEQ ID NO: 132432 - DNA, 23 bp, Artificial sequence
  SiRNA target sequence
gaaattattaacgatttaaaaaa

SEQ ID NO: 132433 - DNA, 23 bp, Artificial sequence
  SiRNA target sequence
aaattattaacgatttaaaaaat

SEQ ID NO: 132434 - DNA, 23 bp, Artificial sequence
  SiRNA target sequence
aattattaacgatttaaaaaata

SEQ ID NO: 132435 - DNA, 23 bp, Artificial sequence
  SiRNA target sequence
attattaacgatttaaaaaatac

SEQ ID NO: 132436 - DNA, 23 bp, Artificial sequence
  SiRNA target sequence
ttattaacgatttaaaaaataca

SEQ ID NO: 132437 - DNA, 23 bp, Artificial sequence
  SiRNA target sequence
tattaacgatttaaaaaatacaa

SEQ ID NO: 132438 - DNA, 23 bp, Artificial sequence
  SiRNA target sequence
attaacgatttaaaaaatacaaa

SEQ ID NO: 132439 - DNA, 23 bp, Artificial sequence
  SiRNA target sequence
ttaacgatttaaaaaatacaaac

SEQ ID NO: 132440 - DNA, 23 bp, Artificial sequence
  SiRNA target sequence
taacgatttaaaaaatacaaact

SEQ ID NO: 132441 - DNA, 23 bp, Artificial sequence
  SiRNA target sequence
aacgatttaaaaaatacaaactt

SEQ ID NO: 132442 - DNA, 23 bp, Artificial sequence
  SiRNA target sequence
acgatttaaaaaatacaaacttt

SEQ ID NO: 132443 - DNA, 23 bp, Artificial sequence
  SiRNA target sequence
cgatttaaaaaatacaaactttg

SEQ ID NO: 132444 - DNA, 23 bp, Artificial sequence
  SiRNA target sequence
gatttaaaaaatacaaactttga

SEQ ID NO: 132445 - DNA, 23 bp, Artificial sequence
  SiRNA target sequence
atttaaaaaatacaaactttgac

SEQ ID NO: 132446 - DNA, 23 bp, Artificial sequence
  SiRNA target sequence
tttaaaaaatacaaactttgaca

SEQ ID NO: 132447 - DNA, 23 bp, Artificial sequence
  SiRNA target sequence
ttaaaaaatacaaactttgacat

SEQ ID NO: 132448 - DNA, 23 bp, Artificial sequence
  SiRNA target sequence
taaaaaatacaaactttgacata

SEQ ID NO: 132449 - DNA, 23 bp, Artificial sequence
  SiRNA target sequence
aaaaaatacaaactttgacatat

SEQ ID NO: 132450 - DNA, 23 bp, Artificial sequence
  SiRNA target sequence
aaaaatacaaactttgacatatt

SEQ ID NO: 132451 - DNA, 23 bp, Artificial sequence
  SiRNA target sequence
aaaatacaaactttgacatattg

SEQ ID NO: 132452 - DNA, 23 bp, Artificial sequence
  SiRNA target sequence
aaatacaaactttgacatattga

SEQ ID NO: 132453 - DNA, 23 bp, Artificial sequence
  SiRNA target sequence
aatacaaactttgacatattgat

SEQ ID NO: 132454 - DNA, 23 bp, Artificial sequence
  SiRNA target sequence
atacaaactttgacatattgatt

SEQ ID NO: 132455 - DNA, 23 bp, Artificial sequence
  SiRNA target sequence
tacaaactttgacatattgatta

SEQ ID NO: 132456 - DNA, 23 bp, Artificial sequence
  SiRNA target sequence
acaaactttgacatattgattat

SEQ ID NO: 132457 - DNA, 23 bp, Artificial sequence
  SiRNA target sequence
caaactttgacatattgattatt

SEQ ID NO: 132458 - DNA, 23 bp, Artificial sequence
  SiRNA target sequence
aaactttgacatattgattattg

SEQ ID NO: 132459 - DNA, 23 bp, Artificial sequence
  SiRNA target sequence
aactttgacatattgattattgg

SEQ ID NO: 132460 - DNA, 23 bp, Artificial sequence
  SiRNA target sequence
actttgacatattgattattggt

SEQ ID NO: 132461 - DNA, 23 bp, Artificial sequence
  SiRNA target sequence
ctttgacatattgattattggtg

SEQ ID NO: 132462 - DNA, 23 bp, Artificial sequence
  SiRNA target sequence
tttgacatattgattattggtgg

SEQ ID NO: 132463 - DNA, 23 bp, Artificial sequence
  SiRNA target sequence
ttgacatattgattattggtggc

SEQ ID NO: 132464 - DNA, 23 bp, Artificial sequence
  SiRNA target sequence
tgacatattgattattggtggcg

SEQ ID NO: 132465 - DNA, 23 bp, Artificial sequence
  SiRNA target sequence
gacatattgattattggtggcgg

SEQ ID NO: 132466 - DNA, 23 bp, Artificial sequence
  SiRNA target sequence
acatattgattattggtggcggt

SEQ ID NO: 132467 - DNA, 23 bp, Artificial sequence
  SiRNA target sequence
catattgattattggtggcggtt

SEQ ID NO: 132468 - DNA, 23 bp, Artificial sequence
  SiRNA target sequence
atattgattattggtggcggttc

SEQ ID NO: 132469 - DNA, 23 bp, Artificial sequence
  SiRNA target sequence
tattgattattggtggcggttca

SEQ ID NO: 132470 - DNA, 23 bp, Artificial sequence
  SiRNA target sequence
attgattattggtggcggttcaa

SEQ ID NO: 132471 - DNA, 23 bp, Artificial sequence
  SiRNA target sequence
ttgattattggtggcggttcaac

SEQ ID NO: 132472 - DNA, 23 bp, Artificial sequence
  SiRNA target sequence
tgattattggtggcggttcaacg

SEQ ID NO: 132473 - DNA, 23 bp, Artificial sequence
  SiRNA target sequence
gattattggtggcggttcaacgg

SEQ ID NO: 132474 - DNA, 23 bp, Artificial sequence
  SiRNA target sequence
attattggtggcggttcaacggg

SEQ ID NO: 132475 - DNA, 23 bp, Artificial sequence
  SiRNA target sequence
ttattggtggcggttcaacggga

SEQ ID NO: 132476 - DNA, 23 bp, Artificial sequence
  SiRNA target sequence
tattggtggcggttcaacgggaa

SEQ ID NO: 132477 - DNA, 23 bp, Artificial sequence
  SiRNA target sequence
attggtggcggttcaacgggaat

SEQ ID NO: 132478 - DNA, 23 bp, Artificial sequence
  SiRNA target sequence
ttggtggcggttcaacgggaatg

SEQ ID NO: 132479 - DNA, 23 bp, Artificial sequence
  SiRNA target sequence
tggtggcggttcaacgggaatgg

SEQ ID NO: 132480 - DNA, 23 bp, Artificial sequence
  SiRNA target sequence
ggtggcggttcaacgggaatggg

SEQ ID NO: 132481 - DNA, 23 bp, Artificial sequence
  SiRNA target sequence
gtggcggttcaacgggaatggga

SEQ ID NO: 132482 - DNA, 23 bp, Artificial sequence
  SiRNA target sequence
tggcggttcaacgggaatgggat

SEQ ID NO: 132483 - DNA, 23 bp, Artificial sequence
  SiRNA target sequence
ggcggttcaacgggaatgggatg

SEQ ID NO: 132484 - DNA, 23 bp, Artificial sequence
  SiRNA target sequence
gcggttcaacgggaatgggatgt

SEQ ID NO: 132485 - DNA, 23 bp, Artificial sequence
  SiRNA target sequence
cggttcaacgggaatgggatgtg

SEQ ID NO: 132486 - DNA, 23 bp, Artificial sequence
  SiRNA target sequence
ggttcaacgggaatgggatgtgc

SEQ ID NO: 132487 - DNA, 23 bp, Artificial sequence
  SiRNA target sequence
gttcaacgggaatgggatgtgca

SEQ ID NO: 132488 - DNA, 23 bp, Artificial sequence
  SiRNA target sequence
ttcaacgggaatgggatgtgcaa

SEQ ID NO: 132489 - DNA, 23 bp, Artificial sequence
  SiRNA target sequence
tcaacgggaatgggatgtgcaat

SEQ ID NO: 132490 - DNA, 23 bp, Artificial sequence
  SiRNA target sequence
caacgggaatgggatgtgcaatc

SEQ ID NO: 132491 - DNA, 23 bp, Artificial sequence
  SiRNA target sequence
aacgggaatgggatgtgcaatcg

SEQ ID NO: 132492 - DNA, 23 bp, Artificial sequence
  SiRNA target sequence
acgggaatgggatgtgcaatcga

SEQ ID NO: 132493 - DNA, 23 bp, Artificial sequence
  SiRNA target sequence
cgggaatgggatgtgcaatcgaa

SEQ ID NO: 132494 - DNA, 23 bp, Artificial sequence
  SiRNA target sequence
gggaatgggatgtgcaatcgaag

SEQ ID NO: 132495 - DNA, 23 bp, Artificial sequence
  SiRNA target sequence
ggaatgggatgtgcaatcgaagc

SEQ ID NO: 132496 - DNA, 23 bp, Artificial sequence
  SiRNA target sequence
gaatgggatgtgcaatcgaagca

SEQ ID NO: 132497 - DNA, 23 bp, Artificial sequence
  SiRNA target sequence
aatgggatgtgcaatcgaagcag

SEQ ID NO: 132498 - DNA, 23 bp, Artificial sequence
  SiRNA target sequence
atgggatgtgcaatcgaagcagc

SEQ ID NO: 132499 - DNA, 23 bp, Artificial sequence
  SiRNA target sequence
tgggatgtgcaatcgaagcagct

SEQ ID NO: 132500 - DNA, 23 bp, Artificial sequence
  SiRNA target sequence
gggatgtgcaatcgaagcagcta

SEQ ID NO: 132501 - DNA, 23 bp, Artificial sequence
  SiRNA target sequence
ggatgtgcaatcgaagcagctac

SEQ ID NO: 132502 - DNA, 23 bp, Artificial sequence
  SiRNA target sequence
gatgtgcaatcgaagcagctaca

SEQ ID NO: 132503 - DNA, 23 bp, Artificial sequence
  SiRNA target sequence
atgtgcaatcgaagcagctacac

SEQ ID NO: 132504 - DNA, 23 bp, Artificial sequence
  SiRNA target sequence
tgtgcaatcgaagcagctacacg

SEQ ID NO: 132505 - DNA, 23 bp, Artificial sequence
  SiRNA target sequence
gtgcaatcgaagcagctacacga

SEQ ID NO: 132506 - DNA, 23 bp, Artificial sequence
  SiRNA target sequence
tgcaatcgaagcagctacacgag

SEQ ID NO: 132507 - DNA, 23 bp, Artificial sequence
  SiRNA target sequence
gcaatcgaagcagctacacgagg

SEQ ID NO: 132508 - DNA, 23 bp, Artificial sequence
  SiRNA target sequence
caatcgaagcagctacacgaggt

SEQ ID NO: 132509 - DNA, 23 bp, Artificial sequence
  SiRNA target sequence
aatcgaagcagctacacgaggta

SEQ ID NO: 132510 - DNA, 23 bp, Artificial sequence
  SiRNA target sequence
atcgaagcagctacacgaggtat

SEQ ID NO: 132511 - DNA, 23 bp, Artificial sequence
  SiRNA target sequence
tcgaagcagctacacgaggtata

SEQ ID NO: 132512 - DNA, 23 bp, Artificial sequence
  SiRNA target sequence
cgaagcagctacacgaggtataa

SEQ ID NO: 132513 - DNA, 23 bp, Artificial sequence
  SiRNA target sequence
gaagcagctacacgaggtataag

SEQ ID NO: 132514 - DNA, 23 bp, Artificial sequence
  SiRNA target sequence
aagcagctacacgaggtataagt

SEQ ID NO: 132515 - DNA, 23 bp, Artificial sequence
  SiRNA target sequence
agcagctacacgaggtataagtg

SEQ ID NO: 132516 - DNA, 23 bp, Artificial sequence
  SiRNA target sequence
gcagctacacgaggtataagtgt

SEQ ID NO: 132517 - DNA, 23 bp, Artificial sequence
  SiRNA target sequence
cagctacacgaggtataagtgtt

SEQ ID NO: 132518 - DNA, 23 bp, Artificial sequence
  SiRNA target sequence
agctacacgaggtataagtgttg

SEQ ID NO: 132519 - DNA, 23 bp, Artificial sequence
  SiRNA target sequence
gctacacgaggtataagtgttgg

SEQ ID NO: 132520 - DNA, 23 bp, Artificial sequence
  SiRNA target sequence
ctacacgaggtataagtgttggc

SEQ ID NO: 132521 - DNA, 23 bp, Artificial sequence
  SiRNA target sequence
tacacgaggtataagtgttggcc

SEQ ID NO: 132522 - DNA, 23 bp, Artificial sequence
  SiRNA target sequence
acacgaggtataagtgttggcct

SEQ ID NO: 132523 - DNA, 23 bp, Artificial sequence
  SiRNA target sequence
cacgaggtataagtgttggcctg

SEQ ID NO: 132524 - DNA, 23 bp, Artificial sequence
  SiRNA target sequence
acgaggtataagtgttggcctga

SEQ ID NO: 132525 - DNA, 23 bp, Artificial sequence
  SiRNA target sequence
cgaggtataagtgttggcctgat

SEQ ID NO: 132526 - DNA, 23 bp, Artificial sequence
  SiRNA target sequence
gaggtataagtgttggcctgata

SEQ ID NO: 132527 - DNA, 23 bp, Artificial sequence
  SiRNA target sequence
aggtataagtgttggcctgatag

SEQ ID NO: 132528 - DNA, 23 bp, Artificial sequence
  SiRNA target sequence
ggtataagtgttggcctgataga

SEQ ID NO: 132529 - DNA, 23 bp, Artificial sequence
  SiRNA target sequence
gtataagtgttggcctgatagaa

SEQ ID NO: 132530 - DNA, 23 bp, Artificial sequence
  SiRNA target sequence
tataagtgttggcctgatagaag

SEQ ID NO: 132531 - DNA, 23 bp, Artificial sequence
  SiRNA target sequence
ataagtgttggcctgatagaagc

SEQ ID NO: 132532 - DNA, 23 bp, Artificial sequence
  SiRNA target sequence
taagtgttggcctgatagaagca

SEQ ID NO: 132533 - DNA, 23 bp, Artificial sequence
  SiRNA target sequence
aagtgttggcctgatagaagcac

SEQ ID NO: 132534 - DNA, 23 bp, Artificial sequence
  SiRNA target sequence
agtgttggcctgatagaagcaca

SEQ ID NO: 132535 - DNA, 23 bp, Artificial sequence
  SiRNA target sequence
gtgttggcctgatagaagcacat

SEQ ID NO: 132536 - DNA, 23 bp, Artificial sequence
  SiRNA target sequence
tgttggcctgatagaagcacatg

SEQ ID NO: 132537 - DNA, 23 bp, Artificial sequence
  SiRNA target sequence
gttggcctgatagaagcacatga

SEQ ID NO: 132538 - DNA, 23 bp, Artificial sequence
  SiRNA target sequence
ttggcctgatagaagcacatgat

SEQ ID NO: 132539 - DNA, 23 bp, Artificial sequence
  SiRNA target sequence
tggcctgatagaagcacatgatt

SEQ ID NO: 132540 - DNA, 23 bp, Artificial sequence
  SiRNA target sequence
ggcctgatagaagcacatgattt

SEQ ID NO: 132541 - DNA, 23 bp, Artificial sequence
  SiRNA target sequence
gcctgatagaagcacatgatttt

SEQ ID NO: 132542 - DNA, 23 bp, Artificial sequence
  SiRNA target sequence
cctgatagaagcacatgattttg

SEQ ID NO: 132543 - DNA, 23 bp, Artificial sequence
  SiRNA target sequence
ctgatagaagcacatgattttgg

SEQ ID NO: 132544 - DNA, 23 bp, Artificial sequence
  SiRNA target sequence
tgatagaagcacatgattttggt

SEQ ID NO: 132545 - DNA, 23 bp, Artificial sequence
  SiRNA target sequence
gatagaagcacatgattttggtt

SEQ ID NO: 132546 - DNA, 23 bp, Artificial sequence
  SiRNA target sequence
atagaagcacatgattttggttc

SEQ ID NO: 132547 - DNA, 23 bp, Artificial sequence
  SiRNA target sequence
tagaagcacatgattttggttcg

SEQ ID NO: 132548 - DNA, 23 bp, Artificial sequence
  SiRNA target sequence
agaagcacatgattttggttcgg

SEQ ID NO: 132549 - DNA, 23 bp, Artificial sequence
  SiRNA target sequence
gaagcacatgattttggttcggg

SEQ ID NO: 132550 - DNA, 23 bp, Artificial sequence
  SiRNA target sequence
aagcacatgattttggttcgggc

SEQ ID NO: 132551 - DNA, 23 bp, Artificial sequence
  SiRNA target sequence
agcacatgattttggttcgggca

SEQ ID NO: 132552 - DNA, 23 bp, Artificial sequence
  SiRNA target sequence
gcacatgattttggttcgggcac

SEQ ID NO: 132553 - DNA, 23 bp, Artificial sequence
  SiRNA target sequence
cacatgattttggttcgggcacg

SEQ ID NO: 132554 - DNA, 23 bp, Artificial sequence
  SiRNA target sequence
acatgattttggttcgggcacga

SEQ ID NO: 132555 - DNA, 23 bp, Artificial sequence
  SiRNA target sequence
catgattttggttcgggcacgag

SEQ ID NO: 132556 - DNA, 23 bp, Artificial sequence
  SiRNA target sequence
atgattttggttcgggcacgagt

SEQ ID NO: 132557 - DNA, 23 bp, Artificial sequence
  SiRNA target sequence
tgattttggttcgggcacgagtt

SEQ ID NO: 132558 - DNA, 23 bp, Artificial sequence
  SiRNA target sequence
gattttggttcgggcacgagttc

SEQ ID NO: 132559 - DNA, 23 bp, Artificial sequence
  SiRNA target sequence
attttggttcgggcacgagttca

SEQ ID NO: 132560 - DNA, 23 bp, Artificial sequence
  SiRNA target sequence
ttttggttcgggcacgagttcaa

SEQ ID NO: 132561 - DNA, 23 bp, Artificial sequence
  SiRNA target sequence
tttggttcgggcacgagttcaaa

SEQ ID NO: 132562 - DNA, 23 bp, Artificial sequence
  SiRNA target sequence
ttggttcgggcacgagttcaaaa

SEQ ID NO: 132563 - DNA, 23 bp, Artificial sequence
  SiRNA target sequence
tggttcgggcacgagttcaaaat

SEQ ID NO: 132564 - DNA, 23 bp, Artificial sequence
  SiRNA target sequence
ggttcgggcacgagttcaaaatc

SEQ ID NO: 132565 - DNA, 23 bp, Artificial sequence
  SiRNA target sequence
gttcgggcacgagttcaaaatct

SEQ ID NO: 132566 - DNA, 23 bp, Artificial sequence
  SiRNA target sequence
ttcgggcacgagttcaaaatcta

SEQ ID NO: 132567 - DNA, 23 bp, Artificial sequence
  SiRNA target sequence
tcgggcacgagttcaaaatctac

SEQ ID NO: 132568 - DNA, 23 bp, Artificial sequence
  SiRNA target sequence
cgggcacgagttcaaaatctaca

SEQ ID NO: 132569 - DNA, 23 bp, Artificial sequence
  SiRNA target sequence
gggcacgagttcaaaatctacaa

SEQ ID NO: 132570 - DNA, 23 bp, Artificial sequence
  SiRNA target sequence
ggcacgagttcaaaatctacaaa

SEQ ID NO: 132571 - DNA, 23 bp, Artificial sequence
  SiRNA target sequence
gcacgagttcaaaatctacaaaa

SEQ ID NO: 132572 - DNA, 23 bp, Artificial sequence
  SiRNA target sequence
cacgagttcaaaatctacaaaac

SEQ ID NO: 132573 - DNA, 23 bp, Artificial sequence
  SiRNA target sequence
acgagttcaaaatctacaaaact

SEQ ID NO: 132574 - DNA, 23 bp, Artificial sequence
  SiRNA target sequence
cgagttcaaaatctacaaaactt

SEQ ID NO: 132575 - DNA, 23 bp, Artificial sequence
  SiRNA target sequence
gagttcaaaatctacaaaacttt

SEQ ID NO: 132576 - DNA, 23 bp, Artificial sequence
  SiRNA target sequence
agttcaaaatctacaaaactttt

SEQ ID NO: 132577 - DNA, 23 bp, Artificial sequence
  SiRNA target sequence
gttcaaaatctacaaaacttttt

SEQ ID NO: 132578 - DNA, 23 bp, Artificial sequence
  SiRNA target sequence
ttcaaaatctacaaaactttttc

SEQ ID NO: 132579 - DNA, 23 bp, Artificial sequence
  SiRNA target sequence
tcaaaatctacaaaactttttca

SEQ ID NO: 132580 - DNA, 23 bp, Artificial sequence
  SiRNA target sequence
caaaatctacaaaactttttcat

SEQ ID NO: 132581 - DNA, 23 bp, Artificial sequence
  SiRNA target sequence
aaaatctacaaaactttttcatg

SEQ ID NO: 132582 - DNA, 23 bp, Artificial sequence
  SiRNA target sequence
aaatctacaaaactttttcatgg

SEQ ID NO: 132583 - DNA, 23 bp, Artificial sequence
  SiRNA target sequence
aatctacaaaactttttcatggc

SEQ ID NO: 132584 - DNA, 23 bp, Artificial sequence
  SiRNA target sequence
atctacaaaactttttcatggcg

SEQ ID NO: 132585 - DNA, 23 bp, Artificial sequence
  SiRNA target sequence
tctacaaaactttttcatggcgg

SEQ ID NO: 132586 - DNA, 23 bp, Artificial sequence
  SiRNA target sequence
ctacaaaactttttcatggcggt

SEQ ID NO: 132587 - DNA, 23 bp, Artificial sequence
  SiRNA target sequence
tacaaaactttttcatggcggtg

SEQ ID NO: 132588 - DNA, 23 bp, Artificial sequence
  SiRNA target sequence
acaaaactttttcatggcggtgt

SEQ ID NO: 132589 - DNA, 23 bp, Artificial sequence
  SiRNA target sequence
caaaactttttcatggcggtgta

SEQ ID NO: 132590 - DNA, 23 bp, Artificial sequence
  SiRNA target sequence
aaaactttttcatggcggtgtac

SEQ ID NO: 132591 - DNA, 23 bp, Artificial sequence
  SiRNA target sequence
aaactttttcatggcggtgtacg

SEQ ID NO: 132592 - DNA, 23 bp, Artificial sequence
  SiRNA target sequence
aactttttcatggcggtgtacgc

SEQ ID NO: 132593 - DNA, 23 bp, Artificial sequence
  SiRNA target sequence
actttttcatggcggtgtacgct

SEQ ID NO: 132594 - DNA, 23 bp, Artificial sequence
  SiRNA target sequence
ctttttcatggcggtgtacgcta

SEQ ID NO: 132595 - DNA, 23 bp, Artificial sequence
  SiRNA target sequence
tttttcatggcggtgtacgctac

SEQ ID NO: 132596 - DNA, 23 bp, Artificial sequence
  SiRNA target sequence
ttttcatggcggtgtacgctacc

SEQ ID NO: 132597 - DNA, 23 bp, Artificial sequence
  SiRNA target sequence
tttcatggcggtgtacgctacct

SEQ ID NO: 132598 - DNA, 23 bp, Artificial sequence
  SiRNA target sequence
ttcatggcggtgtacgctacctt

SEQ ID NO: 132599 - DNA, 23 bp, Artificial sequence
  SiRNA target sequence
tcatggcggtgtacgctaccttg

SEQ ID NO: 132600 - DNA, 23 bp, Artificial sequence
  SiRNA target sequence
catggcggtgtacgctaccttga

SEQ ID NO: 132601 - DNA, 23 bp, Artificial sequence
  SiRNA target sequence
atggcggtgtacgctaccttgaa

SEQ ID NO: 132602 - DNA, 23 bp, Artificial sequence
  SiRNA target sequence
tggcggtgtacgctaccttgaaa

SEQ ID NO: 132603 - DNA, 23 bp, Artificial sequence
  SiRNA target sequence
ggcggtgtacgctaccttgaaaa

SEQ ID NO: 132604 - DNA, 23 bp, Artificial sequence
  SiRNA target sequence
gcggtgtacgctaccttgaaaaa

SEQ ID NO: 132605 - DNA, 23 bp, Artificial sequence
  SiRNA target sequence
cggtgtacgctaccttgaaaaag

SEQ ID NO: 132606 - DNA, 23 bp, Artificial sequence
  SiRNA target sequence
ggtgtacgctaccttgaaaaagc

SEQ ID NO: 132607 - DNA, 23 bp, Artificial sequence
  SiRNA target sequence
gtgtacgctaccttgaaaaagct

SEQ ID NO: 132608 - DNA, 23 bp, Artificial sequence
  SiRNA target sequence
tgtacgctaccttgaaaaagctg

SEQ ID NO: 132609 - DNA, 23 bp, Artificial sequence
  SiRNA target sequence
gtacgctaccttgaaaaagctgt

SEQ ID NO: 132610 - DNA, 23 bp, Artificial sequence
  SiRNA target sequence
tacgctaccttgaaaaagctgtt

SEQ ID NO: 132611 - DNA, 23 bp, Artificial sequence
  SiRNA target sequence
acgctaccttgaaaaagctgtta

SEQ ID NO: 132612 - DNA, 23 bp, Artificial sequence
  SiRNA target sequence
cgctaccttgaaaaagctgttaa

SEQ ID NO: 132613 - DNA, 23 bp, Artificial sequence
  SiRNA target sequence
gctaccttgaaaaagctgttaat

SEQ ID NO: 132614 - DNA, 23 bp, Artificial sequence
  SiRNA target sequence
ctaccttgaaaaagctgttaatg

SEQ ID NO: 132615 - DNA, 23 bp, Artificial sequence
  SiRNA target sequence
taccttgaaaaagctgttaatga

SEQ ID NO: 132616 - DNA, 23 bp, Artificial sequence
  SiRNA target sequence
accttgaaaaagctgttaatgat

SEQ ID NO: 132617 - DNA, 23 bp, Artificial sequence
  SiRNA target sequence
ccttgaaaaagctgttaatgatt

SEQ ID NO: 132618 - DNA, 23 bp, Artificial sequence
  SiRNA target sequence
cttgaaaaagctgttaatgattt

SEQ ID NO: 132619 - DNA, 23 bp, Artificial sequence
  SiRNA target sequence
ttgaaaaagctgttaatgattta

SEQ ID NO: 132620 - DNA, 23 bp, Artificial sequence
  SiRNA target sequence
tgaaaaagctgttaatgatttag

SEQ ID NO: 132621 - DNA, 23 bp, Artificial sequence
  SiRNA target sequence
gaaaaagctgttaatgatttaga

SEQ ID NO: 132622 - DNA, 23 bp, Artificial sequence
  SiRNA target sequence
aaaaagctgttaatgatttagat

SEQ ID NO: 132623 - DNA, 23 bp, Artificial sequence
  SiRNA target sequence
aaaagctgttaatgatttagata

SEQ ID NO: 132624 - DNA, 23 bp, Artificial sequence
  SiRNA target sequence
aaagctgttaatgatttagatag

SEQ ID NO: 132625 - DNA, 23 bp, Artificial sequence
  SiRNA target sequence
aagctgttaatgatttagataga

SEQ ID NO: 132626 - DNA, 23 bp, Artificial sequence
  SiRNA target sequence
agctgttaatgatttagatagat

SEQ ID NO: 132627 - DNA, 23 bp, Artificial sequence
  SiRNA target sequence
gctgttaatgatttagatagatc

SEQ ID NO: 132628 - DNA, 23 bp, Artificial sequence
  SiRNA target sequence
ctgttaatgatttagatagatct

SEQ ID NO: 132629 - DNA, 23 bp, Artificial sequence
  SiRNA target sequence
tgttaatgatttagatagatctc

SEQ ID NO: 132630 - DNA, 23 bp, Artificial sequence
  SiRNA target sequence
gttaatgatttagatagatctca

SEQ ID NO: 132631 - DNA, 23 bp, Artificial sequence
  SiRNA target sequence
ttaatgatttagatagatctcag

SEQ ID NO: 132632 - DNA, 23 bp, Artificial sequence
  SiRNA target sequence
taatgatttagatagatctcagt

SEQ ID NO: 132633 - DNA, 23 bp, Artificial sequence
  SiRNA target sequence
aatgatttagatagatctcagtt

SEQ ID NO: 132634 - DNA, 23 bp, Artificial sequence
  SiRNA target sequence
atgatttagatagatctcagttt

SEQ ID NO: 132635 - DNA, 23 bp, Artificial sequence
  SiRNA target sequence
tgatttagatagatctcagtttg

SEQ ID NO: 132636 - DNA, 23 bp, Artificial sequence
  SiRNA target sequence
gatttagatagatctcagtttga

SEQ ID NO: 132637 - DNA, 23 bp, Artificial sequence
  SiRNA target sequence
atttagatagatctcagtttgac

SEQ ID NO: 132638 - DNA, 23 bp, Artificial sequence
  SiRNA target sequence
tttagatagatctcagtttgact

SEQ ID NO: 132639 - DNA, 23 bp, Artificial sequence
  SiRNA target sequence
ttagatagatctcagtttgactt

SEQ ID NO: 132640 - DNA, 23 bp, Artificial sequence
  SiRNA target sequence
tagatagatctcagtttgacttg

SEQ ID NO: 132641 - DNA, 23 bp, Artificial sequence
  SiRNA target sequence
agatagatctcagtttgacttgg

SEQ ID NO: 132642 - DNA, 23 bp, Artificial sequence
  SiRNA target sequence
gatagatctcagtttgacttggt

SEQ ID NO: 132643 - DNA, 23 bp, Artificial sequence
  SiRNA target sequence
atagatctcagtttgacttggta

SEQ ID NO: 132644 - DNA, 23 bp, Artificial sequence
  SiRNA target sequence
tagatctcagtttgacttggtat

SEQ ID NO: 132645 - DNA, 23 bp, Artificial sequence
  SiRNA target sequence
agatctcagtttgacttggtatc

SEQ ID NO: 132646 - DNA, 23 bp, Artificial sequence
  SiRNA target sequence
gatctcagtttgacttggtatct

SEQ ID NO: 132647 - DNA, 23 bp, Artificial sequence
  SiRNA target sequence
atctcagtttgacttggtatctg

SEQ ID NO: 132648 - DNA, 23 bp, Artificial sequence
  SiRNA target sequence
tctcagtttgacttggtatctga

SEQ ID NO: 132649 - DNA, 23 bp, Artificial sequence
  SiRNA target sequence
ctcagtttgacttggtatctgaa

SEQ ID NO: 132650 - DNA, 23 bp, Artificial sequence
  SiRNA target sequence
tcagtttgacttggtatctgaag

SEQ ID NO: 132651 - DNA, 23 bp, Artificial sequence
  SiRNA target sequence
cagtttgacttggtatctgaagc

SEQ ID NO: 132652 - DNA, 23 bp, Artificial sequence
  SiRNA target sequence
agtttgacttggtatctgaagca

SEQ ID NO: 132653 - DNA, 23 bp, Artificial sequence
  SiRNA target sequence
gtttgacttggtatctgaagcat

SEQ ID NO: 132654 - DNA, 23 bp, Artificial sequence
  SiRNA target sequence
tttgacttggtatctgaagcatt

SEQ ID NO: 132655 - DNA, 23 bp, Artificial sequence
  SiRNA target sequence
ttgacttggtatctgaagcatta

SEQ ID NO: 132656 - DNA, 23 bp, Artificial sequence
  SiRNA target sequence
tgacttggtatctgaagcattaa

SEQ ID NO: 132657 - DNA, 23 bp, Artificial sequence
  SiRNA target sequence
gacttggtatctgaagcattaag

SEQ ID NO: 132658 - DNA, 23 bp, Artificial sequence
  SiRNA target sequence
acttggtatctgaagcattaagt

SEQ ID NO: 132659 - DNA, 23 bp, Artificial sequence
  SiRNA target sequence
cttggtatctgaagcattaagtg

SEQ ID NO: 132660 - DNA, 23 bp, Artificial sequence
  SiRNA target sequence
ttggtatctgaagcattaagtga

SEQ ID NO: 132661 - DNA, 23 bp, Artificial sequence
  SiRNA target sequence
tggtatctgaagcattaagtgaa

SEQ ID NO: 132662 - DNA, 23 bp, Artificial sequence
  SiRNA target sequence
ggtatctgaagcattaagtgaac

SEQ ID NO: 132663 - DNA, 23 bp, Artificial sequence
  SiRNA target sequence
gtatctgaagcattaagtgaacg

SEQ ID NO: 132664 - DNA, 23 bp, Artificial sequence
  SiRNA target sequence
tatctgaagcattaagtgaacga

SEQ ID NO: 132665 - DNA, 23 bp, Artificial sequence
  SiRNA target sequence
atctgaagcattaagtgaacgaa

SEQ ID NO: 132666 - DNA, 23 bp, Artificial sequence
  SiRNA target sequence
tctgaagcattaagtgaacgaaa

SEQ ID NO: 132667 - DNA, 23 bp, Artificial sequence
  SiRNA target sequence
ctgaagcattaagtgaacgaaaa

SEQ ID NO: 132668 - DNA, 23 bp, Artificial sequence
  SiRNA target sequence
tgaagcattaagtgaacgaaaaa

SEQ ID NO: 132669 - DNA, 23 bp, Artificial sequence
  SiRNA target sequence
gaagcattaagtgaacgaaaaat

SEQ ID NO: 132670 - DNA, 23 bp, Artificial sequence
  SiRNA target sequence
aagcattaagtgaacgaaaaatt

SEQ ID NO: 132671 - DNA, 23 bp, Artificial sequence
  SiRNA target sequence
agcattaagtgaacgaaaaattg

SEQ ID NO: 132672 - DNA, 23 bp, Artificial sequence
  SiRNA target sequence
gcattaagtgaacgaaaaattgt

SEQ ID NO: 132673 - DNA, 23 bp, Artificial sequence
  SiRNA target sequence
cattaagtgaacgaaaaattgtt

SEQ ID NO: 132674 - DNA, 23 bp, Artificial sequence
  SiRNA target sequence
attaagtgaacgaaaaattgtta

SEQ ID NO: 132675 - DNA, 23 bp, Artificial sequence
  SiRNA target sequence
ttaagtgaacgaaaaattgttat

SEQ ID NO: 132676 - DNA, 23 bp, Artificial sequence
  SiRNA target sequence
taagtgaacgaaaaattgttatg

SEQ ID NO: 132677 - DNA, 23 bp, Artificial sequence
  SiRNA target sequence
aagtgaacgaaaaattgttatga

SEQ ID NO: 132678 - DNA, 23 bp, Artificial sequence
  SiRNA target sequence
agtgaacgaaaaattgttatgaa

SEQ ID NO: 132679 - DNA, 23 bp, Artificial sequence
  SiRNA target sequence
gtgaacgaaaaattgttatgaat

SEQ ID NO: 132680 - DNA, 23 bp, Artificial sequence
  SiRNA target sequence
tgaacgaaaaattgttatgaata

SEQ ID NO: 132681 - DNA, 23 bp, Artificial sequence
  SiRNA target sequence
gaacgaaaaattgttatgaatat

SEQ ID NO: 132682 - DNA, 23 bp, Artificial sequence
  SiRNA target sequence
aacgaaaaattgttatgaatatg

SEQ ID NO: 132683 - DNA, 23 bp, Artificial sequence
  SiRNA target sequence
acgaaaaattgttatgaatatgt

SEQ ID NO: 132684 - DNA, 23 bp, Artificial sequence
  SiRNA target sequence
cgaaaaattgttatgaatatgtg

SEQ ID NO: 132685 - DNA, 23 bp, Artificial sequence
  SiRNA target sequence
gaaaaattgttatgaatatgtgt

SEQ ID NO: 132686 - DNA, 23 bp, Artificial sequence
  SiRNA target sequence
aaaaattgttatgaatatgtgtc

SEQ ID NO: 132687 - DNA, 23 bp, Artificial sequence
  SiRNA target sequence
aaaattgttatgaatatgtgtcc

SEQ ID NO: 132688 - DNA, 23 bp, Artificial sequence
  SiRNA target sequence
aaattgttatgaatatgtgtcct

SEQ ID NO: 132689 - DNA, 23 bp, Artificial sequence
  SiRNA target sequence
aattgttatgaatatgtgtcctt

SEQ ID NO: 132690 - DNA, 23 bp, Artificial sequence
  SiRNA target sequence
attgttatgaatatgtgtccttt

SEQ ID NO: 132691 - DNA, 23 bp, Artificial sequence
  SiRNA target sequence
ttgttatgaatatgtgtcctttt

SEQ ID NO: 132692 - DNA, 23 bp, Artificial sequence
  SiRNA target sequence
tgttatgaatatgtgtccttttc

SEQ ID NO: 132693 - DNA, 23 bp, Artificial sequence
  SiRNA target sequence
gttatgaatatgtgtccttttct

SEQ ID NO: 132694 - DNA, 23 bp, Artificial sequence
  SiRNA target sequence
ttatgaatatgtgtccttttcta

SEQ ID NO: 132695 - DNA, 23 bp, Artificial sequence
  SiRNA target sequence
tatgaatatgtgtccttttctag

SEQ ID NO: 132696 - DNA, 23 bp, Artificial sequence
  SiRNA target sequence
atgaatatgtgtccttttctagt

SEQ ID NO: 132697 - DNA, 23 bp, Artificial sequence
  SiRNA target sequence
tgaatatgtgtccttttctagta

SEQ ID NO: 132698 - DNA, 23 bp, Artificial sequence
  SiRNA target sequence
gaatatgtgtccttttctagtaa

SEQ ID NO: 132699 - DNA, 23 bp, Artificial sequence
  SiRNA target sequence
aatatgtgtccttttctagtaag

SEQ ID NO: 132700 - DNA, 23 bp, Artificial sequence
  SiRNA target sequence
atatgtgtccttttctagtaagg

SEQ ID NO: 132701 - DNA, 23 bp, Artificial sequence
  SiRNA target sequence
tatgtgtccttttctagtaaggt

SEQ ID NO: 132702 - DNA, 23 bp, Artificial sequence
  SiRNA target sequence
atgtgtccttttctagtaaggtc

SEQ ID NO: 132703 - DNA, 23 bp, Artificial sequence
  SiRNA target sequence
tgtgtccttttctagtaaggtcg

SEQ ID NO: 132704 - DNA, 23 bp, Artificial sequence
  SiRNA target sequence
gtgtccttttctagtaaggtcga

SEQ ID NO: 132705 - DNA, 23 bp, Artificial sequence
  SiRNA target sequence
tgtccttttctagtaaggtcgat

SEQ ID NO: 132706 - DNA, 23 bp, Artificial sequence
  SiRNA target sequence
gtccttttctagtaaggtcgatg

SEQ ID NO: 132707 - DNA, 23 bp, Artificial sequence
  SiRNA target sequence
tccttttctagtaaggtcgatgg

SEQ ID NO: 132708 - DNA, 23 bp, Artificial sequence
  SiRNA target sequence
ccttttctagtaaggtcgatgga

SEQ ID NO: 132709 - DNA, 23 bp, Artificial sequence
  SiRNA target sequence
cttttctagtaaggtcgatggaa

SEQ ID NO: 132710 - DNA, 23 bp, Artificial sequence
  SiRNA target sequence
ttttctagtaaggtcgatggaaa

SEQ ID NO: 132711 - DNA, 23 bp, Artificial sequence
  SiRNA target sequence
tttctagtaaggtcgatggaaat

SEQ ID NO: 132712 - DNA, 23 bp, Artificial sequence
  SiRNA target sequence
ttctagtaaggtcgatggaaata

SEQ ID NO: 132713 - DNA, 23 bp, Artificial sequence
  SiRNA target sequence
tctagtaaggtcgatggaaatat

SEQ ID NO: 132714 - DNA, 23 bp, Artificial sequence
  SiRNA target sequence
ctagtaaggtcgatggaaatatt

SEQ ID NO: 132715 - DNA, 23 bp, Artificial sequence
  SiRNA target sequence
tagtaaggtcgatggaaatatta

SEQ ID NO: 132716 - DNA, 23 bp, Artificial sequence
  SiRNA target sequence
agtaaggtcgatggaaatattat

SEQ ID NO: 132717 - DNA, 23 bp, Artificial sequence
  SiRNA target sequence
gtaaggtcgatggaaatattatt

SEQ ID NO: 132718 - DNA, 23 bp, Artificial sequence
  SiRNA target sequence
taaggtcgatggaaatattattt

SEQ ID NO: 132719 - DNA, 23 bp, Artificial sequence
  SiRNA target sequence
aaggtcgatggaaatattatttc

SEQ ID NO: 132720 - DNA, 23 bp, Artificial sequence
  SiRNA target sequence
aggtcgatggaaatattatttcc

SEQ ID NO: 132721 - DNA, 23 bp, Artificial sequence
  SiRNA target sequence
ggtcgatggaaatattatttccg

SEQ ID NO: 132722 - DNA, 23 bp, Artificial sequence
  SiRNA target sequence
gtcgatggaaatattatttccgg

SEQ ID NO: 132723 - DNA, 23 bp, Artificial sequence
  SiRNA target sequence
tcgatggaaatattatttccggt

SEQ ID NO: 132724 - DNA, 23 bp, Artificial sequence
  SiRNA target sequence
cgatggaaatattatttccggtt

SEQ ID NO: 132725 - DNA, 23 bp, Artificial sequence
  SiRNA target sequence
gatggaaatattatttccggttt

SEQ ID NO: 132726 - DNA, 23 bp, Artificial sequence
  SiRNA target sequence
atggaaatattatttccggttta

SEQ ID NO: 132727 - DNA, 23 bp, Artificial sequence
  SiRNA target sequence
tggaaatattatttccggtttat

SEQ ID NO: 132728 - DNA, 23 bp, Artificial sequence
  SiRNA target sequence
ggaaatattatttccggtttata

SEQ ID NO: 132729 - DNA, 23 bp, Artificial sequence
  SiRNA target sequence
gaaatattatttccggtttataa

SEQ ID NO: 132730 - DNA, 23 bp, Artificial sequence
  SiRNA target sequence
aaatattatttccggtttataaa

SEQ ID NO: 132731 - DNA, 23 bp, Artificial sequence
  SiRNA target sequence
aatattatttccggtttataaaa

SEQ ID NO: 132732 - DNA, 23 bp, Artificial sequence
  SiRNA target sequence
atattatttccggtttataaaag

SEQ ID NO: 132733 - DNA, 23 bp, Artificial sequence
  SiRNA target sequence
tattatttccggtttataaaagg

SEQ ID NO: 132734 - DNA, 23 bp, Artificial sequence
  SiRNA target sequence
attatttccggtttataaaaggc

SEQ ID NO: 132735 - DNA, 23 bp, Artificial sequence
  SiRNA target sequence
ttatttccggtttataaaaggct

SEQ ID NO: 132736 - DNA, 23 bp, Artificial sequence
  SiRNA target sequence
tatttccggtttataaaaggctt

SEQ ID NO: 132737 - DNA, 23 bp, Artificial sequence
  SiRNA target sequence
atttccggtttataaaaggcttt

SEQ ID NO: 132738 - DNA, 23 bp, Artificial sequence
  SiRNA target sequence
tttccggtttataaaaggctttt

SEQ ID NO: 132739 - DNA, 23 bp, Artificial sequence
  SiRNA target sequence
ttccggtttataaaaggctttta

SEQ ID NO: 132740 - DNA, 23 bp, Artificial sequence
  SiRNA target sequence
tccggtttataaaaggcttttaa

SEQ ID NO: 132741 - DNA, 23 bp, Artificial sequence
  SiRNA target sequence
ccggtttataaaaggcttttaat

SEQ ID NO: 132742 - DNA, 23 bp, Artificial sequence
  SiRNA target sequence
cggtttataaaaggcttttaatt

SEQ ID NO: 132743 - DNA, 23 bp, Artificial sequence
  SiRNA target sequence
ggtttataaaaggcttttaattc

SEQ ID NO: 132744 - DNA, 23 bp, Artificial sequence
  SiRNA target sequence
gtttataaaaggcttttaattcc

SEQ ID NO: 132745 - DNA, 23 bp, Artificial sequence
  SiRNA target sequence
tttataaaaggcttttaattcct

SEQ ID NO: 132746 - DNA, 23 bp, Artificial sequence
  SiRNA target sequence
ttataaaaggcttttaattcctt

SEQ ID NO: 132747 - DNA, 23 bp, Artificial sequence
  SiRNA target sequence
tataaaaggcttttaattcctta

SEQ ID NO: 132748 - DNA, 23 bp, Artificial sequence
  SiRNA target sequence
ataaaaggcttttaattccttac

SEQ ID NO: 132749 - DNA, 23 bp, Artificial sequence
  SiRNA target sequence
taaaaggcttttaattccttact

SEQ ID NO: 132750 - DNA, 23 bp, Artificial sequence
  SiRNA target sequence
aaaaggcttttaattccttacta

SEQ ID NO: 132751 - DNA, 23 bp, Artificial sequence
  SiRNA target sequence
aaaggcttttaattccttactac

SEQ ID NO: 132752 - DNA, 23 bp, Artificial sequence
  SiRNA target sequence
aaggcttttaattccttactact

SEQ ID NO: 132753 - DNA, 23 bp, Artificial sequence
  SiRNA target sequence
aggcttttaattccttactacta

SEQ ID NO: 132754 - DNA, 23 bp, Artificial sequence
  SiRNA target sequence
ggcttttaattccttactactat

SEQ ID NO: 132755 - DNA, 23 bp, Artificial sequence
  SiRNA target sequence
gcttttaattccttactactata

SEQ ID NO: 132756 - DNA, 23 bp, Artificial sequence
  SiRNA target sequence
cttttaattccttactactatat

SEQ ID NO: 132757 - DNA, 23 bp, Artificial sequence
  SiRNA target sequence
ttttaattccttactactatatt

SEQ ID NO: 132758 - DNA, 23 bp, Artificial sequence
  SiRNA target sequence
tttaattccttactactatattg

SEQ ID NO: 132759 - DNA, 23 bp, Artificial sequence
  SiRNA target sequence
ttaattccttactactatattgg

SEQ ID NO: 132760 - DNA, 23 bp, Artificial sequence
  SiRNA target sequence
taattccttactactatattggc

SEQ ID NO: 132761 - DNA, 23 bp, Artificial sequence
  SiRNA target sequence
aattccttactactatattggcc

SEQ ID NO: 132762 - DNA, 23 bp, Artificial sequence
  SiRNA target sequence
attccttactactatattggcct

SEQ ID NO: 132763 - DNA, 23 bp, Artificial sequence
  SiRNA target sequence
ttccttactactatattggcctt

SEQ ID NO: 132764 - DNA, 23 bp, Artificial sequence
  SiRNA target sequence
tccttactactatattggcctta

SEQ ID NO: 132765 - DNA, 23 bp, Artificial sequence
  SiRNA target sequence
ccttactactatattggccttaa

SEQ ID NO: 132766 - DNA, 23 bp, Artificial sequence
  SiRNA target sequence
cttactactatattggccttaaa

SEQ ID NO: 132767 - DNA, 23 bp, Artificial sequence
  SiRNA target sequence
ttactactatattggccttaaat

SEQ ID NO: 132768 - DNA, 23 bp, Artificial sequence
  SiRNA target sequence
tactactatattggccttaaatt

SEQ ID NO: 132769 - DNA, 23 bp, Artificial sequence
  SiRNA target sequence
actactatattggccttaaattt

SEQ ID NO: 132770 - DNA, 23 bp, Artificial sequence
  SiRNA target sequence
ctactatattggccttaaatttt

SEQ ID NO: 132771 - DNA, 23 bp, Artificial sequence
  SiRNA target sequence
tactatattggccttaaatttta

SEQ ID NO: 132772 - DNA, 23 bp, Artificial sequence
  SiRNA target sequence
actatattggccttaaattttat

SEQ ID NO: 132773 - DNA, 23 bp, Artificial sequence
  SiRNA target sequence
ctatattggccttaaattttatg

SEQ ID NO: 132774 - DNA, 23 bp, Artificial sequence
  SiRNA target sequence
tatattggccttaaattttatga

SEQ ID NO: 132775 - DNA, 23 bp, Artificial sequence
  SiRNA target sequence
atattggccttaaattttatgat

SEQ ID NO: 132776 - DNA, 23 bp, Artificial sequence
  SiRNA target sequence
tattggccttaaattttatgatt

SEQ ID NO: 132777 - DNA, 23 bp, Artificial sequence
  SiRNA target sequence
attggccttaaattttatgattg

SEQ ID NO: 132778 - DNA, 23 bp, Artificial sequence
  SiRNA target sequence
ttggccttaaattttatgattgg

SEQ ID NO: 132779 - DNA, 23 bp, Artificial sequence
  SiRNA target sequence
tggccttaaattttatgattgga

SEQ ID NO: 132780 - DNA, 23 bp, Artificial sequence
  SiRNA target sequence
ggccttaaattttatgattggat

SEQ ID NO: 132781 - DNA, 23 bp, Artificial sequence
  SiRNA target sequence
gccttaaattttatgattggatt

SEQ ID NO: 132782 - DNA, 23 bp, Artificial sequence
  SiRNA target sequence
ccttaaattttatgattggattt

SEQ ID NO: 132783 - DNA, 23 bp, Artificial sequence
  SiRNA target sequence
cttaaattttatgattggatttc

SEQ ID NO: 132784 - DNA, 23 bp, Artificial sequence
  SiRNA target sequence
ttaaattttatgattggatttct

SEQ ID NO: 132785 - DNA, 23 bp, Artificial sequence
  SiRNA target sequence
taaattttatgattggatttctg

SEQ ID NO: 132786 - DNA, 23 bp, Artificial sequence
  SiRNA target sequence
aaattttatgattggatttctgg

SEQ ID NO: 132787 - DNA, 23 bp, Artificial sequence
  SiRNA target sequence
aattttatgattggatttctggg

SEQ ID NO: 132788 - DNA, 23 bp, Artificial sequence
  SiRNA target sequence
attttatgattggatttctgggc

SEQ ID NO: 132789 - DNA, 23 bp, Artificial sequence
  SiRNA target sequence
ttttatgattggatttctgggca

SEQ ID NO: 132790 - DNA, 23 bp, Artificial sequence
  SiRNA target sequence
tttatgattggatttctgggcaa

SEQ ID NO: 132791 - DNA, 23 bp, Artificial sequence
  SiRNA target sequence
ttatgattggatttctgggcaac

SEQ ID NO: 132792 - DNA, 23 bp, Artificial sequence
  SiRNA target sequence
tatgattggatttctgggcaacg

SEQ ID NO: 132793 - DNA, 23 bp, Artificial sequence
  SiRNA target sequence
atgattggatttctgggcaacgg

SEQ ID NO: 132794 - DNA, 23 bp, Artificial sequence
  SiRNA target sequence
tgattggatttctgggcaacggt

SEQ ID NO: 132795 - DNA, 23 bp, Artificial sequence
  SiRNA target sequence
gattggatttctgggcaacggtc

SEQ ID NO: 132796 - DNA, 23 bp, Artificial sequence
  SiRNA target sequence
attggatttctgggcaacggtcc

SEQ ID NO: 132797 - DNA, 23 bp, Artificial sequence
  SiRNA target sequence
ttggatttctgggcaacggtccc

SEQ ID NO: 132798 - DNA, 23 bp, Artificial sequence
  SiRNA target sequence
tggatttctgggcaacggtccct

SEQ ID NO: 132799 - DNA, 23 bp, Artificial sequence
  SiRNA target sequence
ggatttctgggcaacggtccctt

SEQ ID NO: 132800 - DNA, 23 bp, Artificial sequence
  SiRNA target sequence
gatttctgggcaacggtcccttg

SEQ ID NO: 132801 - DNA, 23 bp, Artificial sequence
  SiRNA target sequence
atttctgggcaacggtcccttgg

SEQ ID NO: 132802 - DNA, 23 bp, Artificial sequence
  SiRNA target sequence
tttctgggcaacggtcccttggg

SEQ ID NO: 132803 - DNA, 23 bp, Artificial sequence
  SiRNA target sequence
ttctgggcaacggtcccttgggc

SEQ ID NO: 132804 - DNA, 23 bp, Artificial sequence
  SiRNA target sequence
tctgggcaacggtcccttgggcg

SEQ ID NO: 132805 - DNA, 23 bp, Artificial sequence
  SiRNA target sequence
ctgggcaacggtcccttgggcga

SEQ ID NO: 132806 - DNA, 23 bp, Artificial sequence
  SiRNA target sequence
tgggcaacggtcccttgggcgaa

SEQ ID NO: 132807 - DNA, 23 bp, Artificial sequence
  SiRNA target sequence
gggcaacggtcccttgggcgaag

SEQ ID NO: 132808 - DNA, 23 bp, Artificial sequence
  SiRNA target sequence
ggcaacggtcccttgggcgaagt

SEQ ID NO: 132809 - DNA, 23 bp, Artificial sequence
  SiRNA target sequence
gcaacggtcccttgggcgaagta

SEQ ID NO: 132810 - DNA, 23 bp, Artificial sequence
  SiRNA target sequence
caacggtcccttgggcgaagtaa

SEQ ID NO: 132811 - DNA, 23 bp, Artificial sequence
  SiRNA target sequence
aacggtcccttgggcgaagtaaa

SEQ ID NO: 132812 - DNA, 23 bp, Artificial sequence
  SiRNA target sequence
acggtcccttgggcgaagtaaat

SEQ ID NO: 132813 - DNA, 23 bp, Artificial sequence
  SiRNA target sequence
cggtcccttgggcgaagtaaatt

SEQ ID NO: 132814 - DNA, 23 bp, Artificial sequence
  SiRNA target sequence
ggtcccttgggcgaagtaaattt

SEQ ID NO: 132815 - DNA, 23 bp, Artificial sequence
  SiRNA target sequence
gtcccttgggcgaagtaaatttt

SEQ ID NO: 132816 - DNA, 23 bp, Artificial sequence
  SiRNA target sequence
tcccttgggcgaagtaaattttt

SEQ ID NO: 132817 - DNA, 23 bp, Artificial sequence
  SiRNA target sequence
cccttgggcgaagtaaatttttg

SEQ ID NO: 132818 - DNA, 23 bp, Artificial sequence
  SiRNA target sequence
ccttgggcgaagtaaatttttgt

SEQ ID NO: 132819 - DNA, 23 bp, Artificial sequence
  SiRNA target sequence
cttgggcgaagtaaatttttgtc

SEQ ID NO: 132820 - DNA, 23 bp, Artificial sequence
  SiRNA target sequence
ttgggcgaagtaaatttttgtcg

SEQ ID NO: 132821 - DNA, 23 bp, Artificial sequence
  SiRNA target sequence
tgggcgaagtaaatttttgtcgc

SEQ ID NO: 132822 - DNA, 23 bp, Artificial sequence
  SiRNA target sequence
gggcgaagtaaatttttgtcgcg

SEQ ID NO: 132823 - DNA, 23 bp, Artificial sequence
  SiRNA target sequence
ggcgaagtaaatttttgtcgcgg

SEQ ID NO: 132824 - DNA, 23 bp, Artificial sequence
  SiRNA target sequence
gcgaagtaaatttttgtcgcggc

SEQ ID NO: 132825 - DNA, 23 bp, Artificial sequence
  SiRNA target sequence
cgaagtaaatttttgtcgcggca

SEQ ID NO: 132826 - DNA, 23 bp, Artificial sequence
  SiRNA target sequence
gaagtaaatttttgtcgcggcaa

SEQ ID NO: 132827 - DNA, 23 bp, Artificial sequence
  SiRNA target sequence
aagtaaatttttgtcgcggcaac

SEQ ID NO: 132828 - DNA, 23 bp, Artificial sequence
  SiRNA target sequence
agtaaatttttgtcgcggcaaca

SEQ ID NO: 132829 - DNA, 23 bp, Artificial sequence
  SiRNA target sequence
gtaaatttttgtcgcggcaacaa

SEQ ID NO: 132830 - DNA, 23 bp, Artificial sequence
  SiRNA target sequence
taaatttttgtcgcggcaacaaa

SEQ ID NO: 132831 - DNA, 23 bp, Artificial sequence
  SiRNA target sequence
aaatttttgtcgcggcaacaaac

SEQ ID NO: 132832 - DNA, 23 bp, Artificial sequence
  SiRNA target sequence
aatttttgtcgcggcaacaaact

SEQ ID NO: 132833 - DNA, 23 bp, Artificial sequence
  SiRNA target sequence
atttttgtcgcggcaacaaacta

SEQ ID NO: 132834 - DNA, 23 bp, Artificial sequence
  SiRNA target sequence
tttttgtcgcggcaacaaactat

SEQ ID NO: 132835 - DNA, 23 bp, Artificial sequence
  SiRNA target sequence
ttttgtcgcggcaacaaactatt

SEQ ID NO: 132836 - DNA, 23 bp, Artificial sequence
  SiRNA target sequence
tttgtcgcggcaacaaactatta

SEQ ID NO: 132837 - DNA, 23 bp, Artificial sequence
  SiRNA target sequence
ttgtcgcggcaacaaactattac

SEQ ID NO: 132838 - DNA, 23 bp, Artificial sequence
  SiRNA target sequence
tgtcgcggcaacaaactattaca

SEQ ID NO: 132839 - DNA, 23 bp, Artificial sequence
  SiRNA target sequence
gtcgcggcaacaaactattacaa

SEQ ID NO: 132840 - DNA, 23 bp, Artificial sequence
  SiRNA target sequence
tcgcggcaacaaactattacaaa

SEQ ID NO: 132841 - DNA, 23 bp, Artificial sequence
  SiRNA target sequence
cgcggcaacaaactattacaaaa

SEQ ID NO: 132842 - DNA, 23 bp, Artificial sequence
  SiRNA target sequence
gcggcaacaaactattacaaaat

SEQ ID NO: 132843 - DNA, 23 bp, Artificial sequence
  SiRNA target sequence
cggcaacaaactattacaaaatt

SEQ ID NO: 132844 - DNA, 23 bp, Artificial sequence
  SiRNA target sequence
ggcaacaaactattacaaaattt

SEQ ID NO: 132845 - DNA, 23 bp, Artificial sequence
  SiRNA target sequence
gcaacaaactattacaaaatttc

SEQ ID NO: 132846 - DNA, 23 bp, Artificial sequence
  SiRNA target sequence
caacaaactattacaaaatttcc

SEQ ID NO: 132847 - DNA, 23 bp, Artificial sequence
  SiRNA target sequence
aacaaactattacaaaatttcct

SEQ ID NO: 132848 - DNA, 23 bp, Artificial sequence
  SiRNA target sequence
acaaactattacaaaatttccta

SEQ ID NO: 132849 - DNA, 23 bp, Artificial sequence
  SiRNA target sequence
caaactattacaaaatttcctaa

SEQ ID NO: 132850 - DNA, 23 bp, Artificial sequence
  SiRNA target sequence
aaactattacaaaatttcctaat

SEQ ID NO: 132851 - DNA, 23 bp, Artificial sequence
  SiRNA target sequence
aactattacaaaatttcctaatg

SEQ ID NO: 132852 - DNA, 23 bp, Artificial sequence
  SiRNA target sequence
actattacaaaatttcctaatgt

SEQ ID NO: 132853 - DNA, 23 bp, Artificial sequence
  SiRNA target sequence
ctattacaaaatttcctaatgtg

SEQ ID NO: 132854 - DNA, 23 bp, Artificial sequence
  SiRNA target sequence
tattacaaaatttcctaatgtga

SEQ ID NO: 132855 - DNA, 23 bp, Artificial sequence
  SiRNA target sequence
attacaaaatttcctaatgtgag

SEQ ID NO: 132856 - DNA, 23 bp, Artificial sequence
  SiRNA target sequence
ttacaaaatttcctaatgtgaga

SEQ ID NO: 132857 - DNA, 23 bp, Artificial sequence
  SiRNA target sequence
tacaaaatttcctaatgtgagaa

SEQ ID NO: 132858 - DNA, 23 bp, Artificial sequence
  SiRNA target sequence
acaaaatttcctaatgtgagaaa

SEQ ID NO: 132859 - DNA, 23 bp, Artificial sequence
  SiRNA target sequence
caaaatttcctaatgtgagaaaa

SEQ ID NO: 132860 - DNA, 23 bp, Artificial sequence
  SiRNA target sequence
aaaatttcctaatgtgagaaaaa

SEQ ID NO: 132861 - DNA, 23 bp, Artificial sequence
  SiRNA target sequence
aaatttcctaatgtgagaaaaat

SEQ ID NO: 132862 - DNA, 23 bp, Artificial sequence
  SiRNA target sequence
aatttcctaatgtgagaaaaatc

SEQ ID NO: 132863 - DNA, 23 bp, Artificial sequence
  SiRNA target sequence
atttcctaatgtgagaaaaatcg

SEQ ID NO: 132864 - DNA, 23 bp, Artificial sequence
  SiRNA target sequence
tttcctaatgtgagaaaaatcga

SEQ ID NO: 132865 - DNA, 23 bp, Artificial sequence
  SiRNA target sequence
ttcctaatgtgagaaaaatcgac

SEQ ID NO: 132866 - DNA, 23 bp, Artificial sequence
  SiRNA target sequence
tcctaatgtgagaaaaatcgacc

SEQ ID NO: 132867 - DNA, 23 bp, Artificial sequence
  SiRNA target sequence
cctaatgtgagaaaaatcgacct

SEQ ID NO: 132868 - DNA, 23 bp, Artificial sequence
  SiRNA target sequence
ctaatgtgagaaaaatcgacctt

SEQ ID NO: 132869 - DNA, 23 bp, Artificial sequence
  SiRNA target sequence
taatgtgagaaaaatcgaccttg

SEQ ID NO: 132870 - DNA, 23 bp, Artificial sequence
  SiRNA target sequence
aatgtgagaaaaatcgaccttgt

SEQ ID NO: 132871 - DNA, 23 bp, Artificial sequence
  SiRNA target sequence
atgtgagaaaaatcgaccttgta

SEQ ID NO: 132872 - DNA, 23 bp, Artificial sequence
  SiRNA target sequence
tgtgagaaaaatcgaccttgtag

SEQ ID NO: 132873 - DNA, 23 bp, Artificial sequence
  SiRNA target sequence
gtgagaaaaatcgaccttgtagg

SEQ ID NO: 132874 - DNA, 23 bp, Artificial sequence
  SiRNA target sequence
tgagaaaaatcgaccttgtagga

SEQ ID NO: 132875 - DNA, 23 bp, Artificial sequence
  SiRNA target sequence
gagaaaaatcgaccttgtaggat

SEQ ID NO: 132876 - DNA, 23 bp, Artificial sequence
  SiRNA target sequence
agaaaaatcgaccttgtaggatc

SEQ ID NO: 132877 - DNA, 23 bp, Artificial sequence
  SiRNA target sequence
gaaaaatcgaccttgtaggatcc

SEQ ID NO: 132878 - DNA, 23 bp, Artificial sequence
  SiRNA target sequence
aaaaatcgaccttgtaggatccg

SEQ ID NO: 132879 - DNA, 23 bp, Artificial sequence
  SiRNA target sequence
aaaatcgaccttgtaggatccgt

SEQ ID NO: 132880 - DNA, 23 bp, Artificial sequence
  SiRNA target sequence
aaatcgaccttgtaggatccgtt

SEQ ID NO: 132881 - DNA, 23 bp, Artificial sequence
  SiRNA target sequence
aatcgaccttgtaggatccgttt

SEQ ID NO: 132882 - DNA, 23 bp, Artificial sequence
  SiRNA target sequence
atcgaccttgtaggatccgtttc

SEQ ID NO: 132883 - DNA, 23 bp, Artificial sequence
  SiRNA target sequence
tcgaccttgtaggatccgtttcg

SEQ ID NO: 132884 - DNA, 23 bp, Artificial sequence
  SiRNA target sequence
cgaccttgtaggatccgtttcgt

SEQ ID NO: 132885 - DNA, 23 bp, Artificial sequence
  SiRNA target sequence
gaccttgtaggatccgtttcgta

SEQ ID NO: 132886 - DNA, 23 bp, Artificial sequence
  SiRNA target sequence
accttgtaggatccgtttcgtat

SEQ ID NO: 132887 - DNA, 23 bp, Artificial sequence
  SiRNA target sequence
ccttgtaggatccgtttcgtatc

SEQ ID NO: 132888 - DNA, 23 bp, Artificial sequence
  SiRNA target sequence
cttgtaggatccgtttcgtatcg

SEQ ID NO: 132889 - DNA, 23 bp, Artificial sequence
  SiRNA target sequence
ttgtaggatccgtttcgtatcgt

SEQ ID NO: 132890 - DNA, 23 bp, Artificial sequence
  SiRNA target sequence
tgtaggatccgtttcgtatcgtg

SEQ ID NO: 132891 - DNA, 23 bp, Artificial sequence
  SiRNA target sequence
gtaggatccgtttcgtatcgtga

SEQ ID NO: 132892 - DNA, 23 bp, Artificial sequence
  SiRNA target sequence
taggatccgtttcgtatcgtgat

SEQ ID NO: 132893 - DNA, 23 bp, Artificial sequence
  SiRNA target sequence
aggatccgtttcgtatcgtgatg

SEQ ID NO: 132894 - DNA, 23 bp, Artificial sequence
  SiRNA target sequence
ggatccgtttcgtatcgtgatgg

SEQ ID NO: 132895 - DNA, 23 bp, Artificial sequence
  SiRNA target sequence
gatccgtttcgtatcgtgatggc

SEQ ID NO: 132896 - DNA, 23 bp, Artificial sequence
  SiRNA target sequence
atccgtttcgtatcgtgatggcc

SEQ ID NO: 132897 - DNA, 23 bp, Artificial sequence
  SiRNA target sequence
tccgtttcgtatcgtgatggcca

SEQ ID NO: 132898 - DNA, 23 bp, Artificial sequence
  SiRNA target sequence
ccgtttcgtatcgtgatggccaa

SEQ ID NO: 132899 - DNA, 23 bp, Artificial sequence
  SiRNA target sequence
cgtttcgtatcgtgatggccaat

SEQ ID NO: 132900 - DNA, 23 bp, Artificial sequence
  SiRNA target sequence
gtttcgtatcgtgatggccaatt

SEQ ID NO: 132901 - DNA, 23 bp, Artificial sequence
  SiRNA target sequence
tttcgtatcgtgatggccaattt

SEQ ID NO: 132902 - DNA, 23 bp, Artificial sequence
  SiRNA target sequence
ttcgtatcgtgatggccaatttt

SEQ ID NO: 132903 - DNA, 23 bp, Artificial sequence
  SiRNA target sequence
tcgtatcgtgatggccaatttta

SEQ ID NO: 132904 - DNA, 23 bp, Artificial sequence
  SiRNA target sequence
cgtatcgtgatggccaattttat

SEQ ID NO: 132905 - DNA, 23 bp, Artificial sequence
  SiRNA target sequence
gtatcgtgatggccaattttatg

SEQ ID NO: 132906 - DNA, 23 bp, Artificial sequence
  SiRNA target sequence
tatcgtgatggccaattttatga

SEQ ID NO: 132907 - DNA, 23 bp, Artificial sequence
  SiRNA target sequence
atcgtgatggccaattttatgat

SEQ ID NO: 132908 - DNA, 23 bp, Artificial sequence
  SiRNA target sequence
tcgtgatggccaattttatgatg

SEQ ID NO: 132909 - DNA, 23 bp, Artificial sequence
  SiRNA target sequence
cgtgatggccaattttatgatgc

SEQ ID NO: 132910 - DNA, 23 bp, Artificial sequence
  SiRNA target sequence
gtgatggccaattttatgatgct

SEQ ID NO: 132911 - DNA, 23 bp, Artificial sequence
  SiRNA target sequence
tgatggccaattttatgatgcta

SEQ ID NO: 132912 - DNA, 23 bp, Artificial sequence
  SiRNA target sequence
gatggccaattttatgatgctaa

SEQ ID NO: 132913 - DNA, 23 bp, Artificial sequence
  SiRNA target sequence
atggccaattttatgatgctaaa

SEQ ID NO: 132914 - DNA, 23 bp, Artificial sequence
  SiRNA target sequence
tggccaattttatgatgctaaat

SEQ ID NO: 132915 - DNA, 23 bp, Artificial sequence
  SiRNA target sequence
ggccaattttatgatgctaaata

SEQ ID NO: 132916 - DNA, 23 bp, Artificial sequence
  SiRNA target sequence
gccaattttatgatgctaaatac

SEQ ID NO: 132917 - DNA, 23 bp, Artificial sequence
  SiRNA target sequence
ccaattttatgatgctaaataca

SEQ ID NO: 132918 - DNA, 23 bp, Artificial sequence
  SiRNA target sequence
caattttatgatgctaaatacaa

SEQ ID NO: 132919 - DNA, 23 bp, Artificial sequence
  SiRNA target sequence
aattttatgatgctaaatacaat

SEQ ID NO: 132920 - DNA, 23 bp, Artificial sequence
  SiRNA target sequence
attttatgatgctaaatacaatg

SEQ ID NO: 132921 - DNA, 23 bp, Artificial sequence
  SiRNA target sequence
ttttatgatgctaaatacaatgt

SEQ ID NO: 132922 - DNA, 23 bp, Artificial sequence
  SiRNA target sequence
tttatgatgctaaatacaatgtt

SEQ ID NO: 132923 - DNA, 23 bp, Artificial sequence
  SiRNA target sequence
ttatgatgctaaatacaatgttc

SEQ ID NO: 132924 - DNA, 23 bp, Artificial sequence
  SiRNA target sequence
tatgatgctaaatacaatgttct

SEQ ID NO: 132925 - DNA, 23 bp, Artificial sequence
  SiRNA target sequence
atgatgctaaatacaatgttcta

SEQ ID NO: 132926 - DNA, 23 bp, Artificial sequence
  SiRNA target sequence
tgatgctaaatacaatgttctat

SEQ ID NO: 132927 - DNA, 23 bp, Artificial sequence
  SiRNA target sequence
gatgctaaatacaatgttctatt

SEQ ID NO: 132928 - DNA, 23 bp, Artificial sequence
  SiRNA target sequence
atgctaaatacaatgttctattg

SEQ ID NO: 132929 - DNA, 23 bp, Artificial sequence
  SiRNA target sequence
tgctaaatacaatgttctattgg

SEQ ID NO: 132930 - DNA, 23 bp, Artificial sequence
  SiRNA target sequence
gctaaatacaatgttctattggg

SEQ ID NO: 132931 - DNA, 23 bp, Artificial sequence
  SiRNA target sequence
ctaaatacaatgttctattgggt

SEQ ID NO: 132932 - DNA, 23 bp, Artificial sequence
  SiRNA target sequence
taaatacaatgttctattgggtg

SEQ ID NO: 132933 - DNA, 23 bp, Artificial sequence
  SiRNA target sequence
aaatacaatgttctattgggtgt

SEQ ID NO: 132934 - DNA, 23 bp, Artificial sequence
  SiRNA target sequence
aatacaatgttctattgggtgtc

SEQ ID NO: 132935 - DNA, 23 bp, Artificial sequence
  SiRNA target sequence
atacaatgttctattgggtgtca

SEQ ID NO: 132936 - DNA, 23 bp, Artificial sequence
  SiRNA target sequence
tacaatgttctattgggtgtcac

SEQ ID NO: 132937 - DNA, 23 bp, Artificial sequence
  SiRNA target sequence
acaatgttctattgggtgtcaca

SEQ ID NO: 132938 - DNA, 23 bp, Artificial sequence
  SiRNA target sequence
caatgttctattgggtgtcacag

SEQ ID NO: 132939 - DNA, 23 bp, Artificial sequence
  SiRNA target sequence
aatgttctattgggtgtcacagc

SEQ ID NO: 132940 - DNA, 23 bp, Artificial sequence
  SiRNA target sequence
atgttctattgggtgtcacagct

SEQ ID NO: 132941 - DNA, 23 bp, Artificial sequence
  SiRNA target sequence
tgttctattgggtgtcacagcta

SEQ ID NO: 132942 - DNA, 23 bp, Artificial sequence
  SiRNA target sequence
gttctattgggtgtcacagctac

SEQ ID NO: 132943 - DNA, 23 bp, Artificial sequence
  SiRNA target sequence
ttctattgggtgtcacagctacc

SEQ ID NO: 132944 - DNA, 23 bp, Artificial sequence
  SiRNA target sequence
tctattgggtgtcacagctacct

SEQ ID NO: 132945 - DNA, 23 bp, Artificial sequence
  SiRNA target sequence
ctattgggtgtcacagctaccta

SEQ ID NO: 132946 - DNA, 23 bp, Artificial sequence
  SiRNA target sequence
tattgggtgtcacagctacctac

SEQ ID NO: 132947 - DNA, 23 bp, Artificial sequence
  SiRNA target sequence
attgggtgtcacagctacctact

SEQ ID NO: 132948 - DNA, 23 bp, Artificial sequence
  SiRNA target sequence
ttgggtgtcacagctacctacta

SEQ ID NO: 132949 - DNA, 23 bp, Artificial sequence
  SiRNA target sequence
tgggtgtcacagctacctactat

SEQ ID NO: 132950 - DNA, 23 bp, Artificial sequence
  SiRNA target sequence
gggtgtcacagctacctactatg

SEQ ID NO: 132951 - DNA, 23 bp, Artificial sequence
  SiRNA target sequence
ggtgtcacagctacctactatgg

SEQ ID NO: 132952 - DNA, 23 bp, Artificial sequence
  SiRNA target sequence
gtgtcacagctacctactatgga

SEQ ID NO: 132953 - DNA, 23 bp, Artificial sequence
  SiRNA target sequence
tgtcacagctacctactatggag

SEQ ID NO: 132954 - DNA, 23 bp, Artificial sequence
  SiRNA target sequence
gtcacagctacctactatggagc

SEQ ID NO: 132955 - DNA, 23 bp, Artificial sequence
  SiRNA target sequence
tcacagctacctactatggagct

SEQ ID NO: 132956 - DNA, 23 bp, Artificial sequence
  SiRNA target sequence
cacagctacctactatggagctg

SEQ ID NO: 132957 - DNA, 23 bp, Artificial sequence
  SiRNA target sequence
acagctacctactatggagctgt

SEQ ID NO: 132958 - DNA, 23 bp, Artificial sequence
  SiRNA target sequence
cagctacctactatggagctgtt

SEQ ID NO: 132959 - DNA, 23 bp, Artificial sequence
  SiRNA target sequence
agctacctactatggagctgttg

SEQ ID NO: 132960 - DNA, 23 bp, Artificial sequence
  SiRNA target sequence
gctacctactatggagctgttgt

SEQ ID NO: 132961 - DNA, 23 bp, Artificial sequence
  SiRNA target sequence
ctacctactatggagctgttgta

SEQ ID NO: 132962 - DNA, 23 bp, Artificial sequence
  SiRNA target sequence
tacctactatggagctgttgtat

SEQ ID NO: 132963 - DNA, 23 bp, Artificial sequence
  SiRNA target sequence
acctactatggagctgttgtatt

SEQ ID NO: 132964 - DNA, 23 bp, Artificial sequence
  SiRNA target sequence
cctactatggagctgttgtatta

SEQ ID NO: 132965 - DNA, 23 bp, Artificial sequence
  SiRNA target sequence
ctactatggagctgttgtattaa

SEQ ID NO: 132966 - DNA, 23 bp, Artificial sequence
  SiRNA target sequence
tactatggagctgttgtattaaa

SEQ ID NO: 132967 - DNA, 23 bp, Artificial sequence
  SiRNA target sequence
actatggagctgttgtattaaat

SEQ ID NO: 132968 - DNA, 23 bp, Artificial sequence
  SiRNA target sequence
ctatggagctgttgtattaaatc

SEQ ID NO: 132969 - DNA, 23 bp, Artificial sequence
  SiRNA target sequence
tatggagctgttgtattaaatca

SEQ ID NO: 132970 - DNA, 23 bp, Artificial sequence
  SiRNA target sequence
atggagctgttgtattaaatcat

SEQ ID NO: 132971 - DNA, 23 bp, Artificial sequence
  SiRNA target sequence
tggagctgttgtattaaatcatg

SEQ ID NO: 132972 - DNA, 23 bp, Artificial sequence
  SiRNA target sequence
ggagctgttgtattaaatcatgc

SEQ ID NO: 132973 - DNA, 23 bp, Artificial sequence
  SiRNA target sequence
gagctgttgtattaaatcatgca

SEQ ID NO: 132974 - DNA, 23 bp, Artificial sequence
  SiRNA target sequence
agctgttgtattaaatcatgcaa

SEQ ID NO: 132975 - DNA, 23 bp, Artificial sequence
  SiRNA target sequence
gctgttgtattaaatcatgcaaa

SEQ ID NO: 132976 - DNA, 23 bp, Artificial sequence
  SiRNA target sequence
ctgttgtattaaatcatgcaaaa

SEQ ID NO: 132977 - DNA, 23 bp, Artificial sequence
  SiRNA target sequence
tgttgtattaaatcatgcaaaat

SEQ ID NO: 132978 - DNA, 23 bp, Artificial sequence
  SiRNA target sequence
gttgtattaaatcatgcaaaatt

SEQ ID NO: 132979 - DNA, 23 bp, Artificial sequence
  SiRNA target sequence
ttgtattaaatcatgcaaaattc

SEQ ID NO: 132980 - DNA, 23 bp, Artificial sequence
  SiRNA target sequence
tgtattaaatcatgcaaaattct

SEQ ID NO: 132981 - DNA, 23 bp, Artificial sequence
  SiRNA target sequence
gtattaaatcatgcaaaattctt

SEQ ID NO: 132982 - DNA, 23 bp, Artificial sequence
  SiRNA target sequence
tattaaatcatgcaaaattcttg

SEQ ID NO: 132983 - DNA, 23 bp, Artificial sequence
  SiRNA target sequence
attaaatcatgcaaaattcttgt

SEQ ID NO: 132984 - DNA, 23 bp, Artificial sequence
  SiRNA target sequence
ttaaatcatgcaaaattcttgtc

SEQ ID NO: 132985 - DNA, 23 bp, Artificial sequence
  SiRNA target sequence
taaatcatgcaaaattcttgtca

SEQ ID NO: 132986 - DNA, 23 bp, Artificial sequence
  SiRNA target sequence
aaatcatgcaaaattcttgtcag

SEQ ID NO: 132987 - DNA, 23 bp, Artificial sequence
  SiRNA target sequence
aatcatgcaaaattcttgtcagt

SEQ ID NO: 132988 - DNA, 23 bp, Artificial sequence
  SiRNA target sequence
atcatgcaaaattcttgtcagta

SEQ ID NO: 132989 - DNA, 23 bp, Artificial sequence
  SiRNA target sequence
tcatgcaaaattcttgtcagtaa

SEQ ID NO: 132990 - DNA, 23 bp, Artificial sequence
  SiRNA target sequence
catgcaaaattcttgtcagtaac

SEQ ID NO: 132991 - DNA, 23 bp, Artificial sequence
  SiRNA target sequence
atgcaaaattcttgtcagtaaca

SEQ ID NO: 132992 - DNA, 23 bp, Artificial sequence
  SiRNA target sequence
tgcaaaattcttgtcagtaacaa

SEQ ID NO: 132993 - DNA, 23 bp, Artificial sequence
  SiRNA target sequence
gcaaaattcttgtcagtaacaaa

SEQ ID NO: 132994 - DNA, 23 bp, Artificial sequence
  SiRNA target sequence
caaaattcttgtcagtaacaaaa

SEQ ID NO: 132995 - DNA, 23 bp, Artificial sequence
  SiRNA target sequence
aaaattcttgtcagtaacaaaag

SEQ ID NO: 132996 - DNA, 23 bp, Artificial sequence
  SiRNA target sequence
aaattcttgtcagtaacaaaaga

SEQ ID NO: 132997 - DNA, 23 bp, Artificial sequence
  SiRNA target sequence
aattcttgtcagtaacaaaagat

SEQ ID NO: 132998 - DNA, 23 bp, Artificial sequence
  SiRNA target sequence
attcttgtcagtaacaaaagatg

SEQ ID NO: 132999 - DNA, 23 bp, Artificial sequence
  SiRNA target sequence
ttcttgtcagtaacaaaagatgg

SEQ ID NO: 133000 - DNA, 23 bp, Artificial sequence
  SiRNA target sequence
tcttgtcagtaacaaaagatggc

SEQ ID NO: 133001 - DNA, 23 bp, Artificial sequence
  SiRNA target sequence
cttgtcagtaacaaaagatggcg

SEQ ID NO: 133002 - DNA, 23 bp, Artificial sequence
  SiRNA target sequence
ttgtcagtaacaaaagatggcga

SEQ ID NO: 133003 - DNA, 23 bp, Artificial sequence
  SiRNA target sequence
tgtcagtaacaaaagatggcgat

SEQ ID NO: 133004 - DNA, 23 bp, Artificial sequence
  SiRNA target sequence
gtcagtaacaaaagatggcgata

SEQ ID NO: 133005 - DNA, 23 bp, Artificial sequence
  SiRNA target sequence
tcagtaacaaaagatggcgataa

SEQ ID NO: 133006 - DNA, 23 bp, Artificial sequence
  SiRNA target sequence
cagtaacaaaagatggcgataaa

SEQ ID NO: 133007 - DNA, 23 bp, Artificial sequence
  SiRNA target sequence
agtaacaaaagatggcgataaaa

SEQ ID NO: 133008 - DNA, 23 bp, Artificial sequence
  SiRNA target sequence
gtaacaaaagatggcgataaaat

SEQ ID NO: 133009 - DNA, 23 bp, Artificial sequence
  SiRNA target sequence
taacaaaagatggcgataaaatt

SEQ ID NO: 133010 - DNA, 23 bp, Artificial sequence
  SiRNA target sequence
aacaaaagatggcgataaaatta

SEQ ID NO: 133011 - DNA, 23 bp, Artificial sequence
  SiRNA target sequence
acaaaagatggcgataaaattaa

SEQ ID NO: 133012 - DNA, 23 bp, Artificial sequence
  SiRNA target sequence
caaaagatggcgataaaattaat

SEQ ID NO: 133013 - DNA, 23 bp, Artificial sequence
  SiRNA target sequence
aaaagatggcgataaaattaatg

SEQ ID NO: 133014 - DNA, 23 bp, Artificial sequence
  SiRNA target sequence
aaagatggcgataaaattaatgg

SEQ ID NO: 133015 - DNA, 23 bp, Artificial sequence
  SiRNA target sequence
aagatggcgataaaattaatgga

SEQ ID NO: 133016 - DNA, 23 bp, Artificial sequence
  SiRNA target sequence
agatggcgataaaattaatggaa

SEQ ID NO: 133017 - DNA, 23 bp, Artificial sequence
  SiRNA target sequence
gatggcgataaaattaatggaat

SEQ ID NO: 133018 - DNA, 23 bp, Artificial sequence
  SiRNA target sequence
atggcgataaaattaatggaatt

SEQ ID NO: 133019 - DNA, 23 bp, Artificial sequence
  SiRNA target sequence
tggcgataaaattaatggaatta

SEQ ID NO: 133020 - DNA, 23 bp, Artificial sequence
  SiRNA target sequence
ggcgataaaattaatggaattaa

SEQ ID NO: 133021 - DNA, 23 bp, Artificial sequence
  SiRNA target sequence
gcgataaaattaatggaattaaa

SEQ ID NO: 133022 - DNA, 23 bp, Artificial sequence
  SiRNA target sequence
cgataaaattaatggaattaaat

SEQ ID NO: 133023 - DNA, 23 bp, Artificial sequence
  SiRNA target sequence
gataaaattaatggaattaaatg

SEQ ID NO: 133024 - DNA, 23 bp, Artificial sequence
  SiRNA target sequence
ataaaattaatggaattaaatgt

SEQ ID NO: 133025 - DNA, 23 bp, Artificial sequence
  SiRNA target sequence
taaaattaatggaattaaatgtc

SEQ ID NO: 133026 - DNA, 23 bp, Artificial sequence
  SiRNA target sequence
aaaattaatggaattaaatgtca

SEQ ID NO: 133027 - DNA, 23 bp, Artificial sequence
  SiRNA target sequence
aaattaatggaattaaatgtcaa

SEQ ID NO: 133028 - DNA, 23 bp, Artificial sequence
  SiRNA target sequence
aattaatggaattaaatgtcaag

SEQ ID NO: 133029 - DNA, 23 bp, Artificial sequence
  SiRNA target sequence
attaatggaattaaatgtcaaga

SEQ ID NO: 133030 - DNA, 23 bp, Artificial sequence
  SiRNA target sequence
ttaatggaattaaatgtcaagat

SEQ ID NO: 133031 - DNA, 23 bp, Artificial sequence
  SiRNA target sequence
taatggaattaaatgtcaagatt

SEQ ID NO: 133032 - DNA, 23 bp, Artificial sequence
  SiRNA target sequence
aatggaattaaatgtcaagattc

SEQ ID NO: 133033 - DNA, 23 bp, Artificial sequence
  SiRNA target sequence
atggaattaaatgtcaagattca

SEQ ID NO: 133034 - DNA, 23 bp, Artificial sequence
  SiRNA target sequence
tggaattaaatgtcaagattcaa

SEQ ID NO: 133035 - DNA, 23 bp, Artificial sequence
  SiRNA target sequence
ggaattaaatgtcaagattcaat

SEQ ID NO: 133036 - DNA, 23 bp, Artificial sequence
  SiRNA target sequence
gaattaaatgtcaagattcaata

SEQ ID NO: 133037 - DNA, 23 bp, Artificial sequence
  SiRNA target sequence
aattaaatgtcaagattcaataa

SEQ ID NO: 133038 - DNA, 23 bp, Artificial sequence
  SiRNA target sequence
attaaatgtcaagattcaataaa

SEQ ID NO: 133039 - DNA, 23 bp, Artificial sequence
  SiRNA target sequence
ttaaatgtcaagattcaataaat

SEQ ID NO: 133040 - DNA, 23 bp, Artificial sequence
  SiRNA target sequence
taaatgtcaagattcaataaata

SEQ ID NO: 133041 - DNA, 23 bp, Artificial sequence
  SiRNA target sequence
aaatgtcaagattcaataaataa

SEQ ID NO: 133042 - DNA, 23 bp, Artificial sequence
  SiRNA target sequence
aatgtcaagattcaataaataat

SEQ ID NO: 133043 - DNA, 23 bp, Artificial sequence
  SiRNA target sequence
atgtcaagattcaataaataatg

SEQ ID NO: 133044 - DNA, 23 bp, Artificial sequence
  SiRNA target sequence
tgtcaagattcaataaataatga

SEQ ID NO: 133045 - DNA, 23 bp, Artificial sequence
  SiRNA target sequence
gtcaagattcaataaataatgaa

SEQ ID NO: 133046 - DNA, 23 bp, Artificial sequence
  SiRNA target sequence
tcaagattcaataaataatgaaa

SEQ ID NO: 133047 - DNA, 23 bp, Artificial sequence
  SiRNA target sequence
caagattcaataaataatgaaaa

SEQ ID NO: 133048 - DNA, 23 bp, Artificial sequence
  SiRNA target sequence
aagattcaataaataatgaaaaa

SEQ ID NO: 133049 - DNA, 23 bp, Artificial sequence
  SiRNA target sequence
agattcaataaataatgaaaaat

SEQ ID NO: 133050 - DNA, 23 bp, Artificial sequence
  SiRNA target sequence
gattcaataaataatgaaaaatt

SEQ ID NO: 133051 - DNA, 23 bp, Artificial sequence
  SiRNA target sequence
attcaataaataatgaaaaattt

SEQ ID NO: 133052 - DNA, 23 bp, Artificial sequence
  SiRNA target sequence
ttcaataaataatgaaaaatttt

SEQ ID NO: 133053 - DNA, 23 bp, Artificial sequence
  SiRNA target sequence
tcaataaataatgaaaaattttt

SEQ ID NO: 133054 - DNA, 23 bp, Artificial sequence
  SiRNA target sequence
caataaataatgaaaaattttta

SEQ ID NO: 133055 - DNA, 23 bp, Artificial sequence
  SiRNA target sequence
aataaataatgaaaaatttttaa

SEQ ID NO: 133056 - DNA, 23 bp, Artificial sequence
  SiRNA target sequence
ataaataatgaaaaatttttaat

SEQ ID NO: 133057 - DNA, 23 bp, Artificial sequence
  SiRNA target sequence
taaataatgaaaaatttttaatt

SEQ ID NO: 133058 - DNA, 23 bp, Artificial sequence
  SiRNA target sequence
aaataatgaaaaatttttaatta

SEQ ID NO: 133059 - DNA, 23 bp, Artificial sequence
  SiRNA target sequence
aataatgaaaaatttttaattag

SEQ ID NO: 133060 - DNA, 23 bp, Artificial sequence
  SiRNA target sequence
ataatgaaaaatttttaattagg

SEQ ID NO: 133061 - DNA, 23 bp, Artificial sequence
  SiRNA target sequence
taatgaaaaatttttaattaggt

SEQ ID NO: 133062 - DNA, 23 bp, Artificial sequence
  SiRNA target sequence
aatgaaaaatttttaattaggtg

SEQ ID NO: 133063 - DNA, 23 bp, Artificial sequence
  SiRNA target sequence
atgaaaaatttttaattaggtgt

SEQ ID NO: 133064 - DNA, 23 bp, Artificial sequence
  SiRNA target sequence
tgaaaaatttttaattaggtgta

SEQ ID NO: 133065 - DNA, 23 bp, Artificial sequence
  SiRNA target sequence
gaaaaatttttaattaggtgtaa

SEQ ID NO: 133066 - DNA, 23 bp, Artificial sequence
  SiRNA target sequence
aaaaatttttaattaggtgtaaa

SEQ ID NO: 133067 - DNA, 23 bp, Artificial sequence
  SiRNA target sequence
aaaatttttaattaggtgtaaag

SEQ ID NO: 133068 - DNA, 23 bp, Artificial sequence
  SiRNA target sequence
aaatttttaattaggtgtaaagt

SEQ ID NO: 133069 - DNA, 23 bp, Artificial sequence
  SiRNA target sequence
aatttttaattaggtgtaaagtt

SEQ ID NO: 133070 - DNA, 23 bp, Artificial sequence
  SiRNA target sequence
atttttaattaggtgtaaagttt

SEQ ID NO: 133071 - DNA, 23 bp, Artificial sequence
  SiRNA target sequence
tttttaattaggtgtaaagtttt

SEQ ID NO: 133072 - DNA, 23 bp, Artificial sequence
  SiRNA target sequence
ttttaattaggtgtaaagtttta

SEQ ID NO: 133073 - DNA, 23 bp, Artificial sequence
  SiRNA target sequence
tttaattaggtgtaaagttttaa

SEQ ID NO: 133074 - DNA, 23 bp, Artificial sequence
  SiRNA target sequence
ttaattaggtgtaaagttttaat

SEQ ID NO: 133075 - DNA, 23 bp, Artificial sequence
  SiRNA target sequence
taattaggtgtaaagttttaata

SEQ ID NO: 133076 - DNA, 23 bp, Artificial sequence
  SiRNA target sequence
aattaggtgtaaagttttaataa

SEQ ID NO: 133077 - DNA, 23 bp, Artificial sequence
  SiRNA target sequence
attaggtgtaaagttttaataaa

SEQ ID NO: 133078 - DNA, 23 bp, Artificial sequence
  SiRNA target sequence
ttaggtgtaaagttttaataaat

SEQ ID NO: 133079 - DNA, 23 bp, Artificial sequence
  SiRNA target sequence
taggtgtaaagttttaataaata

SEQ ID NO: 133080 - DNA, 23 bp, Artificial sequence
  SiRNA target sequence
aggtgtaaagttttaataaatac

SEQ ID NO: 133081 - DNA, 23 bp, Artificial sequence
  SiRNA target sequence
ggtgtaaagttttaataaatact

SEQ ID NO: 133082 - DNA, 23 bp, Artificial sequence
  SiRNA target sequence
gtgtaaagttttaataaatactt

SEQ ID NO: 133083 - DNA, 23 bp, Artificial sequence
  SiRNA target sequence
tgtaaagttttaataaatacttc

SEQ ID NO: 133084 - DNA, 23 bp, Artificial sequence
  SiRNA target sequence
gtaaagttttaataaatacttct

SEQ ID NO: 133085 - DNA, 23 bp, Artificial sequence
  SiRNA target sequence
taaagttttaataaatacttctg

SEQ ID NO: 133086 - DNA, 23 bp, Artificial sequence
  SiRNA target sequence
aaagttttaataaatacttctgg

SEQ ID NO: 133087 - DNA, 23 bp, Artificial sequence
  SiRNA target sequence
aagttttaataaatacttctggc

SEQ ID NO: 133088 - DNA, 23 bp, Artificial sequence
  SiRNA target sequence
agttttaataaatacttctggcc

SEQ ID NO: 133089 - DNA, 23 bp, Artificial sequence
  SiRNA target sequence
gttttaataaatacttctggccc

SEQ ID NO: 133090 - DNA, 23 bp, Artificial sequence
  SiRNA target sequence
ttttaataaatacttctggccct

SEQ ID NO: 133091 - DNA, 23 bp, Artificial sequence
  SiRNA target sequence
tttaataaatacttctggccctt

SEQ ID NO: 133092 - DNA, 23 bp, Artificial sequence
  SiRNA target sequence
ttaataaatacttctggcccttt

SEQ ID NO: 133093 - DNA, 23 bp, Artificial sequence
  SiRNA target sequence
taataaatacttctggccctttt

SEQ ID NO: 133094 - DNA, 23 bp, Artificial sequence
  SiRNA target sequence
aataaatacttctggcccttttg

SEQ ID NO: 133095 - DNA, 23 bp, Artificial sequence
  SiRNA target sequence
ataaatacttctggcccttttgc

SEQ ID NO: 133096 - DNA, 23 bp, Artificial sequence
  SiRNA target sequence
taaatacttctggcccttttgct

SEQ ID NO: 133097 - DNA, 23 bp, Artificial sequence
  SiRNA target sequence
aaatacttctggcccttttgctg

SEQ ID NO: 133098 - DNA, 23 bp, Artificial sequence
  SiRNA target sequence
aatacttctggcccttttgctga

SEQ ID NO: 133099 - DNA, 23 bp, Artificial sequence
  SiRNA target sequence
atacttctggcccttttgctgac

SEQ ID NO: 133100 - DNA, 23 bp, Artificial sequence
  SiRNA target sequence
tacttctggcccttttgctgacg

SEQ ID NO: 133101 - DNA, 23 bp, Artificial sequence
  SiRNA target sequence
acttctggcccttttgctgacga

SEQ ID NO: 133102 - DNA, 23 bp, Artificial sequence
  SiRNA target sequence
cttctggcccttttgctgacgag

SEQ ID NO: 133103 - DNA, 23 bp, Artificial sequence
  SiRNA target sequence
ttctggcccttttgctgacgagg

SEQ ID NO: 133104 - DNA, 23 bp, Artificial sequence
  SiRNA target sequence
tctggcccttttgctgacgaggt

SEQ ID NO: 133105 - DNA, 23 bp, Artificial sequence
  SiRNA target sequence
ctggcccttttgctgacgaggtt

SEQ ID NO: 133106 - DNA, 23 bp, Artificial sequence
  SiRNA target sequence
tggcccttttgctgacgaggttc

SEQ ID NO: 133107 - DNA, 23 bp, Artificial sequence
  SiRNA target sequence
ggcccttttgctgacgaggttcg

SEQ ID NO: 133108 - DNA, 23 bp, Artificial sequence
  SiRNA target sequence
gcccttttgctgacgaggttcga

SEQ ID NO: 133109 - DNA, 23 bp, Artificial sequence
  SiRNA target sequence
cccttttgctgacgaggttcgaa

SEQ ID NO: 133110 - DNA, 23 bp, Artificial sequence
  SiRNA target sequence
ccttttgctgacgaggttcgaaa

SEQ ID NO: 133111 - DNA, 23 bp, Artificial sequence
  SiRNA target sequence
cttttgctgacgaggttcgaaat

SEQ ID NO: 133112 - DNA, 23 bp, Artificial sequence
  SiRNA target sequence
ttttgctgacgaggttcgaaata

SEQ ID NO: 133113 - DNA, 23 bp, Artificial sequence
  SiRNA target sequence
tttgctgacgaggttcgaaatac

SEQ ID NO: 133114 - DNA, 23 bp, Artificial sequence
  SiRNA target sequence
ttgctgacgaggttcgaaataca

SEQ ID NO: 133115 - DNA, 23 bp, Artificial sequence
  SiRNA target sequence
tgctgacgaggttcgaaatacat

SEQ ID NO: 133116 - DNA, 23 bp, Artificial sequence
  SiRNA target sequence
gctgacgaggttcgaaatacatc

SEQ ID NO: 133117 - DNA, 23 bp, Artificial sequence
  SiRNA target sequence
ctgacgaggttcgaaatacatca

SEQ ID NO: 133118 - DNA, 23 bp, Artificial sequence
  SiRNA target sequence
tgacgaggttcgaaatacatcaa

SEQ ID NO: 133119 - DNA, 23 bp, Artificial sequence
  SiRNA target sequence
gacgaggttcgaaatacatcaat

SEQ ID NO: 133120 - DNA, 23 bp, Artificial sequence
  SiRNA target sequence
acgaggttcgaaatacatcaatt

SEQ ID NO: 133121 - DNA, 23 bp, Artificial sequence
  SiRNA target sequence
cgaggttcgaaatacatcaattg

SEQ ID NO: 133122 - DNA, 23 bp, Artificial sequence
  SiRNA target sequence
gaggttcgaaatacatcaattga

SEQ ID NO: 133123 - DNA, 23 bp, Artificial sequence
  SiRNA target sequence
aggttcgaaatacatcaattgaa

SEQ ID NO: 133124 - DNA, 23 bp, Artificial sequence
  SiRNA target sequence
ggttcgaaatacatcaattgaaa

SEQ ID NO: 133125 - DNA, 23 bp, Artificial sequence
  SiRNA target sequence
gttcgaaatacatcaattgaaaa

SEQ ID NO: 133126 - DNA, 23 bp, Artificial sequence
  SiRNA target sequence
ttcgaaatacatcaattgaaaac

SEQ ID NO: 133127 - DNA, 23 bp, Artificial sequence
  SiRNA target sequence
tcgaaatacatcaattgaaaact

SEQ ID NO: 133128 - DNA, 23 bp, Artificial sequence
  SiRNA target sequence
cgaaatacatcaattgaaaactg

SEQ ID NO: 133129 - DNA, 23 bp, Artificial sequence
  SiRNA target sequence
gaaatacatcaattgaaaactgt

SEQ ID NO: 133130 - DNA, 23 bp, Artificial sequence
  SiRNA target sequence
aaatacatcaattgaaaactgtc

SEQ ID NO: 133131 - DNA, 23 bp, Artificial sequence
  SiRNA target sequence
aatacatcaattgaaaactgtca

SEQ ID NO: 133132 - DNA, 23 bp, Artificial sequence
  SiRNA target sequence
atacatcaattgaaaactgtcaa

SEQ ID NO: 133133 - DNA, 23 bp, Artificial sequence
  SiRNA target sequence
tacatcaattgaaaactgtcaac

SEQ ID NO: 133134 - DNA, 23 bp, Artificial sequence
  SiRNA target sequence
acatcaattgaaaactgtcaacc

SEQ ID NO: 133135 - DNA, 23 bp, Artificial sequence
  SiRNA target sequence
catcaattgaaaactgtcaacca

SEQ ID NO: 133136 - DNA, 23 bp, Artificial sequence
  SiRNA target sequence
atcaattgaaaactgtcaaccaa

SEQ ID NO: 133137 - DNA, 23 bp, Artificial sequence
  SiRNA target sequence
tcaattgaaaactgtcaaccaat

SEQ ID NO: 133138 - DNA, 23 bp, Artificial sequence
  SiRNA target sequence
caattgaaaactgtcaaccaata

SEQ ID NO: 133139 - DNA, 23 bp, Artificial sequence
  SiRNA target sequence
aattgaaaactgtcaaccaatac

SEQ ID NO: 133140 - DNA, 23 bp, Artificial sequence
  SiRNA target sequence
attgaaaactgtcaaccaatact

SEQ ID NO: 133141 - DNA, 23 bp, Artificial sequence
  SiRNA target sequence
ttgaaaactgtcaaccaatactc

SEQ ID NO: 133142 - DNA, 23 bp, Artificial sequence
  SiRNA target sequence
tgaaaactgtcaaccaatactcc

SEQ ID NO: 133143 - DNA, 23 bp, Artificial sequence
  SiRNA target sequence
gaaaactgtcaaccaatactcca

SEQ ID NO: 133144 - DNA, 23 bp, Artificial sequence
  SiRNA target sequence
aaaactgtcaaccaatactccaa

SEQ ID NO: 133145 - DNA, 23 bp, Artificial sequence
  SiRNA target sequence
aaactgtcaaccaatactccaac

SEQ ID NO: 133146 - DNA, 23 bp, Artificial sequence
  SiRNA target sequence
aactgtcaaccaatactccaaca

SEQ ID NO: 133147 - DNA, 23 bp, Artificial sequence
  SiRNA target sequence
actgtcaaccaatactccaacat

SEQ ID NO: 133148 - DNA, 23 bp, Artificial sequence
  SiRNA target sequence
ctgtcaaccaatactccaacata

SEQ ID NO: 133149 - DNA, 23 bp, Artificial sequence
  SiRNA target sequence
tgtcaaccaatactccaacatag

SEQ ID NO: 133150 - DNA, 23 bp, Artificial sequence
  SiRNA target sequence
gtcaaccaatactccaacatagt

SEQ ID NO: 133151 - DNA, 23 bp, Artificial sequence
  SiRNA target sequence
tcaaccaatactccaacatagtt

SEQ ID NO: 133152 - DNA, 23 bp, Artificial sequence
  SiRNA target sequence
caaccaatactccaacatagtta

SEQ ID NO: 133153 - DNA, 23 bp, Artificial sequence
  SiRNA target sequence
aaccaatactccaacatagttat

SEQ ID NO: 133154 - DNA, 23 bp, Artificial sequence
  SiRNA target sequence
accaatactccaacatagttatg

SEQ ID NO: 133155 - DNA, 23 bp, Artificial sequence
  SiRNA target sequence
ccaatactccaacatagttatgg

SEQ ID NO: 133156 - DNA, 23 bp, Artificial sequence
  SiRNA target sequence
caatactccaacatagttatggt

SEQ ID NO: 133157 - DNA, 23 bp, Artificial sequence
  SiRNA target sequence
aatactccaacatagttatggta

SEQ ID NO: 133158 - DNA, 23 bp, Artificial sequence
  SiRNA target sequence
atactccaacatagttatggtac

SEQ ID NO: 133159 - DNA, 23 bp, Artificial sequence
  SiRNA target sequence
tactccaacatagttatggtaca

SEQ ID NO: 133160 - DNA, 23 bp, Artificial sequence
  SiRNA target sequence
actccaacatagttatggtacac

SEQ ID NO: 133161 - DNA, 23 bp, Artificial sequence
  SiRNA target sequence
ctccaacatagttatggtacaca

SEQ ID NO: 133162 - DNA, 23 bp, Artificial sequence
  SiRNA target sequence
tccaacatagttatggtacacat

SEQ ID NO: 133163 - DNA, 23 bp, Artificial sequence
  SiRNA target sequence
ccaacatagttatggtacacata

SEQ ID NO: 133164 - DNA, 23 bp, Artificial sequence
  SiRNA target sequence
caacatagttatggtacacatat

SEQ ID NO: 133165 - DNA, 23 bp, Artificial sequence
  SiRNA target sequence
aacatagttatggtacacatatt

SEQ ID NO: 133166 - DNA, 23 bp, Artificial sequence
  SiRNA target sequence
acatagttatggtacacatattg

SEQ ID NO: 133167 - DNA, 23 bp, Artificial sequence
  SiRNA target sequence
catagttatggtacacatattgt

SEQ ID NO: 133168 - DNA, 23 bp, Artificial sequence
  SiRNA target sequence
atagttatggtacacatattgta

SEQ ID NO: 133169 - DNA, 23 bp, Artificial sequence
  SiRNA target sequence
tagttatggtacacatattgtag

SEQ ID NO: 133170 - DNA, 23 bp, Artificial sequence
  SiRNA target sequence
agttatggtacacatattgtagt

SEQ ID NO: 133171 - DNA, 23 bp, Artificial sequence
  SiRNA target sequence
gttatggtacacatattgtagtt

SEQ ID NO: 133172 - DNA, 23 bp, Artificial sequence
  SiRNA target sequence
ttatggtacacatattgtagttc

SEQ ID NO: 133173 - DNA, 23 bp, Artificial sequence
  SiRNA target sequence
tatggtacacatattgtagttcc

SEQ ID NO: 133174 - DNA, 23 bp, Artificial sequence
  SiRNA target sequence
atggtacacatattgtagttcct

SEQ ID NO: 133175 - DNA, 23 bp, Artificial sequence
  SiRNA target sequence
tggtacacatattgtagttcctg

SEQ ID NO: 133176 - DNA, 23 bp, Artificial sequence
  SiRNA target sequence
ggtacacatattgtagttcctgc

SEQ ID NO: 133177 - DNA, 23 bp, Artificial sequence
  SiRNA target sequence
gtacacatattgtagttcctgcg

SEQ ID NO: 133178 - DNA, 23 bp, Artificial sequence
  SiRNA target sequence
tacacatattgtagttcctgcga

SEQ ID NO: 133179 - DNA, 23 bp, Artificial sequence
  SiRNA target sequence
acacatattgtagttcctgcgat

SEQ ID NO: 133180 - DNA, 23 bp, Artificial sequence
  SiRNA target sequence
cacatattgtagttcctgcgata

SEQ ID NO: 133181 - DNA, 23 bp, Artificial sequence
  SiRNA target sequence
acatattgtagttcctgcgatat

SEQ ID NO: 133182 - DNA, 23 bp, Artificial sequence
  SiRNA target sequence
catattgtagttcctgcgatatt

SEQ ID NO: 133183 - DNA, 23 bp, Artificial sequence
  SiRNA target sequence
atattgtagttcctgcgatattt

SEQ ID NO: 133184 - DNA, 23 bp, Artificial sequence
  SiRNA target sequence
tattgtagttcctgcgatatttt

SEQ ID NO: 133185 - DNA, 23 bp, Artificial sequence
  SiRNA target sequence
attgtagttcctgcgatattttc

SEQ ID NO: 133186 - DNA, 23 bp, Artificial sequence
  SiRNA target sequence
ttgtagttcctgcgatattttcg

SEQ ID NO: 133187 - DNA, 23 bp, Artificial sequence
  SiRNA target sequence
tgtagttcctgcgatattttcgc

SEQ ID NO: 133188 - DNA, 23 bp, Artificial sequence
  SiRNA target sequence
gtagttcctgcgatattttcgcc

SEQ ID NO: 133189 - DNA, 23 bp, Artificial sequence
  SiRNA target sequence
tagttcctgcgatattttcgcct

SEQ ID NO: 133190 - DNA, 23 bp, Artificial sequence
  SiRNA target sequence
agttcctgcgatattttcgccta

SEQ ID NO: 133191 - DNA, 23 bp, Artificial sequence
  SiRNA target sequence
gttcctgcgatattttcgcctaa

SEQ ID NO: 133192 - DNA, 23 bp, Artificial sequence
  SiRNA target sequence
ttcctgcgatattttcgcctaaa

SEQ ID NO: 133193 - DNA, 23 bp, Artificial sequence
  SiRNA target sequence
tcctgcgatattttcgcctaaaa

SEQ ID NO: 133194 - DNA, 23 bp, Artificial sequence
  SiRNA target sequence
cctgcgatattttcgcctaaaaa

SEQ ID NO: 133195 - DNA, 23 bp, Artificial sequence
  SiRNA target sequence
ctgcgatattttcgcctaaaaat

SEQ ID NO: 133196 - DNA, 23 bp, Artificial sequence
  SiRNA target sequence
tgcgatattttcgcctaaaaata

SEQ ID NO: 133197 - DNA, 23 bp, Artificial sequence
  SiRNA target sequence
gcgatattttcgcctaaaaatat

SEQ ID NO: 133198 - DNA, 23 bp, Artificial sequence
  SiRNA target sequence
cgatattttcgcctaaaaatatg

SEQ ID NO: 133199 - DNA, 23 bp, Artificial sequence
  SiRNA target sequence
gatattttcgcctaaaaatatgg

SEQ ID NO: 133200 - DNA, 23 bp, Artificial sequence
  SiRNA target sequence
atattttcgcctaaaaatatggg

SEQ ID NO: 133201 - DNA, 23 bp, Artificial sequence
  SiRNA target sequence
tattttcgcctaaaaatatgggc

SEQ ID NO: 133202 - DNA, 23 bp, Artificial sequence
  SiRNA target sequence
attttcgcctaaaaatatgggct

SEQ ID NO: 133203 - DNA, 23 bp, Artificial sequence
  SiRNA target sequence
ttttcgcctaaaaatatgggctt

SEQ ID NO: 133204 - DNA, 23 bp, Artificial sequence
  SiRNA target sequence
tttcgcctaaaaatatgggcttt

SEQ ID NO: 133205 - DNA, 23 bp, Artificial sequence
  SiRNA target sequence
ttcgcctaaaaatatgggctttg

SEQ ID NO: 133206 - DNA, 23 bp, Artificial sequence
  SiRNA target sequence
tcgcctaaaaatatgggctttgt

SEQ ID NO: 133207 - DNA, 23 bp, Artificial sequence
  SiRNA target sequence
cgcctaaaaatatgggctttgtt

SEQ ID NO: 133208 - DNA, 23 bp, Artificial sequence
  SiRNA target sequence
gcctaaaaatatgggctttgttg

SEQ ID NO: 133209 - DNA, 23 bp, Artificial sequence
  SiRNA target sequence
cctaaaaatatgggctttgttga

SEQ ID NO: 133210 - DNA, 23 bp, Artificial sequence
  SiRNA target sequence
ctaaaaatatgggctttgttgat

SEQ ID NO: 133211 - DNA, 23 bp, Artificial sequence
  SiRNA target sequence
taaaaatatgggctttgttgatc

SEQ ID NO: 133212 - DNA, 23 bp, Artificial sequence
  SiRNA target sequence
aaaaatatgggctttgttgatcc

SEQ ID NO: 133213 - DNA, 23 bp, Artificial sequence
  SiRNA target sequence
aaaatatgggctttgttgatcca

SEQ ID NO: 133214 - DNA, 23 bp, Artificial sequence
  SiRNA target sequence
aaatatgggctttgttgatccaa

SEQ ID NO: 133215 - DNA, 23 bp, Artificial sequence
  SiRNA target sequence
aatatgggctttgttgatccaag

SEQ ID NO: 133216 - DNA, 23 bp, Artificial sequence
  SiRNA target sequence
atatgggctttgttgatccaagc

SEQ ID NO: 133217 - DNA, 23 bp, Artificial sequence
  SiRNA target sequence
tatgggctttgttgatccaagca

SEQ ID NO: 133218 - DNA, 23 bp, Artificial sequence
  SiRNA target sequence
atgggctttgttgatccaagcac

SEQ ID NO: 133219 - DNA, 23 bp, Artificial sequence
  SiRNA target sequence
tgggctttgttgatccaagcacg

SEQ ID NO: 133220 - DNA, 23 bp, Artificial sequence
  SiRNA target sequence
gggctttgttgatccaagcacga

SEQ ID NO: 133221 - DNA, 23 bp, Artificial sequence
  SiRNA target sequence
ggctttgttgatccaagcacgag

SEQ ID NO: 133222 - DNA, 23 bp, Artificial sequence
  SiRNA target sequence
gctttgttgatccaagcacgagt

SEQ ID NO: 133223 - DNA, 23 bp, Artificial sequence
  SiRNA target sequence
ctttgttgatccaagcacgagtg

SEQ ID NO: 133224 - DNA, 23 bp, Artificial sequence
  SiRNA target sequence
tttgttgatccaagcacgagtga

SEQ ID NO: 133225 - DNA, 23 bp, Artificial sequence
  SiRNA target sequence
ttgttgatccaagcacgagtgat

SEQ ID NO: 133226 - DNA, 23 bp, Artificial sequence
  SiRNA target sequence
tgttgatccaagcacgagtgatg

SEQ ID NO: 133227 - DNA, 23 bp, Artificial sequence
  SiRNA target sequence
gttgatccaagcacgagtgatgg

SEQ ID NO: 133228 - DNA, 23 bp, Artificial sequence
  SiRNA target sequence
ttgatccaagcacgagtgatgga

SEQ ID NO: 133229 - DNA, 23 bp, Artificial sequence
  SiRNA target sequence
tgatccaagcacgagtgatggaa

SEQ ID NO: 133230 - DNA, 23 bp, Artificial sequence
  SiRNA target sequence
gatccaagcacgagtgatggaag

SEQ ID NO: 133231 - DNA, 23 bp, Artificial sequence
  SiRNA target sequence
atccaagcacgagtgatggaaga

SEQ ID NO: 133232 - DNA, 23 bp, Artificial sequence
  SiRNA target sequence
tccaagcacgagtgatggaagaa

SEQ ID NO: 133233 - DNA, 23 bp, Artificial sequence
  SiRNA target sequence
ccaagcacgagtgatggaagaat

SEQ ID NO: 133234 - DNA, 23 bp, Artificial sequence
  SiRNA target sequence
caagcacgagtgatggaagaatc

SEQ ID NO: 133235 - DNA, 23 bp, Artificial sequence
  SiRNA target sequence
aagcacgagtgatggaagaatcg

SEQ ID NO: 133236 - DNA, 23 bp, Artificial sequence
  SiRNA target sequence
agcacgagtgatggaagaatcgc

SEQ ID NO: 133237 - DNA, 23 bp, Artificial sequence
  SiRNA target sequence
gcacgagtgatggaagaatcgca

SEQ ID NO: 133238 - DNA, 23 bp, Artificial sequence
  SiRNA target sequence
cacgagtgatggaagaatcgcat

SEQ ID NO: 133239 - DNA, 23 bp, Artificial sequence
  SiRNA target sequence
acgagtgatggaagaatcgcatt

SEQ ID NO: 133240 - DNA, 23 bp, Artificial sequence
  SiRNA target sequence
cgagtgatggaagaatcgcattt

SEQ ID NO: 133241 - DNA, 23 bp, Artificial sequence
  SiRNA target sequence
gagtgatggaagaatcgcatttt

SEQ ID NO: 133242 - DNA, 23 bp, Artificial sequence
  SiRNA target sequence
agtgatggaagaatcgcattttt

SEQ ID NO: 133243 - DNA, 23 bp, Artificial sequence
  SiRNA target sequence
gtgatggaagaatcgcatttttt

SEQ ID NO: 133244 - DNA, 23 bp, Artificial sequence
  SiRNA target sequence
tgatggaagaatcgcatttttta

SEQ ID NO: 133245 - DNA, 23 bp, Artificial sequence
  SiRNA target sequence
gatggaagaatcgcattttttat

SEQ ID NO: 133246 - DNA, 23 bp, Artificial sequence
  SiRNA target sequence
atggaagaatcgcattttttatg

SEQ ID NO: 133247 - DNA, 23 bp, Artificial sequence
  SiRNA target sequence
tggaagaatcgcattttttatga

SEQ ID NO: 133248 - DNA, 23 bp, Artificial sequence
  SiRNA target sequence
ggaagaatcgcattttttatgaa

SEQ ID NO: 133249 - DNA, 23 bp, Artificial sequence
  SiRNA target sequence
gaagaatcgcattttttatgaat

SEQ ID NO: 133250 - DNA, 23 bp, Artificial sequence
  SiRNA target sequence
aagaatcgcattttttatgaatt

SEQ ID NO: 133251 - DNA, 23 bp, Artificial sequence
  SiRNA target sequence
agaatcgcattttttatgaattt

SEQ ID NO: 133252 - DNA, 23 bp, Artificial sequence
  SiRNA target sequence
gaatcgcattttttatgaatttt

SEQ ID NO: 133253 - DNA, 23 bp, Artificial sequence
  SiRNA target sequence
aatcgcattttttatgaatttta

SEQ ID NO: 133254 - DNA, 23 bp, Artificial sequence
  SiRNA target sequence
atcgcattttttatgaattttaa

SEQ ID NO: 133255 - DNA, 23 bp, Artificial sequence
  SiRNA target sequence
tcgcattttttatgaattttaaa

SEQ ID NO: 133256 - DNA, 23 bp, Artificial sequence
  SiRNA target sequence
cgcattttttatgaattttaaag

SEQ ID NO: 133257 - DNA, 23 bp, Artificial sequence
  SiRNA target sequence
gcattttttatgaattttaaagg

SEQ ID NO: 133258 - DNA, 23 bp, Artificial sequence
  SiRNA target sequence
cattttttatgaattttaaaggt

SEQ ID NO: 133259 - DNA, 23 bp, Artificial sequence
  SiRNA target sequence
attttttatgaattttaaaggta

SEQ ID NO: 133260 - DNA, 23 bp, Artificial sequence
  SiRNA target sequence
ttttttatgaattttaaaggtaa

SEQ ID NO: 133261 - DNA, 23 bp, Artificial sequence
  SiRNA target sequence
tttttatgaattttaaaggtaaa

SEQ ID NO: 133262 - DNA, 23 bp, Artificial sequence
  SiRNA target sequence
ttttatgaattttaaaggtaaaa

SEQ ID NO: 133263 - DNA, 23 bp, Artificial sequence
  SiRNA target sequence
tttatgaattttaaaggtaaaac

SEQ ID NO: 133264 - DNA, 23 bp, Artificial sequence
  SiRNA target sequence
ttatgaattttaaaggtaaaaca

SEQ ID NO: 133265 - DNA, 23 bp, Artificial sequence
  SiRNA target sequence
tatgaattttaaaggtaaaacat

SEQ ID NO: 133266 - DNA, 23 bp, Artificial sequence
  SiRNA target sequence
atgaattttaaaggtaaaacatt

SEQ ID NO: 133267 - DNA, 23 bp, Artificial sequence
  SiRNA target sequence
tgaattttaaaggtaaaacattg

SEQ ID NO: 133268 - DNA, 23 bp, Artificial sequence
  SiRNA target sequence
gaattttaaaggtaaaacattga

SEQ ID NO: 133269 - DNA, 23 bp, Artificial sequence
  SiRNA target sequence
aattttaaaggtaaaacattgat

SEQ ID NO: 133270 - DNA, 23 bp, Artificial sequence
  SiRNA target sequence
attttaaaggtaaaacattgatt

SEQ ID NO: 133271 - DNA, 23 bp, Artificial sequence
  SiRNA target sequence
ttttaaaggtaaaacattgattg

SEQ ID NO: 133272 - DNA, 23 bp, Artificial sequence
  SiRNA target sequence
tttaaaggtaaaacattgattgg

SEQ ID NO: 133273 - DNA, 23 bp, Artificial sequence
  SiRNA target sequence
ttaaaggtaaaacattgattgga

SEQ ID NO: 133274 - DNA, 23 bp, Artificial sequence
  SiRNA target sequence
taaaggtaaaacattgattggag

SEQ ID NO: 133275 - DNA, 23 bp, Artificial sequence
  SiRNA target sequence
aaaggtaaaacattgattggagg

SEQ ID NO: 133276 - DNA, 23 bp, Artificial sequence
  SiRNA target sequence
aaggtaaaacattgattggagga

SEQ ID NO: 133277 - DNA, 23 bp, Artificial sequence
  SiRNA target sequence
aggtaaaacattgattggaggaa

SEQ ID NO: 133278 - DNA, 23 bp, Artificial sequence
  SiRNA target sequence
ggtaaaacattgattggaggaac

SEQ ID NO: 133279 - DNA, 23 bp, Artificial sequence
  SiRNA target sequence
gtaaaacattgattggaggaaca

SEQ ID NO: 133280 - DNA, 23 bp, Artificial sequence
  SiRNA target sequence
taaaacattgattggaggaacag

SEQ ID NO: 133281 - DNA, 23 bp, Artificial sequence
  SiRNA target sequence
aaaacattgattggaggaacaga

SEQ ID NO: 133282 - DNA, 23 bp, Artificial sequence
  SiRNA target sequence
aaacattgattggaggaacagat

SEQ ID NO: 133283 - DNA, 23 bp, Artificial sequence
  SiRNA target sequence
aacattgattggaggaacagatg

SEQ ID NO: 133284 - DNA, 23 bp, Artificial sequence
  SiRNA target sequence
acattgattggaggaacagatgt

SEQ ID NO: 133285 - DNA, 23 bp, Artificial sequence
  SiRNA target sequence
cattgattggaggaacagatgtt

SEQ ID NO: 133286 - DNA, 23 bp, Artificial sequence
  SiRNA target sequence
attgattggaggaacagatgtta

SEQ ID NO: 133287 - DNA, 23 bp, Artificial sequence
  SiRNA target sequence
ttgattggaggaacagatgttaa

SEQ ID NO: 133288 - DNA, 23 bp, Artificial sequence
  SiRNA target sequence
tgattggaggaacagatgttaag

SEQ ID NO: 133289 - DNA, 23 bp, Artificial sequence
  SiRNA target sequence
gattggaggaacagatgttaagt

SEQ ID NO: 133290 - DNA, 23 bp, Artificial sequence
  SiRNA target sequence
attggaggaacagatgttaagtg

SEQ ID NO: 133291 - DNA, 23 bp, Artificial sequence
  SiRNA target sequence
ttggaggaacagatgttaagtgt

SEQ ID NO: 133292 - DNA, 23 bp, Artificial sequence
  SiRNA target sequence
tggaggaacagatgttaagtgta

SEQ ID NO: 133293 - DNA, 23 bp, Artificial sequence
  SiRNA target sequence
ggaggaacagatgttaagtgtaa

SEQ ID NO: 133294 - DNA, 23 bp, Artificial sequence
  SiRNA target sequence
gaggaacagatgttaagtgtaaa

SEQ ID NO: 133295 - DNA, 23 bp, Artificial sequence
  SiRNA target sequence
aggaacagatgttaagtgtaaag

SEQ ID NO: 133296 - DNA, 23 bp, Artificial sequence
  SiRNA target sequence
ggaacagatgttaagtgtaaagt

SEQ ID NO: 133297 - DNA, 23 bp, Artificial sequence
  SiRNA target sequence
gaacagatgttaagtgtaaagtt

SEQ ID NO: 133298 - DNA, 23 bp, Artificial sequence
  SiRNA target sequence
aacagatgttaagtgtaaagttg

SEQ ID NO: 133299 - DNA, 23 bp, Artificial sequence
  SiRNA target sequence
acagatgttaagtgtaaagttga

SEQ ID NO: 133300 - DNA, 23 bp, Artificial sequence
  SiRNA target sequence
cagatgttaagtgtaaagttgaa

SEQ ID NO: 133301 - DNA, 23 bp, Artificial sequence
  SiRNA target sequence
agatgttaagtgtaaagttgaag

SEQ ID NO: 133302 - DNA, 23 bp, Artificial sequence
  SiRNA target sequence
gatgttaagtgtaaagttgaaga

SEQ ID NO: 133303 - DNA, 23 bp, Artificial sequence
  SiRNA target sequence
atgttaagtgtaaagttgaagat

SEQ ID NO: 133304 - DNA, 23 bp, Artificial sequence
  SiRNA target sequence
tgttaagtgtaaagttgaagatt

SEQ ID NO: 133305 - DNA, 23 bp, Artificial sequence
  SiRNA target sequence
gttaagtgtaaagttgaagattt

SEQ ID NO: 133306 - DNA, 23 bp, Artificial sequence
  SiRNA target sequence
ttaagtgtaaagttgaagattta

SEQ ID NO: 133307 - DNA, 23 bp, Artificial sequence
  SiRNA target sequence
taagtgtaaagttgaagatttaa

SEQ ID NO: 133308 - DNA, 23 bp, Artificial sequence
  SiRNA target sequence
aagtgtaaagttgaagatttaat

SEQ ID NO: 133309 - DNA, 23 bp, Artificial sequence
  SiRNA target sequence
agtgtaaagttgaagatttaata

SEQ ID NO: 133310 - DNA, 23 bp, Artificial sequence
  SiRNA target sequence
gtgtaaagttgaagatttaataa

SEQ ID NO: 133311 - DNA, 23 bp, Artificial sequence
  SiRNA target sequence
tgtaaagttgaagatttaataaa

SEQ ID NO: 133312 - DNA, 23 bp, Artificial sequence
  SiRNA target sequence
gtaaagttgaagatttaataaaa

SEQ ID NO: 133313 - DNA, 23 bp, Artificial sequence
  SiRNA target sequence
taaagttgaagatttaataaaac

SEQ ID NO: 133314 - DNA, 23 bp, Artificial sequence
  SiRNA target sequence
aaagttgaagatttaataaaacc

SEQ ID NO: 133315 - DNA, 23 bp, Artificial sequence
  SiRNA target sequence
aagttgaagatttaataaaaccg

SEQ ID NO: 133316 - DNA, 23 bp, Artificial sequence
  SiRNA target sequence
agttgaagatttaataaaaccga

SEQ ID NO: 133317 - DNA, 23 bp, Artificial sequence
  SiRNA target sequence
gttgaagatttaataaaaccgac

SEQ ID NO: 133318 - DNA, 23 bp, Artificial sequence
  SiRNA target sequence
ttgaagatttaataaaaccgact

SEQ ID NO: 133319 - DNA, 23 bp, Artificial sequence
  SiRNA target sequence
tgaagatttaataaaaccgactg

SEQ ID NO: 133320 - DNA, 23 bp, Artificial sequence
  SiRNA target sequence
gaagatttaataaaaccgactga

SEQ ID NO: 133321 - DNA, 23 bp, Artificial sequence
  SiRNA target sequence
aagatttaataaaaccgactgaa

SEQ ID NO: 133322 - DNA, 23 bp, Artificial sequence
  SiRNA target sequence
agatttaataaaaccgactgaag

SEQ ID NO: 133323 - DNA, 23 bp, Artificial sequence
  SiRNA target sequence
gatttaataaaaccgactgaaga

SEQ ID NO: 133324 - DNA, 23 bp, Artificial sequence
  SiRNA target sequence
atttaataaaaccgactgaagaa

SEQ ID NO: 133325 - DNA, 23 bp, Artificial sequence
  SiRNA target sequence
tttaataaaaccgactgaagaag

SEQ ID NO: 133326 - DNA, 23 bp, Artificial sequence
  SiRNA target sequence
ttaataaaaccgactgaagaaga

SEQ ID NO: 133327 - DNA, 23 bp, Artificial sequence
  SiRNA target sequence
taataaaaccgactgaagaagat

SEQ ID NO: 133328 - DNA, 23 bp, Artificial sequence
  SiRNA target sequence
aataaaaccgactgaagaagatc

SEQ ID NO: 133329 - DNA, 23 bp, Artificial sequence
  SiRNA target sequence
ataaaaccgactgaagaagatct

SEQ ID NO: 133330 - DNA, 23 bp, Artificial sequence
  SiRNA target sequence
taaaaccgactgaagaagatcta

SEQ ID NO: 133331 - DNA, 23 bp, Artificial sequence
  SiRNA target sequence
aaaaccgactgaagaagatctaa

SEQ ID NO: 133332 - DNA, 23 bp, Artificial sequence
  SiRNA target sequence
aaaccgactgaagaagatctaaa

SEQ ID NO: 133333 - DNA, 23 bp, Artificial sequence
  SiRNA target sequence
aaccgactgaagaagatctaaac

SEQ ID NO: 133334 - DNA, 23 bp, Artificial sequence
  SiRNA target sequence
accgactgaagaagatctaaact

SEQ ID NO: 133335 - DNA, 23 bp, Artificial sequence
  SiRNA target sequence
ccgactgaagaagatctaaactt

SEQ ID NO: 133336 - DNA, 23 bp, Artificial sequence
  SiRNA target sequence
cgactgaagaagatctaaacttt

SEQ ID NO: 133337 - DNA, 23 bp, Artificial sequence
  SiRNA target sequence
gactgaagaagatctaaactttc

SEQ ID NO: 133338 - DNA, 23 bp, Artificial sequence
  SiRNA target sequence
actgaagaagatctaaactttct

SEQ ID NO: 133339 - DNA, 23 bp, Artificial sequence
  SiRNA target sequence
ctgaagaagatctaaactttctt

SEQ ID NO: 133340 - DNA, 23 bp, Artificial sequence
  SiRNA target sequence
tgaagaagatctaaactttctta

SEQ ID NO: 133341 - DNA, 23 bp, Artificial sequence
  SiRNA target sequence
gaagaagatctaaactttcttat

SEQ ID NO: 133342 - DNA, 23 bp, Artificial sequence
  SiRNA target sequence
aagaagatctaaactttcttatt

SEQ ID NO: 133343 - DNA, 23 bp, Artificial sequence
  SiRNA target sequence
agaagatctaaactttcttattc

SEQ ID NO: 133344 - DNA, 23 bp, Artificial sequence
  SiRNA target sequence
gaagatctaaactttcttattca

SEQ ID NO: 133345 - DNA, 23 bp, Artificial sequence
  SiRNA target sequence
aagatctaaactttcttattcac

SEQ ID NO: 133346 - DNA, 23 bp, Artificial sequence
  SiRNA target sequence
agatctaaactttcttattcacg

SEQ ID NO: 133347 - DNA, 23 bp, Artificial sequence
  SiRNA target sequence
gatctaaactttcttattcacga

SEQ ID NO: 133348 - DNA, 23 bp, Artificial sequence
  SiRNA target sequence
atctaaactttcttattcacgag

SEQ ID NO: 133349 - DNA, 23 bp, Artificial sequence
  SiRNA target sequence
tctaaactttcttattcacgagg

SEQ ID NO: 133350 - DNA, 23 bp, Artificial sequence
  SiRNA target sequence
ctaaactttcttattcacgaggc

SEQ ID NO: 133351 - DNA, 23 bp, Artificial sequence
  SiRNA target sequence
taaactttcttattcacgaggcc

SEQ ID NO: 133352 - DNA, 23 bp, Artificial sequence
  SiRNA target sequence
aaactttcttattcacgaggcca

SEQ ID NO: 133353 - DNA, 23 bp, Artificial sequence
  SiRNA target sequence
aactttcttattcacgaggccaa

SEQ ID NO: 133354 - DNA, 23 bp, Artificial sequence
  SiRNA target sequence
actttcttattcacgaggccaat

SEQ ID NO: 133355 - DNA, 23 bp, Artificial sequence
  SiRNA target sequence
ctttcttattcacgaggccaatt

SEQ ID NO: 133356 - DNA, 23 bp, Artificial sequence
  SiRNA target sequence
tttcttattcacgaggccaatta

SEQ ID NO: 133357 - DNA, 23 bp, Artificial sequence
  SiRNA target sequence
ttcttattcacgaggccaattat

SEQ ID NO: 133358 - DNA, 23 bp, Artificial sequence
  SiRNA target sequence
tcttattcacgaggccaattatt

SEQ ID NO: 133359 - DNA, 23 bp, Artificial sequence
  SiRNA target sequence
cttattcacgaggccaattattt

SEQ ID NO: 133360 - DNA, 23 bp, Artificial sequence
  SiRNA target sequence
ttattcacgaggccaattatttt

SEQ ID NO: 133361 - DNA, 23 bp, Artificial sequence
  SiRNA target sequence
tattcacgaggccaattatttta

SEQ ID NO: 133362 - DNA, 23 bp, Artificial sequence
  SiRNA target sequence
attcacgaggccaattattttac

SEQ ID NO: 133363 - DNA, 23 bp, Artificial sequence
  SiRNA target sequence
ttcacgaggccaattattttaca

SEQ ID NO: 133364 - DNA, 23 bp, Artificial sequence
  SiRNA target sequence
tcacgaggccaattattttacag

SEQ ID NO: 133365 - DNA, 23 bp, Artificial sequence
  SiRNA target sequence
cacgaggccaattattttacaga

SEQ ID NO: 133366 - DNA, 23 bp, Artificial sequence
  SiRNA target sequence
acgaggccaattattttacagat

SEQ ID NO: 133367 - DNA, 23 bp, Artificial sequence
  SiRNA target sequence
cgaggccaattattttacagatc

SEQ ID NO: 133368 - DNA, 23 bp, Artificial sequence
  SiRNA target sequence
gaggccaattattttacagatca

SEQ ID NO: 133369 - DNA, 23 bp, Artificial sequence
  SiRNA target sequence
aggccaattattttacagatcac

SEQ ID NO: 133370 - DNA, 23 bp, Artificial sequence
  SiRNA target sequence
ggccaattattttacagatcaca

SEQ ID NO: 133371 - DNA, 23 bp, Artificial sequence
  SiRNA target sequence
gccaattattttacagatcacaa

SEQ ID NO: 133372 - DNA, 23 bp, Artificial sequence
  SiRNA target sequence
ccaattattttacagatcacaat

SEQ ID NO: 133373 - DNA, 23 bp, Artificial sequence
  SiRNA target sequence
caattattttacagatcacaatt

SEQ ID NO: 133374 - DNA, 23 bp, Artificial sequence
  SiRNA target sequence
aattattttacagatcacaattt

SEQ ID NO: 133375 - DNA, 23 bp, Artificial sequence
  SiRNA target sequence
attattttacagatcacaattta

SEQ ID NO: 133376 - DNA, 23 bp, Artificial sequence
  SiRNA target sequence
ttattttacagatcacaatttaa

SEQ ID NO: 133377 - DNA, 23 bp, Artificial sequence
  SiRNA target sequence
tattttacagatcacaatttaaa

SEQ ID NO: 133378 - DNA, 23 bp, Artificial sequence
  SiRNA target sequence
attttacagatcacaatttaaaa

SEQ ID NO: 133379 - DNA, 23 bp, Artificial sequence
  SiRNA target sequence
ttttacagatcacaatttaaaat

SEQ ID NO: 133380 - DNA, 23 bp, Artificial sequence
  SiRNA target sequence
tttacagatcacaatttaaaatt

SEQ ID NO: 133381 - DNA, 23 bp, Artificial sequence
  SiRNA target sequence
ttacagatcacaatttaaaatta

SEQ ID NO: 133382 - DNA, 23 bp, Artificial sequence
  SiRNA target sequence
tacagatcacaatttaaaattaa

SEQ ID NO: 133383 - DNA, 23 bp, Artificial sequence
  SiRNA target sequence
acagatcacaatttaaaattaac

SEQ ID NO: 133384 - DNA, 23 bp, Artificial sequence
  SiRNA target sequence
cagatcacaatttaaaattaaca

SEQ ID NO: 133385 - DNA, 23 bp, Artificial sequence
  SiRNA target sequence
agatcacaatttaaaattaacaa

SEQ ID NO: 133386 - DNA, 23 bp, Artificial sequence
  SiRNA target sequence
gatcacaatttaaaattaacaaa

SEQ ID NO: 133387 - DNA, 23 bp, Artificial sequence
  SiRNA target sequence
atcacaatttaaaattaacaaaa

SEQ ID NO: 133388 - DNA, 23 bp, Artificial sequence
  SiRNA target sequence
tcacaatttaaaattaacaaaaa

SEQ ID NO: 133389 - DNA, 23 bp, Artificial sequence
  SiRNA target sequence
cacaatttaaaattaacaaaaaa

SEQ ID NO: 133390 - DNA, 23 bp, Artificial sequence
  SiRNA target sequence
acaatttaaaattaacaaaaaaa

SEQ ID NO: 133391 - DNA, 23 bp, Artificial sequence
  SiRNA target sequence
caatttaaaattaacaaaaaaag

SEQ ID NO: 133392 - DNA, 23 bp, Artificial sequence
  SiRNA target sequence
aatttaaaattaacaaaaaaaga

SEQ ID NO: 133393 - DNA, 23 bp, Artificial sequence
  SiRNA target sequence
atttaaaattaacaaaaaaagat

SEQ ID NO: 133394 - DNA, 23 bp, Artificial sequence
  SiRNA target sequence
tttaaaattaacaaaaaaagatg

SEQ ID NO: 133395 - DNA, 23 bp, Artificial sequence
  SiRNA target sequence
ttaaaattaacaaaaaaagatgt

SEQ ID NO: 133396 - DNA, 23 bp, Artificial sequence
  SiRNA target sequence
taaaattaacaaaaaaagatgtt

SEQ ID NO: 133397 - DNA, 23 bp, Artificial sequence
  SiRNA target sequence
aaaattaacaaaaaaagatgttt

SEQ ID NO: 133398 - DNA, 23 bp, Artificial sequence
  SiRNA target sequence
aaattaacaaaaaaagatgtttt

SEQ ID NO: 133399 - DNA, 23 bp, Artificial sequence
  SiRNA target sequence
aattaacaaaaaaagatgttttg

SEQ ID NO: 133400 - DNA, 23 bp, Artificial sequence
  SiRNA target sequence
attaacaaaaaaagatgttttgt

SEQ ID NO: 133401 - DNA, 23 bp, Artificial sequence
  SiRNA target sequence
ttaacaaaaaaagatgttttgtc

SEQ ID NO: 133402 - DNA, 23 bp, Artificial sequence
  SiRNA target sequence
taacaaaaaaagatgttttgtct

SEQ ID NO: 133403 - DNA, 23 bp, Artificial sequence
  SiRNA target sequence
aacaaaaaaagatgttttgtctg

SEQ ID NO: 133404 - DNA, 23 bp, Artificial sequence
  SiRNA target sequence
acaaaaaaagatgttttgtctgt

SEQ ID NO: 133405 - DNA, 23 bp, Artificial sequence
  SiRNA target sequence
caaaaaaagatgttttgtctgtt

SEQ ID NO: 133406 - DNA, 23 bp, Artificial sequence
  SiRNA target sequence
aaaaaaagatgttttgtctgttt

SEQ ID NO: 133407 - DNA, 23 bp, Artificial sequence
  SiRNA target sequence
aaaaaagatgttttgtctgtttg

SEQ ID NO: 133408 - DNA, 23 bp, Artificial sequence
  SiRNA target sequence
aaaaagatgttttgtctgtttgg

SEQ ID NO: 133409 - DNA, 23 bp, Artificial sequence
  SiRNA target sequence
aaaagatgttttgtctgtttgga

SEQ ID NO: 133410 - DNA, 23 bp, Artificial sequence
  SiRNA target sequence
aaagatgttttgtctgtttggac

SEQ ID NO: 133411 - DNA, 23 bp, Artificial sequence
  SiRNA target sequence
aagatgttttgtctgtttggaca

SEQ ID NO: 133412 - DNA, 23 bp, Artificial sequence
  SiRNA target sequence
agatgttttgtctgtttggacag

SEQ ID NO: 133413 - DNA, 23 bp, Artificial sequence
  SiRNA target sequence
gatgttttgtctgtttggacagg

SEQ ID NO: 133414 - DNA, 23 bp, Artificial sequence
  SiRNA target sequence
atgttttgtctgtttggacaggt

SEQ ID NO: 133415 - DNA, 23 bp, Artificial sequence
  SiRNA target sequence
tgttttgtctgtttggacaggta

SEQ ID NO: 133416 - DNA, 23 bp, Artificial sequence
  SiRNA target sequence
gttttgtctgtttggacaggtat

SEQ ID NO: 133417 - DNA, 23 bp, Artificial sequence
  SiRNA target sequence
ttttgtctgtttggacaggtatt

SEQ ID NO: 133418 - DNA, 23 bp, Artificial sequence
  SiRNA target sequence
tttgtctgtttggacaggtatta

SEQ ID NO: 133419 - DNA, 23 bp, Artificial sequence
  SiRNA target sequence
ttgtctgtttggacaggtattag

SEQ ID NO: 133420 - DNA, 23 bp, Artificial sequence
  SiRNA target sequence
tgtctgtttggacaggtattaga

SEQ ID NO: 133421 - DNA, 23 bp, Artificial sequence
  SiRNA target sequence
gtctgtttggacaggtattagac

SEQ ID NO: 133422 - DNA, 23 bp, Artificial sequence
  SiRNA target sequence
tctgtttggacaggtattagacc

SEQ ID NO: 133423 - DNA, 23 bp, Artificial sequence
  SiRNA target sequence
ctgtttggacaggtattagaccg

SEQ ID NO: 133424 - DNA, 23 bp, Artificial sequence
  SiRNA target sequence
tgtttggacaggtattagaccgt

SEQ ID NO: 133425 - DNA, 23 bp, Artificial sequence
  SiRNA target sequence
gtttggacaggtattagaccgtt

SEQ ID NO: 133426 - DNA, 23 bp, Artificial sequence
  SiRNA target sequence
tttggacaggtattagaccgtta

SEQ ID NO: 133427 - DNA, 23 bp, Artificial sequence
  SiRNA target sequence
ttggacaggtattagaccgttag

SEQ ID NO: 133428 - DNA, 23 bp, Artificial sequence
  SiRNA target sequence
tggacaggtattagaccgttagt

SEQ ID NO: 133429 - DNA, 23 bp, Artificial sequence
  SiRNA target sequence
ggacaggtattagaccgttagtc

SEQ ID NO: 133430 - DNA, 23 bp, Artificial sequence
  SiRNA target sequence
gacaggtattagaccgttagtca

SEQ ID NO: 133431 - DNA, 23 bp, Artificial sequence
  SiRNA target sequence
acaggtattagaccgttagtcaa

SEQ ID NO: 133432 - DNA, 23 bp, Artificial sequence
  SiRNA target sequence
caggtattagaccgttagtcaag

SEQ ID NO: 133433 - DNA, 23 bp, Artificial sequence
  SiRNA target sequence
aggtattagaccgttagtcaagg

SEQ ID NO: 133434 - DNA, 23 bp, Artificial sequence
  SiRNA target sequence
ggtattagaccgttagtcaagga

SEQ ID NO: 133435 - DNA, 23 bp, Artificial sequence
  SiRNA target sequence
gtattagaccgttagtcaaggat

SEQ ID NO: 133436 - DNA, 23 bp, Artificial sequence
  SiRNA target sequence
tattagaccgttagtcaaggatt

SEQ ID NO: 133437 - DNA, 23 bp, Artificial sequence
  SiRNA target sequence
attagaccgttagtcaaggattt

SEQ ID NO: 133438 - DNA, 23 bp, Artificial sequence
  SiRNA target sequence
ttagaccgttagtcaaggattta

SEQ ID NO: 133439 - DNA, 23 bp, Artificial sequence
  SiRNA target sequence
tagaccgttagtcaaggatttat

SEQ ID NO: 133440 - DNA, 23 bp, Artificial sequence
  SiRNA target sequence
agaccgttagtcaaggatttatc

SEQ ID NO: 133441 - DNA, 23 bp, Artificial sequence
  SiRNA target sequence
gaccgttagtcaaggatttatcg

SEQ ID NO: 133442 - DNA, 23 bp, Artificial sequence
  SiRNA target sequence
accgttagtcaaggatttatcga

SEQ ID NO: 133443 - DNA, 23 bp, Artificial sequence
  SiRNA target sequence
ccgttagtcaaggatttatcgaa

SEQ ID NO: 133444 - DNA, 23 bp, Artificial sequence
  SiRNA target sequence
cgttagtcaaggatttatcgaaa

SEQ ID NO: 133445 - DNA, 23 bp, Artificial sequence
  SiRNA target sequence
gttagtcaaggatttatcgaaaa

SEQ ID NO: 133446 - DNA, 23 bp, Artificial sequence
  SiRNA target sequence
ttagtcaaggatttatcgaaaag

SEQ ID NO: 133447 - DNA, 23 bp, Artificial sequence
  SiRNA target sequence
tagtcaaggatttatcgaaaagt

SEQ ID NO: 133448 - DNA, 23 bp, Artificial sequence
  SiRNA target sequence
agtcaaggatttatcgaaaagtt

SEQ ID NO: 133449 - DNA, 23 bp, Artificial sequence
  SiRNA target sequence
gtcaaggatttatcgaaaagttc

SEQ ID NO: 133450 - DNA, 23 bp, Artificial sequence
  SiRNA target sequence
tcaaggatttatcgaaaagttca

SEQ ID NO: 133451 - DNA, 23 bp, Artificial sequence
  SiRNA target sequence
caaggatttatcgaaaagttcaa

SEQ ID NO: 133452 - DNA, 23 bp, Artificial sequence
  SiRNA target sequence
aaggatttatcgaaaagttcaac

SEQ ID NO: 133453 - DNA, 23 bp, Artificial sequence
  SiRNA target sequence
aggatttatcgaaaagttcaaca

SEQ ID NO: 133454 - DNA, 23 bp, Artificial sequence
  SiRNA target sequence
ggatttatcgaaaagttcaacag

SEQ ID NO: 133455 - DNA, 23 bp, Artificial sequence
  SiRNA target sequence
gatttatcgaaaagttcaacaga

SEQ ID NO: 133456 - DNA, 23 bp, Artificial sequence
  SiRNA target sequence
atttatcgaaaagttcaacagaa

SEQ ID NO: 133457 - DNA, 23 bp, Artificial sequence
  SiRNA target sequence
tttatcgaaaagttcaacagaaa

SEQ ID NO: 133458 - DNA, 23 bp, Artificial sequence
  SiRNA target sequence
ttatcgaaaagttcaacagaaaa

SEQ ID NO: 133459 - DNA, 23 bp, Artificial sequence
  SiRNA target sequence
tatcgaaaagttcaacagaaaag

SEQ ID NO: 133460 - DNA, 23 bp, Artificial sequence
  SiRNA target sequence
atcgaaaagttcaacagaaaaga

SEQ ID NO: 133461 - DNA, 23 bp, Artificial sequence
  SiRNA target sequence
tcgaaaagttcaacagaaaagat

SEQ ID NO: 133462 - DNA, 23 bp, Artificial sequence
  SiRNA target sequence
cgaaaagttcaacagaaaagata

SEQ ID NO: 133463 - DNA, 23 bp, Artificial sequence
  SiRNA target sequence
gaaaagttcaacagaaaagatat

SEQ ID NO: 133464 - DNA, 23 bp, Artificial sequence
  SiRNA target sequence
aaaagttcaacagaaaagatatg

SEQ ID NO: 133465 - DNA, 23 bp, Artificial sequence
  SiRNA target sequence
aaagttcaacagaaaagatatgt

SEQ ID NO: 133466 - DNA, 23 bp, Artificial sequence
  SiRNA target sequence
aagttcaacagaaaagatatgta

SEQ ID NO: 133467 - DNA, 23 bp, Artificial sequence
  SiRNA target sequence
agttcaacagaaaagatatgtag

SEQ ID NO: 133468 - DNA, 23 bp, Artificial sequence
  SiRNA target sequence
gttcaacagaaaagatatgtaga

SEQ ID NO: 133469 - DNA, 23 bp, Artificial sequence
  SiRNA target sequence
ttcaacagaaaagatatgtagaa

SEQ ID NO: 133470 - DNA, 23 bp, Artificial sequence
  SiRNA target sequence
tcaacagaaaagatatgtagaaa

SEQ ID NO: 133471 - DNA, 23 bp, Artificial sequence
  SiRNA target sequence
caacagaaaagatatgtagaaaa

SEQ ID NO: 133472 - DNA, 23 bp, Artificial sequence
  SiRNA target sequence
aacagaaaagatatgtagaaaac

SEQ ID NO: 133473 - DNA, 23 bp, Artificial sequence
  SiRNA target sequence
acagaaaagatatgtagaaaaca

SEQ ID NO: 133474 - DNA, 23 bp, Artificial sequence
  SiRNA target sequence
cagaaaagatatgtagaaaacat

SEQ ID NO: 133475 - DNA, 23 bp, Artificial sequence
  SiRNA target sequence
agaaaagatatgtagaaaacata

SEQ ID NO: 133476 - DNA, 23 bp, Artificial sequence
  SiRNA target sequence
gaaaagatatgtagaaaacatac

SEQ ID NO: 133477 - DNA, 23 bp, Artificial sequence
  SiRNA target sequence
aaaagatatgtagaaaacatact

SEQ ID NO: 133478 - DNA, 23 bp, Artificial sequence
  SiRNA target sequence
aaagatatgtagaaaacatacta

SEQ ID NO: 133479 - DNA, 23 bp, Artificial sequence
  SiRNA target sequence
aagatatgtagaaaacatactat

SEQ ID NO: 133480 - DNA, 23 bp, Artificial sequence
  SiRNA target sequence
agatatgtagaaaacatactata

SEQ ID NO: 133481 - DNA, 23 bp, Artificial sequence
  SiRNA target sequence
gatatgtagaaaacatactataa

SEQ ID NO: 133482 - DNA, 23 bp, Artificial sequence
  SiRNA target sequence
atatgtagaaaacatactataag

SEQ ID NO: 133483 - DNA, 23 bp, Artificial sequence
  SiRNA target sequence
tatgtagaaaacatactataaga

SEQ ID NO: 133484 - DNA, 23 bp, Artificial sequence
  SiRNA target sequence
atgtagaaaacatactataagaa

SEQ ID NO: 133485 - DNA, 23 bp, Artificial sequence
  SiRNA target sequence
tgtagaaaacatactataagaat

SEQ ID NO: 133486 - DNA, 23 bp, Artificial sequence
  SiRNA target sequence
gtagaaaacatactataagaata

SEQ ID NO: 133487 - DNA, 23 bp, Artificial sequence
  SiRNA target sequence
tagaaaacatactataagaatag

SEQ ID NO: 133488 - DNA, 23 bp, Artificial sequence
  SiRNA target sequence
agaaaacatactataagaataga

SEQ ID NO: 133489 - DNA, 23 bp, Artificial sequence
  SiRNA target sequence
gaaaacatactataagaatagat

SEQ ID NO: 133490 - DNA, 23 bp, Artificial sequence
  SiRNA target sequence
aaaacatactataagaatagata

SEQ ID NO: 133491 - DNA, 23 bp, Artificial sequence
  SiRNA target sequence
aaacatactataagaatagataa

SEQ ID NO: 133492 - DNA, 23 bp, Artificial sequence
  SiRNA target sequence
aacatactataagaatagataaa

SEQ ID NO: 133493 - DNA, 23 bp, Artificial sequence
  SiRNA target sequence
acatactataagaatagataaag

SEQ ID NO: 133494 - DNA, 23 bp, Artificial sequence
  SiRNA target sequence
catactataagaatagataaaga

SEQ ID NO: 133495 - DNA, 23 bp, Artificial sequence
  SiRNA target sequence
atactataagaatagataaagac

SEQ ID NO: 133496 - DNA, 23 bp, Artificial sequence
  SiRNA target sequence
tactataagaatagataaagaca

SEQ ID NO: 133497 - DNA, 23 bp, Artificial sequence
  SiRNA target sequence
actataagaatagataaagacaa

SEQ ID NO: 133498 - DNA, 23 bp, Artificial sequence
  SiRNA target sequence
ctataagaatagataaagacaat

SEQ ID NO: 133499 - DNA, 23 bp, Artificial sequence
  SiRNA target sequence
tataagaatagataaagacaata

SEQ ID NO: 133500 - DNA, 23 bp, Artificial sequence
  SiRNA target sequence
ataagaatagataaagacaatat

SEQ ID NO: 133501 - DNA, 23 bp, Artificial sequence
  SiRNA target sequence
taagaatagataaagacaatatg

SEQ ID NO: 133502 - DNA, 23 bp, Artificial sequence
  SiRNA target sequence
aagaatagataaagacaatatgg

SEQ ID NO: 133503 - DNA, 23 bp, Artificial sequence
  SiRNA target sequence
agaatagataaagacaatatggt

SEQ ID NO: 133504 - DNA, 23 bp, Artificial sequence
  SiRNA target sequence
gaatagataaagacaatatggta

SEQ ID NO: 133505 - DNA, 23 bp, Artificial sequence
  SiRNA target sequence
aatagataaagacaatatggtaa

SEQ ID NO: 133506 - DNA, 23 bp, Artificial sequence
  SiRNA target sequence
atagataaagacaatatggtaac

SEQ ID NO: 133507 - DNA, 23 bp, Artificial sequence
  SiRNA target sequence
tagataaagacaatatggtaact

SEQ ID NO: 133508 - DNA, 23 bp, Artificial sequence
  SiRNA target sequence
agataaagacaatatggtaactg

SEQ ID NO: 133509 - DNA, 23 bp, Artificial sequence
  SiRNA target sequence
gataaagacaatatggtaactgt

SEQ ID NO: 133510 - DNA, 23 bp, Artificial sequence
  SiRNA target sequence
ataaagacaatatggtaactgta

SEQ ID NO: 133511 - DNA, 23 bp, Artificial sequence
  SiRNA target sequence
taaagacaatatggtaactgtaa

SEQ ID NO: 133512 - DNA, 23 bp, Artificial sequence
  SiRNA target sequence
aaagacaatatggtaactgtaac

SEQ ID NO: 133513 - DNA, 23 bp, Artificial sequence
  SiRNA target sequence
aagacaatatggtaactgtaaca

SEQ ID NO: 133514 - DNA, 23 bp, Artificial sequence
  SiRNA target sequence
agacaatatggtaactgtaacag

SEQ ID NO: 133515 - DNA, 23 bp, Artificial sequence
  SiRNA target sequence
gacaatatggtaactgtaacagg

SEQ ID NO: 133516 - DNA, 23 bp, Artificial sequence
  SiRNA target sequence
acaatatggtaactgtaacaggt

SEQ ID NO: 133517 - DNA, 23 bp, Artificial sequence
  SiRNA target sequence
caatatggtaactgtaacaggtg

SEQ ID NO: 133518 - DNA, 23 bp, Artificial sequence
  SiRNA target sequence
aatatggtaactgtaacaggtgg

SEQ ID NO: 133519 - DNA, 23 bp, Artificial sequence
  SiRNA target sequence
atatggtaactgtaacaggtggt

SEQ ID NO: 133520 - DNA, 23 bp, Artificial sequence
  SiRNA target sequence
tatggtaactgtaacaggtggta

SEQ ID NO: 133521 - DNA, 23 bp, Artificial sequence
  SiRNA target sequence
atggtaactgtaacaggtggtaa

SEQ ID NO: 133522 - DNA, 23 bp, Artificial sequence
  SiRNA target sequence
tggtaactgtaacaggtggtaag

SEQ ID NO: 133523 - DNA, 23 bp, Artificial sequence
  SiRNA target sequence
ggtaactgtaacaggtggtaagt

SEQ ID NO: 133524 - DNA, 23 bp, Artificial sequence
  SiRNA target sequence
gtaactgtaacaggtggtaagtg

SEQ ID NO: 133525 - DNA, 23 bp, Artificial sequence
  SiRNA target sequence
taactgtaacaggtggtaagtgg

SEQ ID NO: 133526 - DNA, 23 bp, Artificial sequence
  SiRNA target sequence
aactgtaacaggtggtaagtgga

SEQ ID NO: 133527 - DNA, 23 bp, Artificial sequence
  SiRNA target sequence
actgtaacaggtggtaagtggac

SEQ ID NO: 133528 - DNA, 23 bp, Artificial sequence
  SiRNA target sequence
ctgtaacaggtggtaagtggaca

SEQ ID NO: 133529 - DNA, 23 bp, Artificial sequence
  SiRNA target sequence
tgtaacaggtggtaagtggacaa

SEQ ID NO: 133530 - DNA, 23 bp, Artificial sequence
  SiRNA target sequence
gtaacaggtggtaagtggacaat

SEQ ID NO: 133531 - DNA, 23 bp, Artificial sequence
  SiRNA target sequence
taacaggtggtaagtggacaatt

SEQ ID NO: 133532 - DNA, 23 bp, Artificial sequence
  SiRNA target sequence
aacaggtggtaagtggacaattt

SEQ ID NO: 133533 - DNA, 23 bp, Artificial sequence
  SiRNA target sequence
acaggtggtaagtggacaatttt

SEQ ID NO: 133534 - DNA, 23 bp, Artificial sequence
  SiRNA target sequence
caggtggtaagtggacaattttt

SEQ ID NO: 133535 - DNA, 23 bp, Artificial sequence
  SiRNA target sequence
aggtggtaagtggacaatttttc

SEQ ID NO: 133536 - DNA, 23 bp, Artificial sequence
  SiRNA target sequence
ggtggtaagtggacaatttttcg

SEQ ID NO: 133537 - DNA, 23 bp, Artificial sequence
  SiRNA target sequence
gtggtaagtggacaatttttcga

SEQ ID NO: 133538 - DNA, 23 bp, Artificial sequence
  SiRNA target sequence
tggtaagtggacaatttttcgac

SEQ ID NO: 133539 - DNA, 23 bp, Artificial sequence
  SiRNA target sequence
ggtaagtggacaatttttcgact

SEQ ID NO: 133540 - DNA, 23 bp, Artificial sequence
  SiRNA target sequence
gtaagtggacaatttttcgactt

SEQ ID NO: 133541 - DNA, 23 bp, Artificial sequence
  SiRNA target sequence
taagtggacaatttttcgactta

SEQ ID NO: 133542 - DNA, 23 bp, Artificial sequence
  SiRNA target sequence
aagtggacaatttttcgacttat

SEQ ID NO: 133543 - DNA, 23 bp, Artificial sequence
  SiRNA target sequence
agtggacaatttttcgacttatg

SEQ ID NO: 133544 - DNA, 23 bp, Artificial sequence
  SiRNA target sequence
gtggacaatttttcgacttatgg

SEQ ID NO: 133545 - DNA, 23 bp, Artificial sequence
  SiRNA target sequence
tggacaatttttcgacttatggg

SEQ ID NO: 133546 - DNA, 23 bp, Artificial sequence
  SiRNA target sequence
ggacaatttttcgacttatggga

SEQ ID NO: 133547 - DNA, 23 bp, Artificial sequence
  SiRNA target sequence
gacaatttttcgacttatgggag

SEQ ID NO: 133548 - DNA, 23 bp, Artificial sequence
  SiRNA target sequence
acaatttttcgacttatgggaga

SEQ ID NO: 133549 - DNA, 23 bp, Artificial sequence
  SiRNA target sequence
caatttttcgacttatgggagaa

SEQ ID NO: 133550 - DNA, 23 bp, Artificial sequence
  SiRNA target sequence
aatttttcgacttatgggagaac

SEQ ID NO: 133551 - DNA, 23 bp, Artificial sequence
  SiRNA target sequence
atttttcgacttatgggagaaca

SEQ ID NO: 133552 - DNA, 23 bp, Artificial sequence
  SiRNA target sequence
tttttcgacttatgggagaacag

SEQ ID NO: 133553 - DNA, 23 bp, Artificial sequence
  SiRNA target sequence
ttttcgacttatgggagaacaga

SEQ ID NO: 133554 - DNA, 23 bp, Artificial sequence
  SiRNA target sequence
tttcgacttatgggagaacagac

SEQ ID NO: 133555 - DNA, 23 bp, Artificial sequence
  SiRNA target sequence
ttcgacttatgggagaacagaca

SEQ ID NO: 133556 - DNA, 23 bp, Artificial sequence
  SiRNA target sequence
tcgacttatgggagaacagacaa

SEQ ID NO: 133557 - DNA, 23 bp, Artificial sequence
  SiRNA target sequence
cgacttatgggagaacagacaat

SEQ ID NO: 133558 - DNA, 23 bp, Artificial sequence
  SiRNA target sequence
gacttatgggagaacagacaata

SEQ ID NO: 133559 - DNA, 23 bp, Artificial sequence
  SiRNA target sequence
acttatgggagaacagacaataa

SEQ ID NO: 133560 - DNA, 23 bp, Artificial sequence
  SiRNA target sequence
cttatgggagaacagacaataaa

SEQ ID NO: 133561 - DNA, 23 bp, Artificial sequence
  SiRNA target sequence
ttatgggagaacagacaataaat

SEQ ID NO: 133562 - DNA, 23 bp, Artificial sequence
  SiRNA target sequence
tatgggagaacagacaataaatc

SEQ ID NO: 133563 - DNA, 23 bp, Artificial sequence
  SiRNA target sequence
atgggagaacagacaataaatca

SEQ ID NO: 133564 - DNA, 23 bp, Artificial sequence
  SiRNA target sequence
tgggagaacagacaataaatcaa

SEQ ID NO: 133565 - DNA, 23 bp, Artificial sequence
  SiRNA target sequence
gggagaacagacaataaatcaaa

SEQ ID NO: 133566 - DNA, 23 bp, Artificial sequence
  SiRNA target sequence
ggagaacagacaataaatcaaat

SEQ ID NO: 133567 - DNA, 23 bp, Artificial sequence
  SiRNA target sequence
gagaacagacaataaatcaaatt

SEQ ID NO: 133568 - DNA, 23 bp, Artificial sequence
  SiRNA target sequence
agaacagacaataaatcaaatta

SEQ ID NO: 133569 - DNA, 23 bp, Artificial sequence
  SiRNA target sequence
gaacagacaataaatcaaattat

SEQ ID NO: 133570 - DNA, 23 bp, Artificial sequence
  SiRNA target sequence
aacagacaataaatcaaattata

SEQ ID NO: 133571 - DNA, 23 bp, Artificial sequence
  SiRNA target sequence
acagacaataaatcaaattataa

SEQ ID NO: 133572 - DNA, 23 bp, Artificial sequence
  SiRNA target sequence
cagacaataaatcaaattataaa

SEQ ID NO: 133573 - DNA, 23 bp, Artificial sequence
  SiRNA target sequence
agacaataaatcaaattataaaa

SEQ ID NO: 133574 - DNA, 23 bp, Artificial sequence
  SiRNA target sequence
gacaataaatcaaattataaaag

SEQ ID NO: 133575 - DNA, 23 bp, Artificial sequence
  SiRNA target sequence
acaataaatcaaattataaaagt

SEQ ID NO: 133576 - DNA, 23 bp, Artificial sequence
  SiRNA target sequence
caataaatcaaattataaaagtt

SEQ ID NO: 133577 - DNA, 23 bp, Artificial sequence
  SiRNA target sequence
aataaatcaaattataaaagttt

SEQ ID NO: 133578 - DNA, 23 bp, Artificial sequence
  SiRNA target sequence
ataaatcaaattataaaagtttt

SEQ ID NO: 133579 - DNA, 23 bp, Artificial sequence
  SiRNA target sequence
taaatcaaattataaaagttttt

SEQ ID NO: 133580 - DNA, 23 bp, Artificial sequence
  SiRNA target sequence
aaatcaaattataaaagttttta

SEQ ID NO: 133581 - DNA, 23 bp, Artificial sequence
  SiRNA target sequence
aatcaaattataaaagtttttaa

SEQ ID NO: 133582 - DNA, 23 bp, Artificial sequence
  SiRNA target sequence
atcaaattataaaagtttttaat

SEQ ID NO: 133583 - DNA, 23 bp, Artificial sequence
  SiRNA target sequence
tcaaattataaaagtttttaata

SEQ ID NO: 133584 - DNA, 23 bp, Artificial sequence
  SiRNA target sequence
caaattataaaagtttttaatat

SEQ ID NO: 133585 - DNA, 23 bp, Artificial sequence
  SiRNA target sequence
aaattataaaagtttttaatata

SEQ ID NO: 133586 - DNA, 23 bp, Artificial sequence
  SiRNA target sequence
aattataaaagtttttaatataa

SEQ ID NO: 133587 - DNA, 23 bp, Artificial sequence
  SiRNA target sequence
attataaaagtttttaatataaa

SEQ ID NO: 133588 - DNA, 23 bp, Artificial sequence
  SiRNA target sequence
ttataaaagtttttaatataaag

SEQ ID NO: 133589 - DNA, 23 bp, Artificial sequence
  SiRNA target sequence
tataaaagtttttaatataaagt

SEQ ID NO: 133590 - DNA, 23 bp, Artificial sequence
  SiRNA target sequence
ataaaagtttttaatataaagtc

SEQ ID NO: 133591 - DNA, 23 bp, Artificial sequence
  SiRNA target sequence
taaaagtttttaatataaagtct

SEQ ID NO: 133592 - DNA, 23 bp, Artificial sequence
  SiRNA target sequence
aaaagtttttaatataaagtcta

SEQ ID NO: 133593 - DNA, 23 bp, Artificial sequence
  SiRNA target sequence
aaagtttttaatataaagtctaa

SEQ ID NO: 133594 - DNA, 23 bp, Artificial sequence
  SiRNA target sequence
aagtttttaatataaagtctaat

SEQ ID NO: 133595 - DNA, 23 bp, Artificial sequence
  SiRNA target sequence
agtttttaatataaagtctaata

SEQ ID NO: 133596 - DNA, 23 bp, Artificial sequence
  SiRNA target sequence
gtttttaatataaagtctaataa

SEQ ID NO: 133597 - DNA, 23 bp, Artificial sequence
  SiRNA target sequence
tttttaatataaagtctaataaa

SEQ ID NO: 133598 - DNA, 23 bp, Artificial sequence
  SiRNA target sequence
ttttaatataaagtctaataaac

SEQ ID NO: 133599 - DNA, 23 bp, Artificial sequence
  SiRNA target sequence
tttaatataaagtctaataaacc

SEQ ID NO: 133600 - DNA, 23 bp, Artificial sequence
  SiRNA target sequence
ttaatataaagtctaataaacca

SEQ ID NO: 133601 - DNA, 23 bp, Artificial sequence
  SiRNA target sequence
taatataaagtctaataaaccaa

SEQ ID NO: 133602 - DNA, 23 bp, Artificial sequence
  SiRNA target sequence
aatataaagtctaataaaccaag

SEQ ID NO: 133603 - DNA, 23 bp, Artificial sequence
  SiRNA target sequence
atataaagtctaataaaccaagt

SEQ ID NO: 133604 - DNA, 23 bp, Artificial sequence
  SiRNA target sequence
tataaagtctaataaaccaagta

SEQ ID NO: 133605 - DNA, 23 bp, Artificial sequence
  SiRNA target sequence
ataaagtctaataaaccaagtat

SEQ ID NO: 133606 - DNA, 23 bp, Artificial sequence
  SiRNA target sequence
taaagtctaataaaccaagtata

SEQ ID NO: 133607 - DNA, 23 bp, Artificial sequence
  SiRNA target sequence
aaagtctaataaaccaagtataa

SEQ ID NO: 133608 - DNA, 23 bp, Artificial sequence
  SiRNA target sequence
aagtctaataaaccaagtataac

SEQ ID NO: 133609 - DNA, 23 bp, Artificial sequence
  SiRNA target sequence
agtctaataaaccaagtataaca

SEQ ID NO: 133610 - DNA, 23 bp, Artificial sequence
  SiRNA target sequence
gtctaataaaccaagtataacac

SEQ ID NO: 133611 - DNA, 23 bp, Artificial sequence
  SiRNA target sequence
tctaataaaccaagtataacaca

SEQ ID NO: 133612 - DNA, 23 bp, Artificial sequence
  SiRNA target sequence
ctaataaaccaagtataacacaa

SEQ ID NO: 133613 - DNA, 23 bp, Artificial sequence
  SiRNA target sequence
taataaaccaagtataacacaat

SEQ ID NO: 133614 - DNA, 23 bp, Artificial sequence
  SiRNA target sequence
aataaaccaagtataacacaata

SEQ ID NO: 133615 - DNA, 23 bp, Artificial sequence
  SiRNA target sequence
ataaaccaagtataacacaatat

SEQ ID NO: 133616 - DNA, 23 bp, Artificial sequence
  SiRNA target sequence
taaaccaagtataacacaatatc

SEQ ID NO: 133617 - DNA, 23 bp, Artificial sequence
  SiRNA target sequence
aaaccaagtataacacaatatct

SEQ ID NO: 133618 - DNA, 23 bp, Artificial sequence
  SiRNA target sequence
aaccaagtataacacaatatctt

SEQ ID NO: 133619 - DNA, 23 bp, Artificial sequence
  SiRNA target sequence
accaagtataacacaatatcttc

SEQ ID NO: 133620 - DNA, 23 bp, Artificial sequence
  SiRNA target sequence
ccaagtataacacaatatcttcc

SEQ ID NO: 133621 - DNA, 23 bp, Artificial sequence
  SiRNA target sequence
caagtataacacaatatcttcct

SEQ ID NO: 133622 - DNA, 23 bp, Artificial sequence
  SiRNA target sequence
aagtataacacaatatcttcctg

SEQ ID NO: 133623 - DNA, 23 bp, Artificial sequence
  SiRNA target sequence
agtataacacaatatcttcctgt

SEQ ID NO: 133624 - DNA, 23 bp, Artificial sequence
  SiRNA target sequence
gtataacacaatatcttcctgtt

SEQ ID NO: 133625 - DNA, 23 bp, Artificial sequence
  SiRNA target sequence
tataacacaatatcttcctgttt

SEQ ID NO: 133626 - DNA, 23 bp, Artificial sequence
  SiRNA target sequence
ataacacaatatcttcctgtttt

SEQ ID NO: 133627 - DNA, 23 bp, Artificial sequence
  SiRNA target sequence
taacacaatatcttcctgttttg

SEQ ID NO: 133628 - DNA, 23 bp, Artificial sequence
  SiRNA target sequence
aacacaatatcttcctgttttgg

SEQ ID NO: 133629 - DNA, 23 bp, Artificial sequence
  SiRNA target sequence
acacaatatcttcctgttttggg

SEQ ID NO: 133630 - DNA, 23 bp, Artificial sequence
  SiRNA target sequence
cacaatatcttcctgttttggga

SEQ ID NO: 133631 - DNA, 23 bp, Artificial sequence
  SiRNA target sequence
acaatatcttcctgttttgggat

SEQ ID NO: 133632 - DNA, 23 bp, Artificial sequence
  SiRNA target sequence
caatatcttcctgttttgggatc

SEQ ID NO: 133633 - DNA, 23 bp, Artificial sequence
  SiRNA target sequence
aatatcttcctgttttgggatca

SEQ ID NO: 133634 - DNA, 23 bp, Artificial sequence
  SiRNA target sequence
atatcttcctgttttgggatcac

SEQ ID NO: 133635 - DNA, 23 bp, Artificial sequence
  SiRNA target sequence
tatcttcctgttttgggatcaca

SEQ ID NO: 133636 - DNA, 23 bp, Artificial sequence
  SiRNA target sequence
atcttcctgttttgggatcacag

SEQ ID NO: 133637 - DNA, 23 bp, Artificial sequence
  SiRNA target sequence
tcttcctgttttgggatcacagg

SEQ ID NO: 133638 - DNA, 23 bp, Artificial sequence
  SiRNA target sequence
cttcctgttttgggatcacaggg

SEQ ID NO: 133639 - DNA, 23 bp, Artificial sequence
  SiRNA target sequence
ttcctgttttgggatcacaggga

SEQ ID NO: 133640 - DNA, 23 bp, Artificial sequence
  SiRNA target sequence
tcctgttttgggatcacagggat

SEQ ID NO: 133641 - DNA, 23 bp, Artificial sequence
  SiRNA target sequence
cctgttttgggatcacagggata

SEQ ID NO: 133642 - DNA, 23 bp, Artificial sequence
  SiRNA target sequence
ctgttttgggatcacagggatat

SEQ ID NO: 133643 - DNA, 23 bp, Artificial sequence
  SiRNA target sequence
tgttttgggatcacagggatata

SEQ ID NO: 133644 - DNA, 23 bp, Artificial sequence
  SiRNA target sequence
gttttgggatcacagggatatac

SEQ ID NO: 133645 - DNA, 23 bp, Artificial sequence
  SiRNA target sequence
ttttgggatcacagggatatact

SEQ ID NO: 133646 - DNA, 23 bp, Artificial sequence
  SiRNA target sequence
tttgggatcacagggatatacta

SEQ ID NO: 133647 - DNA, 23 bp, Artificial sequence
  SiRNA target sequence
ttgggatcacagggatatactaa

SEQ ID NO: 133648 - DNA, 23 bp, Artificial sequence
  SiRNA target sequence
tgggatcacagggatatactaaa

SEQ ID NO: 133649 - DNA, 23 bp, Artificial sequence
  SiRNA target sequence
gggatcacagggatatactaaag

SEQ ID NO: 133650 - DNA, 23 bp, Artificial sequence
  SiRNA target sequence
ggatcacagggatatactaaagc

SEQ ID NO: 133651 - DNA, 23 bp, Artificial sequence
  SiRNA target sequence
gatcacagggatatactaaagct

SEQ ID NO: 133652 - DNA, 23 bp, Artificial sequence
  SiRNA target sequence
atcacagggatatactaaagcta

SEQ ID NO: 133653 - DNA, 23 bp, Artificial sequence
  SiRNA target sequence
tcacagggatatactaaagctac

SEQ ID NO: 133654 - DNA, 23 bp, Artificial sequence
  SiRNA target sequence
cacagggatatactaaagctaca

SEQ ID NO: 133655 - DNA, 23 bp, Artificial sequence
  SiRNA target sequence
acagggatatactaaagctacag

SEQ ID NO: 133656 - DNA, 23 bp, Artificial sequence
  SiRNA target sequence
cagggatatactaaagctacaga

SEQ ID NO: 133657 - DNA, 23 bp, Artificial sequence
  SiRNA target sequence
agggatatactaaagctacagaa

SEQ ID NO: 133658 - DNA, 23 bp, Artificial sequence
  SiRNA target sequence
gggatatactaaagctacagaat

SEQ ID NO: 133659 - DNA, 23 bp, Artificial sequence
  SiRNA target sequence
ggatatactaaagctacagaatt

SEQ ID NO: 133660 - DNA, 23 bp, Artificial sequence
  SiRNA target sequence
gatatactaaagctacagaattt

SEQ ID NO: 133661 - DNA, 23 bp, Artificial sequence
  SiRNA target sequence
atatactaaagctacagaatttg

SEQ ID NO: 133662 - DNA, 23 bp, Artificial sequence
  SiRNA target sequence
tatactaaagctacagaatttga

SEQ ID NO: 133663 - DNA, 23 bp, Artificial sequence
  SiRNA target sequence
atactaaagctacagaatttgat

SEQ ID NO: 133664 - DNA, 23 bp, Artificial sequence
  SiRNA target sequence
tactaaagctacagaatttgatt

SEQ ID NO: 133665 - DNA, 23 bp, Artificial sequence
  SiRNA target sequence
actaaagctacagaatttgattt

SEQ ID NO: 133666 - DNA, 23 bp, Artificial sequence
  SiRNA target sequence
ctaaagctacagaatttgatttg

SEQ ID NO: 133667 - DNA, 23 bp, Artificial sequence
  SiRNA target sequence
taaagctacagaatttgatttgg

SEQ ID NO: 133668 - DNA, 23 bp, Artificial sequence
  SiRNA target sequence
aaagctacagaatttgatttggc

SEQ ID NO: 133669 - DNA, 23 bp, Artificial sequence
  SiRNA target sequence
aagctacagaatttgatttggca

SEQ ID NO: 133670 - DNA, 23 bp, Artificial sequence
  SiRNA target sequence
agctacagaatttgatttggcac

SEQ ID NO: 133671 - DNA, 23 bp, Artificial sequence
  SiRNA target sequence
gctacagaatttgatttggcact

SEQ ID NO: 133672 - DNA, 23 bp, Artificial sequence
  SiRNA target sequence
ctacagaatttgatttggcactt

SEQ ID NO: 133673 - DNA, 23 bp, Artificial sequence
  SiRNA target sequence
tacagaatttgatttggcactta

SEQ ID NO: 133674 - DNA, 23 bp, Artificial sequence
  SiRNA target sequence
acagaatttgatttggcacttac

SEQ ID NO: 133675 - DNA, 23 bp, Artificial sequence
  SiRNA target sequence
cagaatttgatttggcacttact

SEQ ID NO: 133676 - DNA, 23 bp, Artificial sequence
  SiRNA target sequence
agaatttgatttggcacttactt

SEQ ID NO: 133677 - DNA, 23 bp, Artificial sequence
  SiRNA target sequence
gaatttgatttggcacttacttt

SEQ ID NO: 133678 - DNA, 23 bp, Artificial sequence
  SiRNA target sequence
aatttgatttggcacttacttta

SEQ ID NO: 133679 - DNA, 23 bp, Artificial sequence
  SiRNA target sequence
atttgatttggcacttactttaa

SEQ ID NO: 133680 - DNA, 23 bp, Artificial sequence
  SiRNA target sequence
tttgatttggcacttactttaaa

SEQ ID NO: 133681 - DNA, 23 bp, Artificial sequence
  SiRNA target sequence
ttgatttggcacttactttaaat

SEQ ID NO: 133682 - DNA, 23 bp, Artificial sequence
  SiRNA target sequence
tgatttggcacttactttaaata

SEQ ID NO: 133683 - DNA, 23 bp, Artificial sequence
  SiRNA target sequence
gatttggcacttactttaaatat

SEQ ID NO: 133684 - DNA, 23 bp, Artificial sequence
  SiRNA target sequence
atttggcacttactttaaatatt

SEQ ID NO: 133685 - DNA, 23 bp, Artificial sequence
  SiRNA target sequence
tttggcacttactttaaatattc

SEQ ID NO: 133686 - DNA, 23 bp, Artificial sequence
  SiRNA target sequence
ttggcacttactttaaatattcc

SEQ ID NO: 133687 - DNA, 23 bp, Artificial sequence
  SiRNA target sequence
tggcacttactttaaatattcca

SEQ ID NO: 133688 - DNA, 23 bp, Artificial sequence
  SiRNA target sequence
ggcacttactttaaatattccag

SEQ ID NO: 133689 - DNA, 23 bp, Artificial sequence
  SiRNA target sequence
gcacttactttaaatattccaga

SEQ ID NO: 133690 - DNA, 23 bp, Artificial sequence
  SiRNA target sequence
cacttactttaaatattccagaa

SEQ ID NO: 133691 - DNA, 23 bp, Artificial sequence
  SiRNA target sequence
acttactttaaatattccagaag

SEQ ID NO: 133692 - DNA, 23 bp, Artificial sequence
  SiRNA target sequence
cttactttaaatattccagaaga

SEQ ID NO: 133693 - DNA, 23 bp, Artificial sequence
  SiRNA target sequence
ttactttaaatattccagaagat

SEQ ID NO: 133694 - DNA, 23 bp, Artificial sequence
  SiRNA target sequence
tactttaaatattccagaagata

SEQ ID NO: 133695 - DNA, 23 bp, Artificial sequence
  SiRNA target sequence
actttaaatattccagaagatat

SEQ ID NO: 133696 - DNA, 23 bp, Artificial sequence
  SiRNA target sequence
ctttaaatattccagaagatata

SEQ ID NO: 133697 - DNA, 23 bp, Artificial sequence
  SiRNA target sequence
tttaaatattccagaagatatag

SEQ ID NO: 133698 - DNA, 23 bp, Artificial sequence
  SiRNA target sequence
ttaaatattccagaagatatagc

SEQ ID NO: 133699 - DNA, 23 bp, Artificial sequence
  SiRNA target sequence
taaatattccagaagatatagct

SEQ ID NO: 133700 - DNA, 23 bp, Artificial sequence
  SiRNA target sequence
aaatattccagaagatatagcta

SEQ ID NO: 133701 - DNA, 23 bp, Artificial sequence
  SiRNA target sequence
aatattccagaagatatagctaa

SEQ ID NO: 133702 - DNA, 23 bp, Artificial sequence
  SiRNA target sequence
atattccagaagatatagctaag

SEQ ID NO: 133703 - DNA, 23 bp, Artificial sequence
  SiRNA target sequence
tattccagaagatatagctaagc

SEQ ID NO: 133704 - DNA, 23 bp, Artificial sequence
  SiRNA target sequence
attccagaagatatagctaagca

SEQ ID NO: 133705 - DNA, 23 bp, Artificial sequence
  SiRNA target sequence
ttccagaagatatagctaagcat

SEQ ID NO: 133706 - DNA, 23 bp, Artificial sequence
  SiRNA target sequence
tccagaagatatagctaagcatt

SEQ ID NO: 133707 - DNA, 23 bp, Artificial sequence
  SiRNA target sequence
ccagaagatatagctaagcattt

SEQ ID NO: 133708 - DNA, 23 bp, Artificial sequence
  SiRNA target sequence
cagaagatatagctaagcattta

SEQ ID NO: 133709 - DNA, 23 bp, Artificial sequence
  SiRNA target sequence
agaagatatagctaagcatttag

SEQ ID NO: 133710 - DNA, 23 bp, Artificial sequence
  SiRNA target sequence
gaagatatagctaagcatttagc

SEQ ID NO: 133711 - DNA, 23 bp, Artificial sequence
  SiRNA target sequence
aagatatagctaagcatttagct

SEQ ID NO: 133712 - DNA, 23 bp, Artificial sequence
  SiRNA target sequence
agatatagctaagcatttagcta

SEQ ID NO: 133713 - DNA, 23 bp, Artificial sequence
  SiRNA target sequence
gatatagctaagcatttagctac

SEQ ID NO: 133714 - DNA, 23 bp, Artificial sequence
  SiRNA target sequence
atatagctaagcatttagctaca

SEQ ID NO: 133715 - DNA, 23 bp, Artificial sequence
  SiRNA target sequence
tatagctaagcatttagctacaa

SEQ ID NO: 133716 - DNA, 23 bp, Artificial sequence
  SiRNA target sequence
atagctaagcatttagctacaac

SEQ ID NO: 133717 - DNA, 23 bp, Artificial sequence
  SiRNA target sequence
tagctaagcatttagctacaact

SEQ ID NO: 133718 - DNA, 23 bp, Artificial sequence
  SiRNA target sequence
agctaagcatttagctacaactt

SEQ ID NO: 133719 - DNA, 23 bp, Artificial sequence
  SiRNA target sequence
gctaagcatttagctacaactta

SEQ ID NO: 133720 - DNA, 23 bp, Artificial sequence
  SiRNA target sequence
ctaagcatttagctacaacttat

SEQ ID NO: 133721 - DNA, 23 bp, Artificial sequence
  SiRNA target sequence
taagcatttagctacaacttatg

SEQ ID NO: 133722 - DNA, 23 bp, Artificial sequence
  SiRNA target sequence
aagcatttagctacaacttatgg

SEQ ID NO: 133723 - DNA, 23 bp, Artificial sequence
  SiRNA target sequence
agcatttagctacaacttatggt

SEQ ID NO: 133724 - DNA, 23 bp, Artificial sequence
  SiRNA target sequence
gcatttagctacaacttatggta

SEQ ID NO: 133725 - DNA, 23 bp, Artificial sequence
  SiRNA target sequence
catttagctacaacttatggtac

SEQ ID NO: 133726 - DNA, 23 bp, Artificial sequence
  SiRNA target sequence
atttagctacaacttatggtacc

SEQ ID NO: 133727 - DNA, 23 bp, Artificial sequence
  SiRNA target sequence
tttagctacaacttatggtacca

SEQ ID NO: 133728 - DNA, 23 bp, Artificial sequence
  SiRNA target sequence
ttagctacaacttatggtaccaa

SEQ ID NO: 133729 - DNA, 23 bp, Artificial sequence
  SiRNA target sequence
tagctacaacttatggtaccaaa

SEQ ID NO: 133730 - DNA, 23 bp, Artificial sequence
  SiRNA target sequence
agctacaacttatggtaccaaag

SEQ ID NO: 133731 - DNA, 23 bp, Artificial sequence
  SiRNA target sequence
gctacaacttatggtaccaaagc

SEQ ID NO: 133732 - DNA, 23 bp, Artificial sequence
  SiRNA target sequence
ctacaacttatggtaccaaagct

SEQ ID NO: 133733 - DNA, 23 bp, Artificial sequence
  SiRNA target sequence
tacaacttatggtaccaaagctt

SEQ ID NO: 133734 - DNA, 23 bp, Artificial sequence
  SiRNA target sequence
acaacttatggtaccaaagctta

SEQ ID NO: 133735 - DNA, 23 bp, Artificial sequence
  SiRNA target sequence
caacttatggtaccaaagcttac

SEQ ID NO: 133736 - DNA, 23 bp, Artificial sequence
  SiRNA target sequence
aacttatggtaccaaagcttaca

SEQ ID NO: 133737 - DNA, 23 bp, Artificial sequence
  SiRNA target sequence
acttatggtaccaaagcttacaa

SEQ ID NO: 133738 - DNA, 23 bp, Artificial sequence
  SiRNA target sequence
cttatggtaccaaagcttacaat

SEQ ID NO: 133739 - DNA, 23 bp, Artificial sequence
  SiRNA target sequence
ttatggtaccaaagcttacaatt

SEQ ID NO: 133740 - DNA, 23 bp, Artificial sequence
  SiRNA target sequence
tatggtaccaaagcttacaattt

SEQ ID NO: 133741 - DNA, 23 bp, Artificial sequence
  SiRNA target sequence
atggtaccaaagcttacaatttc

SEQ ID NO: 133742 - DNA, 23 bp, Artificial sequence
  SiRNA target sequence
tggtaccaaagcttacaatttct

SEQ ID NO: 133743 - DNA, 23 bp, Artificial sequence
  SiRNA target sequence
ggtaccaaagcttacaatttctc

SEQ ID NO: 133744 - DNA, 23 bp, Artificial sequence
  SiRNA target sequence
gtaccaaagcttacaatttctct

SEQ ID NO: 133745 - DNA, 23 bp, Artificial sequence
  SiRNA target sequence
taccaaagcttacaatttctctg

SEQ ID NO: 133746 - DNA, 23 bp, Artificial sequence
  SiRNA target sequence
accaaagcttacaatttctctga

SEQ ID NO: 133747 - DNA, 23 bp, Artificial sequence
  SiRNA target sequence
ccaaagcttacaatttctctgaa

SEQ ID NO: 133748 - DNA, 23 bp, Artificial sequence
  SiRNA target sequence
caaagcttacaatttctctgaat

SEQ ID NO: 133749 - DNA, 23 bp, Artificial sequence
  SiRNA target sequence
aaagcttacaatttctctgaata

SEQ ID NO: 133750 - DNA, 23 bp, Artificial sequence
  SiRNA target sequence
aagcttacaatttctctgaatac

SEQ ID NO: 133751 - DNA, 23 bp, Artificial sequence
  SiRNA target sequence
agcttacaatttctctgaatact

SEQ ID NO: 133752 - DNA, 23 bp, Artificial sequence
  SiRNA target sequence
gcttacaatttctctgaatactt

SEQ ID NO: 133753 - DNA, 23 bp, Artificial sequence
  SiRNA target sequence
cttacaatttctctgaatacttt

SEQ ID NO: 133754 - DNA, 23 bp, Artificial sequence
  SiRNA target sequence
ttacaatttctctgaatacttta

SEQ ID NO: 133755 - DNA, 23 bp, Artificial sequence
  SiRNA target sequence
tacaatttctctgaatactttaa

SEQ ID NO: 133756 - DNA, 23 bp, Artificial sequence
  SiRNA target sequence
acaatttctctgaatactttaat

SEQ ID NO: 133757 - DNA, 23 bp, Artificial sequence
  SiRNA target sequence
caatttctctgaatactttaatg

SEQ ID NO: 133758 - DNA, 23 bp, Artificial sequence
  SiRNA target sequence
aatttctctgaatactttaatgg

SEQ ID NO: 133759 - DNA, 23 bp, Artificial sequence
  SiRNA target sequence
atttctctgaatactttaatggg

SEQ ID NO: 133760 - DNA, 23 bp, Artificial sequence
  SiRNA target sequence
tttctctgaatactttaatgggt

SEQ ID NO: 133761 - DNA, 23 bp, Artificial sequence
  SiRNA target sequence
ttctctgaatactttaatgggtc

SEQ ID NO: 133762 - DNA, 23 bp, Artificial sequence
  SiRNA target sequence
tctctgaatactttaatgggtca

SEQ ID NO: 133763 - DNA, 23 bp, Artificial sequence
  SiRNA target sequence
ctctgaatactttaatgggtcat

SEQ ID NO: 133764 - DNA, 23 bp, Artificial sequence
  SiRNA target sequence
tctgaatactttaatgggtcata

SEQ ID NO: 133765 - DNA, 23 bp, Artificial sequence
  SiRNA target sequence
ctgaatactttaatgggtcatac

SEQ ID NO: 133766 - DNA, 23 bp, Artificial sequence
  SiRNA target sequence
tgaatactttaatgggtcataca

SEQ ID NO: 133767 - DNA, 23 bp, Artificial sequence
  SiRNA target sequence
gaatactttaatgggtcatacac

SEQ ID NO: 133768 - DNA, 23 bp, Artificial sequence
  SiRNA target sequence
aatactttaatgggtcatacacc

SEQ ID NO: 133769 - DNA, 23 bp, Artificial sequence
  SiRNA target sequence
atactttaatgggtcatacacca

SEQ ID NO: 133770 - DNA, 23 bp, Artificial sequence
  SiRNA target sequence
tactttaatgggtcatacaccag

SEQ ID NO: 133771 - DNA, 23 bp, Artificial sequence
  SiRNA target sequence
actttaatgggtcatacaccaga

SEQ ID NO: 133772 - DNA, 23 bp, Artificial sequence
  SiRNA target sequence
ctttaatgggtcatacaccagac

SEQ ID NO: 133773 - DNA, 23 bp, Artificial sequence
  SiRNA target sequence
tttaatgggtcatacaccagact

SEQ ID NO: 133774 - DNA, 23 bp, Artificial sequence
  SiRNA target sequence
ttaatgggtcatacaccagactt

SEQ ID NO: 133775 - DNA, 23 bp, Artificial sequence
  SiRNA target sequence
taatgggtcatacaccagactta

SEQ ID NO: 133776 - DNA, 23 bp, Artificial sequence
  SiRNA target sequence
aatgggtcatacaccagacttac

SEQ ID NO: 133777 - DNA, 23 bp, Artificial sequence
  SiRNA target sequence
atgggtcatacaccagacttaca

SEQ ID NO: 133778 - DNA, 23 bp, Artificial sequence
  SiRNA target sequence
tgggtcatacaccagacttacag

SEQ ID NO: 133779 - DNA, 23 bp, Artificial sequence
  SiRNA target sequence
gggtcatacaccagacttacaga

SEQ ID NO: 133780 - DNA, 23 bp, Artificial sequence
  SiRNA target sequence
ggtcatacaccagacttacagat

SEQ ID NO: 133781 - DNA, 23 bp, Artificial sequence
  SiRNA target sequence
gtcatacaccagacttacagatg

SEQ ID NO: 133782 - DNA, 23 bp, Artificial sequence
  SiRNA target sequence
tcatacaccagacttacagatgg

SEQ ID NO: 133783 - DNA, 23 bp, Artificial sequence
  SiRNA target sequence
catacaccagacttacagatggt

SEQ ID NO: 133784 - DNA, 23 bp, Artificial sequence
  SiRNA target sequence
atacaccagacttacagatggtt

SEQ ID NO: 133785 - DNA, 23 bp, Artificial sequence
  SiRNA target sequence
tacaccagacttacagatggtta

SEQ ID NO: 133786 - DNA, 23 bp, Artificial sequence
  SiRNA target sequence
acaccagacttacagatggttat

SEQ ID NO: 133787 - DNA, 23 bp, Artificial sequence
  SiRNA target sequence
caccagacttacagatggttatc

SEQ ID NO: 133788 - DNA, 23 bp, Artificial sequence
  SiRNA target sequence
accagacttacagatggttatcc

SEQ ID NO: 133789 - DNA, 23 bp, Artificial sequence
  SiRNA target sequence
ccagacttacagatggttatcct

SEQ ID NO: 133790 - DNA, 23 bp, Artificial sequence
  SiRNA target sequence
cagacttacagatggttatcctt

SEQ ID NO: 133791 - DNA, 23 bp, Artificial sequence
  SiRNA target sequence
agacttacagatggttatcctta

SEQ ID NO: 133792 - DNA, 23 bp, Artificial sequence
  SiRNA target sequence
gacttacagatggttatccttat

SEQ ID NO: 133793 - DNA, 23 bp, Artificial sequence
  SiRNA target sequence
acttacagatggttatccttata

SEQ ID NO: 133794 - DNA, 23 bp, Artificial sequence
  SiRNA target sequence
cttacagatggttatccttatac

SEQ ID NO: 133795 - DNA, 23 bp, Artificial sequence
  SiRNA target sequence
ttacagatggttatccttataca

SEQ ID NO: 133796 - DNA, 23 bp, Artificial sequence
  SiRNA target sequence
tacagatggttatccttatacaa

SEQ ID NO: 133797 - DNA, 23 bp, Artificial sequence
  SiRNA target sequence
acagatggttatccttatacaaa

SEQ ID NO: 133798 - DNA, 23 bp, Artificial sequence
  SiRNA target sequence
cagatggttatccttatacaaaa

SEQ ID NO: 133799 - DNA, 23 bp, Artificial sequence
  SiRNA target sequence
agatggttatccttatacaaaag

SEQ ID NO: 133800 - DNA, 23 bp, Artificial sequence
  SiRNA target sequence
gatggttatccttatacaaaaga

SEQ ID NO: 133801 - DNA, 23 bp, Artificial sequence
  SiRNA target sequence
atggttatccttatacaaaagaa

SEQ ID NO: 133802 - DNA, 23 bp, Artificial sequence
  SiRNA target sequence
tggttatccttatacaaaagaag

SEQ ID NO: 133803 - DNA, 23 bp, Artificial sequence
  SiRNA target sequence
ggttatccttatacaaaagaaga

SEQ ID NO: 133804 - DNA, 23 bp, Artificial sequence
  SiRNA target sequence
gttatccttatacaaaagaagaa

SEQ ID NO: 133805 - DNA, 23 bp, Artificial sequence
  SiRNA target sequence
ttatccttatacaaaagaagaaa

SEQ ID NO: 133806 - DNA, 23 bp, Artificial sequence
  SiRNA target sequence
tatccttatacaaaagaagaaat

SEQ ID NO: 133807 - DNA, 23 bp, Artificial sequence
  SiRNA target sequence
atccttatacaaaagaagaaata

SEQ ID NO: 133808 - DNA, 23 bp, Artificial sequence
  SiRNA target sequence
tccttatacaaaagaagaaatag

SEQ ID NO: 133809 - DNA, 23 bp, Artificial sequence
  SiRNA target sequence
ccttatacaaaagaagaaatagt

SEQ ID NO: 133810 - DNA, 23 bp, Artificial sequence
  SiRNA target sequence
cttatacaaaagaagaaatagta

SEQ ID NO: 133811 - DNA, 23 bp, Artificial sequence
  SiRNA target sequence
ttatacaaaagaagaaatagtat

SEQ ID NO: 133812 - DNA, 23 bp, Artificial sequence
  SiRNA target sequence
tatacaaaagaagaaatagtata

SEQ ID NO: 133813 - DNA, 23 bp, Artificial sequence
  SiRNA target sequence
atacaaaagaagaaatagtatat

SEQ ID NO: 133814 - DNA, 23 bp, Artificial sequence
  SiRNA target sequence
tacaaaagaagaaatagtatatt

SEQ ID NO: 133815 - DNA, 23 bp, Artificial sequence
  SiRNA target sequence
acaaaagaagaaatagtatattg

SEQ ID NO: 133816 - DNA, 23 bp, Artificial sequence
  SiRNA target sequence
caaaagaagaaatagtatattgt

SEQ ID NO: 133817 - DNA, 23 bp, Artificial sequence
  SiRNA target sequence
aaaagaagaaatagtatattgta

SEQ ID NO: 133818 - DNA, 23 bp, Artificial sequence
  SiRNA target sequence
aaagaagaaatagtatattgtat

SEQ ID NO: 133819 - DNA, 23 bp, Artificial sequence
  SiRNA target sequence
aagaagaaatagtatattgtatc

SEQ ID NO: 133820 - DNA, 23 bp, Artificial sequence
  SiRNA target sequence
agaagaaatagtatattgtatcg

SEQ ID NO: 133821 - DNA, 23 bp, Artificial sequence
  SiRNA target sequence
gaagaaatagtatattgtatcga

SEQ ID NO: 133822 - DNA, 23 bp, Artificial sequence
  SiRNA target sequence
aagaaatagtatattgtatcgaa

SEQ ID NO: 133823 - DNA, 23 bp, Artificial sequence
  SiRNA target sequence
agaaatagtatattgtatcgaac

SEQ ID NO: 133824 - DNA, 23 bp, Artificial sequence
  SiRNA target sequence
gaaatagtatattgtatcgaaca

SEQ ID NO: 133825 - DNA, 23 bp, Artificial sequence
  SiRNA target sequence
aaatagtatattgtatcgaacat

SEQ ID NO: 133826 - DNA, 23 bp, Artificial sequence
  SiRNA target sequence
aatagtatattgtatcgaacatg

SEQ ID NO: 133827 - DNA, 23 bp, Artificial sequence
  SiRNA target sequence
atagtatattgtatcgaacatga

SEQ ID NO: 133828 - DNA, 23 bp, Artificial sequence
  SiRNA target sequence
tagtatattgtatcgaacatgaa

SEQ ID NO: 133829 - DNA, 23 bp, Artificial sequence
  SiRNA target sequence
agtatattgtatcgaacatgaat

SEQ ID NO: 133830 - DNA, 23 bp, Artificial sequence
  SiRNA target sequence
gtatattgtatcgaacatgaatt

SEQ ID NO: 133831 - DNA, 23 bp, Artificial sequence
  SiRNA target sequence
tatattgtatcgaacatgaattg

SEQ ID NO: 133832 - DNA, 23 bp, Artificial sequence
  SiRNA target sequence
atattgtatcgaacatgaattgg

SEQ ID NO: 133833 - DNA, 23 bp, Artificial sequence
  SiRNA target sequence
tattgtatcgaacatgaattggc

SEQ ID NO: 133834 - DNA, 23 bp, Artificial sequence
  SiRNA target sequence
attgtatcgaacatgaattggct

SEQ ID NO: 133835 - DNA, 23 bp, Artificial sequence
  SiRNA target sequence
ttgtatcgaacatgaattggctt

SEQ ID NO: 133836 - DNA, 23 bp, Artificial sequence
  SiRNA target sequence
tgtatcgaacatgaattggctta

SEQ ID NO: 133837 - DNA, 23 bp, Artificial sequence
  SiRNA target sequence
gtatcgaacatgaattggcttat

SEQ ID NO: 133838 - DNA, 23 bp, Artificial sequence
  SiRNA target sequence
tatcgaacatgaattggcttatc

SEQ ID NO: 133839 - DNA, 23 bp, Artificial sequence
  SiRNA target sequence
atcgaacatgaattggcttatcg

SEQ ID NO: 133840 - DNA, 23 bp, Artificial sequence
  SiRNA target sequence
tcgaacatgaattggcttatcgc

SEQ ID NO: 133841 - DNA, 23 bp, Artificial sequence
  SiRNA target sequence
cgaacatgaattggcttatcgca

SEQ ID NO: 133842 - DNA, 23 bp, Artificial sequence
  SiRNA target sequence
gaacatgaattggcttatcgcat

SEQ ID NO: 133843 - DNA, 23 bp, Artificial sequence
  SiRNA target sequence
aacatgaattggcttatcgcatc

SEQ ID NO: 133844 - DNA, 23 bp, Artificial sequence
  SiRNA target sequence
acatgaattggcttatcgcatca

SEQ ID NO: 133845 - DNA, 23 bp, Artificial sequence
  SiRNA target sequence
catgaattggcttatcgcatcag

SEQ ID NO: 133846 - DNA, 23 bp, Artificial sequence
  SiRNA target sequence
atgaattggcttatcgcatcagt

SEQ ID NO: 133847 - DNA, 23 bp, Artificial sequence
  SiRNA target sequence
tgaattggcttatcgcatcagtg

SEQ ID NO: 133848 - DNA, 23 bp, Artificial sequence
  SiRNA target sequence
gaattggcttatcgcatcagtga

SEQ ID NO: 133849 - DNA, 23 bp, Artificial sequence
  SiRNA target sequence
aattggcttatcgcatcagtgat

SEQ ID NO: 133850 - DNA, 23 bp, Artificial sequence
  SiRNA target sequence
attggcttatcgcatcagtgata

SEQ ID NO: 133851 - DNA, 23 bp, Artificial sequence
  SiRNA target sequence
ttggcttatcgcatcagtgatat

SEQ ID NO: 133852 - DNA, 23 bp, Artificial sequence
  SiRNA target sequence
tggcttatcgcatcagtgatata

SEQ ID NO: 133853 - DNA, 23 bp, Artificial sequence
  SiRNA target sequence
ggcttatcgcatcagtgatatat

SEQ ID NO: 133854 - DNA, 23 bp, Artificial sequence
  SiRNA target sequence
gcttatcgcatcagtgatatatt

SEQ ID NO: 133855 - DNA, 23 bp, Artificial sequence
  SiRNA target sequence
cttatcgcatcagtgatatatta

SEQ ID NO: 133856 - DNA, 23 bp, Artificial sequence
  SiRNA target sequence
ttatcgcatcagtgatatattat

SEQ ID NO: 133857 - DNA, 23 bp, Artificial sequence
  SiRNA target sequence
tatcgcatcagtgatatattatt

SEQ ID NO: 133858 - DNA, 23 bp, Artificial sequence
  SiRNA target sequence
atcgcatcagtgatatattattt

SEQ ID NO: 133859 - DNA, 23 bp, Artificial sequence
  SiRNA target sequence
tcgcatcagtgatatattattta

SEQ ID NO: 133860 - DNA, 23 bp, Artificial sequence
  SiRNA target sequence
cgcatcagtgatatattatttaa

SEQ ID NO: 133861 - DNA, 23 bp, Artificial sequence
  SiRNA target sequence
gcatcagtgatatattatttaat

SEQ ID NO: 133862 - DNA, 23 bp, Artificial sequence
  SiRNA target sequence
catcagtgatatattatttaata

SEQ ID NO: 133863 - DNA, 23 bp, Artificial sequence
  SiRNA target sequence
atcagtgatatattatttaatag

SEQ ID NO: 133864 - DNA, 23 bp, Artificial sequence
  SiRNA target sequence
tcagtgatatattatttaatagg

SEQ ID NO: 133865 - DNA, 23 bp, Artificial sequence
  SiRNA target sequence
cagtgatatattatttaatagga

SEQ ID NO: 133866 - DNA, 23 bp, Artificial sequence
  SiRNA target sequence
agtgatatattatttaataggat

SEQ ID NO: 133867 - DNA, 23 bp, Artificial sequence
  SiRNA target sequence
gtgatatattatttaataggatg

SEQ ID NO: 133868 - DNA, 23 bp, Artificial sequence
  SiRNA target sequence
tgatatattatttaataggatga

SEQ ID NO: 133869 - DNA, 23 bp, Artificial sequence
  SiRNA target sequence
gatatattatttaataggatgat

SEQ ID NO: 133870 - DNA, 23 bp, Artificial sequence
  SiRNA target sequence
atatattatttaataggatgatg

SEQ ID NO: 133871 - DNA, 23 bp, Artificial sequence
  SiRNA target sequence
tatattatttaataggatgatga

SEQ ID NO: 133872 - DNA, 23 bp, Artificial sequence
  SiRNA target sequence
atattatttaataggatgatgat

SEQ ID NO: 133873 - DNA, 23 bp, Artificial sequence
  SiRNA target sequence
tattatttaataggatgatgata

SEQ ID NO: 133874 - DNA, 23 bp, Artificial sequence
  SiRNA target sequence
attatttaataggatgatgatag

SEQ ID NO: 133875 - DNA, 23 bp, Artificial sequence
  SiRNA target sequence
ttatttaataggatgatgatagg

SEQ ID NO: 133876 - DNA, 23 bp, Artificial sequence
  SiRNA target sequence
tatttaataggatgatgatagga

SEQ ID NO: 133877 - DNA, 23 bp, Artificial sequence
  SiRNA target sequence
atttaataggatgatgataggat

SEQ ID NO: 133878 - DNA, 23 bp, Artificial sequence
  SiRNA target sequence
tttaataggatgatgataggata

SEQ ID NO: 133879 - DNA, 23 bp, Artificial sequence
  SiRNA target sequence
ttaataggatgatgataggatac

SEQ ID NO: 133880 - DNA, 23 bp, Artificial sequence
  SiRNA target sequence
taataggatgatgataggataca

SEQ ID NO: 133881 - DNA, 23 bp, Artificial sequence
  SiRNA target sequence
aataggatgatgataggatacat

SEQ ID NO: 133882 - DNA, 23 bp, Artificial sequence
  SiRNA target sequence
ataggatgatgataggatacatt

SEQ ID NO: 133883 - DNA, 23 bp, Artificial sequence
  SiRNA target sequence
taggatgatgataggatacattg

SEQ ID NO: 133884 - DNA, 23 bp, Artificial sequence
  SiRNA target sequence
aggatgatgataggatacattga

SEQ ID NO: 133885 - DNA, 23 bp, Artificial sequence
  SiRNA target sequence
ggatgatgataggatacattgac

SEQ ID NO: 133886 - DNA, 23 bp, Artificial sequence
  SiRNA target sequence
gatgatgataggatacattgacg

SEQ ID NO: 133887 - DNA, 23 bp, Artificial sequence
  SiRNA target sequence
atgatgataggatacattgacgt

SEQ ID NO: 133888 - DNA, 23 bp, Artificial sequence
  SiRNA target sequence
tgatgataggatacattgacgtc

SEQ ID NO: 133889 - DNA, 23 bp, Artificial sequence
  SiRNA target sequence
gatgataggatacattgacgtca

SEQ ID NO: 133890 - DNA, 23 bp, Artificial sequence
  SiRNA target sequence
atgataggatacattgacgtcag

SEQ ID NO: 133891 - DNA, 23 bp, Artificial sequence
  SiRNA target sequence
tgataggatacattgacgtcaga

SEQ ID NO: 133892 - DNA, 23 bp, Artificial sequence
  SiRNA target sequence
gataggatacattgacgtcagaa

SEQ ID NO: 133893 - DNA, 23 bp, Artificial sequence
  SiRNA target sequence
ataggatacattgacgtcagaag

SEQ ID NO: 133894 - DNA, 23 bp, Artificial sequence
  SiRNA target sequence
taggatacattgacgtcagaaga

SEQ ID NO: 133895 - DNA, 23 bp, Artificial sequence
  SiRNA target sequence
aggatacattgacgtcagaagag

SEQ ID NO: 133896 - DNA, 23 bp, Artificial sequence
  SiRNA target sequence
ggatacattgacgtcagaagagc

SEQ ID NO: 133897 - DNA, 23 bp, Artificial sequence
  SiRNA target sequence
gatacattgacgtcagaagagca

SEQ ID NO: 133898 - DNA, 23 bp, Artificial sequence
  SiRNA target sequence
atacattgacgtcagaagagcat

SEQ ID NO: 133899 - DNA, 23 bp, Artificial sequence
  SiRNA target sequence
tacattgacgtcagaagagcatt

SEQ ID NO: 133900 - DNA, 23 bp, Artificial sequence
  SiRNA target sequence
acattgacgtcagaagagcattt

SEQ ID NO: 133901 - DNA, 23 bp, Artificial sequence
  SiRNA target sequence
cattgacgtcagaagagcatttg

SEQ ID NO: 133902 - DNA, 23 bp, Artificial sequence
  SiRNA target sequence
attgacgtcagaagagcatttga

SEQ ID NO: 133903 - DNA, 23 bp, Artificial sequence
  SiRNA target sequence
ttgacgtcagaagagcatttgat

SEQ ID NO: 133904 - DNA, 23 bp, Artificial sequence
  SiRNA target sequence
tgacgtcagaagagcatttgatt

SEQ ID NO: 133905 - DNA, 23 bp, Artificial sequence
  SiRNA target sequence
gacgtcagaagagcatttgattt

SEQ ID NO: 133906 - DNA, 23 bp, Artificial sequence
  SiRNA target sequence
acgtcagaagagcatttgattta

SEQ ID NO: 133907 - DNA, 23 bp, Artificial sequence
  SiRNA target sequence
cgtcagaagagcatttgatttaa

SEQ ID NO: 133908 - DNA, 23 bp, Artificial sequence
  SiRNA target sequence
gtcagaagagcatttgatttaat

SEQ ID NO: 133909 - DNA, 23 bp, Artificial sequence
  SiRNA target sequence
tcagaagagcatttgatttaatt

SEQ ID NO: 133910 - DNA, 23 bp, Artificial sequence
  SiRNA target sequence
cagaagagcatttgatttaattg

SEQ ID NO: 133911 - DNA, 23 bp, Artificial sequence
  SiRNA target sequence
agaagagcatttgatttaattgg

SEQ ID NO: 133912 - DNA, 23 bp, Artificial sequence
  SiRNA target sequence
gaagagcatttgatttaattggt

SEQ ID NO: 133913 - DNA, 23 bp, Artificial sequence
  SiRNA target sequence
aagagcatttgatttaattggta

SEQ ID NO: 133914 - DNA, 23 bp, Artificial sequence
  SiRNA target sequence
agagcatttgatttaattggtat

SEQ ID NO: 133915 - DNA, 23 bp, Artificial sequence
  SiRNA target sequence
gagcatttgatttaattggtata

SEQ ID NO: 133916 - DNA, 23 bp, Artificial sequence
  SiRNA target sequence
agcatttgatttaattggtatag

SEQ ID NO: 133917 - DNA, 23 bp, Artificial sequence
  SiRNA target sequence
gcatttgatttaattggtatagt

SEQ ID NO: 133918 - DNA, 23 bp, Artificial sequence
  SiRNA target sequence
catttgatttaattggtatagta

SEQ ID NO: 133919 - DNA, 23 bp, Artificial sequence
  SiRNA target sequence
atttgatttaattggtatagtag

SEQ ID NO: 133920 - DNA, 23 bp, Artificial sequence
  SiRNA target sequence
tttgatttaattggtatagtagc

SEQ ID NO: 133921 - DNA, 23 bp, Artificial sequence
  SiRNA target sequence
ttgatttaattggtatagtagct

SEQ ID NO: 133922 - DNA, 23 bp, Artificial sequence
  SiRNA target sequence
tgatttaattggtatagtagctg

SEQ ID NO: 133923 - DNA, 23 bp, Artificial sequence
  SiRNA target sequence
gatttaattggtatagtagctga

SEQ ID NO: 133924 - DNA, 23 bp, Artificial sequence
  SiRNA target sequence
atttaattggtatagtagctgaa

SEQ ID NO: 133925 - DNA, 23 bp, Artificial sequence
  SiRNA target sequence
tttaattggtatagtagctgaag

SEQ ID NO: 133926 - DNA, 23 bp, Artificial sequence
  SiRNA target sequence
ttaattggtatagtagctgaagt

SEQ ID NO: 133927 - DNA, 23 bp, Artificial sequence
  SiRNA target sequence
taattggtatagtagctgaagta

SEQ ID NO: 133928 - DNA, 23 bp, Artificial sequence
  SiRNA target sequence
aattggtatagtagctgaagtaa

SEQ ID NO: 133929 - DNA, 23 bp, Artificial sequence
  SiRNA target sequence
attggtatagtagctgaagtaat

SEQ ID NO: 133930 - DNA, 23 bp, Artificial sequence
  SiRNA target sequence
ttggtatagtagctgaagtaatg

SEQ ID NO: 133931 - DNA, 23 bp, Artificial sequence
  SiRNA target sequence
tggtatagtagctgaagtaatga

SEQ ID NO: 133932 - DNA, 23 bp, Artificial sequence
  SiRNA target sequence
ggtatagtagctgaagtaatgaa

SEQ ID NO: 133933 - DNA, 23 bp, Artificial sequence
  SiRNA target sequence
gtatagtagctgaagtaatgaaa

SEQ ID NO: 133934 - DNA, 23 bp, Artificial sequence
  SiRNA target sequence
tatagtagctgaagtaatgaaag

SEQ ID NO: 133935 - DNA, 23 bp, Artificial sequence
  SiRNA target sequence
atagtagctgaagtaatgaaaga

SEQ ID NO: 133936 - DNA, 23 bp, Artificial sequence
  SiRNA target sequence
tagtagctgaagtaatgaaagac

SEQ ID NO: 133937 - DNA, 23 bp, Artificial sequence
  SiRNA target sequence
agtagctgaagtaatgaaagact

SEQ ID NO: 133938 - DNA, 23 bp, Artificial sequence
  SiRNA target sequence
gtagctgaagtaatgaaagacta

SEQ ID NO: 133939 - DNA, 23 bp, Artificial sequence
  SiRNA target sequence
tagctgaagtaatgaaagactat

SEQ ID NO: 133940 - DNA, 23 bp, Artificial sequence
  SiRNA target sequence
agctgaagtaatgaaagactatt

SEQ ID NO: 133941 - DNA, 23 bp, Artificial sequence
  SiRNA target sequence
gctgaagtaatgaaagactatta

SEQ ID NO: 133942 - DNA, 23 bp, Artificial sequence
  SiRNA target sequence
ctgaagtaatgaaagactattac

SEQ ID NO: 133943 - DNA, 23 bp, Artificial sequence
  SiRNA target sequence
tgaagtaatgaaagactattacg

SEQ ID NO: 133944 - DNA, 23 bp, Artificial sequence
  SiRNA target sequence
gaagtaatgaaagactattacgg

SEQ ID NO: 133945 - DNA, 23 bp, Artificial sequence
  SiRNA target sequence
aagtaatgaaagactattacgga

SEQ ID NO: 133946 - DNA, 23 bp, Artificial sequence
  SiRNA target sequence
agtaatgaaagactattacggat

SEQ ID NO: 133947 - DNA, 23 bp, Artificial sequence
  SiRNA target sequence
gtaatgaaagactattacggatg

SEQ ID NO: 133948 - DNA, 23 bp, Artificial sequence
  SiRNA target sequence
taatgaaagactattacggatgg

SEQ ID NO: 133949 - DNA, 23 bp, Artificial sequence
  SiRNA target sequence
aatgaaagactattacggatggg

SEQ ID NO: 133950 - DNA, 23 bp, Artificial sequence
  SiRNA target sequence
atgaaagactattacggatggga

SEQ ID NO: 133951 - DNA, 23 bp, Artificial sequence
  SiRNA target sequence
tgaaagactattacggatgggat

SEQ ID NO: 133952 - DNA, 23 bp, Artificial sequence
  SiRNA target sequence
gaaagactattacggatgggatc

SEQ ID NO: 133953 - DNA, 23 bp, Artificial sequence
  SiRNA target sequence
aaagactattacggatgggatca

SEQ ID NO: 133954 - DNA, 23 bp, Artificial sequence
  SiRNA target sequence
aagactattacggatgggatcag

SEQ ID NO: 133955 - DNA, 23 bp, Artificial sequence
  SiRNA target sequence
agactattacggatgggatcagc

SEQ ID NO: 133956 - DNA, 23 bp, Artificial sequence
  SiRNA target sequence
gactattacggatgggatcagca

SEQ ID NO: 133957 - DNA, 23 bp, Artificial sequence
  SiRNA target sequence
actattacggatgggatcagcaa

SEQ ID NO: 133958 - DNA, 23 bp, Artificial sequence
  SiRNA target sequence
ctattacggatgggatcagcaaa

SEQ ID NO: 133959 - DNA, 23 bp, Artificial sequence
  SiRNA target sequence
tattacggatgggatcagcaaag

SEQ ID NO: 133960 - DNA, 23 bp, Artificial sequence
  SiRNA target sequence
attacggatgggatcagcaaaga

SEQ ID NO: 133961 - DNA, 23 bp, Artificial sequence
  SiRNA target sequence
ttacggatgggatcagcaaagat

SEQ ID NO: 133962 - DNA, 23 bp, Artificial sequence
  SiRNA target sequence
tacggatgggatcagcaaagata

SEQ ID NO: 133963 - DNA, 23 bp, Artificial sequence
  SiRNA target sequence
acggatgggatcagcaaagatat

SEQ ID NO: 133964 - DNA, 23 bp, Artificial sequence
  SiRNA target sequence
cggatgggatcagcaaagatata

SEQ ID NO: 133965 - DNA, 23 bp, Artificial sequence
  SiRNA target sequence
ggatgggatcagcaaagatataa

SEQ ID NO: 133966 - DNA, 23 bp, Artificial sequence
  SiRNA target sequence
gatgggatcagcaaagatataat

SEQ ID NO: 133967 - DNA, 23 bp, Artificial sequence
  SiRNA target sequence
atgggatcagcaaagatataatg

SEQ ID NO: 133968 - DNA, 23 bp, Artificial sequence
  SiRNA target sequence
tgggatcagcaaagatataatga

SEQ ID NO: 133969 - DNA, 23 bp, Artificial sequence
  SiRNA target sequence
gggatcagcaaagatataatgaa

SEQ ID NO: 133970 - DNA, 23 bp, Artificial sequence
  SiRNA target sequence
ggatcagcaaagatataatgaag

SEQ ID NO: 133971 - DNA, 23 bp, Artificial sequence
  SiRNA target sequence
gatcagcaaagatataatgaaga

SEQ ID NO: 133972 - DNA, 23 bp, Artificial sequence
  SiRNA target sequence
atcagcaaagatataatgaagaa

SEQ ID NO: 133973 - DNA, 23 bp, Artificial sequence
  SiRNA target sequence
tcagcaaagatataatgaagaaa

SEQ ID NO: 133974 - DNA, 23 bp, Artificial sequence
  SiRNA target sequence
cagcaaagatataatgaagaaac

SEQ ID NO: 133975 - DNA, 23 bp, Artificial sequence
  SiRNA target sequence
agcaaagatataatgaagaaaca

SEQ ID NO: 133976 - DNA, 23 bp, Artificial sequence
  SiRNA target sequence
gcaaagatataatgaagaaacaa

SEQ ID NO: 133977 - DNA, 23 bp, Artificial sequence
  SiRNA target sequence
caaagatataatgaagaaacaaa

SEQ ID NO: 133978 - DNA, 23 bp, Artificial sequence
  SiRNA target sequence
aaagatataatgaagaaacaaaa

SEQ ID NO: 133979 - DNA, 23 bp, Artificial sequence
  SiRNA target sequence
aagatataatgaagaaacaaaat

SEQ ID NO: 133980 - DNA, 23 bp, Artificial sequence
  SiRNA target sequence
agatataatgaagaaacaaaatt

SEQ ID NO: 133981 - DNA, 23 bp, Artificial sequence
  SiRNA target sequence
gatataatgaagaaacaaaatta

SEQ ID NO: 133982 - DNA, 23 bp, Artificial sequence
  SiRNA target sequence
atataatgaagaaacaaaattat

SEQ ID NO: 133983 - DNA, 23 bp, Artificial sequence
  SiRNA target sequence
tataatgaagaaacaaaattatg

SEQ ID NO: 133984 - DNA, 23 bp, Artificial sequence
  SiRNA target sequence
ataatgaagaaacaaaattatgc

SEQ ID NO: 133985 - DNA, 23 bp, Artificial sequence
  SiRNA target sequence
taatgaagaaacaaaattatgca

SEQ ID NO: 133986 - DNA, 23 bp, Artificial sequence
  SiRNA target sequence
aatgaagaaacaaaattatgcat

SEQ ID NO: 133987 - DNA, 23 bp, Artificial sequence
  SiRNA target sequence
atgaagaaacaaaattatgcatg

SEQ ID NO: 133988 - DNA, 23 bp, Artificial sequence
  SiRNA target sequence
tgaagaaacaaaattatgcatgg

SEQ ID NO: 133989 - DNA, 23 bp, Artificial sequence
  SiRNA target sequence
gaagaaacaaaattatgcatgga

SEQ ID NO: 133990 - DNA, 23 bp, Artificial sequence
  SiRNA target sequence
aagaaacaaaattatgcatggaa

SEQ ID NO: 133991 - DNA, 23 bp, Artificial sequence
  SiRNA target sequence
agaaacaaaattatgcatggaaa

SEQ ID NO: 133992 - DNA, 23 bp, Artificial sequence
  SiRNA target sequence
gaaacaaaattatgcatggaaat

SEQ ID NO: 133993 - DNA, 23 bp, Artificial sequence
  SiRNA target sequence
aaacaaaattatgcatggaaatg

SEQ ID NO: 133994 - DNA, 23 bp, Artificial sequence
  SiRNA target sequence
aacaaaattatgcatggaaatga

SEQ ID NO: 133995 - DNA, 23 bp, Artificial sequence
  SiRNA target sequence
acaaaattatgcatggaaatgat

SEQ ID NO: 133996 - DNA, 23 bp, Artificial sequence
  SiRNA target sequence
caaaattatgcatggaaatgatg

SEQ ID NO: 133997 - DNA, 23 bp, Artificial sequence
  SiRNA target sequence
aaaattatgcatggaaatgatgg

SEQ ID NO: 133998 - DNA, 23 bp, Artificial sequence
  SiRNA target sequence
aaattatgcatggaaatgatgga

SEQ ID NO: 133999 - DNA, 23 bp, Artificial sequence
  SiRNA target sequence
aattatgcatggaaatgatggaa

SEQ ID NO: 134000 - DNA, 23 bp, Artificial sequence
  SiRNA target sequence
attatgcatggaaatgatggaaa

SEQ ID NO: 134001 - DNA, 23 bp, Artificial sequence
  SiRNA target sequence
ttatgcatggaaatgatggaaac

SEQ ID NO: 134002 - DNA, 23 bp, Artificial sequence
  SiRNA target sequence
tatgcatggaaatgatggaaact

SEQ ID NO: 134003 - DNA, 23 bp, Artificial sequence
  SiRNA target sequence
atgcatggaaatgatggaaactt

SEQ ID NO: 134004 - DNA, 23 bp, Artificial sequence
  SiRNA target sequence
tgcatggaaatgatggaaacttg

SEQ ID NO: 134005 - DNA, 23 bp, Artificial sequence
  SiRNA target sequence
gcatggaaatgatggaaacttgt

SEQ ID NO: 134006 - DNA, 23 bp, Artificial sequence
  SiRNA target sequence
catggaaatgatggaaacttgtg

SEQ ID NO: 134007 - DNA, 23 bp, Artificial sequence
  SiRNA target sequence
atggaaatgatggaaacttgtgg

SEQ ID NO: 134008 - DNA, 23 bp, Artificial sequence
  SiRNA target sequence
tggaaatgatggaaacttgtggt

SEQ ID NO: 134009 - DNA, 23 bp, Artificial sequence
  SiRNA target sequence
ggaaatgatggaaacttgtggtt

SEQ ID NO: 134010 - DNA, 23 bp, Artificial sequence
  SiRNA target sequence
gaaatgatggaaacttgtggtta

SEQ ID NO: 134011 - DNA, 23 bp, Artificial sequence
  SiRNA target sequence
aaatgatggaaacttgtggttat

SEQ ID NO: 134012 - DNA, 23 bp, Artificial sequence
  SiRNA target sequence
aatgatggaaacttgtggttata

SEQ ID NO: 134013 - DNA, 23 bp, Artificial sequence
  SiRNA target sequence
atgatggaaacttgtggttatag

SEQ ID NO: 134014 - DNA, 23 bp, Artificial sequence
  SiRNA target sequence
tgatggaaacttgtggttatagt

SEQ ID NO: 134015 - DNA, 23 bp, Artificial sequence
  SiRNA target sequence
gatggaaacttgtggttatagtt

SEQ ID NO: 134016 - DNA, 23 bp, Artificial sequence
  SiRNA target sequence
atggaaacttgtggttatagttt

SEQ ID NO: 134017 - DNA, 23 bp, Artificial sequence
  SiRNA target sequence
tggaaacttgtggttatagttta

SEQ ID NO: 134018 - DNA, 23 bp, Artificial sequence
  SiRNA target sequence
ggaaacttgtggttatagtttat

SEQ ID NO: 134019 - DNA, 23 bp, Artificial sequence
  SiRNA target sequence
gaaacttgtggttatagtttatt

SEQ ID NO: 134020 - DNA, 23 bp, Artificial sequence
  SiRNA target sequence
aaacttgtggttatagtttatta

SEQ ID NO: 134021 - DNA, 23 bp, Artificial sequence
  SiRNA target sequence
aacttgtggttatagtttattaa

SEQ ID NO: 134022 - DNA, 23 bp, Artificial sequence
  SiRNA target sequence
acttgtggttatagtttattaaa

SEQ ID NO: 134023 - DNA, 23 bp, Artificial sequence
  SiRNA target sequence
cttgtggttatagtttattaaaa

SEQ ID NO: 134024 - DNA, 23 bp, Artificial sequence
  SiRNA target sequence
ttgtggttatagtttattaaaaa

SEQ ID NO: 134025 - DNA, 23 bp, Artificial sequence
  SiRNA target sequence
tgtggttatagtttattaaaaaa

SEQ ID NO: 134026 - DNA, 23 bp, Artificial sequence
  SiRNA target sequence
gtggttatagtttattaaaaaat

SEQ ID NO: 134027 - DNA, 23 bp, Artificial sequence
  SiRNA target sequence
tggttatagtttattaaaaaatt

SEQ ID NO: 134028 - DNA, 23 bp, Artificial sequence
  SiRNA target sequence
ggttatagtttattaaaaaatta

SEQ ID NO: 134029 - DNA, 23 bp, Artificial sequence
  SiRNA target sequence
gttatagtttattaaaaaattaa

SEQ ID NO: 134030 - DNA, 24 bp, Artificial sequence
  SiRNA target sequence
atggtgtataaggttttatttaca

SEQ ID NO: 134031 - DNA, 24 bp, Artificial sequence
  SiRNA target sequence
tggtgtataaggttttatttacag

SEQ ID NO: 134032 - DNA, 24 bp, Artificial sequence
  SiRNA target sequence
ggtgtataaggttttatttacagt

SEQ ID NO: 134033 - DNA, 24 bp, Artificial sequence
  SiRNA target sequence
gtgtataaggttttatttacagta

SEQ ID NO: 134034 - DNA, 24 bp, Artificial sequence
  SiRNA target sequence
tgtataaggttttatttacagtaa

SEQ ID NO: 134035 - DNA, 24 bp, Artificial sequence
  SiRNA target sequence
gtataaggttttatttacagtaat

SEQ ID NO: 134036 - DNA, 24 bp, Artificial sequence
  SiRNA target sequence
tataaggttttatttacagtaata

SEQ ID NO: 134037 - DNA, 24 bp, Artificial sequence
  SiRNA target sequence
ataaggttttatttacagtaatag

SEQ ID NO: 134038 - DNA, 24 bp, Artificial sequence
  SiRNA target sequence
taaggttttatttacagtaatagg

SEQ ID NO: 134039 - DNA, 24 bp, Artificial sequence
  SiRNA target sequence
aaggttttatttacagtaatagga

SEQ ID NO: 134040 - DNA, 24 bp, Artificial sequence
  SiRNA target sequence
aggttttatttacagtaataggat

SEQ ID NO: 134041 - DNA, 24 bp, Artificial sequence
  SiRNA target sequence
ggttttatttacagtaataggatt

SEQ ID NO: 134042 - DNA, 24 bp, Artificial sequence
  SiRNA target sequence
gttttatttacagtaataggatta

SEQ ID NO: 134043 - DNA, 24 bp, Artificial sequence
  SiRNA target sequence
ttttatttacagtaataggattaa

SEQ ID NO: 134044 - DNA, 24 bp, Artificial sequence
  SiRNA target sequence
tttatttacagtaataggattaat

SEQ ID NO: 134045 - DNA, 24 bp, Artificial sequence
  SiRNA target sequence
ttatttacagtaataggattaata

SEQ ID NO: 134046 - DNA, 24 bp, Artificial sequence
  SiRNA target sequence
tatttacagtaataggattaatat

SEQ ID NO: 134047 - DNA, 24 bp, Artificial sequence
  SiRNA target sequence
atttacagtaataggattaatatg

SEQ ID NO: 134048 - DNA, 24 bp, Artificial sequence
  SiRNA target sequence
tttacagtaataggattaatatgt

SEQ ID NO: 134049 - DNA, 24 bp, Artificial sequence
  SiRNA target sequence
ttacagtaataggattaatatgtg

SEQ ID NO: 134050 - DNA, 24 bp, Artificial sequence
  SiRNA target sequence
tacagtaataggattaatatgtgg

SEQ ID NO: 134051 - DNA, 24 bp, Artificial sequence
  SiRNA target sequence
acagtaataggattaatatgtggt

SEQ ID NO: 134052 - DNA, 24 bp, Artificial sequence
  SiRNA target sequence
cagtaataggattaatatgtggta

SEQ ID NO: 134053 - DNA, 24 bp, Artificial sequence
  SiRNA target sequence
agtaataggattaatatgtggtat

SEQ ID NO: 134054 - DNA, 24 bp, Artificial sequence
  SiRNA target sequence
gtaataggattaatatgtggtata

SEQ ID NO: 134055 - DNA, 24 bp, Artificial sequence
  SiRNA target sequence
taataggattaatatgtggtatac

SEQ ID NO: 134056 - DNA, 24 bp, Artificial sequence
  SiRNA target sequence
aataggattaatatgtggtatact

SEQ ID NO: 134057 - DNA, 24 bp, Artificial sequence
  SiRNA target sequence
ataggattaatatgtggtatactt

SEQ ID NO: 134058 - DNA, 24 bp, Artificial sequence
  SiRNA target sequence
taggattaatatgtggtatactta

SEQ ID NO: 134059 - DNA, 24 bp, Artificial sequence
  SiRNA target sequence
aggattaatatgtggtatacttac

SEQ ID NO: 134060 - DNA, 24 bp, Artificial sequence
  SiRNA target sequence
ggattaatatgtggtatacttaca

SEQ ID NO: 134061 - DNA, 24 bp, Artificial sequence
  SiRNA target sequence
gattaatatgtggtatacttacaa

SEQ ID NO: 134062 - DNA, 24 bp, Artificial sequence
  SiRNA target sequence
attaatatgtggtatacttacaat

SEQ ID NO: 134063 - DNA, 24 bp, Artificial sequence
  SiRNA target sequence
ttaatatgtggtatacttacaata

SEQ ID NO: 134064 - DNA, 24 bp, Artificial sequence
  SiRNA target sequence
taatatgtggtatacttacaataa

SEQ ID NO: 134065 - DNA, 24 bp, Artificial sequence
  SiRNA target sequence
aatatgtggtatacttacaataat

SEQ ID NO: 134066 - DNA, 24 bp, Artificial sequence
  SiRNA target sequence
atatgtggtatacttacaataatt

SEQ ID NO: 134067 - DNA, 24 bp, Artificial sequence
  SiRNA target sequence
tatgtggtatacttacaataatta

SEQ ID NO: 134068 - DNA, 24 bp, Artificial sequence
  SiRNA target sequence
atgtggtatacttacaataattaa

SEQ ID NO: 134069 - DNA, 24 bp, Artificial sequence
  SiRNA target sequence
tgtggtatacttacaataattaaa

SEQ ID NO: 134070 - DNA, 24 bp, Artificial sequence
  SiRNA target sequence
gtggtatacttacaataattaaac

SEQ ID NO: 134071 - DNA, 24 bp, Artificial sequence
  SiRNA target sequence
tggtatacttacaataattaaacg

SEQ ID NO: 134072 - DNA, 24 bp, Artificial sequence
  SiRNA target sequence
ggtatacttacaataattaaacga

SEQ ID NO: 134073 - DNA, 24 bp, Artificial sequence
  SiRNA target sequence
gtatacttacaataattaaacgat

SEQ ID NO: 134074 - DNA, 24 bp, Artificial sequence
  SiRNA target sequence
tatacttacaataattaaacgata

SEQ ID NO: 134075 - DNA, 24 bp, Artificial sequence
  SiRNA target sequence
atacttacaataattaaacgatac

SEQ ID NO: 134076 - DNA, 24 bp, Artificial sequence
  SiRNA target sequence
tacttacaataattaaacgataca

SEQ ID NO: 134077 - DNA, 24 bp, Artificial sequence
  SiRNA target sequence
acttacaataattaaacgatacaa

SEQ ID NO: 134078 - DNA, 24 bp, Artificial sequence
  SiRNA target sequence
cttacaataattaaacgatacaag

SEQ ID NO: 134079 - DNA, 24 bp, Artificial sequence
  SiRNA target sequence
ttacaataattaaacgatacaagt

SEQ ID NO: 134080 - DNA, 24 bp, Artificial sequence
  SiRNA target sequence
tacaataattaaacgatacaagta

SEQ ID NO: 134081 - DNA, 24 bp, Artificial sequence
  SiRNA target sequence
acaataattaaacgatacaagtat

SEQ ID NO: 134082 - DNA, 24 bp, Artificial sequence
  SiRNA target sequence
caataattaaacgatacaagtatt

SEQ ID NO: 134083 - DNA, 24 bp, Artificial sequence
  SiRNA target sequence
aataattaaacgatacaagtattt

SEQ ID NO: 134084 - DNA, 24 bp, Artificial sequence
  SiRNA target sequence
ataattaaacgatacaagtatttt

SEQ ID NO: 134085 - DNA, 24 bp, Artificial sequence
  SiRNA target sequence
taattaaacgatacaagtatttta

SEQ ID NO: 134086 - DNA, 24 bp, Artificial sequence
  SiRNA target sequence
aattaaacgatacaagtattttaa

SEQ ID NO: 134087 - DNA, 24 bp, Artificial sequence
  SiRNA target sequence
attaaacgatacaagtattttaag

SEQ ID NO: 134088 - DNA, 24 bp, Artificial sequence
  SiRNA target sequence
ttaaacgatacaagtattttaaga

SEQ ID NO: 134089 - DNA, 24 bp, Artificial sequence
  SiRNA target sequence
taaacgatacaagtattttaagat

SEQ ID NO: 134090 - DNA, 24 bp, Artificial sequence
  SiRNA target sequence
aaacgatacaagtattttaagata

SEQ ID NO: 134091 - DNA, 24 bp, Artificial sequence
  SiRNA target sequence
aacgatacaagtattttaagataa

SEQ ID NO: 134092 - DNA, 24 bp, Artificial sequence
  SiRNA target sequence
acgatacaagtattttaagataaa

SEQ ID NO: 134093 - DNA, 24 bp, Artificial sequence
  SiRNA target sequence
cgatacaagtattttaagataaaa

SEQ ID NO: 134094 - DNA, 24 bp, Artificial sequence
  SiRNA target sequence
gatacaagtattttaagataaaaa

SEQ ID NO: 134095 - DNA, 24 bp, Artificial sequence
  SiRNA target sequence
atacaagtattttaagataaaaaa

SEQ ID NO: 134096 - DNA, 24 bp, Artificial sequence
  SiRNA target sequence
tacaagtattttaagataaaaaaa

SEQ ID NO: 134097 - DNA, 24 bp, Artificial sequence
  SiRNA target sequence
acaagtattttaagataaaaaaat

SEQ ID NO: 134098 - DNA, 24 bp, Artificial sequence
  SiRNA target sequence
caagtattttaagataaaaaaatt

SEQ ID NO: 134099 - DNA, 24 bp, Artificial sequence
  SiRNA target sequence
aagtattttaagataaaaaaattg

SEQ ID NO: 134100 - DNA, 24 bp, Artificial sequence
  SiRNA target sequence
agtattttaagataaaaaaattgg

SEQ ID NO: 134101 - DNA, 24 bp, Artificial sequence
  SiRNA target sequence
gtattttaagataaaaaaattggc

SEQ ID NO: 134102 - DNA, 24 bp, Artificial sequence
  SiRNA target sequence
tattttaagataaaaaaattggcc

SEQ ID NO: 134103 - DNA, 24 bp, Artificial sequence
  SiRNA target sequence
attttaagataaaaaaattggcct

SEQ ID NO: 134104 - DNA, 24 bp, Artificial sequence
  SiRNA target sequence
ttttaagataaaaaaattggcctt

SEQ ID NO: 134105 - DNA, 24 bp, Artificial sequence
  SiRNA target sequence
tttaagataaaaaaattggcctta

SEQ ID NO: 134106 - DNA, 24 bp, Artificial sequence
  SiRNA target sequence
ttaagataaaaaaattggccttaa

SEQ ID NO: 134107 - DNA, 24 bp, Artificial sequence
  SiRNA target sequence
taagataaaaaaattggccttaac

SEQ ID NO: 134108 - DNA, 24 bp, Artificial sequence
  SiRNA target sequence
aagataaaaaaattggccttaact

SEQ ID NO: 134109 - DNA, 24 bp, Artificial sequence
  SiRNA target sequence
agataaaaaaattggccttaactt

SEQ ID NO: 134110 - DNA, 24 bp, Artificial sequence
  SiRNA target sequence
gataaaaaaattggccttaactta

SEQ ID NO: 134111 - DNA, 24 bp, Artificial sequence
  SiRNA target sequence
ataaaaaaattggccttaacttac

SEQ ID NO: 134112 - DNA, 24 bp, Artificial sequence
  SiRNA target sequence
taaaaaaattggccttaacttact

SEQ ID NO: 134113 - DNA, 24 bp, Artificial sequence
  SiRNA target sequence
aaaaaaattggccttaacttactt

SEQ ID NO: 134114 - DNA, 24 bp, Artificial sequence
  SiRNA target sequence
aaaaaattggccttaacttacttc

SEQ ID NO: 134115 - DNA, 24 bp, Artificial sequence
  SiRNA target sequence
aaaaattggccttaacttacttcg

SEQ ID NO: 134116 - DNA, 24 bp, Artificial sequence
  SiRNA target sequence
aaaattggccttaacttacttcgg

SEQ ID NO: 134117 - DNA, 24 bp, Artificial sequence
  SiRNA target sequence
aaattggccttaacttacttcggg

SEQ ID NO: 134118 - DNA, 24 bp, Artificial sequence
  SiRNA target sequence
aattggccttaacttacttcggga

SEQ ID NO: 134119 - DNA, 24 bp, Artificial sequence
  SiRNA target sequence
attggccttaacttacttcgggaa

SEQ ID NO: 134120 - DNA, 24 bp, Artificial sequence
  SiRNA target sequence
ttggccttaacttacttcgggaaa

SEQ ID NO: 134121 - DNA, 24 bp, Artificial sequence
  SiRNA target sequence
tggccttaacttacttcgggaaac

SEQ ID NO: 134122 - DNA, 24 bp, Artificial sequence
  SiRNA target sequence
ggccttaacttacttcgggaaaca

SEQ ID NO: 134123 - DNA, 24 bp, Artificial sequence
  SiRNA target sequence
gccttaacttacttcgggaaacaa

SEQ ID NO: 134124 - DNA, 24 bp, Artificial sequence
  SiRNA target sequence
ccttaacttacttcgggaaacaag

SEQ ID NO: 134125 - DNA, 24 bp, Artificial sequence
  SiRNA target sequence
cttaacttacttcgggaaacaaga

SEQ ID NO: 134126 - DNA, 24 bp, Artificial sequence
  SiRNA target sequence
ttaacttacttcgggaaacaagac

SEQ ID NO: 134127 - DNA, 24 bp, Artificial sequence
  SiRNA target sequence
taacttacttcgggaaacaagact

SEQ ID NO: 134128 - DNA, 24 bp, Artificial sequence
  SiRNA target sequence
aacttacttcgggaaacaagactt

SEQ ID NO: 134129 - DNA, 24 bp, Artificial sequence
  SiRNA target sequence
acttacttcgggaaacaagacttg

SEQ ID NO: 134130 - DNA, 24 bp, Artificial sequence
  SiRNA target sequence
cttacttcgggaaacaagacttgc

SEQ ID NO: 134131 - DNA, 24 bp, Artificial sequence
  SiRNA target sequence
ttacttcgggaaacaagacttgca

SEQ ID NO: 134132 - DNA, 24 bp, Artificial sequence
  SiRNA target sequence
tacttcgggaaacaagacttgcaa

SEQ ID NO: 134133 - DNA, 24 bp, Artificial sequence
  SiRNA target sequence
acttcgggaaacaagacttgcaat

SEQ ID NO: 134134 - DNA, 24 bp, Artificial sequence
  SiRNA target sequence
cttcgggaaacaagacttgcaatg

SEQ ID NO: 134135 - DNA, 24 bp, Artificial sequence
  SiRNA target sequence
ttcgggaaacaagacttgcaatgg

SEQ ID NO: 134136 - DNA, 24 bp, Artificial sequence
  SiRNA target sequence
tcgggaaacaagacttgcaatgga

SEQ ID NO: 134137 - DNA, 24 bp, Artificial sequence
  SiRNA target sequence
cgggaaacaagacttgcaatggaa

SEQ ID NO: 134138 - DNA, 24 bp, Artificial sequence
  SiRNA target sequence
gggaaacaagacttgcaatggaaa

SEQ ID NO: 134139 - DNA, 24 bp, Artificial sequence
  SiRNA target sequence
ggaaacaagacttgcaatggaaac

SEQ ID NO: 134140 - DNA, 24 bp, Artificial sequence
  SiRNA target sequence
gaaacaagacttgcaatggaaacc

SEQ ID NO: 134141 - DNA, 24 bp, Artificial sequence
  SiRNA target sequence
aaacaagacttgcaatggaaacct

SEQ ID NO: 134142 - DNA, 24 bp, Artificial sequence
  SiRNA target sequence
aacaagacttgcaatggaaaccta

SEQ ID NO: 134143 - DNA, 24 bp, Artificial sequence
  SiRNA target sequence
acaagacttgcaatggaaacctaa

SEQ ID NO: 134144 - DNA, 24 bp, Artificial sequence
  SiRNA target sequence
caagacttgcaatggaaacctaaa

SEQ ID NO: 134145 - DNA, 24 bp, Artificial sequence
  SiRNA target sequence
aagacttgcaatggaaacctaaaa

SEQ ID NO: 134146 - DNA, 24 bp, Artificial sequence
  SiRNA target sequence
agacttgcaatggaaacctaaaag

SEQ ID NO: 134147 - DNA, 24 bp, Artificial sequence
  SiRNA target sequence
gacttgcaatggaaacctaaaagt

SEQ ID NO: 134148 - DNA, 24 bp, Artificial sequence
  SiRNA target sequence
acttgcaatggaaacctaaaagtc

SEQ ID NO: 134149 - DNA, 24 bp, Artificial sequence
  SiRNA target sequence
cttgcaatggaaacctaaaagtcg

SEQ ID NO: 134150 - DNA, 24 bp, Artificial sequence
  SiRNA target sequence
ttgcaatggaaacctaaaagtcgg

SEQ ID NO: 134151 - DNA, 24 bp, Artificial sequence
  SiRNA target sequence
tgcaatggaaacctaaaagtcggt

SEQ ID NO: 134152 - DNA, 24 bp, Artificial sequence
  SiRNA target sequence
gcaatggaaacctaaaagtcggtc

SEQ ID NO: 134153 - DNA, 24 bp, Artificial sequence
  SiRNA target sequence
caatggaaacctaaaagtcggtca

SEQ ID NO: 134154 - DNA, 24 bp, Artificial sequence
  SiRNA target sequence
aatggaaacctaaaagtcggtcag

SEQ ID NO: 134155 - DNA, 24 bp, Artificial sequence
  SiRNA target sequence
atggaaacctaaaagtcggtcaga

SEQ ID NO: 134156 - DNA, 24 bp, Artificial sequence
  SiRNA target sequence
tggaaacctaaaagtcggtcagaa

SEQ ID NO: 134157 - DNA, 24 bp, Artificial sequence
  SiRNA target sequence
ggaaacctaaaagtcggtcagaaa

SEQ ID NO: 134158 - DNA, 24 bp, Artificial sequence
  SiRNA target sequence
gaaacctaaaagtcggtcagaaat

SEQ ID NO: 134159 - DNA, 24 bp, Artificial sequence
  SiRNA target sequence
aaacctaaaagtcggtcagaaatt

SEQ ID NO: 134160 - DNA, 24 bp, Artificial sequence
  SiRNA target sequence
aacctaaaagtcggtcagaaatta

SEQ ID NO: 134161 - DNA, 24 bp, Artificial sequence
  SiRNA target sequence
acctaaaagtcggtcagaaattat

SEQ ID NO: 134162 - DNA, 24 bp, Artificial sequence
  SiRNA target sequence
cctaaaagtcggtcagaaattatt

SEQ ID NO: 134163 - DNA, 24 bp, Artificial sequence
  SiRNA target sequence
ctaaaagtcggtcagaaattatta

SEQ ID NO: 134164 - DNA, 24 bp, Artificial sequence
  SiRNA target sequence
taaaagtcggtcagaaattattaa

SEQ ID NO: 134165 - DNA, 24 bp, Artificial sequence
  SiRNA target sequence
aaaagtcggtcagaaattattaac

SEQ ID NO: 134166 - DNA, 24 bp, Artificial sequence
  SiRNA target sequence
aaagtcggtcagaaattattaacg

SEQ ID NO: 134167 - DNA, 24 bp, Artificial sequence
  SiRNA target sequence
aagtcggtcagaaattattaacga

SEQ ID NO: 134168 - DNA, 24 bp, Artificial sequence
  SiRNA target sequence
agtcggtcagaaattattaacgat

SEQ ID NO: 134169 - DNA, 24 bp, Artificial sequence
  SiRNA target sequence
gtcggtcagaaattattaacgatt

SEQ ID NO: 134170 - DNA, 24 bp, Artificial sequence
  SiRNA target sequence
tcggtcagaaattattaacgattt

SEQ ID NO: 134171 - DNA, 24 bp, Artificial sequence
  SiRNA target sequence
cggtcagaaattattaacgattta

SEQ ID NO: 134172 - DNA, 24 bp, Artificial sequence
  SiRNA target sequence
ggtcagaaattattaacgatttaa

SEQ ID NO: 134173 - DNA, 24 bp, Artificial sequence
  SiRNA target sequence
gtcagaaattattaacgatttaaa

SEQ ID NO: 134174 - DNA, 24 bp, Artificial sequence
  SiRNA target sequence
tcagaaattattaacgatttaaaa

SEQ ID NO: 134175 - DNA, 24 bp, Artificial sequence
  SiRNA target sequence
cagaaattattaacgatttaaaaa

SEQ ID NO: 134176 - DNA, 24 bp, Artificial sequence
  SiRNA target sequence
agaaattattaacgatttaaaaaa

SEQ ID NO: 134177 - DNA, 24 bp, Artificial sequence
  SiRNA target sequence
gaaattattaacgatttaaaaaat

SEQ ID NO: 134178 - DNA, 24 bp, Artificial sequence
  SiRNA target sequence
aaattattaacgatttaaaaaata

SEQ ID NO: 134179 - DNA, 24 bp, Artificial sequence
  SiRNA target sequence
aattattaacgatttaaaaaatac

SEQ ID NO: 134180 - DNA, 24 bp, Artificial sequence
  SiRNA target sequence
attattaacgatttaaaaaataca

SEQ ID NO: 134181 - DNA, 24 bp, Artificial sequence
  SiRNA target sequence
ttattaacgatttaaaaaatacaa

SEQ ID NO: 134182 - DNA, 24 bp, Artificial sequence
  SiRNA target sequence
tattaacgatttaaaaaatacaaa

SEQ ID NO: 134183 - DNA, 24 bp, Artificial sequence
  SiRNA target sequence
attaacgatttaaaaaatacaaac

SEQ ID NO: 134184 - DNA, 24 bp, Artificial sequence
  SiRNA target sequence
ttaacgatttaaaaaatacaaact

SEQ ID NO: 134185 - DNA, 24 bp, Artificial sequence
  SiRNA target sequence
taacgatttaaaaaatacaaactt

SEQ ID NO: 134186 - DNA, 24 bp, Artificial sequence
  SiRNA target sequence
aacgatttaaaaaatacaaacttt

SEQ ID NO: 134187 - DNA, 24 bp, Artificial sequence
  SiRNA target sequence
acgatttaaaaaatacaaactttg

SEQ ID NO: 134188 - DNA, 24 bp, Artificial sequence
  SiRNA target sequence
cgatttaaaaaatacaaactttga

SEQ ID NO: 134189 - DNA, 24 bp, Artificial sequence
  SiRNA target sequence
gatttaaaaaatacaaactttgac

SEQ ID NO: 134190 - DNA, 24 bp, Artificial sequence
  SiRNA target sequence
atttaaaaaatacaaactttgaca

SEQ ID NO: 134191 - DNA, 24 bp, Artificial sequence
  SiRNA target sequence
tttaaaaaatacaaactttgacat

SEQ ID NO: 134192 - DNA, 24 bp, Artificial sequence
  SiRNA target sequence
ttaaaaaatacaaactttgacata

SEQ ID NO: 134193 - DNA, 24 bp, Artificial sequence
  SiRNA target sequence
taaaaaatacaaactttgacatat

SEQ ID NO: 134194 - DNA, 24 bp, Artificial sequence
  SiRNA target sequence
aaaaaatacaaactttgacatatt

SEQ ID NO: 134195 - DNA, 24 bp, Artificial sequence
  SiRNA target sequence
aaaaatacaaactttgacatattg

SEQ ID NO: 134196 - DNA, 24 bp, Artificial sequence
  SiRNA target sequence
aaaatacaaactttgacatattga

SEQ ID NO: 134197 - DNA, 24 bp, Artificial sequence
  SiRNA target sequence
aaatacaaactttgacatattgat

SEQ ID NO: 134198 - DNA, 24 bp, Artificial sequence
  SiRNA target sequence
aatacaaactttgacatattgatt

SEQ ID NO: 134199 - DNA, 24 bp, Artificial sequence
  SiRNA target sequence
atacaaactttgacatattgatta

SEQ ID NO: 134200 - DNA, 24 bp, Artificial sequence
  SiRNA target sequence
tacaaactttgacatattgattat

SEQ ID NO: 134201 - DNA, 24 bp, Artificial sequence
  SiRNA target sequence
acaaactttgacatattgattatt

SEQ ID NO: 134202 - DNA, 24 bp, Artificial sequence
  SiRNA target sequence
caaactttgacatattgattattg

SEQ ID NO: 134203 - DNA, 24 bp, Artificial sequence
  SiRNA target sequence
aaactttgacatattgattattgg

SEQ ID NO: 134204 - DNA, 24 bp, Artificial sequence
  SiRNA target sequence
aactttgacatattgattattggt

SEQ ID NO: 134205 - DNA, 24 bp, Artificial sequence
  SiRNA target sequence
actttgacatattgattattggtg

SEQ ID NO: 134206 - DNA, 24 bp, Artificial sequence
  SiRNA target sequence
ctttgacatattgattattggtgg

SEQ ID NO: 134207 - DNA, 24 bp, Artificial sequence
  SiRNA target sequence
tttgacatattgattattggtggc

SEQ ID NO: 134208 - DNA, 24 bp, Artificial sequence
  SiRNA target sequence
ttgacatattgattattggtggcg

SEQ ID NO: 134209 - DNA, 24 bp, Artificial sequence
  SiRNA target sequence
tgacatattgattattggtggcgg

SEQ ID NO: 134210 - DNA, 24 bp, Artificial sequence
  SiRNA target sequence
gacatattgattattggtggcggt

SEQ ID NO: 134211 - DNA, 24 bp, Artificial sequence
  SiRNA target sequence
acatattgattattggtggcggtt

SEQ ID NO: 134212 - DNA, 24 bp, Artificial sequence
  SiRNA target sequence
catattgattattggtggcggttc

SEQ ID NO: 134213 - DNA, 24 bp, Artificial sequence
  SiRNA target sequence
atattgattattggtggcggttca

SEQ ID NO: 134214 - DNA, 24 bp, Artificial sequence
  SiRNA target sequence
tattgattattggtggcggttcaa

SEQ ID NO: 134215 - DNA, 24 bp, Artificial sequence
  SiRNA target sequence
attgattattggtggcggttcaac

SEQ ID NO: 134216 - DNA, 24 bp, Artificial sequence
  SiRNA target sequence
ttgattattggtggcggttcaacg

SEQ ID NO: 134217 - DNA, 24 bp, Artificial sequence
  SiRNA target sequence
tgattattggtggcggttcaacgg

SEQ ID NO: 134218 - DNA, 24 bp, Artificial sequence
  SiRNA target sequence
gattattggtggcggttcaacggg

SEQ ID NO: 134219 - DNA, 24 bp, Artificial sequence
  SiRNA target sequence
attattggtggcggttcaacggga

SEQ ID NO: 134220 - DNA, 24 bp, Artificial sequence
  SiRNA target sequence
ttattggtggcggttcaacgggaa

SEQ ID NO: 134221 - DNA, 24 bp, Artificial sequence
  SiRNA target sequence
tattggtggcggttcaacgggaat

SEQ ID NO: 134222 - DNA, 24 bp, Artificial sequence
  SiRNA target sequence
attggtggcggttcaacgggaatg

SEQ ID NO: 134223 - DNA, 24 bp, Artificial sequence
  SiRNA target sequence
ttggtggcggttcaacgggaatgg

SEQ ID NO: 134224 - DNA, 24 bp, Artificial sequence
  SiRNA target sequence
tggtggcggttcaacgggaatggg

SEQ ID NO: 134225 - DNA, 24 bp, Artificial sequence
  SiRNA target sequence
ggtggcggttcaacgggaatggga

SEQ ID NO: 134226 - DNA, 24 bp, Artificial sequence
  SiRNA target sequence
gtggcggttcaacgggaatgggat

SEQ ID NO: 134227 - DNA, 24 bp, Artificial sequence
  SiRNA target sequence
tggcggttcaacgggaatgggatg

SEQ ID NO: 134228 - DNA, 24 bp, Artificial sequence
  SiRNA target sequence
ggcggttcaacgggaatgggatgt

SEQ ID NO: 134229 - DNA, 24 bp, Artificial sequence
  SiRNA target sequence
gcggttcaacgggaatgggatgtg

SEQ ID NO: 134230 - DNA, 24 bp, Artificial sequence
  SiRNA target sequence
cggttcaacgggaatgggatgtgc

SEQ ID NO: 134231 - DNA, 24 bp, Artificial sequence
  SiRNA target sequence
ggttcaacgggaatgggatgtgca

SEQ ID NO: 134232 - DNA, 24 bp, Artificial sequence
  SiRNA target sequence
gttcaacgggaatgggatgtgcaa

SEQ ID NO: 134233 - DNA, 24 bp, Artificial sequence
  SiRNA target sequence
ttcaacgggaatgggatgtgcaat

SEQ ID NO: 134234 - DNA, 24 bp, Artificial sequence
  SiRNA target sequence
tcaacgggaatgggatgtgcaatc

SEQ ID NO: 134235 - DNA, 24 bp, Artificial sequence
  SiRNA target sequence
caacgggaatgggatgtgcaatcg

SEQ ID NO: 134236 - DNA, 24 bp, Artificial sequence
  SiRNA target sequence
aacgggaatgggatgtgcaatcga

SEQ ID NO: 134237 - DNA, 24 bp, Artificial sequence
  SiRNA target sequence
acgggaatgggatgtgcaatcgaa

SEQ ID NO: 134238 - DNA, 24 bp, Artificial sequence
  SiRNA target sequence
cgggaatgggatgtgcaatcgaag

SEQ ID NO: 134239 - DNA, 24 bp, Artificial sequence
  SiRNA target sequence
gggaatgggatgtgcaatcgaagc

SEQ ID NO: 134240 - DNA, 24 bp, Artificial sequence
  SiRNA target sequence
ggaatgggatgtgcaatcgaagca

SEQ ID NO: 134241 - DNA, 24 bp, Artificial sequence
  SiRNA target sequence
gaatgggatgtgcaatcgaagcag

SEQ ID NO: 134242 - DNA, 24 bp, Artificial sequence
  SiRNA target sequence
aatgggatgtgcaatcgaagcagc

SEQ ID NO: 134243 - DNA, 24 bp, Artificial sequence
  SiRNA target sequence
atgggatgtgcaatcgaagcagct

SEQ ID NO: 134244 - DNA, 24 bp, Artificial sequence
  SiRNA target sequence
tgggatgtgcaatcgaagcagcta

SEQ ID NO: 134245 - DNA, 24 bp, Artificial sequence
  SiRNA target sequence
gggatgtgcaatcgaagcagctac

SEQ ID NO: 134246 - DNA, 24 bp, Artificial sequence
  SiRNA target sequence
ggatgtgcaatcgaagcagctaca

SEQ ID NO: 134247 - DNA, 24 bp, Artificial sequence
  SiRNA target sequence
gatgtgcaatcgaagcagctacac

SEQ ID NO: 134248 - DNA, 24 bp, Artificial sequence
  SiRNA target sequence
atgtgcaatcgaagcagctacacg

SEQ ID NO: 134249 - DNA, 24 bp, Artificial sequence
  SiRNA target sequence
tgtgcaatcgaagcagctacacga

SEQ ID NO: 134250 - DNA, 24 bp, Artificial sequence
  SiRNA target sequence
gtgcaatcgaagcagctacacgag

SEQ ID NO: 134251 - DNA, 24 bp, Artificial sequence
  SiRNA target sequence
tgcaatcgaagcagctacacgagg

SEQ ID NO: 134252 - DNA, 24 bp, Artificial sequence
  SiRNA target sequence
gcaatcgaagcagctacacgaggt

SEQ ID NO: 134253 - DNA, 24 bp, Artificial sequence
  SiRNA target sequence
caatcgaagcagctacacgaggta

SEQ ID NO: 134254 - DNA, 24 bp, Artificial sequence
  SiRNA target sequence
aatcgaagcagctacacgaggtat

SEQ ID NO: 134255 - DNA, 24 bp, Artificial sequence
  SiRNA target sequence
atcgaagcagctacacgaggtata

SEQ ID NO: 134256 - DNA, 24 bp, Artificial sequence
  SiRNA target sequence
tcgaagcagctacacgaggtataa

SEQ ID NO: 134257 - DNA, 24 bp, Artificial sequence
  SiRNA target sequence
cgaagcagctacacgaggtataag

SEQ ID NO: 134258 - DNA, 24 bp, Artificial sequence
  SiRNA target sequence
gaagcagctacacgaggtataagt

SEQ ID NO: 134259 - DNA, 24 bp, Artificial sequence
  SiRNA target sequence
aagcagctacacgaggtataagtg

SEQ ID NO: 134260 - DNA, 24 bp, Artificial sequence
  SiRNA target sequence
agcagctacacgaggtataagtgt

SEQ ID NO: 134261 - DNA, 24 bp, Artificial sequence
  SiRNA target sequence
gcagctacacgaggtataagtgtt

SEQ ID NO: 134262 - DNA, 24 bp, Artificial sequence
  SiRNA target sequence
cagctacacgaggtataagtgttg

SEQ ID NO: 134263 - DNA, 24 bp, Artificial sequence
  SiRNA target sequence
agctacacgaggtataagtgttgg

SEQ ID NO: 134264 - DNA, 24 bp, Artificial sequence
  SiRNA target sequence
gctacacgaggtataagtgttggc

SEQ ID NO: 134265 - DNA, 24 bp, Artificial sequence
  SiRNA target sequence
ctacacgaggtataagtgttggcc

SEQ ID NO: 134266 - DNA, 24 bp, Artificial sequence
  SiRNA target sequence
tacacgaggtataagtgttggcct

SEQ ID NO: 134267 - DNA, 24 bp, Artificial sequence
  SiRNA target sequence
acacgaggtataagtgttggcctg

SEQ ID NO: 134268 - DNA, 24 bp, Artificial sequence
  SiRNA target sequence
cacgaggtataagtgttggcctga

SEQ ID NO: 134269 - DNA, 24 bp, Artificial sequence
  SiRNA target sequence
acgaggtataagtgttggcctgat

SEQ ID NO: 134270 - DNA, 24 bp, Artificial sequence
  SiRNA target sequence
cgaggtataagtgttggcctgata

SEQ ID NO: 134271 - DNA, 24 bp, Artificial sequence
  SiRNA target sequence
gaggtataagtgttggcctgatag

SEQ ID NO: 134272 - DNA, 24 bp, Artificial sequence
  SiRNA target sequence
aggtataagtgttggcctgataga

SEQ ID NO: 134273 - DNA, 24 bp, Artificial sequence
  SiRNA target sequence
ggtataagtgttggcctgatagaa

SEQ ID NO: 134274 - DNA, 24 bp, Artificial sequence
  SiRNA target sequence
gtataagtgttggcctgatagaag

SEQ ID NO: 134275 - DNA, 24 bp, Artificial sequence
  SiRNA target sequence
tataagtgttggcctgatagaagc

SEQ ID NO: 134276 - DNA, 24 bp, Artificial sequence
  SiRNA target sequence
ataagtgttggcctgatagaagca

SEQ ID NO: 134277 - DNA, 24 bp, Artificial sequence
  SiRNA target sequence
taagtgttggcctgatagaagcac

SEQ ID NO: 134278 - DNA, 24 bp, Artificial sequence
  SiRNA target sequence
aagtgttggcctgatagaagcaca

SEQ ID NO: 134279 - DNA, 24 bp, Artificial sequence
  SiRNA target sequence
agtgttggcctgatagaagcacat

SEQ ID NO: 134280 - DNA, 24 bp, Artificial sequence
  SiRNA target sequence
gtgttggcctgatagaagcacatg

SEQ ID NO: 134281 - DNA, 24 bp, Artificial sequence
  SiRNA target sequence
tgttggcctgatagaagcacatga

SEQ ID NO: 134282 - DNA, 24 bp, Artificial sequence
  SiRNA target sequence
gttggcctgatagaagcacatgat

SEQ ID NO: 134283 - DNA, 24 bp, Artificial sequence
  SiRNA target sequence
ttggcctgatagaagcacatgatt

SEQ ID NO: 134284 - DNA, 24 bp, Artificial sequence
  SiRNA target sequence
tggcctgatagaagcacatgattt

SEQ ID NO: 134285 - DNA, 24 bp, Artificial sequence
  SiRNA target sequence
ggcctgatagaagcacatgatttt

SEQ ID NO: 134286 - DNA, 24 bp, Artificial sequence
  SiRNA target sequence
gcctgatagaagcacatgattttg

SEQ ID NO: 134287 - DNA, 24 bp, Artificial sequence
  SiRNA target sequence
cctgatagaagcacatgattttgg

SEQ ID NO: 134288 - DNA, 24 bp, Artificial sequence
  SiRNA target sequence
ctgatagaagcacatgattttggt

SEQ ID NO: 134289 - DNA, 24 bp, Artificial sequence
  SiRNA target sequence
tgatagaagcacatgattttggtt

SEQ ID NO: 134290 - DNA, 24 bp, Artificial sequence
  SiRNA target sequence
gatagaagcacatgattttggttc

SEQ ID NO: 134291 - DNA, 24 bp, Artificial sequence
  SiRNA target sequence
atagaagcacatgattttggttcg

SEQ ID NO: 134292 - DNA, 24 bp, Artificial sequence
  SiRNA target sequence
tagaagcacatgattttggttcgg

SEQ ID NO: 134293 - DNA, 24 bp, Artificial sequence
  SiRNA target sequence
agaagcacatgattttggttcggg

SEQ ID NO: 134294 - DNA, 24 bp, Artificial sequence
  SiRNA target sequence
gaagcacatgattttggttcgggc

SEQ ID NO: 134295 - DNA, 24 bp, Artificial sequence
  SiRNA target sequence
aagcacatgattttggttcgggca

SEQ ID NO: 134296 - DNA, 24 bp, Artificial sequence
  SiRNA target sequence
agcacatgattttggttcgggcac

SEQ ID NO: 134297 - DNA, 24 bp, Artificial sequence
  SiRNA target sequence
gcacatgattttggttcgggcacg

SEQ ID NO: 134298 - DNA, 24 bp, Artificial sequence
  SiRNA target sequence
cacatgattttggttcgggcacga

SEQ ID NO: 134299 - DNA, 24 bp, Artificial sequence
  SiRNA target sequence
acatgattttggttcgggcacgag

SEQ ID NO: 134300 - DNA, 24 bp, Artificial sequence
  SiRNA target sequence
catgattttggttcgggcacgagt

SEQ ID NO: 134301 - DNA, 24 bp, Artificial sequence
  SiRNA target sequence
atgattttggttcgggcacgagtt

SEQ ID NO: 134302 - DNA, 24 bp, Artificial sequence
  SiRNA target sequence
tgattttggttcgggcacgagttc

SEQ ID NO: 134303 - DNA, 24 bp, Artificial sequence
  SiRNA target sequence
gattttggttcgggcacgagttca

SEQ ID NO: 134304 - DNA, 24 bp, Artificial sequence
  SiRNA target sequence
attttggttcgggcacgagttcaa

SEQ ID NO: 134305 - DNA, 24 bp, Artificial sequence
  SiRNA target sequence
ttttggttcgggcacgagttcaaa

SEQ ID NO: 134306 - DNA, 24 bp, Artificial sequence
  SiRNA target sequence
tttggttcgggcacgagttcaaaa

SEQ ID NO: 134307 - DNA, 24 bp, Artificial sequence
  SiRNA target sequence
ttggttcgggcacgagttcaaaat

SEQ ID NO: 134308 - DNA, 24 bp, Artificial sequence
  SiRNA target sequence
tggttcgggcacgagttcaaaatc

SEQ ID NO: 134309 - DNA, 24 bp, Artificial sequence
  SiRNA target sequence
ggttcgggcacgagttcaaaatct

SEQ ID NO: 134310 - DNA, 24 bp, Artificial sequence
  SiRNA target sequence
gttcgggcacgagttcaaaatcta

SEQ ID NO: 134311 - DNA, 24 bp, Artificial sequence
  SiRNA target sequence
ttcgggcacgagttcaaaatctac

SEQ ID NO: 134312 - DNA, 24 bp, Artificial sequence
  SiRNA target sequence
tcgggcacgagttcaaaatctaca

SEQ ID NO: 134313 - DNA, 24 bp, Artificial sequence
  SiRNA target sequence
cgggcacgagttcaaaatctacaa

SEQ ID NO: 134314 - DNA, 24 bp, Artificial sequence
  SiRNA target sequence
gggcacgagttcaaaatctacaaa

SEQ ID NO: 134315 - DNA, 24 bp, Artificial sequence
  SiRNA target sequence
ggcacgagttcaaaatctacaaaa

SEQ ID NO: 134316 - DNA, 24 bp, Artificial sequence
  SiRNA target sequence
gcacgagttcaaaatctacaaaac

SEQ ID NO: 134317 - DNA, 24 bp, Artificial sequence
  SiRNA target sequence
cacgagttcaaaatctacaaaact

SEQ ID NO: 134318 - DNA, 24 bp, Artificial sequence
  SiRNA target sequence
acgagttcaaaatctacaaaactt

SEQ ID NO: 134319 - DNA, 24 bp, Artificial sequence
  SiRNA target sequence
cgagttcaaaatctacaaaacttt

SEQ ID NO: 134320 - DNA, 24 bp, Artificial sequence
  SiRNA target sequence
gagttcaaaatctacaaaactttt

SEQ ID NO: 134321 - DNA, 24 bp, Artificial sequence
  SiRNA target sequence
agttcaaaatctacaaaacttttt

SEQ ID NO: 134322 - DNA, 24 bp, Artificial sequence
  SiRNA target sequence
gttcaaaatctacaaaactttttc

SEQ ID NO: 134323 - DNA, 24 bp, Artificial sequence
  SiRNA target sequence
ttcaaaatctacaaaactttttca

SEQ ID NO: 134324 - DNA, 24 bp, Artificial sequence
  SiRNA target sequence
tcaaaatctacaaaactttttcat

SEQ ID NO: 134325 - DNA, 24 bp, Artificial sequence
  SiRNA target sequence
caaaatctacaaaactttttcatg

SEQ ID NO: 134326 - DNA, 24 bp, Artificial sequence
  SiRNA target sequence
aaaatctacaaaactttttcatgg

SEQ ID NO: 134327 - DNA, 24 bp, Artificial sequence
  SiRNA target sequence
aaatctacaaaactttttcatggc

SEQ ID NO: 134328 - DNA, 24 bp, Artificial sequence
  SiRNA target sequence
aatctacaaaactttttcatggcg

SEQ ID NO: 134329 - DNA, 24 bp, Artificial sequence
  SiRNA target sequence
atctacaaaactttttcatggcgg

SEQ ID NO: 134330 - DNA, 24 bp, Artificial sequence
  SiRNA target sequence
tctacaaaactttttcatggcggt

SEQ ID NO: 134331 - DNA, 24 bp, Artificial sequence
  SiRNA target sequence
ctacaaaactttttcatggcggtg

SEQ ID NO: 134332 - DNA, 24 bp, Artificial sequence
  SiRNA target sequence
tacaaaactttttcatggcggtgt

SEQ ID NO: 134333 - DNA, 24 bp, Artificial sequence
  SiRNA target sequence
acaaaactttttcatggcggtgta

SEQ ID NO: 134334 - DNA, 24 bp, Artificial sequence
  SiRNA target sequence
caaaactttttcatggcggtgtac

SEQ ID NO: 134335 - DNA, 24 bp, Artificial sequence
  SiRNA target sequence
aaaactttttcatggcggtgtacg

SEQ ID NO: 134336 - DNA, 24 bp, Artificial sequence
  SiRNA target sequence
aaactttttcatggcggtgtacgc

SEQ ID NO: 134337 - DNA, 24 bp, Artificial sequence
  SiRNA target sequence
aactttttcatggcggtgtacgct

SEQ ID NO: 134338 - DNA, 24 bp, Artificial sequence
  SiRNA target sequence
actttttcatggcggtgtacgcta

SEQ ID NO: 134339 - DNA, 24 bp, Artificial sequence
  SiRNA target sequence
ctttttcatggcggtgtacgctac

SEQ ID NO: 134340 - DNA, 24 bp, Artificial sequence
  SiRNA target sequence
tttttcatggcggtgtacgctacc

SEQ ID NO: 134341 - DNA, 24 bp, Artificial sequence
  SiRNA target sequence
ttttcatggcggtgtacgctacct

SEQ ID NO: 134342 - DNA, 24 bp, Artificial sequence
  SiRNA target sequence
tttcatggcggtgtacgctacctt

SEQ ID NO: 134343 - DNA, 24 bp, Artificial sequence
  SiRNA target sequence
ttcatggcggtgtacgctaccttg

SEQ ID NO: 134344 - DNA, 24 bp, Artificial sequence
  SiRNA target sequence
tcatggcggtgtacgctaccttga

SEQ ID NO: 134345 - DNA, 24 bp, Artificial sequence
  SiRNA target sequence
catggcggtgtacgctaccttgaa

SEQ ID NO: 134346 - DNA, 24 bp, Artificial sequence
  SiRNA target sequence
atggcggtgtacgctaccttgaaa

SEQ ID NO: 134347 - DNA, 24 bp, Artificial sequence
  SiRNA target sequence
tggcggtgtacgctaccttgaaaa

SEQ ID NO: 134348 - DNA, 24 bp, Artificial sequence
  SiRNA target sequence
ggcggtgtacgctaccttgaaaaa

SEQ ID NO: 134349 - DNA, 24 bp, Artificial sequence
  SiRNA target sequence
gcggtgtacgctaccttgaaaaag

SEQ ID NO: 134350 - DNA, 24 bp, Artificial sequence
  SiRNA target sequence
cggtgtacgctaccttgaaaaagc

SEQ ID NO: 134351 - DNA, 24 bp, Artificial sequence
  SiRNA target sequence
ggtgtacgctaccttgaaaaagct

SEQ ID NO: 134352 - DNA, 24 bp, Artificial sequence
  SiRNA target sequence
gtgtacgctaccttgaaaaagctg

SEQ ID NO: 134353 - DNA, 24 bp, Artificial sequence
  SiRNA target sequence
tgtacgctaccttgaaaaagctgt

SEQ ID NO: 134354 - DNA, 24 bp, Artificial sequence
  SiRNA target sequence
gtacgctaccttgaaaaagctgtt

SEQ ID NO: 134355 - DNA, 24 bp, Artificial sequence
  SiRNA target sequence
tacgctaccttgaaaaagctgtta

SEQ ID NO: 134356 - DNA, 24 bp, Artificial sequence
  SiRNA target sequence
acgctaccttgaaaaagctgttaa

SEQ ID NO: 134357 - DNA, 24 bp, Artificial sequence
  SiRNA target sequence
cgctaccttgaaaaagctgttaat

SEQ ID NO: 134358 - DNA, 24 bp, Artificial sequence
  SiRNA target sequence
gctaccttgaaaaagctgttaatg

SEQ ID NO: 134359 - DNA, 24 bp, Artificial sequence
  SiRNA target sequence
ctaccttgaaaaagctgttaatga

SEQ ID NO: 134360 - DNA, 24 bp, Artificial sequence
  SiRNA target sequence
taccttgaaaaagctgttaatgat

SEQ ID NO: 134361 - DNA, 24 bp, Artificial sequence
  SiRNA target sequence
accttgaaaaagctgttaatgatt

SEQ ID NO: 134362 - DNA, 24 bp, Artificial sequence
  SiRNA target sequence
ccttgaaaaagctgttaatgattt

SEQ ID NO: 134363 - DNA, 24 bp, Artificial sequence
  SiRNA target sequence
cttgaaaaagctgttaatgattta

SEQ ID NO: 134364 - DNA, 24 bp, Artificial sequence
  SiRNA target sequence
ttgaaaaagctgttaatgatttag

SEQ ID NO: 134365 - DNA, 24 bp, Artificial sequence
  SiRNA target sequence
tgaaaaagctgttaatgatttaga

SEQ ID NO: 134366 - DNA, 24 bp, Artificial sequence
  SiRNA target sequence
gaaaaagctgttaatgatttagat

SEQ ID NO: 134367 - DNA, 24 bp, Artificial sequence
  SiRNA target sequence
aaaaagctgttaatgatttagata

SEQ ID NO: 134368 - DNA, 24 bp, Artificial sequence
  SiRNA target sequence
aaaagctgttaatgatttagatag

SEQ ID NO: 134369 - DNA, 24 bp, Artificial sequence
  SiRNA target sequence
aaagctgttaatgatttagataga

SEQ ID NO: 134370 - DNA, 24 bp, Artificial sequence
  SiRNA target sequence
aagctgttaatgatttagatagat

SEQ ID NO: 134371 - DNA, 24 bp, Artificial sequence
  SiRNA target sequence
agctgttaatgatttagatagatc

SEQ ID NO: 134372 - DNA, 24 bp, Artificial sequence
  SiRNA target sequence
gctgttaatgatttagatagatct

SEQ ID NO: 134373 - DNA, 24 bp, Artificial sequence
  SiRNA target sequence
ctgttaatgatttagatagatctc

SEQ ID NO: 134374 - DNA, 24 bp, Artificial sequence
  SiRNA target sequence
tgttaatgatttagatagatctca

SEQ ID NO: 134375 - DNA, 24 bp, Artificial sequence
  SiRNA target sequence
gttaatgatttagatagatctcag

SEQ ID NO: 134376 - DNA, 24 bp, Artificial sequence
  SiRNA target sequence
ttaatgatttagatagatctcagt

SEQ ID NO: 134377 - DNA, 24 bp, Artificial sequence
  SiRNA target sequence
taatgatttagatagatctcagtt

SEQ ID NO: 134378 - DNA, 24 bp, Artificial sequence
  SiRNA target sequence
aatgatttagatagatctcagttt

SEQ ID NO: 134379 - DNA, 24 bp, Artificial sequence
  SiRNA target sequence
atgatttagatagatctcagtttg

SEQ ID NO: 134380 - DNA, 24 bp, Artificial sequence
  SiRNA target sequence
tgatttagatagatctcagtttga

SEQ ID NO: 134381 - DNA, 24 bp, Artificial sequence
  SiRNA target sequence
gatttagatagatctcagtttgac

SEQ ID NO: 134382 - DNA, 24 bp, Artificial sequence
  SiRNA target sequence
atttagatagatctcagtttgact

SEQ ID NO: 134383 - DNA, 24 bp, Artificial sequence
  SiRNA target sequence
tttagatagatctcagtttgactt

SEQ ID NO: 134384 - DNA, 24 bp, Artificial sequence
  SiRNA target sequence
ttagatagatctcagtttgacttg

SEQ ID NO: 134385 - DNA, 24 bp, Artificial sequence
  SiRNA target sequence
tagatagatctcagtttgacttgg

SEQ ID NO: 134386 - DNA, 24 bp, Artificial sequence
  SiRNA target sequence
agatagatctcagtttgacttggt

SEQ ID NO: 134387 - DNA, 24 bp, Artificial sequence
  SiRNA target sequence
gatagatctcagtttgacttggta

SEQ ID NO: 134388 - DNA, 24 bp, Artificial sequence
  SiRNA target sequence
atagatctcagtttgacttggtat

SEQ ID NO: 134389 - DNA, 24 bp, Artificial sequence
  SiRNA target sequence
tagatctcagtttgacttggtatc

SEQ ID NO: 134390 - DNA, 24 bp, Artificial sequence
  SiRNA target sequence
agatctcagtttgacttggtatct

SEQ ID NO: 134391 - DNA, 24 bp, Artificial sequence
  SiRNA target sequence
gatctcagtttgacttggtatctg

SEQ ID NO: 134392 - DNA, 24 bp, Artificial sequence
  SiRNA target sequence
atctcagtttgacttggtatctga

SEQ ID NO: 134393 - DNA, 24 bp, Artificial sequence
  SiRNA target sequence
tctcagtttgacttggtatctgaa

SEQ ID NO: 134394 - DNA, 24 bp, Artificial sequence
  SiRNA target sequence
ctcagtttgacttggtatctgaag

SEQ ID NO: 134395 - DNA, 24 bp, Artificial sequence
  SiRNA target sequence
tcagtttgacttggtatctgaagc

SEQ ID NO: 134396 - DNA, 24 bp, Artificial sequence
  SiRNA target sequence
cagtttgacttggtatctgaagca

SEQ ID NO: 134397 - DNA, 24 bp, Artificial sequence
  SiRNA target sequence
agtttgacttggtatctgaagcat

SEQ ID NO: 134398 - DNA, 24 bp, Artificial sequence
  SiRNA target sequence
gtttgacttggtatctgaagcatt

SEQ ID NO: 134399 - DNA, 24 bp, Artificial sequence
  SiRNA target sequence
tttgacttggtatctgaagcatta

SEQ ID NO: 134400 - DNA, 24 bp, Artificial sequence
  SiRNA target sequence
ttgacttggtatctgaagcattaa

SEQ ID NO: 134401 - DNA, 24 bp, Artificial sequence
  SiRNA target sequence
tgacttggtatctgaagcattaag

SEQ ID NO: 134402 - DNA, 24 bp, Artificial sequence
  SiRNA target sequence
gacttggtatctgaagcattaagt

SEQ ID NO: 134403 - DNA, 24 bp, Artificial sequence
  SiRNA target sequence
acttggtatctgaagcattaagtg

SEQ ID NO: 134404 - DNA, 24 bp, Artificial sequence
  SiRNA target sequence
cttggtatctgaagcattaagtga

SEQ ID NO: 134405 - DNA, 24 bp, Artificial sequence
  SiRNA target sequence
ttggtatctgaagcattaagtgaa

SEQ ID NO: 134406 - DNA, 24 bp, Artificial sequence
  SiRNA target sequence
tggtatctgaagcattaagtgaac

SEQ ID NO: 134407 - DNA, 24 bp, Artificial sequence
  SiRNA target sequence
ggtatctgaagcattaagtgaacg

SEQ ID NO: 134408 - DNA, 24 bp, Artificial sequence
  SiRNA target sequence
gtatctgaagcattaagtgaacga

SEQ ID NO: 134409 - DNA, 24 bp, Artificial sequence
  SiRNA target sequence
tatctgaagcattaagtgaacgaa

SEQ ID NO: 134410 - DNA, 24 bp, Artificial sequence
  SiRNA target sequence
atctgaagcattaagtgaacgaaa

SEQ ID NO: 134411 - DNA, 24 bp, Artificial sequence
  SiRNA target sequence
tctgaagcattaagtgaacgaaaa

SEQ ID NO: 134412 - DNA, 24 bp, Artificial sequence
  SiRNA target sequence
ctgaagcattaagtgaacgaaaaa

SEQ ID NO: 134413 - DNA, 24 bp, Artificial sequence
  SiRNA target sequence
tgaagcattaagtgaacgaaaaat

SEQ ID NO: 134414 - DNA, 24 bp, Artificial sequence
  SiRNA target sequence
gaagcattaagtgaacgaaaaatt

SEQ ID NO: 134415 - DNA, 24 bp, Artificial sequence
  SiRNA target sequence
aagcattaagtgaacgaaaaattg

SEQ ID NO: 134416 - DNA, 24 bp, Artificial sequence
  SiRNA target sequence
agcattaagtgaacgaaaaattgt

SEQ ID NO: 134417 - DNA, 24 bp, Artificial sequence
  SiRNA target sequence
gcattaagtgaacgaaaaattgtt

SEQ ID NO: 134418 - DNA, 24 bp, Artificial sequence
  SiRNA target sequence
cattaagtgaacgaaaaattgtta

SEQ ID NO: 134419 - DNA, 24 bp, Artificial sequence
  SiRNA target sequence
attaagtgaacgaaaaattgttat

SEQ ID NO: 134420 - DNA, 24 bp, Artificial sequence
  SiRNA target sequence
ttaagtgaacgaaaaattgttatg

SEQ ID NO: 134421 - DNA, 24 bp, Artificial sequence
  SiRNA target sequence
taagtgaacgaaaaattgttatga

SEQ ID NO: 134422 - DNA, 24 bp, Artificial sequence
  SiRNA target sequence
aagtgaacgaaaaattgttatgaa

SEQ ID NO: 134423 - DNA, 24 bp, Artificial sequence
  SiRNA target sequence
agtgaacgaaaaattgttatgaat

SEQ ID NO: 134424 - DNA, 24 bp, Artificial sequence
  SiRNA target sequence
gtgaacgaaaaattgttatgaata

SEQ ID NO: 134425 - DNA, 24 bp, Artificial sequence
  SiRNA target sequence
tgaacgaaaaattgttatgaatat

SEQ ID NO: 134426 - DNA, 24 bp, Artificial sequence
  SiRNA target sequence
gaacgaaaaattgttatgaatatg

SEQ ID NO: 134427 - DNA, 24 bp, Artificial sequence
  SiRNA target sequence
aacgaaaaattgttatgaatatgt

SEQ ID NO: 134428 - DNA, 24 bp, Artificial sequence
  SiRNA target sequence
acgaaaaattgttatgaatatgtg

SEQ ID NO: 134429 - DNA, 24 bp, Artificial sequence
  SiRNA target sequence
cgaaaaattgttatgaatatgtgt

SEQ ID NO: 134430 - DNA, 24 bp, Artificial sequence
  SiRNA target sequence
gaaaaattgttatgaatatgtgtc

SEQ ID NO: 134431 - DNA, 24 bp, Artificial sequence
  SiRNA target sequence
aaaaattgttatgaatatgtgtcc

SEQ ID NO: 134432 - DNA, 24 bp, Artificial sequence
  SiRNA target sequence
aaaattgttatgaatatgtgtcct

SEQ ID NO: 134433 - DNA, 24 bp, Artificial sequence
  SiRNA target sequence
aaattgttatgaatatgtgtcctt

SEQ ID NO: 134434 - DNA, 24 bp, Artificial sequence
  SiRNA target sequence
aattgttatgaatatgtgtccttt

SEQ ID NO: 134435 - DNA, 24 bp, Artificial sequence
  SiRNA target sequence
attgttatgaatatgtgtcctttt

SEQ ID NO: 134436 - DNA, 24 bp, Artificial sequence
  SiRNA target sequence
ttgttatgaatatgtgtccttttc

SEQ ID NO: 134437 - DNA, 24 bp, Artificial sequence
  SiRNA target sequence
tgttatgaatatgtgtccttttct

SEQ ID NO: 134438 - DNA, 24 bp, Artificial sequence
  SiRNA target sequence
gttatgaatatgtgtccttttcta

SEQ ID NO: 134439 - DNA, 24 bp, Artificial sequence
  SiRNA target sequence
ttatgaatatgtgtccttttctag

SEQ ID NO: 134440 - DNA, 24 bp, Artificial sequence
  SiRNA target sequence
tatgaatatgtgtccttttctagt

SEQ ID NO: 134441 - DNA, 24 bp, Artificial sequence
  SiRNA target sequence
atgaatatgtgtccttttctagta

SEQ ID NO: 134442 - DNA, 24 bp, Artificial sequence
  SiRNA target sequence
tgaatatgtgtccttttctagtaa

SEQ ID NO: 134443 - DNA, 24 bp, Artificial sequence
  SiRNA target sequence
gaatatgtgtccttttctagtaag

SEQ ID NO: 134444 - DNA, 24 bp, Artificial sequence
  SiRNA target sequence
aatatgtgtccttttctagtaagg

SEQ ID NO: 134445 - DNA, 24 bp, Artificial sequence
  SiRNA target sequence
atatgtgtccttttctagtaaggt

SEQ ID NO: 134446 - DNA, 24 bp, Artificial sequence
  SiRNA target sequence
tatgtgtccttttctagtaaggtc

SEQ ID NO: 134447 - DNA, 24 bp, Artificial sequence
  SiRNA target sequence
atgtgtccttttctagtaaggtcg

SEQ ID NO: 134448 - DNA, 24 bp, Artificial sequence
  SiRNA target sequence
tgtgtccttttctagtaaggtcga

SEQ ID NO: 134449 - DNA, 24 bp, Artificial sequence
  SiRNA target sequence
gtgtccttttctagtaaggtcgat

SEQ ID NO: 134450 - DNA, 24 bp, Artificial sequence
  SiRNA target sequence
tgtccttttctagtaaggtcgatg

SEQ ID NO: 134451 - DNA, 24 bp, Artificial sequence
  SiRNA target sequence
gtccttttctagtaaggtcgatgg

SEQ ID NO: 134452 - DNA, 24 bp, Artificial sequence
  SiRNA target sequence
tccttttctagtaaggtcgatgga

SEQ ID NO: 134453 - DNA, 24 bp, Artificial sequence
  SiRNA target sequence
ccttttctagtaaggtcgatggaa

SEQ ID NO: 134454 - DNA, 24 bp, Artificial sequence
  SiRNA target sequence
cttttctagtaaggtcgatggaaa

SEQ ID NO: 134455 - DNA, 24 bp, Artificial sequence
  SiRNA target sequence
ttttctagtaaggtcgatggaaat

SEQ ID NO: 134456 - DNA, 24 bp, Artificial sequence
  SiRNA target sequence
tttctagtaaggtcgatggaaata

SEQ ID NO: 134457 - DNA, 24 bp, Artificial sequence
  SiRNA target sequence
ttctagtaaggtcgatggaaatat

SEQ ID NO: 134458 - DNA, 24 bp, Artificial sequence
  SiRNA target sequence
tctagtaaggtcgatggaaatatt

SEQ ID NO: 134459 - DNA, 24 bp, Artificial sequence
  SiRNA target sequence
ctagtaaggtcgatggaaatatta

SEQ ID NO: 134460 - DNA, 24 bp, Artificial sequence
  SiRNA target sequence
tagtaaggtcgatggaaatattat

SEQ ID NO: 134461 - DNA, 24 bp, Artificial sequence
  SiRNA target sequence
agtaaggtcgatggaaatattatt

SEQ ID NO: 134462 - DNA, 24 bp, Artificial sequence
  SiRNA target sequence
gtaaggtcgatggaaatattattt

SEQ ID NO: 134463 - DNA, 24 bp, Artificial sequence
  SiRNA target sequence
taaggtcgatggaaatattatttc

SEQ ID NO: 134464 - DNA, 24 bp, Artificial sequence
  SiRNA target sequence
aaggtcgatggaaatattatttcc

SEQ ID NO: 134465 - DNA, 24 bp, Artificial sequence
  SiRNA target sequence
aggtcgatggaaatattatttccg

SEQ ID NO: 134466 - DNA, 24 bp, Artificial sequence
  SiRNA target sequence
ggtcgatggaaatattatttccgg

SEQ ID NO: 134467 - DNA, 24 bp, Artificial sequence
  SiRNA target sequence
gtcgatggaaatattatttccggt

SEQ ID NO: 134468 - DNA, 24 bp, Artificial sequence
  SiRNA target sequence
tcgatggaaatattatttccggtt

SEQ ID NO: 134469 - DNA, 24 bp, Artificial sequence
  SiRNA target sequence
cgatggaaatattatttccggttt

SEQ ID NO: 134470 - DNA, 24 bp, Artificial sequence
  SiRNA target sequence
gatggaaatattatttccggttta

SEQ ID NO: 134471 - DNA, 24 bp, Artificial sequence
  SiRNA target sequence
atggaaatattatttccggtttat

SEQ ID NO: 134472 - DNA, 24 bp, Artificial sequence
  SiRNA target sequence
tggaaatattatttccggtttata

SEQ ID NO: 134473 - DNA, 24 bp, Artificial sequence
  SiRNA target sequence
ggaaatattatttccggtttataa

SEQ ID NO: 134474 - DNA, 24 bp, Artificial sequence
  SiRNA target sequence
gaaatattatttccggtttataaa

SEQ ID NO: 134475 - DNA, 24 bp, Artificial sequence
  SiRNA target sequence
aaatattatttccggtttataaaa

SEQ ID NO: 134476 - DNA, 24 bp, Artificial sequence
  SiRNA target sequence
aatattatttccggtttataaaag

SEQ ID NO: 134477 - DNA, 24 bp, Artificial sequence
  SiRNA target sequence
atattatttccggtttataaaagg

SEQ ID NO: 134478 - DNA, 24 bp, Artificial sequence
  SiRNA target sequence
tattatttccggtttataaaaggc

SEQ ID NO: 134479 - DNA, 24 bp, Artificial sequence
  SiRNA target sequence
attatttccggtttataaaaggct

SEQ ID NO: 134480 - DNA, 24 bp, Artificial sequence
  SiRNA target sequence
ttatttccggtttataaaaggctt

SEQ ID NO: 134481 - DNA, 24 bp, Artificial sequence
  SiRNA target sequence
tatttccggtttataaaaggcttt

SEQ ID NO: 134482 - DNA, 24 bp, Artificial sequence
  SiRNA target sequence
atttccggtttataaaaggctttt

SEQ ID NO: 134483 - DNA, 24 bp, Artificial sequence
  SiRNA target sequence
tttccggtttataaaaggctttta

SEQ ID NO: 134484 - DNA, 24 bp, Artificial sequence
  SiRNA target sequence
ttccggtttataaaaggcttttaa

SEQ ID NO: 134485 - DNA, 24 bp, Artificial sequence
  SiRNA target sequence
tccggtttataaaaggcttttaat

SEQ ID NO: 134486 - DNA, 24 bp, Artificial sequence
  SiRNA target sequence
ccggtttataaaaggcttttaatt

SEQ ID NO: 134487 - DNA, 24 bp, Artificial sequence
  SiRNA target sequence
cggtttataaaaggcttttaattc

SEQ ID NO: 134488 - DNA, 24 bp, Artificial sequence
  SiRNA target sequence
ggtttataaaaggcttttaattcc

SEQ ID NO: 134489 - DNA, 24 bp, Artificial sequence
  SiRNA target sequence
gtttataaaaggcttttaattcct

SEQ ID NO: 134490 - DNA, 24 bp, Artificial sequence
  SiRNA target sequence
tttataaaaggcttttaattcctt

SEQ ID NO: 134491 - DNA, 24 bp, Artificial sequence
  SiRNA target sequence
ttataaaaggcttttaattcctta

SEQ ID NO: 134492 - DNA, 24 bp, Artificial sequence
  SiRNA target sequence
tataaaaggcttttaattccttac

SEQ ID NO: 134493 - DNA, 24 bp, Artificial sequence
  SiRNA target sequence
ataaaaggcttttaattccttact

SEQ ID NO: 134494 - DNA, 24 bp, Artificial sequence
  SiRNA target sequence
taaaaggcttttaattccttacta

SEQ ID NO: 134495 - DNA, 24 bp, Artificial sequence
  SiRNA target sequence
aaaaggcttttaattccttactac

SEQ ID NO: 134496 - DNA, 24 bp, Artificial sequence
  SiRNA target sequence
aaaggcttttaattccttactact

SEQ ID NO: 134497 - DNA, 24 bp, Artificial sequence
  SiRNA target sequence
aaggcttttaattccttactacta

SEQ ID NO: 134498 - DNA, 24 bp, Artificial sequence
  SiRNA target sequence
aggcttttaattccttactactat

SEQ ID NO: 134499 - DNA, 24 bp, Artificial sequence
  SiRNA target sequence
ggcttttaattccttactactata

SEQ ID NO: 134500 - DNA, 24 bp, Artificial sequence
  SiRNA target sequence
gcttttaattccttactactatat

SEQ ID NO: 134501 - DNA, 24 bp, Artificial sequence
  SiRNA target sequence
cttttaattccttactactatatt

SEQ ID NO: 134502 - DNA, 24 bp, Artificial sequence
  SiRNA target sequence
ttttaattccttactactatattg

SEQ ID NO: 134503 - DNA, 24 bp, Artificial sequence
  SiRNA target sequence
tttaattccttactactatattgg

SEQ ID NO: 134504 - DNA, 24 bp, Artificial sequence
  SiRNA target sequence
ttaattccttactactatattggc

SEQ ID NO: 134505 - DNA, 24 bp, Artificial sequence
  SiRNA target sequence
taattccttactactatattggcc

SEQ ID NO: 134506 - DNA, 24 bp, Artificial sequence
  SiRNA target sequence
aattccttactactatattggcct

SEQ ID NO: 134507 - DNA, 24 bp, Artificial sequence
  SiRNA target sequence
attccttactactatattggcctt

SEQ ID NO: 134508 - DNA, 24 bp, Artificial sequence
  SiRNA target sequence
ttccttactactatattggcctta

SEQ ID NO: 134509 - DNA, 24 bp, Artificial sequence
  SiRNA target sequence
tccttactactatattggccttaa

SEQ ID NO: 134510 - DNA, 24 bp, Artificial sequence
  SiRNA target sequence
ccttactactatattggccttaaa

SEQ ID NO: 134511 - DNA, 24 bp, Artificial sequence
  SiRNA target sequence
cttactactatattggccttaaat

SEQ ID NO: 134512 - DNA, 24 bp, Artificial sequence
  SiRNA target sequence
ttactactatattggccttaaatt

SEQ ID NO: 134513 - DNA, 24 bp, Artificial sequence
  SiRNA target sequence
tactactatattggccttaaattt

SEQ ID NO: 134514 - DNA, 24 bp, Artificial sequence
  SiRNA target sequence
actactatattggccttaaatttt

SEQ ID NO: 134515 - DNA, 24 bp, Artificial sequence
  SiRNA target sequence
ctactatattggccttaaatttta

SEQ ID NO: 134516 - DNA, 24 bp, Artificial sequence
  SiRNA target sequence
tactatattggccttaaattttat

SEQ ID NO: 134517 - DNA, 24 bp, Artificial sequence
  SiRNA target sequence
actatattggccttaaattttatg

SEQ ID NO: 134518 - DNA, 24 bp, Artificial sequence
  SiRNA target sequence
ctatattggccttaaattttatga

SEQ ID NO: 134519 - DNA, 24 bp, Artificial sequence
  SiRNA target sequence
tatattggccttaaattttatgat

SEQ ID NO: 134520 - DNA, 24 bp, Artificial sequence
  SiRNA target sequence
atattggccttaaattttatgatt

SEQ ID NO: 134521 - DNA, 24 bp, Artificial sequence
  SiRNA target sequence
tattggccttaaattttatgattg

SEQ ID NO: 134522 - DNA, 24 bp, Artificial sequence
  SiRNA target sequence
attggccttaaattttatgattgg

SEQ ID NO: 134523 - DNA, 24 bp, Artificial sequence
  SiRNA target sequence
ttggccttaaattttatgattgga

SEQ ID NO: 134524 - DNA, 24 bp, Artificial sequence
  SiRNA target sequence
tggccttaaattttatgattggat

SEQ ID NO: 134525 - DNA, 24 bp, Artificial sequence
  SiRNA target sequence
ggccttaaattttatgattggatt

SEQ ID NO: 134526 - DNA, 24 bp, Artificial sequence
  SiRNA target sequence
gccttaaattttatgattggattt

SEQ ID NO: 134527 - DNA, 24 bp, Artificial sequence
  SiRNA target sequence
ccttaaattttatgattggatttc

SEQ ID NO: 134528 - DNA, 24 bp, Artificial sequence
  SiRNA target sequence
cttaaattttatgattggatttct

SEQ ID NO: 134529 - DNA, 24 bp, Artificial sequence
  SiRNA target sequence
ttaaattttatgattggatttctg

SEQ ID NO: 134530 - DNA, 24 bp, Artificial sequence
  SiRNA target sequence
taaattttatgattggatttctgg

SEQ ID NO: 134531 - DNA, 24 bp, Artificial sequence
  SiRNA target sequence
aaattttatgattggatttctggg

SEQ ID NO: 134532 - DNA, 24 bp, Artificial sequence
  SiRNA target sequence
aattttatgattggatttctgggc

SEQ ID NO: 134533 - DNA, 24 bp, Artificial sequence
  SiRNA target sequence
attttatgattggatttctgggca

SEQ ID NO: 134534 - DNA, 24 bp, Artificial sequence
  SiRNA target sequence
ttttatgattggatttctgggcaa

SEQ ID NO: 134535 - DNA, 24 bp, Artificial sequence
  SiRNA target sequence
tttatgattggatttctgggcaac

SEQ ID NO: 134536 - DNA, 24 bp, Artificial sequence
  SiRNA target sequence
ttatgattggatttctgggcaacg

SEQ ID NO: 134537 - DNA, 24 bp, Artificial sequence
  SiRNA target sequence
tatgattggatttctgggcaacgg

SEQ ID NO: 134538 - DNA, 24 bp, Artificial sequence
  SiRNA target sequence
atgattggatttctgggcaacggt

SEQ ID NO: 134539 - DNA, 24 bp, Artificial sequence
  SiRNA target sequence
tgattggatttctgggcaacggtc

SEQ ID NO: 134540 - DNA, 24 bp, Artificial sequence
  SiRNA target sequence
gattggatttctgggcaacggtcc

SEQ ID NO: 134541 - DNA, 24 bp, Artificial sequence
  SiRNA target sequence
attggatttctgggcaacggtccc

SEQ ID NO: 134542 - DNA, 24 bp, Artificial sequence
  SiRNA target sequence
ttggatttctgggcaacggtccct

SEQ ID NO: 134543 - DNA, 24 bp, Artificial sequence
  SiRNA target sequence
tggatttctgggcaacggtccctt

SEQ ID NO: 134544 - DNA, 24 bp, Artificial sequence
  SiRNA target sequence
ggatttctgggcaacggtcccttg

SEQ ID NO: 134545 - DNA, 24 bp, Artificial sequence
  SiRNA target sequence
gatttctgggcaacggtcccttgg

SEQ ID NO: 134546 - DNA, 24 bp, Artificial sequence
  SiRNA target sequence
atttctgggcaacggtcccttggg

SEQ ID NO: 134547 - DNA, 24 bp, Artificial sequence
  SiRNA target sequence
tttctgggcaacggtcccttgggc

SEQ ID NO: 134548 - DNA, 24 bp, Artificial sequence
  SiRNA target sequence
ttctgggcaacggtcccttgggcg

SEQ ID NO: 134549 - DNA, 24 bp, Artificial sequence
  SiRNA target sequence
tctgggcaacggtcccttgggcga

SEQ ID NO: 134550 - DNA, 24 bp, Artificial sequence
  SiRNA target sequence
ctgggcaacggtcccttgggcgaa

SEQ ID NO: 134551 - DNA, 24 bp, Artificial sequence
  SiRNA target sequence
tgggcaacggtcccttgggcgaag

SEQ ID NO: 134552 - DNA, 24 bp, Artificial sequence
  SiRNA target sequence
gggcaacggtcccttgggcgaagt

SEQ ID NO: 134553 - DNA, 24 bp, Artificial sequence
  SiRNA target sequence
ggcaacggtcccttgggcgaagta

SEQ ID NO: 134554 - DNA, 24 bp, Artificial sequence
  SiRNA target sequence
gcaacggtcccttgggcgaagtaa

SEQ ID NO: 134555 - DNA, 24 bp, Artificial sequence
  SiRNA target sequence
caacggtcccttgggcgaagtaaa

SEQ ID NO: 134556 - DNA, 24 bp, Artificial sequence
  SiRNA target sequence
aacggtcccttgggcgaagtaaat

SEQ ID NO: 134557 - DNA, 24 bp, Artificial sequence
  SiRNA target sequence
acggtcccttgggcgaagtaaatt

SEQ ID NO: 134558 - DNA, 24 bp, Artificial sequence
  SiRNA target sequence
cggtcccttgggcgaagtaaattt

SEQ ID NO: 134559 - DNA, 24 bp, Artificial sequence
  SiRNA target sequence
ggtcccttgggcgaagtaaatttt

SEQ ID NO: 134560 - DNA, 24 bp, Artificial sequence
  SiRNA target sequence
gtcccttgggcgaagtaaattttt

SEQ ID NO: 134561 - DNA, 24 bp, Artificial sequence
  SiRNA target sequence
tcccttgggcgaagtaaatttttg

SEQ ID NO: 134562 - DNA, 24 bp, Artificial sequence
  SiRNA target sequence
cccttgggcgaagtaaatttttgt

SEQ ID NO: 134563 - DNA, 24 bp, Artificial sequence
  SiRNA target sequence
ccttgggcgaagtaaatttttgtc

SEQ ID NO: 134564 - DNA, 24 bp, Artificial sequence
  SiRNA target sequence
cttgggcgaagtaaatttttgtcg

SEQ ID NO: 134565 - DNA, 24 bp, Artificial sequence
  SiRNA target sequence
ttgggcgaagtaaatttttgtcgc

SEQ ID NO: 134566 - DNA, 24 bp, Artificial sequence
  SiRNA target sequence
tgggcgaagtaaatttttgtcgcg

SEQ ID NO: 134567 - DNA, 24 bp, Artificial sequence
  SiRNA target sequence
gggcgaagtaaatttttgtcgcgg

SEQ ID NO: 134568 - DNA, 24 bp, Artificial sequence
  SiRNA target sequence
ggcgaagtaaatttttgtcgcggc

SEQ ID NO: 134569 - DNA, 24 bp, Artificial sequence
  SiRNA target sequence
gcgaagtaaatttttgtcgcggca

SEQ ID NO: 134570 - DNA, 24 bp, Artificial sequence
  SiRNA target sequence
cgaagtaaatttttgtcgcggcaa

SEQ ID NO: 134571 - DNA, 24 bp, Artificial sequence
  SiRNA target sequence
gaagtaaatttttgtcgcggcaac

SEQ ID NO: 134572 - DNA, 24 bp, Artificial sequence
  SiRNA target sequence
aagtaaatttttgtcgcggcaaca

SEQ ID NO: 134573 - DNA, 24 bp, Artificial sequence
  SiRNA target sequence
agtaaatttttgtcgcggcaacaa

SEQ ID NO: 134574 - DNA, 24 bp, Artificial sequence
  SiRNA target sequence
gtaaatttttgtcgcggcaacaaa

SEQ ID NO: 134575 - DNA, 24 bp, Artificial sequence
  SiRNA target sequence
taaatttttgtcgcggcaacaaac

SEQ ID NO: 134576 - DNA, 24 bp, Artificial sequence
  SiRNA target sequence
aaatttttgtcgcggcaacaaact

SEQ ID NO: 134577 - DNA, 24 bp, Artificial sequence
  SiRNA target sequence
aatttttgtcgcggcaacaaacta

SEQ ID NO: 134578 - DNA, 24 bp, Artificial sequence
  SiRNA target sequence
atttttgtcgcggcaacaaactat

SEQ ID NO: 134579 - DNA, 24 bp, Artificial sequence
  SiRNA target sequence
tttttgtcgcggcaacaaactatt

SEQ ID NO: 134580 - DNA, 24 bp, Artificial sequence
  SiRNA target sequence
ttttgtcgcggcaacaaactatta

SEQ ID NO: 134581 - DNA, 24 bp, Artificial sequence
  SiRNA target sequence
tttgtcgcggcaacaaactattac

SEQ ID NO: 134582 - DNA, 24 bp, Artificial sequence
  SiRNA target sequence
ttgtcgcggcaacaaactattaca

SEQ ID NO: 134583 - DNA, 24 bp, Artificial sequence
  SiRNA target sequence
tgtcgcggcaacaaactattacaa

SEQ ID NO: 134584 - DNA, 24 bp, Artificial sequence
  SiRNA target sequence
gtcgcggcaacaaactattacaaa

SEQ ID NO: 134585 - DNA, 24 bp, Artificial sequence
  SiRNA target sequence
tcgcggcaacaaactattacaaaa

SEQ ID NO: 134586 - DNA, 24 bp, Artificial sequence
  SiRNA target sequence
cgcggcaacaaactattacaaaat

SEQ ID NO: 134587 - DNA, 24 bp, Artificial sequence
  SiRNA target sequence
gcggcaacaaactattacaaaatt

SEQ ID NO: 134588 - DNA, 24 bp, Artificial sequence
  SiRNA target sequence
cggcaacaaactattacaaaattt

SEQ ID NO: 134589 - DNA, 24 bp, Artificial sequence
  SiRNA target sequence
ggcaacaaactattacaaaatttc

SEQ ID NO: 134590 - DNA, 24 bp, Artificial sequence
  SiRNA target sequence
gcaacaaactattacaaaatttcc

SEQ ID NO: 134591 - DNA, 24 bp, Artificial sequence
  SiRNA target sequence
caacaaactattacaaaatttcct

SEQ ID NO: 134592 - DNA, 24 bp, Artificial sequence
  SiRNA target sequence
aacaaactattacaaaatttccta

SEQ ID NO: 134593 - DNA, 24 bp, Artificial sequence
  SiRNA target sequence
acaaactattacaaaatttcctaa

SEQ ID NO: 134594 - DNA, 24 bp, Artificial sequence
  SiRNA target sequence
caaactattacaaaatttcctaat

SEQ ID NO: 134595 - DNA, 24 bp, Artificial sequence
  SiRNA target sequence
aaactattacaaaatttcctaatg

SEQ ID NO: 134596 - DNA, 24 bp, Artificial sequence
  SiRNA target sequence
aactattacaaaatttcctaatgt

SEQ ID NO: 134597 - DNA, 24 bp, Artificial sequence
  SiRNA target sequence
actattacaaaatttcctaatgtg

SEQ ID NO: 134598 - DNA, 24 bp, Artificial sequence
  SiRNA target sequence
ctattacaaaatttcctaatgtga

SEQ ID NO: 134599 - DNA, 24 bp, Artificial sequence
  SiRNA target sequence
tattacaaaatttcctaatgtgag

SEQ ID NO: 134600 - DNA, 24 bp, Artificial sequence
  SiRNA target sequence
attacaaaatttcctaatgtgaga

SEQ ID NO: 134601 - DNA, 24 bp, Artificial sequence
  SiRNA target sequence
ttacaaaatttcctaatgtgagaa

SEQ ID NO: 134602 - DNA, 24 bp, Artificial sequence
  SiRNA target sequence
tacaaaatttcctaatgtgagaaa

SEQ ID NO: 134603 - DNA, 24 bp, Artificial sequence
  SiRNA target sequence
acaaaatttcctaatgtgagaaaa

SEQ ID NO: 134604 - DNA, 24 bp, Artificial sequence
  SiRNA target sequence
caaaatttcctaatgtgagaaaaa

SEQ ID NO: 134605 - DNA, 24 bp, Artificial sequence
  SiRNA target sequence
aaaatttcctaatgtgagaaaaat

SEQ ID NO: 134606 - DNA, 24 bp, Artificial sequence
  SiRNA target sequence
aaatttcctaatgtgagaaaaatc

SEQ ID NO: 134607 - DNA, 24 bp, Artificial sequence
  SiRNA target sequence
aatttcctaatgtgagaaaaatcg

SEQ ID NO: 134608 - DNA, 24 bp, Artificial sequence
  SiRNA target sequence
atttcctaatgtgagaaaaatcga

SEQ ID NO: 134609 - DNA, 24 bp, Artificial sequence
  SiRNA target sequence
tttcctaatgtgagaaaaatcgac

SEQ ID NO: 134610 - DNA, 24 bp, Artificial sequence
  SiRNA target sequence
ttcctaatgtgagaaaaatcgacc

SEQ ID NO: 134611 - DNA, 24 bp, Artificial sequence
  SiRNA target sequence
tcctaatgtgagaaaaatcgacct

SEQ ID NO: 134612 - DNA, 24 bp, Artificial sequence
  SiRNA target sequence
cctaatgtgagaaaaatcgacctt

SEQ ID NO: 134613 - DNA, 24 bp, Artificial sequence
  SiRNA target sequence
ctaatgtgagaaaaatcgaccttg

SEQ ID NO: 134614 - DNA, 24 bp, Artificial sequence
  SiRNA target sequence
taatgtgagaaaaatcgaccttgt

SEQ ID NO: 134615 - DNA, 24 bp, Artificial sequence
  SiRNA target sequence
aatgtgagaaaaatcgaccttgta

SEQ ID NO: 134616 - DNA, 24 bp, Artificial sequence
  SiRNA target sequence
atgtgagaaaaatcgaccttgtag

SEQ ID NO: 134617 - DNA, 24 bp, Artificial sequence
  SiRNA target sequence
tgtgagaaaaatcgaccttgtagg

SEQ ID NO: 134618 - DNA, 24 bp, Artificial sequence
  SiRNA target sequence
gtgagaaaaatcgaccttgtagga

SEQ ID NO: 134619 - DNA, 24 bp, Artificial sequence
  SiRNA target sequence
tgagaaaaatcgaccttgtaggat

SEQ ID NO: 134620 - DNA, 24 bp, Artificial sequence
  SiRNA target sequence
gagaaaaatcgaccttgtaggatc

SEQ ID NO: 134621 - DNA, 24 bp, Artificial sequence
  SiRNA target sequence
agaaaaatcgaccttgtaggatcc

SEQ ID NO: 134622 - DNA, 24 bp, Artificial sequence
  SiRNA target sequence
gaaaaatcgaccttgtaggatccg

SEQ ID NO: 134623 - DNA, 24 bp, Artificial sequence
  SiRNA target sequence
aaaaatcgaccttgtaggatccgt

SEQ ID NO: 134624 - DNA, 24 bp, Artificial sequence
  SiRNA target sequence
aaaatcgaccttgtaggatccgtt

SEQ ID NO: 134625 - DNA, 24 bp, Artificial sequence
  SiRNA target sequence
aaatcgaccttgtaggatccgttt

SEQ ID NO: 134626 - DNA, 24 bp, Artificial sequence
  SiRNA target sequence
aatcgaccttgtaggatccgtttc

SEQ ID NO: 134627 - DNA, 24 bp, Artificial sequence
  SiRNA target sequence
atcgaccttgtaggatccgtttcg

SEQ ID NO: 134628 - DNA, 24 bp, Artificial sequence
  SiRNA target sequence
tcgaccttgtaggatccgtttcgt

SEQ ID NO: 134629 - DNA, 24 bp, Artificial sequence
  SiRNA target sequence
cgaccttgtaggatccgtttcgta

SEQ ID NO: 134630 - DNA, 24 bp, Artificial sequence
  SiRNA target sequence
gaccttgtaggatccgtttcgtat

SEQ ID NO: 134631 - DNA, 24 bp, Artificial sequence
  SiRNA target sequence
accttgtaggatccgtttcgtatc

SEQ ID NO: 134632 - DNA, 24 bp, Artificial sequence
  SiRNA target sequence
ccttgtaggatccgtttcgtatcg

SEQ ID NO: 134633 - DNA, 24 bp, Artificial sequence
  SiRNA target sequence
cttgtaggatccgtttcgtatcgt

SEQ ID NO: 134634 - DNA, 24 bp, Artificial sequence
  SiRNA target sequence
ttgtaggatccgtttcgtatcgtg

SEQ ID NO: 134635 - DNA, 24 bp, Artificial sequence
  SiRNA target sequence
tgtaggatccgtttcgtatcgtga

SEQ ID NO: 134636 - DNA, 24 bp, Artificial sequence
  SiRNA target sequence
gtaggatccgtttcgtatcgtgat

SEQ ID NO: 134637 - DNA, 24 bp, Artificial sequence
  SiRNA target sequence
taggatccgtttcgtatcgtgatg

SEQ ID NO: 134638 - DNA, 24 bp, Artificial sequence
  SiRNA target sequence
aggatccgtttcgtatcgtgatgg

SEQ ID NO: 134639 - DNA, 24 bp, Artificial sequence
  SiRNA target sequence
ggatccgtttcgtatcgtgatggc

SEQ ID NO: 134640 - DNA, 24 bp, Artificial sequence
  SiRNA target sequence
gatccgtttcgtatcgtgatggcc

SEQ ID NO: 134641 - DNA, 24 bp, Artificial sequence
  SiRNA target sequence
atccgtttcgtatcgtgatggcca

SEQ ID NO: 134642 - DNA, 24 bp, Artificial sequence
  SiRNA target sequence
tccgtttcgtatcgtgatggccaa

SEQ ID NO: 134643 - DNA, 24 bp, Artificial sequence
  SiRNA target sequence
ccgtttcgtatcgtgatggccaat

SEQ ID NO: 134644 - DNA, 24 bp, Artificial sequence
  SiRNA target sequence
cgtttcgtatcgtgatggccaatt

SEQ ID NO: 134645 - DNA, 24 bp, Artificial sequence
  SiRNA target sequence
gtttcgtatcgtgatggccaattt

SEQ ID NO: 134646 - DNA, 24 bp, Artificial sequence
  SiRNA target sequence
tttcgtatcgtgatggccaatttt

SEQ ID NO: 134647 - DNA, 24 bp, Artificial sequence
  SiRNA target sequence
ttcgtatcgtgatggccaatttta

SEQ ID NO: 134648 - DNA, 24 bp, Artificial sequence
  SiRNA target sequence
tcgtatcgtgatggccaattttat

SEQ ID NO: 134649 - DNA, 24 bp, Artificial sequence
  SiRNA target sequence
cgtatcgtgatggccaattttatg

SEQ ID NO: 134650 - DNA, 24 bp, Artificial sequence
  SiRNA target sequence
gtatcgtgatggccaattttatga

SEQ ID NO: 134651 - DNA, 24 bp, Artificial sequence
  SiRNA target sequence
tatcgtgatggccaattttatgat

SEQ ID NO: 134652 - DNA, 24 bp, Artificial sequence
  SiRNA target sequence
atcgtgatggccaattttatgatg

SEQ ID NO: 134653 - DNA, 24 bp, Artificial sequence
  SiRNA target sequence
tcgtgatggccaattttatgatgc

SEQ ID NO: 134654 - DNA, 24 bp, Artificial sequence
  SiRNA target sequence
cgtgatggccaattttatgatgct

SEQ ID NO: 134655 - DNA, 24 bp, Artificial sequence
  SiRNA target sequence
gtgatggccaattttatgatgcta

SEQ ID NO: 134656 - DNA, 24 bp, Artificial sequence
  SiRNA target sequence
tgatggccaattttatgatgctaa

SEQ ID NO: 134657 - DNA, 24 bp, Artificial sequence
  SiRNA target sequence
gatggccaattttatgatgctaaa

SEQ ID NO: 134658 - DNA, 24 bp, Artificial sequence
  SiRNA target sequence
atggccaattttatgatgctaaat

SEQ ID NO: 134659 - DNA, 24 bp, Artificial sequence
  SiRNA target sequence
tggccaattttatgatgctaaata

SEQ ID NO: 134660 - DNA, 24 bp, Artificial sequence
  SiRNA target sequence
ggccaattttatgatgctaaatac

SEQ ID NO: 134661 - DNA, 24 bp, Artificial sequence
  SiRNA target sequence
gccaattttatgatgctaaataca

SEQ ID NO: 134662 - DNA, 24 bp, Artificial sequence
  SiRNA target sequence
ccaattttatgatgctaaatacaa

SEQ ID NO: 134663 - DNA, 24 bp, Artificial sequence
  SiRNA target sequence
caattttatgatgctaaatacaat

SEQ ID NO: 134664 - DNA, 24 bp, Artificial sequence
  SiRNA target sequence
aattttatgatgctaaatacaatg

SEQ ID NO: 134665 - DNA, 24 bp, Artificial sequence
  SiRNA target sequence
attttatgatgctaaatacaatgt

SEQ ID NO: 134666 - DNA, 24 bp, Artificial sequence
  SiRNA target sequence
ttttatgatgctaaatacaatgtt

SEQ ID NO: 134667 - DNA, 24 bp, Artificial sequence
  SiRNA target sequence
tttatgatgctaaatacaatgttc

SEQ ID NO: 134668 - DNA, 24 bp, Artificial sequence
  SiRNA target sequence
ttatgatgctaaatacaatgttct

SEQ ID NO: 134669 - DNA, 24 bp, Artificial sequence
  SiRNA target sequence
tatgatgctaaatacaatgttcta

SEQ ID NO: 134670 - DNA, 24 bp, Artificial sequence
  SiRNA target sequence
atgatgctaaatacaatgttctat

SEQ ID NO: 134671 - DNA, 24 bp, Artificial sequence
  SiRNA target sequence
tgatgctaaatacaatgttctatt

SEQ ID NO: 134672 - DNA, 24 bp, Artificial sequence
  SiRNA target sequence
gatgctaaatacaatgttctattg

SEQ ID NO: 134673 - DNA, 24 bp, Artificial sequence
  SiRNA target sequence
atgctaaatacaatgttctattgg

SEQ ID NO: 134674 - DNA, 24 bp, Artificial sequence
  SiRNA target sequence
tgctaaatacaatgttctattggg

SEQ ID NO: 134675 - DNA, 24 bp, Artificial sequence
  SiRNA target sequence
gctaaatacaatgttctattgggt

SEQ ID NO: 134676 - DNA, 24 bp, Artificial sequence
  SiRNA target sequence
ctaaatacaatgttctattgggtg

SEQ ID NO: 134677 - DNA, 24 bp, Artificial sequence
  SiRNA target sequence
taaatacaatgttctattgggtgt

SEQ ID NO: 134678 - DNA, 24 bp, Artificial sequence
  SiRNA target sequence
aaatacaatgttctattgggtgtc

SEQ ID NO: 134679 - DNA, 24 bp, Artificial sequence
  SiRNA target sequence
aatacaatgttctattgggtgtca

SEQ ID NO: 134680 - DNA, 24 bp, Artificial sequence
  SiRNA target sequence
atacaatgttctattgggtgtcac

SEQ ID NO: 134681 - DNA, 24 bp, Artificial sequence
  SiRNA target sequence
tacaatgttctattgggtgtcaca

SEQ ID NO: 134682 - DNA, 24 bp, Artificial sequence
  SiRNA target sequence
acaatgttctattgggtgtcacag

SEQ ID NO: 134683 - DNA, 24 bp, Artificial sequence
  SiRNA target sequence
caatgttctattgggtgtcacagc

SEQ ID NO: 134684 - DNA, 24 bp, Artificial sequence
  SiRNA target sequence
aatgttctattgggtgtcacagct

SEQ ID NO: 134685 - DNA, 24 bp, Artificial sequence
  SiRNA target sequence
atgttctattgggtgtcacagcta

SEQ ID NO: 134686 - DNA, 24 bp, Artificial sequence
  SiRNA target sequence
tgttctattgggtgtcacagctac

SEQ ID NO: 134687 - DNA, 24 bp, Artificial sequence
  SiRNA target sequence
gttctattgggtgtcacagctacc

SEQ ID NO: 134688 - DNA, 24 bp, Artificial sequence
  SiRNA target sequence
ttctattgggtgtcacagctacct

SEQ ID NO: 134689 - DNA, 24 bp, Artificial sequence
  SiRNA target sequence
tctattgggtgtcacagctaccta

SEQ ID NO: 134690 - DNA, 24 bp, Artificial sequence
  SiRNA target sequence
ctattgggtgtcacagctacctac

SEQ ID NO: 134691 - DNA, 24 bp, Artificial sequence
  SiRNA target sequence
tattgggtgtcacagctacctact

SEQ ID NO: 134692 - DNA, 24 bp, Artificial sequence
  SiRNA target sequence
attgggtgtcacagctacctacta

SEQ ID NO: 134693 - DNA, 24 bp, Artificial sequence
  SiRNA target sequence
ttgggtgtcacagctacctactat

SEQ ID NO: 134694 - DNA, 24 bp, Artificial sequence
  SiRNA target sequence
tgggtgtcacagctacctactatg

SEQ ID NO: 134695 - DNA, 24 bp, Artificial sequence
  SiRNA target sequence
gggtgtcacagctacctactatgg

SEQ ID NO: 134696 - DNA, 24 bp, Artificial sequence
  SiRNA target sequence
ggtgtcacagctacctactatgga

SEQ ID NO: 134697 - DNA, 24 bp, Artificial sequence
  SiRNA target sequence
gtgtcacagctacctactatggag

SEQ ID NO: 134698 - DNA, 24 bp, Artificial sequence
  SiRNA target sequence
tgtcacagctacctactatggagc

SEQ ID NO: 134699 - DNA, 24 bp, Artificial sequence
  SiRNA target sequence
gtcacagctacctactatggagct

SEQ ID NO: 134700 - DNA, 24 bp, Artificial sequence
  SiRNA target sequence
tcacagctacctactatggagctg

SEQ ID NO: 134701 - DNA, 24 bp, Artificial sequence
  SiRNA target sequence
cacagctacctactatggagctgt

SEQ ID NO: 134702 - DNA, 24 bp, Artificial sequence
  SiRNA target sequence
acagctacctactatggagctgtt

SEQ ID NO: 134703 - DNA, 24 bp, Artificial sequence
  SiRNA target sequence
cagctacctactatggagctgttg

SEQ ID NO: 134704 - DNA, 24 bp, Artificial sequence
  SiRNA target sequence
agctacctactatggagctgttgt

SEQ ID NO: 134705 - DNA, 24 bp, Artificial sequence
  SiRNA target sequence
gctacctactatggagctgttgta

SEQ ID NO: 134706 - DNA, 24 bp, Artificial sequence
  SiRNA target sequence
ctacctactatggagctgttgtat

SEQ ID NO: 134707 - DNA, 24 bp, Artificial sequence
  SiRNA target sequence
tacctactatggagctgttgtatt

SEQ ID NO: 134708 - DNA, 24 bp, Artificial sequence
  SiRNA target sequence
acctactatggagctgttgtatta

SEQ ID NO: 134709 - DNA, 24 bp, Artificial sequence
  SiRNA target sequence
cctactatggagctgttgtattaa

SEQ ID NO: 134710 - DNA, 24 bp, Artificial sequence
  SiRNA target sequence
ctactatggagctgttgtattaaa

SEQ ID NO: 134711 - DNA, 24 bp, Artificial sequence
  SiRNA target sequence
tactatggagctgttgtattaaat

SEQ ID NO: 134712 - DNA, 24 bp, Artificial sequence
  SiRNA target sequence
actatggagctgttgtattaaatc

SEQ ID NO: 134713 - DNA, 24 bp, Artificial sequence
  SiRNA target sequence
ctatggagctgttgtattaaatca

SEQ ID NO: 134714 - DNA, 24 bp, Artificial sequence
  SiRNA target sequence
tatggagctgttgtattaaatcat

SEQ ID NO: 134715 - DNA, 24 bp, Artificial sequence
  SiRNA target sequence
atggagctgttgtattaaatcatg

SEQ ID NO: 134716 - DNA, 24 bp, Artificial sequence
  SiRNA target sequence
tggagctgttgtattaaatcatgc

SEQ ID NO: 134717 - DNA, 24 bp, Artificial sequence
  SiRNA target sequence
ggagctgttgtattaaatcatgca

SEQ ID NO: 134718 - DNA, 24 bp, Artificial sequence
  SiRNA target sequence
gagctgttgtattaaatcatgcaa

SEQ ID NO: 134719 - DNA, 24 bp, Artificial sequence
  SiRNA target sequence
agctgttgtattaaatcatgcaaa

SEQ ID NO: 134720 - DNA, 24 bp, Artificial sequence
  SiRNA target sequence
gctgttgtattaaatcatgcaaaa

SEQ ID NO: 134721 - DNA, 24 bp, Artificial sequence
  SiRNA target sequence
ctgttgtattaaatcatgcaaaat

SEQ ID NO: 134722 - DNA, 24 bp, Artificial sequence
  SiRNA target sequence
tgttgtattaaatcatgcaaaatt

SEQ ID NO: 134723 - DNA, 24 bp, Artificial sequence
  SiRNA target sequence
gttgtattaaatcatgcaaaattc

SEQ ID NO: 134724 - DNA, 24 bp, Artificial sequence
  SiRNA target sequence
ttgtattaaatcatgcaaaattct

SEQ ID NO: 134725 - DNA, 24 bp, Artificial sequence
  SiRNA target sequence
tgtattaaatcatgcaaaattctt

SEQ ID NO: 134726 - DNA, 24 bp, Artificial sequence
  SiRNA target sequence
gtattaaatcatgcaaaattcttg

SEQ ID NO: 134727 - DNA, 24 bp, Artificial sequence
  SiRNA target sequence
tattaaatcatgcaaaattcttgt

SEQ ID NO: 134728 - DNA, 24 bp, Artificial sequence
  SiRNA target sequence
attaaatcatgcaaaattcttgtc

SEQ ID NO: 134729 - DNA, 24 bp, Artificial sequence
  SiRNA target sequence
ttaaatcatgcaaaattcttgtca

SEQ ID NO: 134730 - DNA, 24 bp, Artificial sequence
  SiRNA target sequence
taaatcatgcaaaattcttgtcag

SEQ ID NO: 134731 - DNA, 24 bp, Artificial sequence
  SiRNA target sequence
aaatcatgcaaaattcttgtcagt

SEQ ID NO: 134732 - DNA, 24 bp, Artificial sequence
  SiRNA target sequence
aatcatgcaaaattcttgtcagta

SEQ ID NO: 134733 - DNA, 24 bp, Artificial sequence
  SiRNA target sequence
atcatgcaaaattcttgtcagtaa

SEQ ID NO: 134734 - DNA, 24 bp, Artificial sequence
  SiRNA target sequence
tcatgcaaaattcttgtcagtaac

SEQ ID NO: 134735 - DNA, 24 bp, Artificial sequence
  SiRNA target sequence
catgcaaaattcttgtcagtaaca

SEQ ID NO: 134736 - DNA, 24 bp, Artificial sequence
  SiRNA target sequence
atgcaaaattcttgtcagtaacaa

SEQ ID NO: 134737 - DNA, 24 bp, Artificial sequence
  SiRNA target sequence
tgcaaaattcttgtcagtaacaaa

SEQ ID NO: 134738 - DNA, 24 bp, Artificial sequence
  SiRNA target sequence
gcaaaattcttgtcagtaacaaaa

SEQ ID NO: 134739 - DNA, 24 bp, Artificial sequence
  SiRNA target sequence
caaaattcttgtcagtaacaaaag

SEQ ID NO: 134740 - DNA, 24 bp, Artificial sequence
  SiRNA target sequence
aaaattcttgtcagtaacaaaaga

SEQ ID NO: 134741 - DNA, 24 bp, Artificial sequence
  SiRNA target sequence
aaattcttgtcagtaacaaaagat

SEQ ID NO: 134742 - DNA, 24 bp, Artificial sequence
  SiRNA target sequence
aattcttgtcagtaacaaaagatg

SEQ ID NO: 134743 - DNA, 24 bp, Artificial sequence
  SiRNA target sequence
attcttgtcagtaacaaaagatgg

SEQ ID NO: 134744 - DNA, 24 bp, Artificial sequence
  SiRNA target sequence
ttcttgtcagtaacaaaagatggc

SEQ ID NO: 134745 - DNA, 24 bp, Artificial sequence
  SiRNA target sequence
tcttgtcagtaacaaaagatggcg

SEQ ID NO: 134746 - DNA, 24 bp, Artificial sequence
  SiRNA target sequence
cttgtcagtaacaaaagatggcga

SEQ ID NO: 134747 - DNA, 24 bp, Artificial sequence
  SiRNA target sequence
ttgtcagtaacaaaagatggcgat

SEQ ID NO: 134748 - DNA, 24 bp, Artificial sequence
  SiRNA target sequence
tgtcagtaacaaaagatggcgata

SEQ ID NO: 134749 - DNA, 24 bp, Artificial sequence
  SiRNA target sequence
gtcagtaacaaaagatggcgataa

SEQ ID NO: 134750 - DNA, 24 bp, Artificial sequence
  SiRNA target sequence
tcagtaacaaaagatggcgataaa

SEQ ID NO: 134751 - DNA, 24 bp, Artificial sequence
  SiRNA target sequence
cagtaacaaaagatggcgataaaa

SEQ ID NO: 134752 - DNA, 24 bp, Artificial sequence
  SiRNA target sequence
agtaacaaaagatggcgataaaat

SEQ ID NO: 134753 - DNA, 24 bp, Artificial sequence
  SiRNA target sequence
gtaacaaaagatggcgataaaatt

SEQ ID NO: 134754 - DNA, 24 bp, Artificial sequence
  SiRNA target sequence
taacaaaagatggcgataaaatta

SEQ ID NO: 134755 - DNA, 24 bp, Artificial sequence
  SiRNA target sequence
aacaaaagatggcgataaaattaa

SEQ ID NO: 134756 - DNA, 24 bp, Artificial sequence
  SiRNA target sequence
acaaaagatggcgataaaattaat

SEQ ID NO: 134757 - DNA, 24 bp, Artificial sequence
  SiRNA target sequence
caaaagatggcgataaaattaatg

SEQ ID NO: 134758 - DNA, 24 bp, Artificial sequence
  SiRNA target sequence
aaaagatggcgataaaattaatgg

SEQ ID NO: 134759 - DNA, 24 bp, Artificial sequence
  SiRNA target sequence
aaagatggcgataaaattaatgga

SEQ ID NO: 134760 - DNA, 24 bp, Artificial sequence
  SiRNA target sequence
aagatggcgataaaattaatggaa

SEQ ID NO: 134761 - DNA, 24 bp, Artificial sequence
  SiRNA target sequence
agatggcgataaaattaatggaat

SEQ ID NO: 134762 - DNA, 24 bp, Artificial sequence
  SiRNA target sequence
gatggcgataaaattaatggaatt

SEQ ID NO: 134763 - DNA, 24 bp, Artificial sequence
  SiRNA target sequence
atggcgataaaattaatggaatta

SEQ ID NO: 134764 - DNA, 24 bp, Artificial sequence
  SiRNA target sequence
tggcgataaaattaatggaattaa

SEQ ID NO: 134765 - DNA, 24 bp, Artificial sequence
  SiRNA target sequence
ggcgataaaattaatggaattaaa

SEQ ID NO: 134766 - DNA, 24 bp, Artificial sequence
  SiRNA target sequence
gcgataaaattaatggaattaaat

SEQ ID NO: 134767 - DNA, 24 bp, Artificial sequence
  SiRNA target sequence
cgataaaattaatggaattaaatg

SEQ ID NO: 134768 - DNA, 24 bp, Artificial sequence
  SiRNA target sequence
gataaaattaatggaattaaatgt

SEQ ID NO: 134769 - DNA, 24 bp, Artificial sequence
  SiRNA target sequence
ataaaattaatggaattaaatgtc

SEQ ID NO: 134770 - DNA, 24 bp, Artificial sequence
  SiRNA target sequence
taaaattaatggaattaaatgtca

SEQ ID NO: 134771 - DNA, 24 bp, Artificial sequence
  SiRNA target sequence
aaaattaatggaattaaatgtcaa

SEQ ID NO: 134772 - DNA, 24 bp, Artificial sequence
  SiRNA target sequence
aaattaatggaattaaatgtcaag

SEQ ID NO: 134773 - DNA, 24 bp, Artificial sequence
  SiRNA target sequence
aattaatggaattaaatgtcaaga

SEQ ID NO: 134774 - DNA, 24 bp, Artificial sequence
  SiRNA target sequence
attaatggaattaaatgtcaagat

SEQ ID NO: 134775 - DNA, 24 bp, Artificial sequence
  SiRNA target sequence
ttaatggaattaaatgtcaagatt

SEQ ID NO: 134776 - DNA, 24 bp, Artificial sequence
  SiRNA target sequence
taatggaattaaatgtcaagattc

SEQ ID NO: 134777 - DNA, 24 bp, Artificial sequence
  SiRNA target sequence
aatggaattaaatgtcaagattca

SEQ ID NO: 134778 - DNA, 24 bp, Artificial sequence
  SiRNA target sequence
atggaattaaatgtcaagattcaa

SEQ ID NO: 134779 - DNA, 24 bp, Artificial sequence
  SiRNA target sequence
tggaattaaatgtcaagattcaat

SEQ ID NO: 134780 - DNA, 24 bp, Artificial sequence
  SiRNA target sequence
ggaattaaatgtcaagattcaata

SEQ ID NO: 134781 - DNA, 24 bp, Artificial sequence
  SiRNA target sequence
gaattaaatgtcaagattcaataa

SEQ ID NO: 134782 - DNA, 24 bp, Artificial sequence
  SiRNA target sequence
aattaaatgtcaagattcaataaa

SEQ ID NO: 134783 - DNA, 24 bp, Artificial sequence
  SiRNA target sequence
attaaatgtcaagattcaataaat

SEQ ID NO: 134784 - DNA, 24 bp, Artificial sequence
  SiRNA target sequence
ttaaatgtcaagattcaataaata

SEQ ID NO: 134785 - DNA, 24 bp, Artificial sequence
  SiRNA target sequence
taaatgtcaagattcaataaataa

SEQ ID NO: 134786 - DNA, 24 bp, Artificial sequence
  SiRNA target sequence
aaatgtcaagattcaataaataat

SEQ ID NO: 134787 - DNA, 24 bp, Artificial sequence
  SiRNA target sequence
aatgtcaagattcaataaataatg

SEQ ID NO: 134788 - DNA, 24 bp, Artificial sequence
  SiRNA target sequence
atgtcaagattcaataaataatga

SEQ ID NO: 134789 - DNA, 24 bp, Artificial sequence
  SiRNA target sequence
tgtcaagattcaataaataatgaa

SEQ ID NO: 134790 - DNA, 24 bp, Artificial sequence
  SiRNA target sequence
gtcaagattcaataaataatgaaa

SEQ ID NO: 134791 - DNA, 24 bp, Artificial sequence
  SiRNA target sequence
tcaagattcaataaataatgaaaa

SEQ ID NO: 134792 - DNA, 24 bp, Artificial sequence
  SiRNA target sequence
caagattcaataaataatgaaaaa

SEQ ID NO: 134793 - DNA, 24 bp, Artificial sequence
  SiRNA target sequence
aagattcaataaataatgaaaaat

SEQ ID NO: 134794 - DNA, 24 bp, Artificial sequence
  SiRNA target sequence
agattcaataaataatgaaaaatt

SEQ ID NO: 134795 - DNA, 24 bp, Artificial sequence
  SiRNA target sequence
gattcaataaataatgaaaaattt

SEQ ID NO: 134796 - DNA, 24 bp, Artificial sequence
  SiRNA target sequence
attcaataaataatgaaaaatttt

SEQ ID NO: 134797 - DNA, 24 bp, Artificial sequence
  SiRNA target sequence
ttcaataaataatgaaaaattttt

SEQ ID NO: 134798 - DNA, 24 bp, Artificial sequence
  SiRNA target sequence
tcaataaataatgaaaaattttta

SEQ ID NO: 134799 - DNA, 24 bp, Artificial sequence
  SiRNA target sequence
caataaataatgaaaaatttttaa

SEQ ID NO: 134800 - DNA, 24 bp, Artificial sequence
  SiRNA target sequence
aataaataatgaaaaatttttaat

SEQ ID NO: 134801 - DNA, 24 bp, Artificial sequence
  SiRNA target sequence
ataaataatgaaaaatttttaatt

SEQ ID NO: 134802 - DNA, 24 bp, Artificial sequence
  SiRNA target sequence
taaataatgaaaaatttttaatta

SEQ ID NO: 134803 - DNA, 24 bp, Artificial sequence
  SiRNA target sequence
aaataatgaaaaatttttaattag

SEQ ID NO: 134804 - DNA, 24 bp, Artificial sequence
  SiRNA target sequence
aataatgaaaaatttttaattagg

SEQ ID NO: 134805 - DNA, 24 bp, Artificial sequence
  SiRNA target sequence
ataatgaaaaatttttaattaggt

SEQ ID NO: 134806 - DNA, 24 bp, Artificial sequence
  SiRNA target sequence
taatgaaaaatttttaattaggtg

SEQ ID NO: 134807 - DNA, 24 bp, Artificial sequence
  SiRNA target sequence
aatgaaaaatttttaattaggtgt

SEQ ID NO: 134808 - DNA, 24 bp, Artificial sequence
  SiRNA target sequence
atgaaaaatttttaattaggtgta

SEQ ID NO: 134809 - DNA, 24 bp, Artificial sequence
  SiRNA target sequence
tgaaaaatttttaattaggtgtaa

SEQ ID NO: 134810 - DNA, 24 bp, Artificial sequence
  SiRNA target sequence
gaaaaatttttaattaggtgtaaa

SEQ ID NO: 134811 - DNA, 24 bp, Artificial sequence
  SiRNA target sequence
aaaaatttttaattaggtgtaaag

SEQ ID NO: 134812 - DNA, 24 bp, Artificial sequence
  SiRNA target sequence
aaaatttttaattaggtgtaaagt

SEQ ID NO: 134813 - DNA, 24 bp, Artificial sequence
  SiRNA target sequence
aaatttttaattaggtgtaaagtt

SEQ ID NO: 134814 - DNA, 24 bp, Artificial sequence
  SiRNA target sequence
aatttttaattaggtgtaaagttt

SEQ ID NO: 134815 - DNA, 24 bp, Artificial sequence
  SiRNA target sequence
atttttaattaggtgtaaagtttt

SEQ ID NO: 134816 - DNA, 24 bp, Artificial sequence
  SiRNA target sequence
tttttaattaggtgtaaagtttta

SEQ ID NO: 134817 - DNA, 24 bp, Artificial sequence
  SiRNA target sequence
ttttaattaggtgtaaagttttaa

SEQ ID NO: 134818 - DNA, 24 bp, Artificial sequence
  SiRNA target sequence
tttaattaggtgtaaagttttaat

SEQ ID NO: 134819 - DNA, 24 bp, Artificial sequence
  SiRNA target sequence
ttaattaggtgtaaagttttaata

SEQ ID NO: 134820 - DNA, 24 bp, Artificial sequence
  SiRNA target sequence
taattaggtgtaaagttttaataa

SEQ ID NO: 134821 - DNA, 24 bp, Artificial sequence
  SiRNA target sequence
aattaggtgtaaagttttaataaa

SEQ ID NO: 134822 - DNA, 24 bp, Artificial sequence
  SiRNA target sequence
attaggtgtaaagttttaataaat

SEQ ID NO: 134823 - DNA, 24 bp, Artificial sequence
  SiRNA target sequence
ttaggtgtaaagttttaataaata

SEQ ID NO: 134824 - DNA, 24 bp, Artificial sequence
  SiRNA target sequence
taggtgtaaagttttaataaatac

SEQ ID NO: 134825 - DNA, 24 bp, Artificial sequence
  SiRNA target sequence
aggtgtaaagttttaataaatact

SEQ ID NO: 134826 - DNA, 24 bp, Artificial sequence
  SiRNA target sequence
ggtgtaaagttttaataaatactt

SEQ ID NO: 134827 - DNA, 24 bp, Artificial sequence
  SiRNA target sequence
gtgtaaagttttaataaatacttc

SEQ ID NO: 134828 - DNA, 24 bp, Artificial sequence
  SiRNA target sequence
tgtaaagttttaataaatacttct

SEQ ID NO: 134829 - DNA, 24 bp, Artificial sequence
  SiRNA target sequence
gtaaagttttaataaatacttctg

SEQ ID NO: 134830 - DNA, 24 bp, Artificial sequence
  SiRNA target sequence
taaagttttaataaatacttctgg

SEQ ID NO: 134831 - DNA, 24 bp, Artificial sequence
  SiRNA target sequence
aaagttttaataaatacttctggc

SEQ ID NO: 134832 - DNA, 24 bp, Artificial sequence
  SiRNA target sequence
aagttttaataaatacttctggcc

SEQ ID NO: 134833 - DNA, 24 bp, Artificial sequence
  SiRNA target sequence
agttttaataaatacttctggccc

SEQ ID NO: 134834 - DNA, 24 bp, Artificial sequence
  SiRNA target sequence
gttttaataaatacttctggccct

SEQ ID NO: 134835 - DNA, 24 bp, Artificial sequence
  SiRNA target sequence
ttttaataaatacttctggccctt

SEQ ID NO: 134836 - DNA, 24 bp, Artificial sequence
  SiRNA target sequence
tttaataaatacttctggcccttt

SEQ ID NO: 134837 - DNA, 24 bp, Artificial sequence
  SiRNA target sequence
ttaataaatacttctggccctttt

SEQ ID NO: 134838 - DNA, 24 bp, Artificial sequence
  SiRNA target sequence
taataaatacttctggcccttttg

SEQ ID NO: 134839 - DNA, 24 bp, Artificial sequence
  SiRNA target sequence
aataaatacttctggcccttttgc

SEQ ID NO: 134840 - DNA, 24 bp, Artificial sequence
  SiRNA target sequence
ataaatacttctggcccttttgct

SEQ ID NO: 134841 - DNA, 24 bp, Artificial sequence
  SiRNA target sequence
taaatacttctggcccttttgctg

SEQ ID NO: 134842 - DNA, 24 bp, Artificial sequence
  SiRNA target sequence
aaatacttctggcccttttgctga

SEQ ID NO: 134843 - DNA, 24 bp, Artificial sequence
  SiRNA target sequence
aatacttctggcccttttgctgac

SEQ ID NO: 134844 - DNA, 24 bp, Artificial sequence
  SiRNA target sequence
atacttctggcccttttgctgacg

SEQ ID NO: 134845 - DNA, 24 bp, Artificial sequence
  SiRNA target sequence
tacttctggcccttttgctgacga

SEQ ID NO: 134846 - DNA, 24 bp, Artificial sequence
  SiRNA target sequence
acttctggcccttttgctgacgag

SEQ ID NO: 134847 - DNA, 24 bp, Artificial sequence
  SiRNA target sequence
cttctggcccttttgctgacgagg

SEQ ID NO: 134848 - DNA, 24 bp, Artificial sequence
  SiRNA target sequence
ttctggcccttttgctgacgaggt

SEQ ID NO: 134849 - DNA, 24 bp, Artificial sequence
  SiRNA target sequence
tctggcccttttgctgacgaggtt

SEQ ID NO: 134850 - DNA, 24 bp, Artificial sequence
  SiRNA target sequence
ctggcccttttgctgacgaggttc

SEQ ID NO: 134851 - DNA, 24 bp, Artificial sequence
  SiRNA target sequence
tggcccttttgctgacgaggttcg

SEQ ID NO: 134852 - DNA, 24 bp, Artificial sequence
  SiRNA target sequence
ggcccttttgctgacgaggttcga

SEQ ID NO: 134853 - DNA, 24 bp, Artificial sequence
  SiRNA target sequence
gcccttttgctgacgaggttcgaa

SEQ ID NO: 134854 - DNA, 24 bp, Artificial sequence
  SiRNA target sequence
cccttttgctgacgaggttcgaaa

SEQ ID NO: 134855 - DNA, 24 bp, Artificial sequence
  SiRNA target sequence
ccttttgctgacgaggttcgaaat

SEQ ID NO: 134856 - DNA, 24 bp, Artificial sequence
  SiRNA target sequence
cttttgctgacgaggttcgaaata

SEQ ID NO: 134857 - DNA, 24 bp, Artificial sequence
  SiRNA target sequence
ttttgctgacgaggttcgaaatac

SEQ ID NO: 134858 - DNA, 24 bp, Artificial sequence
  SiRNA target sequence
tttgctgacgaggttcgaaataca

SEQ ID NO: 134859 - DNA, 24 bp, Artificial sequence
  SiRNA target sequence
ttgctgacgaggttcgaaatacat

SEQ ID NO: 134860 - DNA, 24 bp, Artificial sequence
  SiRNA target sequence
tgctgacgaggttcgaaatacatc

SEQ ID NO: 134861 - DNA, 24 bp, Artificial sequence
  SiRNA target sequence
gctgacgaggttcgaaatacatca

SEQ ID NO: 134862 - DNA, 24 bp, Artificial sequence
  SiRNA target sequence
ctgacgaggttcgaaatacatcaa

SEQ ID NO: 134863 - DNA, 24 bp, Artificial sequence
  SiRNA target sequence
tgacgaggttcgaaatacatcaat

SEQ ID NO: 134864 - DNA, 24 bp, Artificial sequence
  SiRNA target sequence
gacgaggttcgaaatacatcaatt

SEQ ID NO: 134865 - DNA, 24 bp, Artificial sequence
  SiRNA target sequence
acgaggttcgaaatacatcaattg

SEQ ID NO: 134866 - DNA, 24 bp, Artificial sequence
  SiRNA target sequence
cgaggttcgaaatacatcaattga

SEQ ID NO: 134867 - DNA, 24 bp, Artificial sequence
  SiRNA target sequence
gaggttcgaaatacatcaattgaa

SEQ ID NO: 134868 - DNA, 24 bp, Artificial sequence
  SiRNA target sequence
aggttcgaaatacatcaattgaaa

SEQ ID NO: 134869 - DNA, 24 bp, Artificial sequence
  SiRNA target sequence
ggttcgaaatacatcaattgaaaa

SEQ ID NO: 134870 - DNA, 24 bp, Artificial sequence
  SiRNA target sequence
gttcgaaatacatcaattgaaaac

SEQ ID NO: 134871 - DNA, 24 bp, Artificial sequence
  SiRNA target sequence
ttcgaaatacatcaattgaaaact

SEQ ID NO: 134872 - DNA, 24 bp, Artificial sequence
  SiRNA target sequence
tcgaaatacatcaattgaaaactg

SEQ ID NO: 134873 - DNA, 24 bp, Artificial sequence
  SiRNA target sequence
cgaaatacatcaattgaaaactgt

SEQ ID NO: 134874 - DNA, 24 bp, Artificial sequence
  SiRNA target sequence
gaaatacatcaattgaaaactgtc

SEQ ID NO: 134875 - DNA, 24 bp, Artificial sequence
  SiRNA target sequence
aaatacatcaattgaaaactgtca

SEQ ID NO: 134876 - DNA, 24 bp, Artificial sequence
  SiRNA target sequence
aatacatcaattgaaaactgtcaa

SEQ ID NO: 134877 - DNA, 24 bp, Artificial sequence
  SiRNA target sequence
atacatcaattgaaaactgtcaac

SEQ ID NO: 134878 - DNA, 24 bp, Artificial sequence
  SiRNA target sequence
tacatcaattgaaaactgtcaacc

SEQ ID NO: 134879 - DNA, 24 bp, Artificial sequence
  SiRNA target sequence
acatcaattgaaaactgtcaacca

SEQ ID NO: 134880 - DNA, 24 bp, Artificial sequence
  SiRNA target sequence
catcaattgaaaactgtcaaccaa

SEQ ID NO: 134881 - DNA, 24 bp, Artificial sequence
  SiRNA target sequence
atcaattgaaaactgtcaaccaat

SEQ ID NO: 134882 - DNA, 24 bp, Artificial sequence
  SiRNA target sequence
tcaattgaaaactgtcaaccaata

SEQ ID NO: 134883 - DNA, 24 bp, Artificial sequence
  SiRNA target sequence
caattgaaaactgtcaaccaatac

SEQ ID NO: 134884 - DNA, 24 bp, Artificial sequence
  SiRNA target sequence
aattgaaaactgtcaaccaatact

SEQ ID NO: 134885 - DNA, 24 bp, Artificial sequence
  SiRNA target sequence
attgaaaactgtcaaccaatactc

SEQ ID NO: 134886 - DNA, 24 bp, Artificial sequence
  SiRNA target sequence
ttgaaaactgtcaaccaatactcc

SEQ ID NO: 134887 - DNA, 24 bp, Artificial sequence
  SiRNA target sequence
tgaaaactgtcaaccaatactcca

SEQ ID NO: 134888 - DNA, 24 bp, Artificial sequence
  SiRNA target sequence
gaaaactgtcaaccaatactccaa

SEQ ID NO: 134889 - DNA, 24 bp, Artificial sequence
  SiRNA target sequence
aaaactgtcaaccaatactccaac

SEQ ID NO: 134890 - DNA, 24 bp, Artificial sequence
  SiRNA target sequence
aaactgtcaaccaatactccaaca

SEQ ID NO: 134891 - DNA, 24 bp, Artificial sequence
  SiRNA target sequence
aactgtcaaccaatactccaacat

SEQ ID NO: 134892 - DNA, 24 bp, Artificial sequence
  SiRNA target sequence
actgtcaaccaatactccaacata

SEQ ID NO: 134893 - DNA, 24 bp, Artificial sequence
  SiRNA target sequence
ctgtcaaccaatactccaacatag

SEQ ID NO: 134894 - DNA, 24 bp, Artificial sequence
  SiRNA target sequence
tgtcaaccaatactccaacatagt

SEQ ID NO: 134895 - DNA, 24 bp, Artificial sequence
  SiRNA target sequence
gtcaaccaatactccaacatagtt

SEQ ID NO: 134896 - DNA, 24 bp, Artificial sequence
  SiRNA target sequence
tcaaccaatactccaacatagtta

SEQ ID NO: 134897 - DNA, 24 bp, Artificial sequence
  SiRNA target sequence
caaccaatactccaacatagttat

SEQ ID NO: 134898 - DNA, 24 bp, Artificial sequence
  SiRNA target sequence
aaccaatactccaacatagttatg

SEQ ID NO: 134899 - DNA, 24 bp, Artificial sequence
  SiRNA target sequence
accaatactccaacatagttatgg

SEQ ID NO: 134900 - DNA, 24 bp, Artificial sequence
  SiRNA target sequence
ccaatactccaacatagttatggt

SEQ ID NO: 134901 - DNA, 24 bp, Artificial sequence
  SiRNA target sequence
caatactccaacatagttatggta

SEQ ID NO: 134902 - DNA, 24 bp, Artificial sequence
  SiRNA target sequence
aatactccaacatagttatggtac

SEQ ID NO: 134903 - DNA, 24 bp, Artificial sequence
  SiRNA target sequence
atactccaacatagttatggtaca

SEQ ID NO: 134904 - DNA, 24 bp, Artificial sequence
  SiRNA target sequence
tactccaacatagttatggtacac

SEQ ID NO: 134905 - DNA, 24 bp, Artificial sequence
  SiRNA target sequence
actccaacatagttatggtacaca

SEQ ID NO: 134906 - DNA, 24 bp, Artificial sequence
  SiRNA target sequence
ctccaacatagttatggtacacat

SEQ ID NO: 134907 - DNA, 24 bp, Artificial sequence
  SiRNA target sequence
tccaacatagttatggtacacata

SEQ ID NO: 134908 - DNA, 24 bp, Artificial sequence
  SiRNA target sequence
ccaacatagttatggtacacatat

SEQ ID NO: 134909 - DNA, 24 bp, Artificial sequence
  SiRNA target sequence
caacatagttatggtacacatatt

SEQ ID NO: 134910 - DNA, 24 bp, Artificial sequence
  SiRNA target sequence
aacatagttatggtacacatattg

SEQ ID NO: 134911 - DNA, 24 bp, Artificial sequence
  SiRNA target sequence
acatagttatggtacacatattgt

SEQ ID NO: 134912 - DNA, 24 bp, Artificial sequence
  SiRNA target sequence
catagttatggtacacatattgta

SEQ ID NO: 134913 - DNA, 24 bp, Artificial sequence
  SiRNA target sequence
atagttatggtacacatattgtag

SEQ ID NO: 134914 - DNA, 24 bp, Artificial sequence
  SiRNA target sequence
tagttatggtacacatattgtagt

SEQ ID NO: 134915 - DNA, 24 bp, Artificial sequence
  SiRNA target sequence
agttatggtacacatattgtagtt

SEQ ID NO: 134916 - DNA, 24 bp, Artificial sequence
  SiRNA target sequence
gttatggtacacatattgtagttc

SEQ ID NO: 134917 - DNA, 24 bp, Artificial sequence
  SiRNA target sequence
ttatggtacacatattgtagttcc

SEQ ID NO: 134918 - DNA, 24 bp, Artificial sequence
  SiRNA target sequence
tatggtacacatattgtagttcct

SEQ ID NO: 134919 - DNA, 24 bp, Artificial sequence
  SiRNA target sequence
atggtacacatattgtagttcctg

SEQ ID NO: 134920 - DNA, 24 bp, Artificial sequence
  SiRNA target sequence
tggtacacatattgtagttcctgc

SEQ ID NO: 134921 - DNA, 24 bp, Artificial sequence
  SiRNA target sequence
ggtacacatattgtagttcctgcg

SEQ ID NO: 134922 - DNA, 24 bp, Artificial sequence
  SiRNA target sequence
gtacacatattgtagttcctgcga

SEQ ID NO: 134923 - DNA, 24 bp, Artificial sequence
  SiRNA target sequence
tacacatattgtagttcctgcgat

SEQ ID NO: 134924 - DNA, 24 bp, Artificial sequence
  SiRNA target sequence
acacatattgtagttcctgcgata

SEQ ID NO: 134925 - DNA, 24 bp, Artificial sequence
  SiRNA target sequence
cacatattgtagttcctgcgatat

SEQ ID NO: 134926 - DNA, 24 bp, Artificial sequence
  SiRNA target sequence
acatattgtagttcctgcgatatt

SEQ ID NO: 134927 - DNA, 24 bp, Artificial sequence
  SiRNA target sequence
catattgtagttcctgcgatattt

SEQ ID NO: 134928 - DNA, 24 bp, Artificial sequence
  SiRNA target sequence
atattgtagttcctgcgatatttt

SEQ ID NO: 134929 - DNA, 24 bp, Artificial sequence
  SiRNA target sequence
tattgtagttcctgcgatattttc

SEQ ID NO: 134930 - DNA, 24 bp, Artificial sequence
  SiRNA target sequence
attgtagttcctgcgatattttcg

SEQ ID NO: 134931 - DNA, 24 bp, Artificial sequence
  SiRNA target sequence
ttgtagttcctgcgatattttcgc

SEQ ID NO: 134932 - DNA, 24 bp, Artificial sequence
  SiRNA target sequence
tgtagttcctgcgatattttcgcc

SEQ ID NO: 134933 - DNA, 24 bp, Artificial sequence
  SiRNA target sequence
gtagttcctgcgatattttcgcct

SEQ ID NO: 134934 - DNA, 24 bp, Artificial sequence
  SiRNA target sequence
tagttcctgcgatattttcgccta

SEQ ID NO: 134935 - DNA, 24 bp, Artificial sequence
  SiRNA target sequence
agttcctgcgatattttcgcctaa

SEQ ID NO: 134936 - DNA, 24 bp, Artificial sequence
  SiRNA target sequence
gttcctgcgatattttcgcctaaa

SEQ ID NO: 134937 - DNA, 24 bp, Artificial sequence
  SiRNA target sequence
ttcctgcgatattttcgcctaaaa

SEQ ID NO: 134938 - DNA, 24 bp, Artificial sequence
  SiRNA target sequence
tcctgcgatattttcgcctaaaaa

SEQ ID NO: 134939 - DNA, 24 bp, Artificial sequence
  SiRNA target sequence
cctgcgatattttcgcctaaaaat

SEQ ID NO: 134940 - DNA, 24 bp, Artificial sequence
  SiRNA target sequence
ctgcgatattttcgcctaaaaata

SEQ ID NO: 134941 - DNA, 24 bp, Artificial sequence
  SiRNA target sequence
tgcgatattttcgcctaaaaatat

SEQ ID NO: 134942 - DNA, 24 bp, Artificial sequence
  SiRNA target sequence
gcgatattttcgcctaaaaatatg

SEQ ID NO: 134943 - DNA, 24 bp, Artificial sequence
  SiRNA target sequence
cgatattttcgcctaaaaatatgg

SEQ ID NO: 134944 - DNA, 24 bp, Artificial sequence
  SiRNA target sequence
gatattttcgcctaaaaatatggg

SEQ ID NO: 134945 - DNA, 24 bp, Artificial sequence
  SiRNA target sequence
atattttcgcctaaaaatatgggc

SEQ ID NO: 134946 - DNA, 24 bp, Artificial sequence
  SiRNA target sequence
tattttcgcctaaaaatatgggct

SEQ ID NO: 134947 - DNA, 24 bp, Artificial sequence
  SiRNA target sequence
attttcgcctaaaaatatgggctt

SEQ ID NO: 134948 - DNA, 24 bp, Artificial sequence
  SiRNA target sequence
ttttcgcctaaaaatatgggcttt

SEQ ID NO: 134949 - DNA, 24 bp, Artificial sequence
  SiRNA target sequence
tttcgcctaaaaatatgggctttg

SEQ ID NO: 134950 - DNA, 24 bp, Artificial sequence
  SiRNA target sequence
ttcgcctaaaaatatgggctttgt

SEQ ID NO: 134951 - DNA, 24 bp, Artificial sequence
  SiRNA target sequence
tcgcctaaaaatatgggctttgtt

SEQ ID NO: 134952 - DNA, 24 bp, Artificial sequence
  SiRNA target sequence
cgcctaaaaatatgggctttgttg

SEQ ID NO: 134953 - DNA, 24 bp, Artificial sequence
  SiRNA target sequence
gcctaaaaatatgggctttgttga

SEQ ID NO: 134954 - DNA, 24 bp, Artificial sequence
  SiRNA target sequence
cctaaaaatatgggctttgttgat

SEQ ID NO: 134955 - DNA, 24 bp, Artificial sequence
  SiRNA target sequence
ctaaaaatatgggctttgttgatc

SEQ ID NO: 134956 - DNA, 24 bp, Artificial sequence
  SiRNA target sequence
taaaaatatgggctttgttgatcc

SEQ ID NO: 134957 - DNA, 24 bp, Artificial sequence
  SiRNA target sequence
aaaaatatgggctttgttgatcca

SEQ ID NO: 134958 - DNA, 24 bp, Artificial sequence
  SiRNA target sequence
aaaatatgggctttgttgatccaa

SEQ ID NO: 134959 - DNA, 24 bp, Artificial sequence
  SiRNA target sequence
aaatatgggctttgttgatccaag

SEQ ID NO: 134960 - DNA, 24 bp, Artificial sequence
  SiRNA target sequence
aatatgggctttgttgatccaagc

SEQ ID NO: 134961 - DNA, 24 bp, Artificial sequence
  SiRNA target sequence
atatgggctttgttgatccaagca

SEQ ID NO: 134962 - DNA, 24 bp, Artificial sequence
  SiRNA target sequence
tatgggctttgttgatccaagcac

SEQ ID NO: 134963 - DNA, 24 bp, Artificial sequence
  SiRNA target sequence
atgggctttgttgatccaagcacg

SEQ ID NO: 134964 - DNA, 24 bp, Artificial sequence
  SiRNA target sequence
tgggctttgttgatccaagcacga

SEQ ID NO: 134965 - DNA, 24 bp, Artificial sequence
  SiRNA target sequence
gggctttgttgatccaagcacgag

SEQ ID NO: 134966 - DNA, 24 bp, Artificial sequence
  SiRNA target sequence
ggctttgttgatccaagcacgagt

SEQ ID NO: 134967 - DNA, 24 bp, Artificial sequence
  SiRNA target sequence
gctttgttgatccaagcacgagtg

SEQ ID NO: 134968 - DNA, 24 bp, Artificial sequence
  SiRNA target sequence
ctttgttgatccaagcacgagtga

SEQ ID NO: 134969 - DNA, 24 bp, Artificial sequence
  SiRNA target sequence
tttgttgatccaagcacgagtgat

SEQ ID NO: 134970 - DNA, 24 bp, Artificial sequence
  SiRNA target sequence
ttgttgatccaagcacgagtgatg

SEQ ID NO: 134971 - DNA, 24 bp, Artificial sequence
  SiRNA target sequence
tgttgatccaagcacgagtgatgg

SEQ ID NO: 134972 - DNA, 24 bp, Artificial sequence
  SiRNA target sequence
gttgatccaagcacgagtgatgga

SEQ ID NO: 134973 - DNA, 24 bp, Artificial sequence
  SiRNA target sequence
ttgatccaagcacgagtgatggaa

SEQ ID NO: 134974 - DNA, 24 bp, Artificial sequence
  SiRNA target sequence
tgatccaagcacgagtgatggaag

SEQ ID NO: 134975 - DNA, 24 bp, Artificial sequence
  SiRNA target sequence
gatccaagcacgagtgatggaaga

SEQ ID NO: 134976 - DNA, 24 bp, Artificial sequence
  SiRNA target sequence
atccaagcacgagtgatggaagaa

SEQ ID NO: 134977 - DNA, 24 bp, Artificial sequence
  SiRNA target sequence
tccaagcacgagtgatggaagaat

SEQ ID NO: 134978 - DNA, 24 bp, Artificial sequence
  SiRNA target sequence
ccaagcacgagtgatggaagaatc

SEQ ID NO: 134979 - DNA, 24 bp, Artificial sequence
  SiRNA target sequence
caagcacgagtgatggaagaatcg

SEQ ID NO: 134980 - DNA, 24 bp, Artificial sequence
  SiRNA target sequence
aagcacgagtgatggaagaatcgc

SEQ ID NO: 134981 - DNA, 24 bp, Artificial sequence
  SiRNA target sequence
agcacgagtgatggaagaatcgca

SEQ ID NO: 134982 - DNA, 24 bp, Artificial sequence
  SiRNA target sequence
gcacgagtgatggaagaatcgcat

SEQ ID NO: 134983 - DNA, 24 bp, Artificial sequence
  SiRNA target sequence
cacgagtgatggaagaatcgcatt

SEQ ID NO: 134984 - DNA, 24 bp, Artificial sequence
  SiRNA target sequence
acgagtgatggaagaatcgcattt

SEQ ID NO: 134985 - DNA, 24 bp, Artificial sequence
  SiRNA target sequence
cgagtgatggaagaatcgcatttt

SEQ ID NO: 134986 - DNA, 24 bp, Artificial sequence
  SiRNA target sequence
gagtgatggaagaatcgcattttt

SEQ ID NO: 134987 - DNA, 24 bp, Artificial sequence
  SiRNA target sequence
agtgatggaagaatcgcatttttt

SEQ ID NO: 134988 - DNA, 24 bp, Artificial sequence
  SiRNA target sequence
gtgatggaagaatcgcatttttta

SEQ ID NO: 134989 - DNA, 24 bp, Artificial sequence
  SiRNA target sequence
tgatggaagaatcgcattttttat

SEQ ID NO: 134990 - DNA, 24 bp, Artificial sequence
  SiRNA target sequence
gatggaagaatcgcattttttatg

SEQ ID NO: 134991 - DNA, 24 bp, Artificial sequence
  SiRNA target sequence
atggaagaatcgcattttttatga

SEQ ID NO: 134992 - DNA, 24 bp, Artificial sequence
  SiRNA target sequence
tggaagaatcgcattttttatgaa

SEQ ID NO: 134993 - DNA, 24 bp, Artificial sequence
  SiRNA target sequence
ggaagaatcgcattttttatgaat

SEQ ID NO: 134994 - DNA, 24 bp, Artificial sequence
  SiRNA target sequence
gaagaatcgcattttttatgaatt

SEQ ID NO: 134995 - DNA, 24 bp, Artificial sequence
  SiRNA target sequence
aagaatcgcattttttatgaattt

SEQ ID NO: 134996 - DNA, 24 bp, Artificial sequence
  SiRNA target sequence
agaatcgcattttttatgaatttt

SEQ ID NO: 134997 - DNA, 24 bp, Artificial sequence
  SiRNA target sequence
gaatcgcattttttatgaatttta

SEQ ID NO: 134998 - DNA, 24 bp, Artificial sequence
  SiRNA target sequence
aatcgcattttttatgaattttaa

SEQ ID NO: 134999 - DNA, 24 bp, Artificial sequence
  SiRNA target sequence
atcgcattttttatgaattttaaa

SEQ ID NO: 135000 - DNA, 24 bp, Artificial sequence
  SiRNA target sequence
tcgcattttttatgaattttaaag

SEQ ID NO: 135001 - DNA, 24 bp, Artificial sequence
  SiRNA target sequence
cgcattttttatgaattttaaagg

SEQ ID NO: 135002 - DNA, 24 bp, Artificial sequence
  SiRNA target sequence
gcattttttatgaattttaaaggt

SEQ ID NO: 135003 - DNA, 24 bp, Artificial sequence
  SiRNA target sequence
cattttttatgaattttaaaggta

SEQ ID NO: 135004 - DNA, 24 bp, Artificial sequence
  SiRNA target sequence
attttttatgaattttaaaggtaa

SEQ ID NO: 135005 - DNA, 24 bp, Artificial sequence
  SiRNA target sequence
ttttttatgaattttaaaggtaaa

SEQ ID NO: 135006 - DNA, 24 bp, Artificial sequence
  SiRNA target sequence
tttttatgaattttaaaggtaaaa

SEQ ID NO: 135007 - DNA, 24 bp, Artificial sequence
  SiRNA target sequence
ttttatgaattttaaaggtaaaac

SEQ ID NO: 135008 - DNA, 24 bp, Artificial sequence
  SiRNA target sequence
tttatgaattttaaaggtaaaaca

SEQ ID NO: 135009 - DNA, 24 bp, Artificial sequence
  SiRNA target sequence
ttatgaattttaaaggtaaaacat

SEQ ID NO: 135010 - DNA, 24 bp, Artificial sequence
  SiRNA target sequence
tatgaattttaaaggtaaaacatt

SEQ ID NO: 135011 - DNA, 24 bp, Artificial sequence
  SiRNA target sequence
atgaattttaaaggtaaaacattg

SEQ ID NO: 135012 - DNA, 24 bp, Artificial sequence
  SiRNA target sequence
tgaattttaaaggtaaaacattga

SEQ ID NO: 135013 - DNA, 24 bp, Artificial sequence
  SiRNA target sequence
gaattttaaaggtaaaacattgat

SEQ ID NO: 135014 - DNA, 24 bp, Artificial sequence
  SiRNA target sequence
aattttaaaggtaaaacattgatt

SEQ ID NO: 135015 - DNA, 24 bp, Artificial sequence
  SiRNA target sequence
attttaaaggtaaaacattgattg

SEQ ID NO: 135016 - DNA, 24 bp, Artificial sequence
  SiRNA target sequence
ttttaaaggtaaaacattgattgg

SEQ ID NO: 135017 - DNA, 24 bp, Artificial sequence
  SiRNA target sequence
tttaaaggtaaaacattgattgga

SEQ ID NO: 135018 - DNA, 24 bp, Artificial sequence
  SiRNA target sequence
ttaaaggtaaaacattgattggag

SEQ ID NO: 135019 - DNA, 24 bp, Artificial sequence
  SiRNA target sequence
taaaggtaaaacattgattggagg

SEQ ID NO: 135020 - DNA, 24 bp, Artificial sequence
  SiRNA target sequence
aaaggtaaaacattgattggagga

SEQ ID NO: 135021 - DNA, 24 bp, Artificial sequence
  SiRNA target sequence
aaggtaaaacattgattggaggaa

SEQ ID NO: 135022 - DNA, 24 bp, Artificial sequence
  SiRNA target sequence
aggtaaaacattgattggaggaac

SEQ ID NO: 135023 - DNA, 24 bp, Artificial sequence
  SiRNA target sequence
ggtaaaacattgattggaggaaca

SEQ ID NO: 135024 - DNA, 24 bp, Artificial sequence
  SiRNA target sequence
gtaaaacattgattggaggaacag

SEQ ID NO: 135025 - DNA, 24 bp, Artificial sequence
  SiRNA target sequence
taaaacattgattggaggaacaga

SEQ ID NO: 135026 - DNA, 24 bp, Artificial sequence
  SiRNA target sequence
aaaacattgattggaggaacagat

SEQ ID NO: 135027 - DNA, 24 bp, Artificial sequence
  SiRNA target sequence
aaacattgattggaggaacagatg

SEQ ID NO: 135028 - DNA, 24 bp, Artificial sequence
  SiRNA target sequence
aacattgattggaggaacagatgt

SEQ ID NO: 135029 - DNA, 24 bp, Artificial sequence
  SiRNA target sequence
acattgattggaggaacagatgtt

SEQ ID NO: 135030 - DNA, 24 bp, Artificial sequence
  SiRNA target sequence
cattgattggaggaacagatgtta

SEQ ID NO: 135031 - DNA, 24 bp, Artificial sequence
  SiRNA target sequence
attgattggaggaacagatgttaa

SEQ ID NO: 135032 - DNA, 24 bp, Artificial sequence
  SiRNA target sequence
ttgattggaggaacagatgttaag

SEQ ID NO: 135033 - DNA, 24 bp, Artificial sequence
  SiRNA target sequence
tgattggaggaacagatgttaagt

SEQ ID NO: 135034 - DNA, 24 bp, Artificial sequence
  SiRNA target sequence
gattggaggaacagatgttaagtg

SEQ ID NO: 135035 - DNA, 24 bp, Artificial sequence
  SiRNA target sequence
attggaggaacagatgttaagtgt

SEQ ID NO: 135036 - DNA, 24 bp, Artificial sequence
  SiRNA target sequence
ttggaggaacagatgttaagtgta

SEQ ID NO: 135037 - DNA, 24 bp, Artificial sequence
  SiRNA target sequence
tggaggaacagatgttaagtgtaa

SEQ ID NO: 135038 - DNA, 24 bp, Artificial sequence
  SiRNA target sequence
ggaggaacagatgttaagtgtaaa

SEQ ID NO: 135039 - DNA, 24 bp, Artificial sequence
  SiRNA target sequence
gaggaacagatgttaagtgtaaag

SEQ ID NO: 135040 - DNA, 24 bp, Artificial sequence
  SiRNA target sequence
aggaacagatgttaagtgtaaagt

SEQ ID NO: 135041 - DNA, 24 bp, Artificial sequence
  SiRNA target sequence
ggaacagatgttaagtgtaaagtt

SEQ ID NO: 135042 - DNA, 24 bp, Artificial sequence
  SiRNA target sequence
gaacagatgttaagtgtaaagttg

SEQ ID NO: 135043 - DNA, 24 bp, Artificial sequence
  SiRNA target sequence
aacagatgttaagtgtaaagttga

SEQ ID NO: 135044 - DNA, 24 bp, Artificial sequence
  SiRNA target sequence
acagatgttaagtgtaaagttgaa

SEQ ID NO: 135045 - DNA, 24 bp, Artificial sequence
  SiRNA target sequence
cagatgttaagtgtaaagttgaag

SEQ ID NO: 135046 - DNA, 24 bp, Artificial sequence
  SiRNA target sequence
agatgttaagtgtaaagttgaaga

SEQ ID NO: 135047 - DNA, 24 bp, Artificial sequence
  SiRNA target sequence
gatgttaagtgtaaagttgaagat

SEQ ID NO: 135048 - DNA, 24 bp, Artificial sequence
  SiRNA target sequence
atgttaagtgtaaagttgaagatt

SEQ ID NO: 135049 - DNA, 24 bp, Artificial sequence
  SiRNA target sequence
tgttaagtgtaaagttgaagattt

SEQ ID NO: 135050 - DNA, 24 bp, Artificial sequence
  SiRNA target sequence
gttaagtgtaaagttgaagattta

SEQ ID NO: 135051 - DNA, 24 bp, Artificial sequence
  SiRNA target sequence
ttaagtgtaaagttgaagatttaa

SEQ ID NO: 135052 - DNA, 24 bp, Artificial sequence
  SiRNA target sequence
taagtgtaaagttgaagatttaat

SEQ ID NO: 135053 - DNA, 24 bp, Artificial sequence
  SiRNA target sequence
aagtgtaaagttgaagatttaata

SEQ ID NO: 135054 - DNA, 24 bp, Artificial sequence
  SiRNA target sequence
agtgtaaagttgaagatttaataa

SEQ ID NO: 135055 - DNA, 24 bp, Artificial sequence
  SiRNA target sequence
gtgtaaagttgaagatttaataaa

SEQ ID NO: 135056 - DNA, 24 bp, Artificial sequence
  SiRNA target sequence
tgtaaagttgaagatttaataaaa

SEQ ID NO: 135057 - DNA, 24 bp, Artificial sequence
  SiRNA target sequence
gtaaagttgaagatttaataaaac

SEQ ID NO: 135058 - DNA, 24 bp, Artificial sequence
  SiRNA target sequence
taaagttgaagatttaataaaacc

SEQ ID NO: 135059 - DNA, 24 bp, Artificial sequence
  SiRNA target sequence
aaagttgaagatttaataaaaccg

SEQ ID NO: 135060 - DNA, 24 bp, Artificial sequence
  SiRNA target sequence
aagttgaagatttaataaaaccga

SEQ ID NO: 135061 - DNA, 24 bp, Artificial sequence
  SiRNA target sequence
agttgaagatttaataaaaccgac

SEQ ID NO: 135062 - DNA, 24 bp, Artificial sequence
  SiRNA target sequence
gttgaagatttaataaaaccgact

SEQ ID NO: 135063 - DNA, 24 bp, Artificial sequence
  SiRNA target sequence
ttgaagatttaataaaaccgactg

SEQ ID NO: 135064 - DNA, 24 bp, Artificial sequence
  SiRNA target sequence
tgaagatttaataaaaccgactga

SEQ ID NO: 135065 - DNA, 24 bp, Artificial sequence
  SiRNA target sequence
gaagatttaataaaaccgactgaa

SEQ ID NO: 135066 - DNA, 24 bp, Artificial sequence
  SiRNA target sequence
aagatttaataaaaccgactgaag

SEQ ID NO: 135067 - DNA, 24 bp, Artificial sequence
  SiRNA target sequence
agatttaataaaaccgactgaaga

SEQ ID NO: 135068 - DNA, 24 bp, Artificial sequence
  SiRNA target sequence
gatttaataaaaccgactgaagaa

SEQ ID NO: 135069 - DNA, 24 bp, Artificial sequence
  SiRNA target sequence
atttaataaaaccgactgaagaag

SEQ ID NO: 135070 - DNA, 24 bp, Artificial sequence
  SiRNA target sequence
tttaataaaaccgactgaagaaga

SEQ ID NO: 135071 - DNA, 24 bp, Artificial sequence
  SiRNA target sequence
ttaataaaaccgactgaagaagat

SEQ ID NO: 135072 - DNA, 24 bp, Artificial sequence
  SiRNA target sequence
taataaaaccgactgaagaagatc

SEQ ID NO: 135073 - DNA, 24 bp, Artificial sequence
  SiRNA target sequence
aataaaaccgactgaagaagatct

SEQ ID NO: 135074 - DNA, 24 bp, Artificial sequence
  SiRNA target sequence
ataaaaccgactgaagaagatcta

SEQ ID NO: 135075 - DNA, 24 bp, Artificial sequence
  SiRNA target sequence
taaaaccgactgaagaagatctaa

SEQ ID NO: 135076 - DNA, 24 bp, Artificial sequence
  SiRNA target sequence
aaaaccgactgaagaagatctaaa

SEQ ID NO: 135077 - DNA, 24 bp, Artificial sequence
  SiRNA target sequence
aaaccgactgaagaagatctaaac

SEQ ID NO: 135078 - DNA, 24 bp, Artificial sequence
  SiRNA target sequence
aaccgactgaagaagatctaaact

SEQ ID NO: 135079 - DNA, 24 bp, Artificial sequence
  SiRNA target sequence
accgactgaagaagatctaaactt

SEQ ID NO: 135080 - DNA, 24 bp, Artificial sequence
  SiRNA target sequence
ccgactgaagaagatctaaacttt

SEQ ID NO: 135081 - DNA, 24 bp, Artificial sequence
  SiRNA target sequence
cgactgaagaagatctaaactttc

SEQ ID NO: 135082 - DNA, 24 bp, Artificial sequence
  SiRNA target sequence
gactgaagaagatctaaactttct

SEQ ID NO: 135083 - DNA, 24 bp, Artificial sequence
  SiRNA target sequence
actgaagaagatctaaactttctt

SEQ ID NO: 135084 - DNA, 24 bp, Artificial sequence
  SiRNA target sequence
ctgaagaagatctaaactttctta

SEQ ID NO: 135085 - DNA, 24 bp, Artificial sequence
  SiRNA target sequence
tgaagaagatctaaactttcttat

SEQ ID NO: 135086 - DNA, 24 bp, Artificial sequence
  SiRNA target sequence
gaagaagatctaaactttcttatt

SEQ ID NO: 135087 - DNA, 24 bp, Artificial sequence
  SiRNA target sequence
aagaagatctaaactttcttattc

SEQ ID NO: 135088 - DNA, 24 bp, Artificial sequence
  SiRNA target sequence
agaagatctaaactttcttattca

SEQ ID NO: 135089 - DNA, 24 bp, Artificial sequence
  SiRNA target sequence
gaagatctaaactttcttattcac

SEQ ID NO: 135090 - DNA, 24 bp, Artificial sequence
  SiRNA target sequence
aagatctaaactttcttattcacg

SEQ ID NO: 135091 - DNA, 24 bp, Artificial sequence
  SiRNA target sequence
agatctaaactttcttattcacga

SEQ ID NO: 135092 - DNA, 24 bp, Artificial sequence
  SiRNA target sequence
gatctaaactttcttattcacgag

SEQ ID NO: 135093 - DNA, 24 bp, Artificial sequence
  SiRNA target sequence
atctaaactttcttattcacgagg

SEQ ID NO: 135094 - DNA, 24 bp, Artificial sequence
  SiRNA target sequence
tctaaactttcttattcacgaggc

SEQ ID NO: 135095 - DNA, 24 bp, Artificial sequence
  SiRNA target sequence
ctaaactttcttattcacgaggcc

SEQ ID NO: 135096 - DNA, 24 bp, Artificial sequence
  SiRNA target sequence
taaactttcttattcacgaggcca

SEQ ID NO: 135097 - DNA, 24 bp, Artificial sequence
  SiRNA target sequence
aaactttcttattcacgaggccaa

SEQ ID NO: 135098 - DNA, 24 bp, Artificial sequence
  SiRNA target sequence
aactttcttattcacgaggccaat

SEQ ID NO: 135099 - DNA, 24 bp, Artificial sequence
  SiRNA target sequence
actttcttattcacgaggccaatt

SEQ ID NO: 135100 - DNA, 24 bp, Artificial sequence
  SiRNA target sequence
ctttcttattcacgaggccaatta

SEQ ID NO: 135101 - DNA, 24 bp, Artificial sequence
  SiRNA target sequence
tttcttattcacgaggccaattat

SEQ ID NO: 135102 - DNA, 24 bp, Artificial sequence
  SiRNA target sequence
ttcttattcacgaggccaattatt

SEQ ID NO: 135103 - DNA, 24 bp, Artificial sequence
  SiRNA target sequence
tcttattcacgaggccaattattt

SEQ ID NO: 135104 - DNA, 24 bp, Artificial sequence
  SiRNA target sequence
cttattcacgaggccaattatttt

SEQ ID NO: 135105 - DNA, 24 bp, Artificial sequence
  SiRNA target sequence
ttattcacgaggccaattatttta

SEQ ID NO: 135106 - DNA, 24 bp, Artificial sequence
  SiRNA target sequence
tattcacgaggccaattattttac

SEQ ID NO: 135107 - DNA, 24 bp, Artificial sequence
  SiRNA target sequence
attcacgaggccaattattttaca

SEQ ID NO: 135108 - DNA, 24 bp, Artificial sequence
  SiRNA target sequence
ttcacgaggccaattattttacag

SEQ ID NO: 135109 - DNA, 24 bp, Artificial sequence
  SiRNA target sequence
tcacgaggccaattattttacaga

SEQ ID NO: 135110 - DNA, 24 bp, Artificial sequence
  SiRNA target sequence
cacgaggccaattattttacagat

SEQ ID NO: 135111 - DNA, 24 bp, Artificial sequence
  SiRNA target sequence
acgaggccaattattttacagatc

SEQ ID NO: 135112 - DNA, 24 bp, Artificial sequence
  SiRNA target sequence
cgaggccaattattttacagatca

SEQ ID NO: 135113 - DNA, 24 bp, Artificial sequence
  SiRNA target sequence
gaggccaattattttacagatcac

SEQ ID NO: 135114 - DNA, 24 bp, Artificial sequence
  SiRNA target sequence
aggccaattattttacagatcaca

SEQ ID NO: 135115 - DNA, 24 bp, Artificial sequence
  SiRNA target sequence
ggccaattattttacagatcacaa

SEQ ID NO: 135116 - DNA, 24 bp, Artificial sequence
  SiRNA target sequence
gccaattattttacagatcacaat

SEQ ID NO: 135117 - DNA, 24 bp, Artificial sequence
  SiRNA target sequence
ccaattattttacagatcacaatt

SEQ ID NO: 135118 - DNA, 24 bp, Artificial sequence
  SiRNA target sequence
caattattttacagatcacaattt

SEQ ID NO: 135119 - DNA, 24 bp, Artificial sequence
  SiRNA target sequence
aattattttacagatcacaattta

SEQ ID NO: 135120 - DNA, 24 bp, Artificial sequence
  SiRNA target sequence
attattttacagatcacaatttaa

SEQ ID NO: 135121 - DNA, 24 bp, Artificial sequence
  SiRNA target sequence
ttattttacagatcacaatttaaa

SEQ ID NO: 135122 - DNA, 24 bp, Artificial sequence
  SiRNA target sequence
tattttacagatcacaatttaaaa

SEQ ID NO: 135123 - DNA, 24 bp, Artificial sequence
  SiRNA target sequence
attttacagatcacaatttaaaat

SEQ ID NO: 135124 - DNA, 24 bp, Artificial sequence
  SiRNA target sequence
ttttacagatcacaatttaaaatt

SEQ ID NO: 135125 - DNA, 24 bp, Artificial sequence
  SiRNA target sequence
tttacagatcacaatttaaaatta

SEQ ID NO: 135126 - DNA, 24 bp, Artificial sequence
  SiRNA target sequence
ttacagatcacaatttaaaattaa

SEQ ID NO: 135127 - DNA, 24 bp, Artificial sequence
  SiRNA target sequence
tacagatcacaatttaaaattaac

SEQ ID NO: 135128 - DNA, 24 bp, Artificial sequence
  SiRNA target sequence
acagatcacaatttaaaattaaca

SEQ ID NO: 135129 - DNA, 24 bp, Artificial sequence
  SiRNA target sequence
cagatcacaatttaaaattaacaa

SEQ ID NO: 135130 - DNA, 24 bp, Artificial sequence
  SiRNA target sequence
agatcacaatttaaaattaacaaa

SEQ ID NO: 135131 - DNA, 24 bp, Artificial sequence
  SiRNA target sequence
gatcacaatttaaaattaacaaaa

SEQ ID NO: 135132 - DNA, 24 bp, Artificial sequence
  SiRNA target sequence
atcacaatttaaaattaacaaaaa

SEQ ID NO: 135133 - DNA, 24 bp, Artificial sequence
  SiRNA target sequence
tcacaatttaaaattaacaaaaaa

SEQ ID NO: 135134 - DNA, 24 bp, Artificial sequence
  SiRNA target sequence
cacaatttaaaattaacaaaaaaa

SEQ ID NO: 135135 - DNA, 24 bp, Artificial sequence
  SiRNA target sequence
acaatttaaaattaacaaaaaaag

SEQ ID NO: 135136 - DNA, 24 bp, Artificial sequence
  SiRNA target sequence
caatttaaaattaacaaaaaaaga

SEQ ID NO: 135137 - DNA, 24 bp, Artificial sequence
  SiRNA target sequence
aatttaaaattaacaaaaaaagat

SEQ ID NO: 135138 - DNA, 24 bp, Artificial sequence
  SiRNA target sequence
atttaaaattaacaaaaaaagatg

SEQ ID NO: 135139 - DNA, 24 bp, Artificial sequence
  SiRNA target sequence
tttaaaattaacaaaaaaagatgt

SEQ ID NO: 135140 - DNA, 24 bp, Artificial sequence
  SiRNA target sequence
ttaaaattaacaaaaaaagatgtt

SEQ ID NO: 135141 - DNA, 24 bp, Artificial sequence
  SiRNA target sequence
taaaattaacaaaaaaagatgttt

SEQ ID NO: 135142 - DNA, 24 bp, Artificial sequence
  SiRNA target sequence
aaaattaacaaaaaaagatgtttt

SEQ ID NO: 135143 - DNA, 24 bp, Artificial sequence
  SiRNA target sequence
aaattaacaaaaaaagatgttttg

SEQ ID NO: 135144 - DNA, 24 bp, Artificial sequence
  SiRNA target sequence
aattaacaaaaaaagatgttttgt

SEQ ID NO: 135145 - DNA, 24 bp, Artificial sequence
  SiRNA target sequence
attaacaaaaaaagatgttttgtc

SEQ ID NO: 135146 - DNA, 24 bp, Artificial sequence
  SiRNA target sequence
ttaacaaaaaaagatgttttgtct

SEQ ID NO: 135147 - DNA, 24 bp, Artificial sequence
  SiRNA target sequence
taacaaaaaaagatgttttgtctg

SEQ ID NO: 135148 - DNA, 24 bp, Artificial sequence
  SiRNA target sequence
aacaaaaaaagatgttttgtctgt

SEQ ID NO: 135149 - DNA, 24 bp, Artificial sequence
  SiRNA target sequence
acaaaaaaagatgttttgtctgtt

SEQ ID NO: 135150 - DNA, 24 bp, Artificial sequence
  SiRNA target sequence
caaaaaaagatgttttgtctgttt

SEQ ID NO: 135151 - DNA, 24 bp, Artificial sequence
  SiRNA target sequence
aaaaaaagatgttttgtctgtttg

SEQ ID NO: 135152 - DNA, 24 bp, Artificial sequence
  SiRNA target sequence
aaaaaagatgttttgtctgtttgg

SEQ ID NO: 135153 - DNA, 24 bp, Artificial sequence
  SiRNA target sequence
aaaaagatgttttgtctgtttgga

SEQ ID NO: 135154 - DNA, 24 bp, Artificial sequence
  SiRNA target sequence
aaaagatgttttgtctgtttggac

SEQ ID NO: 135155 - DNA, 24 bp, Artificial sequence
  SiRNA target sequence
aaagatgttttgtctgtttggaca

SEQ ID NO: 135156 - DNA, 24 bp, Artificial sequence
  SiRNA target sequence
aagatgttttgtctgtttggacag

SEQ ID NO: 135157 - DNA, 24 bp, Artificial sequence
  SiRNA target sequence
agatgttttgtctgtttggacagg

SEQ ID NO: 135158 - DNA, 24 bp, Artificial sequence
  SiRNA target sequence
gatgttttgtctgtttggacaggt

SEQ ID NO: 135159 - DNA, 24 bp, Artificial sequence
  SiRNA target sequence
atgttttgtctgtttggacaggta

SEQ ID NO: 135160 - DNA, 24 bp, Artificial sequence
  SiRNA target sequence
tgttttgtctgtttggacaggtat

SEQ ID NO: 135161 - DNA, 24 bp, Artificial sequence
  SiRNA target sequence
gttttgtctgtttggacaggtatt

SEQ ID NO: 135162 - DNA, 24 bp, Artificial sequence
  SiRNA target sequence
ttttgtctgtttggacaggtatta

SEQ ID NO: 135163 - DNA, 24 bp, Artificial sequence
  SiRNA target sequence
tttgtctgtttggacaggtattag

SEQ ID NO: 135164 - DNA, 24 bp, Artificial sequence
  SiRNA target sequence
ttgtctgtttggacaggtattaga

SEQ ID NO: 135165 - DNA, 24 bp, Artificial sequence
  SiRNA target sequence
tgtctgtttggacaggtattagac

SEQ ID NO: 135166 - DNA, 24 bp, Artificial sequence
  SiRNA target sequence
gtctgtttggacaggtattagacc

SEQ ID NO: 135167 - DNA, 24 bp, Artificial sequence
  SiRNA target sequence
tctgtttggacaggtattagaccg

SEQ ID NO: 135168 - DNA, 24 bp, Artificial sequence
  SiRNA target sequence
ctgtttggacaggtattagaccgt

SEQ ID NO: 135169 - DNA, 24 bp, Artificial sequence
  SiRNA target sequence
tgtttggacaggtattagaccgtt

SEQ ID NO: 135170 - DNA, 24 bp, Artificial sequence
  SiRNA target sequence
gtttggacaggtattagaccgtta

SEQ ID NO: 135171 - DNA, 24 bp, Artificial sequence
  SiRNA target sequence
tttggacaggtattagaccgttag

SEQ ID NO: 135172 - DNA, 24 bp, Artificial sequence
  SiRNA target sequence
ttggacaggtattagaccgttagt

SEQ ID NO: 135173 - DNA, 24 bp, Artificial sequence
  SiRNA target sequence
tggacaggtattagaccgttagtc

SEQ ID NO: 135174 - DNA, 24 bp, Artificial sequence
  SiRNA target sequence
ggacaggtattagaccgttagtca

SEQ ID NO: 135175 - DNA, 24 bp, Artificial sequence
  SiRNA target sequence
gacaggtattagaccgttagtcaa

SEQ ID NO: 135176 - DNA, 24 bp, Artificial sequence
  SiRNA target sequence
acaggtattagaccgttagtcaag

SEQ ID NO: 135177 - DNA, 24 bp, Artificial sequence
  SiRNA target sequence
caggtattagaccgttagtcaagg

SEQ ID NO: 135178 - DNA, 24 bp, Artificial sequence
  SiRNA target sequence
aggtattagaccgttagtcaagga

SEQ ID NO: 135179 - DNA, 24 bp, Artificial sequence
  SiRNA target sequence
ggtattagaccgttagtcaaggat

SEQ ID NO: 135180 - DNA, 24 bp, Artificial sequence
  SiRNA target sequence
gtattagaccgttagtcaaggatt

SEQ ID NO: 135181 - DNA, 24 bp, Artificial sequence
  SiRNA target sequence
tattagaccgttagtcaaggattt

SEQ ID NO: 135182 - DNA, 24 bp, Artificial sequence
  SiRNA target sequence
attagaccgttagtcaaggattta

SEQ ID NO: 135183 - DNA, 24 bp, Artificial sequence
  SiRNA target sequence
ttagaccgttagtcaaggatttat

SEQ ID NO: 135184 - DNA, 24 bp, Artificial sequence
  SiRNA target sequence
tagaccgttagtcaaggatttatc

SEQ ID NO: 135185 - DNA, 24 bp, Artificial sequence
  SiRNA target sequence
agaccgttagtcaaggatttatcg

SEQ ID NO: 135186 - DNA, 24 bp, Artificial sequence
  SiRNA target sequence
gaccgttagtcaaggatttatcga

SEQ ID NO: 135187 - DNA, 24 bp, Artificial sequence
  SiRNA target sequence
accgttagtcaaggatttatcgaa

SEQ ID NO: 135188 - DNA, 24 bp, Artificial sequence
  SiRNA target sequence
ccgttagtcaaggatttatcgaaa

SEQ ID NO: 135189 - DNA, 24 bp, Artificial sequence
  SiRNA target sequence
cgttagtcaaggatttatcgaaaa

SEQ ID NO: 135190 - DNA, 24 bp, Artificial sequence
  SiRNA target sequence
gttagtcaaggatttatcgaaaag

SEQ ID NO: 135191 - DNA, 24 bp, Artificial sequence
  SiRNA target sequence
ttagtcaaggatttatcgaaaagt

SEQ ID NO: 135192 - DNA, 24 bp, Artificial sequence
  SiRNA target sequence
tagtcaaggatttatcgaaaagtt

SEQ ID NO: 135193 - DNA, 24 bp, Artificial sequence
  SiRNA target sequence
agtcaaggatttatcgaaaagttc

SEQ ID NO: 135194 - DNA, 24 bp, Artificial sequence
  SiRNA target sequence
gtcaaggatttatcgaaaagttca

SEQ ID NO: 135195 - DNA, 24 bp, Artificial sequence
  SiRNA target sequence
tcaaggatttatcgaaaagttcaa

SEQ ID NO: 135196 - DNA, 24 bp, Artificial sequence
  SiRNA target sequence
caaggatttatcgaaaagttcaac

SEQ ID NO: 135197 - DNA, 24 bp, Artificial sequence
  SiRNA target sequence
aaggatttatcgaaaagttcaaca

SEQ ID NO: 135198 - DNA, 24 bp, Artificial sequence
  SiRNA target sequence
aggatttatcgaaaagttcaacag

SEQ ID NO: 135199 - DNA, 24 bp, Artificial sequence
  SiRNA target sequence
ggatttatcgaaaagttcaacaga

SEQ ID NO: 135200 - DNA, 24 bp, Artificial sequence
  SiRNA target sequence
gatttatcgaaaagttcaacagaa

SEQ ID NO: 135201 - DNA, 24 bp, Artificial sequence
  SiRNA target sequence
atttatcgaaaagttcaacagaaa

SEQ ID NO: 135202 - DNA, 24 bp, Artificial sequence
  SiRNA target sequence
tttatcgaaaagttcaacagaaaa

SEQ ID NO: 135203 - DNA, 24 bp, Artificial sequence
  SiRNA target sequence
ttatcgaaaagttcaacagaaaag

SEQ ID NO: 135204 - DNA, 24 bp, Artificial sequence
  SiRNA target sequence
tatcgaaaagttcaacagaaaaga

SEQ ID NO: 135205 - DNA, 24 bp, Artificial sequence
  SiRNA target sequence
atcgaaaagttcaacagaaaagat

SEQ ID NO: 135206 - DNA, 24 bp, Artificial sequence
  SiRNA target sequence
tcgaaaagttcaacagaaaagata

SEQ ID NO: 135207 - DNA, 24 bp, Artificial sequence
  SiRNA target sequence
cgaaaagttcaacagaaaagatat

SEQ ID NO: 135208 - DNA, 24 bp, Artificial sequence
  SiRNA target sequence
gaaaagttcaacagaaaagatatg

SEQ ID NO: 135209 - DNA, 24 bp, Artificial sequence
  SiRNA target sequence
aaaagttcaacagaaaagatatgt

SEQ ID NO: 135210 - DNA, 24 bp, Artificial sequence
  SiRNA target sequence
aaagttcaacagaaaagatatgta

SEQ ID NO: 135211 - DNA, 24 bp, Artificial sequence
  SiRNA target sequence
aagttcaacagaaaagatatgtag

SEQ ID NO: 135212 - DNA, 24 bp, Artificial sequence
  SiRNA target sequence
agttcaacagaaaagatatgtaga

SEQ ID NO: 135213 - DNA, 24 bp, Artificial sequence
  SiRNA target sequence
gttcaacagaaaagatatgtagaa

SEQ ID NO: 135214 - DNA, 24 bp, Artificial sequence
  SiRNA target sequence
ttcaacagaaaagatatgtagaaa

SEQ ID NO: 135215 - DNA, 24 bp, Artificial sequence
  SiRNA target sequence
tcaacagaaaagatatgtagaaaa

SEQ ID NO: 135216 - DNA, 24 bp, Artificial sequence
  SiRNA target sequence
caacagaaaagatatgtagaaaac

SEQ ID NO: 135217 - DNA, 24 bp, Artificial sequence
  SiRNA target sequence
aacagaaaagatatgtagaaaaca

SEQ ID NO: 135218 - DNA, 24 bp, Artificial sequence
  SiRNA target sequence
acagaaaagatatgtagaaaacat

SEQ ID NO: 135219 - DNA, 24 bp, Artificial sequence
  SiRNA target sequence
cagaaaagatatgtagaaaacata

SEQ ID NO: 135220 - DNA, 24 bp, Artificial sequence
  SiRNA target sequence
agaaaagatatgtagaaaacatac

SEQ ID NO: 135221 - DNA, 24 bp, Artificial sequence
  SiRNA target sequence
gaaaagatatgtagaaaacatact

SEQ ID NO: 135222 - DNA, 24 bp, Artificial sequence
  SiRNA target sequence
aaaagatatgtagaaaacatacta

SEQ ID NO: 135223 - DNA, 24 bp, Artificial sequence
  SiRNA target sequence
aaagatatgtagaaaacatactat

SEQ ID NO: 135224 - DNA, 24 bp, Artificial sequence
  SiRNA target sequence
aagatatgtagaaaacatactata

SEQ ID NO: 135225 - DNA, 24 bp, Artificial sequence
  SiRNA target sequence
agatatgtagaaaacatactataa

SEQ ID NO: 135226 - DNA, 24 bp, Artificial sequence
  SiRNA target sequence
gatatgtagaaaacatactataag

SEQ ID NO: 135227 - DNA, 24 bp, Artificial sequence
  SiRNA target sequence
atatgtagaaaacatactataaga

SEQ ID NO: 135228 - DNA, 24 bp, Artificial sequence
  SiRNA target sequence
tatgtagaaaacatactataagaa

SEQ ID NO: 135229 - DNA, 24 bp, Artificial sequence
  SiRNA target sequence
atgtagaaaacatactataagaat

SEQ ID NO: 135230 - DNA, 24 bp, Artificial sequence
  SiRNA target sequence
tgtagaaaacatactataagaata

SEQ ID NO: 135231 - DNA, 24 bp, Artificial sequence
  SiRNA target sequence
gtagaaaacatactataagaatag

SEQ ID NO: 135232 - DNA, 24 bp, Artificial sequence
  SiRNA target sequence
tagaaaacatactataagaataga

SEQ ID NO: 135233 - DNA, 24 bp, Artificial sequence
  SiRNA target sequence
agaaaacatactataagaatagat

SEQ ID NO: 135234 - DNA, 24 bp, Artificial sequence
  SiRNA target sequence
gaaaacatactataagaatagata

SEQ ID NO: 135235 - DNA, 24 bp, Artificial sequence
  SiRNA target sequence
aaaacatactataagaatagataa

SEQ ID NO: 135236 - DNA, 24 bp, Artificial sequence
  SiRNA target sequence
aaacatactataagaatagataaa

SEQ ID NO: 135237 - DNA, 24 bp, Artificial sequence
  SiRNA target sequence
aacatactataagaatagataaag

SEQ ID NO: 135238 - DNA, 24 bp, Artificial sequence
  SiRNA target sequence
acatactataagaatagataaaga

SEQ ID NO: 135239 - DNA, 24 bp, Artificial sequence
  SiRNA target sequence
catactataagaatagataaagac

SEQ ID NO: 135240 - DNA, 24 bp, Artificial sequence
  SiRNA target sequence
atactataagaatagataaagaca

SEQ ID NO: 135241 - DNA, 24 bp, Artificial sequence
  SiRNA target sequence
tactataagaatagataaagacaa

SEQ ID NO: 135242 - DNA, 24 bp, Artificial sequence
  SiRNA target sequence
actataagaatagataaagacaat

SEQ ID NO: 135243 - DNA, 24 bp, Artificial sequence
  SiRNA target sequence
ctataagaatagataaagacaata

SEQ ID NO: 135244 - DNA, 24 bp, Artificial sequence
  SiRNA target sequence
tataagaatagataaagacaatat

SEQ ID NO: 135245 - DNA, 24 bp, Artificial sequence
  SiRNA target sequence
ataagaatagataaagacaatatg

SEQ ID NO: 135246 - DNA, 24 bp, Artificial sequence
  SiRNA target sequence
taagaatagataaagacaatatgg

SEQ ID NO: 135247 - DNA, 24 bp, Artificial sequence
  SiRNA target sequence
aagaatagataaagacaatatggt

SEQ ID NO: 135248 - DNA, 24 bp, Artificial sequence
  SiRNA target sequence
agaatagataaagacaatatggta

SEQ ID NO: 135249 - DNA, 24 bp, Artificial sequence
  SiRNA target sequence
gaatagataaagacaatatggtaa

SEQ ID NO: 135250 - DNA, 24 bp, Artificial sequence
  SiRNA target sequence
aatagataaagacaatatggtaac

SEQ ID NO: 135251 - DNA, 24 bp, Artificial sequence
  SiRNA target sequence
atagataaagacaatatggtaact

SEQ ID NO: 135252 - DNA, 24 bp, Artificial sequence
  SiRNA target sequence
tagataaagacaatatggtaactg

SEQ ID NO: 135253 - DNA, 24 bp, Artificial sequence
  SiRNA target sequence
agataaagacaatatggtaactgt

SEQ ID NO: 135254 - DNA, 24 bp, Artificial sequence
  SiRNA target sequence
gataaagacaatatggtaactgta

SEQ ID NO: 135255 - DNA, 24 bp, Artificial sequence
  SiRNA target sequence
ataaagacaatatggtaactgtaa

SEQ ID NO: 135256 - DNA, 24 bp, Artificial sequence
  SiRNA target sequence
taaagacaatatggtaactgtaac

SEQ ID NO: 135257 - DNA, 24 bp, Artificial sequence
  SiRNA target sequence
aaagacaatatggtaactgtaaca

SEQ ID NO: 135258 - DNA, 24 bp, Artificial sequence
  SiRNA target sequence
aagacaatatggtaactgtaacag

SEQ ID NO: 135259 - DNA, 24 bp, Artificial sequence
  SiRNA target sequence
agacaatatggtaactgtaacagg

SEQ ID NO: 135260 - DNA, 24 bp, Artificial sequence
  SiRNA target sequence
gacaatatggtaactgtaacaggt

SEQ ID NO: 135261 - DNA, 24 bp, Artificial sequence
  SiRNA target sequence
acaatatggtaactgtaacaggtg

SEQ ID NO: 135262 - DNA, 24 bp, Artificial sequence
  SiRNA target sequence
caatatggtaactgtaacaggtgg

SEQ ID NO: 135263 - DNA, 24 bp, Artificial sequence
  SiRNA target sequence
aatatggtaactgtaacaggtggt

SEQ ID NO: 135264 - DNA, 24 bp, Artificial sequence
  SiRNA target sequence
atatggtaactgtaacaggtggta

SEQ ID NO: 135265 - DNA, 24 bp, Artificial sequence
  SiRNA target sequence
tatggtaactgtaacaggtggtaa

SEQ ID NO: 135266 - DNA, 24 bp, Artificial sequence
  SiRNA target sequence
atggtaactgtaacaggtggtaag

SEQ ID NO: 135267 - DNA, 24 bp, Artificial sequence
  SiRNA target sequence
tggtaactgtaacaggtggtaagt

SEQ ID NO: 135268 - DNA, 24 bp, Artificial sequence
  SiRNA target sequence
ggtaactgtaacaggtggtaagtg

SEQ ID NO: 135269 - DNA, 24 bp, Artificial sequence
  SiRNA target sequence
gtaactgtaacaggtggtaagtgg

SEQ ID NO: 135270 - DNA, 24 bp, Artificial sequence
  SiRNA target sequence
taactgtaacaggtggtaagtgga

SEQ ID NO: 135271 - DNA, 24 bp, Artificial sequence
  SiRNA target sequence
aactgtaacaggtggtaagtggac

SEQ ID NO: 135272 - DNA, 24 bp, Artificial sequence
  SiRNA target sequence
actgtaacaggtggtaagtggaca

SEQ ID NO: 135273 - DNA, 24 bp, Artificial sequence
  SiRNA target sequence
ctgtaacaggtggtaagtggacaa

SEQ ID NO: 135274 - DNA, 24 bp, Artificial sequence
  SiRNA target sequence
tgtaacaggtggtaagtggacaat

SEQ ID NO: 135275 - DNA, 24 bp, Artificial sequence
  SiRNA target sequence
gtaacaggtggtaagtggacaatt

SEQ ID NO: 135276 - DNA, 24 bp, Artificial sequence
  SiRNA target sequence
taacaggtggtaagtggacaattt

SEQ ID NO: 135277 - DNA, 24 bp, Artificial sequence
  SiRNA target sequence
aacaggtggtaagtggacaatttt

SEQ ID NO: 135278 - DNA, 24 bp, Artificial sequence
  SiRNA target sequence
acaggtggtaagtggacaattttt

SEQ ID NO: 135279 - DNA, 24 bp, Artificial sequence
  SiRNA target sequence
caggtggtaagtggacaatttttc

SEQ ID NO: 135280 - DNA, 24 bp, Artificial sequence
  SiRNA target sequence
aggtggtaagtggacaatttttcg

SEQ ID NO: 135281 - DNA, 24 bp, Artificial sequence
  SiRNA target sequence
ggtggtaagtggacaatttttcga

SEQ ID NO: 135282 - DNA, 24 bp, Artificial sequence
  SiRNA target sequence
gtggtaagtggacaatttttcgac

SEQ ID NO: 135283 - DNA, 24 bp, Artificial sequence
  SiRNA target sequence
tggtaagtggacaatttttcgact

SEQ ID NO: 135284 - DNA, 24 bp, Artificial sequence
  SiRNA target sequence
ggtaagtggacaatttttcgactt

SEQ ID NO: 135285 - DNA, 24 bp, Artificial sequence
  SiRNA target sequence
gtaagtggacaatttttcgactta

SEQ ID NO: 135286 - DNA, 24 bp, Artificial sequence
  SiRNA target sequence
taagtggacaatttttcgacttat

SEQ ID NO: 135287 - DNA, 24 bp, Artificial sequence
  SiRNA target sequence
aagtggacaatttttcgacttatg

SEQ ID NO: 135288 - DNA, 24 bp, Artificial sequence
  SiRNA target sequence
agtggacaatttttcgacttatgg

SEQ ID NO: 135289 - DNA, 24 bp, Artificial sequence
  SiRNA target sequence
gtggacaatttttcgacttatggg

SEQ ID NO: 135290 - DNA, 24 bp, Artificial sequence
  SiRNA target sequence
tggacaatttttcgacttatggga

SEQ ID NO: 135291 - DNA, 24 bp, Artificial sequence
  SiRNA target sequence
ggacaatttttcgacttatgggag

SEQ ID NO: 135292 - DNA, 24 bp, Artificial sequence
  SiRNA target sequence
gacaatttttcgacttatgggaga

SEQ ID NO: 135293 - DNA, 24 bp, Artificial sequence
  SiRNA target sequence
acaatttttcgacttatgggagaa

SEQ ID NO: 135294 - DNA, 24 bp, Artificial sequence
  SiRNA target sequence
caatttttcgacttatgggagaac

SEQ ID NO: 135295 - DNA, 24 bp, Artificial sequence
  SiRNA target sequence
aatttttcgacttatgggagaaca

SEQ ID NO: 135296 - DNA, 24 bp, Artificial sequence
  SiRNA target sequence
atttttcgacttatgggagaacag

SEQ ID NO: 135297 - DNA, 24 bp, Artificial sequence
  SiRNA target sequence
tttttcgacttatgggagaacaga

SEQ ID NO: 135298 - DNA, 24 bp, Artificial sequence
  SiRNA target sequence
ttttcgacttatgggagaacagac

SEQ ID NO: 135299 - DNA, 24 bp, Artificial sequence
  SiRNA target sequence
tttcgacttatgggagaacagaca

SEQ ID NO: 135300 - DNA, 24 bp, Artificial sequence
  SiRNA target sequence
ttcgacttatgggagaacagacaa

SEQ ID NO: 135301 - DNA, 24 bp, Artificial sequence
  SiRNA target sequence
tcgacttatgggagaacagacaat

SEQ ID NO: 135302 - DNA, 24 bp, Artificial sequence
  SiRNA target sequence
cgacttatgggagaacagacaata

SEQ ID NO: 135303 - DNA, 24 bp, Artificial sequence
  SiRNA target sequence
gacttatgggagaacagacaataa

SEQ ID NO: 135304 - DNA, 24 bp, Artificial sequence
  SiRNA target sequence
acttatgggagaacagacaataaa

SEQ ID NO: 135305 - DNA, 24 bp, Artificial sequence
  SiRNA target sequence
cttatgggagaacagacaataaat

SEQ ID NO: 135306 - DNA, 24 bp, Artificial sequence
  SiRNA target sequence
ttatgggagaacagacaataaatc

SEQ ID NO: 135307 - DNA, 24 bp, Artificial sequence
  SiRNA target sequence
tatgggagaacagacaataaatca

SEQ ID NO: 135308 - DNA, 24 bp, Artificial sequence
  SiRNA target sequence
atgggagaacagacaataaatcaa

SEQ ID NO: 135309 - DNA, 24 bp, Artificial sequence
  SiRNA target sequence
tgggagaacagacaataaatcaaa

SEQ ID NO: 135310 - DNA, 24 bp, Artificial sequence
  SiRNA target sequence
gggagaacagacaataaatcaaat

SEQ ID NO: 135311 - DNA, 24 bp, Artificial sequence
  SiRNA target sequence
ggagaacagacaataaatcaaatt

SEQ ID NO: 135312 - DNA, 24 bp, Artificial sequence
  SiRNA target sequence
gagaacagacaataaatcaaatta

SEQ ID NO: 135313 - DNA, 24 bp, Artificial sequence
  SiRNA target sequence
agaacagacaataaatcaaattat

SEQ ID NO: 135314 - DNA, 24 bp, Artificial sequence
  SiRNA target sequence
gaacagacaataaatcaaattata

SEQ ID NO: 135315 - DNA, 24 bp, Artificial sequence
  SiRNA target sequence
aacagacaataaatcaaattataa

SEQ ID NO: 135316 - DNA, 24 bp, Artificial sequence
  SiRNA target sequence
acagacaataaatcaaattataaa

SEQ ID NO: 135317 - DNA, 24 bp, Artificial sequence
  SiRNA target sequence
cagacaataaatcaaattataaaa

SEQ ID NO: 135318 - DNA, 24 bp, Artificial sequence
  SiRNA target sequence
agacaataaatcaaattataaaag

SEQ ID NO: 135319 - DNA, 24 bp, Artificial sequence
  SiRNA target sequence
gacaataaatcaaattataaaagt

SEQ ID NO: 135320 - DNA, 24 bp, Artificial sequence
  SiRNA target sequence
acaataaatcaaattataaaagtt

SEQ ID NO: 135321 - DNA, 24 bp, Artificial sequence
  SiRNA target sequence
caataaatcaaattataaaagttt

SEQ ID NO: 135322 - DNA, 24 bp, Artificial sequence
  SiRNA target sequence
aataaatcaaattataaaagtttt

SEQ ID NO: 135323 - DNA, 24 bp, Artificial sequence
  SiRNA target sequence
ataaatcaaattataaaagttttt

SEQ ID NO: 135324 - DNA, 24 bp, Artificial sequence
  SiRNA target sequence
taaatcaaattataaaagttttta

SEQ ID NO: 135325 - DNA, 24 bp, Artificial sequence
  SiRNA target sequence
aaatcaaattataaaagtttttaa

SEQ ID NO: 135326 - DNA, 24 bp, Artificial sequence
  SiRNA target sequence
aatcaaattataaaagtttttaat

SEQ ID NO: 135327 - DNA, 24 bp, Artificial sequence
  SiRNA target sequence
atcaaattataaaagtttttaata

SEQ ID NO: 135328 - DNA, 24 bp, Artificial sequence
  SiRNA target sequence
tcaaattataaaagtttttaatat

SEQ ID NO: 135329 - DNA, 24 bp, Artificial sequence
  SiRNA target sequence
caaattataaaagtttttaatata

SEQ ID NO: 135330 - DNA, 24 bp, Artificial sequence
  SiRNA target sequence
aaattataaaagtttttaatataa

SEQ ID NO: 135331 - DNA, 24 bp, Artificial sequence
  SiRNA target sequence
aattataaaagtttttaatataaa

SEQ ID NO: 135332 - DNA, 24 bp, Artificial sequence
  SiRNA target sequence
attataaaagtttttaatataaag

SEQ ID NO: 135333 - DNA, 24 bp, Artificial sequence
  SiRNA target sequence
ttataaaagtttttaatataaagt

SEQ ID NO: 135334 - DNA, 24 bp, Artificial sequence
  SiRNA target sequence
tataaaagtttttaatataaagtc

SEQ ID NO: 135335 - DNA, 24 bp, Artificial sequence
  SiRNA target sequence
ataaaagtttttaatataaagtct

SEQ ID NO: 135336 - DNA, 24 bp, Artificial sequence
  SiRNA target sequence
taaaagtttttaatataaagtcta

SEQ ID NO: 135337 - DNA, 24 bp, Artificial sequence
  SiRNA target sequence
aaaagtttttaatataaagtctaa

SEQ ID NO: 135338 - DNA, 24 bp, Artificial sequence
  SiRNA target sequence
aaagtttttaatataaagtctaat

SEQ ID NO: 135339 - DNA, 24 bp, Artificial sequence
  SiRNA target sequence
aagtttttaatataaagtctaata

SEQ ID NO: 135340 - DNA, 24 bp, Artificial sequence
  SiRNA target sequence
agtttttaatataaagtctaataa

SEQ ID NO: 135341 - DNA, 24 bp, Artificial sequence
  SiRNA target sequence
gtttttaatataaagtctaataaa

SEQ ID NO: 135342 - DNA, 24 bp, Artificial sequence
  SiRNA target sequence
tttttaatataaagtctaataaac

SEQ ID NO: 135343 - DNA, 24 bp, Artificial sequence
  SiRNA target sequence
ttttaatataaagtctaataaacc

SEQ ID NO: 135344 - DNA, 24 bp, Artificial sequence
  SiRNA target sequence
tttaatataaagtctaataaacca

SEQ ID NO: 135345 - DNA, 24 bp, Artificial sequence
  SiRNA target sequence
ttaatataaagtctaataaaccaa

SEQ ID NO: 135346 - DNA, 24 bp, Artificial sequence
  SiRNA target sequence
taatataaagtctaataaaccaag

SEQ ID NO: 135347 - DNA, 24 bp, Artificial sequence
  SiRNA target sequence
aatataaagtctaataaaccaagt

SEQ ID NO: 135348 - DNA, 24 bp, Artificial sequence
  SiRNA target sequence
atataaagtctaataaaccaagta

SEQ ID NO: 135349 - DNA, 24 bp, Artificial sequence
  SiRNA target sequence
tataaagtctaataaaccaagtat

SEQ ID NO: 135350 - DNA, 24 bp, Artificial sequence
  SiRNA target sequence
ataaagtctaataaaccaagtata

SEQ ID NO: 135351 - DNA, 24 bp, Artificial sequence
  SiRNA target sequence
taaagtctaataaaccaagtataa

SEQ ID NO: 135352 - DNA, 24 bp, Artificial sequence
  SiRNA target sequence
aaagtctaataaaccaagtataac

SEQ ID NO: 135353 - DNA, 24 bp, Artificial sequence
  SiRNA target sequence
aagtctaataaaccaagtataaca

SEQ ID NO: 135354 - DNA, 24 bp, Artificial sequence
  SiRNA target sequence
agtctaataaaccaagtataacac

SEQ ID NO: 135355 - DNA, 24 bp, Artificial sequence
  SiRNA target sequence
gtctaataaaccaagtataacaca

SEQ ID NO: 135356 - DNA, 24 bp, Artificial sequence
  SiRNA target sequence
tctaataaaccaagtataacacaa

SEQ ID NO: 135357 - DNA, 24 bp, Artificial sequence
  SiRNA target sequence
ctaataaaccaagtataacacaat

SEQ ID NO: 135358 - DNA, 24 bp, Artificial sequence
  SiRNA target sequence
taataaaccaagtataacacaata

SEQ ID NO: 135359 - DNA, 24 bp, Artificial sequence
  SiRNA target sequence
aataaaccaagtataacacaatat

SEQ ID NO: 135360 - DNA, 24 bp, Artificial sequence
  SiRNA target sequence
ataaaccaagtataacacaatatc

SEQ ID NO: 135361 - DNA, 24 bp, Artificial sequence
  SiRNA target sequence
taaaccaagtataacacaatatct

SEQ ID NO: 135362 - DNA, 24 bp, Artificial sequence
  SiRNA target sequence
aaaccaagtataacacaatatctt

SEQ ID NO: 135363 - DNA, 24 bp, Artificial sequence
  SiRNA target sequence
aaccaagtataacacaatatcttc

SEQ ID NO: 135364 - DNA, 24 bp, Artificial sequence
  SiRNA target sequence
accaagtataacacaatatcttcc

SEQ ID NO: 135365 - DNA, 24 bp, Artificial sequence
  SiRNA target sequence
ccaagtataacacaatatcttcct

SEQ ID NO: 135366 - DNA, 24 bp, Artificial sequence
  SiRNA target sequence
caagtataacacaatatcttcctg

SEQ ID NO: 135367 - DNA, 24 bp, Artificial sequence
  SiRNA target sequence
aagtataacacaatatcttcctgt

SEQ ID NO: 135368 - DNA, 24 bp, Artificial sequence
  SiRNA target sequence
agtataacacaatatcttcctgtt

SEQ ID NO: 135369 - DNA, 24 bp, Artificial sequence
  SiRNA target sequence
gtataacacaatatcttcctgttt

SEQ ID NO: 135370 - DNA, 24 bp, Artificial sequence
  SiRNA target sequence
tataacacaatatcttcctgtttt

SEQ ID NO: 135371 - DNA, 24 bp, Artificial sequence
  SiRNA target sequence
ataacacaatatcttcctgttttg

SEQ ID NO: 135372 - DNA, 24 bp, Artificial sequence
  SiRNA target sequence
taacacaatatcttcctgttttgg

SEQ ID NO: 135373 - DNA, 24 bp, Artificial sequence
  SiRNA target sequence
aacacaatatcttcctgttttggg

SEQ ID NO: 135374 - DNA, 24 bp, Artificial sequence
  SiRNA target sequence
acacaatatcttcctgttttggga

SEQ ID NO: 135375 - DNA, 24 bp, Artificial sequence
  SiRNA target sequence
cacaatatcttcctgttttgggat

SEQ ID NO: 135376 - DNA, 24 bp, Artificial sequence
  SiRNA target sequence
acaatatcttcctgttttgggatc

SEQ ID NO: 135377 - DNA, 24 bp, Artificial sequence
  SiRNA target sequence
caatatcttcctgttttgggatca

SEQ ID NO: 135378 - DNA, 24 bp, Artificial sequence
  SiRNA target sequence
aatatcttcctgttttgggatcac

SEQ ID NO: 135379 - DNA, 24 bp, Artificial sequence
  SiRNA target sequence
atatcttcctgttttgggatcaca

SEQ ID NO: 135380 - DNA, 24 bp, Artificial sequence
  SiRNA target sequence
tatcttcctgttttgggatcacag

SEQ ID NO: 135381 - DNA, 24 bp, Artificial sequence
  SiRNA target sequence
atcttcctgttttgggatcacagg

SEQ ID NO: 135382 - DNA, 24 bp, Artificial sequence
  SiRNA target sequence
tcttcctgttttgggatcacaggg

SEQ ID NO: 135383 - DNA, 24 bp, Artificial sequence
  SiRNA target sequence
cttcctgttttgggatcacaggga

SEQ ID NO: 135384 - DNA, 24 bp, Artificial sequence
  SiRNA target sequence
ttcctgttttgggatcacagggat

SEQ ID NO: 135385 - DNA, 24 bp, Artificial sequence
  SiRNA target sequence
tcctgttttgggatcacagggata

SEQ ID NO: 135386 - DNA, 24 bp, Artificial sequence
  SiRNA target sequence
cctgttttgggatcacagggatat

SEQ ID NO: 135387 - DNA, 24 bp, Artificial sequence
  SiRNA target sequence
ctgttttgggatcacagggatata

SEQ ID NO: 135388 - DNA, 24 bp, Artificial sequence
  SiRNA target sequence
tgttttgggatcacagggatatac

SEQ ID NO: 135389 - DNA, 24 bp, Artificial sequence
  SiRNA target sequence
gttttgggatcacagggatatact

SEQ ID NO: 135390 - DNA, 24 bp, Artificial sequence
  SiRNA target sequence
ttttgggatcacagggatatacta

SEQ ID NO: 135391 - DNA, 24 bp, Artificial sequence
  SiRNA target sequence
tttgggatcacagggatatactaa

SEQ ID NO: 135392 - DNA, 24 bp, Artificial sequence
  SiRNA target sequence
ttgggatcacagggatatactaaa

SEQ ID NO: 135393 - DNA, 24 bp, Artificial sequence
  SiRNA target sequence
tgggatcacagggatatactaaag

SEQ ID NO: 135394 - DNA, 24 bp, Artificial sequence
  SiRNA target sequence
gggatcacagggatatactaaagc

SEQ ID NO: 135395 - DNA, 24 bp, Artificial sequence
  SiRNA target sequence
ggatcacagggatatactaaagct

SEQ ID NO: 135396 - DNA, 24 bp, Artificial sequence
  SiRNA target sequence
gatcacagggatatactaaagcta

SEQ ID NO: 135397 - DNA, 24 bp, Artificial sequence
  SiRNA target sequence
atcacagggatatactaaagctac

SEQ ID NO: 135398 - DNA, 24 bp, Artificial sequence
  SiRNA target sequence
tcacagggatatactaaagctaca

SEQ ID NO: 135399 - DNA, 24 bp, Artificial sequence
  SiRNA target sequence
cacagggatatactaaagctacag

SEQ ID NO: 135400 - DNA, 24 bp, Artificial sequence
  SiRNA target sequence
acagggatatactaaagctacaga

SEQ ID NO: 135401 - DNA, 24 bp, Artificial sequence
  SiRNA target sequence
cagggatatactaaagctacagaa

SEQ ID NO: 135402 - DNA, 24 bp, Artificial sequence
  SiRNA target sequence
agggatatactaaagctacagaat

SEQ ID NO: 135403 - DNA, 24 bp, Artificial sequence
  SiRNA target sequence
gggatatactaaagctacagaatt

SEQ ID NO: 135404 - DNA, 24 bp, Artificial sequence
  SiRNA target sequence
ggatatactaaagctacagaattt

SEQ ID NO: 135405 - DNA, 24 bp, Artificial sequence
  SiRNA target sequence
gatatactaaagctacagaatttg

SEQ ID NO: 135406 - DNA, 24 bp, Artificial sequence
  SiRNA target sequence
atatactaaagctacagaatttga

SEQ ID NO: 135407 - DNA, 24 bp, Artificial sequence
  SiRNA target sequence
tatactaaagctacagaatttgat

SEQ ID NO: 135408 - DNA, 24 bp, Artificial sequence
  SiRNA target sequence
atactaaagctacagaatttgatt

SEQ ID NO: 135409 - DNA, 24 bp, Artificial sequence
  SiRNA target sequence
tactaaagctacagaatttgattt

SEQ ID NO: 135410 - DNA, 24 bp, Artificial sequence
  SiRNA target sequence
actaaagctacagaatttgatttg

SEQ ID NO: 135411 - DNA, 24 bp, Artificial sequence
  SiRNA target sequence
ctaaagctacagaatttgatttgg

SEQ ID NO: 135412 - DNA, 24 bp, Artificial sequence
  SiRNA target sequence
taaagctacagaatttgatttggc

SEQ ID NO: 135413 - DNA, 24 bp, Artificial sequence
  SiRNA target sequence
aaagctacagaatttgatttggca

SEQ ID NO: 135414 - DNA, 24 bp, Artificial sequence
  SiRNA target sequence
aagctacagaatttgatttggcac

SEQ ID NO: 135415 - DNA, 24 bp, Artificial sequence
  SiRNA target sequence
agctacagaatttgatttggcact

SEQ ID NO: 135416 - DNA, 24 bp, Artificial sequence
  SiRNA target sequence
gctacagaatttgatttggcactt

SEQ ID NO: 135417 - DNA, 24 bp, Artificial sequence
  SiRNA target sequence
ctacagaatttgatttggcactta

SEQ ID NO: 135418 - DNA, 24 bp, Artificial sequence
  SiRNA target sequence
tacagaatttgatttggcacttac

SEQ ID NO: 135419 - DNA, 24 bp, Artificial sequence
  SiRNA target sequence
acagaatttgatttggcacttact

SEQ ID NO: 135420 - DNA, 24 bp, Artificial sequence
  SiRNA target sequence
cagaatttgatttggcacttactt

SEQ ID NO: 135421 - DNA, 24 bp, Artificial sequence
  SiRNA target sequence
agaatttgatttggcacttacttt

SEQ ID NO: 135422 - DNA, 24 bp, Artificial sequence
  SiRNA target sequence
gaatttgatttggcacttacttta

SEQ ID NO: 135423 - DNA, 24 bp, Artificial sequence
  SiRNA target sequence
aatttgatttggcacttactttaa

SEQ ID NO: 135424 - DNA, 24 bp, Artificial sequence
  SiRNA target sequence
atttgatttggcacttactttaaa

SEQ ID NO: 135425 - DNA, 24 bp, Artificial sequence
  SiRNA target sequence
tttgatttggcacttactttaaat

SEQ ID NO: 135426 - DNA, 24 bp, Artificial sequence
  SiRNA target sequence
ttgatttggcacttactttaaata

SEQ ID NO: 135427 - DNA, 24 bp, Artificial sequence
  SiRNA target sequence
tgatttggcacttactttaaatat

SEQ ID NO: 135428 - DNA, 24 bp, Artificial sequence
  SiRNA target sequence
gatttggcacttactttaaatatt

SEQ ID NO: 135429 - DNA, 24 bp, Artificial sequence
  SiRNA target sequence
atttggcacttactttaaatattc

SEQ ID NO: 135430 - DNA, 24 bp, Artificial sequence
  SiRNA target sequence
tttggcacttactttaaatattcc

SEQ ID NO: 135431 - DNA, 24 bp, Artificial sequence
  SiRNA target sequence
ttggcacttactttaaatattcca

SEQ ID NO: 135432 - DNA, 24 bp, Artificial sequence
  SiRNA target sequence
tggcacttactttaaatattccag

SEQ ID NO: 135433 - DNA, 24 bp, Artificial sequence
  SiRNA target sequence
ggcacttactttaaatattccaga

SEQ ID NO: 135434 - DNA, 24 bp, Artificial sequence
  SiRNA target sequence
gcacttactttaaatattccagaa

SEQ ID NO: 135435 - DNA, 24 bp, Artificial sequence
  SiRNA target sequence
cacttactttaaatattccagaag

SEQ ID NO: 135436 - DNA, 24 bp, Artificial sequence
  SiRNA target sequence
acttactttaaatattccagaaga

SEQ ID NO: 135437 - DNA, 24 bp, Artificial sequence
  SiRNA target sequence
cttactttaaatattccagaagat

SEQ ID NO: 135438 - DNA, 24 bp, Artificial sequence
  SiRNA target sequence
ttactttaaatattccagaagata

SEQ ID NO: 135439 - DNA, 24 bp, Artificial sequence
  SiRNA target sequence
tactttaaatattccagaagatat

SEQ ID NO: 135440 - DNA, 24 bp, Artificial sequence
  SiRNA target sequence
actttaaatattccagaagatata

SEQ ID NO: 135441 - DNA, 24 bp, Artificial sequence
  SiRNA target sequence
ctttaaatattccagaagatatag

SEQ ID NO: 135442 - DNA, 24 bp, Artificial sequence
  SiRNA target sequence
tttaaatattccagaagatatagc

SEQ ID NO: 135443 - DNA, 24 bp, Artificial sequence
  SiRNA target sequence
ttaaatattccagaagatatagct

SEQ ID NO: 135444 - DNA, 24 bp, Artificial sequence
  SiRNA target sequence
taaatattccagaagatatagcta

SEQ ID NO: 135445 - DNA, 24 bp, Artificial sequence
  SiRNA target sequence
aaatattccagaagatatagctaa

SEQ ID NO: 135446 - DNA, 24 bp, Artificial sequence
  SiRNA target sequence
aatattccagaagatatagctaag

SEQ ID NO: 135447 - DNA, 24 bp, Artificial sequence
  SiRNA target sequence
atattccagaagatatagctaagc

SEQ ID NO: 135448 - DNA, 24 bp, Artificial sequence
  SiRNA target sequence
tattccagaagatatagctaagca

SEQ ID NO: 135449 - DNA, 24 bp, Artificial sequence
  SiRNA target sequence
attccagaagatatagctaagcat

SEQ ID NO: 135450 - DNA, 24 bp, Artificial sequence
  SiRNA target sequence
ttccagaagatatagctaagcatt

SEQ ID NO: 135451 - DNA, 24 bp, Artificial sequence
  SiRNA target sequence
tccagaagatatagctaagcattt

SEQ ID NO: 135452 - DNA, 24 bp, Artificial sequence
  SiRNA target sequence
ccagaagatatagctaagcattta

SEQ ID NO: 135453 - DNA, 24 bp, Artificial sequence
  SiRNA target sequence
cagaagatatagctaagcatttag

SEQ ID NO: 135454 - DNA, 24 bp, Artificial sequence
  SiRNA target sequence
agaagatatagctaagcatttagc

SEQ ID NO: 135455 - DNA, 24 bp, Artificial sequence
  SiRNA target sequence
gaagatatagctaagcatttagct

SEQ ID NO: 135456 - DNA, 24 bp, Artificial sequence
  SiRNA target sequence
aagatatagctaagcatttagcta

SEQ ID NO: 135457 - DNA, 24 bp, Artificial sequence
  SiRNA target sequence
agatatagctaagcatttagctac

SEQ ID NO: 135458 - DNA, 24 bp, Artificial sequence
  SiRNA target sequence
gatatagctaagcatttagctaca

SEQ ID NO: 135459 - DNA, 24 bp, Artificial sequence
  SiRNA target sequence
atatagctaagcatttagctacaa

SEQ ID NO: 135460 - DNA, 24 bp, Artificial sequence
  SiRNA target sequence
tatagctaagcatttagctacaac

SEQ ID NO: 135461 - DNA, 24 bp, Artificial sequence
  SiRNA target sequence
atagctaagcatttagctacaact

SEQ ID NO: 135462 - DNA, 24 bp, Artificial sequence
  SiRNA target sequence
tagctaagcatttagctacaactt

SEQ ID NO: 135463 - DNA, 24 bp, Artificial sequence
  SiRNA target sequence
agctaagcatttagctacaactta

SEQ ID NO: 135464 - DNA, 24 bp, Artificial sequence
  SiRNA target sequence
gctaagcatttagctacaacttat

SEQ ID NO: 135465 - DNA, 24 bp, Artificial sequence
  SiRNA target sequence
ctaagcatttagctacaacttatg

SEQ ID NO: 135466 - DNA, 24 bp, Artificial sequence
  SiRNA target sequence
taagcatttagctacaacttatgg

SEQ ID NO: 135467 - DNA, 24 bp, Artificial sequence
  SiRNA target sequence
aagcatttagctacaacttatggt

SEQ ID NO: 135468 - DNA, 24 bp, Artificial sequence
  SiRNA target sequence
agcatttagctacaacttatggta

SEQ ID NO: 135469 - DNA, 24 bp, Artificial sequence
  SiRNA target sequence
gcatttagctacaacttatggtac

SEQ ID NO: 135470 - DNA, 24 bp, Artificial sequence
  SiRNA target sequence
catttagctacaacttatggtacc

SEQ ID NO: 135471 - DNA, 24 bp, Artificial sequence
  SiRNA target sequence
atttagctacaacttatggtacca

SEQ ID NO: 135472 - DNA, 24 bp, Artificial sequence
  SiRNA target sequence
tttagctacaacttatggtaccaa

SEQ ID NO: 135473 - DNA, 24 bp, Artificial sequence
  SiRNA target sequence
ttagctacaacttatggtaccaaa

SEQ ID NO: 135474 - DNA, 24 bp, Artificial sequence
  SiRNA target sequence
tagctacaacttatggtaccaaag

SEQ ID NO: 135475 - DNA, 24 bp, Artificial sequence
  SiRNA target sequence
agctacaacttatggtaccaaagc

SEQ ID NO: 135476 - DNA, 24 bp, Artificial sequence
  SiRNA target sequence
gctacaacttatggtaccaaagct

SEQ ID NO: 135477 - DNA, 24 bp, Artificial sequence
  SiRNA target sequence
ctacaacttatggtaccaaagctt

SEQ ID NO: 135478 - DNA, 24 bp, Artificial sequence
  SiRNA target sequence
tacaacttatggtaccaaagctta

SEQ ID NO: 135479 - DNA, 24 bp, Artificial sequence
  SiRNA target sequence
acaacttatggtaccaaagcttac

SEQ ID NO: 135480 - DNA, 24 bp, Artificial sequence
  SiRNA target sequence
caacttatggtaccaaagcttaca

SEQ ID NO: 135481 - DNA, 24 bp, Artificial sequence
  SiRNA target sequence
aacttatggtaccaaagcttacaa

SEQ ID NO: 135482 - DNA, 24 bp, Artificial sequence
  SiRNA target sequence
acttatggtaccaaagcttacaat

SEQ ID NO: 135483 - DNA, 24 bp, Artificial sequence
  SiRNA target sequence
cttatggtaccaaagcttacaatt

SEQ ID NO: 135484 - DNA, 24 bp, Artificial sequence
  SiRNA target sequence
ttatggtaccaaagcttacaattt

SEQ ID NO: 135485 - DNA, 24 bp, Artificial sequence
  SiRNA target sequence
tatggtaccaaagcttacaatttc

SEQ ID NO: 135486 - DNA, 24 bp, Artificial sequence
  SiRNA target sequence
atggtaccaaagcttacaatttct

SEQ ID NO: 135487 - DNA, 24 bp, Artificial sequence
  SiRNA target sequence
tggtaccaaagcttacaatttctc

SEQ ID NO: 135488 - DNA, 24 bp, Artificial sequence
  SiRNA target sequence
ggtaccaaagcttacaatttctct

SEQ ID NO: 135489 - DNA, 24 bp, Artificial sequence
  SiRNA target sequence
gtaccaaagcttacaatttctctg

SEQ ID NO: 135490 - DNA, 24 bp, Artificial sequence
  SiRNA target sequence
taccaaagcttacaatttctctga

SEQ ID NO: 135491 - DNA, 24 bp, Artificial sequence
  SiRNA target sequence
accaaagcttacaatttctctgaa

SEQ ID NO: 135492 - DNA, 24 bp, Artificial sequence
  SiRNA target sequence
ccaaagcttacaatttctctgaat

SEQ ID NO: 135493 - DNA, 24 bp, Artificial sequence
  SiRNA target sequence
caaagcttacaatttctctgaata

SEQ ID NO: 135494 - DNA, 24 bp, Artificial sequence
  SiRNA target sequence
aaagcttacaatttctctgaatac

SEQ ID NO: 135495 - DNA, 24 bp, Artificial sequence
  SiRNA target sequence
aagcttacaatttctctgaatact

SEQ ID NO: 135496 - DNA, 24 bp, Artificial sequence
  SiRNA target sequence
agcttacaatttctctgaatactt

SEQ ID NO: 135497 - DNA, 24 bp, Artificial sequence
  SiRNA target sequence
gcttacaatttctctgaatacttt

SEQ ID NO: 135498 - DNA, 24 bp, Artificial sequence
  SiRNA target sequence
cttacaatttctctgaatacttta

SEQ ID NO: 135499 - DNA, 24 bp, Artificial sequence
  SiRNA target sequence
ttacaatttctctgaatactttaa

SEQ ID NO: 135500 - DNA, 24 bp, Artificial sequence
  SiRNA target sequence
tacaatttctctgaatactttaat

SEQ ID NO: 135501 - DNA, 24 bp, Artificial sequence
  SiRNA target sequence
acaatttctctgaatactttaatg

SEQ ID NO: 135502 - DNA, 24 bp, Artificial sequence
  SiRNA target sequence
caatttctctgaatactttaatgg

SEQ ID NO: 135503 - DNA, 24 bp, Artificial sequence
  SiRNA target sequence
aatttctctgaatactttaatggg

SEQ ID NO: 135504 - DNA, 24 bp, Artificial sequence
  SiRNA target sequence
atttctctgaatactttaatgggt

SEQ ID NO: 135505 - DNA, 24 bp, Artificial sequence
  SiRNA target sequence
tttctctgaatactttaatgggtc

SEQ ID NO: 135506 - DNA, 24 bp, Artificial sequence
  SiRNA target sequence
ttctctgaatactttaatgggtca

SEQ ID NO: 135507 - DNA, 24 bp, Artificial sequence
  SiRNA target sequence
tctctgaatactttaatgggtcat

SEQ ID NO: 135508 - DNA, 24 bp, Artificial sequence
  SiRNA target sequence
ctctgaatactttaatgggtcata

SEQ ID NO: 135509 - DNA, 24 bp, Artificial sequence
  SiRNA target sequence
tctgaatactttaatgggtcatac

SEQ ID NO: 135510 - DNA, 24 bp, Artificial sequence
  SiRNA target sequence
ctgaatactttaatgggtcataca

SEQ ID NO: 135511 - DNA, 24 bp, Artificial sequence
  SiRNA target sequence
tgaatactttaatgggtcatacac

SEQ ID NO: 135512 - DNA, 24 bp, Artificial sequence
  SiRNA target sequence
gaatactttaatgggtcatacacc

SEQ ID NO: 135513 - DNA, 24 bp, Artificial sequence
  SiRNA target sequence
aatactttaatgggtcatacacca

SEQ ID NO: 135514 - DNA, 24 bp, Artificial sequence
  SiRNA target sequence
atactttaatgggtcatacaccag

SEQ ID NO: 135515 - DNA, 24 bp, Artificial sequence
  SiRNA target sequence
tactttaatgggtcatacaccaga

SEQ ID NO: 135516 - DNA, 24 bp, Artificial sequence
  SiRNA target sequence
actttaatgggtcatacaccagac

SEQ ID NO: 135517 - DNA, 24 bp, Artificial sequence
  SiRNA target sequence
ctttaatgggtcatacaccagact

SEQ ID NO: 135518 - DNA, 24 bp, Artificial sequence
  SiRNA target sequence
tttaatgggtcatacaccagactt

SEQ ID NO: 135519 - DNA, 24 bp, Artificial sequence
  SiRNA target sequence
ttaatgggtcatacaccagactta

SEQ ID NO: 135520 - DNA, 24 bp, Artificial sequence
  SiRNA target sequence
taatgggtcatacaccagacttac

SEQ ID NO: 135521 - DNA, 24 bp, Artificial sequence
  SiRNA target sequence
aatgggtcatacaccagacttaca

SEQ ID NO: 135522 - DNA, 24 bp, Artificial sequence
  SiRNA target sequence
atgggtcatacaccagacttacag

SEQ ID NO: 135523 - DNA, 24 bp, Artificial sequence
  SiRNA target sequence
tgggtcatacaccagacttacaga

SEQ ID NO: 135524 - DNA, 24 bp, Artificial sequence
  SiRNA target sequence
gggtcatacaccagacttacagat

SEQ ID NO: 135525 - DNA, 24 bp, Artificial sequence
  SiRNA target sequence
ggtcatacaccagacttacagatg

SEQ ID NO: 135526 - DNA, 24 bp, Artificial sequence
  SiRNA target sequence
gtcatacaccagacttacagatgg

SEQ ID NO: 135527 - DNA, 24 bp, Artificial sequence
  SiRNA target sequence
tcatacaccagacttacagatggt

SEQ ID NO: 135528 - DNA, 24 bp, Artificial sequence
  SiRNA target sequence
catacaccagacttacagatggtt

SEQ ID NO: 135529 - DNA, 24 bp, Artificial sequence
  SiRNA target sequence
atacaccagacttacagatggtta

SEQ ID NO: 135530 - DNA, 24 bp, Artificial sequence
  SiRNA target sequence
tacaccagacttacagatggttat

SEQ ID NO: 135531 - DNA, 24 bp, Artificial sequence
  SiRNA target sequence
acaccagacttacagatggttatc

SEQ ID NO: 135532 - DNA, 24 bp, Artificial sequence
  SiRNA target sequence
caccagacttacagatggttatcc

SEQ ID NO: 135533 - DNA, 24 bp, Artificial sequence
  SiRNA target sequence
accagacttacagatggttatcct

SEQ ID NO: 135534 - DNA, 24 bp, Artificial sequence
  SiRNA target sequence
ccagacttacagatggttatcctt

SEQ ID NO: 135535 - DNA, 24 bp, Artificial sequence
  SiRNA target sequence
cagacttacagatggttatcctta

SEQ ID NO: 135536 - DNA, 24 bp, Artificial sequence
  SiRNA target sequence
agacttacagatggttatccttat

SEQ ID NO: 135537 - DNA, 24 bp, Artificial sequence
  SiRNA target sequence
gacttacagatggttatccttata

SEQ ID NO: 135538 - DNA, 24 bp, Artificial sequence
  SiRNA target sequence
acttacagatggttatccttatac

SEQ ID NO: 135539 - DNA, 24 bp, Artificial sequence
  SiRNA target sequence
cttacagatggttatccttataca

SEQ ID NO: 135540 - DNA, 24 bp, Artificial sequence
  SiRNA target sequence
ttacagatggttatccttatacaa

SEQ ID NO: 135541 - DNA, 24 bp, Artificial sequence
  SiRNA target sequence
tacagatggttatccttatacaaa

SEQ ID NO: 135542 - DNA, 24 bp, Artificial sequence
  SiRNA target sequence
acagatggttatccttatacaaaa

SEQ ID NO: 135543 - DNA, 24 bp, Artificial sequence
  SiRNA target sequence
cagatggttatccttatacaaaag

SEQ ID NO: 135544 - DNA, 24 bp, Artificial sequence
  SiRNA target sequence
agatggttatccttatacaaaaga

SEQ ID NO: 135545 - DNA, 24 bp, Artificial sequence
  SiRNA target sequence
gatggttatccttatacaaaagaa

SEQ ID NO: 135546 - DNA, 24 bp, Artificial sequence
  SiRNA target sequence
atggttatccttatacaaaagaag

SEQ ID NO: 135547 - DNA, 24 bp, Artificial sequence
  SiRNA target sequence
tggttatccttatacaaaagaaga

SEQ ID NO: 135548 - DNA, 24 bp, Artificial sequence
  SiRNA target sequence
ggttatccttatacaaaagaagaa

SEQ ID NO: 135549 - DNA, 24 bp, Artificial sequence
  SiRNA target sequence
gttatccttatacaaaagaagaaa

SEQ ID NO: 135550 - DNA, 24 bp, Artificial sequence
  SiRNA target sequence
ttatccttatacaaaagaagaaat

SEQ ID NO: 135551 - DNA, 24 bp, Artificial sequence
  SiRNA target sequence
tatccttatacaaaagaagaaata

SEQ ID NO: 135552 - DNA, 24 bp, Artificial sequence
  SiRNA target sequence
atccttatacaaaagaagaaatag

SEQ ID NO: 135553 - DNA, 24 bp, Artificial sequence
  SiRNA target sequence
tccttatacaaaagaagaaatagt

SEQ ID NO: 135554 - DNA, 24 bp, Artificial sequence
  SiRNA target sequence
ccttatacaaaagaagaaatagta

SEQ ID NO: 135555 - DNA, 24 bp, Artificial sequence
  SiRNA target sequence
cttatacaaaagaagaaatagtat

SEQ ID NO: 135556 - DNA, 24 bp, Artificial sequence
  SiRNA target sequence
ttatacaaaagaagaaatagtata

SEQ ID NO: 135557 - DNA, 24 bp, Artificial sequence
  SiRNA target sequence
tatacaaaagaagaaatagtatat

SEQ ID NO: 135558 - DNA, 24 bp, Artificial sequence
  SiRNA target sequence
atacaaaagaagaaatagtatatt

SEQ ID NO: 135559 - DNA, 24 bp, Artificial sequence
  SiRNA target sequence
tacaaaagaagaaatagtatattg

SEQ ID NO: 135560 - DNA, 24 bp, Artificial sequence
  SiRNA target sequence
acaaaagaagaaatagtatattgt

SEQ ID NO: 135561 - DNA, 24 bp, Artificial sequence
  SiRNA target sequence
caaaagaagaaatagtatattgta

SEQ ID NO: 135562 - DNA, 24 bp, Artificial sequence
  SiRNA target sequence
aaaagaagaaatagtatattgtat

SEQ ID NO: 135563 - DNA, 24 bp, Artificial sequence
  SiRNA target sequence
aaagaagaaatagtatattgtatc

SEQ ID NO: 135564 - DNA, 24 bp, Artificial sequence
  SiRNA target sequence
aagaagaaatagtatattgtatcg

SEQ ID NO: 135565 - DNA, 24 bp, Artificial sequence
  SiRNA target sequence
agaagaaatagtatattgtatcga

SEQ ID NO: 135566 - DNA, 24 bp, Artificial sequence
  SiRNA target sequence
gaagaaatagtatattgtatcgaa

SEQ ID NO: 135567 - DNA, 24 bp, Artificial sequence
  SiRNA target sequence
aagaaatagtatattgtatcgaac

SEQ ID NO: 135568 - DNA, 24 bp, Artificial sequence
  SiRNA target sequence
agaaatagtatattgtatcgaaca

SEQ ID NO: 135569 - DNA, 24 bp, Artificial sequence
  SiRNA target sequence
gaaatagtatattgtatcgaacat

SEQ ID NO: 135570 - DNA, 24 bp, Artificial sequence
  SiRNA target sequence
aaatagtatattgtatcgaacatg

SEQ ID NO: 135571 - DNA, 24 bp, Artificial sequence
  SiRNA target sequence
aatagtatattgtatcgaacatga

SEQ ID NO: 135572 - DNA, 24 bp, Artificial sequence
  SiRNA target sequence
atagtatattgtatcgaacatgaa

SEQ ID NO: 135573 - DNA, 24 bp, Artificial sequence
  SiRNA target sequence
tagtatattgtatcgaacatgaat

SEQ ID NO: 135574 - DNA, 24 bp, Artificial sequence
  SiRNA target sequence
agtatattgtatcgaacatgaatt

SEQ ID NO: 135575 - DNA, 24 bp, Artificial sequence
  SiRNA target sequence
gtatattgtatcgaacatgaattg

SEQ ID NO: 135576 - DNA, 24 bp, Artificial sequence
  SiRNA target sequence
tatattgtatcgaacatgaattgg

SEQ ID NO: 135577 - DNA, 24 bp, Artificial sequence
  SiRNA target sequence
atattgtatcgaacatgaattggc

SEQ ID NO: 135578 - DNA, 24 bp, Artificial sequence
  SiRNA target sequence
tattgtatcgaacatgaattggct

SEQ ID NO: 135579 - DNA, 24 bp, Artificial sequence
  SiRNA target sequence
attgtatcgaacatgaattggctt

SEQ ID NO: 135580 - DNA, 24 bp, Artificial sequence
  SiRNA target sequence
ttgtatcgaacatgaattggctta

SEQ ID NO: 135581 - DNA, 24 bp, Artificial sequence
  SiRNA target sequence
tgtatcgaacatgaattggcttat

SEQ ID NO: 135582 - DNA, 24 bp, Artificial sequence
  SiRNA target sequence
gtatcgaacatgaattggcttatc

SEQ ID NO: 135583 - DNA, 24 bp, Artificial sequence
  SiRNA target sequence
tatcgaacatgaattggcttatcg

SEQ ID NO: 135584 - DNA, 24 bp, Artificial sequence
  SiRNA target sequence
atcgaacatgaattggcttatcgc

SEQ ID NO: 135585 - DNA, 24 bp, Artificial sequence
  SiRNA target sequence
tcgaacatgaattggcttatcgca

SEQ ID NO: 135586 - DNA, 24 bp, Artificial sequence
  SiRNA target sequence
cgaacatgaattggcttatcgcat

SEQ ID NO: 135587 - DNA, 24 bp, Artificial sequence
  SiRNA target sequence
gaacatgaattggcttatcgcatc

SEQ ID NO: 135588 - DNA, 24 bp, Artificial sequence
  SiRNA target sequence
aacatgaattggcttatcgcatca

SEQ ID NO: 135589 - DNA, 24 bp, Artificial sequence
  SiRNA target sequence
acatgaattggcttatcgcatcag

SEQ ID NO: 135590 - DNA, 24 bp, Artificial sequence
  SiRNA target sequence
catgaattggcttatcgcatcagt

SEQ ID NO: 135591 - DNA, 24 bp, Artificial sequence
  SiRNA target sequence
atgaattggcttatcgcatcagtg

SEQ ID NO: 135592 - DNA, 24 bp, Artificial sequence
  SiRNA target sequence
tgaattggcttatcgcatcagtga

SEQ ID NO: 135593 - DNA, 24 bp, Artificial sequence
  SiRNA target sequence
gaattggcttatcgcatcagtgat

SEQ ID NO: 135594 - DNA, 24 bp, Artificial sequence
  SiRNA target sequence
aattggcttatcgcatcagtgata

SEQ ID NO: 135595 - DNA, 24 bp, Artificial sequence
  SiRNA target sequence
attggcttatcgcatcagtgatat

SEQ ID NO: 135596 - DNA, 24 bp, Artificial sequence
  SiRNA target sequence
ttggcttatcgcatcagtgatata

SEQ ID NO: 135597 - DNA, 24 bp, Artificial sequence
  SiRNA target sequence
tggcttatcgcatcagtgatatat

SEQ ID NO: 135598 - DNA, 24 bp, Artificial sequence
  SiRNA target sequence
ggcttatcgcatcagtgatatatt

SEQ ID NO: 135599 - DNA, 24 bp, Artificial sequence
  SiRNA target sequence
gcttatcgcatcagtgatatatta

SEQ ID NO: 135600 - DNA, 24 bp, Artificial sequence
  SiRNA target sequence
cttatcgcatcagtgatatattat

SEQ ID NO: 135601 - DNA, 24 bp, Artificial sequence
  SiRNA target sequence
ttatcgcatcagtgatatattatt

SEQ ID NO: 135602 - DNA, 24 bp, Artificial sequence
  SiRNA target sequence
tatcgcatcagtgatatattattt

SEQ ID NO: 135603 - DNA, 24 bp, Artificial sequence
  SiRNA target sequence
atcgcatcagtgatatattattta

SEQ ID NO: 135604 - DNA, 24 bp, Artificial sequence
  SiRNA target sequence
tcgcatcagtgatatattatttaa

SEQ ID NO: 135605 - DNA, 24 bp, Artificial sequence
  SiRNA target sequence
cgcatcagtgatatattatttaat

SEQ ID NO: 135606 - DNA, 24 bp, Artificial sequence
  SiRNA target sequence
gcatcagtgatatattatttaata

SEQ ID NO: 135607 - DNA, 24 bp, Artificial sequence
  SiRNA target sequence
catcagtgatatattatttaatag

SEQ ID NO: 135608 - DNA, 24 bp, Artificial sequence
  SiRNA target sequence
atcagtgatatattatttaatagg

SEQ ID NO: 135609 - DNA, 24 bp, Artificial sequence
  SiRNA target sequence
tcagtgatatattatttaatagga

SEQ ID NO: 135610 - DNA, 24 bp, Artificial sequence
  SiRNA target sequence
cagtgatatattatttaataggat

SEQ ID NO: 135611 - DNA, 24 bp, Artificial sequence
  SiRNA target sequence
agtgatatattatttaataggatg

SEQ ID NO: 135612 - DNA, 24 bp, Artificial sequence
  SiRNA target sequence
gtgatatattatttaataggatga

SEQ ID NO: 135613 - DNA, 24 bp, Artificial sequence
  SiRNA target sequence
tgatatattatttaataggatgat

SEQ ID NO: 135614 - DNA, 24 bp, Artificial sequence
  SiRNA target sequence
gatatattatttaataggatgatg

SEQ ID NO: 135615 - DNA, 24 bp, Artificial sequence
  SiRNA target sequence
atatattatttaataggatgatga

SEQ ID NO: 135616 - DNA, 24 bp, Artificial sequence
  SiRNA target sequence
tatattatttaataggatgatgat

SEQ ID NO: 135617 - DNA, 24 bp, Artificial sequence
  SiRNA target sequence
atattatttaataggatgatgata

SEQ ID NO: 135618 - DNA, 24 bp, Artificial sequence
  SiRNA target sequence
tattatttaataggatgatgatag

SEQ ID NO: 135619 - DNA, 24 bp, Artificial sequence
  SiRNA target sequence
attatttaataggatgatgatagg

SEQ ID NO: 135620 - DNA, 24 bp, Artificial sequence
  SiRNA target sequence
ttatttaataggatgatgatagga

SEQ ID NO: 135621 - DNA, 24 bp, Artificial sequence
  SiRNA target sequence
tatttaataggatgatgataggat

SEQ ID NO: 135622 - DNA, 24 bp, Artificial sequence
  SiRNA target sequence
atttaataggatgatgataggata

SEQ ID NO: 135623 - DNA, 24 bp, Artificial sequence
  SiRNA target sequence
tttaataggatgatgataggatac

SEQ ID NO: 135624 - DNA, 24 bp, Artificial sequence
  SiRNA target sequence
ttaataggatgatgataggataca

SEQ ID NO: 135625 - DNA, 24 bp, Artificial sequence
  SiRNA target sequence
taataggatgatgataggatacat

SEQ ID NO: 135626 - DNA, 24 bp, Artificial sequence
  SiRNA target sequence
aataggatgatgataggatacatt

SEQ ID NO: 135627 - DNA, 24 bp, Artificial sequence
  SiRNA target sequence
ataggatgatgataggatacattg

SEQ ID NO: 135628 - DNA, 24 bp, Artificial sequence
  SiRNA target sequence
taggatgatgataggatacattga

SEQ ID NO: 135629 - DNA, 24 bp, Artificial sequence
  SiRNA target sequence
aggatgatgataggatacattgac

SEQ ID NO: 135630 - DNA, 24 bp, Artificial sequence
  SiRNA target sequence
ggatgatgataggatacattgacg

SEQ ID NO: 135631 - DNA, 24 bp, Artificial sequence
  SiRNA target sequence
gatgatgataggatacattgacgt

SEQ ID NO: 135632 - DNA, 24 bp, Artificial sequence
  SiRNA target sequence
atgatgataggatacattgacgtc

SEQ ID NO: 135633 - DNA, 24 bp, Artificial sequence
  SiRNA target sequence
tgatgataggatacattgacgtca

SEQ ID NO: 135634 - DNA, 24 bp, Artificial sequence
  SiRNA target sequence
gatgataggatacattgacgtcag

SEQ ID NO: 135635 - DNA, 24 bp, Artificial sequence
  SiRNA target sequence
atgataggatacattgacgtcaga

SEQ ID NO: 135636 - DNA, 24 bp, Artificial sequence
  SiRNA target sequence
tgataggatacattgacgtcagaa

SEQ ID NO: 135637 - DNA, 24 bp, Artificial sequence
  SiRNA target sequence
gataggatacattgacgtcagaag

SEQ ID NO: 135638 - DNA, 24 bp, Artificial sequence
  SiRNA target sequence
ataggatacattgacgtcagaaga

SEQ ID NO: 135639 - DNA, 24 bp, Artificial sequence
  SiRNA target sequence
taggatacattgacgtcagaagag

SEQ ID NO: 135640 - DNA, 24 bp, Artificial sequence
  SiRNA target sequence
aggatacattgacgtcagaagagc

SEQ ID NO: 135641 - DNA, 24 bp, Artificial sequence
  SiRNA target sequence
ggatacattgacgtcagaagagca

SEQ ID NO: 135642 - DNA, 24 bp, Artificial sequence
  SiRNA target sequence
gatacattgacgtcagaagagcat

SEQ ID NO: 135643 - DNA, 24 bp, Artificial sequence
  SiRNA target sequence
atacattgacgtcagaagagcatt

SEQ ID NO: 135644 - DNA, 24 bp, Artificial sequence
  SiRNA target sequence
tacattgacgtcagaagagcattt

SEQ ID NO: 135645 - DNA, 24 bp, Artificial sequence
  SiRNA target sequence
acattgacgtcagaagagcatttg

SEQ ID NO: 135646 - DNA, 24 bp, Artificial sequence
  SiRNA target sequence
cattgacgtcagaagagcatttga

SEQ ID NO: 135647 - DNA, 24 bp, Artificial sequence
  SiRNA target sequence
attgacgtcagaagagcatttgat

SEQ ID NO: 135648 - DNA, 24 bp, Artificial sequence
  SiRNA target sequence
ttgacgtcagaagagcatttgatt

SEQ ID NO: 135649 - DNA, 24 bp, Artificial sequence
  SiRNA target sequence
tgacgtcagaagagcatttgattt

SEQ ID NO: 135650 - DNA, 24 bp, Artificial sequence
  SiRNA target sequence
gacgtcagaagagcatttgattta

SEQ ID NO: 135651 - DNA, 24 bp, Artificial sequence
  SiRNA target sequence
acgtcagaagagcatttgatttaa

SEQ ID NO: 135652 - DNA, 24 bp, Artificial sequence
  SiRNA target sequence
cgtcagaagagcatttgatttaat

SEQ ID NO: 135653 - DNA, 24 bp, Artificial sequence
  SiRNA target sequence
gtcagaagagcatttgatttaatt

SEQ ID NO: 135654 - DNA, 24 bp, Artificial sequence
  SiRNA target sequence
tcagaagagcatttgatttaattg

SEQ ID NO: 135655 - DNA, 24 bp, Artificial sequence
  SiRNA target sequence
cagaagagcatttgatttaattgg

SEQ ID NO: 135656 - DNA, 24 bp, Artificial sequence
  SiRNA target sequence
agaagagcatttgatttaattggt

SEQ ID NO: 135657 - DNA, 24 bp, Artificial sequence
  SiRNA target sequence
gaagagcatttgatttaattggta

SEQ ID NO: 135658 - DNA, 24 bp, Artificial sequence
  SiRNA target sequence
aagagcatttgatttaattggtat

SEQ ID NO: 135659 - DNA, 24 bp, Artificial sequence
  SiRNA target sequence
agagcatttgatttaattggtata

SEQ ID NO: 135660 - DNA, 24 bp, Artificial sequence
  SiRNA target sequence
gagcatttgatttaattggtatag

SEQ ID NO: 135661 - DNA, 24 bp, Artificial sequence
  SiRNA target sequence
agcatttgatttaattggtatagt

SEQ ID NO: 135662 - DNA, 24 bp, Artificial sequence
  SiRNA target sequence
gcatttgatttaattggtatagta

SEQ ID NO: 135663 - DNA, 24 bp, Artificial sequence
  SiRNA target sequence
catttgatttaattggtatagtag

SEQ ID NO: 135664 - DNA, 24 bp, Artificial sequence
  SiRNA target sequence
atttgatttaattggtatagtagc

SEQ ID NO: 135665 - DNA, 24 bp, Artificial sequence
  SiRNA target sequence
tttgatttaattggtatagtagct

SEQ ID NO: 135666 - DNA, 24 bp, Artificial sequence
  SiRNA target sequence
ttgatttaattggtatagtagctg

SEQ ID NO: 135667 - DNA, 24 bp, Artificial sequence
  SiRNA target sequence
tgatttaattggtatagtagctga

SEQ ID NO: 135668 - DNA, 24 bp, Artificial sequence
  SiRNA target sequence
gatttaattggtatagtagctgaa

SEQ ID NO: 135669 - DNA, 24 bp, Artificial sequence
  SiRNA target sequence
atttaattggtatagtagctgaag

SEQ ID NO: 135670 - DNA, 24 bp, Artificial sequence
  SiRNA target sequence
tttaattggtatagtagctgaagt

SEQ ID NO: 135671 - DNA, 24 bp, Artificial sequence
  SiRNA target sequence
ttaattggtatagtagctgaagta

SEQ ID NO: 135672 - DNA, 24 bp, Artificial sequence
  SiRNA target sequence
taattggtatagtagctgaagtaa

SEQ ID NO: 135673 - DNA, 24 bp, Artificial sequence
  SiRNA target sequence
aattggtatagtagctgaagtaat

SEQ ID NO: 135674 - DNA, 24 bp, Artificial sequence
  SiRNA target sequence
attggtatagtagctgaagtaatg

SEQ ID NO: 135675 - DNA, 24 bp, Artificial sequence
  SiRNA target sequence
ttggtatagtagctgaagtaatga

SEQ ID NO: 135676 - DNA, 24 bp, Artificial sequence
  SiRNA target sequence
tggtatagtagctgaagtaatgaa

SEQ ID NO: 135677 - DNA, 24 bp, Artificial sequence
  SiRNA target sequence
ggtatagtagctgaagtaatgaaa

SEQ ID NO: 135678 - DNA, 24 bp, Artificial sequence
  SiRNA target sequence
gtatagtagctgaagtaatgaaag

SEQ ID NO: 135679 - DNA, 24 bp, Artificial sequence
  SiRNA target sequence
tatagtagctgaagtaatgaaaga

SEQ ID NO: 135680 - DNA, 24 bp, Artificial sequence
  SiRNA target sequence
atagtagctgaagtaatgaaagac

SEQ ID NO: 135681 - DNA, 24 bp, Artificial sequence
  SiRNA target sequence
tagtagctgaagtaatgaaagact

SEQ ID NO: 135682 - DNA, 24 bp, Artificial sequence
  SiRNA target sequence
agtagctgaagtaatgaaagacta

SEQ ID NO: 135683 - DNA, 24 bp, Artificial sequence
  SiRNA target sequence
gtagctgaagtaatgaaagactat

SEQ ID NO: 135684 - DNA, 24 bp, Artificial sequence
  SiRNA target sequence
tagctgaagtaatgaaagactatt

SEQ ID NO: 135685 - DNA, 24 bp, Artificial sequence
  SiRNA target sequence
agctgaagtaatgaaagactatta

SEQ ID NO: 135686 - DNA, 24 bp, Artificial sequence
  SiRNA target sequence
gctgaagtaatgaaagactattac

SEQ ID NO: 135687 - DNA, 24 bp, Artificial sequence
  SiRNA target sequence
ctgaagtaatgaaagactattacg

SEQ ID NO: 135688 - DNA, 24 bp, Artificial sequence
  SiRNA target sequence
tgaagtaatgaaagactattacgg

SEQ ID NO: 135689 - DNA, 24 bp, Artificial sequence
  SiRNA target sequence
gaagtaatgaaagactattacgga

SEQ ID NO: 135690 - DNA, 24 bp, Artificial sequence
  SiRNA target sequence
aagtaatgaaagactattacggat

SEQ ID NO: 135691 - DNA, 24 bp, Artificial sequence
  SiRNA target sequence
agtaatgaaagactattacggatg

SEQ ID NO: 135692 - DNA, 24 bp, Artificial sequence
  SiRNA target sequence
gtaatgaaagactattacggatgg

SEQ ID NO: 135693 - DNA, 24 bp, Artificial sequence
  SiRNA target sequence
taatgaaagactattacggatggg

SEQ ID NO: 135694 - DNA, 24 bp, Artificial sequence
  SiRNA target sequence
aatgaaagactattacggatggga

SEQ ID NO: 135695 - DNA, 24 bp, Artificial sequence
  SiRNA target sequence
atgaaagactattacggatgggat

SEQ ID NO: 135696 - DNA, 24 bp, Artificial sequence
  SiRNA target sequence
tgaaagactattacggatgggatc

SEQ ID NO: 135697 - DNA, 24 bp, Artificial sequence
  SiRNA target sequence
gaaagactattacggatgggatca

SEQ ID NO: 135698 - DNA, 24 bp, Artificial sequence
  SiRNA target sequence
aaagactattacggatgggatcag

SEQ ID NO: 135699 - DNA, 24 bp, Artificial sequence
  SiRNA target sequence
aagactattacggatgggatcagc

SEQ ID NO: 135700 - DNA, 24 bp, Artificial sequence
  SiRNA target sequence
agactattacggatgggatcagca

SEQ ID NO: 135701 - DNA, 24 bp, Artificial sequence
  SiRNA target sequence
gactattacggatgggatcagcaa

SEQ ID NO: 135702 - DNA, 24 bp, Artificial sequence
  SiRNA target sequence
actattacggatgggatcagcaaa

SEQ ID NO: 135703 - DNA, 24 bp, Artificial sequence
  SiRNA target sequence
ctattacggatgggatcagcaaag

SEQ ID NO: 135704 - DNA, 24 bp, Artificial sequence
  SiRNA target sequence
tattacggatgggatcagcaaaga

SEQ ID NO: 135705 - DNA, 24 bp, Artificial sequence
  SiRNA target sequence
attacggatgggatcagcaaagat

SEQ ID NO: 135706 - DNA, 24 bp, Artificial sequence
  SiRNA target sequence
ttacggatgggatcagcaaagata

SEQ ID NO: 135707 - DNA, 24 bp, Artificial sequence
  SiRNA target sequence
tacggatgggatcagcaaagatat

SEQ ID NO: 135708 - DNA, 24 bp, Artificial sequence
  SiRNA target sequence
acggatgggatcagcaaagatata

SEQ ID NO: 135709 - DNA, 24 bp, Artificial sequence
  SiRNA target sequence
cggatgggatcagcaaagatataa

SEQ ID NO: 135710 - DNA, 24 bp, Artificial sequence
  SiRNA target sequence
ggatgggatcagcaaagatataat

SEQ ID NO: 135711 - DNA, 24 bp, Artificial sequence
  SiRNA target sequence
gatgggatcagcaaagatataatg

SEQ ID NO: 135712 - DNA, 24 bp, Artificial sequence
  SiRNA target sequence
atgggatcagcaaagatataatga

SEQ ID NO: 135713 - DNA, 24 bp, Artificial sequence
  SiRNA target sequence
tgggatcagcaaagatataatgaa

SEQ ID NO: 135714 - DNA, 24 bp, Artificial sequence
  SiRNA target sequence
gggatcagcaaagatataatgaag

SEQ ID NO: 135715 - DNA, 24 bp, Artificial sequence
  SiRNA target sequence
ggatcagcaaagatataatgaaga

SEQ ID NO: 135716 - DNA, 24 bp, Artificial sequence
  SiRNA target sequence
gatcagcaaagatataatgaagaa

SEQ ID NO: 135717 - DNA, 24 bp, Artificial sequence
  SiRNA target sequence
atcagcaaagatataatgaagaaa

SEQ ID NO: 135718 - DNA, 24 bp, Artificial sequence
  SiRNA target sequence
tcagcaaagatataatgaagaaac

SEQ ID NO: 135719 - DNA, 24 bp, Artificial sequence
  SiRNA target sequence
cagcaaagatataatgaagaaaca

SEQ ID NO: 135720 - DNA, 24 bp, Artificial sequence
  SiRNA target sequence
agcaaagatataatgaagaaacaa

SEQ ID NO: 135721 - DNA, 24 bp, Artificial sequence
  SiRNA target sequence
gcaaagatataatgaagaaacaaa

SEQ ID NO: 135722 - DNA, 24 bp, Artificial sequence
  SiRNA target sequence
caaagatataatgaagaaacaaaa

SEQ ID NO: 135723 - DNA, 24 bp, Artificial sequence
  SiRNA target sequence
aaagatataatgaagaaacaaaat

SEQ ID NO: 135724 - DNA, 24 bp, Artificial sequence
  SiRNA target sequence
aagatataatgaagaaacaaaatt

SEQ ID NO: 135725 - DNA, 24 bp, Artificial sequence
  SiRNA target sequence
agatataatgaagaaacaaaatta

SEQ ID NO: 135726 - DNA, 24 bp, Artificial sequence
  SiRNA target sequence
gatataatgaagaaacaaaattat

SEQ ID NO: 135727 - DNA, 24 bp, Artificial sequence
  SiRNA target sequence
atataatgaagaaacaaaattatg

SEQ ID NO: 135728 - DNA, 24 bp, Artificial sequence
  SiRNA target sequence
tataatgaagaaacaaaattatgc

SEQ ID NO: 135729 - DNA, 24 bp, Artificial sequence
  SiRNA target sequence
ataatgaagaaacaaaattatgca

SEQ ID NO: 135730 - DNA, 24 bp, Artificial sequence
  SiRNA target sequence
taatgaagaaacaaaattatgcat

SEQ ID NO: 135731 - DNA, 24 bp, Artificial sequence
  SiRNA target sequence
aatgaagaaacaaaattatgcatg

SEQ ID NO: 135732 - DNA, 24 bp, Artificial sequence
  SiRNA target sequence
atgaagaaacaaaattatgcatgg

SEQ ID NO: 135733 - DNA, 24 bp, Artificial sequence
  SiRNA target sequence
tgaagaaacaaaattatgcatgga

SEQ ID NO: 135734 - DNA, 24 bp, Artificial sequence
  SiRNA target sequence
gaagaaacaaaattatgcatggaa

SEQ ID NO: 135735 - DNA, 24 bp, Artificial sequence
  SiRNA target sequence
aagaaacaaaattatgcatggaaa

SEQ ID NO: 135736 - DNA, 24 bp, Artificial sequence
  SiRNA target sequence
agaaacaaaattatgcatggaaat

SEQ ID NO: 135737 - DNA, 24 bp, Artificial sequence
  SiRNA target sequence
gaaacaaaattatgcatggaaatg

SEQ ID NO: 135738 - DNA, 24 bp, Artificial sequence
  SiRNA target sequence
aaacaaaattatgcatggaaatga

SEQ ID NO: 135739 - DNA, 24 bp, Artificial sequence
  SiRNA target sequence
aacaaaattatgcatggaaatgat

SEQ ID NO: 135740 - DNA, 24 bp, Artificial sequence
  SiRNA target sequence
acaaaattatgcatggaaatgatg

SEQ ID NO: 135741 - DNA, 24 bp, Artificial sequence
  SiRNA target sequence
caaaattatgcatggaaatgatgg

SEQ ID NO: 135742 - DNA, 24 bp, Artificial sequence
  SiRNA target sequence
aaaattatgcatggaaatgatgga

SEQ ID NO: 135743 - DNA, 24 bp, Artificial sequence
  SiRNA target sequence
aaattatgcatggaaatgatggaa

SEQ ID NO: 135744 - DNA, 24 bp, Artificial sequence
  SiRNA target sequence
aattatgcatggaaatgatggaaa

SEQ ID NO: 135745 - DNA, 24 bp, Artificial sequence
  SiRNA target sequence
attatgcatggaaatgatggaaac

SEQ ID NO: 135746 - DNA, 24 bp, Artificial sequence
  SiRNA target sequence
ttatgcatggaaatgatggaaact

SEQ ID NO: 135747 - DNA, 24 bp, Artificial sequence
  SiRNA target sequence
tatgcatggaaatgatggaaactt

SEQ ID NO: 135748 - DNA, 24 bp, Artificial sequence
  SiRNA target sequence
atgcatggaaatgatggaaacttg

SEQ ID NO: 135749 - DNA, 24 bp, Artificial sequence
  SiRNA target sequence
tgcatggaaatgatggaaacttgt

SEQ ID NO: 135750 - DNA, 24 bp, Artificial sequence
  SiRNA target sequence
gcatggaaatgatggaaacttgtg

SEQ ID NO: 135751 - DNA, 24 bp, Artificial sequence
  SiRNA target sequence
catggaaatgatggaaacttgtgg

SEQ ID NO: 135752 - DNA, 24 bp, Artificial sequence
  SiRNA target sequence
atggaaatgatggaaacttgtggt

SEQ ID NO: 135753 - DNA, 24 bp, Artificial sequence
  SiRNA target sequence
tggaaatgatggaaacttgtggtt

SEQ ID NO: 135754 - DNA, 24 bp, Artificial sequence
  SiRNA target sequence
ggaaatgatggaaacttgtggtta

SEQ ID NO: 135755 - DNA, 24 bp, Artificial sequence
  SiRNA target sequence
gaaatgatggaaacttgtggttat

SEQ ID NO: 135756 - DNA, 24 bp, Artificial sequence
  SiRNA target sequence
aaatgatggaaacttgtggttata

SEQ ID NO: 135757 - DNA, 24 bp, Artificial sequence
  SiRNA target sequence
aatgatggaaacttgtggttatag

SEQ ID NO: 135758 - DNA, 24 bp, Artificial sequence
  SiRNA target sequence
atgatggaaacttgtggttatagt

SEQ ID NO: 135759 - DNA, 24 bp, Artificial sequence
  SiRNA target sequence
tgatggaaacttgtggttatagtt

SEQ ID NO: 135760 - DNA, 24 bp, Artificial sequence
  SiRNA target sequence
gatggaaacttgtggttatagttt

SEQ ID NO: 135761 - DNA, 24 bp, Artificial sequence
  SiRNA target sequence
atggaaacttgtggttatagttta

SEQ ID NO: 135762 - DNA, 24 bp, Artificial sequence
  SiRNA target sequence
tggaaacttgtggttatagtttat

SEQ ID NO: 135763 - DNA, 24 bp, Artificial sequence
  SiRNA target sequence
ggaaacttgtggttatagtttatt

SEQ ID NO: 135764 - DNA, 24 bp, Artificial sequence
  SiRNA target sequence
gaaacttgtggttatagtttatta

SEQ ID NO: 135765 - DNA, 24 bp, Artificial sequence
  SiRNA target sequence
aaacttgtggttatagtttattaa

SEQ ID NO: 135766 - DNA, 24 bp, Artificial sequence
  SiRNA target sequence
aacttgtggttatagtttattaaa

SEQ ID NO: 135767 - DNA, 24 bp, Artificial sequence
  SiRNA target sequence
acttgtggttatagtttattaaaa

SEQ ID NO: 135768 - DNA, 24 bp, Artificial sequence
  SiRNA target sequence
cttgtggttatagtttattaaaaa

SEQ ID NO: 135769 - DNA, 24 bp, Artificial sequence
  SiRNA target sequence
ttgtggttatagtttattaaaaaa

SEQ ID NO: 135770 - DNA, 24 bp, Artificial sequence
  SiRNA target sequence
tgtggttatagtttattaaaaaat

SEQ ID NO: 135771 - DNA, 24 bp, Artificial sequence
  SiRNA target sequence
gtggttatagtttattaaaaaatt

SEQ ID NO: 135772 - DNA, 24 bp, Artificial sequence
  SiRNA target sequence
tggttatagtttattaaaaaatta

SEQ ID NO: 135773 - DNA, 24 bp, Artificial sequence
  SiRNA target sequence
ggttatagtttattaaaaaattaa

SEQ ID NO: 135774 - DNA, 25 bp, Artificial sequence
  SiRNA target sequence
atggtgtataaggttttatttacag

SEQ ID NO: 135775 - DNA, 25 bp, Artificial sequence
  SiRNA target sequence
tggtgtataaggttttatttacagt

SEQ ID NO: 135776 - DNA, 25 bp, Artificial sequence
  SiRNA target sequence
ggtgtataaggttttatttacagta

SEQ ID NO: 135777 - DNA, 25 bp, Artificial sequence
  SiRNA target sequence
gtgtataaggttttatttacagtaa

SEQ ID NO: 135778 - DNA, 25 bp, Artificial sequence
  SiRNA target sequence
tgtataaggttttatttacagtaat

SEQ ID NO: 135779 - DNA, 25 bp, Artificial sequence
  SiRNA target sequence
gtataaggttttatttacagtaata

SEQ ID NO: 135780 - DNA, 25 bp, Artificial sequence
  SiRNA target sequence
tataaggttttatttacagtaatag

SEQ ID NO: 135781 - DNA, 25 bp, Artificial sequence
  SiRNA target sequence
ataaggttttatttacagtaatagg

SEQ ID NO: 135782 - DNA, 25 bp, Artificial sequence
  SiRNA target sequence
taaggttttatttacagtaatagga

SEQ ID NO: 135783 - DNA, 25 bp, Artificial sequence
  SiRNA target sequence
aaggttttatttacagtaataggat

SEQ ID NO: 135784 - DNA, 25 bp, Artificial sequence
  SiRNA target sequence
aggttttatttacagtaataggatt

SEQ ID NO: 135785 - DNA, 25 bp, Artificial sequence
  SiRNA target sequence
ggttttatttacagtaataggatta

SEQ ID NO: 135786 - DNA, 25 bp, Artificial sequence
  SiRNA target sequence
gttttatttacagtaataggattaa

SEQ ID NO: 135787 - DNA, 25 bp, Artificial sequence
  SiRNA target sequence
ttttatttacagtaataggattaat

SEQ ID NO: 135788 - DNA, 25 bp, Artificial sequence
  SiRNA target sequence
tttatttacagtaataggattaata

SEQ ID NO: 135789 - DNA, 25 bp, Artificial sequence
  SiRNA target sequence
ttatttacagtaataggattaatat

SEQ ID NO: 135790 - DNA, 25 bp, Artificial sequence
  SiRNA target sequence
tatttacagtaataggattaatatg

SEQ ID NO: 135791 - DNA, 25 bp, Artificial sequence
  SiRNA target sequence
atttacagtaataggattaatatgt

SEQ ID NO: 135792 - DNA, 25 bp, Artificial sequence
  SiRNA target sequence
tttacagtaataggattaatatgtg

SEQ ID NO: 135793 - DNA, 25 bp, Artificial sequence
  SiRNA target sequence
ttacagtaataggattaatatgtgg

SEQ ID NO: 135794 - DNA, 25 bp, Artificial sequence
  SiRNA target sequence
tacagtaataggattaatatgtggt

SEQ ID NO: 135795 - DNA, 25 bp, Artificial sequence
  SiRNA target sequence
acagtaataggattaatatgtggta

SEQ ID NO: 135796 - DNA, 25 bp, Artificial sequence
  SiRNA target sequence
cagtaataggattaatatgtggtat

SEQ ID NO: 135797 - DNA, 25 bp, Artificial sequence
  SiRNA target sequence
agtaataggattaatatgtggtata

SEQ ID NO: 135798 - DNA, 25 bp, Artificial sequence
  SiRNA target sequence
gtaataggattaatatgtggtatac

SEQ ID NO: 135799 - DNA, 25 bp, Artificial sequence
  SiRNA target sequence
taataggattaatatgtggtatact

SEQ ID NO: 135800 - DNA, 25 bp, Artificial sequence
  SiRNA target sequence
aataggattaatatgtggtatactt

SEQ ID NO: 135801 - DNA, 25 bp, Artificial sequence
  SiRNA target sequence
ataggattaatatgtggtatactta

SEQ ID NO: 135802 - DNA, 25 bp, Artificial sequence
  SiRNA target sequence
taggattaatatgtggtatacttac

SEQ ID NO: 135803 - DNA, 25 bp, Artificial sequence
  SiRNA target sequence
aggattaatatgtggtatacttaca

SEQ ID NO: 135804 - DNA, 25 bp, Artificial sequence
  SiRNA target sequence
ggattaatatgtggtatacttacaa

SEQ ID NO: 135805 - DNA, 25 bp, Artificial sequence
  SiRNA target sequence
gattaatatgtggtatacttacaat

SEQ ID NO: 135806 - DNA, 25 bp, Artificial sequence
  SiRNA target sequence
attaatatgtggtatacttacaata

SEQ ID NO: 135807 - DNA, 25 bp, Artificial sequence
  SiRNA target sequence
ttaatatgtggtatacttacaataa

SEQ ID NO: 135808 - DNA, 25 bp, Artificial sequence
  SiRNA target sequence
taatatgtggtatacttacaataat

SEQ ID NO: 135809 - DNA, 25 bp, Artificial sequence
  SiRNA target sequence
aatatgtggtatacttacaataatt

SEQ ID NO: 135810 - DNA, 25 bp, Artificial sequence
  SiRNA target sequence
atatgtggtatacttacaataatta

SEQ ID NO: 135811 - DNA, 25 bp, Artificial sequence
  SiRNA target sequence
tatgtggtatacttacaataattaa

SEQ ID NO: 135812 - DNA, 25 bp, Artificial sequence
  SiRNA target sequence
atgtggtatacttacaataattaaa

SEQ ID NO: 135813 - DNA, 25 bp, Artificial sequence
  SiRNA target sequence
tgtggtatacttacaataattaaac

SEQ ID NO: 135814 - DNA, 25 bp, Artificial sequence
  SiRNA target sequence
gtggtatacttacaataattaaacg

SEQ ID NO: 135815 - DNA, 25 bp, Artificial sequence
  SiRNA target sequence
tggtatacttacaataattaaacga

SEQ ID NO: 135816 - DNA, 25 bp, Artificial sequence
  SiRNA target sequence
ggtatacttacaataattaaacgat

SEQ ID NO: 135817 - DNA, 25 bp, Artificial sequence
  SiRNA target sequence
gtatacttacaataattaaacgata

SEQ ID NO: 135818 - DNA, 25 bp, Artificial sequence
  SiRNA target sequence
tatacttacaataattaaacgatac

SEQ ID NO: 135819 - DNA, 25 bp, Artificial sequence
  SiRNA target sequence
atacttacaataattaaacgataca

SEQ ID NO: 135820 - DNA, 25 bp, Artificial sequence
  SiRNA target sequence
tacttacaataattaaacgatacaa

SEQ ID NO: 135821 - DNA, 25 bp, Artificial sequence
  SiRNA target sequence
acttacaataattaaacgatacaag

SEQ ID NO: 135822 - DNA, 25 bp, Artificial sequence
  SiRNA target sequence
cttacaataattaaacgatacaagt

SEQ ID NO: 135823 - DNA, 25 bp, Artificial sequence
  SiRNA target sequence
ttacaataattaaacgatacaagta

SEQ ID NO: 135824 - DNA, 25 bp, Artificial sequence
  SiRNA target sequence
tacaataattaaacgatacaagtat

SEQ ID NO: 135825 - DNA, 25 bp, Artificial sequence
  SiRNA target sequence
acaataattaaacgatacaagtatt

SEQ ID NO: 135826 - DNA, 25 bp, Artificial sequence
  SiRNA target sequence
caataattaaacgatacaagtattt

SEQ ID NO: 135827 - DNA, 25 bp, Artificial sequence
  SiRNA target sequence
aataattaaacgatacaagtatttt

SEQ ID NO: 135828 - DNA, 25 bp, Artificial sequence
  SiRNA target sequence
ataattaaacgatacaagtatttta

SEQ ID NO: 135829 - DNA, 25 bp, Artificial sequence
  SiRNA target sequence
taattaaacgatacaagtattttaa

SEQ ID NO: 135830 - DNA, 25 bp, Artificial sequence
  SiRNA target sequence
aattaaacgatacaagtattttaag

SEQ ID NO: 135831 - DNA, 25 bp, Artificial sequence
  SiRNA target sequence
attaaacgatacaagtattttaaga

SEQ ID NO: 135832 - DNA, 25 bp, Artificial sequence
  SiRNA target sequence
ttaaacgatacaagtattttaagat

SEQ ID NO: 135833 - DNA, 25 bp, Artificial sequence
  SiRNA target sequence
taaacgatacaagtattttaagata

SEQ ID NO: 135834 - DNA, 25 bp, Artificial sequence
  SiRNA target sequence
aaacgatacaagtattttaagataa

SEQ ID NO: 135835 - DNA, 25 bp, Artificial sequence
  SiRNA target sequence
aacgatacaagtattttaagataaa

SEQ ID NO: 135836 - DNA, 25 bp, Artificial sequence
  SiRNA target sequence
acgatacaagtattttaagataaaa

SEQ ID NO: 135837 - DNA, 25 bp, Artificial sequence
  SiRNA target sequence
cgatacaagtattttaagataaaaa

SEQ ID NO: 135838 - DNA, 25 bp, Artificial sequence
  SiRNA target sequence
gatacaagtattttaagataaaaaa

SEQ ID NO: 135839 - DNA, 25 bp, Artificial sequence
  SiRNA target sequence
atacaagtattttaagataaaaaaa

SEQ ID NO: 135840 - DNA, 25 bp, Artificial sequence
  SiRNA target sequence
tacaagtattttaagataaaaaaat

SEQ ID NO: 135841 - DNA, 25 bp, Artificial sequence
  SiRNA target sequence
acaagtattttaagataaaaaaatt

SEQ ID NO: 135842 - DNA, 25 bp, Artificial sequence
  SiRNA target sequence
caagtattttaagataaaaaaattg

SEQ ID NO: 135843 - DNA, 25 bp, Artificial sequence
  SiRNA target sequence
aagtattttaagataaaaaaattgg

SEQ ID NO: 135844 - DNA, 25 bp, Artificial sequence
  SiRNA target sequence
agtattttaagataaaaaaattggc

SEQ ID NO: 135845 - DNA, 25 bp, Artificial sequence
  SiRNA target sequence
gtattttaagataaaaaaattggcc

SEQ ID NO: 135846 - DNA, 25 bp, Artificial sequence
  SiRNA target sequence
tattttaagataaaaaaattggcct

SEQ ID NO: 135847 - DNA, 25 bp, Artificial sequence
  SiRNA target sequence
attttaagataaaaaaattggcctt

SEQ ID NO: 135848 - DNA, 25 bp, Artificial sequence
  SiRNA target sequence
ttttaagataaaaaaattggcctta

SEQ ID NO: 135849 - DNA, 25 bp, Artificial sequence
  SiRNA target sequence
tttaagataaaaaaattggccttaa

SEQ ID NO: 135850 - DNA, 25 bp, Artificial sequence
  SiRNA target sequence
ttaagataaaaaaattggccttaac

SEQ ID NO: 135851 - DNA, 25 bp, Artificial sequence
  SiRNA target sequence
taagataaaaaaattggccttaact

SEQ ID NO: 135852 - DNA, 25 bp, Artificial sequence
  SiRNA target sequence
aagataaaaaaattggccttaactt

SEQ ID NO: 135853 - DNA, 25 bp, Artificial sequence
  SiRNA target sequence
agataaaaaaattggccttaactta

SEQ ID NO: 135854 - DNA, 25 bp, Artificial sequence
  SiRNA target sequence
gataaaaaaattggccttaacttac

SEQ ID NO: 135855 - DNA, 25 bp, Artificial sequence
  SiRNA target sequence
ataaaaaaattggccttaacttact

SEQ ID NO: 135856 - DNA, 25 bp, Artificial sequence
  SiRNA target sequence
taaaaaaattggccttaacttactt

SEQ ID NO: 135857 - DNA, 25 bp, Artificial sequence
  SiRNA target sequence
aaaaaaattggccttaacttacttc

SEQ ID NO: 135858 - DNA, 25 bp, Artificial sequence
  SiRNA target sequence
aaaaaattggccttaacttacttcg

SEQ ID NO: 135859 - DNA, 25 bp, Artificial sequence
  SiRNA target sequence
aaaaattggccttaacttacttcgg

SEQ ID NO: 135860 - DNA, 25 bp, Artificial sequence
  SiRNA target sequence
aaaattggccttaacttacttcggg

SEQ ID NO: 135861 - DNA, 25 bp, Artificial sequence
  SiRNA target sequence
aaattggccttaacttacttcggga

SEQ ID NO: 135862 - DNA, 25 bp, Artificial sequence
  SiRNA target sequence
aattggccttaacttacttcgggaa

SEQ ID NO: 135863 - DNA, 25 bp, Artificial sequence
  SiRNA target sequence
attggccttaacttacttcgggaaa

SEQ ID NO: 135864 - DNA, 25 bp, Artificial sequence
  SiRNA target sequence
ttggccttaacttacttcgggaaac

SEQ ID NO: 135865 - DNA, 25 bp, Artificial sequence
  SiRNA target sequence
tggccttaacttacttcgggaaaca

SEQ ID NO: 135866 - DNA, 25 bp, Artificial sequence
  SiRNA target sequence
ggccttaacttacttcgggaaacaa

SEQ ID NO: 135867 - DNA, 25 bp, Artificial sequence
  SiRNA target sequence
gccttaacttacttcgggaaacaag

SEQ ID NO: 135868 - DNA, 25 bp, Artificial sequence
  SiRNA target sequence
ccttaacttacttcgggaaacaaga

SEQ ID NO: 135869 - DNA, 25 bp, Artificial sequence
  SiRNA target sequence
cttaacttacttcgggaaacaagac

SEQ ID NO: 135870 - DNA, 25 bp, Artificial sequence
  SiRNA target sequence
ttaacttacttcgggaaacaagact

SEQ ID NO: 135871 - DNA, 25 bp, Artificial sequence
  SiRNA target sequence
taacttacttcgggaaacaagactt

SEQ ID NO: 135872 - DNA, 25 bp, Artificial sequence
  SiRNA target sequence
aacttacttcgggaaacaagacttg

SEQ ID NO: 135873 - DNA, 25 bp, Artificial sequence
  SiRNA target sequence
acttacttcgggaaacaagacttgc

SEQ ID NO: 135874 - DNA, 25 bp, Artificial sequence
  SiRNA target sequence
cttacttcgggaaacaagacttgca

SEQ ID NO: 135875 - DNA, 25 bp, Artificial sequence
  SiRNA target sequence
ttacttcgggaaacaagacttgcaa

SEQ ID NO: 135876 - DNA, 25 bp, Artificial sequence
  SiRNA target sequence
tacttcgggaaacaagacttgcaat

SEQ ID NO: 135877 - DNA, 25 bp, Artificial sequence
  SiRNA target sequence
acttcgggaaacaagacttgcaatg

SEQ ID NO: 135878 - DNA, 25 bp, Artificial sequence
  SiRNA target sequence
cttcgggaaacaagacttgcaatgg

SEQ ID NO: 135879 - DNA, 25 bp, Artificial sequence
  SiRNA target sequence
ttcgggaaacaagacttgcaatgga

SEQ ID NO: 135880 - DNA, 25 bp, Artificial sequence
  SiRNA target sequence
tcgggaaacaagacttgcaatggaa

SEQ ID NO: 135881 - DNA, 25 bp, Artificial sequence
  SiRNA target sequence
cgggaaacaagacttgcaatggaaa

SEQ ID NO: 135882 - DNA, 25 bp, Artificial sequence
  SiRNA target sequence
gggaaacaagacttgcaatggaaac

SEQ ID NO: 135883 - DNA, 25 bp, Artificial sequence
  SiRNA target sequence
ggaaacaagacttgcaatggaaacc

SEQ ID NO: 135884 - DNA, 25 bp, Artificial sequence
  SiRNA target sequence
gaaacaagacttgcaatggaaacct

SEQ ID NO: 135885 - DNA, 25 bp, Artificial sequence
  SiRNA target sequence
aaacaagacttgcaatggaaaccta

SEQ ID NO: 135886 - DNA, 25 bp, Artificial sequence
  SiRNA target sequence
aacaagacttgcaatggaaacctaa

SEQ ID NO: 135887 - DNA, 25 bp, Artificial sequence
  SiRNA target sequence
acaagacttgcaatggaaacctaaa

SEQ ID NO: 135888 - DNA, 25 bp, Artificial sequence
  SiRNA target sequence
caagacttgcaatggaaacctaaaa

SEQ ID NO: 135889 - DNA, 25 bp, Artificial sequence
  SiRNA target sequence
aagacttgcaatggaaacctaaaag

SEQ ID NO: 135890 - DNA, 25 bp, Artificial sequence
  SiRNA target sequence
agacttgcaatggaaacctaaaagt

SEQ ID NO: 135891 - DNA, 25 bp, Artificial sequence
  SiRNA target sequence
gacttgcaatggaaacctaaaagtc

SEQ ID NO: 135892 - DNA, 25 bp, Artificial sequence
  SiRNA target sequence
acttgcaatggaaacctaaaagtcg

SEQ ID NO: 135893 - DNA, 25 bp, Artificial sequence
  SiRNA target sequence
cttgcaatggaaacctaaaagtcgg

SEQ ID NO: 135894 - DNA, 25 bp, Artificial sequence
  SiRNA target sequence
ttgcaatggaaacctaaaagtcggt

SEQ ID NO: 135895 - DNA, 25 bp, Artificial sequence
  SiRNA target sequence
tgcaatggaaacctaaaagtcggtc

SEQ ID NO: 135896 - DNA, 25 bp, Artificial sequence
  SiRNA target sequence
gcaatggaaacctaaaagtcggtca

SEQ ID NO: 135897 - DNA, 25 bp, Artificial sequence
  SiRNA target sequence
caatggaaacctaaaagtcggtcag

SEQ ID NO: 135898 - DNA, 25 bp, Artificial sequence
  SiRNA target sequence
aatggaaacctaaaagtcggtcaga

SEQ ID NO: 135899 - DNA, 25 bp, Artificial sequence
  SiRNA target sequence
atggaaacctaaaagtcggtcagaa

SEQ ID NO: 135900 - DNA, 25 bp, Artificial sequence
  SiRNA target sequence
tggaaacctaaaagtcggtcagaaa

SEQ ID NO: 135901 - DNA, 25 bp, Artificial sequence
  SiRNA target sequence
ggaaacctaaaagtcggtcagaaat

SEQ ID NO: 135902 - DNA, 25 bp, Artificial sequence
  SiRNA target sequence
gaaacctaaaagtcggtcagaaatt

SEQ ID NO: 135903 - DNA, 25 bp, Artificial sequence
  SiRNA target sequence
aaacctaaaagtcggtcagaaatta

SEQ ID NO: 135904 - DNA, 25 bp, Artificial sequence
  SiRNA target sequence
aacctaaaagtcggtcagaaattat

SEQ ID NO: 135905 - DNA, 25 bp, Artificial sequence
  SiRNA target sequence
acctaaaagtcggtcagaaattatt

SEQ ID NO: 135906 - DNA, 25 bp, Artificial sequence
  SiRNA target sequence
cctaaaagtcggtcagaaattatta

SEQ ID NO: 135907 - DNA, 25 bp, Artificial sequence
  SiRNA target sequence
ctaaaagtcggtcagaaattattaa

SEQ ID NO: 135908 - DNA, 25 bp, Artificial sequence
  SiRNA target sequence
taaaagtcggtcagaaattattaac

SEQ ID NO: 135909 - DNA, 25 bp, Artificial sequence
  SiRNA target sequence
aaaagtcggtcagaaattattaacg

SEQ ID NO: 135910 - DNA, 25 bp, Artificial sequence
  SiRNA target sequence
aaagtcggtcagaaattattaacga

SEQ ID NO: 135911 - DNA, 25 bp, Artificial sequence
  SiRNA target sequence
aagtcggtcagaaattattaacgat

SEQ ID NO: 135912 - DNA, 25 bp, Artificial sequence
  SiRNA target sequence
agtcggtcagaaattattaacgatt

SEQ ID NO: 135913 - DNA, 25 bp, Artificial sequence
  SiRNA target sequence
gtcggtcagaaattattaacgattt

SEQ ID NO: 135914 - DNA, 25 bp, Artificial sequence
  SiRNA target sequence
tcggtcagaaattattaacgattta

SEQ ID NO: 135915 - DNA, 25 bp, Artificial sequence
  SiRNA target sequence
cggtcagaaattattaacgatttaa

SEQ ID NO: 135916 - DNA, 25 bp, Artificial sequence
  SiRNA target sequence
ggtcagaaattattaacgatttaaa

SEQ ID NO: 135917 - DNA, 25 bp, Artificial sequence
  SiRNA target sequence
gtcagaaattattaacgatttaaaa

SEQ ID NO: 135918 - DNA, 25 bp, Artificial sequence
  SiRNA target sequence
tcagaaattattaacgatttaaaaa

SEQ ID NO: 135919 - DNA, 25 bp, Artificial sequence
  SiRNA target sequence
cagaaattattaacgatttaaaaaa

SEQ ID NO: 135920 - DNA, 25 bp, Artificial sequence
  SiRNA target sequence
agaaattattaacgatttaaaaaat

SEQ ID NO: 135921 - DNA, 25 bp, Artificial sequence
  SiRNA target sequence
gaaattattaacgatttaaaaaata

SEQ ID NO: 135922 - DNA, 25 bp, Artificial sequence
  SiRNA target sequence
aaattattaacgatttaaaaaatac

SEQ ID NO: 135923 - DNA, 25 bp, Artificial sequence
  SiRNA target sequence
aattattaacgatttaaaaaataca

SEQ ID NO: 135924 - DNA, 25 bp, Artificial sequence
  SiRNA target sequence
attattaacgatttaaaaaatacaa

SEQ ID NO: 135925 - DNA, 25 bp, Artificial sequence
  SiRNA target sequence
ttattaacgatttaaaaaatacaaa

SEQ ID NO: 135926 - DNA, 25 bp, Artificial sequence
  SiRNA target sequence
tattaacgatttaaaaaatacaaac

SEQ ID NO: 135927 - DNA, 25 bp, Artificial sequence
  SiRNA target sequence
attaacgatttaaaaaatacaaact

SEQ ID NO: 135928 - DNA, 25 bp, Artificial sequence
  SiRNA target sequence
ttaacgatttaaaaaatacaaactt

SEQ ID NO: 135929 - DNA, 25 bp, Artificial sequence
  SiRNA target sequence
taacgatttaaaaaatacaaacttt

SEQ ID NO: 135930 - DNA, 25 bp, Artificial sequence
  SiRNA target sequence
aacgatttaaaaaatacaaactttg

SEQ ID NO: 135931 - DNA, 25 bp, Artificial sequence
  SiRNA target sequence
acgatttaaaaaatacaaactttga

SEQ ID NO: 135932 - DNA, 25 bp, Artificial sequence
  SiRNA target sequence
cgatttaaaaaatacaaactttgac

SEQ ID NO: 135933 - DNA, 25 bp, Artificial sequence
  SiRNA target sequence
gatttaaaaaatacaaactttgaca

SEQ ID NO: 135934 - DNA, 25 bp, Artificial sequence
  SiRNA target sequence
atttaaaaaatacaaactttgacat

SEQ ID NO: 135935 - DNA, 25 bp, Artificial sequence
  SiRNA target sequence
tttaaaaaatacaaactttgacata

SEQ ID NO: 135936 - DNA, 25 bp, Artificial sequence
  SiRNA target sequence
ttaaaaaatacaaactttgacatat

SEQ ID NO: 135937 - DNA, 25 bp, Artificial sequence
  SiRNA target sequence
taaaaaatacaaactttgacatatt

SEQ ID NO: 135938 - DNA, 25 bp, Artificial sequence
  SiRNA target sequence
aaaaaatacaaactttgacatattg

SEQ ID NO: 135939 - DNA, 25 bp, Artificial sequence
  SiRNA target sequence
aaaaatacaaactttgacatattga

SEQ ID NO: 135940 - DNA, 25 bp, Artificial sequence
  SiRNA target sequence
aaaatacaaactttgacatattgat

SEQ ID NO: 135941 - DNA, 25 bp, Artificial sequence
  SiRNA target sequence
aaatacaaactttgacatattgatt

SEQ ID NO: 135942 - DNA, 25 bp, Artificial sequence
  SiRNA target sequence
aatacaaactttgacatattgatta

SEQ ID NO: 135943 - DNA, 25 bp, Artificial sequence
  SiRNA target sequence
atacaaactttgacatattgattat

SEQ ID NO: 135944 - DNA, 25 bp, Artificial sequence
  SiRNA target sequence
tacaaactttgacatattgattatt

SEQ ID NO: 135945 - DNA, 25 bp, Artificial sequence
  SiRNA target sequence
acaaactttgacatattgattattg

SEQ ID NO: 135946 - DNA, 25 bp, Artificial sequence
  SiRNA target sequence
caaactttgacatattgattattgg

SEQ ID NO: 135947 - DNA, 25 bp, Artificial sequence
  SiRNA target sequence
aaactttgacatattgattattggt

SEQ ID NO: 135948 - DNA, 25 bp, Artificial sequence
  SiRNA target sequence
aactttgacatattgattattggtg

SEQ ID NO: 135949 - DNA, 25 bp, Artificial sequence
  SiRNA target sequence
actttgacatattgattattggtgg

SEQ ID NO: 135950 - DNA, 25 bp, Artificial sequence
  SiRNA target sequence
ctttgacatattgattattggtggc

SEQ ID NO: 135951 - DNA, 25 bp, Artificial sequence
  SiRNA target sequence
tttgacatattgattattggtggcg

SEQ ID NO: 135952 - DNA, 25 bp, Artificial sequence
  SiRNA target sequence
ttgacatattgattattggtggcgg

SEQ ID NO: 135953 - DNA, 25 bp, Artificial sequence
  SiRNA target sequence
tgacatattgattattggtggcggt

SEQ ID NO: 135954 - DNA, 25 bp, Artificial sequence
  SiRNA target sequence
gacatattgattattggtggcggtt

SEQ ID NO: 135955 - DNA, 25 bp, Artificial sequence
  SiRNA target sequence
acatattgattattggtggcggttc

SEQ ID NO: 135956 - DNA, 25 bp, Artificial sequence
  SiRNA target sequence
catattgattattggtggcggttca

SEQ ID NO: 135957 - DNA, 25 bp, Artificial sequence
  SiRNA target sequence
atattgattattggtggcggttcaa

SEQ ID NO: 135958 - DNA, 25 bp, Artificial sequence
  SiRNA target sequence
tattgattattggtggcggttcaac

SEQ ID NO: 135959 - DNA, 25 bp, Artificial sequence
  SiRNA target sequence
attgattattggtggcggttcaacg

SEQ ID NO: 135960 - DNA, 25 bp, Artificial sequence
  SiRNA target sequence
ttgattattggtggcggttcaacgg

SEQ ID NO: 135961 - DNA, 25 bp, Artificial sequence
  SiRNA target sequence
tgattattggtggcggttcaacggg

SEQ ID NO: 135962 - DNA, 25 bp, Artificial sequence
  SiRNA target sequence
gattattggtggcggttcaacggga

SEQ ID NO: 135963 - DNA, 25 bp, Artificial sequence
  SiRNA target sequence
attattggtggcggttcaacgggaa

SEQ ID NO: 135964 - DNA, 25 bp, Artificial sequence
  SiRNA target sequence
ttattggtggcggttcaacgggaat

SEQ ID NO: 135965 - DNA, 25 bp, Artificial sequence
  SiRNA target sequence
tattggtggcggttcaacgggaatg

SEQ ID NO: 135966 - DNA, 25 bp, Artificial sequence
  SiRNA target sequence
attggtggcggttcaacgggaatgg

SEQ ID NO: 135967 - DNA, 25 bp, Artificial sequence
  SiRNA target sequence
ttggtggcggttcaacgggaatggg

SEQ ID NO: 135968 - DNA, 25 bp, Artificial sequence
  SiRNA target sequence
tggtggcggttcaacgggaatggga

SEQ ID NO: 135969 - DNA, 25 bp, Artificial sequence
  SiRNA target sequence
ggtggcggttcaacgggaatgggat

SEQ ID NO: 135970 - DNA, 25 bp, Artificial sequence
  SiRNA target sequence
gtggcggttcaacgggaatgggatg

SEQ ID NO: 135971 - DNA, 25 bp, Artificial sequence
  SiRNA target sequence
tggcggttcaacgggaatgggatgt

SEQ ID NO: 135972 - DNA, 25 bp, Artificial sequence
  SiRNA target sequence
ggcggttcaacgggaatgggatgtg

SEQ ID NO: 135973 - DNA, 25 bp, Artificial sequence
  SiRNA target sequence
gcggttcaacgggaatgggatgtgc

SEQ ID NO: 135974 - DNA, 25 bp, Artificial sequence
  SiRNA target sequence
cggttcaacgggaatgggatgtgca

SEQ ID NO: 135975 - DNA, 25 bp, Artificial sequence
  SiRNA target sequence
ggttcaacgggaatgggatgtgcaa

SEQ ID NO: 135976 - DNA, 25 bp, Artificial sequence
  SiRNA target sequence
gttcaacgggaatgggatgtgcaat

SEQ ID NO: 135977 - DNA, 25 bp, Artificial sequence
  SiRNA target sequence
ttcaacgggaatgggatgtgcaatc

SEQ ID NO: 135978 - DNA, 25 bp, Artificial sequence
  SiRNA target sequence
tcaacgggaatgggatgtgcaatcg

SEQ ID NO: 135979 - DNA, 25 bp, Artificial sequence
  SiRNA target sequence
caacgggaatgggatgtgcaatcga

SEQ ID NO: 135980 - DNA, 25 bp, Artificial sequence
  SiRNA target sequence
aacgggaatgggatgtgcaatcgaa

SEQ ID NO: 135981 - DNA, 25 bp, Artificial sequence
  SiRNA target sequence
acgggaatgggatgtgcaatcgaag

SEQ ID NO: 135982 - DNA, 25 bp, Artificial sequence
  SiRNA target sequence
cgggaatgggatgtgcaatcgaagc

SEQ ID NO: 135983 - DNA, 25 bp, Artificial sequence
  SiRNA target sequence
gggaatgggatgtgcaatcgaagca

SEQ ID NO: 135984 - DNA, 25 bp, Artificial sequence
  SiRNA target sequence
ggaatgggatgtgcaatcgaagcag

SEQ ID NO: 135985 - DNA, 25 bp, Artificial sequence
  SiRNA target sequence
gaatgggatgtgcaatcgaagcagc

SEQ ID NO: 135986 - DNA, 25 bp, Artificial sequence
  SiRNA target sequence
aatgggatgtgcaatcgaagcagct

SEQ ID NO: 135987 - DNA, 25 bp, Artificial sequence
  SiRNA target sequence
atgggatgtgcaatcgaagcagcta

SEQ ID NO: 135988 - DNA, 25 bp, Artificial sequence
  SiRNA target sequence
tgggatgtgcaatcgaagcagctac

SEQ ID NO: 135989 - DNA, 25 bp, Artificial sequence
  SiRNA target sequence
gggatgtgcaatcgaagcagctaca

SEQ ID NO: 135990 - DNA, 25 bp, Artificial sequence
  SiRNA target sequence
ggatgtgcaatcgaagcagctacac

SEQ ID NO: 135991 - DNA, 25 bp, Artificial sequence
  SiRNA target sequence
gatgtgcaatcgaagcagctacacg

SEQ ID NO: 135992 - DNA, 25 bp, Artificial sequence
  SiRNA target sequence
atgtgcaatcgaagcagctacacga

SEQ ID NO: 135993 - DNA, 25 bp, Artificial sequence
  SiRNA target sequence
tgtgcaatcgaagcagctacacgag

SEQ ID NO: 135994 - DNA, 25 bp, Artificial sequence
  SiRNA target sequence
gtgcaatcgaagcagctacacgagg

SEQ ID NO: 135995 - DNA, 25 bp, Artificial sequence
  SiRNA target sequence
tgcaatcgaagcagctacacgaggt

SEQ ID NO: 135996 - DNA, 25 bp, Artificial sequence
  SiRNA target sequence
gcaatcgaagcagctacacgaggta

SEQ ID NO: 135997 - DNA, 25 bp, Artificial sequence
  SiRNA target sequence
caatcgaagcagctacacgaggtat

SEQ ID NO: 135998 - DNA, 25 bp, Artificial sequence
  SiRNA target sequence
aatcgaagcagctacacgaggtata

SEQ ID NO: 135999 - DNA, 25 bp, Artificial sequence
  SiRNA target sequence
atcgaagcagctacacgaggtataa

SEQ ID NO: 136000 - DNA, 25 bp, Artificial sequence
  SiRNA target sequence
tcgaagcagctacacgaggtataag

SEQ ID NO: 136001 - DNA, 25 bp, Artificial sequence
  SiRNA target sequence
cgaagcagctacacgaggtataagt

SEQ ID NO: 136002 - DNA, 25 bp, Artificial sequence
  SiRNA target sequence
gaagcagctacacgaggtataagtg

SEQ ID NO: 136003 - DNA, 25 bp, Artificial sequence
  SiRNA target sequence
aagcagctacacgaggtataagtgt

SEQ ID NO: 136004 - DNA, 25 bp, Artificial sequence
  SiRNA target sequence
agcagctacacgaggtataagtgtt

SEQ ID NO: 136005 - DNA, 25 bp, Artificial sequence
  SiRNA target sequence
gcagctacacgaggtataagtgttg

SEQ ID NO: 136006 - DNA, 25 bp, Artificial sequence
  SiRNA target sequence
cagctacacgaggtataagtgttgg

SEQ ID NO: 136007 - DNA, 25 bp, Artificial sequence
  SiRNA target sequence
agctacacgaggtataagtgttggc

SEQ ID NO: 136008 - DNA, 25 bp, Artificial sequence
  SiRNA target sequence
gctacacgaggtataagtgttggcc

SEQ ID NO: 136009 - DNA, 25 bp, Artificial sequence
  SiRNA target sequence
ctacacgaggtataagtgttggcct

SEQ ID NO: 136010 - DNA, 25 bp, Artificial sequence
  SiRNA target sequence
tacacgaggtataagtgttggcctg

SEQ ID NO: 136011 - DNA, 25 bp, Artificial sequence
  SiRNA target sequence
acacgaggtataagtgttggcctga

SEQ ID NO: 136012 - DNA, 25 bp, Artificial sequence
  SiRNA target sequence
cacgaggtataagtgttggcctgat

SEQ ID NO: 136013 - DNA, 25 bp, Artificial sequence
  SiRNA target sequence
acgaggtataagtgttggcctgata

SEQ ID NO: 136014 - DNA, 25 bp, Artificial sequence
  SiRNA target sequence
cgaggtataagtgttggcctgatag

SEQ ID NO: 136015 - DNA, 25 bp, Artificial sequence
  SiRNA target sequence
gaggtataagtgttggcctgataga

SEQ ID NO: 136016 - DNA, 25 bp, Artificial sequence
  SiRNA target sequence
aggtataagtgttggcctgatagaa

SEQ ID NO: 136017 - DNA, 25 bp, Artificial sequence
  SiRNA target sequence
ggtataagtgttggcctgatagaag

SEQ ID NO: 136018 - DNA, 25 bp, Artificial sequence
  SiRNA target sequence
gtataagtgttggcctgatagaagc

SEQ ID NO: 136019 - DNA, 25 bp, Artificial sequence
  SiRNA target sequence
tataagtgttggcctgatagaagca

SEQ ID NO: 136020 - DNA, 25 bp, Artificial sequence
  SiRNA target sequence
ataagtgttggcctgatagaagcac

SEQ ID NO: 136021 - DNA, 25 bp, Artificial sequence
  SiRNA target sequence
taagtgttggcctgatagaagcaca

SEQ ID NO: 136022 - DNA, 25 bp, Artificial sequence
  SiRNA target sequence
aagtgttggcctgatagaagcacat

SEQ ID NO: 136023 - DNA, 25 bp, Artificial sequence
  SiRNA target sequence
agtgttggcctgatagaagcacatg

SEQ ID NO: 136024 - DNA, 25 bp, Artificial sequence
  SiRNA target sequence
gtgttggcctgatagaagcacatga

SEQ ID NO: 136025 - DNA, 25 bp, Artificial sequence
  SiRNA target sequence
tgttggcctgatagaagcacatgat

SEQ ID NO: 136026 - DNA, 25 bp, Artificial sequence
  SiRNA target sequence
gttggcctgatagaagcacatgatt

SEQ ID NO: 136027 - DNA, 25 bp, Artificial sequence
  SiRNA target sequence
ttggcctgatagaagcacatgattt

SEQ ID NO: 136028 - DNA, 25 bp, Artificial sequence
  SiRNA target sequence
tggcctgatagaagcacatgatttt

SEQ ID NO: 136029 - DNA, 25 bp, Artificial sequence
  SiRNA target sequence
ggcctgatagaagcacatgattttg

SEQ ID NO: 136030 - DNA, 25 bp, Artificial sequence
  SiRNA target sequence
gcctgatagaagcacatgattttgg

SEQ ID NO: 136031 - DNA, 25 bp, Artificial sequence
  SiRNA target sequence
cctgatagaagcacatgattttggt

SEQ ID NO: 136032 - DNA, 25 bp, Artificial sequence
  SiRNA target sequence
ctgatagaagcacatgattttggtt

SEQ ID NO: 136033 - DNA, 25 bp, Artificial sequence
  SiRNA target sequence
tgatagaagcacatgattttggttc

SEQ ID NO: 136034 - DNA, 25 bp, Artificial sequence
  SiRNA target sequence
gatagaagcacatgattttggttcg

SEQ ID NO: 136035 - DNA, 25 bp, Artificial sequence
  SiRNA target sequence
atagaagcacatgattttggttcgg

SEQ ID NO: 136036 - DNA, 25 bp, Artificial sequence
  SiRNA target sequence
tagaagcacatgattttggttcggg

SEQ ID NO: 136037 - DNA, 25 bp, Artificial sequence
  SiRNA target sequence
agaagcacatgattttggttcgggc

SEQ ID NO: 136038 - DNA, 25 bp, Artificial sequence
  SiRNA target sequence
gaagcacatgattttggttcgggca

SEQ ID NO: 136039 - DNA, 25 bp, Artificial sequence
  SiRNA target sequence
aagcacatgattttggttcgggcac

SEQ ID NO: 136040 - DNA, 25 bp, Artificial sequence
  SiRNA target sequence
agcacatgattttggttcgggcacg

SEQ ID NO: 136041 - DNA, 25 bp, Artificial sequence
  SiRNA target sequence
gcacatgattttggttcgggcacga

SEQ ID NO: 136042 - DNA, 25 bp, Artificial sequence
  SiRNA target sequence
cacatgattttggttcgggcacgag

SEQ ID NO: 136043 - DNA, 25 bp, Artificial sequence
  SiRNA target sequence
acatgattttggttcgggcacgagt

SEQ ID NO: 136044 - DNA, 25 bp, Artificial sequence
  SiRNA target sequence
catgattttggttcgggcacgagtt

SEQ ID NO: 136045 - DNA, 25 bp, Artificial sequence
  SiRNA target sequence
atgattttggttcgggcacgagttc

SEQ ID NO: 136046 - DNA, 25 bp, Artificial sequence
  SiRNA target sequence
tgattttggttcgggcacgagttca

SEQ ID NO: 136047 - DNA, 25 bp, Artificial sequence
  SiRNA target sequence
gattttggttcgggcacgagttcaa

SEQ ID NO: 136048 - DNA, 25 bp, Artificial sequence
  SiRNA target sequence
attttggttcgggcacgagttcaaa

SEQ ID NO: 136049 - DNA, 25 bp, Artificial sequence
  SiRNA target sequence
ttttggttcgggcacgagttcaaaa

SEQ ID NO: 136050 - DNA, 25 bp, Artificial sequence
  SiRNA target sequence
tttggttcgggcacgagttcaaaat

SEQ ID NO: 136051 - DNA, 25 bp, Artificial sequence
  SiRNA target sequence
ttggttcgggcacgagttcaaaatc

SEQ ID NO: 136052 - DNA, 25 bp, Artificial sequence
  SiRNA target sequence
tggttcgggcacgagttcaaaatct

SEQ ID NO: 136053 - DNA, 25 bp, Artificial sequence
  SiRNA target sequence
ggttcgggcacgagttcaaaatcta

SEQ ID NO: 136054 - DNA, 25 bp, Artificial sequence
  SiRNA target sequence
gttcgggcacgagttcaaaatctac

SEQ ID NO: 136055 - DNA, 25 bp, Artificial sequence
  SiRNA target sequence
ttcgggcacgagttcaaaatctaca

SEQ ID NO: 136056 - DNA, 25 bp, Artificial sequence
  SiRNA target sequence
tcgggcacgagttcaaaatctacaa

SEQ ID NO: 136057 - DNA, 25 bp, Artificial sequence
  SiRNA target sequence
cgggcacgagttcaaaatctacaaa

SEQ ID NO: 136058 - DNA, 25 bp, Artificial sequence
  SiRNA target sequence
gggcacgagttcaaaatctacaaaa

SEQ ID NO: 136059 - DNA, 25 bp, Artificial sequence
  SiRNA target sequence
ggcacgagttcaaaatctacaaaac

SEQ ID NO: 136060 - DNA, 25 bp, Artificial sequence
  SiRNA target sequence
gcacgagttcaaaatctacaaaact

SEQ ID NO: 136061 - DNA, 25 bp, Artificial sequence
  SiRNA target sequence
cacgagttcaaaatctacaaaactt

SEQ ID NO: 136062 - DNA, 25 bp, Artificial sequence
  SiRNA target sequence
acgagttcaaaatctacaaaacttt

SEQ ID NO: 136063 - DNA, 25 bp, Artificial sequence
  SiRNA target sequence
cgagttcaaaatctacaaaactttt

SEQ ID NO: 136064 - DNA, 25 bp, Artificial sequence
  SiRNA target sequence
gagttcaaaatctacaaaacttttt

SEQ ID NO: 136065 - DNA, 25 bp, Artificial sequence
  SiRNA target sequence
agttcaaaatctacaaaactttttc

SEQ ID NO: 136066 - DNA, 25 bp, Artificial sequence
  SiRNA target sequence
gttcaaaatctacaaaactttttca

SEQ ID NO: 136067 - DNA, 25 bp, Artificial sequence
  SiRNA target sequence
ttcaaaatctacaaaactttttcat

SEQ ID NO: 136068 - DNA, 25 bp, Artificial sequence
  SiRNA target sequence
tcaaaatctacaaaactttttcatg

SEQ ID NO: 136069 - DNA, 25 bp, Artificial sequence
  SiRNA target sequence
caaaatctacaaaactttttcatgg

SEQ ID NO: 136070 - DNA, 25 bp, Artificial sequence
  SiRNA target sequence
aaaatctacaaaactttttcatggc

SEQ ID NO: 136071 - DNA, 25 bp, Artificial sequence
  SiRNA target sequence
aaatctacaaaactttttcatggcg

SEQ ID NO: 136072 - DNA, 25 bp, Artificial sequence
  SiRNA target sequence
aatctacaaaactttttcatggcgg

SEQ ID NO: 136073 - DNA, 25 bp, Artificial sequence
  SiRNA target sequence
atctacaaaactttttcatggcggt

SEQ ID NO: 136074 - DNA, 25 bp, Artificial sequence
  SiRNA target sequence
tctacaaaactttttcatggcggtg

SEQ ID NO: 136075 - DNA, 25 bp, Artificial sequence
  SiRNA target sequence
ctacaaaactttttcatggcggtgt

SEQ ID NO: 136076 - DNA, 25 bp, Artificial sequence
  SiRNA target sequence
tacaaaactttttcatggcggtgta

SEQ ID NO: 136077 - DNA, 25 bp, Artificial sequence
  SiRNA target sequence
acaaaactttttcatggcggtgtac

SEQ ID NO: 136078 - DNA, 25 bp, Artificial sequence
  SiRNA target sequence
caaaactttttcatggcggtgtacg

SEQ ID NO: 136079 - DNA, 25 bp, Artificial sequence
  SiRNA target sequence
aaaactttttcatggcggtgtacgc

SEQ ID NO: 136080 - DNA, 25 bp, Artificial sequence
  SiRNA target sequence
aaactttttcatggcggtgtacgct

SEQ ID NO: 136081 - DNA, 25 bp, Artificial sequence
  SiRNA target sequence
aactttttcatggcggtgtacgcta

SEQ ID NO: 136082 - DNA, 25 bp, Artificial sequence
  SiRNA target sequence
actttttcatggcggtgtacgctac

SEQ ID NO: 136083 - DNA, 25 bp, Artificial sequence
  SiRNA target sequence
ctttttcatggcggtgtacgctacc

SEQ ID NO: 136084 - DNA, 25 bp, Artificial sequence
  SiRNA target sequence
tttttcatggcggtgtacgctacct

SEQ ID NO: 136085 - DNA, 25 bp, Artificial sequence
  SiRNA target sequence
ttttcatggcggtgtacgctacctt

SEQ ID NO: 136086 - DNA, 25 bp, Artificial sequence
  SiRNA target sequence
tttcatggcggtgtacgctaccttg

SEQ ID NO: 136087 - DNA, 25 bp, Artificial sequence
  SiRNA target sequence
ttcatggcggtgtacgctaccttga

SEQ ID NO: 136088 - DNA, 25 bp, Artificial sequence
  SiRNA target sequence
tcatggcggtgtacgctaccttgaa

SEQ ID NO: 136089 - DNA, 25 bp, Artificial sequence
  SiRNA target sequence
catggcggtgtacgctaccttgaaa

SEQ ID NO: 136090 - DNA, 25 bp, Artificial sequence
  SiRNA target sequence
atggcggtgtacgctaccttgaaaa

SEQ ID NO: 136091 - DNA, 25 bp, Artificial sequence
  SiRNA target sequence
tggcggtgtacgctaccttgaaaaa

SEQ ID NO: 136092 - DNA, 25 bp, Artificial sequence
  SiRNA target sequence
ggcggtgtacgctaccttgaaaaag

SEQ ID NO: 136093 - DNA, 25 bp, Artificial sequence
  SiRNA target sequence
gcggtgtacgctaccttgaaaaagc

SEQ ID NO: 136094 - DNA, 25 bp, Artificial sequence
  SiRNA target sequence
cggtgtacgctaccttgaaaaagct

SEQ ID NO: 136095 - DNA, 25 bp, Artificial sequence
  SiRNA target sequence
ggtgtacgctaccttgaaaaagctg

SEQ ID NO: 136096 - DNA, 25 bp, Artificial sequence
  SiRNA target sequence
gtgtacgctaccttgaaaaagctgt

SEQ ID NO: 136097 - DNA, 25 bp, Artificial sequence
  SiRNA target sequence
tgtacgctaccttgaaaaagctgtt

SEQ ID NO: 136098 - DNA, 25 bp, Artificial sequence
  SiRNA target sequence
gtacgctaccttgaaaaagctgtta

SEQ ID NO: 136099 - DNA, 25 bp, Artificial sequence
  SiRNA target sequence
tacgctaccttgaaaaagctgttaa

SEQ ID NO: 136100 - DNA, 25 bp, Artificial sequence
  SiRNA target sequence
acgctaccttgaaaaagctgttaat

SEQ ID NO: 136101 - DNA, 25 bp, Artificial sequence
  SiRNA target sequence
cgctaccttgaaaaagctgttaatg

SEQ ID NO: 136102 - DNA, 25 bp, Artificial sequence
  SiRNA target sequence
gctaccttgaaaaagctgttaatga

SEQ ID NO: 136103 - DNA, 25 bp, Artificial sequence
  SiRNA target sequence
ctaccttgaaaaagctgttaatgat

SEQ ID NO: 136104 - DNA, 25 bp, Artificial sequence
  SiRNA target sequence
taccttgaaaaagctgttaatgatt

SEQ ID NO: 136105 - DNA, 25 bp, Artificial sequence
  SiRNA target sequence
accttgaaaaagctgttaatgattt

SEQ ID NO: 136106 - DNA, 25 bp, Artificial sequence
  SiRNA target sequence
ccttgaaaaagctgttaatgattta

SEQ ID NO: 136107 - DNA, 25 bp, Artificial sequence
  SiRNA target sequence
cttgaaaaagctgttaatgatttag

SEQ ID NO: 136108 - DNA, 25 bp, Artificial sequence
  SiRNA target sequence
ttgaaaaagctgttaatgatttaga

SEQ ID NO: 136109 - DNA, 25 bp, Artificial sequence
  SiRNA target sequence
tgaaaaagctgttaatgatttagat

SEQ ID NO: 136110 - DNA, 25 bp, Artificial sequence
  SiRNA target sequence
gaaaaagctgttaatgatttagata

SEQ ID NO: 136111 - DNA, 25 bp, Artificial sequence
  SiRNA target sequence
aaaaagctgttaatgatttagatag

SEQ ID NO: 136112 - DNA, 25 bp, Artificial sequence
  SiRNA target sequence
aaaagctgttaatgatttagataga

SEQ ID NO: 136113 - DNA, 25 bp, Artificial sequence
  SiRNA target sequence
aaagctgttaatgatttagatagat

SEQ ID NO: 136114 - DNA, 25 bp, Artificial sequence
  SiRNA target sequence
aagctgttaatgatttagatagatc

SEQ ID NO: 136115 - DNA, 25 bp, Artificial sequence
  SiRNA target sequence
agctgttaatgatttagatagatct

SEQ ID NO: 136116 - DNA, 25 bp, Artificial sequence
  SiRNA target sequence
gctgttaatgatttagatagatctc

SEQ ID NO: 136117 - DNA, 25 bp, Artificial sequence
  SiRNA target sequence
ctgttaatgatttagatagatctca

SEQ ID NO: 136118 - DNA, 25 bp, Artificial sequence
  SiRNA target sequence
tgttaatgatttagatagatctcag

SEQ ID NO: 136119 - DNA, 25 bp, Artificial sequence
  SiRNA target sequence
gttaatgatttagatagatctcagt

SEQ ID NO: 136120 - DNA, 25 bp, Artificial sequence
  SiRNA target sequence
ttaatgatttagatagatctcagtt

SEQ ID NO: 136121 - DNA, 25 bp, Artificial sequence
  SiRNA target sequence
taatgatttagatagatctcagttt

SEQ ID NO: 136122 - DNA, 25 bp, Artificial sequence
  SiRNA target sequence
aatgatttagatagatctcagtttg

SEQ ID NO: 136123 - DNA, 25 bp, Artificial sequence
  SiRNA target sequence
atgatttagatagatctcagtttga

SEQ ID NO: 136124 - DNA, 25 bp, Artificial sequence
  SiRNA target sequence
tgatttagatagatctcagtttgac

SEQ ID NO: 136125 - DNA, 25 bp, Artificial sequence
  SiRNA target sequence
gatttagatagatctcagtttgact

SEQ ID NO: 136126 - DNA, 25 bp, Artificial sequence
  SiRNA target sequence
atttagatagatctcagtttgactt

SEQ ID NO: 136127 - DNA, 25 bp, Artificial sequence
  SiRNA target sequence
tttagatagatctcagtttgacttg

SEQ ID NO: 136128 - DNA, 25 bp, Artificial sequence
  SiRNA target sequence
ttagatagatctcagtttgacttgg

SEQ ID NO: 136129 - DNA, 25 bp, Artificial sequence
  SiRNA target sequence
tagatagatctcagtttgacttggt

SEQ ID NO: 136130 - DNA, 25 bp, Artificial sequence
  SiRNA target sequence
agatagatctcagtttgacttggta

SEQ ID NO: 136131 - DNA, 25 bp, Artificial sequence
  SiRNA target sequence
gatagatctcagtttgacttggtat

SEQ ID NO: 136132 - DNA, 25 bp, Artificial sequence
  SiRNA target sequence
atagatctcagtttgacttggtatc

SEQ ID NO: 136133 - DNA, 25 bp, Artificial sequence
  SiRNA target sequence
tagatctcagtttgacttggtatct

SEQ ID NO: 136134 - DNA, 25 bp, Artificial sequence
  SiRNA target sequence
agatctcagtttgacttggtatctg

SEQ ID NO: 136135 - DNA, 25 bp, Artificial sequence
  SiRNA target sequence
gatctcagtttgacttggtatctga

SEQ ID NO: 136136 - DNA, 25 bp, Artificial sequence
  SiRNA target sequence
atctcagtttgacttggtatctgaa

SEQ ID NO: 136137 - DNA, 25 bp, Artificial sequence
  SiRNA target sequence
tctcagtttgacttggtatctgaag

SEQ ID NO: 136138 - DNA, 25 bp, Artificial sequence
  SiRNA target sequence
ctcagtttgacttggtatctgaagc

SEQ ID NO: 136139 - DNA, 25 bp, Artificial sequence
  SiRNA target sequence
tcagtttgacttggtatctgaagca

SEQ ID NO: 136140 - DNA, 25 bp, Artificial sequence
  SiRNA target sequence
cagtttgacttggtatctgaagcat

SEQ ID NO: 136141 - DNA, 25 bp, Artificial sequence
  SiRNA target sequence
agtttgacttggtatctgaagcatt

SEQ ID NO: 136142 - DNA, 25 bp, Artificial sequence
  SiRNA target sequence
gtttgacttggtatctgaagcatta

SEQ ID NO: 136143 - DNA, 25 bp, Artificial sequence
  SiRNA target sequence
tttgacttggtatctgaagcattaa

SEQ ID NO: 136144 - DNA, 25 bp, Artificial sequence
  SiRNA target sequence
ttgacttggtatctgaagcattaag

SEQ ID NO: 136145 - DNA, 25 bp, Artificial sequence
  SiRNA target sequence
tgacttggtatctgaagcattaagt

SEQ ID NO: 136146 - DNA, 25 bp, Artificial sequence
  SiRNA target sequence
gacttggtatctgaagcattaagtg

SEQ ID NO: 136147 - DNA, 25 bp, Artificial sequence
  SiRNA target sequence
acttggtatctgaagcattaagtga

SEQ ID NO: 136148 - DNA, 25 bp, Artificial sequence
  SiRNA target sequence
cttggtatctgaagcattaagtgaa

SEQ ID NO: 136149 - DNA, 25 bp, Artificial sequence
  SiRNA target sequence
ttggtatctgaagcattaagtgaac

SEQ ID NO: 136150 - DNA, 25 bp, Artificial sequence
  SiRNA target sequence
tggtatctgaagcattaagtgaacg

SEQ ID NO: 136151 - DNA, 25 bp, Artificial sequence
  SiRNA target sequence
ggtatctgaagcattaagtgaacga

SEQ ID NO: 136152 - DNA, 25 bp, Artificial sequence
  SiRNA target sequence
gtatctgaagcattaagtgaacgaa

SEQ ID NO: 136153 - DNA, 25 bp, Artificial sequence
  SiRNA target sequence
tatctgaagcattaagtgaacgaaa

SEQ ID NO: 136154 - DNA, 25 bp, Artificial sequence
  SiRNA target sequence
atctgaagcattaagtgaacgaaaa

SEQ ID NO: 136155 - DNA, 25 bp, Artificial sequence
  SiRNA target sequence
tctgaagcattaagtgaacgaaaaa

SEQ ID NO: 136156 - DNA, 25 bp, Artificial sequence
  SiRNA target sequence
ctgaagcattaagtgaacgaaaaat

SEQ ID NO: 136157 - DNA, 25 bp, Artificial sequence
  SiRNA target sequence
tgaagcattaagtgaacgaaaaatt

SEQ ID NO: 136158 - DNA, 25 bp, Artificial sequence
  SiRNA target sequence
gaagcattaagtgaacgaaaaattg

SEQ ID NO: 136159 - DNA, 25 bp, Artificial sequence
  SiRNA target sequence
aagcattaagtgaacgaaaaattgt

SEQ ID NO: 136160 - DNA, 25 bp, Artificial sequence
  SiRNA target sequence
agcattaagtgaacgaaaaattgtt

SEQ ID NO: 136161 - DNA, 25 bp, Artificial sequence
  SiRNA target sequence
gcattaagtgaacgaaaaattgtta

SEQ ID NO: 136162 - DNA, 25 bp, Artificial sequence
  SiRNA target sequence
cattaagtgaacgaaaaattgttat

SEQ ID NO: 136163 - DNA, 25 bp, Artificial sequence
  SiRNA target sequence
attaagtgaacgaaaaattgttatg

SEQ ID NO: 136164 - DNA, 25 bp, Artificial sequence
  SiRNA target sequence
ttaagtgaacgaaaaattgttatga

SEQ ID NO: 136165 - DNA, 25 bp, Artificial sequence
  SiRNA target sequence
taagtgaacgaaaaattgttatgaa

SEQ ID NO: 136166 - DNA, 25 bp, Artificial sequence
  SiRNA target sequence
aagtgaacgaaaaattgttatgaat

SEQ ID NO: 136167 - DNA, 25 bp, Artificial sequence
  SiRNA target sequence
agtgaacgaaaaattgttatgaata

SEQ ID NO: 136168 - DNA, 25 bp, Artificial sequence
  SiRNA target sequence
gtgaacgaaaaattgttatgaatat

SEQ ID NO: 136169 - DNA, 25 bp, Artificial sequence
  SiRNA target sequence
tgaacgaaaaattgttatgaatatg

SEQ ID NO: 136170 - DNA, 25 bp, Artificial sequence
  SiRNA target sequence
gaacgaaaaattgttatgaatatgt

SEQ ID NO: 136171 - DNA, 25 bp, Artificial sequence
  SiRNA target sequence
aacgaaaaattgttatgaatatgtg

SEQ ID NO: 136172 - DNA, 25 bp, Artificial sequence
  SiRNA target sequence
acgaaaaattgttatgaatatgtgt

SEQ ID NO: 136173 - DNA, 25 bp, Artificial sequence
  SiRNA target sequence
cgaaaaattgttatgaatatgtgtc

SEQ ID NO: 136174 - DNA, 25 bp, Artificial sequence
  SiRNA target sequence
gaaaaattgttatgaatatgtgtcc

SEQ ID NO: 136175 - DNA, 25 bp, Artificial sequence
  SiRNA target sequence
aaaaattgttatgaatatgtgtcct

SEQ ID NO: 136176 - DNA, 25 bp, Artificial sequence
  SiRNA target sequence
aaaattgttatgaatatgtgtcctt

SEQ ID NO: 136177 - DNA, 25 bp, Artificial sequence
  SiRNA target sequence
aaattgttatgaatatgtgtccttt

SEQ ID NO: 136178 - DNA, 25 bp, Artificial sequence
  SiRNA target sequence
aattgttatgaatatgtgtcctttt

SEQ ID NO: 136179 - DNA, 25 bp, Artificial sequence
  SiRNA target sequence
attgttatgaatatgtgtccttttc

SEQ ID NO: 136180 - DNA, 25 bp, Artificial sequence
  SiRNA target sequence
ttgttatgaatatgtgtccttttct

SEQ ID NO: 136181 - DNA, 25 bp, Artificial sequence
  SiRNA target sequence
tgttatgaatatgtgtccttttcta

SEQ ID NO: 136182 - DNA, 25 bp, Artificial sequence
  SiRNA target sequence
gttatgaatatgtgtccttttctag

SEQ ID NO: 136183 - DNA, 25 bp, Artificial sequence
  SiRNA target sequence
ttatgaatatgtgtccttttctagt

SEQ ID NO: 136184 - DNA, 25 bp, Artificial sequence
  SiRNA target sequence
tatgaatatgtgtccttttctagta

SEQ ID NO: 136185 - DNA, 25 bp, Artificial sequence
  SiRNA target sequence
atgaatatgtgtccttttctagtaa

SEQ ID NO: 136186 - DNA, 25 bp, Artificial sequence
  SiRNA target sequence
tgaatatgtgtccttttctagtaag

SEQ ID NO: 136187 - DNA, 25 bp, Artificial sequence
  SiRNA target sequence
gaatatgtgtccttttctagtaagg

SEQ ID NO: 136188 - DNA, 25 bp, Artificial sequence
  SiRNA target sequence
aatatgtgtccttttctagtaaggt

SEQ ID NO: 136189 - DNA, 25 bp, Artificial sequence
  SiRNA target sequence
atatgtgtccttttctagtaaggtc

SEQ ID NO: 136190 - DNA, 25 bp, Artificial sequence
  SiRNA target sequence
tatgtgtccttttctagtaaggtcg

SEQ ID NO: 136191 - DNA, 25 bp, Artificial sequence
  SiRNA target sequence
atgtgtccttttctagtaaggtcga

SEQ ID NO: 136192 - DNA, 25 bp, Artificial sequence
  SiRNA target sequence
tgtgtccttttctagtaaggtcgat

SEQ ID NO: 136193 - DNA, 25 bp, Artificial sequence
  SiRNA target sequence
gtgtccttttctagtaaggtcgatg

SEQ ID NO: 136194 - DNA, 25 bp, Artificial sequence
  SiRNA target sequence
tgtccttttctagtaaggtcgatgg

SEQ ID NO: 136195 - DNA, 25 bp, Artificial sequence
  SiRNA target sequence
gtccttttctagtaaggtcgatgga

SEQ ID NO: 136196 - DNA, 25 bp, Artificial sequence
  SiRNA target sequence
tccttttctagtaaggtcgatggaa

SEQ ID NO: 136197 - DNA, 25 bp, Artificial sequence
  SiRNA target sequence
ccttttctagtaaggtcgatggaaa

SEQ ID NO: 136198 - DNA, 25 bp, Artificial sequence
  SiRNA target sequence
cttttctagtaaggtcgatggaaat

SEQ ID NO: 136199 - DNA, 25 bp, Artificial sequence
  SiRNA target sequence
ttttctagtaaggtcgatggaaata

SEQ ID NO: 136200 - DNA, 25 bp, Artificial sequence
  SiRNA target sequence
tttctagtaaggtcgatggaaatat

SEQ ID NO: 136201 - DNA, 25 bp, Artificial sequence
  SiRNA target sequence
ttctagtaaggtcgatggaaatatt

SEQ ID NO: 136202 - DNA, 25 bp, Artificial sequence
  SiRNA target sequence
tctagtaaggtcgatggaaatatta

SEQ ID NO: 136203 - DNA, 25 bp, Artificial sequence
  SiRNA target sequence
ctagtaaggtcgatggaaatattat

SEQ ID NO: 136204 - DNA, 25 bp, Artificial sequence
  SiRNA target sequence
tagtaaggtcgatggaaatattatt

SEQ ID NO: 136205 - DNA, 25 bp, Artificial sequence
  SiRNA target sequence
agtaaggtcgatggaaatattattt

SEQ ID NO: 136206 - DNA, 25 bp, Artificial sequence
  SiRNA target sequence
gtaaggtcgatggaaatattatttc

SEQ ID NO: 136207 - DNA, 25 bp, Artificial sequence
  SiRNA target sequence
taaggtcgatggaaatattatttcc

SEQ ID NO: 136208 - DNA, 25 bp, Artificial sequence
  SiRNA target sequence
aaggtcgatggaaatattatttccg

SEQ ID NO: 136209 - DNA, 25 bp, Artificial sequence
  SiRNA target sequence
aggtcgatggaaatattatttccgg

SEQ ID NO: 136210 - DNA, 25 bp, Artificial sequence
  SiRNA target sequence
ggtcgatggaaatattatttccggt

SEQ ID NO: 136211 - DNA, 25 bp, Artificial sequence
  SiRNA target sequence
gtcgatggaaatattatttccggtt

SEQ ID NO: 136212 - DNA, 25 bp, Artificial sequence
  SiRNA target sequence
tcgatggaaatattatttccggttt

SEQ ID NO: 136213 - DNA, 25 bp, Artificial sequence
  SiRNA target sequence
cgatggaaatattatttccggttta

SEQ ID NO: 136214 - DNA, 25 bp, Artificial sequence
  SiRNA target sequence
gatggaaatattatttccggtttat

SEQ ID NO: 136215 - DNA, 25 bp, Artificial sequence
  SiRNA target sequence
atggaaatattatttccggtttata

SEQ ID NO: 136216 - DNA, 25 bp, Artificial sequence
  SiRNA target sequence
tggaaatattatttccggtttataa

SEQ ID NO: 136217 - DNA, 25 bp, Artificial sequence
  SiRNA target sequence
ggaaatattatttccggtttataaa

SEQ ID NO: 136218 - DNA, 25 bp, Artificial sequence
  SiRNA target sequence
gaaatattatttccggtttataaaa

SEQ ID NO: 136219 - DNA, 25 bp, Artificial sequence
  SiRNA target sequence
aaatattatttccggtttataaaag

SEQ ID NO: 136220 - DNA, 25 bp, Artificial sequence
  SiRNA target sequence
aatattatttccggtttataaaagg

SEQ ID NO: 136221 - DNA, 25 bp, Artificial sequence
  SiRNA target sequence
atattatttccggtttataaaaggc

SEQ ID NO: 136222 - DNA, 25 bp, Artificial sequence
  SiRNA target sequence
tattatttccggtttataaaaggct

SEQ ID NO: 136223 - DNA, 25 bp, Artificial sequence
  SiRNA target sequence
attatttccggtttataaaaggctt

SEQ ID NO: 136224 - DNA, 25 bp, Artificial sequence
  SiRNA target sequence
ttatttccggtttataaaaggcttt

SEQ ID NO: 136225 - DNA, 25 bp, Artificial sequence
  SiRNA target sequence
tatttccggtttataaaaggctttt

SEQ ID NO: 136226 - DNA, 25 bp, Artificial sequence
  SiRNA target sequence
atttccggtttataaaaggctttta

SEQ ID NO: 136227 - DNA, 25 bp, Artificial sequence
  SiRNA target sequence
tttccggtttataaaaggcttttaa

SEQ ID NO: 136228 - DNA, 25 bp, Artificial sequence
  SiRNA target sequence
ttccggtttataaaaggcttttaat

SEQ ID NO: 136229 - DNA, 25 bp, Artificial sequence
  SiRNA target sequence
tccggtttataaaaggcttttaatt

SEQ ID NO: 136230 - DNA, 25 bp, Artificial sequence
  SiRNA target sequence
ccggtttataaaaggcttttaattc

SEQ ID NO: 136231 - DNA, 25 bp, Artificial sequence
  SiRNA target sequence
cggtttataaaaggcttttaattcc

SEQ ID NO: 136232 - DNA, 25 bp, Artificial sequence
  SiRNA target sequence
ggtttataaaaggcttttaattcct

SEQ ID NO: 136233 - DNA, 25 bp, Artificial sequence
  SiRNA target sequence
gtttataaaaggcttttaattcctt

SEQ ID NO: 136234 - DNA, 25 bp, Artificial sequence
  SiRNA target sequence
tttataaaaggcttttaattcctta

SEQ ID NO: 136235 - DNA, 25 bp, Artificial sequence
  SiRNA target sequence
ttataaaaggcttttaattccttac

SEQ ID NO: 136236 - DNA, 25 bp, Artificial sequence
  SiRNA target sequence
tataaaaggcttttaattccttact

SEQ ID NO: 136237 - DNA, 25 bp, Artificial sequence
  SiRNA target sequence
ataaaaggcttttaattccttacta

SEQ ID NO: 136238 - DNA, 25 bp, Artificial sequence
  SiRNA target sequence
taaaaggcttttaattccttactac

SEQ ID NO: 136239 - DNA, 25 bp, Artificial sequence
  SiRNA target sequence
aaaaggcttttaattccttactact

SEQ ID NO: 136240 - DNA, 25 bp, Artificial sequence
  SiRNA target sequence
aaaggcttttaattccttactacta

SEQ ID NO: 136241 - DNA, 25 bp, Artificial sequence
  SiRNA target sequence
aaggcttttaattccttactactat

SEQ ID NO: 136242 - DNA, 25 bp, Artificial sequence
  SiRNA target sequence
aggcttttaattccttactactata

SEQ ID NO: 136243 - DNA, 25 bp, Artificial sequence
  SiRNA target sequence
ggcttttaattccttactactatat

SEQ ID NO: 136244 - DNA, 25 bp, Artificial sequence
  SiRNA target sequence
gcttttaattccttactactatatt

SEQ ID NO: 136245 - DNA, 25 bp, Artificial sequence
  SiRNA target sequence
cttttaattccttactactatattg

SEQ ID NO: 136246 - DNA, 25 bp, Artificial sequence
  SiRNA target sequence
ttttaattccttactactatattgg

SEQ ID NO: 136247 - DNA, 25 bp, Artificial sequence
  SiRNA target sequence
tttaattccttactactatattggc

SEQ ID NO: 136248 - DNA, 25 bp, Artificial sequence
  SiRNA target sequence
ttaattccttactactatattggcc

SEQ ID NO: 136249 - DNA, 25 bp, Artificial sequence
  SiRNA target sequence
taattccttactactatattggcct

SEQ ID NO: 136250 - DNA, 25 bp, Artificial sequence
  SiRNA target sequence
aattccttactactatattggcctt

SEQ ID NO: 136251 - DNA, 25 bp, Artificial sequence
  SiRNA target sequence
attccttactactatattggcctta

SEQ ID NO: 136252 - DNA, 25 bp, Artificial sequence
  SiRNA target sequence
ttccttactactatattggccttaa

SEQ ID NO: 136253 - DNA, 25 bp, Artificial sequence
  SiRNA target sequence
tccttactactatattggccttaaa

SEQ ID NO: 136254 - DNA, 25 bp, Artificial sequence
  SiRNA target sequence
ccttactactatattggccttaaat

SEQ ID NO: 136255 - DNA, 25 bp, Artificial sequence
  SiRNA target sequence
cttactactatattggccttaaatt

SEQ ID NO: 136256 - DNA, 25 bp, Artificial sequence
  SiRNA target sequence
ttactactatattggccttaaattt

SEQ ID NO: 136257 - DNA, 25 bp, Artificial sequence
  SiRNA target sequence
tactactatattggccttaaatttt

SEQ ID NO: 136258 - DNA, 25 bp, Artificial sequence
  SiRNA target sequence
actactatattggccttaaatttta

SEQ ID NO: 136259 - DNA, 25 bp, Artificial sequence
  SiRNA target sequence
ctactatattggccttaaattttat

SEQ ID NO: 136260 - DNA, 25 bp, Artificial sequence
  SiRNA target sequence
tactatattggccttaaattttatg

SEQ ID NO: 136261 - DNA, 25 bp, Artificial sequence
  SiRNA target sequence
actatattggccttaaattttatga

SEQ ID NO: 136262 - DNA, 25 bp, Artificial sequence
  SiRNA target sequence
ctatattggccttaaattttatgat

SEQ ID NO: 136263 - DNA, 25 bp, Artificial sequence
  SiRNA target sequence
tatattggccttaaattttatgatt

SEQ ID NO: 136264 - DNA, 25 bp, Artificial sequence
  SiRNA target sequence
atattggccttaaattttatgattg

SEQ ID NO: 136265 - DNA, 25 bp, Artificial sequence
  SiRNA target sequence
tattggccttaaattttatgattgg

SEQ ID NO: 136266 - DNA, 25 bp, Artificial sequence
  SiRNA target sequence
attggccttaaattttatgattgga

SEQ ID NO: 136267 - DNA, 25 bp, Artificial sequence
  SiRNA target sequence
ttggccttaaattttatgattggat

SEQ ID NO: 136268 - DNA, 25 bp, Artificial sequence
  SiRNA target sequence
tggccttaaattttatgattggatt

SEQ ID NO: 136269 - DNA, 25 bp, Artificial sequence
  SiRNA target sequence
ggccttaaattttatgattggattt

SEQ ID NO: 136270 - DNA, 25 bp, Artificial sequence
  SiRNA target sequence
gccttaaattttatgattggatttc

SEQ ID NO: 136271 - DNA, 25 bp, Artificial sequence
  SiRNA target sequence
ccttaaattttatgattggatttct

SEQ ID NO: 136272 - DNA, 25 bp, Artificial sequence
  SiRNA target sequence
cttaaattttatgattggatttctg

SEQ ID NO: 136273 - DNA, 25 bp, Artificial sequence
  SiRNA target sequence
ttaaattttatgattggatttctgg

SEQ ID NO: 136274 - DNA, 25 bp, Artificial sequence
  SiRNA target sequence
taaattttatgattggatttctggg

SEQ ID NO: 136275 - DNA, 25 bp, Artificial sequence
  SiRNA target sequence
aaattttatgattggatttctgggc

SEQ ID NO: 136276 - DNA, 25 bp, Artificial sequence
  SiRNA target sequence
aattttatgattggatttctgggca

SEQ ID NO: 136277 - DNA, 25 bp, Artificial sequence
  SiRNA target sequence
attttatgattggatttctgggcaa

SEQ ID NO: 136278 - DNA, 25 bp, Artificial sequence
  SiRNA target sequence
ttttatgattggatttctgggcaac

SEQ ID NO: 136279 - DNA, 25 bp, Artificial sequence
  SiRNA target sequence
tttatgattggatttctgggcaacg

SEQ ID NO: 136280 - DNA, 25 bp, Artificial sequence
  SiRNA target sequence
ttatgattggatttctgggcaacgg

SEQ ID NO: 136281 - DNA, 25 bp, Artificial sequence
  SiRNA target sequence
tatgattggatttctgggcaacggt

SEQ ID NO: 136282 - DNA, 25 bp, Artificial sequence
  SiRNA target sequence
atgattggatttctgggcaacggtc

SEQ ID NO: 136283 - DNA, 25 bp, Artificial sequence
  SiRNA target sequence
tgattggatttctgggcaacggtcc

SEQ ID NO: 136284 - DNA, 25 bp, Artificial sequence
  SiRNA target sequence
gattggatttctgggcaacggtccc

SEQ ID NO: 136285 - DNA, 25 bp, Artificial sequence
  SiRNA target sequence
attggatttctgggcaacggtccct

SEQ ID NO: 136286 - DNA, 25 bp, Artificial sequence
  SiRNA target sequence
ttggatttctgggcaacggtccctt

SEQ ID NO: 136287 - DNA, 25 bp, Artificial sequence
  SiRNA target sequence
tggatttctgggcaacggtcccttg

SEQ ID NO: 136288 - DNA, 25 bp, Artificial sequence
  SiRNA target sequence
ggatttctgggcaacggtcccttgg

SEQ ID NO: 136289 - DNA, 25 bp, Artificial sequence
  SiRNA target sequence
gatttctgggcaacggtcccttggg

SEQ ID NO: 136290 - DNA, 25 bp, Artificial sequence
  SiRNA target sequence
atttctgggcaacggtcccttgggc

SEQ ID NO: 136291 - DNA, 25 bp, Artificial sequence
  SiRNA target sequence
tttctgggcaacggtcccttgggcg

SEQ ID NO: 136292 - DNA, 25 bp, Artificial sequence
  SiRNA target sequence
ttctgggcaacggtcccttgggcga

SEQ ID NO: 136293 - DNA, 25 bp, Artificial sequence
  SiRNA target sequence
tctgggcaacggtcccttgggcgaa

SEQ ID NO: 136294 - DNA, 25 bp, Artificial sequence
  SiRNA target sequence
ctgggcaacggtcccttgggcgaag

SEQ ID NO: 136295 - DNA, 25 bp, Artificial sequence
  SiRNA target sequence
tgggcaacggtcccttgggcgaagt

SEQ ID NO: 136296 - DNA, 25 bp, Artificial sequence
  SiRNA target sequence
gggcaacggtcccttgggcgaagta

SEQ ID NO: 136297 - DNA, 25 bp, Artificial sequence
  SiRNA target sequence
ggcaacggtcccttgggcgaagtaa

SEQ ID NO: 136298 - DNA, 25 bp, Artificial sequence
  SiRNA target sequence
gcaacggtcccttgggcgaagtaaa

SEQ ID NO: 136299 - DNA, 25 bp, Artificial sequence
  SiRNA target sequence
caacggtcccttgggcgaagtaaat

SEQ ID NO: 136300 - DNA, 25 bp, Artificial sequence
  SiRNA target sequence
aacggtcccttgggcgaagtaaatt

SEQ ID NO: 136301 - DNA, 25 bp, Artificial sequence
  SiRNA target sequence
acggtcccttgggcgaagtaaattt

SEQ ID NO: 136302 - DNA, 25 bp, Artificial sequence
  SiRNA target sequence
cggtcccttgggcgaagtaaatttt

SEQ ID NO: 136303 - DNA, 25 bp, Artificial sequence
  SiRNA target sequence
ggtcccttgggcgaagtaaattttt

SEQ ID NO: 136304 - DNA, 25 bp, Artificial sequence
  SiRNA target sequence
gtcccttgggcgaagtaaatttttg

SEQ ID NO: 136305 - DNA, 25 bp, Artificial sequence
  SiRNA target sequence
tcccttgggcgaagtaaatttttgt

SEQ ID NO: 136306 - DNA, 25 bp, Artificial sequence
  SiRNA target sequence
cccttgggcgaagtaaatttttgtc

SEQ ID NO: 136307 - DNA, 25 bp, Artificial sequence
  SiRNA target sequence
ccttgggcgaagtaaatttttgtcg

SEQ ID NO: 136308 - DNA, 25 bp, Artificial sequence
  SiRNA target sequence
cttgggcgaagtaaatttttgtcgc

SEQ ID NO: 136309 - DNA, 25 bp, Artificial sequence
  SiRNA target sequence
ttgggcgaagtaaatttttgtcgcg

SEQ ID NO: 136310 - DNA, 25 bp, Artificial sequence
  SiRNA target sequence
tgggcgaagtaaatttttgtcgcgg

SEQ ID NO: 136311 - DNA, 25 bp, Artificial sequence
  SiRNA target sequence
gggcgaagtaaatttttgtcgcggc

SEQ ID NO: 136312 - DNA, 25 bp, Artificial sequence
  SiRNA target sequence
ggcgaagtaaatttttgtcgcggca

SEQ ID NO: 136313 - DNA, 25 bp, Artificial sequence
  SiRNA target sequence
gcgaagtaaatttttgtcgcggcaa

SEQ ID NO: 136314 - DNA, 25 bp, Artificial sequence
  SiRNA target sequence
cgaagtaaatttttgtcgcggcaac

SEQ ID NO: 136315 - DNA, 25 bp, Artificial sequence
  SiRNA target sequence
gaagtaaatttttgtcgcggcaaca

SEQ ID NO: 136316 - DNA, 25 bp, Artificial sequence
  SiRNA target sequence
aagtaaatttttgtcgcggcaacaa

SEQ ID NO: 136317 - DNA, 25 bp, Artificial sequence
  SiRNA target sequence
agtaaatttttgtcgcggcaacaaa

SEQ ID NO: 136318 - DNA, 25 bp, Artificial sequence
  SiRNA target sequence
gtaaatttttgtcgcggcaacaaac

SEQ ID NO: 136319 - DNA, 25 bp, Artificial sequence
  SiRNA target sequence
taaatttttgtcgcggcaacaaact

SEQ ID NO: 136320 - DNA, 25 bp, Artificial sequence
  SiRNA target sequence
aaatttttgtcgcggcaacaaacta

SEQ ID NO: 136321 - DNA, 25 bp, Artificial sequence
  SiRNA target sequence
aatttttgtcgcggcaacaaactat

SEQ ID NO: 136322 - DNA, 25 bp, Artificial sequence
  SiRNA target sequence
atttttgtcgcggcaacaaactatt

SEQ ID NO: 136323 - DNA, 25 bp, Artificial sequence
  SiRNA target sequence
tttttgtcgcggcaacaaactatta

SEQ ID NO: 136324 - DNA, 25 bp, Artificial sequence
  SiRNA target sequence
ttttgtcgcggcaacaaactattac

SEQ ID NO: 136325 - DNA, 25 bp, Artificial sequence
  SiRNA target sequence
tttgtcgcggcaacaaactattaca

SEQ ID NO: 136326 - DNA, 25 bp, Artificial sequence
  SiRNA target sequence
ttgtcgcggcaacaaactattacaa

SEQ ID NO: 136327 - DNA, 25 bp, Artificial sequence
  SiRNA target sequence
tgtcgcggcaacaaactattacaaa

SEQ ID NO: 136328 - DNA, 25 bp, Artificial sequence
  SiRNA target sequence
gtcgcggcaacaaactattacaaaa

SEQ ID NO: 136329 - DNA, 25 bp, Artificial sequence
  SiRNA target sequence
tcgcggcaacaaactattacaaaat

SEQ ID NO: 136330 - DNA, 25 bp, Artificial sequence
  SiRNA target sequence
cgcggcaacaaactattacaaaatt

SEQ ID NO: 136331 - DNA, 25 bp, Artificial sequence
  SiRNA target sequence
gcggcaacaaactattacaaaattt

SEQ ID NO: 136332 - DNA, 25 bp, Artificial sequence
  SiRNA target sequence
cggcaacaaactattacaaaatttc

SEQ ID NO: 136333 - DNA, 25 bp, Artificial sequence
  SiRNA target sequence
ggcaacaaactattacaaaatttcc

SEQ ID NO: 136334 - DNA, 25 bp, Artificial sequence
  SiRNA target sequence
gcaacaaactattacaaaatttcct

SEQ ID NO: 136335 - DNA, 25 bp, Artificial sequence
  SiRNA target sequence
caacaaactattacaaaatttccta

SEQ ID NO: 136336 - DNA, 25 bp, Artificial sequence
  SiRNA target sequence
aacaaactattacaaaatttcctaa

SEQ ID NO: 136337 - DNA, 25 bp, Artificial sequence
  SiRNA target sequence
acaaactattacaaaatttcctaat

SEQ ID NO: 136338 - DNA, 25 bp, Artificial sequence
  SiRNA target sequence
caaactattacaaaatttcctaatg

SEQ ID NO: 136339 - DNA, 25 bp, Artificial sequence
  SiRNA target sequence
aaactattacaaaatttcctaatgt

SEQ ID NO: 136340 - DNA, 25 bp, Artificial sequence
  SiRNA target sequence
aactattacaaaatttcctaatgtg

SEQ ID NO: 136341 - DNA, 25 bp, Artificial sequence
  SiRNA target sequence
actattacaaaatttcctaatgtga

SEQ ID NO: 136342 - DNA, 25 bp, Artificial sequence
  SiRNA target sequence
ctattacaaaatttcctaatgtgag

SEQ ID NO: 136343 - DNA, 25 bp, Artificial sequence
  SiRNA target sequence
tattacaaaatttcctaatgtgaga

SEQ ID NO: 136344 - DNA, 25 bp, Artificial sequence
  SiRNA target sequence
attacaaaatttcctaatgtgagaa

SEQ ID NO: 136345 - DNA, 25 bp, Artificial sequence
  SiRNA target sequence
ttacaaaatttcctaatgtgagaaa

SEQ ID NO: 136346 - DNA, 25 bp, Artificial sequence
  SiRNA target sequence
tacaaaatttcctaatgtgagaaaa

SEQ ID NO: 136347 - DNA, 25 bp, Artificial sequence
  SiRNA target sequence
acaaaatttcctaatgtgagaaaaa

SEQ ID NO: 136348 - DNA, 25 bp, Artificial sequence
  SiRNA target sequence
caaaatttcctaatgtgagaaaaat

SEQ ID NO: 136349 - DNA, 25 bp, Artificial sequence
  SiRNA target sequence
aaaatttcctaatgtgagaaaaatc

SEQ ID NO: 136350 - DNA, 25 bp, Artificial sequence
  SiRNA target sequence
aaatttcctaatgtgagaaaaatcg

SEQ ID NO: 136351 - DNA, 25 bp, Artificial sequence
  SiRNA target sequence
aatttcctaatgtgagaaaaatcga

SEQ ID NO: 136352 - DNA, 25 bp, Artificial sequence
  SiRNA target sequence
atttcctaatgtgagaaaaatcgac

SEQ ID NO: 136353 - DNA, 25 bp, Artificial sequence
  SiRNA target sequence
tttcctaatgtgagaaaaatcgacc

SEQ ID NO: 136354 - DNA, 25 bp, Artificial sequence
  SiRNA target sequence
ttcctaatgtgagaaaaatcgacct

SEQ ID NO: 136355 - DNA, 25 bp, Artificial sequence
  SiRNA target sequence
tcctaatgtgagaaaaatcgacctt

SEQ ID NO: 136356 - DNA, 25 bp, Artificial sequence
  SiRNA target sequence
cctaatgtgagaaaaatcgaccttg

SEQ ID NO: 136357 - DNA, 25 bp, Artificial sequence
  SiRNA target sequence
ctaatgtgagaaaaatcgaccttgt

SEQ ID NO: 136358 - DNA, 25 bp, Artificial sequence
  SiRNA target sequence
taatgtgagaaaaatcgaccttgta

SEQ ID NO: 136359 - DNA, 25 bp, Artificial sequence
  SiRNA target sequence
aatgtgagaaaaatcgaccttgtag

SEQ ID NO: 136360 - DNA, 25 bp, Artificial sequence
  SiRNA target sequence
atgtgagaaaaatcgaccttgtagg

SEQ ID NO: 136361 - DNA, 25 bp, Artificial sequence
  SiRNA target sequence
tgtgagaaaaatcgaccttgtagga

SEQ ID NO: 136362 - DNA, 25 bp, Artificial sequence
  SiRNA target sequence
gtgagaaaaatcgaccttgtaggat

SEQ ID NO: 136363 - DNA, 25 bp, Artificial sequence
  SiRNA target sequence
tgagaaaaatcgaccttgtaggatc

SEQ ID NO: 136364 - DNA, 25 bp, Artificial sequence
  SiRNA target sequence
gagaaaaatcgaccttgtaggatcc

SEQ ID NO: 136365 - DNA, 25 bp, Artificial sequence
  SiRNA target sequence
agaaaaatcgaccttgtaggatccg

SEQ ID NO: 136366 - DNA, 25 bp, Artificial sequence
  SiRNA target sequence
gaaaaatcgaccttgtaggatccgt

SEQ ID NO: 136367 - DNA, 25 bp, Artificial sequence
  SiRNA target sequence
aaaaatcgaccttgtaggatccgtt

SEQ ID NO: 136368 - DNA, 25 bp, Artificial sequence
  SiRNA target sequence
aaaatcgaccttgtaggatccgttt

SEQ ID NO: 136369 - DNA, 25 bp, Artificial sequence
  SiRNA target sequence
aaatcgaccttgtaggatccgtttc

SEQ ID NO: 136370 - DNA, 25 bp, Artificial sequence
  SiRNA target sequence
aatcgaccttgtaggatccgtttcg

SEQ ID NO: 136371 - DNA, 25 bp, Artificial sequence
  SiRNA target sequence
atcgaccttgtaggatccgtttcgt

SEQ ID NO: 136372 - DNA, 25 bp, Artificial sequence
  SiRNA target sequence
tcgaccttgtaggatccgtttcgta

SEQ ID NO: 136373 - DNA, 25 bp, Artificial sequence
  SiRNA target sequence
cgaccttgtaggatccgtttcgtat

SEQ ID NO: 136374 - DNA, 25 bp, Artificial sequence
  SiRNA target sequence
gaccttgtaggatccgtttcgtatc

SEQ ID NO: 136375 - DNA, 25 bp, Artificial sequence
  SiRNA target sequence
accttgtaggatccgtttcgtatcg

SEQ ID NO: 136376 - DNA, 25 bp, Artificial sequence
  SiRNA target sequence
ccttgtaggatccgtttcgtatcgt

SEQ ID NO: 136377 - DNA, 25 bp, Artificial sequence
  SiRNA target sequence
cttgtaggatccgtttcgtatcgtg

SEQ ID NO: 136378 - DNA, 25 bp, Artificial sequence
  SiRNA target sequence
ttgtaggatccgtttcgtatcgtga

SEQ ID NO: 136379 - DNA, 25 bp, Artificial sequence
  SiRNA target sequence
tgtaggatccgtttcgtatcgtgat

SEQ ID NO: 136380 - DNA, 25 bp, Artificial sequence
  SiRNA target sequence
gtaggatccgtttcgtatcgtgatg

SEQ ID NO: 136381 - DNA, 25 bp, Artificial sequence
  SiRNA target sequence
taggatccgtttcgtatcgtgatgg

SEQ ID NO: 136382 - DNA, 25 bp, Artificial sequence
  SiRNA target sequence
aggatccgtttcgtatcgtgatggc

SEQ ID NO: 136383 - DNA, 25 bp, Artificial sequence
  SiRNA target sequence
ggatccgtttcgtatcgtgatggcc

SEQ ID NO: 136384 - DNA, 25 bp, Artificial sequence
  SiRNA target sequence
gatccgtttcgtatcgtgatggcca

SEQ ID NO: 136385 - DNA, 25 bp, Artificial sequence
  SiRNA target sequence
atccgtttcgtatcgtgatggccaa

SEQ ID NO: 136386 - DNA, 25 bp, Artificial sequence
  SiRNA target sequence
tccgtttcgtatcgtgatggccaat

SEQ ID NO: 136387 - DNA, 25 bp, Artificial sequence
  SiRNA target sequence
ccgtttcgtatcgtgatggccaatt

SEQ ID NO: 136388 - DNA, 25 bp, Artificial sequence
  SiRNA target sequence
cgtttcgtatcgtgatggccaattt

SEQ ID NO: 136389 - DNA, 25 bp, Artificial sequence
  SiRNA target sequence
gtttcgtatcgtgatggccaatttt

SEQ ID NO: 136390 - DNA, 25 bp, Artificial sequence
  SiRNA target sequence
tttcgtatcgtgatggccaatttta

SEQ ID NO: 136391 - DNA, 25 bp, Artificial sequence
  SiRNA target sequence
ttcgtatcgtgatggccaattttat

SEQ ID NO: 136392 - DNA, 25 bp, Artificial sequence
  SiRNA target sequence
tcgtatcgtgatggccaattttatg

SEQ ID NO: 136393 - DNA, 25 bp, Artificial sequence
  SiRNA target sequence
cgtatcgtgatggccaattttatga

SEQ ID NO: 136394 - DNA, 25 bp, Artificial sequence
  SiRNA target sequence
gtatcgtgatggccaattttatgat

SEQ ID NO: 136395 - DNA, 25 bp, Artificial sequence
  SiRNA target sequence
tatcgtgatggccaattttatgatg

SEQ ID NO: 136396 - DNA, 25 bp, Artificial sequence
  SiRNA target sequence
atcgtgatggccaattttatgatgc

SEQ ID NO: 136397 - DNA, 25 bp, Artificial sequence
  SiRNA target sequence
tcgtgatggccaattttatgatgct

SEQ ID NO: 136398 - DNA, 25 bp, Artificial sequence
  SiRNA target sequence
cgtgatggccaattttatgatgcta

SEQ ID NO: 136399 - DNA, 25 bp, Artificial sequence
  SiRNA target sequence
gtgatggccaattttatgatgctaa

SEQ ID NO: 136400 - DNA, 25 bp, Artificial sequence
  SiRNA target sequence
tgatggccaattttatgatgctaaa

SEQ ID NO: 136401 - DNA, 25 bp, Artificial sequence
  SiRNA target sequence
gatggccaattttatgatgctaaat

SEQ ID NO: 136402 - DNA, 25 bp, Artificial sequence
  SiRNA target sequence
atggccaattttatgatgctaaata

SEQ ID NO: 136403 - DNA, 25 bp, Artificial sequence
  SiRNA target sequence
tggccaattttatgatgctaaatac

SEQ ID NO: 136404 - DNA, 25 bp, Artificial sequence
  SiRNA target sequence
ggccaattttatgatgctaaataca

SEQ ID NO: 136405 - DNA, 25 bp, Artificial sequence
  SiRNA target sequence
gccaattttatgatgctaaatacaa

SEQ ID NO: 136406 - DNA, 25 bp, Artificial sequence
  SiRNA target sequence
ccaattttatgatgctaaatacaat

SEQ ID NO: 136407 - DNA, 25 bp, Artificial sequence
  SiRNA target sequence
caattttatgatgctaaatacaatg

SEQ ID NO: 136408 - DNA, 25 bp, Artificial sequence
  SiRNA target sequence
aattttatgatgctaaatacaatgt

SEQ ID NO: 136409 - DNA, 25 bp, Artificial sequence
  SiRNA target sequence
attttatgatgctaaatacaatgtt

SEQ ID NO: 136410 - DNA, 25 bp, Artificial sequence
  SiRNA target sequence
ttttatgatgctaaatacaatgttc

SEQ ID NO: 136411 - DNA, 25 bp, Artificial sequence
  SiRNA target sequence
tttatgatgctaaatacaatgttct

SEQ ID NO: 136412 - DNA, 25 bp, Artificial sequence
  SiRNA target sequence
ttatgatgctaaatacaatgttcta

SEQ ID NO: 136413 - DNA, 25 bp, Artificial sequence
  SiRNA target sequence
tatgatgctaaatacaatgttctat

SEQ ID NO: 136414 - DNA, 25 bp, Artificial sequence
  SiRNA target sequence
atgatgctaaatacaatgttctatt

SEQ ID NO: 136415 - DNA, 25 bp, Artificial sequence
  SiRNA target sequence
tgatgctaaatacaatgttctattg

SEQ ID NO: 136416 - DNA, 25 bp, Artificial sequence
  SiRNA target sequence
gatgctaaatacaatgttctattgg

SEQ ID NO: 136417 - DNA, 25 bp, Artificial sequence
  SiRNA target sequence
atgctaaatacaatgttctattggg

SEQ ID NO: 136418 - DNA, 25 bp, Artificial sequence
  SiRNA target sequence
tgctaaatacaatgttctattgggt

SEQ ID NO: 136419 - DNA, 25 bp, Artificial sequence
  SiRNA target sequence
gctaaatacaatgttctattgggtg

SEQ ID NO: 136420 - DNA, 25 bp, Artificial sequence
  SiRNA target sequence
ctaaatacaatgttctattgggtgt

SEQ ID NO: 136421 - DNA, 25 bp, Artificial sequence
  SiRNA target sequence
taaatacaatgttctattgggtgtc

SEQ ID NO: 136422 - DNA, 25 bp, Artificial sequence
  SiRNA target sequence
aaatacaatgttctattgggtgtca

SEQ ID NO: 136423 - DNA, 25 bp, Artificial sequence
  SiRNA target sequence
aatacaatgttctattgggtgtcac

SEQ ID NO: 136424 - DNA, 25 bp, Artificial sequence
  SiRNA target sequence
atacaatgttctattgggtgtcaca

SEQ ID NO: 136425 - DNA, 25 bp, Artificial sequence
  SiRNA target sequence
tacaatgttctattgggtgtcacag

SEQ ID NO: 136426 - DNA, 25 bp, Artificial sequence
  SiRNA target sequence
acaatgttctattgggtgtcacagc

SEQ ID NO: 136427 - DNA, 25 bp, Artificial sequence
  SiRNA target sequence
caatgttctattgggtgtcacagct

SEQ ID NO: 136428 - DNA, 25 bp, Artificial sequence
  SiRNA target sequence
aatgttctattgggtgtcacagcta

SEQ ID NO: 136429 - DNA, 25 bp, Artificial sequence
  SiRNA target sequence
atgttctattgggtgtcacagctac

SEQ ID NO: 136430 - DNA, 25 bp, Artificial sequence
  SiRNA target sequence
tgttctattgggtgtcacagctacc

SEQ ID NO: 136431 - DNA, 25 bp, Artificial sequence
  SiRNA target sequence
gttctattgggtgtcacagctacct

SEQ ID NO: 136432 - DNA, 25 bp, Artificial sequence
  SiRNA target sequence
ttctattgggtgtcacagctaccta

SEQ ID NO: 136433 - DNA, 25 bp, Artificial sequence
  SiRNA target sequence
tctattgggtgtcacagctacctac

SEQ ID NO: 136434 - DNA, 25 bp, Artificial sequence
  SiRNA target sequence
ctattgggtgtcacagctacctact

SEQ ID NO: 136435 - DNA, 25 bp, Artificial sequence
  SiRNA target sequence
tattgggtgtcacagctacctacta

SEQ ID NO: 136436 - DNA, 25 bp, Artificial sequence
  SiRNA target sequence
attgggtgtcacagctacctactat

SEQ ID NO: 136437 - DNA, 25 bp, Artificial sequence
  SiRNA target sequence
ttgggtgtcacagctacctactatg

SEQ ID NO: 136438 - DNA, 25 bp, Artificial sequence
  SiRNA target sequence
tgggtgtcacagctacctactatgg

SEQ ID NO: 136439 - DNA, 25 bp, Artificial sequence
  SiRNA target sequence
gggtgtcacagctacctactatgga

SEQ ID NO: 136440 - DNA, 25 bp, Artificial sequence
  SiRNA target sequence
ggtgtcacagctacctactatggag

SEQ ID NO: 136441 - DNA, 25 bp, Artificial sequence
  SiRNA target sequence
gtgtcacagctacctactatggagc

SEQ ID NO: 136442 - DNA, 25 bp, Artificial sequence
  SiRNA target sequence
tgtcacagctacctactatggagct

SEQ ID NO: 136443 - DNA, 25 bp, Artificial sequence
  SiRNA target sequence
gtcacagctacctactatggagctg

SEQ ID NO: 136444 - DNA, 25 bp, Artificial sequence
  SiRNA target sequence
tcacagctacctactatggagctgt

SEQ ID NO: 136445 - DNA, 25 bp, Artificial sequence
  SiRNA target sequence
cacagctacctactatggagctgtt

SEQ ID NO: 136446 - DNA, 25 bp, Artificial sequence
  SiRNA target sequence
acagctacctactatggagctgttg

SEQ ID NO: 136447 - DNA, 25 bp, Artificial sequence
  SiRNA target sequence
cagctacctactatggagctgttgt

SEQ ID NO: 136448 - DNA, 25 bp, Artificial sequence
  SiRNA target sequence
agctacctactatggagctgttgta

SEQ ID NO: 136449 - DNA, 25 bp, Artificial sequence
  SiRNA target sequence
gctacctactatggagctgttgtat

SEQ ID NO: 136450 - DNA, 25 bp, Artificial sequence
  SiRNA target sequence
ctacctactatggagctgttgtatt

SEQ ID NO: 136451 - DNA, 25 bp, Artificial sequence
  SiRNA target sequence
tacctactatggagctgttgtatta

SEQ ID NO: 136452 - DNA, 25 bp, Artificial sequence
  SiRNA target sequence
acctactatggagctgttgtattaa

SEQ ID NO: 136453 - DNA, 25 bp, Artificial sequence
  SiRNA target sequence
cctactatggagctgttgtattaaa

SEQ ID NO: 136454 - DNA, 25 bp, Artificial sequence
  SiRNA target sequence
ctactatggagctgttgtattaaat

SEQ ID NO: 136455 - DNA, 25 bp, Artificial sequence
  SiRNA target sequence
tactatggagctgttgtattaaatc

SEQ ID NO: 136456 - DNA, 25 bp, Artificial sequence
  SiRNA target sequence
actatggagctgttgtattaaatca

SEQ ID NO: 136457 - DNA, 25 bp, Artificial sequence
  SiRNA target sequence
ctatggagctgttgtattaaatcat

SEQ ID NO: 136458 - DNA, 25 bp, Artificial sequence
  SiRNA target sequence
tatggagctgttgtattaaatcatg

SEQ ID NO: 136459 - DNA, 25 bp, Artificial sequence
  SiRNA target sequence
atggagctgttgtattaaatcatgc

SEQ ID NO: 136460 - DNA, 25 bp, Artificial sequence
  SiRNA target sequence
tggagctgttgtattaaatcatgca

SEQ ID NO: 136461 - DNA, 25 bp, Artificial sequence
  SiRNA target sequence
ggagctgttgtattaaatcatgcaa

SEQ ID NO: 136462 - DNA, 25 bp, Artificial sequence
  SiRNA target sequence
gagctgttgtattaaatcatgcaaa

SEQ ID NO: 136463 - DNA, 25 bp, Artificial sequence
  SiRNA target sequence
agctgttgtattaaatcatgcaaaa

SEQ ID NO: 136464 - DNA, 25 bp, Artificial sequence
  SiRNA target sequence
gctgttgtattaaatcatgcaaaat

SEQ ID NO: 136465 - DNA, 25 bp, Artificial sequence
  SiRNA target sequence
ctgttgtattaaatcatgcaaaatt

SEQ ID NO: 136466 - DNA, 25 bp, Artificial sequence
  SiRNA target sequence
tgttgtattaaatcatgcaaaattc

SEQ ID NO: 136467 - DNA, 25 bp, Artificial sequence
  SiRNA target sequence
gttgtattaaatcatgcaaaattct

SEQ ID NO: 136468 - DNA, 25 bp, Artificial sequence
  SiRNA target sequence
ttgtattaaatcatgcaaaattctt

SEQ ID NO: 136469 - DNA, 25 bp, Artificial sequence
  SiRNA target sequence
tgtattaaatcatgcaaaattcttg

SEQ ID NO: 136470 - DNA, 25 bp, Artificial sequence
  SiRNA target sequence
gtattaaatcatgcaaaattcttgt

SEQ ID NO: 136471 - DNA, 25 bp, Artificial sequence
  SiRNA target sequence
tattaaatcatgcaaaattcttgtc

SEQ ID NO: 136472 - DNA, 25 bp, Artificial sequence
  SiRNA target sequence
attaaatcatgcaaaattcttgtca

SEQ ID NO: 136473 - DNA, 25 bp, Artificial sequence
  SiRNA target sequence
ttaaatcatgcaaaattcttgtcag

SEQ ID NO: 136474 - DNA, 25 bp, Artificial sequence
  SiRNA target sequence
taaatcatgcaaaattcttgtcagt

SEQ ID NO: 136475 - DNA, 25 bp, Artificial sequence
  SiRNA target sequence
aaatcatgcaaaattcttgtcagta

SEQ ID NO: 136476 - DNA, 25 bp, Artificial sequence
  SiRNA target sequence
aatcatgcaaaattcttgtcagtaa

SEQ ID NO: 136477 - DNA, 25 bp, Artificial sequence
  SiRNA target sequence
atcatgcaaaattcttgtcagtaac

SEQ ID NO: 136478 - DNA, 25 bp, Artificial sequence
  SiRNA target sequence
tcatgcaaaattcttgtcagtaaca

SEQ ID NO: 136479 - DNA, 25 bp, Artificial sequence
  SiRNA target sequence
catgcaaaattcttgtcagtaacaa

SEQ ID NO: 136480 - DNA, 25 bp, Artificial sequence
  SiRNA target sequence
atgcaaaattcttgtcagtaacaaa

SEQ ID NO: 136481 - DNA, 25 bp, Artificial sequence
  SiRNA target sequence
tgcaaaattcttgtcagtaacaaaa

SEQ ID NO: 136482 - DNA, 25 bp, Artificial sequence
  SiRNA target sequence
gcaaaattcttgtcagtaacaaaag

SEQ ID NO: 136483 - DNA, 25 bp, Artificial sequence
  SiRNA target sequence
caaaattcttgtcagtaacaaaaga

SEQ ID NO: 136484 - DNA, 25 bp, Artificial sequence
  SiRNA target sequence
aaaattcttgtcagtaacaaaagat

SEQ ID NO: 136485 - DNA, 25 bp, Artificial sequence
  SiRNA target sequence
aaattcttgtcagtaacaaaagatg

SEQ ID NO: 136486 - DNA, 25 bp, Artificial sequence
  SiRNA target sequence
aattcttgtcagtaacaaaagatgg

SEQ ID NO: 136487 - DNA, 25 bp, Artificial sequence
  SiRNA target sequence
attcttgtcagtaacaaaagatggc

SEQ ID NO: 136488 - DNA, 25 bp, Artificial sequence
  SiRNA target sequence
ttcttgtcagtaacaaaagatggcg

SEQ ID NO: 136489 - DNA, 25 bp, Artificial sequence
  SiRNA target sequence
tcttgtcagtaacaaaagatggcga

SEQ ID NO: 136490 - DNA, 25 bp, Artificial sequence
  SiRNA target sequence
cttgtcagtaacaaaagatggcgat

SEQ ID NO: 136491 - DNA, 25 bp, Artificial sequence
  SiRNA target sequence
ttgtcagtaacaaaagatggcgata

SEQ ID NO: 136492 - DNA, 25 bp, Artificial sequence
  SiRNA target sequence
tgtcagtaacaaaagatggcgataa

SEQ ID NO: 136493 - DNA, 25 bp, Artificial sequence
  SiRNA target sequence
gtcagtaacaaaagatggcgataaa

SEQ ID NO: 136494 - DNA, 25 bp, Artificial sequence
  SiRNA target sequence
tcagtaacaaaagatggcgataaaa

SEQ ID NO: 136495 - DNA, 25 bp, Artificial sequence
  SiRNA target sequence
cagtaacaaaagatggcgataaaat

SEQ ID NO: 136496 - DNA, 25 bp, Artificial sequence
  SiRNA target sequence
agtaacaaaagatggcgataaaatt

SEQ ID NO: 136497 - DNA, 25 bp, Artificial sequence
  SiRNA target sequence
gtaacaaaagatggcgataaaatta

SEQ ID NO: 136498 - DNA, 25 bp, Artificial sequence
  SiRNA target sequence
taacaaaagatggcgataaaattaa

SEQ ID NO: 136499 - DNA, 25 bp, Artificial sequence
  SiRNA target sequence
aacaaaagatggcgataaaattaat

SEQ ID NO: 136500 - DNA, 25 bp, Artificial sequence
  SiRNA target sequence
acaaaagatggcgataaaattaatg

SEQ ID NO: 136501 - DNA, 25 bp, Artificial sequence
  SiRNA target sequence
caaaagatggcgataaaattaatgg

SEQ ID NO: 136502 - DNA, 25 bp, Artificial sequence
  SiRNA target sequence
aaaagatggcgataaaattaatgga

SEQ ID NO: 136503 - DNA, 25 bp, Artificial sequence
  SiRNA target sequence
aaagatggcgataaaattaatggaa

SEQ ID NO: 136504 - DNA, 25 bp, Artificial sequence
  SiRNA target sequence
aagatggcgataaaattaatggaat

SEQ ID NO: 136505 - DNA, 25 bp, Artificial sequence
  SiRNA target sequence
agatggcgataaaattaatggaatt

SEQ ID NO: 136506 - DNA, 25 bp, Artificial sequence
  SiRNA target sequence
gatggcgataaaattaatggaatta

SEQ ID NO: 136507 - DNA, 25 bp, Artificial sequence
  SiRNA target sequence
atggcgataaaattaatggaattaa

SEQ ID NO: 136508 - DNA, 25 bp, Artificial sequence
  SiRNA target sequence
tggcgataaaattaatggaattaaa

SEQ ID NO: 136509 - DNA, 25 bp, Artificial sequence
  SiRNA target sequence
ggcgataaaattaatggaattaaat

SEQ ID NO: 136510 - DNA, 25 bp, Artificial sequence
  SiRNA target sequence
gcgataaaattaatggaattaaatg

SEQ ID NO: 136511 - DNA, 25 bp, Artificial sequence
  SiRNA target sequence
cgataaaattaatggaattaaatgt

SEQ ID NO: 136512 - DNA, 25 bp, Artificial sequence
  SiRNA target sequence
gataaaattaatggaattaaatgtc

SEQ ID NO: 136513 - DNA, 25 bp, Artificial sequence
  SiRNA target sequence
ataaaattaatggaattaaatgtca

SEQ ID NO: 136514 - DNA, 25 bp, Artificial sequence
  SiRNA target sequence
taaaattaatggaattaaatgtcaa

SEQ ID NO: 136515 - DNA, 25 bp, Artificial sequence
  SiRNA target sequence
aaaattaatggaattaaatgtcaag

SEQ ID NO: 136516 - DNA, 25 bp, Artificial sequence
  SiRNA target sequence
aaattaatggaattaaatgtcaaga

SEQ ID NO: 136517 - DNA, 25 bp, Artificial sequence
  SiRNA target sequence
aattaatggaattaaatgtcaagat

SEQ ID NO: 136518 - DNA, 25 bp, Artificial sequence
  SiRNA target sequence
attaatggaattaaatgtcaagatt

SEQ ID NO: 136519 - DNA, 25 bp, Artificial sequence
  SiRNA target sequence
ttaatggaattaaatgtcaagattc

SEQ ID NO: 136520 - DNA, 25 bp, Artificial sequence
  SiRNA target sequence
taatggaattaaatgtcaagattca

SEQ ID NO: 136521 - DNA, 25 bp, Artificial sequence
  SiRNA target sequence
aatggaattaaatgtcaagattcaa

SEQ ID NO: 136522 - DNA, 25 bp, Artificial sequence
  SiRNA target sequence
atggaattaaatgtcaagattcaat

SEQ ID NO: 136523 - DNA, 25 bp, Artificial sequence
  SiRNA target sequence
tggaattaaatgtcaagattcaata

SEQ ID NO: 136524 - DNA, 25 bp, Artificial sequence
  SiRNA target sequence
ggaattaaatgtcaagattcaataa

SEQ ID NO: 136525 - DNA, 25 bp, Artificial sequence
  SiRNA target sequence
gaattaaatgtcaagattcaataaa

SEQ ID NO: 136526 - DNA, 25 bp, Artificial sequence
  SiRNA target sequence
aattaaatgtcaagattcaataaat

SEQ ID NO: 136527 - DNA, 25 bp, Artificial sequence
  SiRNA target sequence
attaaatgtcaagattcaataaata

SEQ ID NO: 136528 - DNA, 25 bp, Artificial sequence
  SiRNA target sequence
ttaaatgtcaagattcaataaataa

SEQ ID NO: 136529 - DNA, 25 bp, Artificial sequence
  SiRNA target sequence
taaatgtcaagattcaataaataat

SEQ ID NO: 136530 - DNA, 25 bp, Artificial sequence
  SiRNA target sequence
aaatgtcaagattcaataaataatg

SEQ ID NO: 136531 - DNA, 25 bp, Artificial sequence
  SiRNA target sequence
aatgtcaagattcaataaataatga

SEQ ID NO: 136532 - DNA, 25 bp, Artificial sequence
  SiRNA target sequence
atgtcaagattcaataaataatgaa

SEQ ID NO: 136533 - DNA, 25 bp, Artificial sequence
  SiRNA target sequence
tgtcaagattcaataaataatgaaa

SEQ ID NO: 136534 - DNA, 25 bp, Artificial sequence
  SiRNA target sequence
gtcaagattcaataaataatgaaaa

SEQ ID NO: 136535 - DNA, 25 bp, Artificial sequence
  SiRNA target sequence
tcaagattcaataaataatgaaaaa

SEQ ID NO: 136536 - DNA, 25 bp, Artificial sequence
  SiRNA target sequence
caagattcaataaataatgaaaaat

SEQ ID NO: 136537 - DNA, 25 bp, Artificial sequence
  SiRNA target sequence
aagattcaataaataatgaaaaatt

SEQ ID NO: 136538 - DNA, 25 bp, Artificial sequence
  SiRNA target sequence
agattcaataaataatgaaaaattt

SEQ ID NO: 136539 - DNA, 25 bp, Artificial sequence
  SiRNA target sequence
gattcaataaataatgaaaaatttt

SEQ ID NO: 136540 - DNA, 25 bp, Artificial sequence
  SiRNA target sequence
attcaataaataatgaaaaattttt

SEQ ID NO: 136541 - DNA, 25 bp, Artificial sequence
  SiRNA target sequence
ttcaataaataatgaaaaattttta

SEQ ID NO: 136542 - DNA, 25 bp, Artificial sequence
  SiRNA target sequence
tcaataaataatgaaaaatttttaa

SEQ ID NO: 136543 - DNA, 25 bp, Artificial sequence
  SiRNA target sequence
caataaataatgaaaaatttttaat

SEQ ID NO: 136544 - DNA, 25 bp, Artificial sequence
  SiRNA target sequence
aataaataatgaaaaatttttaatt

SEQ ID NO: 136545 - DNA, 25 bp, Artificial sequence
  SiRNA target sequence
ataaataatgaaaaatttttaatta

SEQ ID NO: 136546 - DNA, 25 bp, Artificial sequence
  SiRNA target sequence
taaataatgaaaaatttttaattag

SEQ ID NO: 136547 - DNA, 25 bp, Artificial sequence
  SiRNA target sequence
aaataatgaaaaatttttaattagg

SEQ ID NO: 136548 - DNA, 25 bp, Artificial sequence
  SiRNA target sequence
aataatgaaaaatttttaattaggt

SEQ ID NO: 136549 - DNA, 25 bp, Artificial sequence
  SiRNA target sequence
ataatgaaaaatttttaattaggtg

SEQ ID NO: 136550 - DNA, 25 bp, Artificial sequence
  SiRNA target sequence
taatgaaaaatttttaattaggtgt

SEQ ID NO: 136551 - DNA, 25 bp, Artificial sequence
  SiRNA target sequence
aatgaaaaatttttaattaggtgta

SEQ ID NO: 136552 - DNA, 25 bp, Artificial sequence
  SiRNA target sequence
atgaaaaatttttaattaggtgtaa

SEQ ID NO: 136553 - DNA, 25 bp, Artificial sequence
  SiRNA target sequence
tgaaaaatttttaattaggtgtaaa

SEQ ID NO: 136554 - DNA, 25 bp, Artificial sequence
  SiRNA target sequence
gaaaaatttttaattaggtgtaaag

SEQ ID NO: 136555 - DNA, 25 bp, Artificial sequence
  SiRNA target sequence
aaaaatttttaattaggtgtaaagt

SEQ ID NO: 136556 - DNA, 25 bp, Artificial sequence
  SiRNA target sequence
aaaatttttaattaggtgtaaagtt

SEQ ID NO: 136557 - DNA, 25 bp, Artificial sequence
  SiRNA target sequence
aaatttttaattaggtgtaaagttt

SEQ ID NO: 136558 - DNA, 25 bp, Artificial sequence
  SiRNA target sequence
aatttttaattaggtgtaaagtttt

SEQ ID NO: 136559 - DNA, 25 bp, Artificial sequence
  SiRNA target sequence
atttttaattaggtgtaaagtttta

SEQ ID NO: 136560 - DNA, 25 bp, Artificial sequence
  SiRNA target sequence
tttttaattaggtgtaaagttttaa

SEQ ID NO: 136561 - DNA, 25 bp, Artificial sequence
  SiRNA target sequence
ttttaattaggtgtaaagttttaat

SEQ ID NO: 136562 - DNA, 25 bp, Artificial sequence
  SiRNA target sequence
tttaattaggtgtaaagttttaata

SEQ ID NO: 136563 - DNA, 25 bp, Artificial sequence
  SiRNA target sequence
ttaattaggtgtaaagttttaataa

SEQ ID NO: 136564 - DNA, 25 bp, Artificial sequence
  SiRNA target sequence
taattaggtgtaaagttttaataaa

SEQ ID NO: 136565 - DNA, 25 bp, Artificial sequence
  SiRNA target sequence
aattaggtgtaaagttttaataaat

SEQ ID NO: 136566 - DNA, 25 bp, Artificial sequence
  SiRNA target sequence
attaggtgtaaagttttaataaata

SEQ ID NO: 136567 - DNA, 25 bp, Artificial sequence
  SiRNA target sequence
ttaggtgtaaagttttaataaatac

SEQ ID NO: 136568 - DNA, 25 bp, Artificial sequence
  SiRNA target sequence
taggtgtaaagttttaataaatact

SEQ ID NO: 136569 - DNA, 25 bp, Artificial sequence
  SiRNA target sequence
aggtgtaaagttttaataaatactt

SEQ ID NO: 136570 - DNA, 25 bp, Artificial sequence
  SiRNA target sequence
ggtgtaaagttttaataaatacttc

SEQ ID NO: 136571 - DNA, 25 bp, Artificial sequence
  SiRNA target sequence
gtgtaaagttttaataaatacttct

SEQ ID NO: 136572 - DNA, 25 bp, Artificial sequence
  SiRNA target sequence
tgtaaagttttaataaatacttctg

SEQ ID NO: 136573 - DNA, 25 bp, Artificial sequence
  SiRNA target sequence
gtaaagttttaataaatacttctgg

SEQ ID NO: 136574 - DNA, 25 bp, Artificial sequence
  SiRNA target sequence
taaagttttaataaatacttctggc

SEQ ID NO: 136575 - DNA, 25 bp, Artificial sequence
  SiRNA target sequence
aaagttttaataaatacttctggcc

SEQ ID NO: 136576 - DNA, 25 bp, Artificial sequence
  SiRNA target sequence
aagttttaataaatacttctggccc

SEQ ID NO: 136577 - DNA, 25 bp, Artificial sequence
  SiRNA target sequence
agttttaataaatacttctggccct

SEQ ID NO: 136578 - DNA, 25 bp, Artificial sequence
  SiRNA target sequence
gttttaataaatacttctggccctt

SEQ ID NO: 136579 - DNA, 25 bp, Artificial sequence
  SiRNA target sequence
ttttaataaatacttctggcccttt

SEQ ID NO: 136580 - DNA, 25 bp, Artificial sequence
  SiRNA target sequence
tttaataaatacttctggccctttt

SEQ ID NO: 136581 - DNA, 25 bp, Artificial sequence
  SiRNA target sequence
ttaataaatacttctggcccttttg

SEQ ID NO: 136582 - DNA, 25 bp, Artificial sequence
  SiRNA target sequence
taataaatacttctggcccttttgc

SEQ ID NO: 136583 - DNA, 25 bp, Artificial sequence
  SiRNA target sequence
aataaatacttctggcccttttgct

SEQ ID NO: 136584 - DNA, 25 bp, Artificial sequence
  SiRNA target sequence
ataaatacttctggcccttttgctg

SEQ ID NO: 136585 - DNA, 25 bp, Artificial sequence
  SiRNA target sequence
taaatacttctggcccttttgctga

SEQ ID NO: 136586 - DNA, 25 bp, Artificial sequence
  SiRNA target sequence
aaatacttctggcccttttgctgac

SEQ ID NO: 136587 - DNA, 25 bp, Artificial sequence
  SiRNA target sequence
aatacttctggcccttttgctgacg

SEQ ID NO: 136588 - DNA, 25 bp, Artificial sequence
  SiRNA target sequence
atacttctggcccttttgctgacga

SEQ ID NO: 136589 - DNA, 25 bp, Artificial sequence
  SiRNA target sequence
tacttctggcccttttgctgacgag

SEQ ID NO: 136590 - DNA, 25 bp, Artificial sequence
  SiRNA target sequence
acttctggcccttttgctgacgagg

SEQ ID NO: 136591 - DNA, 25 bp, Artificial sequence
  SiRNA target sequence
cttctggcccttttgctgacgaggt

SEQ ID NO: 136592 - DNA, 25 bp, Artificial sequence
  SiRNA target sequence
ttctggcccttttgctgacgaggtt

SEQ ID NO: 136593 - DNA, 25 bp, Artificial sequence
  SiRNA target sequence
tctggcccttttgctgacgaggttc

SEQ ID NO: 136594 - DNA, 25 bp, Artificial sequence
  SiRNA target sequence
ctggcccttttgctgacgaggttcg

SEQ ID NO: 136595 - DNA, 25 bp, Artificial sequence
  SiRNA target sequence
tggcccttttgctgacgaggttcga

SEQ ID NO: 136596 - DNA, 25 bp, Artificial sequence
  SiRNA target sequence
ggcccttttgctgacgaggttcgaa

SEQ ID NO: 136597 - DNA, 25 bp, Artificial sequence
  SiRNA target sequence
gcccttttgctgacgaggttcgaaa

SEQ ID NO: 136598 - DNA, 25 bp, Artificial sequence
  SiRNA target sequence
cccttttgctgacgaggttcgaaat

SEQ ID NO: 136599 - DNA, 25 bp, Artificial sequence
  SiRNA target sequence
ccttttgctgacgaggttcgaaata

SEQ ID NO: 136600 - DNA, 25 bp, Artificial sequence
  SiRNA target sequence
cttttgctgacgaggttcgaaatac

SEQ ID NO: 136601 - DNA, 25 bp, Artificial sequence
  SiRNA target sequence
ttttgctgacgaggttcgaaataca

SEQ ID NO: 136602 - DNA, 25 bp, Artificial sequence
  SiRNA target sequence
tttgctgacgaggttcgaaatacat

SEQ ID NO: 136603 - DNA, 25 bp, Artificial sequence
  SiRNA target sequence
ttgctgacgaggttcgaaatacatc

SEQ ID NO: 136604 - DNA, 25 bp, Artificial sequence
  SiRNA target sequence
tgctgacgaggttcgaaatacatca

SEQ ID NO: 136605 - DNA, 25 bp, Artificial sequence
  SiRNA target sequence
gctgacgaggttcgaaatacatcaa

SEQ ID NO: 136606 - DNA, 25 bp, Artificial sequence
  SiRNA target sequence
ctgacgaggttcgaaatacatcaat

SEQ ID NO: 136607 - DNA, 25 bp, Artificial sequence
  SiRNA target sequence
tgacgaggttcgaaatacatcaatt

SEQ ID NO: 136608 - DNA, 25 bp, Artificial sequence
  SiRNA target sequence
gacgaggttcgaaatacatcaattg

SEQ ID NO: 136609 - DNA, 25 bp, Artificial sequence
  SiRNA target sequence
acgaggttcgaaatacatcaattga

SEQ ID NO: 136610 - DNA, 25 bp, Artificial sequence
  SiRNA target sequence
cgaggttcgaaatacatcaattgaa

SEQ ID NO: 136611 - DNA, 25 bp, Artificial sequence
  SiRNA target sequence
gaggttcgaaatacatcaattgaaa

SEQ ID NO: 136612 - DNA, 25 bp, Artificial sequence
  SiRNA target sequence
aggttcgaaatacatcaattgaaaa

SEQ ID NO: 136613 - DNA, 25 bp, Artificial sequence
  SiRNA target sequence
ggttcgaaatacatcaattgaaaac

SEQ ID NO: 136614 - DNA, 25 bp, Artificial sequence
  SiRNA target sequence
gttcgaaatacatcaattgaaaact

SEQ ID NO: 136615 - DNA, 25 bp, Artificial sequence
  SiRNA target sequence
ttcgaaatacatcaattgaaaactg

SEQ ID NO: 136616 - DNA, 25 bp, Artificial sequence
  SiRNA target sequence
tcgaaatacatcaattgaaaactgt

SEQ ID NO: 136617 - DNA, 25 bp, Artificial sequence
  SiRNA target sequence
cgaaatacatcaattgaaaactgtc

SEQ ID NO: 136618 - DNA, 25 bp, Artificial sequence
  SiRNA target sequence
gaaatacatcaattgaaaactgtca

SEQ ID NO: 136619 - DNA, 25 bp, Artificial sequence
  SiRNA target sequence
aaatacatcaattgaaaactgtcaa

SEQ ID NO: 136620 - DNA, 25 bp, Artificial sequence
  SiRNA target sequence
aatacatcaattgaaaactgtcaac

SEQ ID NO: 136621 - DNA, 25 bp, Artificial sequence
  SiRNA target sequence
atacatcaattgaaaactgtcaacc

SEQ ID NO: 136622 - DNA, 25 bp, Artificial sequence
  SiRNA target sequence
tacatcaattgaaaactgtcaacca

SEQ ID NO: 136623 - DNA, 25 bp, Artificial sequence
  SiRNA target sequence
acatcaattgaaaactgtcaaccaa

SEQ ID NO: 136624 - DNA, 25 bp, Artificial sequence
  SiRNA target sequence
catcaattgaaaactgtcaaccaat

SEQ ID NO: 136625 - DNA, 25 bp, Artificial sequence
  SiRNA target sequence
atcaattgaaaactgtcaaccaata

SEQ ID NO: 136626 - DNA, 25 bp, Artificial sequence
  SiRNA target sequence
tcaattgaaaactgtcaaccaatac

SEQ ID NO: 136627 - DNA, 25 bp, Artificial sequence
  SiRNA target sequence
caattgaaaactgtcaaccaatact

SEQ ID NO: 136628 - DNA, 25 bp, Artificial sequence
  SiRNA target sequence
aattgaaaactgtcaaccaatactc

SEQ ID NO: 136629 - DNA, 25 bp, Artificial sequence
  SiRNA target sequence
attgaaaactgtcaaccaatactcc

SEQ ID NO: 136630 - DNA, 25 bp, Artificial sequence
  SiRNA target sequence
ttgaaaactgtcaaccaatactcca

SEQ ID NO: 136631 - DNA, 25 bp, Artificial sequence
  SiRNA target sequence
tgaaaactgtcaaccaatactccaa

SEQ ID NO: 136632 - DNA, 25 bp, Artificial sequence
  SiRNA target sequence
gaaaactgtcaaccaatactccaac

SEQ ID NO: 136633 - DNA, 25 bp, Artificial sequence
  SiRNA target sequence
aaaactgtcaaccaatactccaaca

SEQ ID NO: 136634 - DNA, 25 bp, Artificial sequence
  SiRNA target sequence
aaactgtcaaccaatactccaacat

SEQ ID NO: 136635 - DNA, 25 bp, Artificial sequence
  SiRNA target sequence
aactgtcaaccaatactccaacata

SEQ ID NO: 136636 - DNA, 25 bp, Artificial sequence
  SiRNA target sequence
actgtcaaccaatactccaacatag

SEQ ID NO: 136637 - DNA, 25 bp, Artificial sequence
  SiRNA target sequence
ctgtcaaccaatactccaacatagt

SEQ ID NO: 136638 - DNA, 25 bp, Artificial sequence
  SiRNA target sequence
tgtcaaccaatactccaacatagtt

SEQ ID NO: 136639 - DNA, 25 bp, Artificial sequence
  SiRNA target sequence
gtcaaccaatactccaacatagtta

SEQ ID NO: 136640 - DNA, 25 bp, Artificial sequence
  SiRNA target sequence
tcaaccaatactccaacatagttat

SEQ ID NO: 136641 - DNA, 25 bp, Artificial sequence
  SiRNA target sequence
caaccaatactccaacatagttatg

SEQ ID NO: 136642 - DNA, 25 bp, Artificial sequence
  SiRNA target sequence
aaccaatactccaacatagttatgg

SEQ ID NO: 136643 - DNA, 25 bp, Artificial sequence
  SiRNA target sequence
accaatactccaacatagttatggt

SEQ ID NO: 136644 - DNA, 25 bp, Artificial sequence
  SiRNA target sequence
ccaatactccaacatagttatggta

SEQ ID NO: 136645 - DNA, 25 bp, Artificial sequence
  SiRNA target sequence
caatactccaacatagttatggtac

SEQ ID NO: 136646 - DNA, 25 bp, Artificial sequence
  SiRNA target sequence
aatactccaacatagttatggtaca

SEQ ID NO: 136647 - DNA, 25 bp, Artificial sequence
  SiRNA target sequence
atactccaacatagttatggtacac

SEQ ID NO: 136648 - DNA, 25 bp, Artificial sequence
  SiRNA target sequence
tactccaacatagttatggtacaca

SEQ ID NO: 136649 - DNA, 25 bp, Artificial sequence
  SiRNA target sequence
actccaacatagttatggtacacat

SEQ ID NO: 136650 - DNA, 25 bp, Artificial sequence
  SiRNA target sequence
ctccaacatagttatggtacacata

SEQ ID NO: 136651 - DNA, 25 bp, Artificial sequence
  SiRNA target sequence
tccaacatagttatggtacacatat

SEQ ID NO: 136652 - DNA, 25 bp, Artificial sequence
  SiRNA target sequence
ccaacatagttatggtacacatatt

SEQ ID NO: 136653 - DNA, 25 bp, Artificial sequence
  SiRNA target sequence
caacatagttatggtacacatattg

SEQ ID NO: 136654 - DNA, 25 bp, Artificial sequence
  SiRNA target sequence
aacatagttatggtacacatattgt

SEQ ID NO: 136655 - DNA, 25 bp, Artificial sequence
  SiRNA target sequence
acatagttatggtacacatattgta

SEQ ID NO: 136656 - DNA, 25 bp, Artificial sequence
  SiRNA target sequence
catagttatggtacacatattgtag

SEQ ID NO: 136657 - DNA, 25 bp, Artificial sequence
  SiRNA target sequence
atagttatggtacacatattgtagt

SEQ ID NO: 136658 - DNA, 25 bp, Artificial sequence
  SiRNA target sequence
tagttatggtacacatattgtagtt

SEQ ID NO: 136659 - DNA, 25 bp, Artificial sequence
  SiRNA target sequence
agttatggtacacatattgtagttc

SEQ ID NO: 136660 - DNA, 25 bp, Artificial sequence
  SiRNA target sequence
gttatggtacacatattgtagttcc

SEQ ID NO: 136661 - DNA, 25 bp, Artificial sequence
  SiRNA target sequence
ttatggtacacatattgtagttcct

SEQ ID NO: 136662 - DNA, 25 bp, Artificial sequence
  SiRNA target sequence
tatggtacacatattgtagttcctg

SEQ ID NO: 136663 - DNA, 25 bp, Artificial sequence
  SiRNA target sequence
atggtacacatattgtagttcctgc

SEQ ID NO: 136664 - DNA, 25 bp, Artificial sequence
  SiRNA target sequence
tggtacacatattgtagttcctgcg

SEQ ID NO: 136665 - DNA, 25 bp, Artificial sequence
  SiRNA target sequence
ggtacacatattgtagttcctgcga

SEQ ID NO: 136666 - DNA, 25 bp, Artificial sequence
  SiRNA target sequence
gtacacatattgtagttcctgcgat

SEQ ID NO: 136667 - DNA, 25 bp, Artificial sequence
  SiRNA target sequence
tacacatattgtagttcctgcgata

SEQ ID NO: 136668 - DNA, 25 bp, Artificial sequence
  SiRNA target sequence
acacatattgtagttcctgcgatat

SEQ ID NO: 136669 - DNA, 25 bp, Artificial sequence
  SiRNA target sequence
cacatattgtagttcctgcgatatt

SEQ ID NO: 136670 - DNA, 25 bp, Artificial sequence
  SiRNA target sequence
acatattgtagttcctgcgatattt

SEQ ID NO: 136671 - DNA, 25 bp, Artificial sequence
  SiRNA target sequence
catattgtagttcctgcgatatttt

SEQ ID NO: 136672 - DNA, 25 bp, Artificial sequence
  SiRNA target sequence
atattgtagttcctgcgatattttc

SEQ ID NO: 136673 - DNA, 25 bp, Artificial sequence
  SiRNA target sequence
tattgtagttcctgcgatattttcg

SEQ ID NO: 136674 - DNA, 25 bp, Artificial sequence
  SiRNA target sequence
attgtagttcctgcgatattttcgc

SEQ ID NO: 136675 - DNA, 25 bp, Artificial sequence
  SiRNA target sequence
ttgtagttcctgcgatattttcgcc

SEQ ID NO: 136676 - DNA, 25 bp, Artificial sequence
  SiRNA target sequence
tgtagttcctgcgatattttcgcct

SEQ ID NO: 136677 - DNA, 25 bp, Artificial sequence
  SiRNA target sequence
gtagttcctgcgatattttcgccta

SEQ ID NO: 136678 - DNA, 25 bp, Artificial sequence
  SiRNA target sequence
tagttcctgcgatattttcgcctaa

SEQ ID NO: 136679 - DNA, 25 bp, Artificial sequence
  SiRNA target sequence
agttcctgcgatattttcgcctaaa

SEQ ID NO: 136680 - DNA, 25 bp, Artificial sequence
  SiRNA target sequence
gttcctgcgatattttcgcctaaaa

SEQ ID NO: 136681 - DNA, 25 bp, Artificial sequence
  SiRNA target sequence
ttcctgcgatattttcgcctaaaaa

SEQ ID NO: 136682 - DNA, 25 bp, Artificial sequence
  SiRNA target sequence
tcctgcgatattttcgcctaaaaat

SEQ ID NO: 136683 - DNA, 25 bp, Artificial sequence
  SiRNA target sequence
cctgcgatattttcgcctaaaaata

SEQ ID NO: 136684 - DNA, 25 bp, Artificial sequence
  SiRNA target sequence
ctgcgatattttcgcctaaaaatat

SEQ ID NO: 136685 - DNA, 25 bp, Artificial sequence
  SiRNA target sequence
tgcgatattttcgcctaaaaatatg

SEQ ID NO: 136686 - DNA, 25 bp, Artificial sequence
  SiRNA target sequence
gcgatattttcgcctaaaaatatgg

SEQ ID NO: 136687 - DNA, 25 bp, Artificial sequence
  SiRNA target sequence
cgatattttcgcctaaaaatatggg

SEQ ID NO: 136688 - DNA, 25 bp, Artificial sequence
  SiRNA target sequence
gatattttcgcctaaaaatatgggc

SEQ ID NO: 136689 - DNA, 25 bp, Artificial sequence
  SiRNA target sequence
atattttcgcctaaaaatatgggct

SEQ ID NO: 136690 - DNA, 25 bp, Artificial sequence
  SiRNA target sequence
tattttcgcctaaaaatatgggctt

SEQ ID NO: 136691 - DNA, 25 bp, Artificial sequence
  SiRNA target sequence
attttcgcctaaaaatatgggcttt

SEQ ID NO: 136692 - DNA, 25 bp, Artificial sequence
  SiRNA target sequence
ttttcgcctaaaaatatgggctttg

SEQ ID NO: 136693 - DNA, 25 bp, Artificial sequence
  SiRNA target sequence
tttcgcctaaaaatatgggctttgt

SEQ ID NO: 136694 - DNA, 25 bp, Artificial sequence
  SiRNA target sequence
ttcgcctaaaaatatgggctttgtt

SEQ ID NO: 136695 - DNA, 25 bp, Artificial sequence
  SiRNA target sequence
tcgcctaaaaatatgggctttgttg

SEQ ID NO: 136696 - DNA, 25 bp, Artificial sequence
  SiRNA target sequence
cgcctaaaaatatgggctttgttga

SEQ ID NO: 136697 - DNA, 25 bp, Artificial sequence
  SiRNA target sequence
gcctaaaaatatgggctttgttgat

SEQ ID NO: 136698 - DNA, 25 bp, Artificial sequence
  SiRNA target sequence
cctaaaaatatgggctttgttgatc

SEQ ID NO: 136699 - DNA, 25 bp, Artificial sequence
  SiRNA target sequence
ctaaaaatatgggctttgttgatcc

SEQ ID NO: 136700 - DNA, 25 bp, Artificial sequence
  SiRNA target sequence
taaaaatatgggctttgttgatcca

SEQ ID NO: 136701 - DNA, 25 bp, Artificial sequence
  SiRNA target sequence
aaaaatatgggctttgttgatccaa

SEQ ID NO: 136702 - DNA, 25 bp, Artificial sequence
  SiRNA target sequence
aaaatatgggctttgttgatccaag

SEQ ID NO: 136703 - DNA, 25 bp, Artificial sequence
  SiRNA target sequence
aaatatgggctttgttgatccaagc

SEQ ID NO: 136704 - DNA, 25 bp, Artificial sequence
  SiRNA target sequence
aatatgggctttgttgatccaagca

SEQ ID NO: 136705 - DNA, 25 bp, Artificial sequence
  SiRNA target sequence
atatgggctttgttgatccaagcac

SEQ ID NO: 136706 - DNA, 25 bp, Artificial sequence
  SiRNA target sequence
tatgggctttgttgatccaagcacg

SEQ ID NO: 136707 - DNA, 25 bp, Artificial sequence
  SiRNA target sequence
atgggctttgttgatccaagcacga

SEQ ID NO: 136708 - DNA, 25 bp, Artificial sequence
  SiRNA target sequence
tgggctttgttgatccaagcacgag

SEQ ID NO: 136709 - DNA, 25 bp, Artificial sequence
  SiRNA target sequence
gggctttgttgatccaagcacgagt

SEQ ID NO: 136710 - DNA, 25 bp, Artificial sequence
  SiRNA target sequence
ggctttgttgatccaagcacgagtg

SEQ ID NO: 136711 - DNA, 25 bp, Artificial sequence
  SiRNA target sequence
gctttgttgatccaagcacgagtga

SEQ ID NO: 136712 - DNA, 25 bp, Artificial sequence
  SiRNA target sequence
ctttgttgatccaagcacgagtgat

SEQ ID NO: 136713 - DNA, 25 bp, Artificial sequence
  SiRNA target sequence
tttgttgatccaagcacgagtgatg

SEQ ID NO: 136714 - DNA, 25 bp, Artificial sequence
  SiRNA target sequence
ttgttgatccaagcacgagtgatgg

SEQ ID NO: 136715 - DNA, 25 bp, Artificial sequence
  SiRNA target sequence
tgttgatccaagcacgagtgatgga

SEQ ID NO: 136716 - DNA, 25 bp, Artificial sequence
  SiRNA target sequence
gttgatccaagcacgagtgatggaa

SEQ ID NO: 136717 - DNA, 25 bp, Artificial sequence
  SiRNA target sequence
ttgatccaagcacgagtgatggaag

SEQ ID NO: 136718 - DNA, 25 bp, Artificial sequence
  SiRNA target sequence
tgatccaagcacgagtgatggaaga

SEQ ID NO: 136719 - DNA, 25 bp, Artificial sequence
  SiRNA target sequence
gatccaagcacgagtgatggaagaa

SEQ ID NO: 136720 - DNA, 25 bp, Artificial sequence
  SiRNA target sequence
atccaagcacgagtgatggaagaat

SEQ ID NO: 136721 - DNA, 25 bp, Artificial sequence
  SiRNA target sequence
tccaagcacgagtgatggaagaatc

SEQ ID NO: 136722 - DNA, 25 bp, Artificial sequence
  SiRNA target sequence
ccaagcacgagtgatggaagaatcg

SEQ ID NO: 136723 - DNA, 25 bp, Artificial sequence
  SiRNA target sequence
caagcacgagtgatggaagaatcgc

SEQ ID NO: 136724 - DNA, 25 bp, Artificial sequence
  SiRNA target sequence
aagcacgagtgatggaagaatcgca

SEQ ID NO: 136725 - DNA, 25 bp, Artificial sequence
  SiRNA target sequence
agcacgagtgatggaagaatcgcat

SEQ ID NO: 136726 - DNA, 25 bp, Artificial sequence
  SiRNA target sequence
gcacgagtgatggaagaatcgcatt

SEQ ID NO: 136727 - DNA, 25 bp, Artificial sequence
  SiRNA target sequence
cacgagtgatggaagaatcgcattt

SEQ ID NO: 136728 - DNA, 25 bp, Artificial sequence
  SiRNA target sequence
acgagtgatggaagaatcgcatttt

SEQ ID NO: 136729 - DNA, 25 bp, Artificial sequence
  SiRNA target sequence
cgagtgatggaagaatcgcattttt

SEQ ID NO: 136730 - DNA, 25 bp, Artificial sequence
  SiRNA target sequence
gagtgatggaagaatcgcatttttt

SEQ ID NO: 136731 - DNA, 25 bp, Artificial sequence
  SiRNA target sequence
agtgatggaagaatcgcatttttta

SEQ ID NO: 136732 - DNA, 25 bp, Artificial sequence
  SiRNA target sequence
gtgatggaagaatcgcattttttat

SEQ ID NO: 136733 - DNA, 25 bp, Artificial sequence
  SiRNA target sequence
tgatggaagaatcgcattttttatg

SEQ ID NO: 136734 - DNA, 25 bp, Artificial sequence
  SiRNA target sequence
gatggaagaatcgcattttttatga

SEQ ID NO: 136735 - DNA, 25 bp, Artificial sequence
  SiRNA target sequence
atggaagaatcgcattttttatgaa

SEQ ID NO: 136736 - DNA, 25 bp, Artificial sequence
  SiRNA target sequence
tggaagaatcgcattttttatgaat

SEQ ID NO: 136737 - DNA, 25 bp, Artificial sequence
  SiRNA target sequence
ggaagaatcgcattttttatgaatt

SEQ ID NO: 136738 - DNA, 25 bp, Artificial sequence
  SiRNA target sequence
gaagaatcgcattttttatgaattt

SEQ ID NO: 136739 - DNA, 25 bp, Artificial sequence
  SiRNA target sequence
aagaatcgcattttttatgaatttt

SEQ ID NO: 136740 - DNA, 25 bp, Artificial sequence
  SiRNA target sequence
agaatcgcattttttatgaatttta

SEQ ID NO: 136741 - DNA, 25 bp, Artificial sequence
  SiRNA target sequence
gaatcgcattttttatgaattttaa

SEQ ID NO: 136742 - DNA, 25 bp, Artificial sequence
  SiRNA target sequence
aatcgcattttttatgaattttaaa

SEQ ID NO: 136743 - DNA, 25 bp, Artificial sequence
  SiRNA target sequence
atcgcattttttatgaattttaaag

SEQ ID NO: 136744 - DNA, 25 bp, Artificial sequence
  SiRNA target sequence
tcgcattttttatgaattttaaagg

SEQ ID NO: 136745 - DNA, 25 bp, Artificial sequence
  SiRNA target sequence
cgcattttttatgaattttaaaggt

SEQ ID NO: 136746 - DNA, 25 bp, Artificial sequence
  SiRNA target sequence
gcattttttatgaattttaaaggta

SEQ ID NO: 136747 - DNA, 25 bp, Artificial sequence
  SiRNA target sequence
cattttttatgaattttaaaggtaa

SEQ ID NO: 136748 - DNA, 25 bp, Artificial sequence
  SiRNA target sequence
attttttatgaattttaaaggtaaa

SEQ ID NO: 136749 - DNA, 25 bp, Artificial sequence
  SiRNA target sequence
ttttttatgaattttaaaggtaaaa

SEQ ID NO: 136750 - DNA, 25 bp, Artificial sequence
  SiRNA target sequence
tttttatgaattttaaaggtaaaac

SEQ ID NO: 136751 - DNA, 25 bp, Artificial sequence
  SiRNA target sequence
ttttatgaattttaaaggtaaaaca

SEQ ID NO: 136752 - DNA, 25 bp, Artificial sequence
  SiRNA target sequence
tttatgaattttaaaggtaaaacat

SEQ ID NO: 136753 - DNA, 25 bp, Artificial sequence
  SiRNA target sequence
ttatgaattttaaaggtaaaacatt

SEQ ID NO: 136754 - DNA, 25 bp, Artificial sequence
  SiRNA target sequence
tatgaattttaaaggtaaaacattg

SEQ ID NO: 136755 - DNA, 25 bp, Artificial sequence
  SiRNA target sequence
atgaattttaaaggtaaaacattga

SEQ ID NO: 136756 - DNA, 25 bp, Artificial sequence
  SiRNA target sequence
tgaattttaaaggtaaaacattgat

SEQ ID NO: 136757 - DNA, 25 bp, Artificial sequence
  SiRNA target sequence
gaattttaaaggtaaaacattgatt

SEQ ID NO: 136758 - DNA, 25 bp, Artificial sequence
  SiRNA target sequence
aattttaaaggtaaaacattgattg

SEQ ID NO: 136759 - DNA, 25 bp, Artificial sequence
  SiRNA target sequence
attttaaaggtaaaacattgattgg

SEQ ID NO: 136760 - DNA, 25 bp, Artificial sequence
  SiRNA target sequence
ttttaaaggtaaaacattgattgga

SEQ ID NO: 136761 - DNA, 25 bp, Artificial sequence
  SiRNA target sequence
tttaaaggtaaaacattgattggag

SEQ ID NO: 136762 - DNA, 25 bp, Artificial sequence
  SiRNA target sequence
ttaaaggtaaaacattgattggagg

SEQ ID NO: 136763 - DNA, 25 bp, Artificial sequence
  SiRNA target sequence
taaaggtaaaacattgattggagga

SEQ ID NO: 136764 - DNA, 25 bp, Artificial sequence
  SiRNA target sequence
aaaggtaaaacattgattggaggaa

SEQ ID NO: 136765 - DNA, 25 bp, Artificial sequence
  SiRNA target sequence
aaggtaaaacattgattggaggaac

SEQ ID NO: 136766 - DNA, 25 bp, Artificial sequence
  SiRNA target sequence
aggtaaaacattgattggaggaaca

SEQ ID NO: 136767 - DNA, 25 bp, Artificial sequence
  SiRNA target sequence
ggtaaaacattgattggaggaacag

SEQ ID NO: 136768 - DNA, 25 bp, Artificial sequence
  SiRNA target sequence
gtaaaacattgattggaggaacaga

SEQ ID NO: 136769 - DNA, 25 bp, Artificial sequence
  SiRNA target sequence
taaaacattgattggaggaacagat

SEQ ID NO: 136770 - DNA, 25 bp, Artificial sequence
  SiRNA target sequence
aaaacattgattggaggaacagatg

SEQ ID NO: 136771 - DNA, 25 bp, Artificial sequence
  SiRNA target sequence
aaacattgattggaggaacagatgt

SEQ ID NO: 136772 - DNA, 25 bp, Artificial sequence
  SiRNA target sequence
aacattgattggaggaacagatgtt

SEQ ID NO: 136773 - DNA, 25 bp, Artificial sequence
  SiRNA target sequence
acattgattggaggaacagatgtta

SEQ ID NO: 136774 - DNA, 25 bp, Artificial sequence
  SiRNA target sequence
cattgattggaggaacagatgttaa

SEQ ID NO: 136775 - DNA, 25 bp, Artificial sequence
  SiRNA target sequence
attgattggaggaacagatgttaag

SEQ ID NO: 136776 - DNA, 25 bp, Artificial sequence
  SiRNA target sequence
ttgattggaggaacagatgttaagt

SEQ ID NO: 136777 - DNA, 25 bp, Artificial sequence
  SiRNA target sequence
tgattggaggaacagatgttaagtg

SEQ ID NO: 136778 - DNA, 25 bp, Artificial sequence
  SiRNA target sequence
gattggaggaacagatgttaagtgt

SEQ ID NO: 136779 - DNA, 25 bp, Artificial sequence
  SiRNA target sequence
attggaggaacagatgttaagtgta

SEQ ID NO: 136780 - DNA, 25 bp, Artificial sequence
  SiRNA target sequence
ttggaggaacagatgttaagtgtaa

SEQ ID NO: 136781 - DNA, 25 bp, Artificial sequence
  SiRNA target sequence
tggaggaacagatgttaagtgtaaa

SEQ ID NO: 136782 - DNA, 25 bp, Artificial sequence
  SiRNA target sequence
ggaggaacagatgttaagtgtaaag

SEQ ID NO: 136783 - DNA, 25 bp, Artificial sequence
  SiRNA target sequence
gaggaacagatgttaagtgtaaagt

SEQ ID NO: 136784 - DNA, 25 bp, Artificial sequence
  SiRNA target sequence
aggaacagatgttaagtgtaaagtt

SEQ ID NO: 136785 - DNA, 25 bp, Artificial sequence
  SiRNA target sequence
ggaacagatgttaagtgtaaagttg

SEQ ID NO: 136786 - DNA, 25 bp, Artificial sequence
  SiRNA target sequence
gaacagatgttaagtgtaaagttga

SEQ ID NO: 136787 - DNA, 25 bp, Artificial sequence
  SiRNA target sequence
aacagatgttaagtgtaaagttgaa

SEQ ID NO: 136788 - DNA, 25 bp, Artificial sequence
  SiRNA target sequence
acagatgttaagtgtaaagttgaag

SEQ ID NO: 136789 - DNA, 25 bp, Artificial sequence
  SiRNA target sequence
cagatgttaagtgtaaagttgaaga

SEQ ID NO: 136790 - DNA, 25 bp, Artificial sequence
  SiRNA target sequence
agatgttaagtgtaaagttgaagat

SEQ ID NO: 136791 - DNA, 25 bp, Artificial sequence
  SiRNA target sequence
gatgttaagtgtaaagttgaagatt

SEQ ID NO: 136792 - DNA, 25 bp, Artificial sequence
  SiRNA target sequence
atgttaagtgtaaagttgaagattt

SEQ ID NO: 136793 - DNA, 25 bp, Artificial sequence
  SiRNA target sequence
tgttaagtgtaaagttgaagattta

SEQ ID NO: 136794 - DNA, 25 bp, Artificial sequence
  SiRNA target sequence
gttaagtgtaaagttgaagatttaa

SEQ ID NO: 136795 - DNA, 25 bp, Artificial sequence
  SiRNA target sequence
ttaagtgtaaagttgaagatttaat

SEQ ID NO: 136796 - DNA, 25 bp, Artificial sequence
  SiRNA target sequence
taagtgtaaagttgaagatttaata

SEQ ID NO: 136797 - DNA, 25 bp, Artificial sequence
  SiRNA target sequence
aagtgtaaagttgaagatttaataa

SEQ ID NO: 136798 - DNA, 25 bp, Artificial sequence
  SiRNA target sequence
agtgtaaagttgaagatttaataaa

SEQ ID NO: 136799 - DNA, 25 bp, Artificial sequence
  SiRNA target sequence
gtgtaaagttgaagatttaataaaa

SEQ ID NO: 136800 - DNA, 25 bp, Artificial sequence
  SiRNA target sequence
tgtaaagttgaagatttaataaaac

SEQ ID NO: 136801 - DNA, 25 bp, Artificial sequence
  SiRNA target sequence
gtaaagttgaagatttaataaaacc

SEQ ID NO: 136802 - DNA, 25 bp, Artificial sequence
  SiRNA target sequence
taaagttgaagatttaataaaaccg

SEQ ID NO: 136803 - DNA, 25 bp, Artificial sequence
  SiRNA target sequence
aaagttgaagatttaataaaaccga

SEQ ID NO: 136804 - DNA, 25 bp, Artificial sequence
  SiRNA target sequence
aagttgaagatttaataaaaccgac

SEQ ID NO: 136805 - DNA, 25 bp, Artificial sequence
  SiRNA target sequence
agttgaagatttaataaaaccgact

SEQ ID NO: 136806 - DNA, 25 bp, Artificial sequence
  SiRNA target sequence
gttgaagatttaataaaaccgactg

SEQ ID NO: 136807 - DNA, 25 bp, Artificial sequence
  SiRNA target sequence
ttgaagatttaataaaaccgactga

SEQ ID NO: 136808 - DNA, 25 bp, Artificial sequence
  SiRNA target sequence
tgaagatttaataaaaccgactgaa

SEQ ID NO: 136809 - DNA, 25 bp, Artificial sequence
  SiRNA target sequence
gaagatttaataaaaccgactgaag

SEQ ID NO: 136810 - DNA, 25 bp, Artificial sequence
  SiRNA target sequence
aagatttaataaaaccgactgaaga

SEQ ID NO: 136811 - DNA, 25 bp, Artificial sequence
  SiRNA target sequence
agatttaataaaaccgactgaagaa

SEQ ID NO: 136812 - DNA, 25 bp, Artificial sequence
  SiRNA target sequence
gatttaataaaaccgactgaagaag

SEQ ID NO: 136813 - DNA, 25 bp, Artificial sequence
  SiRNA target sequence
atttaataaaaccgactgaagaaga

SEQ ID NO: 136814 - DNA, 25 bp, Artificial sequence
  SiRNA target sequence
tttaataaaaccgactgaagaagat

SEQ ID NO: 136815 - DNA, 25 bp, Artificial sequence
  SiRNA target sequence
ttaataaaaccgactgaagaagatc

SEQ ID NO: 136816 - DNA, 25 bp, Artificial sequence
  SiRNA target sequence
taataaaaccgactgaagaagatct

SEQ ID NO: 136817 - DNA, 25 bp, Artificial sequence
  SiRNA target sequence
aataaaaccgactgaagaagatcta

SEQ ID NO: 136818 - DNA, 25 bp, Artificial sequence
  SiRNA target sequence
ataaaaccgactgaagaagatctaa

SEQ ID NO: 136819 - DNA, 25 bp, Artificial sequence
  SiRNA target sequence
taaaaccgactgaagaagatctaaa

SEQ ID NO: 136820 - DNA, 25 bp, Artificial sequence
  SiRNA target sequence
aaaaccgactgaagaagatctaaac

SEQ ID NO: 136821 - DNA, 25 bp, Artificial sequence
  SiRNA target sequence
aaaccgactgaagaagatctaaact

SEQ ID NO: 136822 - DNA, 25 bp, Artificial sequence
  SiRNA target sequence
aaccgactgaagaagatctaaactt

SEQ ID NO: 136823 - DNA, 25 bp, Artificial sequence
  SiRNA target sequence
accgactgaagaagatctaaacttt

SEQ ID NO: 136824 - DNA, 25 bp, Artificial sequence
  SiRNA target sequence
ccgactgaagaagatctaaactttc

SEQ ID NO: 136825 - DNA, 25 bp, Artificial sequence
  SiRNA target sequence
cgactgaagaagatctaaactttct

SEQ ID NO: 136826 - DNA, 25 bp, Artificial sequence
  SiRNA target sequence
gactgaagaagatctaaactttctt

SEQ ID NO: 136827 - DNA, 25 bp, Artificial sequence
  SiRNA target sequence
actgaagaagatctaaactttctta

SEQ ID NO: 136828 - DNA, 25 bp, Artificial sequence
  SiRNA target sequence
ctgaagaagatctaaactttcttat

SEQ ID NO: 136829 - DNA, 25 bp, Artificial sequence
  SiRNA target sequence
tgaagaagatctaaactttcttatt

SEQ ID NO: 136830 - DNA, 25 bp, Artificial sequence
  SiRNA target sequence
gaagaagatctaaactttcttattc

SEQ ID NO: 136831 - DNA, 25 bp, Artificial sequence
  SiRNA target sequence
aagaagatctaaactttcttattca

SEQ ID NO: 136832 - DNA, 25 bp, Artificial sequence
  SiRNA target sequence
agaagatctaaactttcttattcac

SEQ ID NO: 136833 - DNA, 25 bp, Artificial sequence
  SiRNA target sequence
gaagatctaaactttcttattcacg

SEQ ID NO: 136834 - DNA, 25 bp, Artificial sequence
  SiRNA target sequence
aagatctaaactttcttattcacga

SEQ ID NO: 136835 - DNA, 25 bp, Artificial sequence
  SiRNA target sequence
agatctaaactttcttattcacgag

SEQ ID NO: 136836 - DNA, 25 bp, Artificial sequence
  SiRNA target sequence
gatctaaactttcttattcacgagg

SEQ ID NO: 136837 - DNA, 25 bp, Artificial sequence
  SiRNA target sequence
atctaaactttcttattcacgaggc

SEQ ID NO: 136838 - DNA, 25 bp, Artificial sequence
  SiRNA target sequence
tctaaactttcttattcacgaggcc

SEQ ID NO: 136839 - DNA, 25 bp, Artificial sequence
  SiRNA target sequence
ctaaactttcttattcacgaggcca

SEQ ID NO: 136840 - DNA, 25 bp, Artificial sequence
  SiRNA target sequence
taaactttcttattcacgaggccaa

SEQ ID NO: 136841 - DNA, 25 bp, Artificial sequence
  SiRNA target sequence
aaactttcttattcacgaggccaat

SEQ ID NO: 136842 - DNA, 25 bp, Artificial sequence
  SiRNA target sequence
aactttcttattcacgaggccaatt

SEQ ID NO: 136843 - DNA, 25 bp, Artificial sequence
  SiRNA target sequence
actttcttattcacgaggccaatta

SEQ ID NO: 136844 - DNA, 25 bp, Artificial sequence
  SiRNA target sequence
ctttcttattcacgaggccaattat

SEQ ID NO: 136845 - DNA, 25 bp, Artificial sequence
  SiRNA target sequence
tttcttattcacgaggccaattatt

SEQ ID NO: 136846 - DNA, 25 bp, Artificial sequence
  SiRNA target sequence
ttcttattcacgaggccaattattt

SEQ ID NO: 136847 - DNA, 25 bp, Artificial sequence
  SiRNA target sequence
tcttattcacgaggccaattatttt

SEQ ID NO: 136848 - DNA, 25 bp, Artificial sequence
  SiRNA target sequence
cttattcacgaggccaattatttta

SEQ ID NO: 136849 - DNA, 25 bp, Artificial sequence
  SiRNA target sequence
ttattcacgaggccaattattttac

SEQ ID NO: 136850 - DNA, 25 bp, Artificial sequence
  SiRNA target sequence
tattcacgaggccaattattttaca

SEQ ID NO: 136851 - DNA, 25 bp, Artificial sequence
  SiRNA target sequence
attcacgaggccaattattttacag

SEQ ID NO: 136852 - DNA, 25 bp, Artificial sequence
  SiRNA target sequence
ttcacgaggccaattattttacaga

SEQ ID NO: 136853 - DNA, 25 bp, Artificial sequence
  SiRNA target sequence
tcacgaggccaattattttacagat

SEQ ID NO: 136854 - DNA, 25 bp, Artificial sequence
  SiRNA target sequence
cacgaggccaattattttacagatc

SEQ ID NO: 136855 - DNA, 25 bp, Artificial sequence
  SiRNA target sequence
acgaggccaattattttacagatca

SEQ ID NO: 136856 - DNA, 25 bp, Artificial sequence
  SiRNA target sequence
cgaggccaattattttacagatcac

SEQ ID NO: 136857 - DNA, 25 bp, Artificial sequence
  SiRNA target sequence
gaggccaattattttacagatcaca

SEQ ID NO: 136858 - DNA, 25 bp, Artificial sequence
  SiRNA target sequence
aggccaattattttacagatcacaa

SEQ ID NO: 136859 - DNA, 25 bp, Artificial sequence
  SiRNA target sequence
ggccaattattttacagatcacaat

SEQ ID NO: 136860 - DNA, 25 bp, Artificial sequence
  SiRNA target sequence
gccaattattttacagatcacaatt

SEQ ID NO: 136861 - DNA, 25 bp, Artificial sequence
  SiRNA target sequence
ccaattattttacagatcacaattt

SEQ ID NO: 136862 - DNA, 25 bp, Artificial sequence
  SiRNA target sequence
caattattttacagatcacaattta

SEQ ID NO: 136863 - DNA, 25 bp, Artificial sequence
  SiRNA target sequence
aattattttacagatcacaatttaa

SEQ ID NO: 136864 - DNA, 25 bp, Artificial sequence
  SiRNA target sequence
attattttacagatcacaatttaaa

SEQ ID NO: 136865 - DNA, 25 bp, Artificial sequence
  SiRNA target sequence
ttattttacagatcacaatttaaaa

SEQ ID NO: 136866 - DNA, 25 bp, Artificial sequence
  SiRNA target sequence
tattttacagatcacaatttaaaat

SEQ ID NO: 136867 - DNA, 25 bp, Artificial sequence
  SiRNA target sequence
attttacagatcacaatttaaaatt

SEQ ID NO: 136868 - DNA, 25 bp, Artificial sequence
  SiRNA target sequence
ttttacagatcacaatttaaaatta

SEQ ID NO: 136869 - DNA, 25 bp, Artificial sequence
  SiRNA target sequence
tttacagatcacaatttaaaattaa

SEQ ID NO: 136870 - DNA, 25 bp, Artificial sequence
  SiRNA target sequence
ttacagatcacaatttaaaattaac

SEQ ID NO: 136871 - DNA, 25 bp, Artificial sequence
  SiRNA target sequence
tacagatcacaatttaaaattaaca

SEQ ID NO: 136872 - DNA, 25 bp, Artificial sequence
  SiRNA target sequence
acagatcacaatttaaaattaacaa

SEQ ID NO: 136873 - DNA, 25 bp, Artificial sequence
  SiRNA target sequence
cagatcacaatttaaaattaacaaa

SEQ ID NO: 136874 - DNA, 25 bp, Artificial sequence
  SiRNA target sequence
agatcacaatttaaaattaacaaaa

SEQ ID NO: 136875 - DNA, 25 bp, Artificial sequence
  SiRNA target sequence
gatcacaatttaaaattaacaaaaa

SEQ ID NO: 136876 - DNA, 25 bp, Artificial sequence
  SiRNA target sequence
atcacaatttaaaattaacaaaaaa

SEQ ID NO: 136877 - DNA, 25 bp, Artificial sequence
  SiRNA target sequence
tcacaatttaaaattaacaaaaaaa

SEQ ID NO: 136878 - DNA, 25 bp, Artificial sequence
  SiRNA target sequence
cacaatttaaaattaacaaaaaaag

SEQ ID NO: 136879 - DNA, 25 bp, Artificial sequence
  SiRNA target sequence
acaatttaaaattaacaaaaaaaga

SEQ ID NO: 136880 - DNA, 25 bp, Artificial sequence
  SiRNA target sequence
caatttaaaattaacaaaaaaagat

SEQ ID NO: 136881 - DNA, 25 bp, Artificial sequence
  SiRNA target sequence
aatttaaaattaacaaaaaaagatg

SEQ ID NO: 136882 - DNA, 25 bp, Artificial sequence
  SiRNA target sequence
atttaaaattaacaaaaaaagatgt

SEQ ID NO: 136883 - DNA, 25 bp, Artificial sequence
  SiRNA target sequence
tttaaaattaacaaaaaaagatgtt

SEQ ID NO: 136884 - DNA, 25 bp, Artificial sequence
  SiRNA target sequence
ttaaaattaacaaaaaaagatgttt

SEQ ID NO: 136885 - DNA, 25 bp, Artificial sequence
  SiRNA target sequence
taaaattaacaaaaaaagatgtttt

SEQ ID NO: 136886 - DNA, 25 bp, Artificial sequence
  SiRNA target sequence
aaaattaacaaaaaaagatgttttg

SEQ ID NO: 136887 - DNA, 25 bp, Artificial sequence
  SiRNA target sequence
aaattaacaaaaaaagatgttttgt

SEQ ID NO: 136888 - DNA, 25 bp, Artificial sequence
  SiRNA target sequence
aattaacaaaaaaagatgttttgtc

SEQ ID NO: 136889 - DNA, 25 bp, Artificial sequence
  SiRNA target sequence
attaacaaaaaaagatgttttgtct

SEQ ID NO: 136890 - DNA, 25 bp, Artificial sequence
  SiRNA target sequence
ttaacaaaaaaagatgttttgtctg

SEQ ID NO: 136891 - DNA, 25 bp, Artificial sequence
  SiRNA target sequence
taacaaaaaaagatgttttgtctgt

SEQ ID NO: 136892 - DNA, 25 bp, Artificial sequence
  SiRNA target sequence
aacaaaaaaagatgttttgtctgtt

SEQ ID NO: 136893 - DNA, 25 bp, Artificial sequence
  SiRNA target sequence
acaaaaaaagatgttttgtctgttt

SEQ ID NO: 136894 - DNA, 25 bp, Artificial sequence
  SiRNA target sequence
caaaaaaagatgttttgtctgtttg

SEQ ID NO: 136895 - DNA, 25 bp, Artificial sequence
  SiRNA target sequence
aaaaaaagatgttttgtctgtttgg

SEQ ID NO: 136896 - DNA, 25 bp, Artificial sequence
  SiRNA target sequence
aaaaaagatgttttgtctgtttgga

SEQ ID NO: 136897 - DNA, 25 bp, Artificial sequence
  SiRNA target sequence
aaaaagatgttttgtctgtttggac

SEQ ID NO: 136898 - DNA, 25 bp, Artificial sequence
  SiRNA target sequence
aaaagatgttttgtctgtttggaca

SEQ ID NO: 136899 - DNA, 25 bp, Artificial sequence
  SiRNA target sequence
aaagatgttttgtctgtttggacag

SEQ ID NO: 136900 - DNA, 25 bp, Artificial sequence
  SiRNA target sequence
aagatgttttgtctgtttggacagg

SEQ ID NO: 136901 - DNA, 25 bp, Artificial sequence
  SiRNA target sequence
agatgttttgtctgtttggacaggt

SEQ ID NO: 136902 - DNA, 25 bp, Artificial sequence
  SiRNA target sequence
gatgttttgtctgtttggacaggta

SEQ ID NO: 136903 - DNA, 25 bp, Artificial sequence
  SiRNA target sequence
atgttttgtctgtttggacaggtat

SEQ ID NO: 136904 - DNA, 25 bp, Artificial sequence
  SiRNA target sequence
tgttttgtctgtttggacaggtatt

SEQ ID NO: 136905 - DNA, 25 bp, Artificial sequence
  SiRNA target sequence
gttttgtctgtttggacaggtatta

SEQ ID NO: 136906 - DNA, 25 bp, Artificial sequence
  SiRNA target sequence
ttttgtctgtttggacaggtattag

SEQ ID NO: 136907 - DNA, 25 bp, Artificial sequence
  SiRNA target sequence
tttgtctgtttggacaggtattaga

SEQ ID NO: 136908 - DNA, 25 bp, Artificial sequence
  SiRNA target sequence
ttgtctgtttggacaggtattagac

SEQ ID NO: 136909 - DNA, 25 bp, Artificial sequence
  SiRNA target sequence
tgtctgtttggacaggtattagacc

SEQ ID NO: 136910 - DNA, 25 bp, Artificial sequence
  SiRNA target sequence
gtctgtttggacaggtattagaccg

SEQ ID NO: 136911 - DNA, 25 bp, Artificial sequence
  SiRNA target sequence
tctgtttggacaggtattagaccgt

SEQ ID NO: 136912 - DNA, 25 bp, Artificial sequence
  SiRNA target sequence
ctgtttggacaggtattagaccgtt

SEQ ID NO: 136913 - DNA, 25 bp, Artificial sequence
  SiRNA target sequence
tgtttggacaggtattagaccgtta

SEQ ID NO: 136914 - DNA, 25 bp, Artificial sequence
  SiRNA target sequence
gtttggacaggtattagaccgttag

SEQ ID NO: 136915 - DNA, 25 bp, Artificial sequence
  SiRNA target sequence
tttggacaggtattagaccgttagt

SEQ ID NO: 136916 - DNA, 25 bp, Artificial sequence
  SiRNA target sequence
ttggacaggtattagaccgttagtc

SEQ ID NO: 136917 - DNA, 25 bp, Artificial sequence
  SiRNA target sequence
tggacaggtattagaccgttagtca

SEQ ID NO: 136918 - DNA, 25 bp, Artificial sequence
  SiRNA target sequence
ggacaggtattagaccgttagtcaa

SEQ ID NO: 136919 - DNA, 25 bp, Artificial sequence
  SiRNA target sequence
gacaggtattagaccgttagtcaag

SEQ ID NO: 136920 - DNA, 25 bp, Artificial sequence
  SiRNA target sequence
acaggtattagaccgttagtcaagg

SEQ ID NO: 136921 - DNA, 25 bp, Artificial sequence
  SiRNA target sequence
caggtattagaccgttagtcaagga

SEQ ID NO: 136922 - DNA, 25 bp, Artificial sequence
  SiRNA target sequence
aggtattagaccgttagtcaaggat

SEQ ID NO: 136923 - DNA, 25 bp, Artificial sequence
  SiRNA target sequence
ggtattagaccgttagtcaaggatt

SEQ ID NO: 136924 - DNA, 25 bp, Artificial sequence
  SiRNA target sequence
gtattagaccgttagtcaaggattt

SEQ ID NO: 136925 - DNA, 25 bp, Artificial sequence
  SiRNA target sequence
tattagaccgttagtcaaggattta

SEQ ID NO: 136926 - DNA, 25 bp, Artificial sequence
  SiRNA target sequence
attagaccgttagtcaaggatttat

SEQ ID NO: 136927 - DNA, 25 bp, Artificial sequence
  SiRNA target sequence
ttagaccgttagtcaaggatttatc

SEQ ID NO: 136928 - DNA, 25 bp, Artificial sequence
  SiRNA target sequence
tagaccgttagtcaaggatttatcg

SEQ ID NO: 136929 - DNA, 25 bp, Artificial sequence
  SiRNA target sequence
agaccgttagtcaaggatttatcga

SEQ ID NO: 136930 - DNA, 25 bp, Artificial sequence
  SiRNA target sequence
gaccgttagtcaaggatttatcgaa

SEQ ID NO: 136931 - DNA, 25 bp, Artificial sequence
  SiRNA target sequence
accgttagtcaaggatttatcgaaa

SEQ ID NO: 136932 - DNA, 25 bp, Artificial sequence
  SiRNA target sequence
ccgttagtcaaggatttatcgaaaa

SEQ ID NO: 136933 - DNA, 25 bp, Artificial sequence
  SiRNA target sequence
cgttagtcaaggatttatcgaaaag

SEQ ID NO: 136934 - DNA, 25 bp, Artificial sequence
  SiRNA target sequence
gttagtcaaggatttatcgaaaagt

SEQ ID NO: 136935 - DNA, 25 bp, Artificial sequence
  SiRNA target sequence
ttagtcaaggatttatcgaaaagtt

SEQ ID NO: 136936 - DNA, 25 bp, Artificial sequence
  SiRNA target sequence
tagtcaaggatttatcgaaaagttc

SEQ ID NO: 136937 - DNA, 25 bp, Artificial sequence
  SiRNA target sequence
agtcaaggatttatcgaaaagttca

SEQ ID NO: 136938 - DNA, 25 bp, Artificial sequence
  SiRNA target sequence
gtcaaggatttatcgaaaagttcaa

SEQ ID NO: 136939 - DNA, 25 bp, Artificial sequence
  SiRNA target sequence
tcaaggatttatcgaaaagttcaac

SEQ ID NO: 136940 - DNA, 25 bp, Artificial sequence
  SiRNA target sequence
caaggatttatcgaaaagttcaaca

SEQ ID NO: 136941 - DNA, 25 bp, Artificial sequence
  SiRNA target sequence
aaggatttatcgaaaagttcaacag

SEQ ID NO: 136942 - DNA, 25 bp, Artificial sequence
  SiRNA target sequence
aggatttatcgaaaagttcaacaga

SEQ ID NO: 136943 - DNA, 25 bp, Artificial sequence
  SiRNA target sequence
ggatttatcgaaaagttcaacagaa

SEQ ID NO: 136944 - DNA, 25 bp, Artificial sequence
  SiRNA target sequence
gatttatcgaaaagttcaacagaaa

SEQ ID NO: 136945 - DNA, 25 bp, Artificial sequence
  SiRNA target sequence
atttatcgaaaagttcaacagaaaa

SEQ ID NO: 136946 - DNA, 25 bp, Artificial sequence
  SiRNA target sequence
tttatcgaaaagttcaacagaaaag

SEQ ID NO: 136947 - DNA, 25 bp, Artificial sequence
  SiRNA target sequence
ttatcgaaaagttcaacagaaaaga

SEQ ID NO: 136948 - DNA, 25 bp, Artificial sequence
  SiRNA target sequence
tatcgaaaagttcaacagaaaagat

SEQ ID NO: 136949 - DNA, 25 bp, Artificial sequence
  SiRNA target sequence
atcgaaaagttcaacagaaaagata

SEQ ID NO: 136950 - DNA, 25 bp, Artificial sequence
  SiRNA target sequence
tcgaaaagttcaacagaaaagatat

SEQ ID NO: 136951 - DNA, 25 bp, Artificial sequence
  SiRNA target sequence
cgaaaagttcaacagaaaagatatg

SEQ ID NO: 136952 - DNA, 25 bp, Artificial sequence
  SiRNA target sequence
gaaaagttcaacagaaaagatatgt

SEQ ID NO: 136953 - DNA, 25 bp, Artificial sequence
  SiRNA target sequence
aaaagttcaacagaaaagatatgta

SEQ ID NO: 136954 - DNA, 25 bp, Artificial sequence
  SiRNA target sequence
aaagttcaacagaaaagatatgtag

SEQ ID NO: 136955 - DNA, 25 bp, Artificial sequence
  SiRNA target sequence
aagttcaacagaaaagatatgtaga

SEQ ID NO: 136956 - DNA, 25 bp, Artificial sequence
  SiRNA target sequence
agttcaacagaaaagatatgtagaa

SEQ ID NO: 136957 - DNA, 25 bp, Artificial sequence
  SiRNA target sequence
gttcaacagaaaagatatgtagaaa

SEQ ID NO: 136958 - DNA, 25 bp, Artificial sequence
  SiRNA target sequence
ttcaacagaaaagatatgtagaaaa

SEQ ID NO: 136959 - DNA, 25 bp, Artificial sequence
  SiRNA target sequence
tcaacagaaaagatatgtagaaaac

SEQ ID NO: 136960 - DNA, 25 bp, Artificial sequence
  SiRNA target sequence
caacagaaaagatatgtagaaaaca

SEQ ID NO: 136961 - DNA, 25 bp, Artificial sequence
  SiRNA target sequence
aacagaaaagatatgtagaaaacat

SEQ ID NO: 136962 - DNA, 25 bp, Artificial sequence
  SiRNA target sequence
acagaaaagatatgtagaaaacata

SEQ ID NO: 136963 - DNA, 25 bp, Artificial sequence
  SiRNA target sequence
cagaaaagatatgtagaaaacatac

SEQ ID NO: 136964 - DNA, 25 bp, Artificial sequence
  SiRNA target sequence
agaaaagatatgtagaaaacatact

SEQ ID NO: 136965 - DNA, 25 bp, Artificial sequence
  SiRNA target sequence
gaaaagatatgtagaaaacatacta

SEQ ID NO: 136966 - DNA, 25 bp, Artificial sequence
  SiRNA target sequence
aaaagatatgtagaaaacatactat

SEQ ID NO: 136967 - DNA, 25 bp, Artificial sequence
  SiRNA target sequence
aaagatatgtagaaaacatactata

SEQ ID NO: 136968 - DNA, 25 bp, Artificial sequence
  SiRNA target sequence
aagatatgtagaaaacatactataa

SEQ ID NO: 136969 - DNA, 25 bp, Artificial sequence
  SiRNA target sequence
agatatgtagaaaacatactataag

SEQ ID NO: 136970 - DNA, 25 bp, Artificial sequence
  SiRNA target sequence
gatatgtagaaaacatactataaga

SEQ ID NO: 136971 - DNA, 25 bp, Artificial sequence
  SiRNA target sequence
atatgtagaaaacatactataagaa

SEQ ID NO: 136972 - DNA, 25 bp, Artificial sequence
  SiRNA target sequence
tatgtagaaaacatactataagaat

SEQ ID NO: 136973 - DNA, 25 bp, Artificial sequence
  SiRNA target sequence
atgtagaaaacatactataagaata

SEQ ID NO: 136974 - DNA, 25 bp, Artificial sequence
  SiRNA target sequence
tgtagaaaacatactataagaatag

SEQ ID NO: 136975 - DNA, 25 bp, Artificial sequence
  SiRNA target sequence
gtagaaaacatactataagaataga

SEQ ID NO: 136976 - DNA, 25 bp, Artificial sequence
  SiRNA target sequence
tagaaaacatactataagaatagat

SEQ ID NO: 136977 - DNA, 25 bp, Artificial sequence
  SiRNA target sequence
agaaaacatactataagaatagata

SEQ ID NO: 136978 - DNA, 25 bp, Artificial sequence
  SiRNA target sequence
gaaaacatactataagaatagataa

SEQ ID NO: 136979 - DNA, 25 bp, Artificial sequence
  SiRNA target sequence
aaaacatactataagaatagataaa

SEQ ID NO: 136980 - DNA, 25 bp, Artificial sequence
  SiRNA target sequence
aaacatactataagaatagataaag

SEQ ID NO: 136981 - DNA, 25 bp, Artificial sequence
  SiRNA target sequence
aacatactataagaatagataaaga

SEQ ID NO: 136982 - DNA, 25 bp, Artificial sequence
  SiRNA target sequence
acatactataagaatagataaagac

SEQ ID NO: 136983 - DNA, 25 bp, Artificial sequence
  SiRNA target sequence
catactataagaatagataaagaca

SEQ ID NO: 136984 - DNA, 25 bp, Artificial sequence
  SiRNA target sequence
atactataagaatagataaagacaa

SEQ ID NO: 136985 - DNA, 25 bp, Artificial sequence
  SiRNA target sequence
tactataagaatagataaagacaat

SEQ ID NO: 136986 - DNA, 25 bp, Artificial sequence
  SiRNA target sequence
actataagaatagataaagacaata

SEQ ID NO: 136987 - DNA, 25 bp, Artificial sequence
  SiRNA target sequence
ctataagaatagataaagacaatat

SEQ ID NO: 136988 - DNA, 25 bp, Artificial sequence
  SiRNA target sequence
tataagaatagataaagacaatatg

SEQ ID NO: 136989 - DNA, 25 bp, Artificial sequence
  SiRNA target sequence
ataagaatagataaagacaatatgg

SEQ ID NO: 136990 - DNA, 25 bp, Artificial sequence
  SiRNA target sequence
taagaatagataaagacaatatggt

SEQ ID NO: 136991 - DNA, 25 bp, Artificial sequence
  SiRNA target sequence
aagaatagataaagacaatatggta

SEQ ID NO: 136992 - DNA, 25 bp, Artificial sequence
  SiRNA target sequence
agaatagataaagacaatatggtaa

SEQ ID NO: 136993 - DNA, 25 bp, Artificial sequence
  SiRNA target sequence
gaatagataaagacaatatggtaac

SEQ ID NO: 136994 - DNA, 25 bp, Artificial sequence
  SiRNA target sequence
aatagataaagacaatatggtaact

SEQ ID NO: 136995 - DNA, 25 bp, Artificial sequence
  SiRNA target sequence
atagataaagacaatatggtaactg

SEQ ID NO: 136996 - DNA, 25 bp, Artificial sequence
  SiRNA target sequence
tagataaagacaatatggtaactgt

SEQ ID NO: 136997 - DNA, 25 bp, Artificial sequence
  SiRNA target sequence
agataaagacaatatggtaactgta

SEQ ID NO: 136998 - DNA, 25 bp, Artificial sequence
  SiRNA target sequence
gataaagacaatatggtaactgtaa

SEQ ID NO: 136999 - DNA, 25 bp, Artificial sequence
  SiRNA target sequence
ataaagacaatatggtaactgtaac

SEQ ID NO: 137000 - DNA, 25 bp, Artificial sequence
  SiRNA target sequence
taaagacaatatggtaactgtaaca

SEQ ID NO: 137001 - DNA, 25 bp, Artificial sequence
  SiRNA target sequence
aaagacaatatggtaactgtaacag

SEQ ID NO: 137002 - DNA, 25 bp, Artificial sequence
  SiRNA target sequence
aagacaatatggtaactgtaacagg

SEQ ID NO: 137003 - DNA, 25 bp, Artificial sequence
  SiRNA target sequence
agacaatatggtaactgtaacaggt

SEQ ID NO: 137004 - DNA, 25 bp, Artificial sequence
  SiRNA target sequence
gacaatatggtaactgtaacaggtg

SEQ ID NO: 137005 - DNA, 25 bp, Artificial sequence
  SiRNA target sequence
acaatatggtaactgtaacaggtgg

SEQ ID NO: 137006 - DNA, 25 bp, Artificial sequence
  SiRNA target sequence
caatatggtaactgtaacaggtggt

SEQ ID NO: 137007 - DNA, 25 bp, Artificial sequence
  SiRNA target sequence
aatatggtaactgtaacaggtggta

SEQ ID NO: 137008 - DNA, 25 bp, Artificial sequence
  SiRNA target sequence
atatggtaactgtaacaggtggtaa

SEQ ID NO: 137009 - DNA, 25 bp, Artificial sequence
  SiRNA target sequence
tatggtaactgtaacaggtggtaag

SEQ ID NO: 137010 - DNA, 25 bp, Artificial sequence
  SiRNA target sequence
atggtaactgtaacaggtggtaagt

SEQ ID NO: 137011 - DNA, 25 bp, Artificial sequence
  SiRNA target sequence
tggtaactgtaacaggtggtaagtg

SEQ ID NO: 137012 - DNA, 25 bp, Artificial sequence
  SiRNA target sequence
ggtaactgtaacaggtggtaagtgg

SEQ ID NO: 137013 - DNA, 25 bp, Artificial sequence
  SiRNA target sequence
gtaactgtaacaggtggtaagtgga

SEQ ID NO: 137014 - DNA, 25 bp, Artificial sequence
  SiRNA target sequence
taactgtaacaggtggtaagtggac

SEQ ID NO: 137015 - DNA, 25 bp, Artificial sequence
  SiRNA target sequence
aactgtaacaggtggtaagtggaca

SEQ ID NO: 137016 - DNA, 25 bp, Artificial sequence
  SiRNA target sequence
actgtaacaggtggtaagtggacaa

SEQ ID NO: 137017 - DNA, 25 bp, Artificial sequence
  SiRNA target sequence
ctgtaacaggtggtaagtggacaat

SEQ ID NO: 137018 - DNA, 25 bp, Artificial sequence
  SiRNA target sequence
tgtaacaggtggtaagtggacaatt

SEQ ID NO: 137019 - DNA, 25 bp, Artificial sequence
  SiRNA target sequence
gtaacaggtggtaagtggacaattt

SEQ ID NO: 137020 - DNA, 25 bp, Artificial sequence
  SiRNA target sequence
taacaggtggtaagtggacaatttt

SEQ ID NO: 137021 - DNA, 25 bp, Artificial sequence
  SiRNA target sequence
aacaggtggtaagtggacaattttt

SEQ ID NO: 137022 - DNA, 25 bp, Artificial sequence
  SiRNA target sequence
acaggtggtaagtggacaatttttc

SEQ ID NO: 137023 - DNA, 25 bp, Artificial sequence
  SiRNA target sequence
caggtggtaagtggacaatttttcg

SEQ ID NO: 137024 - DNA, 25 bp, Artificial sequence
  SiRNA target sequence
aggtggtaagtggacaatttttcga

SEQ ID NO: 137025 - DNA, 25 bp, Artificial sequence
  SiRNA target sequence
ggtggtaagtggacaatttttcgac

SEQ ID NO: 137026 - DNA, 25 bp, Artificial sequence
  SiRNA target sequence
gtggtaagtggacaatttttcgact

SEQ ID NO: 137027 - DNA, 25 bp, Artificial sequence
  SiRNA target sequence
tggtaagtggacaatttttcgactt

SEQ ID NO: 137028 - DNA, 25 bp, Artificial sequence
  SiRNA target sequence
ggtaagtggacaatttttcgactta

SEQ ID NO: 137029 - DNA, 25 bp, Artificial sequence
  SiRNA target sequence
gtaagtggacaatttttcgacttat

SEQ ID NO: 137030 - DNA, 25 bp, Artificial sequence
  SiRNA target sequence
taagtggacaatttttcgacttatg

SEQ ID NO: 137031 - DNA, 25 bp, Artificial sequence
  SiRNA target sequence
aagtggacaatttttcgacttatgg

SEQ ID NO: 137032 - DNA, 25 bp, Artificial sequence
  SiRNA target sequence
agtggacaatttttcgacttatggg

SEQ ID NO: 137033 - DNA, 25 bp, Artificial sequence
  SiRNA target sequence
gtggacaatttttcgacttatggga

SEQ ID NO: 137034 - DNA, 25 bp, Artificial sequence
  SiRNA target sequence
tggacaatttttcgacttatgggag

SEQ ID NO: 137035 - DNA, 25 bp, Artificial sequence
  SiRNA target sequence
ggacaatttttcgacttatgggaga

SEQ ID NO: 137036 - DNA, 25 bp, Artificial sequence
  SiRNA target sequence
gacaatttttcgacttatgggagaa

SEQ ID NO: 137037 - DNA, 25 bp, Artificial sequence
  SiRNA target sequence
acaatttttcgacttatgggagaac

SEQ ID NO: 137038 - DNA, 25 bp, Artificial sequence
  SiRNA target sequence
caatttttcgacttatgggagaaca

SEQ ID NO: 137039 - DNA, 25 bp, Artificial sequence
  SiRNA target sequence
aatttttcgacttatgggagaacag

SEQ ID NO: 137040 - DNA, 25 bp, Artificial sequence
  SiRNA target sequence
atttttcgacttatgggagaacaga

SEQ ID NO: 137041 - DNA, 25 bp, Artificial sequence
  SiRNA target sequence
tttttcgacttatgggagaacagac

SEQ ID NO: 137042 - DNA, 25 bp, Artificial sequence
  SiRNA target sequence
ttttcgacttatgggagaacagaca

SEQ ID NO: 137043 - DNA, 25 bp, Artificial sequence
  SiRNA target sequence
tttcgacttatgggagaacagacaa

SEQ ID NO: 137044 - DNA, 25 bp, Artificial sequence
  SiRNA target sequence
ttcgacttatgggagaacagacaat

SEQ ID NO: 137045 - DNA, 25 bp, Artificial sequence
  SiRNA target sequence
tcgacttatgggagaacagacaata

SEQ ID NO: 137046 - DNA, 25 bp, Artificial sequence
  SiRNA target sequence
cgacttatgggagaacagacaataa

SEQ ID NO: 137047 - DNA, 25 bp, Artificial sequence
  SiRNA target sequence
gacttatgggagaacagacaataaa

SEQ ID NO: 137048 - DNA, 25 bp, Artificial sequence
  SiRNA target sequence
acttatgggagaacagacaataaat

SEQ ID NO: 137049 - DNA, 25 bp, Artificial sequence
  SiRNA target sequence
cttatgggagaacagacaataaatc

SEQ ID NO: 137050 - DNA, 25 bp, Artificial sequence
  SiRNA target sequence
ttatgggagaacagacaataaatca

SEQ ID NO: 137051 - DNA, 25 bp, Artificial sequence
  SiRNA target sequence
tatgggagaacagacaataaatcaa

SEQ ID NO: 137052 - DNA, 25 bp, Artificial sequence
  SiRNA target sequence
atgggagaacagacaataaatcaaa

SEQ ID NO: 137053 - DNA, 25 bp, Artificial sequence
  SiRNA target sequence
tgggagaacagacaataaatcaaat

SEQ ID NO: 137054 - DNA, 25 bp, Artificial sequence
  SiRNA target sequence
gggagaacagacaataaatcaaatt

SEQ ID NO: 137055 - DNA, 25 bp, Artificial sequence
  SiRNA target sequence
ggagaacagacaataaatcaaatta

SEQ ID NO: 137056 - DNA, 25 bp, Artificial sequence
  SiRNA target sequence
gagaacagacaataaatcaaattat

SEQ ID NO: 137057 - DNA, 25 bp, Artificial sequence
  SiRNA target sequence
agaacagacaataaatcaaattata

SEQ ID NO: 137058 - DNA, 25 bp, Artificial sequence
  SiRNA target sequence
gaacagacaataaatcaaattataa

SEQ ID NO: 137059 - DNA, 25 bp, Artificial sequence
  SiRNA target sequence
aacagacaataaatcaaattataaa

SEQ ID NO: 137060 - DNA, 25 bp, Artificial sequence
  SiRNA target sequence
acagacaataaatcaaattataaaa

SEQ ID NO: 137061 - DNA, 25 bp, Artificial sequence
  SiRNA target sequence
cagacaataaatcaaattataaaag

SEQ ID NO: 137062 - DNA, 25 bp, Artificial sequence
  SiRNA target sequence
agacaataaatcaaattataaaagt

SEQ ID NO: 137063 - DNA, 25 bp, Artificial sequence
  SiRNA target sequence
gacaataaatcaaattataaaagtt

SEQ ID NO: 137064 - DNA, 25 bp, Artificial sequence
  SiRNA target sequence
acaataaatcaaattataaaagttt

SEQ ID NO: 137065 - DNA, 25 bp, Artificial sequence
  SiRNA target sequence
caataaatcaaattataaaagtttt

SEQ ID NO: 137066 - DNA, 25 bp, Artificial sequence
  SiRNA target sequence
aataaatcaaattataaaagttttt

SEQ ID NO: 137067 - DNA, 25 bp, Artificial sequence
  SiRNA target sequence
ataaatcaaattataaaagttttta

SEQ ID NO: 137068 - DNA, 25 bp, Artificial sequence
  SiRNA target sequence
taaatcaaattataaaagtttttaa

SEQ ID NO: 137069 - DNA, 25 bp, Artificial sequence
  SiRNA target sequence
aaatcaaattataaaagtttttaat

SEQ ID NO: 137070 - DNA, 25 bp, Artificial sequence
  SiRNA target sequence
aatcaaattataaaagtttttaata

SEQ ID NO: 137071 - DNA, 25 bp, Artificial sequence
  SiRNA target sequence
atcaaattataaaagtttttaatat

SEQ ID NO: 137072 - DNA, 25 bp, Artificial sequence
  SiRNA target sequence
tcaaattataaaagtttttaatata

SEQ ID NO: 137073 - DNA, 25 bp, Artificial sequence
  SiRNA target sequence
caaattataaaagtttttaatataa

SEQ ID NO: 137074 - DNA, 25 bp, Artificial sequence
  SiRNA target sequence
aaattataaaagtttttaatataaa

SEQ ID NO: 137075 - DNA, 25 bp, Artificial sequence
  SiRNA target sequence
aattataaaagtttttaatataaag

SEQ ID NO: 137076 - DNA, 25 bp, Artificial sequence
  SiRNA target sequence
attataaaagtttttaatataaagt

SEQ ID NO: 137077 - DNA, 25 bp, Artificial sequence
  SiRNA target sequence
ttataaaagtttttaatataaagtc

SEQ ID NO: 137078 - DNA, 25 bp, Artificial sequence
  SiRNA target sequence
tataaaagtttttaatataaagtct

SEQ ID NO: 137079 - DNA, 25 bp, Artificial sequence
  SiRNA target sequence
ataaaagtttttaatataaagtcta

SEQ ID NO: 137080 - DNA, 25 bp, Artificial sequence
  SiRNA target sequence
taaaagtttttaatataaagtctaa

SEQ ID NO: 137081 - DNA, 25 bp, Artificial sequence
  SiRNA target sequence
aaaagtttttaatataaagtctaat

SEQ ID NO: 137082 - DNA, 25 bp, Artificial sequence
  SiRNA target sequence
aaagtttttaatataaagtctaata

SEQ ID NO: 137083 - DNA, 25 bp, Artificial sequence
  SiRNA target sequence
aagtttttaatataaagtctaataa

SEQ ID NO: 137084 - DNA, 25 bp, Artificial sequence
  SiRNA target sequence
agtttttaatataaagtctaataaa

SEQ ID NO: 137085 - DNA, 25 bp, Artificial sequence
  SiRNA target sequence
gtttttaatataaagtctaataaac

SEQ ID NO: 137086 - DNA, 25 bp, Artificial sequence
  SiRNA target sequence
tttttaatataaagtctaataaacc

SEQ ID NO: 137087 - DNA, 25 bp, Artificial sequence
  SiRNA target sequence
ttttaatataaagtctaataaacca

SEQ ID NO: 137088 - DNA, 25 bp, Artificial sequence
  SiRNA target sequence
tttaatataaagtctaataaaccaa

SEQ ID NO: 137089 - DNA, 25 bp, Artificial sequence
  SiRNA target sequence
ttaatataaagtctaataaaccaag

SEQ ID NO: 137090 - DNA, 25 bp, Artificial sequence
  SiRNA target sequence
taatataaagtctaataaaccaagt

SEQ ID NO: 137091 - DNA, 25 bp, Artificial sequence
  SiRNA target sequence
aatataaagtctaataaaccaagta

SEQ ID NO: 137092 - DNA, 25 bp, Artificial sequence
  SiRNA target sequence
atataaagtctaataaaccaagtat

SEQ ID NO: 137093 - DNA, 25 bp, Artificial sequence
  SiRNA target sequence
tataaagtctaataaaccaagtata

SEQ ID NO: 137094 - DNA, 25 bp, Artificial sequence
  SiRNA target sequence
ataaagtctaataaaccaagtataa

SEQ ID NO: 137095 - DNA, 25 bp, Artificial sequence
  SiRNA target sequence
taaagtctaataaaccaagtataac

SEQ ID NO: 137096 - DNA, 25 bp, Artificial sequence
  SiRNA target sequence
aaagtctaataaaccaagtataaca

SEQ ID NO: 137097 - DNA, 25 bp, Artificial sequence
  SiRNA target sequence
aagtctaataaaccaagtataacac

SEQ ID NO: 137098 - DNA, 25 bp, Artificial sequence
  SiRNA target sequence
agtctaataaaccaagtataacaca

SEQ ID NO: 137099 - DNA, 25 bp, Artificial sequence
  SiRNA target sequence
gtctaataaaccaagtataacacaa

SEQ ID NO: 137100 - DNA, 25 bp, Artificial sequence
  SiRNA target sequence
tctaataaaccaagtataacacaat

SEQ ID NO: 137101 - DNA, 25 bp, Artificial sequence
  SiRNA target sequence
ctaataaaccaagtataacacaata

SEQ ID NO: 137102 - DNA, 25 bp, Artificial sequence
  SiRNA target sequence
taataaaccaagtataacacaatat

SEQ ID NO: 137103 - DNA, 25 bp, Artificial sequence
  SiRNA target sequence
aataaaccaagtataacacaatatc

SEQ ID NO: 137104 - DNA, 25 bp, Artificial sequence
  SiRNA target sequence
ataaaccaagtataacacaatatct

SEQ ID NO: 137105 - DNA, 25 bp, Artificial sequence
  SiRNA target sequence
taaaccaagtataacacaatatctt

SEQ ID NO: 137106 - DNA, 25 bp, Artificial sequence
  SiRNA target sequence
aaaccaagtataacacaatatcttc

SEQ ID NO: 137107 - DNA, 25 bp, Artificial sequence
  SiRNA target sequence
aaccaagtataacacaatatcttcc

SEQ ID NO: 137108 - DNA, 25 bp, Artificial sequence
  SiRNA target sequence
accaagtataacacaatatcttcct

SEQ ID NO: 137109 - DNA, 25 bp, Artificial sequence
  SiRNA target sequence
ccaagtataacacaatatcttcctg

SEQ ID NO: 137110 - DNA, 25 bp, Artificial sequence
  SiRNA target sequence
caagtataacacaatatcttcctgt

SEQ ID NO: 137111 - DNA, 25 bp, Artificial sequence
  SiRNA target sequence
aagtataacacaatatcttcctgtt

SEQ ID NO: 137112 - DNA, 25 bp, Artificial sequence
  SiRNA target sequence
agtataacacaatatcttcctgttt

SEQ ID NO: 137113 - DNA, 25 bp, Artificial sequence
  SiRNA target sequence
gtataacacaatatcttcctgtttt

SEQ ID NO: 137114 - DNA, 25 bp, Artificial sequence
  SiRNA target sequence
tataacacaatatcttcctgttttg

SEQ ID NO: 137115 - DNA, 25 bp, Artificial sequence
  SiRNA target sequence
ataacacaatatcttcctgttttgg

SEQ ID NO: 137116 - DNA, 25 bp, Artificial sequence
  SiRNA target sequence
taacacaatatcttcctgttttggg

SEQ ID NO: 137117 - DNA, 25 bp, Artificial sequence
  SiRNA target sequence
aacacaatatcttcctgttttggga

SEQ ID NO: 137118 - DNA, 25 bp, Artificial sequence
  SiRNA target sequence
acacaatatcttcctgttttgggat

SEQ ID NO: 137119 - DNA, 25 bp, Artificial sequence
  SiRNA target sequence
cacaatatcttcctgttttgggatc

SEQ ID NO: 137120 - DNA, 25 bp, Artificial sequence
  SiRNA target sequence
acaatatcttcctgttttgggatca

SEQ ID NO: 137121 - DNA, 25 bp, Artificial sequence
  SiRNA target sequence
caatatcttcctgttttgggatcac

SEQ ID NO: 137122 - DNA, 25 bp, Artificial sequence
  SiRNA target sequence
aatatcttcctgttttgggatcaca

SEQ ID NO: 137123 - DNA, 25 bp, Artificial sequence
  SiRNA target sequence
atatcttcctgttttgggatcacag

SEQ ID NO: 137124 - DNA, 25 bp, Artificial sequence
  SiRNA target sequence
tatcttcctgttttgggatcacagg

SEQ ID NO: 137125 - DNA, 25 bp, Artificial sequence
  SiRNA target sequence
atcttcctgttttgggatcacaggg

SEQ ID NO: 137126 - DNA, 25 bp, Artificial sequence
  SiRNA target sequence
tcttcctgttttgggatcacaggga

SEQ ID NO: 137127 - DNA, 25 bp, Artificial sequence
  SiRNA target sequence
cttcctgttttgggatcacagggat

SEQ ID NO: 137128 - DNA, 25 bp, Artificial sequence
  SiRNA target sequence
ttcctgttttgggatcacagggata

SEQ ID NO: 137129 - DNA, 25 bp, Artificial sequence
  SiRNA target sequence
tcctgttttgggatcacagggatat

SEQ ID NO: 137130 - DNA, 25 bp, Artificial sequence
  SiRNA target sequence
cctgttttgggatcacagggatata

SEQ ID NO: 137131 - DNA, 25 bp, Artificial sequence
  SiRNA target sequence
ctgttttgggatcacagggatatac

SEQ ID NO: 137132 - DNA, 25 bp, Artificial sequence
  SiRNA target sequence
tgttttgggatcacagggatatact

SEQ ID NO: 137133 - DNA, 25 bp, Artificial sequence
  SiRNA target sequence
gttttgggatcacagggatatacta

SEQ ID NO: 137134 - DNA, 25 bp, Artificial sequence
  SiRNA target sequence
ttttgggatcacagggatatactaa

SEQ ID NO: 137135 - DNA, 25 bp, Artificial sequence
  SiRNA target sequence
tttgggatcacagggatatactaaa

SEQ ID NO: 137136 - DNA, 25 bp, Artificial sequence
  SiRNA target sequence
ttgggatcacagggatatactaaag

SEQ ID NO: 137137 - DNA, 25 bp, Artificial sequence
  SiRNA target sequence
tgggatcacagggatatactaaagc

SEQ ID NO: 137138 - DNA, 25 bp, Artificial sequence
  SiRNA target sequence
gggatcacagggatatactaaagct

SEQ ID NO: 137139 - DNA, 25 bp, Artificial sequence
  SiRNA target sequence
ggatcacagggatatactaaagcta

SEQ ID NO: 137140 - DNA, 25 bp, Artificial sequence
  SiRNA target sequence
gatcacagggatatactaaagctac

SEQ ID NO: 137141 - DNA, 25 bp, Artificial sequence
  SiRNA target sequence
atcacagggatatactaaagctaca

SEQ ID NO: 137142 - DNA, 25 bp, Artificial sequence
  SiRNA target sequence
tcacagggatatactaaagctacag

SEQ ID NO: 137143 - DNA, 25 bp, Artificial sequence
  SiRNA target sequence
cacagggatatactaaagctacaga

SEQ ID NO: 137144 - DNA, 25 bp, Artificial sequence
  SiRNA target sequence
acagggatatactaaagctacagaa

SEQ ID NO: 137145 - DNA, 25 bp, Artificial sequence
  SiRNA target sequence
cagggatatactaaagctacagaat

SEQ ID NO: 137146 - DNA, 25 bp, Artificial sequence
  SiRNA target sequence
agggatatactaaagctacagaatt

SEQ ID NO: 137147 - DNA, 25 bp, Artificial sequence
  SiRNA target sequence
gggatatactaaagctacagaattt

SEQ ID NO: 137148 - DNA, 25 bp, Artificial sequence
  SiRNA target sequence
ggatatactaaagctacagaatttg

SEQ ID NO: 137149 - DNA, 25 bp, Artificial sequence
  SiRNA target sequence
gatatactaaagctacagaatttga

SEQ ID NO: 137150 - DNA, 25 bp, Artificial sequence
  SiRNA target sequence
atatactaaagctacagaatttgat

SEQ ID NO: 137151 - DNA, 25 bp, Artificial sequence
  SiRNA target sequence
tatactaaagctacagaatttgatt

SEQ ID NO: 137152 - DNA, 25 bp, Artificial sequence
  SiRNA target sequence
atactaaagctacagaatttgattt

SEQ ID NO: 137153 - DNA, 25 bp, Artificial sequence
  SiRNA target sequence
tactaaagctacagaatttgatttg

SEQ ID NO: 137154 - DNA, 25 bp, Artificial sequence
  SiRNA target sequence
actaaagctacagaatttgatttgg

SEQ ID NO: 137155 - DNA, 25 bp, Artificial sequence
  SiRNA target sequence
ctaaagctacagaatttgatttggc

SEQ ID NO: 137156 - DNA, 25 bp, Artificial sequence
  SiRNA target sequence
taaagctacagaatttgatttggca

SEQ ID NO: 137157 - DNA, 25 bp, Artificial sequence
  SiRNA target sequence
aaagctacagaatttgatttggcac

SEQ ID NO: 137158 - DNA, 25 bp, Artificial sequence
  SiRNA target sequence
aagctacagaatttgatttggcact

SEQ ID NO: 137159 - DNA, 25 bp, Artificial sequence
  SiRNA target sequence
agctacagaatttgatttggcactt

SEQ ID NO: 137160 - DNA, 25 bp, Artificial sequence
  SiRNA target sequence
gctacagaatttgatttggcactta

SEQ ID NO: 137161 - DNA, 25 bp, Artificial sequence
  SiRNA target sequence
ctacagaatttgatttggcacttac

SEQ ID NO: 137162 - DNA, 25 bp, Artificial sequence
  SiRNA target sequence
tacagaatttgatttggcacttact

SEQ ID NO: 137163 - DNA, 25 bp, Artificial sequence
  SiRNA target sequence
acagaatttgatttggcacttactt

SEQ ID NO: 137164 - DNA, 25 bp, Artificial sequence
  SiRNA target sequence
cagaatttgatttggcacttacttt

SEQ ID NO: 137165 - DNA, 25 bp, Artificial sequence
  SiRNA target sequence
agaatttgatttggcacttacttta

SEQ ID NO: 137166 - DNA, 25 bp, Artificial sequence
  SiRNA target sequence
gaatttgatttggcacttactttaa

SEQ ID NO: 137167 - DNA, 25 bp, Artificial sequence
  SiRNA target sequence
aatttgatttggcacttactttaaa

SEQ ID NO: 137168 - DNA, 25 bp, Artificial sequence
  SiRNA target sequence
atttgatttggcacttactttaaat

SEQ ID NO: 137169 - DNA, 25 bp, Artificial sequence
  SiRNA target sequence
tttgatttggcacttactttaaata

SEQ ID NO: 137170 - DNA, 25 bp, Artificial sequence
  SiRNA target sequence
ttgatttggcacttactttaaatat

SEQ ID NO: 137171 - DNA, 25 bp, Artificial sequence
  SiRNA target sequence
tgatttggcacttactttaaatatt

SEQ ID NO: 137172 - DNA, 25 bp, Artificial sequence
  SiRNA target sequence
gatttggcacttactttaaatattc

SEQ ID NO: 137173 - DNA, 25 bp, Artificial sequence
  SiRNA target sequence
atttggcacttactttaaatattcc

SEQ ID NO: 137174 - DNA, 25 bp, Artificial sequence
  SiRNA target sequence
tttggcacttactttaaatattcca

SEQ ID NO: 137175 - DNA, 25 bp, Artificial sequence
  SiRNA target sequence
ttggcacttactttaaatattccag

SEQ ID NO: 137176 - DNA, 25 bp, Artificial sequence
  SiRNA target sequence
tggcacttactttaaatattccaga

SEQ ID NO: 137177 - DNA, 25 bp, Artificial sequence
  SiRNA target sequence
ggcacttactttaaatattccagaa

SEQ ID NO: 137178 - DNA, 25 bp, Artificial sequence
  SiRNA target sequence
gcacttactttaaatattccagaag

SEQ ID NO: 137179 - DNA, 25 bp, Artificial sequence
  SiRNA target sequence
cacttactttaaatattccagaaga

SEQ ID NO: 137180 - DNA, 25 bp, Artificial sequence
  SiRNA target sequence
acttactttaaatattccagaagat

SEQ ID NO: 137181 - DNA, 25 bp, Artificial sequence
  SiRNA target sequence
cttactttaaatattccagaagata

SEQ ID NO: 137182 - DNA, 25 bp, Artificial sequence
  SiRNA target sequence
ttactttaaatattccagaagatat

SEQ ID NO: 137183 - DNA, 25 bp, Artificial sequence
  SiRNA target sequence
tactttaaatattccagaagatata

SEQ ID NO: 137184 - DNA, 25 bp, Artificial sequence
  SiRNA target sequence
actttaaatattccagaagatatag

SEQ ID NO: 137185 - DNA, 25 bp, Artificial sequence
  SiRNA target sequence
ctttaaatattccagaagatatagc

SEQ ID NO: 137186 - DNA, 25 bp, Artificial sequence
  SiRNA target sequence
tttaaatattccagaagatatagct

SEQ ID NO: 137187 - DNA, 25 bp, Artificial sequence
  SiRNA target sequence
ttaaatattccagaagatatagcta

SEQ ID NO: 137188 - DNA, 25 bp, Artificial sequence
  SiRNA target sequence
taaatattccagaagatatagctaa

SEQ ID NO: 137189 - DNA, 25 bp, Artificial sequence
  SiRNA target sequence
aaatattccagaagatatagctaag

SEQ ID NO: 137190 - DNA, 25 bp, Artificial sequence
  SiRNA target sequence
aatattccagaagatatagctaagc

SEQ ID NO: 137191 - DNA, 25 bp, Artificial sequence
  SiRNA target sequence
atattccagaagatatagctaagca

SEQ ID NO: 137192 - DNA, 25 bp, Artificial sequence
  SiRNA target sequence
tattccagaagatatagctaagcat

SEQ ID NO: 137193 - DNA, 25 bp, Artificial sequence
  SiRNA target sequence
attccagaagatatagctaagcatt

SEQ ID NO: 137194 - DNA, 25 bp, Artificial sequence
  SiRNA target sequence
ttccagaagatatagctaagcattt

SEQ ID NO: 137195 - DNA, 25 bp, Artificial sequence
  SiRNA target sequence
tccagaagatatagctaagcattta

SEQ ID NO: 137196 - DNA, 25 bp, Artificial sequence
  SiRNA target sequence
ccagaagatatagctaagcatttag

SEQ ID NO: 137197 - DNA, 25 bp, Artificial sequence
  SiRNA target sequence
cagaagatatagctaagcatttagc

SEQ ID NO: 137198 - DNA, 25 bp, Artificial sequence
  SiRNA target sequence
agaagatatagctaagcatttagct

SEQ ID NO: 137199 - DNA, 25 bp, Artificial sequence
  SiRNA target sequence
gaagatatagctaagcatttagcta

SEQ ID NO: 137200 - DNA, 25 bp, Artificial sequence
  SiRNA target sequence
aagatatagctaagcatttagctac

SEQ ID NO: 137201 - DNA, 25 bp, Artificial sequence
  SiRNA target sequence
agatatagctaagcatttagctaca

SEQ ID NO: 137202 - DNA, 25 bp, Artificial sequence
  SiRNA target sequence
gatatagctaagcatttagctacaa

SEQ ID NO: 137203 - DNA, 25 bp, Artificial sequence
  SiRNA target sequence
atatagctaagcatttagctacaac

SEQ ID NO: 137204 - DNA, 25 bp, Artificial sequence
  SiRNA target sequence
tatagctaagcatttagctacaact

SEQ ID NO: 137205 - DNA, 25 bp, Artificial sequence
  SiRNA target sequence
atagctaagcatttagctacaactt

SEQ ID NO: 137206 - DNA, 25 bp, Artificial sequence
  SiRNA target sequence
tagctaagcatttagctacaactta

SEQ ID NO: 137207 - DNA, 25 bp, Artificial sequence
  SiRNA target sequence
agctaagcatttagctacaacttat

SEQ ID NO: 137208 - DNA, 25 bp, Artificial sequence
  SiRNA target sequence
gctaagcatttagctacaacttatg

SEQ ID NO: 137209 - DNA, 25 bp, Artificial sequence
  SiRNA target sequence
ctaagcatttagctacaacttatgg

SEQ ID NO: 137210 - DNA, 25 bp, Artificial sequence
  SiRNA target sequence
taagcatttagctacaacttatggt

SEQ ID NO: 137211 - DNA, 25 bp, Artificial sequence
  SiRNA target sequence
aagcatttagctacaacttatggta

SEQ ID NO: 137212 - DNA, 25 bp, Artificial sequence
  SiRNA target sequence
agcatttagctacaacttatggtac

SEQ ID NO: 137213 - DNA, 25 bp, Artificial sequence
  SiRNA target sequence
gcatttagctacaacttatggtacc

SEQ ID NO: 137214 - DNA, 25 bp, Artificial sequence
  SiRNA target sequence
catttagctacaacttatggtacca

SEQ ID NO: 137215 - DNA, 25 bp, Artificial sequence
  SiRNA target sequence
atttagctacaacttatggtaccaa

SEQ ID NO: 137216 - DNA, 25 bp, Artificial sequence
  SiRNA target sequence
tttagctacaacttatggtaccaaa

SEQ ID NO: 137217 - DNA, 25 bp, Artificial sequence
  SiRNA target sequence
ttagctacaacttatggtaccaaag

SEQ ID NO: 137218 - DNA, 25 bp, Artificial sequence
  SiRNA target sequence
tagctacaacttatggtaccaaagc

SEQ ID NO: 137219 - DNA, 25 bp, Artificial sequence
  SiRNA target sequence
agctacaacttatggtaccaaagct

SEQ ID NO: 137220 - DNA, 25 bp, Artificial sequence
  SiRNA target sequence
gctacaacttatggtaccaaagctt

SEQ ID NO: 137221 - DNA, 25 bp, Artificial sequence
  SiRNA target sequence
ctacaacttatggtaccaaagctta

SEQ ID NO: 137222 - DNA, 25 bp, Artificial sequence
  SiRNA target sequence
tacaacttatggtaccaaagcttac

SEQ ID NO: 137223 - DNA, 25 bp, Artificial sequence
  SiRNA target sequence
acaacttatggtaccaaagcttaca

SEQ ID NO: 137224 - DNA, 25 bp, Artificial sequence
  SiRNA target sequence
caacttatggtaccaaagcttacaa

SEQ ID NO: 137225 - DNA, 25 bp, Artificial sequence
  SiRNA target sequence
aacttatggtaccaaagcttacaat

SEQ ID NO: 137226 - DNA, 25 bp, Artificial sequence
  SiRNA target sequence
acttatggtaccaaagcttacaatt

SEQ ID NO: 137227 - DNA, 25 bp, Artificial sequence
  SiRNA target sequence
cttatggtaccaaagcttacaattt

SEQ ID NO: 137228 - DNA, 25 bp, Artificial sequence
  SiRNA target sequence
ttatggtaccaaagcttacaatttc

SEQ ID NO: 137229 - DNA, 25 bp, Artificial sequence
  SiRNA target sequence
tatggtaccaaagcttacaatttct

SEQ ID NO: 137230 - DNA, 25 bp, Artificial sequence
  SiRNA target sequence
atggtaccaaagcttacaatttctc

SEQ ID NO: 137231 - DNA, 25 bp, Artificial sequence
  SiRNA target sequence
tggtaccaaagcttacaatttctct

SEQ ID NO: 137232 - DNA, 25 bp, Artificial sequence
  SiRNA target sequence
ggtaccaaagcttacaatttctctg

SEQ ID NO: 137233 - DNA, 25 bp, Artificial sequence
  SiRNA target sequence
gtaccaaagcttacaatttctctga

SEQ ID NO: 137234 - DNA, 25 bp, Artificial sequence
  SiRNA target sequence
taccaaagcttacaatttctctgaa

SEQ ID NO: 137235 - DNA, 25 bp, Artificial sequence
  SiRNA target sequence
accaaagcttacaatttctctgaat

SEQ ID NO: 137236 - DNA, 25 bp, Artificial sequence
  SiRNA target sequence
ccaaagcttacaatttctctgaata

SEQ ID NO: 137237 - DNA, 25 bp, Artificial sequence
  SiRNA target sequence
caaagcttacaatttctctgaatac

SEQ ID NO: 137238 - DNA, 25 bp, Artificial sequence
  SiRNA target sequence
aaagcttacaatttctctgaatact

SEQ ID NO: 137239 - DNA, 25 bp, Artificial sequence
  SiRNA target sequence
aagcttacaatttctctgaatactt

SEQ ID NO: 137240 - DNA, 25 bp, Artificial sequence
  SiRNA target sequence
agcttacaatttctctgaatacttt

SEQ ID NO: 137241 - DNA, 25 bp, Artificial sequence
  SiRNA target sequence
gcttacaatttctctgaatacttta

SEQ ID NO: 137242 - DNA, 25 bp, Artificial sequence
  SiRNA target sequence
cttacaatttctctgaatactttaa

SEQ ID NO: 137243 - DNA, 25 bp, Artificial sequence
  SiRNA target sequence
ttacaatttctctgaatactttaat

SEQ ID NO: 137244 - DNA, 25 bp, Artificial sequence
  SiRNA target sequence
tacaatttctctgaatactttaatg

SEQ ID NO: 137245 - DNA, 25 bp, Artificial sequence
  SiRNA target sequence
acaatttctctgaatactttaatgg

SEQ ID NO: 137246 - DNA, 25 bp, Artificial sequence
  SiRNA target sequence
caatttctctgaatactttaatggg

SEQ ID NO: 137247 - DNA, 25 bp, Artificial sequence
  SiRNA target sequence
aatttctctgaatactttaatgggt

SEQ ID NO: 137248 - DNA, 25 bp, Artificial sequence
  SiRNA target sequence
atttctctgaatactttaatgggtc

SEQ ID NO: 137249 - DNA, 25 bp, Artificial sequence
  SiRNA target sequence
tttctctgaatactttaatgggtca

SEQ ID NO: 137250 - DNA, 25 bp, Artificial sequence
  SiRNA target sequence
ttctctgaatactttaatgggtcat

SEQ ID NO: 137251 - DNA, 25 bp, Artificial sequence
  SiRNA target sequence
tctctgaatactttaatgggtcata

SEQ ID NO: 137252 - DNA, 25 bp, Artificial sequence
  SiRNA target sequence
ctctgaatactttaatgggtcatac

SEQ ID NO: 137253 - DNA, 25 bp, Artificial sequence
  SiRNA target sequence
tctgaatactttaatgggtcataca

SEQ ID NO: 137254 - DNA, 25 bp, Artificial sequence
  SiRNA target sequence
ctgaatactttaatgggtcatacac

SEQ ID NO: 137255 - DNA, 25 bp, Artificial sequence
  SiRNA target sequence
tgaatactttaatgggtcatacacc

SEQ ID NO: 137256 - DNA, 25 bp, Artificial sequence
  SiRNA target sequence
gaatactttaatgggtcatacacca

SEQ ID NO: 137257 - DNA, 25 bp, Artificial sequence
  SiRNA target sequence
aatactttaatgggtcatacaccag

SEQ ID NO: 137258 - DNA, 25 bp, Artificial sequence
  SiRNA target sequence
atactttaatgggtcatacaccaga

SEQ ID NO: 137259 - DNA, 25 bp, Artificial sequence
  SiRNA target sequence
tactttaatgggtcatacaccagac

SEQ ID NO: 137260 - DNA, 25 bp, Artificial sequence
  SiRNA target sequence
actttaatgggtcatacaccagact

SEQ ID NO: 137261 - DNA, 25 bp, Artificial sequence
  SiRNA target sequence
ctttaatgggtcatacaccagactt

SEQ ID NO: 137262 - DNA, 25 bp, Artificial sequence
  SiRNA target sequence
tttaatgggtcatacaccagactta

SEQ ID NO: 137263 - DNA, 25 bp, Artificial sequence
  SiRNA target sequence
ttaatgggtcatacaccagacttac

SEQ ID NO: 137264 - DNA, 25 bp, Artificial sequence
  SiRNA target sequence
taatgggtcatacaccagacttaca

SEQ ID NO: 137265 - DNA, 25 bp, Artificial sequence
  SiRNA target sequence
aatgggtcatacaccagacttacag

SEQ ID NO: 137266 - DNA, 25 bp, Artificial sequence
  SiRNA target sequence
atgggtcatacaccagacttacaga

SEQ ID NO: 137267 - DNA, 25 bp, Artificial sequence
  SiRNA target sequence
tgggtcatacaccagacttacagat

SEQ ID NO: 137268 - DNA, 25 bp, Artificial sequence
  SiRNA target sequence
gggtcatacaccagacttacagatg

SEQ ID NO: 137269 - DNA, 25 bp, Artificial sequence
  SiRNA target sequence
ggtcatacaccagacttacagatgg

SEQ ID NO: 137270 - DNA, 25 bp, Artificial sequence
  SiRNA target sequence
gtcatacaccagacttacagatggt

SEQ ID NO: 137271 - DNA, 25 bp, Artificial sequence
  SiRNA target sequence
tcatacaccagacttacagatggtt

SEQ ID NO: 137272 - DNA, 25 bp, Artificial sequence
  SiRNA target sequence
catacaccagacttacagatggtta

SEQ ID NO: 137273 - DNA, 25 bp, Artificial sequence
  SiRNA target sequence
atacaccagacttacagatggttat

SEQ ID NO: 137274 - DNA, 25 bp, Artificial sequence
  SiRNA target sequence
tacaccagacttacagatggttatc

SEQ ID NO: 137275 - DNA, 25 bp, Artificial sequence
  SiRNA target sequence
acaccagacttacagatggttatcc

SEQ ID NO: 137276 - DNA, 25 bp, Artificial sequence
  SiRNA target sequence
caccagacttacagatggttatcct

SEQ ID NO: 137277 - DNA, 25 bp, Artificial sequence
  SiRNA target sequence
accagacttacagatggttatcctt

SEQ ID NO: 137278 - DNA, 25 bp, Artificial sequence
  SiRNA target sequence
ccagacttacagatggttatcctta

SEQ ID NO: 137279 - DNA, 25 bp, Artificial sequence
  SiRNA target sequence
cagacttacagatggttatccttat

SEQ ID NO: 137280 - DNA, 25 bp, Artificial sequence
  SiRNA target sequence
agacttacagatggttatccttata

SEQ ID NO: 137281 - DNA, 25 bp, Artificial sequence
  SiRNA target sequence
gacttacagatggttatccttatac

SEQ ID NO: 137282 - DNA, 25 bp, Artificial sequence
  SiRNA target sequence
acttacagatggttatccttataca

SEQ ID NO: 137283 - DNA, 25 bp, Artificial sequence
  SiRNA target sequence
cttacagatggttatccttatacaa

SEQ ID NO: 137284 - DNA, 25 bp, Artificial sequence
  SiRNA target sequence
ttacagatggttatccttatacaaa

SEQ ID NO: 137285 - DNA, 25 bp, Artificial sequence
  SiRNA target sequence
tacagatggttatccttatacaaaa

SEQ ID NO: 137286 - DNA, 25 bp, Artificial sequence
  SiRNA target sequence
acagatggttatccttatacaaaag

SEQ ID NO: 137287 - DNA, 25 bp, Artificial sequence
  SiRNA target sequence
cagatggttatccttatacaaaaga

SEQ ID NO: 137288 - DNA, 25 bp, Artificial sequence
  SiRNA target sequence
agatggttatccttatacaaaagaa

SEQ ID NO: 137289 - DNA, 25 bp, Artificial sequence
  SiRNA target sequence
gatggttatccttatacaaaagaag

SEQ ID NO: 137290 - DNA, 25 bp, Artificial sequence
  SiRNA target sequence
atggttatccttatacaaaagaaga

SEQ ID NO: 137291 - DNA, 25 bp, Artificial sequence
  SiRNA target sequence
tggttatccttatacaaaagaagaa

SEQ ID NO: 137292 - DNA, 25 bp, Artificial sequence
  SiRNA target sequence
ggttatccttatacaaaagaagaaa

SEQ ID NO: 137293 - DNA, 25 bp, Artificial sequence
  SiRNA target sequence
gttatccttatacaaaagaagaaat

SEQ ID NO: 137294 - DNA, 25 bp, Artificial sequence
  SiRNA target sequence
ttatccttatacaaaagaagaaata

SEQ ID NO: 137295 - DNA, 25 bp, Artificial sequence
  SiRNA target sequence
tatccttatacaaaagaagaaatag

SEQ ID NO: 137296 - DNA, 25 bp, Artificial sequence
  SiRNA target sequence
atccttatacaaaagaagaaatagt

SEQ ID NO: 137297 - DNA, 25 bp, Artificial sequence
  SiRNA target sequence
tccttatacaaaagaagaaatagta

SEQ ID NO: 137298 - DNA, 25 bp, Artificial sequence
  SiRNA target sequence
ccttatacaaaagaagaaatagtat

SEQ ID NO: 137299 - DNA, 25 bp, Artificial sequence
  SiRNA target sequence
cttatacaaaagaagaaatagtata

SEQ ID NO: 137300 - DNA, 25 bp, Artificial sequence
  SiRNA target sequence
ttatacaaaagaagaaatagtatat

SEQ ID NO: 137301 - DNA, 25 bp, Artificial sequence
  SiRNA target sequence
tatacaaaagaagaaatagtatatt

SEQ ID NO: 137302 - DNA, 25 bp, Artificial sequence
  SiRNA target sequence
atacaaaagaagaaatagtatattg

SEQ ID NO: 137303 - DNA, 25 bp, Artificial sequence
  SiRNA target sequence
tacaaaagaagaaatagtatattgt

SEQ ID NO: 137304 - DNA, 25 bp, Artificial sequence
  SiRNA target sequence
acaaaagaagaaatagtatattgta

SEQ ID NO: 137305 - DNA, 25 bp, Artificial sequence
  SiRNA target sequence
caaaagaagaaatagtatattgtat

SEQ ID NO: 137306 - DNA, 25 bp, Artificial sequence
  SiRNA target sequence
aaaagaagaaatagtatattgtatc

SEQ ID NO: 137307 - DNA, 25 bp, Artificial sequence
  SiRNA target sequence
aaagaagaaatagtatattgtatcg

SEQ ID NO: 137308 - DNA, 25 bp, Artificial sequence
  SiRNA target sequence
aagaagaaatagtatattgtatcga

SEQ ID NO: 137309 - DNA, 25 bp, Artificial sequence
  SiRNA target sequence
agaagaaatagtatattgtatcgaa

SEQ ID NO: 137310 - DNA, 25 bp, Artificial sequence
  SiRNA target sequence
gaagaaatagtatattgtatcgaac

SEQ ID NO: 137311 - DNA, 25 bp, Artificial sequence
  SiRNA target sequence
aagaaatagtatattgtatcgaaca

SEQ ID NO: 137312 - DNA, 25 bp, Artificial sequence
  SiRNA target sequence
agaaatagtatattgtatcgaacat

SEQ ID NO: 137313 - DNA, 25 bp, Artificial sequence
  SiRNA target sequence
gaaatagtatattgtatcgaacatg

SEQ ID NO: 137314 - DNA, 25 bp, Artificial sequence
  SiRNA target sequence
aaatagtatattgtatcgaacatga

SEQ ID NO: 137315 - DNA, 25 bp, Artificial sequence
  SiRNA target sequence
aatagtatattgtatcgaacatgaa

SEQ ID NO: 137316 - DNA, 25 bp, Artificial sequence
  SiRNA target sequence
atagtatattgtatcgaacatgaat

SEQ ID NO: 137317 - DNA, 25 bp, Artificial sequence
  SiRNA target sequence
tagtatattgtatcgaacatgaatt

SEQ ID NO: 137318 - DNA, 25 bp, Artificial sequence
  SiRNA target sequence
agtatattgtatcgaacatgaattg

SEQ ID NO: 137319 - DNA, 25 bp, Artificial sequence
  SiRNA target sequence
gtatattgtatcgaacatgaattgg

SEQ ID NO: 137320 - DNA, 25 bp, Artificial sequence
  SiRNA target sequence
tatattgtatcgaacatgaattggc

SEQ ID NO: 137321 - DNA, 25 bp, Artificial sequence
  SiRNA target sequence
atattgtatcgaacatgaattggct

SEQ ID NO: 137322 - DNA, 25 bp, Artificial sequence
  SiRNA target sequence
tattgtatcgaacatgaattggctt

SEQ ID NO: 137323 - DNA, 25 bp, Artificial sequence
  SiRNA target sequence
attgtatcgaacatgaattggctta

SEQ ID NO: 137324 - DNA, 25 bp, Artificial sequence
  SiRNA target sequence
ttgtatcgaacatgaattggcttat

SEQ ID NO: 137325 - DNA, 25 bp, Artificial sequence
  SiRNA target sequence
tgtatcgaacatgaattggcttatc

SEQ ID NO: 137326 - DNA, 25 bp, Artificial sequence
  SiRNA target sequence
gtatcgaacatgaattggcttatcg

SEQ ID NO: 137327 - DNA, 25 bp, Artificial sequence
  SiRNA target sequence
tatcgaacatgaattggcttatcgc

SEQ ID NO: 137328 - DNA, 25 bp, Artificial sequence
  SiRNA target sequence
atcgaacatgaattggcttatcgca

SEQ ID NO: 137329 - DNA, 25 bp, Artificial sequence
  SiRNA target sequence
tcgaacatgaattggcttatcgcat

SEQ ID NO: 137330 - DNA, 25 bp, Artificial sequence
  SiRNA target sequence
cgaacatgaattggcttatcgcatc

SEQ ID NO: 137331 - DNA, 25 bp, Artificial sequence
  SiRNA target sequence
gaacatgaattggcttatcgcatca

SEQ ID NO: 137332 - DNA, 25 bp, Artificial sequence
  SiRNA target sequence
aacatgaattggcttatcgcatcag

SEQ ID NO: 137333 - DNA, 25 bp, Artificial sequence
  SiRNA target sequence
acatgaattggcttatcgcatcagt

SEQ ID NO: 137334 - DNA, 25 bp, Artificial sequence
  SiRNA target sequence
catgaattggcttatcgcatcagtg

SEQ ID NO: 137335 - DNA, 25 bp, Artificial sequence
  SiRNA target sequence
atgaattggcttatcgcatcagtga

SEQ ID NO: 137336 - DNA, 25 bp, Artificial sequence
  SiRNA target sequence
tgaattggcttatcgcatcagtgat

SEQ ID NO: 137337 - DNA, 25 bp, Artificial sequence
  SiRNA target sequence
gaattggcttatcgcatcagtgata

SEQ ID NO: 137338 - DNA, 25 bp, Artificial sequence
  SiRNA target sequence
aattggcttatcgcatcagtgatat

SEQ ID NO: 137339 - DNA, 25 bp, Artificial sequence
  SiRNA target sequence
attggcttatcgcatcagtgatata

SEQ ID NO: 137340 - DNA, 25 bp, Artificial sequence
  SiRNA target sequence
ttggcttatcgcatcagtgatatat

SEQ ID NO: 137341 - DNA, 25 bp, Artificial sequence
  SiRNA target sequence
tggcttatcgcatcagtgatatatt

SEQ ID NO: 137342 - DNA, 25 bp, Artificial sequence
  SiRNA target sequence
ggcttatcgcatcagtgatatatta

SEQ ID NO: 137343 - DNA, 25 bp, Artificial sequence
  SiRNA target sequence
gcttatcgcatcagtgatatattat

SEQ ID NO: 137344 - DNA, 25 bp, Artificial sequence
  SiRNA target sequence
cttatcgcatcagtgatatattatt

SEQ ID NO: 137345 - DNA, 25 bp, Artificial sequence
  SiRNA target sequence
ttatcgcatcagtgatatattattt

SEQ ID NO: 137346 - DNA, 25 bp, Artificial sequence
  SiRNA target sequence
tatcgcatcagtgatatattattta

SEQ ID NO: 137347 - DNA, 25 bp, Artificial sequence
  SiRNA target sequence
atcgcatcagtgatatattatttaa

SEQ ID NO: 137348 - DNA, 25 bp, Artificial sequence
  SiRNA target sequence
tcgcatcagtgatatattatttaat

SEQ ID NO: 137349 - DNA, 25 bp, Artificial sequence
  SiRNA target sequence
cgcatcagtgatatattatttaata

SEQ ID NO: 137350 - DNA, 25 bp, Artificial sequence
  SiRNA target sequence
gcatcagtgatatattatttaatag

SEQ ID NO: 137351 - DNA, 25 bp, Artificial sequence
  SiRNA target sequence
catcagtgatatattatttaatagg

SEQ ID NO: 137352 - DNA, 25 bp, Artificial sequence
  SiRNA target sequence
atcagtgatatattatttaatagga

SEQ ID NO: 137353 - DNA, 25 bp, Artificial sequence
  SiRNA target sequence
tcagtgatatattatttaataggat

SEQ ID NO: 137354 - DNA, 25 bp, Artificial sequence
  SiRNA target sequence
cagtgatatattatttaataggatg

SEQ ID NO: 137355 - DNA, 25 bp, Artificial sequence
  SiRNA target sequence
agtgatatattatttaataggatga

SEQ ID NO: 137356 - DNA, 25 bp, Artificial sequence
  SiRNA target sequence
gtgatatattatttaataggatgat

SEQ ID NO: 137357 - DNA, 25 bp, Artificial sequence
  SiRNA target sequence
tgatatattatttaataggatgatg

SEQ ID NO: 137358 - DNA, 25 bp, Artificial sequence
  SiRNA target sequence
gatatattatttaataggatgatga

SEQ ID NO: 137359 - DNA, 25 bp, Artificial sequence
  SiRNA target sequence
atatattatttaataggatgatgat

SEQ ID NO: 137360 - DNA, 25 bp, Artificial sequence
  SiRNA target sequence
tatattatttaataggatgatgata

SEQ ID NO: 137361 - DNA, 25 bp, Artificial sequence
  SiRNA target sequence
atattatttaataggatgatgatag

SEQ ID NO: 137362 - DNA, 25 bp, Artificial sequence
  SiRNA target sequence
tattatttaataggatgatgatagg

SEQ ID NO: 137363 - DNA, 25 bp, Artificial sequence
  SiRNA target sequence
attatttaataggatgatgatagga

SEQ ID NO: 137364 - DNA, 25 bp, Artificial sequence
  SiRNA target sequence
ttatttaataggatgatgataggat

SEQ ID NO: 137365 - DNA, 25 bp, Artificial sequence
  SiRNA target sequence
tatttaataggatgatgataggata

SEQ ID NO: 137366 - DNA, 25 bp, Artificial sequence
  SiRNA target sequence
atttaataggatgatgataggatac

SEQ ID NO: 137367 - DNA, 25 bp, Artificial sequence
  SiRNA target sequence
tttaataggatgatgataggataca

SEQ ID NO: 137368 - DNA, 25 bp, Artificial sequence
  SiRNA target sequence
ttaataggatgatgataggatacat

SEQ ID NO: 137369 - DNA, 25 bp, Artificial sequence
  SiRNA target sequence
taataggatgatgataggatacatt

SEQ ID NO: 137370 - DNA, 25 bp, Artificial sequence
  SiRNA target sequence
aataggatgatgataggatacattg

SEQ ID NO: 137371 - DNA, 25 bp, Artificial sequence
  SiRNA target sequence
ataggatgatgataggatacattga

SEQ ID NO: 137372 - DNA, 25 bp, Artificial sequence
  SiRNA target sequence
taggatgatgataggatacattgac

SEQ ID NO: 137373 - DNA, 25 bp, Artificial sequence
  SiRNA target sequence
aggatgatgataggatacattgacg

SEQ ID NO: 137374 - DNA, 25 bp, Artificial sequence
  SiRNA target sequence
ggatgatgataggatacattgacgt

SEQ ID NO: 137375 - DNA, 25 bp, Artificial sequence
  SiRNA target sequence
gatgatgataggatacattgacgtc

SEQ ID NO: 137376 - DNA, 25 bp, Artificial sequence
  SiRNA target sequence
atgatgataggatacattgacgtca

SEQ ID NO: 137377 - DNA, 25 bp, Artificial sequence
  SiRNA target sequence
tgatgataggatacattgacgtcag

SEQ ID NO: 137378 - DNA, 25 bp, Artificial sequence
  SiRNA target sequence
gatgataggatacattgacgtcaga

SEQ ID NO: 137379 - DNA, 25 bp, Artificial sequence
  SiRNA target sequence
atgataggatacattgacgtcagaa

SEQ ID NO: 137380 - DNA, 25 bp, Artificial sequence
  SiRNA target sequence
tgataggatacattgacgtcagaag

SEQ ID NO: 137381 - DNA, 25 bp, Artificial sequence
  SiRNA target sequence
gataggatacattgacgtcagaaga

SEQ ID NO: 137382 - DNA, 25 bp, Artificial sequence
  SiRNA target sequence
ataggatacattgacgtcagaagag

SEQ ID NO: 137383 - DNA, 25 bp, Artificial sequence
  SiRNA target sequence
taggatacattgacgtcagaagagc

SEQ ID NO: 137384 - DNA, 25 bp, Artificial sequence
  SiRNA target sequence
aggatacattgacgtcagaagagca

SEQ ID NO: 137385 - DNA, 25 bp, Artificial sequence
  SiRNA target sequence
ggatacattgacgtcagaagagcat

SEQ ID NO: 137386 - DNA, 25 bp, Artificial sequence
  SiRNA target sequence
gatacattgacgtcagaagagcatt

SEQ ID NO: 137387 - DNA, 25 bp, Artificial sequence
  SiRNA target sequence
atacattgacgtcagaagagcattt

SEQ ID NO: 137388 - DNA, 25 bp, Artificial sequence
  SiRNA target sequence
tacattgacgtcagaagagcatttg

SEQ ID NO: 137389 - DNA, 25 bp, Artificial sequence
  SiRNA target sequence
acattgacgtcagaagagcatttga

SEQ ID NO: 137390 - DNA, 25 bp, Artificial sequence
  SiRNA target sequence
cattgacgtcagaagagcatttgat

SEQ ID NO: 137391 - DNA, 25 bp, Artificial sequence
  SiRNA target sequence
attgacgtcagaagagcatttgatt

SEQ ID NO: 137392 - DNA, 25 bp, Artificial sequence
  SiRNA target sequence
ttgacgtcagaagagcatttgattt

SEQ ID NO: 137393 - DNA, 25 bp, Artificial sequence
  SiRNA target sequence
tgacgtcagaagagcatttgattta

SEQ ID NO: 137394 - DNA, 25 bp, Artificial sequence
  SiRNA target sequence
gacgtcagaagagcatttgatttaa

SEQ ID NO: 137395 - DNA, 25 bp, Artificial sequence
  SiRNA target sequence
acgtcagaagagcatttgatttaat

SEQ ID NO: 137396 - DNA, 25 bp, Artificial sequence
  SiRNA target sequence
cgtcagaagagcatttgatttaatt

SEQ ID NO: 137397 - DNA, 25 bp, Artificial sequence
  SiRNA target sequence
gtcagaagagcatttgatttaattg

SEQ ID NO: 137398 - DNA, 25 bp, Artificial sequence
  SiRNA target sequence
tcagaagagcatttgatttaattgg

SEQ ID NO: 137399 - DNA, 25 bp, Artificial sequence
  SiRNA target sequence
cagaagagcatttgatttaattggt

SEQ ID NO: 137400 - DNA, 25 bp, Artificial sequence
  SiRNA target sequence
agaagagcatttgatttaattggta

SEQ ID NO: 137401 - DNA, 25 bp, Artificial sequence
  SiRNA target sequence
gaagagcatttgatttaattggtat

SEQ ID NO: 137402 - DNA, 25 bp, Artificial sequence
  SiRNA target sequence
aagagcatttgatttaattggtata

SEQ ID NO: 137403 - DNA, 25 bp, Artificial sequence
  SiRNA target sequence
agagcatttgatttaattggtatag

SEQ ID NO: 137404 - DNA, 25 bp, Artificial sequence
  SiRNA target sequence
gagcatttgatttaattggtatagt

SEQ ID NO: 137405 - DNA, 25 bp, Artificial sequence
  SiRNA target sequence
agcatttgatttaattggtatagta

SEQ ID NO: 137406 - DNA, 25 bp, Artificial sequence
  SiRNA target sequence
gcatttgatttaattggtatagtag

SEQ ID NO: 137407 - DNA, 25 bp, Artificial sequence
  SiRNA target sequence
catttgatttaattggtatagtagc

SEQ ID NO: 137408 - DNA, 25 bp, Artificial sequence
  SiRNA target sequence
atttgatttaattggtatagtagct

SEQ ID NO: 137409 - DNA, 25 bp, Artificial sequence
  SiRNA target sequence
tttgatttaattggtatagtagctg

SEQ ID NO: 137410 - DNA, 25 bp, Artificial sequence
  SiRNA target sequence
ttgatttaattggtatagtagctga

SEQ ID NO: 137411 - DNA, 25 bp, Artificial sequence
  SiRNA target sequence
tgatttaattggtatagtagctgaa

SEQ ID NO: 137412 - DNA, 25 bp, Artificial sequence
  SiRNA target sequence
gatttaattggtatagtagctgaag

SEQ ID NO: 137413 - DNA, 25 bp, Artificial sequence
  SiRNA target sequence
atttaattggtatagtagctgaagt

SEQ ID NO: 137414 - DNA, 25 bp, Artificial sequence
  SiRNA target sequence
tttaattggtatagtagctgaagta

SEQ ID NO: 137415 - DNA, 25 bp, Artificial sequence
  SiRNA target sequence
ttaattggtatagtagctgaagtaa

SEQ ID NO: 137416 - DNA, 25 bp, Artificial sequence
  SiRNA target sequence
taattggtatagtagctgaagtaat

SEQ ID NO: 137417 - DNA, 25 bp, Artificial sequence
  SiRNA target sequence
aattggtatagtagctgaagtaatg

SEQ ID NO: 137418 - DNA, 25 bp, Artificial sequence
  SiRNA target sequence
attggtatagtagctgaagtaatga

SEQ ID NO: 137419 - DNA, 25 bp, Artificial sequence
  SiRNA target sequence
ttggtatagtagctgaagtaatgaa

SEQ ID NO: 137420 - DNA, 25 bp, Artificial sequence
  SiRNA target sequence
tggtatagtagctgaagtaatgaaa

SEQ ID NO: 137421 - DNA, 25 bp, Artificial sequence
  SiRNA target sequence
ggtatagtagctgaagtaatgaaag

SEQ ID NO: 137422 - DNA, 25 bp, Artificial sequence
  SiRNA target sequence
gtatagtagctgaagtaatgaaaga

SEQ ID NO: 137423 - DNA, 25 bp, Artificial sequence
  SiRNA target sequence
tatagtagctgaagtaatgaaagac

SEQ ID NO: 137424 - DNA, 25 bp, Artificial sequence
  SiRNA target sequence
atagtagctgaagtaatgaaagact

SEQ ID NO: 137425 - DNA, 25 bp, Artificial sequence
  SiRNA target sequence
tagtagctgaagtaatgaaagacta

SEQ ID NO: 137426 - DNA, 25 bp, Artificial sequence
  SiRNA target sequence
agtagctgaagtaatgaaagactat

SEQ ID NO: 137427 - DNA, 25 bp, Artificial sequence
  SiRNA target sequence
gtagctgaagtaatgaaagactatt

SEQ ID NO: 137428 - DNA, 25 bp, Artificial sequence
  SiRNA target sequence
tagctgaagtaatgaaagactatta

SEQ ID NO: 137429 - DNA, 25 bp, Artificial sequence
  SiRNA target sequence
agctgaagtaatgaaagactattac

SEQ ID NO: 137430 - DNA, 25 bp, Artificial sequence
  SiRNA target sequence
gctgaagtaatgaaagactattacg

SEQ ID NO: 137431 - DNA, 25 bp, Artificial sequence
  SiRNA target sequence
ctgaagtaatgaaagactattacgg

SEQ ID NO: 137432 - DNA, 25 bp, Artificial sequence
  SiRNA target sequence
tgaagtaatgaaagactattacgga

SEQ ID NO: 137433 - DNA, 25 bp, Artificial sequence
  SiRNA target sequence
gaagtaatgaaagactattacggat

SEQ ID NO: 137434 - DNA, 25 bp, Artificial sequence
  SiRNA target sequence
aagtaatgaaagactattacggatg

SEQ ID NO: 137435 - DNA, 25 bp, Artificial sequence
  SiRNA target sequence
agtaatgaaagactattacggatgg

SEQ ID NO: 137436 - DNA, 25 bp, Artificial sequence
  SiRNA target sequence
gtaatgaaagactattacggatggg

SEQ ID NO: 137437 - DNA, 25 bp, Artificial sequence
  SiRNA target sequence
taatgaaagactattacggatggga

SEQ ID NO: 137438 - DNA, 25 bp, Artificial sequence
  SiRNA target sequence
aatgaaagactattacggatgggat

SEQ ID NO: 137439 - DNA, 25 bp, Artificial sequence
  SiRNA target sequence
atgaaagactattacggatgggatc

SEQ ID NO: 137440 - DNA, 25 bp, Artificial sequence
  SiRNA target sequence
tgaaagactattacggatgggatca

SEQ ID NO: 137441 - DNA, 25 bp, Artificial sequence
  SiRNA target sequence
gaaagactattacggatgggatcag

SEQ ID NO: 137442 - DNA, 25 bp, Artificial sequence
  SiRNA target sequence
aaagactattacggatgggatcagc

SEQ ID NO: 137443 - DNA, 25 bp, Artificial sequence
  SiRNA target sequence
aagactattacggatgggatcagca

SEQ ID NO: 137444 - DNA, 25 bp, Artificial sequence
  SiRNA target sequence
agactattacggatgggatcagcaa

SEQ ID NO: 137445 - DNA, 25 bp, Artificial sequence
  SiRNA target sequence
gactattacggatgggatcagcaaa

SEQ ID NO: 137446 - DNA, 25 bp, Artificial sequence
  SiRNA target sequence
actattacggatgggatcagcaaag

SEQ ID NO: 137447 - DNA, 25 bp, Artificial sequence
  SiRNA target sequence
ctattacggatgggatcagcaaaga

SEQ ID NO: 137448 - DNA, 25 bp, Artificial sequence
  SiRNA target sequence
tattacggatgggatcagcaaagat

SEQ ID NO: 137449 - DNA, 25 bp, Artificial sequence
  SiRNA target sequence
attacggatgggatcagcaaagata

SEQ ID NO: 137450 - DNA, 25 bp, Artificial sequence
  SiRNA target sequence
ttacggatgggatcagcaaagatat

SEQ ID NO: 137451 - DNA, 25 bp, Artificial sequence
  SiRNA target sequence
tacggatgggatcagcaaagatata

SEQ ID NO: 137452 - DNA, 25 bp, Artificial sequence
  SiRNA target sequence
acggatgggatcagcaaagatataa

SEQ ID NO: 137453 - DNA, 25 bp, Artificial sequence
  SiRNA target sequence
cggatgggatcagcaaagatataat

SEQ ID NO: 137454 - DNA, 25 bp, Artificial sequence
  SiRNA target sequence
ggatgggatcagcaaagatataatg

SEQ ID NO: 137455 - DNA, 25 bp, Artificial sequence
  SiRNA target sequence
gatgggatcagcaaagatataatga

SEQ ID NO: 137456 - DNA, 25 bp, Artificial sequence
  SiRNA target sequence
atgggatcagcaaagatataatgaa

SEQ ID NO: 137457 - DNA, 25 bp, Artificial sequence
  SiRNA target sequence
tgggatcagcaaagatataatgaag

SEQ ID NO: 137458 - DNA, 25 bp, Artificial sequence
  SiRNA target sequence
gggatcagcaaagatataatgaaga

SEQ ID NO: 137459 - DNA, 25 bp, Artificial sequence
  SiRNA target sequence
ggatcagcaaagatataatgaagaa

SEQ ID NO: 137460 - DNA, 25 bp, Artificial sequence
  SiRNA target sequence
gatcagcaaagatataatgaagaaa

SEQ ID NO: 137461 - DNA, 25 bp, Artificial sequence
  SiRNA target sequence
atcagcaaagatataatgaagaaac

SEQ ID NO: 137462 - DNA, 25 bp, Artificial sequence
  SiRNA target sequence
tcagcaaagatataatgaagaaaca

SEQ ID NO: 137463 - DNA, 25 bp, Artificial sequence
  SiRNA target sequence
cagcaaagatataatgaagaaacaa

SEQ ID NO: 137464 - DNA, 25 bp, Artificial sequence
  SiRNA target sequence
agcaaagatataatgaagaaacaaa

SEQ ID NO: 137465 - DNA, 25 bp, Artificial sequence
  SiRNA target sequence
gcaaagatataatgaagaaacaaaa

SEQ ID NO: 137466 - DNA, 25 bp, Artificial sequence
  SiRNA target sequence
caaagatataatgaagaaacaaaat

SEQ ID NO: 137467 - DNA, 25 bp, Artificial sequence
  SiRNA target sequence
aaagatataatgaagaaacaaaatt

SEQ ID NO: 137468 - DNA, 25 bp, Artificial sequence
  SiRNA target sequence
aagatataatgaagaaacaaaatta

SEQ ID NO: 137469 - DNA, 25 bp, Artificial sequence
  SiRNA target sequence
agatataatgaagaaacaaaattat

SEQ ID NO: 137470 - DNA, 25 bp, Artificial sequence
  SiRNA target sequence
gatataatgaagaaacaaaattatg

SEQ ID NO: 137471 - DNA, 25 bp, Artificial sequence
  SiRNA target sequence
atataatgaagaaacaaaattatgc

SEQ ID NO: 137472 - DNA, 25 bp, Artificial sequence
  SiRNA target sequence
tataatgaagaaacaaaattatgca

SEQ ID NO: 137473 - DNA, 25 bp, Artificial sequence
  SiRNA target sequence
ataatgaagaaacaaaattatgcat

SEQ ID NO: 137474 - DNA, 25 bp, Artificial sequence
  SiRNA target sequence
taatgaagaaacaaaattatgcatg

SEQ ID NO: 137475 - DNA, 25 bp, Artificial sequence
  SiRNA target sequence
aatgaagaaacaaaattatgcatgg

SEQ ID NO: 137476 - DNA, 25 bp, Artificial sequence
  SiRNA target sequence
atgaagaaacaaaattatgcatgga

SEQ ID NO: 137477 - DNA, 25 bp, Artificial sequence
  SiRNA target sequence
tgaagaaacaaaattatgcatggaa

SEQ ID NO: 137478 - DNA, 25 bp, Artificial sequence
  SiRNA target sequence
gaagaaacaaaattatgcatggaaa

SEQ ID NO: 137479 - DNA, 25 bp, Artificial sequence
  SiRNA target sequence
aagaaacaaaattatgcatggaaat

SEQ ID NO: 137480 - DNA, 25 bp, Artificial sequence
  SiRNA target sequence
agaaacaaaattatgcatggaaatg

SEQ ID NO: 137481 - DNA, 25 bp, Artificial sequence
  SiRNA target sequence
gaaacaaaattatgcatggaaatga

SEQ ID NO: 137482 - DNA, 25 bp, Artificial sequence
  SiRNA target sequence
aaacaaaattatgcatggaaatgat

SEQ ID NO: 137483 - DNA, 25 bp, Artificial sequence
  SiRNA target sequence
aacaaaattatgcatggaaatgatg

SEQ ID NO: 137484 - DNA, 25 bp, Artificial sequence
  SiRNA target sequence
acaaaattatgcatggaaatgatgg

SEQ ID NO: 137485 - DNA, 25 bp, Artificial sequence
  SiRNA target sequence
caaaattatgcatggaaatgatgga

SEQ ID NO: 137486 - DNA, 25 bp, Artificial sequence
  SiRNA target sequence
aaaattatgcatggaaatgatggaa

SEQ ID NO: 137487 - DNA, 25 bp, Artificial sequence
  SiRNA target sequence
aaattatgcatggaaatgatggaaa

SEQ ID NO: 137488 - DNA, 25 bp, Artificial sequence
  SiRNA target sequence
aattatgcatggaaatgatggaaac

SEQ ID NO: 137489 - DNA, 25 bp, Artificial sequence
  SiRNA target sequence
attatgcatggaaatgatggaaact

SEQ ID NO: 137490 - DNA, 25 bp, Artificial sequence
  SiRNA target sequence
ttatgcatggaaatgatggaaactt

SEQ ID NO: 137491 - DNA, 25 bp, Artificial sequence
  SiRNA target sequence
tatgcatggaaatgatggaaacttg

SEQ ID NO: 137492 - DNA, 25 bp, Artificial sequence
  SiRNA target sequence
atgcatggaaatgatggaaacttgt

SEQ ID NO: 137493 - DNA, 25 bp, Artificial sequence
  SiRNA target sequence
tgcatggaaatgatggaaacttgtg

SEQ ID NO: 137494 - DNA, 25 bp, Artificial sequence
  SiRNA target sequence
gcatggaaatgatggaaacttgtgg

SEQ ID NO: 137495 - DNA, 25 bp, Artificial sequence
  SiRNA target sequence
catggaaatgatggaaacttgtggt

SEQ ID NO: 137496 - DNA, 25 bp, Artificial sequence
  SiRNA target sequence
atggaaatgatggaaacttgtggtt

SEQ ID NO: 137497 - DNA, 25 bp, Artificial sequence
  SiRNA target sequence
tggaaatgatggaaacttgtggtta

SEQ ID NO: 137498 - DNA, 25 bp, Artificial sequence
  SiRNA target sequence
ggaaatgatggaaacttgtggttat

SEQ ID NO: 137499 - DNA, 25 bp, Artificial sequence
  SiRNA target sequence
gaaatgatggaaacttgtggttata

SEQ ID NO: 137500 - DNA, 25 bp, Artificial sequence
  SiRNA target sequence
aaatgatggaaacttgtggttatag

SEQ ID NO: 137501 - DNA, 25 bp, Artificial sequence
  SiRNA target sequence
aatgatggaaacttgtggttatagt

SEQ ID NO: 137502 - DNA, 25 bp, Artificial sequence
  SiRNA target sequence
atgatggaaacttgtggttatagtt

SEQ ID NO: 137503 - DNA, 25 bp, Artificial sequence
  SiRNA target sequence
tgatggaaacttgtggttatagttt

SEQ ID NO: 137504 - DNA, 25 bp, Artificial sequence
  SiRNA target sequence
gatggaaacttgtggttatagttta

SEQ ID NO: 137505 - DNA, 25 bp, Artificial sequence
  SiRNA target sequence
atggaaacttgtggttatagtttat

SEQ ID NO: 137506 - DNA, 25 bp, Artificial sequence
  SiRNA target sequence
tggaaacttgtggttatagtttatt

SEQ ID NO: 137507 - DNA, 25 bp, Artificial sequence
  SiRNA target sequence
ggaaacttgtggttatagtttatta

SEQ ID NO: 137508 - DNA, 25 bp, Artificial sequence
  SiRNA target sequence
gaaacttgtggttatagtttattaa

SEQ ID NO: 137509 - DNA, 25 bp, Artificial sequence
  SiRNA target sequence
aaacttgtggttatagtttattaaa

SEQ ID NO: 137510 - DNA, 25 bp, Artificial sequence
  SiRNA target sequence
aacttgtggttatagtttattaaaa

SEQ ID NO: 137511 - DNA, 25 bp, Artificial sequence
  SiRNA target sequence
acttgtggttatagtttattaaaaa

SEQ ID NO: 137512 - DNA, 25 bp, Artificial sequence
  SiRNA target sequence
cttgtggttatagtttattaaaaaa

SEQ ID NO: 137513 - DNA, 25 bp, Artificial sequence
  SiRNA target sequence
ttgtggttatagtttattaaaaaat

SEQ ID NO: 137514 - DNA, 25 bp, Artificial sequence
  SiRNA target sequence
tgtggttatagtttattaaaaaatt

SEQ ID NO: 137515 - DNA, 25 bp, Artificial sequence
  SiRNA target sequence
gtggttatagtttattaaaaaatta

SEQ ID NO: 137516 - DNA, 25 bp, Artificial sequence
  SiRNA target sequence
tggttatagtttattaaaaaattaa

SEQ ID NO: 137517 - DNA, 26 bp, Artificial sequence
  SiRNA target sequence
atggtgtataaggttttatttacagt

SEQ ID NO: 137518 - DNA, 26 bp, Artificial sequence
  SiRNA target sequence
tggtgtataaggttttatttacagta

SEQ ID NO: 137519 - DNA, 26 bp, Artificial sequence
  SiRNA target sequence
ggtgtataaggttttatttacagtaa

SEQ ID NO: 137520 - DNA, 26 bp, Artificial sequence
  SiRNA target sequence
gtgtataaggttttatttacagtaat

SEQ ID NO: 137521 - DNA, 26 bp, Artificial sequence
  SiRNA target sequence
tgtataaggttttatttacagtaata

SEQ ID NO: 137522 - DNA, 26 bp, Artificial sequence
  SiRNA target sequence
gtataaggttttatttacagtaatag

SEQ ID NO: 137523 - DNA, 26 bp, Artificial sequence
  SiRNA target sequence
tataaggttttatttacagtaatagg

SEQ ID NO: 137524 - DNA, 26 bp, Artificial sequence
  SiRNA target sequence
ataaggttttatttacagtaatagga

SEQ ID NO: 137525 - DNA, 26 bp, Artificial sequence
  SiRNA target sequence
taaggttttatttacagtaataggat

SEQ ID NO: 137526 - DNA, 26 bp, Artificial sequence
  SiRNA target sequence
aaggttttatttacagtaataggatt

SEQ ID NO: 137527 - DNA, 26 bp, Artificial sequence
  SiRNA target sequence
aggttttatttacagtaataggatta

SEQ ID NO: 137528 - DNA, 26 bp, Artificial sequence
  SiRNA target sequence
ggttttatttacagtaataggattaa

SEQ ID NO: 137529 - DNA, 26 bp, Artificial sequence
  SiRNA target sequence
gttttatttacagtaataggattaat

SEQ ID NO: 137530 - DNA, 26 bp, Artificial sequence
  SiRNA target sequence
ttttatttacagtaataggattaata

SEQ ID NO: 137531 - DNA, 26 bp, Artificial sequence
  SiRNA target sequence
tttatttacagtaataggattaatat

SEQ ID NO: 137532 - DNA, 26 bp, Artificial sequence
  SiRNA target sequence
ttatttacagtaataggattaatatg

SEQ ID NO: 137533 - DNA, 26 bp, Artificial sequence
  SiRNA target sequence
tatttacagtaataggattaatatgt

SEQ ID NO: 137534 - DNA, 26 bp, Artificial sequence
  SiRNA target sequence
atttacagtaataggattaatatgtg

SEQ ID NO: 137535 - DNA, 26 bp, Artificial sequence
  SiRNA target sequence
tttacagtaataggattaatatgtgg

SEQ ID NO: 137536 - DNA, 26 bp, Artificial sequence
  SiRNA target sequence
ttacagtaataggattaatatgtggt

SEQ ID NO: 137537 - DNA, 26 bp, Artificial sequence
  SiRNA target sequence
tacagtaataggattaatatgtggta

SEQ ID NO: 137538 - DNA, 26 bp, Artificial sequence
  SiRNA target sequence
acagtaataggattaatatgtggtat

SEQ ID NO: 137539 - DNA, 26 bp, Artificial sequence
  SiRNA target sequence
cagtaataggattaatatgtggtata

SEQ ID NO: 137540 - DNA, 26 bp, Artificial sequence
  SiRNA target sequence
agtaataggattaatatgtggtatac

SEQ ID NO: 137541 - DNA, 26 bp, Artificial sequence
  SiRNA target sequence
gtaataggattaatatgtggtatact

SEQ ID NO: 137542 - DNA, 26 bp, Artificial sequence
  SiRNA target sequence
taataggattaatatgtggtatactt

SEQ ID NO: 137543 - DNA, 26 bp, Artificial sequence
  SiRNA target sequence
aataggattaatatgtggtatactta

SEQ ID NO: 137544 - DNA, 26 bp, Artificial sequence
  SiRNA target sequence
ataggattaatatgtggtatacttac

SEQ ID NO: 137545 - DNA, 26 bp, Artificial sequence
  SiRNA target sequence
taggattaatatgtggtatacttaca

SEQ ID NO: 137546 - DNA, 26 bp, Artificial sequence
  SiRNA target sequence
aggattaatatgtggtatacttacaa

SEQ ID NO: 137547 - DNA, 26 bp, Artificial sequence
  SiRNA target sequence
ggattaatatgtggtatacttacaat

SEQ ID NO: 137548 - DNA, 26 bp, Artificial sequence
  SiRNA target sequence
gattaatatgtggtatacttacaata

SEQ ID NO: 137549 - DNA, 26 bp, Artificial sequence
  SiRNA target sequence
attaatatgtggtatacttacaataa

SEQ ID NO: 137550 - DNA, 26 bp, Artificial sequence
  SiRNA target sequence
ttaatatgtggtatacttacaataat

SEQ ID NO: 137551 - DNA, 26 bp, Artificial sequence
  SiRNA target sequence
taatatgtggtatacttacaataatt

SEQ ID NO: 137552 - DNA, 26 bp, Artificial sequence
  SiRNA target sequence
aatatgtggtatacttacaataatta

SEQ ID NO: 137553 - DNA, 26 bp, Artificial sequence
  SiRNA target sequence
atatgtggtatacttacaataattaa

SEQ ID NO: 137554 - DNA, 26 bp, Artificial sequence
  SiRNA target sequence
tatgtggtatacttacaataattaaa

SEQ ID NO: 137555 - DNA, 26 bp, Artificial sequence
  SiRNA target sequence
atgtggtatacttacaataattaaac

SEQ ID NO: 137556 - DNA, 26 bp, Artificial sequence
  SiRNA target sequence
tgtggtatacttacaataattaaacg

SEQ ID NO: 137557 - DNA, 26 bp, Artificial sequence
  SiRNA target sequence
gtggtatacttacaataattaaacga

SEQ ID NO: 137558 - DNA, 26 bp, Artificial sequence
  SiRNA target sequence
tggtatacttacaataattaaacgat

SEQ ID NO: 137559 - DNA, 26 bp, Artificial sequence
  SiRNA target sequence
ggtatacttacaataattaaacgata

SEQ ID NO: 137560 - DNA, 26 bp, Artificial sequence
  SiRNA target sequence
gtatacttacaataattaaacgatac

SEQ ID NO: 137561 - DNA, 26 bp, Artificial sequence
  SiRNA target sequence
tatacttacaataattaaacgataca

SEQ ID NO: 137562 - DNA, 26 bp, Artificial sequence
  SiRNA target sequence
atacttacaataattaaacgatacaa

SEQ ID NO: 137563 - DNA, 26 bp, Artificial sequence
  SiRNA target sequence
tacttacaataattaaacgatacaag

SEQ ID NO: 137564 - DNA, 26 bp, Artificial sequence
  SiRNA target sequence
acttacaataattaaacgatacaagt

SEQ ID NO: 137565 - DNA, 26 bp, Artificial sequence
  SiRNA target sequence
cttacaataattaaacgatacaagta

SEQ ID NO: 137566 - DNA, 26 bp, Artificial sequence
  SiRNA target sequence
ttacaataattaaacgatacaagtat

SEQ ID NO: 137567 - DNA, 26 bp, Artificial sequence
  SiRNA target sequence
tacaataattaaacgatacaagtatt

SEQ ID NO: 137568 - DNA, 26 bp, Artificial sequence
  SiRNA target sequence
acaataattaaacgatacaagtattt

SEQ ID NO: 137569 - DNA, 26 bp, Artificial sequence
  SiRNA target sequence
caataattaaacgatacaagtatttt

SEQ ID NO: 137570 - DNA, 26 bp, Artificial sequence
  SiRNA target sequence
aataattaaacgatacaagtatttta

SEQ ID NO: 137571 - DNA, 26 bp, Artificial sequence
  SiRNA target sequence
ataattaaacgatacaagtattttaa

SEQ ID NO: 137572 - DNA, 26 bp, Artificial sequence
  SiRNA target sequence
taattaaacgatacaagtattttaag

SEQ ID NO: 137573 - DNA, 26 bp, Artificial sequence
  SiRNA target sequence
aattaaacgatacaagtattttaaga

SEQ ID NO: 137574 - DNA, 26 bp, Artificial sequence
  SiRNA target sequence
attaaacgatacaagtattttaagat

SEQ ID NO: 137575 - DNA, 26 bp, Artificial sequence
  SiRNA target sequence
ttaaacgatacaagtattttaagata

SEQ ID NO: 137576 - DNA, 26 bp, Artificial sequence
  SiRNA target sequence
taaacgatacaagtattttaagataa

SEQ ID NO: 137577 - DNA, 26 bp, Artificial sequence
  SiRNA target sequence
aaacgatacaagtattttaagataaa

SEQ ID NO: 137578 - DNA, 26 bp, Artificial sequence
  SiRNA target sequence
aacgatacaagtattttaagataaaa

SEQ ID NO: 137579 - DNA, 26 bp, Artificial sequence
  SiRNA target sequence
acgatacaagtattttaagataaaaa

SEQ ID NO: 137580 - DNA, 26 bp, Artificial sequence
  SiRNA target sequence
cgatacaagtattttaagataaaaaa

SEQ ID NO: 137581 - DNA, 26 bp, Artificial sequence
  SiRNA target sequence
gatacaagtattttaagataaaaaaa

SEQ ID NO: 137582 - DNA, 26 bp, Artificial sequence
  SiRNA target sequence
atacaagtattttaagataaaaaaat

SEQ ID NO: 137583 - DNA, 26 bp, Artificial sequence
  SiRNA target sequence
tacaagtattttaagataaaaaaatt

SEQ ID NO: 137584 - DNA, 26 bp, Artificial sequence
  SiRNA target sequence
acaagtattttaagataaaaaaattg

SEQ ID NO: 137585 - DNA, 26 bp, Artificial sequence
  SiRNA target sequence
caagtattttaagataaaaaaattgg

SEQ ID NO: 137586 - DNA, 26 bp, Artificial sequence
  SiRNA target sequence
aagtattttaagataaaaaaattggc

SEQ ID NO: 137587 - DNA, 26 bp, Artificial sequence
  SiRNA target sequence
agtattttaagataaaaaaattggcc

SEQ ID NO: 137588 - DNA, 26 bp, Artificial sequence
  SiRNA target sequence
gtattttaagataaaaaaattggcct

SEQ ID NO: 137589 - DNA, 26 bp, Artificial sequence
  SiRNA target sequence
tattttaagataaaaaaattggcctt

SEQ ID NO: 137590 - DNA, 26 bp, Artificial sequence
  SiRNA target sequence
attttaagataaaaaaattggcctta

SEQ ID NO: 137591 - DNA, 26 bp, Artificial sequence
  SiRNA target sequence
ttttaagataaaaaaattggccttaa

SEQ ID NO: 137592 - DNA, 26 bp, Artificial sequence
  SiRNA target sequence
tttaagataaaaaaattggccttaac

SEQ ID NO: 137593 - DNA, 26 bp, Artificial sequence
  SiRNA target sequence
ttaagataaaaaaattggccttaact

SEQ ID NO: 137594 - DNA, 26 bp, Artificial sequence
  SiRNA target sequence
taagataaaaaaattggccttaactt

SEQ ID NO: 137595 - DNA, 26 bp, Artificial sequence
  SiRNA target sequence
aagataaaaaaattggccttaactta

SEQ ID NO: 137596 - DNA, 26 bp, Artificial sequence
  SiRNA target sequence
agataaaaaaattggccttaacttac

SEQ ID NO: 137597 - DNA, 26 bp, Artificial sequence
  SiRNA target sequence
gataaaaaaattggccttaacttact

SEQ ID NO: 137598 - DNA, 26 bp, Artificial sequence
  SiRNA target sequence
ataaaaaaattggccttaacttactt

SEQ ID NO: 137599 - DNA, 26 bp, Artificial sequence
  SiRNA target sequence
taaaaaaattggccttaacttacttc

SEQ ID NO: 137600 - DNA, 26 bp, Artificial sequence
  SiRNA target sequence
aaaaaaattggccttaacttacttcg

SEQ ID NO: 137601 - DNA, 26 bp, Artificial sequence
  SiRNA target sequence
aaaaaattggccttaacttacttcgg

SEQ ID NO: 137602 - DNA, 26 bp, Artificial sequence
  SiRNA target sequence
aaaaattggccttaacttacttcggg

SEQ ID NO: 137603 - DNA, 26 bp, Artificial sequence
  SiRNA target sequence
aaaattggccttaacttacttcggga

SEQ ID NO: 137604 - DNA, 26 bp, Artificial sequence
  SiRNA target sequence
aaattggccttaacttacttcgggaa

SEQ ID NO: 137605 - DNA, 26 bp, Artificial sequence
  SiRNA target sequence
aattggccttaacttacttcgggaaa

SEQ ID NO: 137606 - DNA, 26 bp, Artificial sequence
  SiRNA target sequence
attggccttaacttacttcgggaaac

SEQ ID NO: 137607 - DNA, 26 bp, Artificial sequence
  SiRNA target sequence
ttggccttaacttacttcgggaaaca

SEQ ID NO: 137608 - DNA, 26 bp, Artificial sequence
  SiRNA target sequence
tggccttaacttacttcgggaaacaa

SEQ ID NO: 137609 - DNA, 26 bp, Artificial sequence
  SiRNA target sequence
ggccttaacttacttcgggaaacaag

SEQ ID NO: 137610 - DNA, 26 bp, Artificial sequence
  SiRNA target sequence
gccttaacttacttcgggaaacaaga

SEQ ID NO: 137611 - DNA, 26 bp, Artificial sequence
  SiRNA target sequence
ccttaacttacttcgggaaacaagac

SEQ ID NO: 137612 - DNA, 26 bp, Artificial sequence
  SiRNA target sequence
cttaacttacttcgggaaacaagact

SEQ ID NO: 137613 - DNA, 26 bp, Artificial sequence
  SiRNA target sequence
ttaacttacttcgggaaacaagactt

SEQ ID NO: 137614 - DNA, 26 bp, Artificial sequence
  SiRNA target sequence
taacttacttcgggaaacaagacttg

SEQ ID NO: 137615 - DNA, 26 bp, Artificial sequence
  SiRNA target sequence
aacttacttcgggaaacaagacttgc

SEQ ID NO: 137616 - DNA, 26 bp, Artificial sequence
  SiRNA target sequence
acttacttcgggaaacaagacttgca

SEQ ID NO: 137617 - DNA, 26 bp, Artificial sequence
  SiRNA target sequence
cttacttcgggaaacaagacttgcaa

SEQ ID NO: 137618 - DNA, 26 bp, Artificial sequence
  SiRNA target sequence
ttacttcgggaaacaagacttgcaat

SEQ ID NO: 137619 - DNA, 26 bp, Artificial sequence
  SiRNA target sequence
tacttcgggaaacaagacttgcaatg

SEQ ID NO: 137620 - DNA, 26 bp, Artificial sequence
  SiRNA target sequence
acttcgggaaacaagacttgcaatgg

SEQ ID NO: 137621 - DNA, 26 bp, Artificial sequence
  SiRNA target sequence
cttcgggaaacaagacttgcaatgga

SEQ ID NO: 137622 - DNA, 26 bp, Artificial sequence
  SiRNA target sequence
ttcgggaaacaagacttgcaatggaa

SEQ ID NO: 137623 - DNA, 26 bp, Artificial sequence
  SiRNA target sequence
tcgggaaacaagacttgcaatggaaa

SEQ ID NO: 137624 - DNA, 26 bp, Artificial sequence
  SiRNA target sequence
cgggaaacaagacttgcaatggaaac

SEQ ID NO: 137625 - DNA, 26 bp, Artificial sequence
  SiRNA target sequence
gggaaacaagacttgcaatggaaacc

SEQ ID NO: 137626 - DNA, 26 bp, Artificial sequence
  SiRNA target sequence
ggaaacaagacttgcaatggaaacct

SEQ ID NO: 137627 - DNA, 26 bp, Artificial sequence
  SiRNA target sequence
gaaacaagacttgcaatggaaaccta

SEQ ID NO: 137628 - DNA, 26 bp, Artificial sequence
  SiRNA target sequence
aaacaagacttgcaatggaaacctaa

SEQ ID NO: 137629 - DNA, 26 bp, Artificial sequence
  SiRNA target sequence
aacaagacttgcaatggaaacctaaa

SEQ ID NO: 137630 - DNA, 26 bp, Artificial sequence
  SiRNA target sequence
acaagacttgcaatggaaacctaaaa

SEQ ID NO: 137631 - DNA, 26 bp, Artificial sequence
  SiRNA target sequence
caagacttgcaatggaaacctaaaag

SEQ ID NO: 137632 - DNA, 26 bp, Artificial sequence
  SiRNA target sequence
aagacttgcaatggaaacctaaaagt

SEQ ID NO: 137633 - DNA, 26 bp, Artificial sequence
  SiRNA target sequence
agacttgcaatggaaacctaaaagtc

SEQ ID NO: 137634 - DNA, 26 bp, Artificial sequence
  SiRNA target sequence
gacttgcaatggaaacctaaaagtcg

SEQ ID NO: 137635 - DNA, 26 bp, Artificial sequence
  SiRNA target sequence
acttgcaatggaaacctaaaagtcgg

SEQ ID NO: 137636 - DNA, 26 bp, Artificial sequence
  SiRNA target sequence
cttgcaatggaaacctaaaagtcggt

SEQ ID NO: 137637 - DNA, 26 bp, Artificial sequence
  SiRNA target sequence
ttgcaatggaaacctaaaagtcggtc

SEQ ID NO: 137638 - DNA, 26 bp, Artificial sequence
  SiRNA target sequence
tgcaatggaaacctaaaagtcggtca

SEQ ID NO: 137639 - DNA, 26 bp, Artificial sequence
  SiRNA target sequence
gcaatggaaacctaaaagtcggtcag

SEQ ID NO: 137640 - DNA, 26 bp, Artificial sequence
  SiRNA target sequence
caatggaaacctaaaagtcggtcaga

SEQ ID NO: 137641 - DNA, 26 bp, Artificial sequence
  SiRNA target sequence
aatggaaacctaaaagtcggtcagaa

SEQ ID NO: 137642 - DNA, 26 bp, Artificial sequence
  SiRNA target sequence
atggaaacctaaaagtcggtcagaaa

SEQ ID NO: 137643 - DNA, 26 bp, Artificial sequence
  SiRNA target sequence
tggaaacctaaaagtcggtcagaaat

SEQ ID NO: 137644 - DNA, 26 bp, Artificial sequence
  SiRNA target sequence
ggaaacctaaaagtcggtcagaaatt

SEQ ID NO: 137645 - DNA, 26 bp, Artificial sequence
  SiRNA target sequence
gaaacctaaaagtcggtcagaaatta

SEQ ID NO: 137646 - DNA, 26 bp, Artificial sequence
  SiRNA target sequence
aaacctaaaagtcggtcagaaattat

SEQ ID NO: 137647 - DNA, 26 bp, Artificial sequence
  SiRNA target sequence
aacctaaaagtcggtcagaaattatt

SEQ ID NO: 137648 - DNA, 26 bp, Artificial sequence
  SiRNA target sequence
acctaaaagtcggtcagaaattatta

SEQ ID NO: 137649 - DNA, 26 bp, Artificial sequence
  SiRNA target sequence
cctaaaagtcggtcagaaattattaa

SEQ ID NO: 137650 - DNA, 26 bp, Artificial sequence
  SiRNA target sequence
ctaaaagtcggtcagaaattattaac

SEQ ID NO: 137651 - DNA, 26 bp, Artificial sequence
  SiRNA target sequence
taaaagtcggtcagaaattattaacg

SEQ ID NO: 137652 - DNA, 26 bp, Artificial sequence
  SiRNA target sequence
aaaagtcggtcagaaattattaacga

SEQ ID NO: 137653 - DNA, 26 bp, Artificial sequence
  SiRNA target sequence
aaagtcggtcagaaattattaacgat

SEQ ID NO: 137654 - DNA, 26 bp, Artificial sequence
  SiRNA target sequence
aagtcggtcagaaattattaacgatt

SEQ ID NO: 137655 - DNA, 26 bp, Artificial sequence
  SiRNA target sequence
agtcggtcagaaattattaacgattt

SEQ ID NO: 137656 - DNA, 26 bp, Artificial sequence
  SiRNA target sequence
gtcggtcagaaattattaacgattta

SEQ ID NO: 137657 - DNA, 26 bp, Artificial sequence
  SiRNA target sequence
tcggtcagaaattattaacgatttaa

SEQ ID NO: 137658 - DNA, 26 bp, Artificial sequence
  SiRNA target sequence
cggtcagaaattattaacgatttaaa

SEQ ID NO: 137659 - DNA, 26 bp, Artificial sequence
  SiRNA target sequence
ggtcagaaattattaacgatttaaaa

SEQ ID NO: 137660 - DNA, 26 bp, Artificial sequence
  SiRNA target sequence
gtcagaaattattaacgatttaaaaa

SEQ ID NO: 137661 - DNA, 26 bp, Artificial sequence
  SiRNA target sequence
tcagaaattattaacgatttaaaaaa

SEQ ID NO: 137662 - DNA, 26 bp, Artificial sequence
  SiRNA target sequence
cagaaattattaacgatttaaaaaat

SEQ ID NO: 137663 - DNA, 26 bp, Artificial sequence
  SiRNA target sequence
agaaattattaacgatttaaaaaata

SEQ ID NO: 137664 - DNA, 26 bp, Artificial sequence
  SiRNA target sequence
gaaattattaacgatttaaaaaatac

SEQ ID NO: 137665 - DNA, 26 bp, Artificial sequence
  SiRNA target sequence
aaattattaacgatttaaaaaataca

SEQ ID NO: 137666 - DNA, 26 bp, Artificial sequence
  SiRNA target sequence
aattattaacgatttaaaaaatacaa

SEQ ID NO: 137667 - DNA, 26 bp, Artificial sequence
  SiRNA target sequence
attattaacgatttaaaaaatacaaa

SEQ ID NO: 137668 - DNA, 26 bp, Artificial sequence
  SiRNA target sequence
ttattaacgatttaaaaaatacaaac

SEQ ID NO: 137669 - DNA, 26 bp, Artificial sequence
  SiRNA target sequence
tattaacgatttaaaaaatacaaact

SEQ ID NO: 137670 - DNA, 26 bp, Artificial sequence
  SiRNA target sequence
attaacgatttaaaaaatacaaactt

SEQ ID NO: 137671 - DNA, 26 bp, Artificial sequence
  SiRNA target sequence
ttaacgatttaaaaaatacaaacttt

SEQ ID NO: 137672 - DNA, 26 bp, Artificial sequence
  SiRNA target sequence
taacgatttaaaaaatacaaactttg

SEQ ID NO: 137673 - DNA, 26 bp, Artificial sequence
  SiRNA target sequence
aacgatttaaaaaatacaaactttga

SEQ ID NO: 137674 - DNA, 26 bp, Artificial sequence
  SiRNA target sequence
acgatttaaaaaatacaaactttgac

SEQ ID NO: 137675 - DNA, 26 bp, Artificial sequence
  SiRNA target sequence
cgatttaaaaaatacaaactttgaca

SEQ ID NO: 137676 - DNA, 26 bp, Artificial sequence
  SiRNA target sequence
gatttaaaaaatacaaactttgacat

SEQ ID NO: 137677 - DNA, 26 bp, Artificial sequence
  SiRNA target sequence
atttaaaaaatacaaactttgacata

SEQ ID NO: 137678 - DNA, 26 bp, Artificial sequence
  SiRNA target sequence
tttaaaaaatacaaactttgacatat

SEQ ID NO: 137679 - DNA, 26 bp, Artificial sequence
  SiRNA target sequence
ttaaaaaatacaaactttgacatatt

SEQ ID NO: 137680 - DNA, 26 bp, Artificial sequence
  SiRNA target sequence
taaaaaatacaaactttgacatattg

SEQ ID NO: 137681 - DNA, 26 bp, Artificial sequence
  SiRNA target sequence
aaaaaatacaaactttgacatattga

SEQ ID NO: 137682 - DNA, 26 bp, Artificial sequence
  SiRNA target sequence
aaaaatacaaactttgacatattgat

SEQ ID NO: 137683 - DNA, 26 bp, Artificial sequence
  SiRNA target sequence
aaaatacaaactttgacatattgatt

SEQ ID NO: 137684 - DNA, 26 bp, Artificial sequence
  SiRNA target sequence
aaatacaaactttgacatattgatta

SEQ ID NO: 137685 - DNA, 26 bp, Artificial sequence
  SiRNA target sequence
aatacaaactttgacatattgattat

SEQ ID NO: 137686 - DNA, 26 bp, Artificial sequence
  SiRNA target sequence
atacaaactttgacatattgattatt

SEQ ID NO: 137687 - DNA, 26 bp, Artificial sequence
  SiRNA target sequence
tacaaactttgacatattgattattg

SEQ ID NO: 137688 - DNA, 26 bp, Artificial sequence
  SiRNA target sequence
acaaactttgacatattgattattgg

SEQ ID NO: 137689 - DNA, 26 bp, Artificial sequence
  SiRNA target sequence
caaactttgacatattgattattggt

SEQ ID NO: 137690 - DNA, 26 bp, Artificial sequence
  SiRNA target sequence
aaactttgacatattgattattggtg

SEQ ID NO: 137691 - DNA, 26 bp, Artificial sequence
  SiRNA target sequence
aactttgacatattgattattggtgg

SEQ ID NO: 137692 - DNA, 26 bp, Artificial sequence
  SiRNA target sequence
actttgacatattgattattggtggc

SEQ ID NO: 137693 - DNA, 26 bp, Artificial sequence
  SiRNA target sequence
ctttgacatattgattattggtggcg

SEQ ID NO: 137694 - DNA, 26 bp, Artificial sequence
  SiRNA target sequence
tttgacatattgattattggtggcgg

SEQ ID NO: 137695 - DNA, 26 bp, Artificial sequence
  SiRNA target sequence
ttgacatattgattattggtggcggt

SEQ ID NO: 137696 - DNA, 26 bp, Artificial sequence
  SiRNA target sequence
tgacatattgattattggtggcggtt

SEQ ID NO: 137697 - DNA, 26 bp, Artificial sequence
  SiRNA target sequence
gacatattgattattggtggcggttc

SEQ ID NO: 137698 - DNA, 26 bp, Artificial sequence
  SiRNA target sequence
acatattgattattggtggcggttca

SEQ ID NO: 137699 - DNA, 26 bp, Artificial sequence
  SiRNA target sequence
catattgattattggtggcggttcaa

SEQ ID NO: 137700 - DNA, 26 bp, Artificial sequence
  SiRNA target sequence
atattgattattggtggcggttcaac

SEQ ID NO: 137701 - DNA, 26 bp, Artificial sequence
  SiRNA target sequence
tattgattattggtggcggttcaacg

SEQ ID NO: 137702 - DNA, 26 bp, Artificial sequence
  SiRNA target sequence
attgattattggtggcggttcaacgg

SEQ ID NO: 137703 - DNA, 26 bp, Artificial sequence
  SiRNA target sequence
ttgattattggtggcggttcaacggg

SEQ ID NO: 137704 - DNA, 26 bp, Artificial sequence
  SiRNA target sequence
tgattattggtggcggttcaacggga

SEQ ID NO: 137705 - DNA, 26 bp, Artificial sequence
  SiRNA target sequence
gattattggtggcggttcaacgggaa

SEQ ID NO: 137706 - DNA, 26 bp, Artificial sequence
  SiRNA target sequence
attattggtggcggttcaacgggaat

SEQ ID NO: 137707 - DNA, 26 bp, Artificial sequence
  SiRNA target sequence
ttattggtggcggttcaacgggaatg

SEQ ID NO: 137708 - DNA, 26 bp, Artificial sequence
  SiRNA target sequence
tattggtggcggttcaacgggaatgg

SEQ ID NO: 137709 - DNA, 26 bp, Artificial sequence
  SiRNA target sequence
attggtggcggttcaacgggaatggg

SEQ ID NO: 137710 - DNA, 26 bp, Artificial sequence
  SiRNA target sequence
ttggtggcggttcaacgggaatggga

SEQ ID NO: 137711 - DNA, 26 bp, Artificial sequence
  SiRNA target sequence
tggtggcggttcaacgggaatgggat

SEQ ID NO: 137712 - DNA, 26 bp, Artificial sequence
  SiRNA target sequence
ggtggcggttcaacgggaatgggatg

SEQ ID NO: 137713 - DNA, 26 bp, Artificial sequence
  SiRNA target sequence
gtggcggttcaacgggaatgggatgt

SEQ ID NO: 137714 - DNA, 26 bp, Artificial sequence
  SiRNA target sequence
tggcggttcaacgggaatgggatgtg

SEQ ID NO: 137715 - DNA, 26 bp, Artificial sequence
  SiRNA target sequence
ggcggttcaacgggaatgggatgtgc

SEQ ID NO: 137716 - DNA, 26 bp, Artificial sequence
  SiRNA target sequence
gcggttcaacgggaatgggatgtgca

SEQ ID NO: 137717 - DNA, 26 bp, Artificial sequence
  SiRNA target sequence
cggttcaacgggaatgggatgtgcaa

SEQ ID NO: 137718 - DNA, 26 bp, Artificial sequence
  SiRNA target sequence
ggttcaacgggaatgggatgtgcaat

SEQ ID NO: 137719 - DNA, 26 bp, Artificial sequence
  SiRNA target sequence
gttcaacgggaatgggatgtgcaatc

SEQ ID NO: 137720 - DNA, 26 bp, Artificial sequence
  SiRNA target sequence
ttcaacgggaatgggatgtgcaatcg

SEQ ID NO: 137721 - DNA, 26 bp, Artificial sequence
  SiRNA target sequence
tcaacgggaatgggatgtgcaatcga

SEQ ID NO: 137722 - DNA, 26 bp, Artificial sequence
  SiRNA target sequence
caacgggaatgggatgtgcaatcgaa

SEQ ID NO: 137723 - DNA, 26 bp, Artificial sequence
  SiRNA target sequence
aacgggaatgggatgtgcaatcgaag

SEQ ID NO: 137724 - DNA, 26 bp, Artificial sequence
  SiRNA target sequence
acgggaatgggatgtgcaatcgaagc

SEQ ID NO: 137725 - DNA, 26 bp, Artificial sequence
  SiRNA target sequence
cgggaatgggatgtgcaatcgaagca

SEQ ID NO: 137726 - DNA, 26 bp, Artificial sequence
  SiRNA target sequence
gggaatgggatgtgcaatcgaagcag

SEQ ID NO: 137727 - DNA, 26 bp, Artificial sequence
  SiRNA target sequence
ggaatgggatgtgcaatcgaagcagc

SEQ ID NO: 137728 - DNA, 26 bp, Artificial sequence
  SiRNA target sequence
gaatgggatgtgcaatcgaagcagct

SEQ ID NO: 137729 - DNA, 26 bp, Artificial sequence
  SiRNA target sequence
aatgggatgtgcaatcgaagcagcta

SEQ ID NO: 137730 - DNA, 26 bp, Artificial sequence
  SiRNA target sequence
atgggatgtgcaatcgaagcagctac

SEQ ID NO: 137731 - DNA, 26 bp, Artificial sequence
  SiRNA target sequence
tgggatgtgcaatcgaagcagctaca

SEQ ID NO: 137732 - DNA, 26 bp, Artificial sequence
  SiRNA target sequence
gggatgtgcaatcgaagcagctacac

SEQ ID NO: 137733 - DNA, 26 bp, Artificial sequence
  SiRNA target sequence
ggatgtgcaatcgaagcagctacacg

SEQ ID NO: 137734 - DNA, 26 bp, Artificial sequence
  SiRNA target sequence
gatgtgcaatcgaagcagctacacga

SEQ ID NO: 137735 - DNA, 26 bp, Artificial sequence
  SiRNA target sequence
atgtgcaatcgaagcagctacacgag

SEQ ID NO: 137736 - DNA, 26 bp, Artificial sequence
  SiRNA target sequence
tgtgcaatcgaagcagctacacgagg

SEQ ID NO: 137737 - DNA, 26 bp, Artificial sequence
  SiRNA target sequence
gtgcaatcgaagcagctacacgaggt

SEQ ID NO: 137738 - DNA, 26 bp, Artificial sequence
  SiRNA target sequence
tgcaatcgaagcagctacacgaggta

SEQ ID NO: 137739 - DNA, 26 bp, Artificial sequence
  SiRNA target sequence
gcaatcgaagcagctacacgaggtat

SEQ ID NO: 137740 - DNA, 26 bp, Artificial sequence
  SiRNA target sequence
caatcgaagcagctacacgaggtata

SEQ ID NO: 137741 - DNA, 26 bp, Artificial sequence
  SiRNA target sequence
aatcgaagcagctacacgaggtataa

SEQ ID NO: 137742 - DNA, 26 bp, Artificial sequence
  SiRNA target sequence
atcgaagcagctacacgaggtataag

SEQ ID NO: 137743 - DNA, 26 bp, Artificial sequence
  SiRNA target sequence
tcgaagcagctacacgaggtataagt

SEQ ID NO: 137744 - DNA, 26 bp, Artificial sequence
  SiRNA target sequence
cgaagcagctacacgaggtataagtg

SEQ ID NO: 137745 - DNA, 26 bp, Artificial sequence
  SiRNA target sequence
gaagcagctacacgaggtataagtgt

SEQ ID NO: 137746 - DNA, 26 bp, Artificial sequence
  SiRNA target sequence
aagcagctacacgaggtataagtgtt

SEQ ID NO: 137747 - DNA, 26 bp, Artificial sequence
  SiRNA target sequence
agcagctacacgaggtataagtgttg

SEQ ID NO: 137748 - DNA, 26 bp, Artificial sequence
  SiRNA target sequence
gcagctacacgaggtataagtgttgg

SEQ ID NO: 137749 - DNA, 26 bp, Artificial sequence
  SiRNA target sequence
cagctacacgaggtataagtgttggc

SEQ ID NO: 137750 - DNA, 26 bp, Artificial sequence
  SiRNA target sequence
agctacacgaggtataagtgttggcc

SEQ ID NO: 137751 - DNA, 26 bp, Artificial sequence
  SiRNA target sequence
gctacacgaggtataagtgttggcct

SEQ ID NO: 137752 - DNA, 26 bp, Artificial sequence
  SiRNA target sequence
ctacacgaggtataagtgttggcctg

SEQ ID NO: 137753 - DNA, 26 bp, Artificial sequence
  SiRNA target sequence
tacacgaggtataagtgttggcctga

SEQ ID NO: 137754 - DNA, 26 bp, Artificial sequence
  SiRNA target sequence
acacgaggtataagtgttggcctgat

SEQ ID NO: 137755 - DNA, 26 bp, Artificial sequence
  SiRNA target sequence
cacgaggtataagtgttggcctgata

SEQ ID NO: 137756 - DNA, 26 bp, Artificial sequence
  SiRNA target sequence
acgaggtataagtgttggcctgatag

SEQ ID NO: 137757 - DNA, 26 bp, Artificial sequence
  SiRNA target sequence
cgaggtataagtgttggcctgataga

SEQ ID NO: 137758 - DNA, 26 bp, Artificial sequence
  SiRNA target sequence
gaggtataagtgttggcctgatagaa

SEQ ID NO: 137759 - DNA, 26 bp, Artificial sequence
  SiRNA target sequence
aggtataagtgttggcctgatagaag

SEQ ID NO: 137760 - DNA, 26 bp, Artificial sequence
  SiRNA target sequence
ggtataagtgttggcctgatagaagc

SEQ ID NO: 137761 - DNA, 26 bp, Artificial sequence
  SiRNA target sequence
gtataagtgttggcctgatagaagca

SEQ ID NO: 137762 - DNA, 26 bp, Artificial sequence
  SiRNA target sequence
tataagtgttggcctgatagaagcac

SEQ ID NO: 137763 - DNA, 26 bp, Artificial sequence
  SiRNA target sequence
ataagtgttggcctgatagaagcaca

SEQ ID NO: 137764 - DNA, 26 bp, Artificial sequence
  SiRNA target sequence
taagtgttggcctgatagaagcacat

SEQ ID NO: 137765 - DNA, 26 bp, Artificial sequence
  SiRNA target sequence
aagtgttggcctgatagaagcacatg

SEQ ID NO: 137766 - DNA, 26 bp, Artificial sequence
  SiRNA target sequence
agtgttggcctgatagaagcacatga

SEQ ID NO: 137767 - DNA, 26 bp, Artificial sequence
  SiRNA target sequence
gtgttggcctgatagaagcacatgat

SEQ ID NO: 137768 - DNA, 26 bp, Artificial sequence
  SiRNA target sequence
tgttggcctgatagaagcacatgatt

SEQ ID NO: 137769 - DNA, 26 bp, Artificial sequence
  SiRNA target sequence
gttggcctgatagaagcacatgattt

SEQ ID NO: 137770 - DNA, 26 bp, Artificial sequence
  SiRNA target sequence
ttggcctgatagaagcacatgatttt

SEQ ID NO: 137771 - DNA, 26 bp, Artificial sequence
  SiRNA target sequence
tggcctgatagaagcacatgattttg

SEQ ID NO: 137772 - DNA, 26 bp, Artificial sequence
  SiRNA target sequence
ggcctgatagaagcacatgattttgg

SEQ ID NO: 137773 - DNA, 26 bp, Artificial sequence
  SiRNA target sequence
gcctgatagaagcacatgattttggt

SEQ ID NO: 137774 - DNA, 26 bp, Artificial sequence
  SiRNA target sequence
cctgatagaagcacatgattttggtt

SEQ ID NO: 137775 - DNA, 26 bp, Artificial sequence
  SiRNA target sequence
ctgatagaagcacatgattttggttc

SEQ ID NO: 137776 - DNA, 26 bp, Artificial sequence
  SiRNA target sequence
tgatagaagcacatgattttggttcg

SEQ ID NO: 137777 - DNA, 26 bp, Artificial sequence
  SiRNA target sequence
gatagaagcacatgattttggttcgg

SEQ ID NO: 137778 - DNA, 26 bp, Artificial sequence
  SiRNA target sequence
atagaagcacatgattttggttcggg

SEQ ID NO: 137779 - DNA, 26 bp, Artificial sequence
  SiRNA target sequence
tagaagcacatgattttggttcgggc

SEQ ID NO: 137780 - DNA, 26 bp, Artificial sequence
  SiRNA target sequence
agaagcacatgattttggttcgggca

SEQ ID NO: 137781 - DNA, 26 bp, Artificial sequence
  SiRNA target sequence
gaagcacatgattttggttcgggcac

SEQ ID NO: 137782 - DNA, 26 bp, Artificial sequence
  SiRNA target sequence
aagcacatgattttggttcgggcacg

SEQ ID NO: 137783 - DNA, 26 bp, Artificial sequence
  SiRNA target sequence
agcacatgattttggttcgggcacga

SEQ ID NO: 137784 - DNA, 26 bp, Artificial sequence
  SiRNA target sequence
gcacatgattttggttcgggcacgag

SEQ ID NO: 137785 - DNA, 26 bp, Artificial sequence
  SiRNA target sequence
cacatgattttggttcgggcacgagt

SEQ ID NO: 137786 - DNA, 26 bp, Artificial sequence
  SiRNA target sequence
acatgattttggttcgggcacgagtt

SEQ ID NO: 137787 - DNA, 26 bp, Artificial sequence
  SiRNA target sequence
catgattttggttcgggcacgagttc

SEQ ID NO: 137788 - DNA, 26 bp, Artificial sequence
  SiRNA target sequence
atgattttggttcgggcacgagttca

SEQ ID NO: 137789 - DNA, 26 bp, Artificial sequence
  SiRNA target sequence
tgattttggttcgggcacgagttcaa

SEQ ID NO: 137790 - DNA, 26 bp, Artificial sequence
  SiRNA target sequence
gattttggttcgggcacgagttcaaa

SEQ ID NO: 137791 - DNA, 26 bp, Artificial sequence
  SiRNA target sequence
attttggttcgggcacgagttcaaaa

SEQ ID NO: 137792 - DNA, 26 bp, Artificial sequence
  SiRNA target sequence
ttttggttcgggcacgagttcaaaat

SEQ ID NO: 137793 - DNA, 26 bp, Artificial sequence
  SiRNA target sequence
tttggttcgggcacgagttcaaaatc

SEQ ID NO: 137794 - DNA, 26 bp, Artificial sequence
  SiRNA target sequence
ttggttcgggcacgagttcaaaatct

SEQ ID NO: 137795 - DNA, 26 bp, Artificial sequence
  SiRNA target sequence
tggttcgggcacgagttcaaaatcta

SEQ ID NO: 137796 - DNA, 26 bp, Artificial sequence
  SiRNA target sequence
ggttcgggcacgagttcaaaatctac

SEQ ID NO: 137797 - DNA, 26 bp, Artificial sequence
  SiRNA target sequence
gttcgggcacgagttcaaaatctaca

SEQ ID NO: 137798 - DNA, 26 bp, Artificial sequence
  SiRNA target sequence
ttcgggcacgagttcaaaatctacaa

SEQ ID NO: 137799 - DNA, 26 bp, Artificial sequence
  SiRNA target sequence
tcgggcacgagttcaaaatctacaaa

SEQ ID NO: 137800 - DNA, 26 bp, Artificial sequence
  SiRNA target sequence
cgggcacgagttcaaaatctacaaaa

SEQ ID NO: 137801 - DNA, 26 bp, Artificial sequence
  SiRNA target sequence
gggcacgagttcaaaatctacaaaac

SEQ ID NO: 137802 - DNA, 26 bp, Artificial sequence
  SiRNA target sequence
ggcacgagttcaaaatctacaaaact

SEQ ID NO: 137803 - DNA, 26 bp, Artificial sequence
  SiRNA target sequence
gcacgagttcaaaatctacaaaactt

SEQ ID NO: 137804 - DNA, 26 bp, Artificial sequence
  SiRNA target sequence
cacgagttcaaaatctacaaaacttt

SEQ ID NO: 137805 - DNA, 26 bp, Artificial sequence
  SiRNA target sequence
acgagttcaaaatctacaaaactttt

SEQ ID NO: 137806 - DNA, 26 bp, Artificial sequence
  SiRNA target sequence
cgagttcaaaatctacaaaacttttt

SEQ ID NO: 137807 - DNA, 26 bp, Artificial sequence
  SiRNA target sequence
gagttcaaaatctacaaaactttttc

SEQ ID NO: 137808 - DNA, 26 bp, Artificial sequence
  SiRNA target sequence
agttcaaaatctacaaaactttttca

SEQ ID NO: 137809 - DNA, 26 bp, Artificial sequence
  SiRNA target sequence
gttcaaaatctacaaaactttttcat

SEQ ID NO: 137810 - DNA, 26 bp, Artificial sequence
  SiRNA target sequence
ttcaaaatctacaaaactttttcatg

SEQ ID NO: 137811 - DNA, 26 bp, Artificial sequence
  SiRNA target sequence
tcaaaatctacaaaactttttcatgg

SEQ ID NO: 137812 - DNA, 26 bp, Artificial sequence
  SiRNA target sequence
caaaatctacaaaactttttcatggc

SEQ ID NO: 137813 - DNA, 26 bp, Artificial sequence
  SiRNA target sequence
aaaatctacaaaactttttcatggcg

SEQ ID NO: 137814 - DNA, 26 bp, Artificial sequence
  SiRNA target sequence
aaatctacaaaactttttcatggcgg

SEQ ID NO: 137815 - DNA, 26 bp, Artificial sequence
  SiRNA target sequence
aatctacaaaactttttcatggcggt

SEQ ID NO: 137816 - DNA, 26 bp, Artificial sequence
  SiRNA target sequence
atctacaaaactttttcatggcggtg

SEQ ID NO: 137817 - DNA, 26 bp, Artificial sequence
  SiRNA target sequence
tctacaaaactttttcatggcggtgt

SEQ ID NO: 137818 - DNA, 26 bp, Artificial sequence
  SiRNA target sequence
ctacaaaactttttcatggcggtgta

SEQ ID NO: 137819 - DNA, 26 bp, Artificial sequence
  SiRNA target sequence
tacaaaactttttcatggcggtgtac

SEQ ID NO: 137820 - DNA, 26 bp, Artificial sequence
  SiRNA target sequence
acaaaactttttcatggcggtgtacg

SEQ ID NO: 137821 - DNA, 26 bp, Artificial sequence
  SiRNA target sequence
caaaactttttcatggcggtgtacgc

SEQ ID NO: 137822 - DNA, 26 bp, Artificial sequence
  SiRNA target sequence
aaaactttttcatggcggtgtacgct

SEQ ID NO: 137823 - DNA, 26 bp, Artificial sequence
  SiRNA target sequence
aaactttttcatggcggtgtacgcta

SEQ ID NO: 137824 - DNA, 26 bp, Artificial sequence
  SiRNA target sequence
aactttttcatggcggtgtacgctac

SEQ ID NO: 137825 - DNA, 26 bp, Artificial sequence
  SiRNA target sequence
actttttcatggcggtgtacgctacc

SEQ ID NO: 137826 - DNA, 26 bp, Artificial sequence
  SiRNA target sequence
ctttttcatggcggtgtacgctacct

SEQ ID NO: 137827 - DNA, 26 bp, Artificial sequence
  SiRNA target sequence
tttttcatggcggtgtacgctacctt

SEQ ID NO: 137828 - DNA, 26 bp, Artificial sequence
  SiRNA target sequence
ttttcatggcggtgtacgctaccttg

SEQ ID NO: 137829 - DNA, 26 bp, Artificial sequence
  SiRNA target sequence
tttcatggcggtgtacgctaccttga

SEQ ID NO: 137830 - DNA, 26 bp, Artificial sequence
  SiRNA target sequence
ttcatggcggtgtacgctaccttgaa

SEQ ID NO: 137831 - DNA, 26 bp, Artificial sequence
  SiRNA target sequence
tcatggcggtgtacgctaccttgaaa

SEQ ID NO: 137832 - DNA, 26 bp, Artificial sequence
  SiRNA target sequence
catggcggtgtacgctaccttgaaaa

SEQ ID NO: 137833 - DNA, 26 bp, Artificial sequence
  SiRNA target sequence
atggcggtgtacgctaccttgaaaaa

SEQ ID NO: 137834 - DNA, 26 bp, Artificial sequence
  SiRNA target sequence
tggcggtgtacgctaccttgaaaaag

SEQ ID NO: 137835 - DNA, 26 bp, Artificial sequence
  SiRNA target sequence
ggcggtgtacgctaccttgaaaaagc

SEQ ID NO: 137836 - DNA, 26 bp, Artificial sequence
  SiRNA target sequence
gcggtgtacgctaccttgaaaaagct

SEQ ID NO: 137837 - DNA, 26 bp, Artificial sequence
  SiRNA target sequence
cggtgtacgctaccttgaaaaagctg

SEQ ID NO: 137838 - DNA, 26 bp, Artificial sequence
  SiRNA target sequence
ggtgtacgctaccttgaaaaagctgt

SEQ ID NO: 137839 - DNA, 26 bp, Artificial sequence
  SiRNA target sequence
gtgtacgctaccttgaaaaagctgtt

SEQ ID NO: 137840 - DNA, 26 bp, Artificial sequence
  SiRNA target sequence
tgtacgctaccttgaaaaagctgtta

SEQ ID NO: 137841 - DNA, 26 bp, Artificial sequence
  SiRNA target sequence
gtacgctaccttgaaaaagctgttaa

SEQ ID NO: 137842 - DNA, 26 bp, Artificial sequence
  SiRNA target sequence
tacgctaccttgaaaaagctgttaat

SEQ ID NO: 137843 - DNA, 26 bp, Artificial sequence
  SiRNA target sequence
acgctaccttgaaaaagctgttaatg

SEQ ID NO: 137844 - DNA, 26 bp, Artificial sequence
  SiRNA target sequence
cgctaccttgaaaaagctgttaatga

SEQ ID NO: 137845 - DNA, 26 bp, Artificial sequence
  SiRNA target sequence
gctaccttgaaaaagctgttaatgat

SEQ ID NO: 137846 - DNA, 26 bp, Artificial sequence
  SiRNA target sequence
ctaccttgaaaaagctgttaatgatt

SEQ ID NO: 137847 - DNA, 26 bp, Artificial sequence
  SiRNA target sequence
taccttgaaaaagctgttaatgattt

SEQ ID NO: 137848 - DNA, 26 bp, Artificial sequence
  SiRNA target sequence
accttgaaaaagctgttaatgattta

SEQ ID NO: 137849 - DNA, 26 bp, Artificial sequence
  SiRNA target sequence
ccttgaaaaagctgttaatgatttag

SEQ ID NO: 137850 - DNA, 26 bp, Artificial sequence
  SiRNA target sequence
cttgaaaaagctgttaatgatttaga

SEQ ID NO: 137851 - DNA, 26 bp, Artificial sequence
  SiRNA target sequence
ttgaaaaagctgttaatgatttagat

SEQ ID NO: 137852 - DNA, 26 bp, Artificial sequence
  SiRNA target sequence
tgaaaaagctgttaatgatttagata

SEQ ID NO: 137853 - DNA, 26 bp, Artificial sequence
  SiRNA target sequence
gaaaaagctgttaatgatttagatag

SEQ ID NO: 137854 - DNA, 26 bp, Artificial sequence
  SiRNA target sequence
aaaaagctgttaatgatttagataga

SEQ ID NO: 137855 - DNA, 26 bp, Artificial sequence
  SiRNA target sequence
aaaagctgttaatgatttagatagat

SEQ ID NO: 137856 - DNA, 26 bp, Artificial sequence
  SiRNA target sequence
aaagctgttaatgatttagatagatc

SEQ ID NO: 137857 - DNA, 26 bp, Artificial sequence
  SiRNA target sequence
aagctgttaatgatttagatagatct

SEQ ID NO: 137858 - DNA, 26 bp, Artificial sequence
  SiRNA target sequence
agctgttaatgatttagatagatctc

SEQ ID NO: 137859 - DNA, 26 bp, Artificial sequence
  SiRNA target sequence
gctgttaatgatttagatagatctca

SEQ ID NO: 137860 - DNA, 26 bp, Artificial sequence
  SiRNA target sequence
ctgttaatgatttagatagatctcag

SEQ ID NO: 137861 - DNA, 26 bp, Artificial sequence
  SiRNA target sequence
tgttaatgatttagatagatctcagt

SEQ ID NO: 137862 - DNA, 26 bp, Artificial sequence
  SiRNA target sequence
gttaatgatttagatagatctcagtt

SEQ ID NO: 137863 - DNA, 26 bp, Artificial sequence
  SiRNA target sequence
ttaatgatttagatagatctcagttt

SEQ ID NO: 137864 - DNA, 26 bp, Artificial sequence
  SiRNA target sequence
taatgatttagatagatctcagtttg

SEQ ID NO: 137865 - DNA, 26 bp, Artificial sequence
  SiRNA target sequence
aatgatttagatagatctcagtttga

SEQ ID NO: 137866 - DNA, 26 bp, Artificial sequence
  SiRNA target sequence
atgatttagatagatctcagtttgac

SEQ ID NO: 137867 - DNA, 26 bp, Artificial sequence
  SiRNA target sequence
tgatttagatagatctcagtttgact

SEQ ID NO: 137868 - DNA, 26 bp, Artificial sequence
  SiRNA target sequence
gatttagatagatctcagtttgactt

SEQ ID NO: 137869 - DNA, 26 bp, Artificial sequence
  SiRNA target sequence
atttagatagatctcagtttgacttg

SEQ ID NO: 137870 - DNA, 26 bp, Artificial sequence
  SiRNA target sequence
tttagatagatctcagtttgacttgg

SEQ ID NO: 137871 - DNA, 26 bp, Artificial sequence
  SiRNA target sequence
ttagatagatctcagtttgacttggt

SEQ ID NO: 137872 - DNA, 26 bp, Artificial sequence
  SiRNA target sequence
tagatagatctcagtttgacttggta

SEQ ID NO: 137873 - DNA, 26 bp, Artificial sequence
  SiRNA target sequence
agatagatctcagtttgacttggtat

SEQ ID NO: 137874 - DNA, 26 bp, Artificial sequence
  SiRNA target sequence
gatagatctcagtttgacttggtatc

SEQ ID NO: 137875 - DNA, 26 bp, Artificial sequence
  SiRNA target sequence
atagatctcagtttgacttggtatct

SEQ ID NO: 137876 - DNA, 26 bp, Artificial sequence
  SiRNA target sequence
tagatctcagtttgacttggtatctg

SEQ ID NO: 137877 - DNA, 26 bp, Artificial sequence
  SiRNA target sequence
agatctcagtttgacttggtatctga

SEQ ID NO: 137878 - DNA, 26 bp, Artificial sequence
  SiRNA target sequence
gatctcagtttgacttggtatctgaa

SEQ ID NO: 137879 - DNA, 26 bp, Artificial sequence
  SiRNA target sequence
atctcagtttgacttggtatctgaag

SEQ ID NO: 137880 - DNA, 26 bp, Artificial sequence
  SiRNA target sequence
tctcagtttgacttggtatctgaagc

SEQ ID NO: 137881 - DNA, 26 bp, Artificial sequence
  SiRNA target sequence
ctcagtttgacttggtatctgaagca

SEQ ID NO: 137882 - DNA, 26 bp, Artificial sequence
  SiRNA target sequence
tcagtttgacttggtatctgaagcat

SEQ ID NO: 137883 - DNA, 26 bp, Artificial sequence
  SiRNA target sequence
cagtttgacttggtatctgaagcatt

SEQ ID NO: 137884 - DNA, 26 bp, Artificial sequence
  SiRNA target sequence
agtttgacttggtatctgaagcatta

SEQ ID NO: 137885 - DNA, 26 bp, Artificial sequence
  SiRNA target sequence
gtttgacttggtatctgaagcattaa

SEQ ID NO: 137886 - DNA, 26 bp, Artificial sequence
  SiRNA target sequence
tttgacttggtatctgaagcattaag

SEQ ID NO: 137887 - DNA, 26 bp, Artificial sequence
  SiRNA target sequence
ttgacttggtatctgaagcattaagt

SEQ ID NO: 137888 - DNA, 26 bp, Artificial sequence
  SiRNA target sequence
tgacttggtatctgaagcattaagtg

SEQ ID NO: 137889 - DNA, 26 bp, Artificial sequence
  SiRNA target sequence
gacttggtatctgaagcattaagtga

SEQ ID NO: 137890 - DNA, 26 bp, Artificial sequence
  SiRNA target sequence
acttggtatctgaagcattaagtgaa

SEQ ID NO: 137891 - DNA, 26 bp, Artificial sequence
  SiRNA target sequence
cttggtatctgaagcattaagtgaac

SEQ ID NO: 137892 - DNA, 26 bp, Artificial sequence
  SiRNA target sequence
ttggtatctgaagcattaagtgaacg

SEQ ID NO: 137893 - DNA, 26 bp, Artificial sequence
  SiRNA target sequence
tggtatctgaagcattaagtgaacga

SEQ ID NO: 137894 - DNA, 26 bp, Artificial sequence
  SiRNA target sequence
ggtatctgaagcattaagtgaacgaa

SEQ ID NO: 137895 - DNA, 26 bp, Artificial sequence
  SiRNA target sequence
gtatctgaagcattaagtgaacgaaa

SEQ ID NO: 137896 - DNA, 26 bp, Artificial sequence
  SiRNA target sequence
tatctgaagcattaagtgaacgaaaa

SEQ ID NO: 137897 - DNA, 26 bp, Artificial sequence
  SiRNA target sequence
atctgaagcattaagtgaacgaaaaa

SEQ ID NO: 137898 - DNA, 26 bp, Artificial sequence
  SiRNA target sequence
tctgaagcattaagtgaacgaaaaat

SEQ ID NO: 137899 - DNA, 26 bp, Artificial sequence
  SiRNA target sequence
ctgaagcattaagtgaacgaaaaatt

SEQ ID NO: 137900 - DNA, 26 bp, Artificial sequence
  SiRNA target sequence
tgaagcattaagtgaacgaaaaattg

SEQ ID NO: 137901 - DNA, 26 bp, Artificial sequence
  SiRNA target sequence
gaagcattaagtgaacgaaaaattgt

SEQ ID NO: 137902 - DNA, 26 bp, Artificial sequence
  SiRNA target sequence
aagcattaagtgaacgaaaaattgtt

SEQ ID NO: 137903 - DNA, 26 bp, Artificial sequence
  SiRNA target sequence
agcattaagtgaacgaaaaattgtta

SEQ ID NO: 137904 - DNA, 26 bp, Artificial sequence
  SiRNA target sequence
gcattaagtgaacgaaaaattgttat

SEQ ID NO: 137905 - DNA, 26 bp, Artificial sequence
  SiRNA target sequence
cattaagtgaacgaaaaattgttatg

SEQ ID NO: 137906 - DNA, 26 bp, Artificial sequence
  SiRNA target sequence
attaagtgaacgaaaaattgttatga

SEQ ID NO: 137907 - DNA, 26 bp, Artificial sequence
  SiRNA target sequence
ttaagtgaacgaaaaattgttatgaa

SEQ ID NO: 137908 - DNA, 26 bp, Artificial sequence
  SiRNA target sequence
taagtgaacgaaaaattgttatgaat

SEQ ID NO: 137909 - DNA, 26 bp, Artificial sequence
  SiRNA target sequence
aagtgaacgaaaaattgttatgaata

SEQ ID NO: 137910 - DNA, 26 bp, Artificial sequence
  SiRNA target sequence
agtgaacgaaaaattgttatgaatat

SEQ ID NO: 137911 - DNA, 26 bp, Artificial sequence
  SiRNA target sequence
gtgaacgaaaaattgttatgaatatg

SEQ ID NO: 137912 - DNA, 26 bp, Artificial sequence
  SiRNA target sequence
tgaacgaaaaattgttatgaatatgt

SEQ ID NO: 137913 - DNA, 26 bp, Artificial sequence
  SiRNA target sequence
gaacgaaaaattgttatgaatatgtg

SEQ ID NO: 137914 - DNA, 26 bp, Artificial sequence
  SiRNA target sequence
aacgaaaaattgttatgaatatgtgt

SEQ ID NO: 137915 - DNA, 26 bp, Artificial sequence
  SiRNA target sequence
acgaaaaattgttatgaatatgtgtc

SEQ ID NO: 137916 - DNA, 26 bp, Artificial sequence
  SiRNA target sequence
cgaaaaattgttatgaatatgtgtcc

SEQ ID NO: 137917 - DNA, 26 bp, Artificial sequence
  SiRNA target sequence
gaaaaattgttatgaatatgtgtcct

SEQ ID NO: 137918 - DNA, 26 bp, Artificial sequence
  SiRNA target sequence
aaaaattgttatgaatatgtgtcctt

SEQ ID NO: 137919 - DNA, 26 bp, Artificial sequence
  SiRNA target sequence
aaaattgttatgaatatgtgtccttt

SEQ ID NO: 137920 - DNA, 26 bp, Artificial sequence
  SiRNA target sequence
aaattgttatgaatatgtgtcctttt

SEQ ID NO: 137921 - DNA, 26 bp, Artificial sequence
  SiRNA target sequence
aattgttatgaatatgtgtccttttc

SEQ ID NO: 137922 - DNA, 26 bp, Artificial sequence
  SiRNA target sequence
attgttatgaatatgtgtccttttct

SEQ ID NO: 137923 - DNA, 26 bp, Artificial sequence
  SiRNA target sequence
ttgttatgaatatgtgtccttttcta

SEQ ID NO: 137924 - DNA, 26 bp, Artificial sequence
  SiRNA target sequence
tgttatgaatatgtgtccttttctag

SEQ ID NO: 137925 - DNA, 26 bp, Artificial sequence
  SiRNA target sequence
gttatgaatatgtgtccttttctagt

SEQ ID NO: 137926 - DNA, 26 bp, Artificial sequence
  SiRNA target sequence
ttatgaatatgtgtccttttctagta

SEQ ID NO: 137927 - DNA, 26 bp, Artificial sequence
  SiRNA target sequence
tatgaatatgtgtccttttctagtaa

SEQ ID NO: 137928 - DNA, 26 bp, Artificial sequence
  SiRNA target sequence
atgaatatgtgtccttttctagtaag

SEQ ID NO: 137929 - DNA, 26 bp, Artificial sequence
  SiRNA target sequence
tgaatatgtgtccttttctagtaagg

SEQ ID NO: 137930 - DNA, 26 bp, Artificial sequence
  SiRNA target sequence
gaatatgtgtccttttctagtaaggt

SEQ ID NO: 137931 - DNA, 26 bp, Artificial sequence
  SiRNA target sequence
aatatgtgtccttttctagtaaggtc

SEQ ID NO: 137932 - DNA, 26 bp, Artificial sequence
  SiRNA target sequence
atatgtgtccttttctagtaaggtcg

SEQ ID NO: 137933 - DNA, 26 bp, Artificial sequence
  SiRNA target sequence
tatgtgtccttttctagtaaggtcga

SEQ ID NO: 137934 - DNA, 26 bp, Artificial sequence
  SiRNA target sequence
atgtgtccttttctagtaaggtcgat

SEQ ID NO: 137935 - DNA, 26 bp, Artificial sequence
  SiRNA target sequence
tgtgtccttttctagtaaggtcgatg

SEQ ID NO: 137936 - DNA, 26 bp, Artificial sequence
  SiRNA target sequence
gtgtccttttctagtaaggtcgatgg

SEQ ID NO: 137937 - DNA, 26 bp, Artificial sequence
  SiRNA target sequence
tgtccttttctagtaaggtcgatgga

SEQ ID NO: 137938 - DNA, 26 bp, Artificial sequence
  SiRNA target sequence
gtccttttctagtaaggtcgatggaa

SEQ ID NO: 137939 - DNA, 26 bp, Artificial sequence
  SiRNA target sequence
tccttttctagtaaggtcgatggaaa

SEQ ID NO: 137940 - DNA, 26 bp, Artificial sequence
  SiRNA target sequence
ccttttctagtaaggtcgatggaaat

SEQ ID NO: 137941 - DNA, 26 bp, Artificial sequence
  SiRNA target sequence
cttttctagtaaggtcgatggaaata

SEQ ID NO: 137942 - DNA, 26 bp, Artificial sequence
  SiRNA target sequence
ttttctagtaaggtcgatggaaatat

SEQ ID NO: 137943 - DNA, 26 bp, Artificial sequence
  SiRNA target sequence
tttctagtaaggtcgatggaaatatt

SEQ ID NO: 137944 - DNA, 26 bp, Artificial sequence
  SiRNA target sequence
ttctagtaaggtcgatggaaatatta

SEQ ID NO: 137945 - DNA, 26 bp, Artificial sequence
  SiRNA target sequence
tctagtaaggtcgatggaaatattat

SEQ ID NO: 137946 - DNA, 26 bp, Artificial sequence
  SiRNA target sequence
ctagtaaggtcgatggaaatattatt

SEQ ID NO: 137947 - DNA, 26 bp, Artificial sequence
  SiRNA target sequence
tagtaaggtcgatggaaatattattt

SEQ ID NO: 137948 - DNA, 26 bp, Artificial sequence
  SiRNA target sequence
agtaaggtcgatggaaatattatttc

SEQ ID NO: 137949 - DNA, 26 bp, Artificial sequence
  SiRNA target sequence
gtaaggtcgatggaaatattatttcc

SEQ ID NO: 137950 - DNA, 26 bp, Artificial sequence
  SiRNA target sequence
taaggtcgatggaaatattatttccg

SEQ ID NO: 137951 - DNA, 26 bp, Artificial sequence
  SiRNA target sequence
aaggtcgatggaaatattatttccgg

SEQ ID NO: 137952 - DNA, 26 bp, Artificial sequence
  SiRNA target sequence
aggtcgatggaaatattatttccggt

SEQ ID NO: 137953 - DNA, 26 bp, Artificial sequence
  SiRNA target sequence
ggtcgatggaaatattatttccggtt

SEQ ID NO: 137954 - DNA, 26 bp, Artificial sequence
  SiRNA target sequence
gtcgatggaaatattatttccggttt

SEQ ID NO: 137955 - DNA, 26 bp, Artificial sequence
  SiRNA target sequence
tcgatggaaatattatttccggttta

SEQ ID NO: 137956 - DNA, 26 bp, Artificial sequence
  SiRNA target sequence
cgatggaaatattatttccggtttat

SEQ ID NO: 137957 - DNA, 26 bp, Artificial sequence
  SiRNA target sequence
gatggaaatattatttccggtttata

SEQ ID NO: 137958 - DNA, 26 bp, Artificial sequence
  SiRNA target sequence
atggaaatattatttccggtttataa

SEQ ID NO: 137959 - DNA, 26 bp, Artificial sequence
  SiRNA target sequence
tggaaatattatttccggtttataaa

SEQ ID NO: 137960 - DNA, 26 bp, Artificial sequence
  SiRNA target sequence
ggaaatattatttccggtttataaaa

SEQ ID NO: 137961 - DNA, 26 bp, Artificial sequence
  SiRNA target sequence
gaaatattatttccggtttataaaag

SEQ ID NO: 137962 - DNA, 26 bp, Artificial sequence
  SiRNA target sequence
aaatattatttccggtttataaaagg

SEQ ID NO: 137963 - DNA, 26 bp, Artificial sequence
  SiRNA target sequence
aatattatttccggtttataaaaggc

SEQ ID NO: 137964 - DNA, 26 bp, Artificial sequence
  SiRNA target sequence
atattatttccggtttataaaaggct

SEQ ID NO: 137965 - DNA, 26 bp, Artificial sequence
  SiRNA target sequence
tattatttccggtttataaaaggctt

SEQ ID NO: 137966 - DNA, 26 bp, Artificial sequence
  SiRNA target sequence
attatttccggtttataaaaggcttt

SEQ ID NO: 137967 - DNA, 26 bp, Artificial sequence
  SiRNA target sequence
ttatttccggtttataaaaggctttt

SEQ ID NO: 137968 - DNA, 26 bp, Artificial sequence
  SiRNA target sequence
tatttccggtttataaaaggctttta

SEQ ID NO: 137969 - DNA, 26 bp, Artificial sequence
  SiRNA target sequence
atttccggtttataaaaggcttttaa

SEQ ID NO: 137970 - DNA, 26 bp, Artificial sequence
  SiRNA target sequence
tttccggtttataaaaggcttttaat

SEQ ID NO: 137971 - DNA, 26 bp, Artificial sequence
  SiRNA target sequence
ttccggtttataaaaggcttttaatt

SEQ ID NO: 137972 - DNA, 26 bp, Artificial sequence
  SiRNA target sequence
tccggtttataaaaggcttttaattc

SEQ ID NO: 137973 - DNA, 26 bp, Artificial sequence
  SiRNA target sequence
ccggtttataaaaggcttttaattcc

SEQ ID NO: 137974 - DNA, 26 bp, Artificial sequence
  SiRNA target sequence
cggtttataaaaggcttttaattcct

SEQ ID NO: 137975 - DNA, 26 bp, Artificial sequence
  SiRNA target sequence
ggtttataaaaggcttttaattcctt

SEQ ID NO: 137976 - DNA, 26 bp, Artificial sequence
  SiRNA target sequence
gtttataaaaggcttttaattcctta

SEQ ID NO: 137977 - DNA, 26 bp, Artificial sequence
  SiRNA target sequence
tttataaaaggcttttaattccttac

SEQ ID NO: 137978 - DNA, 26 bp, Artificial sequence
  SiRNA target sequence
ttataaaaggcttttaattccttact

SEQ ID NO: 137979 - DNA, 26 bp, Artificial sequence
  SiRNA target sequence
tataaaaggcttttaattccttacta

SEQ ID NO: 137980 - DNA, 26 bp, Artificial sequence
  SiRNA target sequence
ataaaaggcttttaattccttactac

SEQ ID NO: 137981 - DNA, 26 bp, Artificial sequence
  SiRNA target sequence
taaaaggcttttaattccttactact

SEQ ID NO: 137982 - DNA, 26 bp, Artificial sequence
  SiRNA target sequence
aaaaggcttttaattccttactacta

SEQ ID NO: 137983 - DNA, 26 bp, Artificial sequence
  SiRNA target sequence
aaaggcttttaattccttactactat

SEQ ID NO: 137984 - DNA, 26 bp, Artificial sequence
  SiRNA target sequence
aaggcttttaattccttactactata

SEQ ID NO: 137985 - DNA, 26 bp, Artificial sequence
  SiRNA target sequence
aggcttttaattccttactactatat

SEQ ID NO: 137986 - DNA, 26 bp, Artificial sequence
  SiRNA target sequence
ggcttttaattccttactactatatt

SEQ ID NO: 137987 - DNA, 26 bp, Artificial sequence
  SiRNA target sequence
gcttttaattccttactactatattg

SEQ ID NO: 137988 - DNA, 26 bp, Artificial sequence
  SiRNA target sequence
cttttaattccttactactatattgg

SEQ ID NO: 137989 - DNA, 26 bp, Artificial sequence
  SiRNA target sequence
ttttaattccttactactatattggc

SEQ ID NO: 137990 - DNA, 26 bp, Artificial sequence
  SiRNA target sequence
tttaattccttactactatattggcc

SEQ ID NO: 137991 - DNA, 26 bp, Artificial sequence
  SiRNA target sequence
ttaattccttactactatattggcct

SEQ ID NO: 137992 - DNA, 26 bp, Artificial sequence
  SiRNA target sequence
taattccttactactatattggcctt

SEQ ID NO: 137993 - DNA, 26 bp, Artificial sequence
  SiRNA target sequence
aattccttactactatattggcctta

SEQ ID NO: 137994 - DNA, 26 bp, Artificial sequence
  SiRNA target sequence
attccttactactatattggccttaa

SEQ ID NO: 137995 - DNA, 26 bp, Artificial sequence
  SiRNA target sequence
ttccttactactatattggccttaaa

SEQ ID NO: 137996 - DNA, 26 bp, Artificial sequence
  SiRNA target sequence
tccttactactatattggccttaaat

SEQ ID NO: 137997 - DNA, 26 bp, Artificial sequence
  SiRNA target sequence
ccttactactatattggccttaaatt

SEQ ID NO: 137998 - DNA, 26 bp, Artificial sequence
  SiRNA target sequence
cttactactatattggccttaaattt

SEQ ID NO: 137999 - DNA, 26 bp, Artificial sequence
  SiRNA target sequence
ttactactatattggccttaaatttt

SEQ ID NO: 138000 - DNA, 26 bp, Artificial sequence
  SiRNA target sequence
tactactatattggccttaaatttta

SEQ ID NO: 138001 - DNA, 26 bp, Artificial sequence
  SiRNA target sequence
actactatattggccttaaattttat

SEQ ID NO: 138002 - DNA, 26 bp, Artificial sequence
  SiRNA target sequence
ctactatattggccttaaattttatg

SEQ ID NO: 138003 - DNA, 26 bp, Artificial sequence
  SiRNA target sequence
tactatattggccttaaattttatga

SEQ ID NO: 138004 - DNA, 26 bp, Artificial sequence
  SiRNA target sequence
actatattggccttaaattttatgat

SEQ ID NO: 138005 - DNA, 26 bp, Artificial sequence
  SiRNA target sequence
ctatattggccttaaattttatgatt

SEQ ID NO: 138006 - DNA, 26 bp, Artificial sequence
  SiRNA target sequence
tatattggccttaaattttatgattg

SEQ ID NO: 138007 - DNA, 26 bp, Artificial sequence
  SiRNA target sequence
atattggccttaaattttatgattgg

SEQ ID NO: 138008 - DNA, 26 bp, Artificial sequence
  SiRNA target sequence
tattggccttaaattttatgattgga

SEQ ID NO: 138009 - DNA, 26 bp, Artificial sequence
  SiRNA target sequence
attggccttaaattttatgattggat

SEQ ID NO: 138010 - DNA, 26 bp, Artificial sequence
  SiRNA target sequence
ttggccttaaattttatgattggatt

SEQ ID NO: 138011 - DNA, 26 bp, Artificial sequence
  SiRNA target sequence
tggccttaaattttatgattggattt

SEQ ID NO: 138012 - DNA, 26 bp, Artificial sequence
  SiRNA target sequence
ggccttaaattttatgattggatttc

SEQ ID NO: 138013 - DNA, 26 bp, Artificial sequence
  SiRNA target sequence
gccttaaattttatgattggatttct

SEQ ID NO: 138014 - DNA, 26 bp, Artificial sequence
  SiRNA target sequence
ccttaaattttatgattggatttctg

SEQ ID NO: 138015 - DNA, 26 bp, Artificial sequence
  SiRNA target sequence
cttaaattttatgattggatttctgg

SEQ ID NO: 138016 - DNA, 26 bp, Artificial sequence
  SiRNA target sequence
ttaaattttatgattggatttctggg

SEQ ID NO: 138017 - DNA, 26 bp, Artificial sequence
  SiRNA target sequence
taaattttatgattggatttctgggc

SEQ ID NO: 138018 - DNA, 26 bp, Artificial sequence
  SiRNA target sequence
aaattttatgattggatttctgggca

SEQ ID NO: 138019 - DNA, 26 bp, Artificial sequence
  SiRNA target sequence
aattttatgattggatttctgggcaa

SEQ ID NO: 138020 - DNA, 26 bp, Artificial sequence
  SiRNA target sequence
attttatgattggatttctgggcaac

SEQ ID NO: 138021 - DNA, 26 bp, Artificial sequence
  SiRNA target sequence
ttttatgattggatttctgggcaacg

SEQ ID NO: 138022 - DNA, 26 bp, Artificial sequence
  SiRNA target sequence
tttatgattggatttctgggcaacgg

SEQ ID NO: 138023 - DNA, 26 bp, Artificial sequence
  SiRNA target sequence
ttatgattggatttctgggcaacggt

SEQ ID NO: 138024 - DNA, 26 bp, Artificial sequence
  SiRNA target sequence
tatgattggatttctgggcaacggtc

SEQ ID NO: 138025 - DNA, 26 bp, Artificial sequence
  SiRNA target sequence
atgattggatttctgggcaacggtcc

SEQ ID NO: 138026 - DNA, 26 bp, Artificial sequence
  SiRNA target sequence
tgattggatttctgggcaacggtccc

SEQ ID NO: 138027 - DNA, 26 bp, Artificial sequence
  SiRNA target sequence
gattggatttctgggcaacggtccct

SEQ ID NO: 138028 - DNA, 26 bp, Artificial sequence
  SiRNA target sequence
attggatttctgggcaacggtccctt

SEQ ID NO: 138029 - DNA, 26 bp, Artificial sequence
  SiRNA target sequence
ttggatttctgggcaacggtcccttg

SEQ ID NO: 138030 - DNA, 26 bp, Artificial sequence
  SiRNA target sequence
tggatttctgggcaacggtcccttgg

SEQ ID NO: 138031 - DNA, 26 bp, Artificial sequence
  SiRNA target sequence
ggatttctgggcaacggtcccttggg

SEQ ID NO: 138032 - DNA, 26 bp, Artificial sequence
  SiRNA target sequence
gatttctgggcaacggtcccttgggc

SEQ ID NO: 138033 - DNA, 26 bp, Artificial sequence
  SiRNA target sequence
atttctgggcaacggtcccttgggcg

SEQ ID NO: 138034 - DNA, 26 bp, Artificial sequence
  SiRNA target sequence
tttctgggcaacggtcccttgggcga

SEQ ID NO: 138035 - DNA, 26 bp, Artificial sequence
  SiRNA target sequence
ttctgggcaacggtcccttgggcgaa

SEQ ID NO: 138036 - DNA, 26 bp, Artificial sequence
  SiRNA target sequence
tctgggcaacggtcccttgggcgaag

SEQ ID NO: 138037 - DNA, 26 bp, Artificial sequence
  SiRNA target sequence
ctgggcaacggtcccttgggcgaagt

SEQ ID NO: 138038 - DNA, 26 bp, Artificial sequence
  SiRNA target sequence
tgggcaacggtcccttgggcgaagta

SEQ ID NO: 138039 - DNA, 26 bp, Artificial sequence
  SiRNA target sequence
gggcaacggtcccttgggcgaagtaa

SEQ ID NO: 138040 - DNA, 26 bp, Artificial sequence
  SiRNA target sequence
ggcaacggtcccttgggcgaagtaaa

SEQ ID NO: 138041 - DNA, 26 bp, Artificial sequence
  SiRNA target sequence
gcaacggtcccttgggcgaagtaaat

SEQ ID NO: 138042 - DNA, 26 bp, Artificial sequence
  SiRNA target sequence
caacggtcccttgggcgaagtaaatt

SEQ ID NO: 138043 - DNA, 26 bp, Artificial sequence
  SiRNA target sequence
aacggtcccttgggcgaagtaaattt

SEQ ID NO: 138044 - DNA, 26 bp, Artificial sequence
  SiRNA target sequence
acggtcccttgggcgaagtaaatttt

SEQ ID NO: 138045 - DNA, 26 bp, Artificial sequence
  SiRNA target sequence
cggtcccttgggcgaagtaaattttt

SEQ ID NO: 138046 - DNA, 26 bp, Artificial sequence
  SiRNA target sequence
ggtcccttgggcgaagtaaatttttg

SEQ ID NO: 138047 - DNA, 26 bp, Artificial sequence
  SiRNA target sequence
gtcccttgggcgaagtaaatttttgt

SEQ ID NO: 138048 - DNA, 26 bp, Artificial sequence
  SiRNA target sequence
tcccttgggcgaagtaaatttttgtc

SEQ ID NO: 138049 - DNA, 26 bp, Artificial sequence
  SiRNA target sequence
cccttgggcgaagtaaatttttgtcg

SEQ ID NO: 138050 - DNA, 26 bp, Artificial sequence
  SiRNA target sequence
ccttgggcgaagtaaatttttgtcgc

SEQ ID NO: 138051 - DNA, 26 bp, Artificial sequence
  SiRNA target sequence
cttgggcgaagtaaatttttgtcgcg

SEQ ID NO: 138052 - DNA, 26 bp, Artificial sequence
  SiRNA target sequence
ttgggcgaagtaaatttttgtcgcgg

SEQ ID NO: 138053 - DNA, 26 bp, Artificial sequence
  SiRNA target sequence
tgggcgaagtaaatttttgtcgcggc

SEQ ID NO: 138054 - DNA, 26 bp, Artificial sequence
  SiRNA target sequence
gggcgaagtaaatttttgtcgcggca

SEQ ID NO: 138055 - DNA, 26 bp, Artificial sequence
  SiRNA target sequence
ggcgaagtaaatttttgtcgcggcaa

SEQ ID NO: 138056 - DNA, 26 bp, Artificial sequence
  SiRNA target sequence
gcgaagtaaatttttgtcgcggcaac

SEQ ID NO: 138057 - DNA, 26 bp, Artificial sequence
  SiRNA target sequence
cgaagtaaatttttgtcgcggcaaca

SEQ ID NO: 138058 - DNA, 26 bp, Artificial sequence
  SiRNA target sequence
gaagtaaatttttgtcgcggcaacaa

SEQ ID NO: 138059 - DNA, 26 bp, Artificial sequence
  SiRNA target sequence
aagtaaatttttgtcgcggcaacaaa

SEQ ID NO: 138060 - DNA, 26 bp, Artificial sequence
  SiRNA target sequence
agtaaatttttgtcgcggcaacaaac

SEQ ID NO: 138061 - DNA, 26 bp, Artificial sequence
  SiRNA target sequence
gtaaatttttgtcgcggcaacaaact

SEQ ID NO: 138062 - DNA, 26 bp, Artificial sequence
  SiRNA target sequence
taaatttttgtcgcggcaacaaacta

SEQ ID NO: 138063 - DNA, 26 bp, Artificial sequence
  SiRNA target sequence
aaatttttgtcgcggcaacaaactat

SEQ ID NO: 138064 - DNA, 26 bp, Artificial sequence
  SiRNA target sequence
aatttttgtcgcggcaacaaactatt

SEQ ID NO: 138065 - DNA, 26 bp, Artificial sequence
  SiRNA target sequence
atttttgtcgcggcaacaaactatta

SEQ ID NO: 138066 - DNA, 26 bp, Artificial sequence
  SiRNA target sequence
tttttgtcgcggcaacaaactattac

SEQ ID NO: 138067 - DNA, 26 bp, Artificial sequence
  SiRNA target sequence
ttttgtcgcggcaacaaactattaca

SEQ ID NO: 138068 - DNA, 26 bp, Artificial sequence
  SiRNA target sequence
tttgtcgcggcaacaaactattacaa

SEQ ID NO: 138069 - DNA, 26 bp, Artificial sequence
  SiRNA target sequence
ttgtcgcggcaacaaactattacaaa

SEQ ID NO: 138070 - DNA, 26 bp, Artificial sequence
  SiRNA target sequence
tgtcgcggcaacaaactattacaaaa

SEQ ID NO: 138071 - DNA, 26 bp, Artificial sequence
  SiRNA target sequence
gtcgcggcaacaaactattacaaaat

SEQ ID NO: 138072 - DNA, 26 bp, Artificial sequence
  SiRNA target sequence
tcgcggcaacaaactattacaaaatt

SEQ ID NO: 138073 - DNA, 26 bp, Artificial sequence
  SiRNA target sequence
cgcggcaacaaactattacaaaattt

SEQ ID NO: 138074 - DNA, 26 bp, Artificial sequence
  SiRNA target sequence
gcggcaacaaactattacaaaatttc

SEQ ID NO: 138075 - DNA, 26 bp, Artificial sequence
  SiRNA target sequence
cggcaacaaactattacaaaatttcc

SEQ ID NO: 138076 - DNA, 26 bp, Artificial sequence
  SiRNA target sequence
ggcaacaaactattacaaaatttcct

SEQ ID NO: 138077 - DNA, 26 bp, Artificial sequence
  SiRNA target sequence
gcaacaaactattacaaaatttccta

SEQ ID NO: 138078 - DNA, 26 bp, Artificial sequence
  SiRNA target sequence
caacaaactattacaaaatttcctaa

SEQ ID NO: 138079 - DNA, 26 bp, Artificial sequence
  SiRNA target sequence
aacaaactattacaaaatttcctaat

SEQ ID NO: 138080 - DNA, 26 bp, Artificial sequence
  SiRNA target sequence
acaaactattacaaaatttcctaatg

SEQ ID NO: 138081 - DNA, 26 bp, Artificial sequence
  SiRNA target sequence
caaactattacaaaatttcctaatgt

SEQ ID NO: 138082 - DNA, 26 bp, Artificial sequence
  SiRNA target sequence
aaactattacaaaatttcctaatgtg

SEQ ID NO: 138083 - DNA, 26 bp, Artificial sequence
  SiRNA target sequence
aactattacaaaatttcctaatgtga

SEQ ID NO: 138084 - DNA, 26 bp, Artificial sequence
  SiRNA target sequence
actattacaaaatttcctaatgtgag

SEQ ID NO: 138085 - DNA, 26 bp, Artificial sequence
  SiRNA target sequence
ctattacaaaatttcctaatgtgaga

SEQ ID NO: 138086 - DNA, 26 bp, Artificial sequence
  SiRNA target sequence
tattacaaaatttcctaatgtgagaa

SEQ ID NO: 138087 - DNA, 26 bp, Artificial sequence
  SiRNA target sequence
attacaaaatttcctaatgtgagaaa

SEQ ID NO: 138088 - DNA, 26 bp, Artificial sequence
  SiRNA target sequence
ttacaaaatttcctaatgtgagaaaa

SEQ ID NO: 138089 - DNA, 26 bp, Artificial sequence
  SiRNA target sequence
tacaaaatttcctaatgtgagaaaaa

SEQ ID NO: 138090 - DNA, 26 bp, Artificial sequence
  SiRNA target sequence
acaaaatttcctaatgtgagaaaaat

SEQ ID NO: 138091 - DNA, 26 bp, Artificial sequence
  SiRNA target sequence
caaaatttcctaatgtgagaaaaatc

SEQ ID NO: 138092 - DNA, 26 bp, Artificial sequence
  SiRNA target sequence
aaaatttcctaatgtgagaaaaatcg

SEQ ID NO: 138093 - DNA, 26 bp, Artificial sequence
  SiRNA target sequence
aaatttcctaatgtgagaaaaatcga

SEQ ID NO: 138094 - DNA, 26 bp, Artificial sequence
  SiRNA target sequence
aatttcctaatgtgagaaaaatcgac

SEQ ID NO: 138095 - DNA, 26 bp, Artificial sequence
  SiRNA target sequence
atttcctaatgtgagaaaaatcgacc

SEQ ID NO: 138096 - DNA, 26 bp, Artificial sequence
  SiRNA target sequence
tttcctaatgtgagaaaaatcgacct

SEQ ID NO: 138097 - DNA, 26 bp, Artificial sequence
  SiRNA target sequence
ttcctaatgtgagaaaaatcgacctt

SEQ ID NO: 138098 - DNA, 26 bp, Artificial sequence
  SiRNA target sequence
tcctaatgtgagaaaaatcgaccttg

SEQ ID NO: 138099 - DNA, 26 bp, Artificial sequence
  SiRNA target sequence
cctaatgtgagaaaaatcgaccttgt

SEQ ID NO: 138100 - DNA, 26 bp, Artificial sequence
  SiRNA target sequence
ctaatgtgagaaaaatcgaccttgta

SEQ ID NO: 138101 - DNA, 26 bp, Artificial sequence
  SiRNA target sequence
taatgtgagaaaaatcgaccttgtag

SEQ ID NO: 138102 - DNA, 26 bp, Artificial sequence
  SiRNA target sequence
aatgtgagaaaaatcgaccttgtagg

SEQ ID NO: 138103 - DNA, 26 bp, Artificial sequence
  SiRNA target sequence
atgtgagaaaaatcgaccttgtagga

SEQ ID NO: 138104 - DNA, 26 bp, Artificial sequence
  SiRNA target sequence
tgtgagaaaaatcgaccttgtaggat

SEQ ID NO: 138105 - DNA, 26 bp, Artificial sequence
  SiRNA target sequence
gtgagaaaaatcgaccttgtaggatc

SEQ ID NO: 138106 - DNA, 26 bp, Artificial sequence
  SiRNA target sequence
tgagaaaaatcgaccttgtaggatcc

SEQ ID NO: 138107 - DNA, 26 bp, Artificial sequence
  SiRNA target sequence
gagaaaaatcgaccttgtaggatccg

SEQ ID NO: 138108 - DNA, 26 bp, Artificial sequence
  SiRNA target sequence
agaaaaatcgaccttgtaggatccgt

SEQ ID NO: 138109 - DNA, 26 bp, Artificial sequence
  SiRNA target sequence
gaaaaatcgaccttgtaggatccgtt

SEQ ID NO: 138110 - DNA, 26 bp, Artificial sequence
  SiRNA target sequence
aaaaatcgaccttgtaggatccgttt

SEQ ID NO: 138111 - DNA, 26 bp, Artificial sequence
  SiRNA target sequence
aaaatcgaccttgtaggatccgtttc

SEQ ID NO: 138112 - DNA, 26 bp, Artificial sequence
  SiRNA target sequence
aaatcgaccttgtaggatccgtttcg

SEQ ID NO: 138113 - DNA, 26 bp, Artificial sequence
  SiRNA target sequence
aatcgaccttgtaggatccgtttcgt

SEQ ID NO: 138114 - DNA, 26 bp, Artificial sequence
  SiRNA target sequence
atcgaccttgtaggatccgtttcgta

SEQ ID NO: 138115 - DNA, 26 bp, Artificial sequence
  SiRNA target sequence
tcgaccttgtaggatccgtttcgtat

SEQ ID NO: 138116 - DNA, 26 bp, Artificial sequence
  SiRNA target sequence
cgaccttgtaggatccgtttcgtatc

SEQ ID NO: 138117 - DNA, 26 bp, Artificial sequence
  SiRNA target sequence
gaccttgtaggatccgtttcgtatcg

SEQ ID NO: 138118 - DNA, 26 bp, Artificial sequence
  SiRNA target sequence
accttgtaggatccgtttcgtatcgt

SEQ ID NO: 138119 - DNA, 26 bp, Artificial sequence
  SiRNA target sequence
ccttgtaggatccgtttcgtatcgtg

SEQ ID NO: 138120 - DNA, 26 bp, Artificial sequence
  SiRNA target sequence
cttgtaggatccgtttcgtatcgtga

SEQ ID NO: 138121 - DNA, 26 bp, Artificial sequence
  SiRNA target sequence
ttgtaggatccgtttcgtatcgtgat

SEQ ID NO: 138122 - DNA, 26 bp, Artificial sequence
  SiRNA target sequence
tgtaggatccgtttcgtatcgtgatg

SEQ ID NO: 138123 - DNA, 26 bp, Artificial sequence
  SiRNA target sequence
gtaggatccgtttcgtatcgtgatgg

SEQ ID NO: 138124 - DNA, 26 bp, Artificial sequence
  SiRNA target sequence
taggatccgtttcgtatcgtgatggc

SEQ ID NO: 138125 - DNA, 26 bp, Artificial sequence
  SiRNA target sequence
aggatccgtttcgtatcgtgatggcc

SEQ ID NO: 138126 - DNA, 26 bp, Artificial sequence
  SiRNA target sequence
ggatccgtttcgtatcgtgatggcca

SEQ ID NO: 138127 - DNA, 26 bp, Artificial sequence
  SiRNA target sequence
gatccgtttcgtatcgtgatggccaa

SEQ ID NO: 138128 - DNA, 26 bp, Artificial sequence
  SiRNA target sequence
atccgtttcgtatcgtgatggccaat

SEQ ID NO: 138129 - DNA, 26 bp, Artificial sequence
  SiRNA target sequence
tccgtttcgtatcgtgatggccaatt

SEQ ID NO: 138130 - DNA, 26 bp, Artificial sequence
  SiRNA target sequence
ccgtttcgtatcgtgatggccaattt

SEQ ID NO: 138131 - DNA, 26 bp, Artificial sequence
  SiRNA target sequence
cgtttcgtatcgtgatggccaatttt

SEQ ID NO: 138132 - DNA, 26 bp, Artificial sequence
  SiRNA target sequence
gtttcgtatcgtgatggccaatttta

SEQ ID NO: 138133 - DNA, 26 bp, Artificial sequence
  SiRNA target sequence
tttcgtatcgtgatggccaattttat

SEQ ID NO: 138134 - DNA, 26 bp, Artificial sequence
  SiRNA target sequence
ttcgtatcgtgatggccaattttatg

SEQ ID NO: 138135 - DNA, 26 bp, Artificial sequence
  SiRNA target sequence
tcgtatcgtgatggccaattttatga

SEQ ID NO: 138136 - DNA, 26 bp, Artificial sequence
  SiRNA target sequence
cgtatcgtgatggccaattttatgat

SEQ ID NO: 138137 - DNA, 26 bp, Artificial sequence
  SiRNA target sequence
gtatcgtgatggccaattttatgatg

SEQ ID NO: 138138 - DNA, 26 bp, Artificial sequence
  SiRNA target sequence
tatcgtgatggccaattttatgatgc

SEQ ID NO: 138139 - DNA, 26 bp, Artificial sequence
  SiRNA target sequence
atcgtgatggccaattttatgatgct

SEQ ID NO: 138140 - DNA, 26 bp, Artificial sequence
  SiRNA target sequence
tcgtgatggccaattttatgatgcta

SEQ ID NO: 138141 - DNA, 26 bp, Artificial sequence
  SiRNA target sequence
cgtgatggccaattttatgatgctaa

SEQ ID NO: 138142 - DNA, 26 bp, Artificial sequence
  SiRNA target sequence
gtgatggccaattttatgatgctaaa

SEQ ID NO: 138143 - DNA, 26 bp, Artificial sequence
  SiRNA target sequence
tgatggccaattttatgatgctaaat

SEQ ID NO: 138144 - DNA, 26 bp, Artificial sequence
  SiRNA target sequence
gatggccaattttatgatgctaaata

SEQ ID NO: 138145 - DNA, 26 bp, Artificial sequence
  SiRNA target sequence
atggccaattttatgatgctaaatac

SEQ ID NO: 138146 - DNA, 26 bp, Artificial sequence
  SiRNA target sequence
tggccaattttatgatgctaaataca

SEQ ID NO: 138147 - DNA, 26 bp, Artificial sequence
  SiRNA target sequence
ggccaattttatgatgctaaatacaa

SEQ ID NO: 138148 - DNA, 26 bp, Artificial sequence
  SiRNA target sequence
gccaattttatgatgctaaatacaat

SEQ ID NO: 138149 - DNA, 26 bp, Artificial sequence
  SiRNA target sequence
ccaattttatgatgctaaatacaatg

SEQ ID NO: 138150 - DNA, 26 bp, Artificial sequence
  SiRNA target sequence
caattttatgatgctaaatacaatgt

SEQ ID NO: 138151 - DNA, 26 bp, Artificial sequence
  SiRNA target sequence
aattttatgatgctaaatacaatgtt

SEQ ID NO: 138152 - DNA, 26 bp, Artificial sequence
  SiRNA target sequence
attttatgatgctaaatacaatgttc

SEQ ID NO: 138153 - DNA, 26 bp, Artificial sequence
  SiRNA target sequence
ttttatgatgctaaatacaatgttct

SEQ ID NO: 138154 - DNA, 26 bp, Artificial sequence
  SiRNA target sequence
tttatgatgctaaatacaatgttcta

SEQ ID NO: 138155 - DNA, 26 bp, Artificial sequence
  SiRNA target sequence
ttatgatgctaaatacaatgttctat

SEQ ID NO: 138156 - DNA, 26 bp, Artificial sequence
  SiRNA target sequence
tatgatgctaaatacaatgttctatt

SEQ ID NO: 138157 - DNA, 26 bp, Artificial sequence
  SiRNA target sequence
atgatgctaaatacaatgttctattg

SEQ ID NO: 138158 - DNA, 26 bp, Artificial sequence
  SiRNA target sequence
tgatgctaaatacaatgttctattgg

SEQ ID NO: 138159 - DNA, 26 bp, Artificial sequence
  SiRNA target sequence
gatgctaaatacaatgttctattggg

SEQ ID NO: 138160 - DNA, 26 bp, Artificial sequence
  SiRNA target sequence
atgctaaatacaatgttctattgggt

SEQ ID NO: 138161 - DNA, 26 bp, Artificial sequence
  SiRNA target sequence
tgctaaatacaatgttctattgggtg

SEQ ID NO: 138162 - DNA, 26 bp, Artificial sequence
  SiRNA target sequence
gctaaatacaatgttctattgggtgt

SEQ ID NO: 138163 - DNA, 26 bp, Artificial sequence
  SiRNA target sequence
ctaaatacaatgttctattgggtgtc

SEQ ID NO: 138164 - DNA, 26 bp, Artificial sequence
  SiRNA target sequence
taaatacaatgttctattgggtgtca

SEQ ID NO: 138165 - DNA, 26 bp, Artificial sequence
  SiRNA target sequence
aaatacaatgttctattgggtgtcac

SEQ ID NO: 138166 - DNA, 26 bp, Artificial sequence
  SiRNA target sequence
aatacaatgttctattgggtgtcaca

SEQ ID NO: 138167 - DNA, 26 bp, Artificial sequence
  SiRNA target sequence
atacaatgttctattgggtgtcacag

SEQ ID NO: 138168 - DNA, 26 bp, Artificial sequence
  SiRNA target sequence
tacaatgttctattgggtgtcacagc

SEQ ID NO: 138169 - DNA, 26 bp, Artificial sequence
  SiRNA target sequence
acaatgttctattgggtgtcacagct

SEQ ID NO: 138170 - DNA, 26 bp, Artificial sequence
  SiRNA target sequence
caatgttctattgggtgtcacagcta

SEQ ID NO: 138171 - DNA, 26 bp, Artificial sequence
  SiRNA target sequence
aatgttctattgggtgtcacagctac

SEQ ID NO: 138172 - DNA, 26 bp, Artificial sequence
  SiRNA target sequence
atgttctattgggtgtcacagctacc

SEQ ID NO: 138173 - DNA, 26 bp, Artificial sequence
  SiRNA target sequence
tgttctattgggtgtcacagctacct

SEQ ID NO: 138174 - DNA, 26 bp, Artificial sequence
  SiRNA target sequence
gttctattgggtgtcacagctaccta

SEQ ID NO: 138175 - DNA, 26 bp, Artificial sequence
  SiRNA target sequence
ttctattgggtgtcacagctacctac

SEQ ID NO: 138176 - DNA, 26 bp, Artificial sequence
  SiRNA target sequence
tctattgggtgtcacagctacctact

SEQ ID NO: 138177 - DNA, 26 bp, Artificial sequence
  SiRNA target sequence
ctattgggtgtcacagctacctacta

SEQ ID NO: 138178 - DNA, 26 bp, Artificial sequence
  SiRNA target sequence
tattgggtgtcacagctacctactat

SEQ ID NO: 138179 - DNA, 26 bp, Artificial sequence
  SiRNA target sequence
attgggtgtcacagctacctactatg

SEQ ID NO: 138180 - DNA, 26 bp, Artificial sequence
  SiRNA target sequence
ttgggtgtcacagctacctactatgg

SEQ ID NO: 138181 - DNA, 26 bp, Artificial sequence
  SiRNA target sequence
tgggtgtcacagctacctactatgga

SEQ ID NO: 138182 - DNA, 26 bp, Artificial sequence
  SiRNA target sequence
gggtgtcacagctacctactatggag

SEQ ID NO: 138183 - DNA, 26 bp, Artificial sequence
  SiRNA target sequence
ggtgtcacagctacctactatggagc

SEQ ID NO: 138184 - DNA, 26 bp, Artificial sequence
  SiRNA target sequence
gtgtcacagctacctactatggagct

SEQ ID NO: 138185 - DNA, 26 bp, Artificial sequence
  SiRNA target sequence
tgtcacagctacctactatggagctg

SEQ ID NO: 138186 - DNA, 26 bp, Artificial sequence
  SiRNA target sequence
gtcacagctacctactatggagctgt

SEQ ID NO: 138187 - DNA, 26 bp, Artificial sequence
  SiRNA target sequence
tcacagctacctactatggagctgtt

SEQ ID NO: 138188 - DNA, 26 bp, Artificial sequence
  SiRNA target sequence
cacagctacctactatggagctgttg

SEQ ID NO: 138189 - DNA, 26 bp, Artificial sequence
  SiRNA target sequence
acagctacctactatggagctgttgt

SEQ ID NO: 138190 - DNA, 26 bp, Artificial sequence
  SiRNA target sequence
cagctacctactatggagctgttgta

SEQ ID NO: 138191 - DNA, 26 bp, Artificial sequence
  SiRNA target sequence
agctacctactatggagctgttgtat

SEQ ID NO: 138192 - DNA, 26 bp, Artificial sequence
  SiRNA target sequence
gctacctactatggagctgttgtatt

SEQ ID NO: 138193 - DNA, 26 bp, Artificial sequence
  SiRNA target sequence
ctacctactatggagctgttgtatta

SEQ ID NO: 138194 - DNA, 26 bp, Artificial sequence
  SiRNA target sequence
tacctactatggagctgttgtattaa

SEQ ID NO: 138195 - DNA, 26 bp, Artificial sequence
  SiRNA target sequence
acctactatggagctgttgtattaaa

SEQ ID NO: 138196 - DNA, 26 bp, Artificial sequence
  SiRNA target sequence
cctactatggagctgttgtattaaat

SEQ ID NO: 138197 - DNA, 26 bp, Artificial sequence
  SiRNA target sequence
ctactatggagctgttgtattaaatc

SEQ ID NO: 138198 - DNA, 26 bp, Artificial sequence
  SiRNA target sequence
tactatggagctgttgtattaaatca

SEQ ID NO: 138199 - DNA, 26 bp, Artificial sequence
  SiRNA target sequence
actatggagctgttgtattaaatcat

SEQ ID NO: 138200 - DNA, 26 bp, Artificial sequence
  SiRNA target sequence
ctatggagctgttgtattaaatcatg

SEQ ID NO: 138201 - DNA, 26 bp, Artificial sequence
  SiRNA target sequence
tatggagctgttgtattaaatcatgc

SEQ ID NO: 138202 - DNA, 26 bp, Artificial sequence
  SiRNA target sequence
atggagctgttgtattaaatcatgca

SEQ ID NO: 138203 - DNA, 26 bp, Artificial sequence
  SiRNA target sequence
tggagctgttgtattaaatcatgcaa

SEQ ID NO: 138204 - DNA, 26 bp, Artificial sequence
  SiRNA target sequence
ggagctgttgtattaaatcatgcaaa

SEQ ID NO: 138205 - DNA, 26 bp, Artificial sequence
  SiRNA target sequence
gagctgttgtattaaatcatgcaaaa

SEQ ID NO: 138206 - DNA, 26 bp, Artificial sequence
  SiRNA target sequence
agctgttgtattaaatcatgcaaaat

SEQ ID NO: 138207 - DNA, 26 bp, Artificial sequence
  SiRNA target sequence
gctgttgtattaaatcatgcaaaatt

SEQ ID NO: 138208 - DNA, 26 bp, Artificial sequence
  SiRNA target sequence
ctgttgtattaaatcatgcaaaattc

SEQ ID NO: 138209 - DNA, 26 bp, Artificial sequence
  SiRNA target sequence
tgttgtattaaatcatgcaaaattct

SEQ ID NO: 138210 - DNA, 26 bp, Artificial sequence
  SiRNA target sequence
gttgtattaaatcatgcaaaattctt

SEQ ID NO: 138211 - DNA, 26 bp, Artificial sequence
  SiRNA target sequence
ttgtattaaatcatgcaaaattcttg

SEQ ID NO: 138212 - DNA, 26 bp, Artificial sequence
  SiRNA target sequence
tgtattaaatcatgcaaaattcttgt

SEQ ID NO: 138213 - DNA, 26 bp, Artificial sequence
  SiRNA target sequence
gtattaaatcatgcaaaattcttgtc

SEQ ID NO: 138214 - DNA, 26 bp, Artificial sequence
  SiRNA target sequence
tattaaatcatgcaaaattcttgtca

SEQ ID NO: 138215 - DNA, 26 bp, Artificial sequence
  SiRNA target sequence
attaaatcatgcaaaattcttgtcag

SEQ ID NO: 138216 - DNA, 26 bp, Artificial sequence
  SiRNA target sequence
ttaaatcatgcaaaattcttgtcagt

SEQ ID NO: 138217 - DNA, 26 bp, Artificial sequence
  SiRNA target sequence
taaatcatgcaaaattcttgtcagta

SEQ ID NO: 138218 - DNA, 26 bp, Artificial sequence
  SiRNA target sequence
aaatcatgcaaaattcttgtcagtaa

SEQ ID NO: 138219 - DNA, 26 bp, Artificial sequence
  SiRNA target sequence
aatcatgcaaaattcttgtcagtaac

SEQ ID NO: 138220 - DNA, 26 bp, Artificial sequence
  SiRNA target sequence
atcatgcaaaattcttgtcagtaaca

SEQ ID NO: 138221 - DNA, 26 bp, Artificial sequence
  SiRNA target sequence
tcatgcaaaattcttgtcagtaacaa

SEQ ID NO: 138222 - DNA, 26 bp, Artificial sequence
  SiRNA target sequence
catgcaaaattcttgtcagtaacaaa

SEQ ID NO: 138223 - DNA, 26 bp, Artificial sequence
  SiRNA target sequence
atgcaaaattcttgtcagtaacaaaa

SEQ ID NO: 138224 - DNA, 26 bp, Artificial sequence
  SiRNA target sequence
tgcaaaattcttgtcagtaacaaaag

SEQ ID NO: 138225 - DNA, 26 bp, Artificial sequence
  SiRNA target sequence
gcaaaattcttgtcagtaacaaaaga

SEQ ID NO: 138226 - DNA, 26 bp, Artificial sequence
  SiRNA target sequence
caaaattcttgtcagtaacaaaagat

SEQ ID NO: 138227 - DNA, 26 bp, Artificial sequence
  SiRNA target sequence
aaaattcttgtcagtaacaaaagatg

SEQ ID NO: 138228 - DNA, 26 bp, Artificial sequence
  SiRNA target sequence
aaattcttgtcagtaacaaaagatgg

SEQ ID NO: 138229 - DNA, 26 bp, Artificial sequence
  SiRNA target sequence
aattcttgtcagtaacaaaagatggc

SEQ ID NO: 138230 - DNA, 26 bp, Artificial sequence
  SiRNA target sequence
attcttgtcagtaacaaaagatggcg

SEQ ID NO: 138231 - DNA, 26 bp, Artificial sequence
  SiRNA target sequence
ttcttgtcagtaacaaaagatggcga

SEQ ID NO: 138232 - DNA, 26 bp, Artificial sequence
  SiRNA target sequence
tcttgtcagtaacaaaagatggcgat

SEQ ID NO: 138233 - DNA, 26 bp, Artificial sequence
  SiRNA target sequence
cttgtcagtaacaaaagatggcgata

SEQ ID NO: 138234 - DNA, 26 bp, Artificial sequence
  SiRNA target sequence
ttgtcagtaacaaaagatggcgataa

SEQ ID NO: 138235 - DNA, 26 bp, Artificial sequence
  SiRNA target sequence
tgtcagtaacaaaagatggcgataaa

SEQ ID NO: 138236 - DNA, 26 bp, Artificial sequence
  SiRNA target sequence
gtcagtaacaaaagatggcgataaaa

SEQ ID NO: 138237 - DNA, 26 bp, Artificial sequence
  SiRNA target sequence
tcagtaacaaaagatggcgataaaat

SEQ ID NO: 138238 - DNA, 26 bp, Artificial sequence
  SiRNA target sequence
cagtaacaaaagatggcgataaaatt

SEQ ID NO: 138239 - DNA, 26 bp, Artificial sequence
  SiRNA target sequence
agtaacaaaagatggcgataaaatta

SEQ ID NO: 138240 - DNA, 26 bp, Artificial sequence
  SiRNA target sequence
gtaacaaaagatggcgataaaattaa

SEQ ID NO: 138241 - DNA, 26 bp, Artificial sequence
  SiRNA target sequence
taacaaaagatggcgataaaattaat

SEQ ID NO: 138242 - DNA, 26 bp, Artificial sequence
  SiRNA target sequence
aacaaaagatggcgataaaattaatg

SEQ ID NO: 138243 - DNA, 26 bp, Artificial sequence
  SiRNA target sequence
acaaaagatggcgataaaattaatgg

SEQ ID NO: 138244 - DNA, 26 bp, Artificial sequence
  SiRNA target sequence
caaaagatggcgataaaattaatgga

SEQ ID NO: 138245 - DNA, 26 bp, Artificial sequence
  SiRNA target sequence
aaaagatggcgataaaattaatggaa

SEQ ID NO: 138246 - DNA, 26 bp, Artificial sequence
  SiRNA target sequence
aaagatggcgataaaattaatggaat

SEQ ID NO: 138247 - DNA, 26 bp, Artificial sequence
  SiRNA target sequence
aagatggcgataaaattaatggaatt

SEQ ID NO: 138248 - DNA, 26 bp, Artificial sequence
  SiRNA target sequence
agatggcgataaaattaatggaatta

SEQ ID NO: 138249 - DNA, 26 bp, Artificial sequence
  SiRNA target sequence
gatggcgataaaattaatggaattaa

SEQ ID NO: 138250 - DNA, 26 bp, Artificial sequence
  SiRNA target sequence
atggcgataaaattaatggaattaaa

SEQ ID NO: 138251 - DNA, 26 bp, Artificial sequence
  SiRNA target sequence
tggcgataaaattaatggaattaaat

SEQ ID NO: 138252 - DNA, 26 bp, Artificial sequence
  SiRNA target sequence
ggcgataaaattaatggaattaaatg

SEQ ID NO: 138253 - DNA, 26 bp, Artificial sequence
  SiRNA target sequence
gcgataaaattaatggaattaaatgt

SEQ ID NO: 138254 - DNA, 26 bp, Artificial sequence
  SiRNA target sequence
cgataaaattaatggaattaaatgtc

SEQ ID NO: 138255 - DNA, 26 bp, Artificial sequence
  SiRNA target sequence
gataaaattaatggaattaaatgtca

SEQ ID NO: 138256 - DNA, 26 bp, Artificial sequence
  SiRNA target sequence
ataaaattaatggaattaaatgtcaa

SEQ ID NO: 138257 - DNA, 26 bp, Artificial sequence
  SiRNA target sequence
taaaattaatggaattaaatgtcaag

SEQ ID NO: 138258 - DNA, 26 bp, Artificial sequence
  SiRNA target sequence
aaaattaatggaattaaatgtcaaga

SEQ ID NO: 138259 - DNA, 26 bp, Artificial sequence
  SiRNA target sequence
aaattaatggaattaaatgtcaagat

SEQ ID NO: 138260 - DNA, 26 bp, Artificial sequence
  SiRNA target sequence
aattaatggaattaaatgtcaagatt

SEQ ID NO: 138261 - DNA, 26 bp, Artificial sequence
  SiRNA target sequence
attaatggaattaaatgtcaagattc

SEQ ID NO: 138262 - DNA, 26 bp, Artificial sequence
  SiRNA target sequence
ttaatggaattaaatgtcaagattca

SEQ ID NO: 138263 - DNA, 26 bp, Artificial sequence
  SiRNA target sequence
taatggaattaaatgtcaagattcaa

SEQ ID NO: 138264 - DNA, 26 bp, Artificial sequence
  SiRNA target sequence
aatggaattaaatgtcaagattcaat

SEQ ID NO: 138265 - DNA, 26 bp, Artificial sequence
  SiRNA target sequence
atggaattaaatgtcaagattcaata

SEQ ID NO: 138266 - DNA, 26 bp, Artificial sequence
  SiRNA target sequence
tggaattaaatgtcaagattcaataa

SEQ ID NO: 138267 - DNA, 26 bp, Artificial sequence
  SiRNA target sequence
ggaattaaatgtcaagattcaataaa

SEQ ID NO: 138268 - DNA, 26 bp, Artificial sequence
  SiRNA target sequence
gaattaaatgtcaagattcaataaat

SEQ ID NO: 138269 - DNA, 26 bp, Artificial sequence
  SiRNA target sequence
aattaaatgtcaagattcaataaata

SEQ ID NO: 138270 - DNA, 26 bp, Artificial sequence
  SiRNA target sequence
attaaatgtcaagattcaataaataa

SEQ ID NO: 138271 - DNA, 26 bp, Artificial sequence
  SiRNA target sequence
ttaaatgtcaagattcaataaataat

SEQ ID NO: 138272 - DNA, 26 bp, Artificial sequence
  SiRNA target sequence
taaatgtcaagattcaataaataatg

SEQ ID NO: 138273 - DNA, 26 bp, Artificial sequence
  SiRNA target sequence
aaatgtcaagattcaataaataatga

SEQ ID NO: 138274 - DNA, 26 bp, Artificial sequence
  SiRNA target sequence
aatgtcaagattcaataaataatgaa

SEQ ID NO: 138275 - DNA, 26 bp, Artificial sequence
  SiRNA target sequence
atgtcaagattcaataaataatgaaa

SEQ ID NO: 138276 - DNA, 26 bp, Artificial sequence
  SiRNA target sequence
tgtcaagattcaataaataatgaaaa

SEQ ID NO: 138277 - DNA, 26 bp, Artificial sequence
  SiRNA target sequence
gtcaagattcaataaataatgaaaaa

SEQ ID NO: 138278 - DNA, 26 bp, Artificial sequence
  SiRNA target sequence
tcaagattcaataaataatgaaaaat

SEQ ID NO: 138279 - DNA, 26 bp, Artificial sequence
  SiRNA target sequence
caagattcaataaataatgaaaaatt

SEQ ID NO: 138280 - DNA, 26 bp, Artificial sequence
  SiRNA target sequence
aagattcaataaataatgaaaaattt

SEQ ID NO: 138281 - DNA, 26 bp, Artificial sequence
  SiRNA target sequence
agattcaataaataatgaaaaatttt

SEQ ID NO: 138282 - DNA, 26 bp, Artificial sequence
  SiRNA target sequence
gattcaataaataatgaaaaattttt

SEQ ID NO: 138283 - DNA, 26 bp, Artificial sequence
  SiRNA target sequence
attcaataaataatgaaaaattttta

SEQ ID NO: 138284 - DNA, 26 bp, Artificial sequence
  SiRNA target sequence
ttcaataaataatgaaaaatttttaa

SEQ ID NO: 138285 - DNA, 26 bp, Artificial sequence
  SiRNA target sequence
tcaataaataatgaaaaatttttaat

SEQ ID NO: 138286 - DNA, 26 bp, Artificial sequence
  SiRNA target sequence
caataaataatgaaaaatttttaatt

SEQ ID NO: 138287 - DNA, 26 bp, Artificial sequence
  SiRNA target sequence
aataaataatgaaaaatttttaatta

SEQ ID NO: 138288 - DNA, 26 bp, Artificial sequence
  SiRNA target sequence
ataaataatgaaaaatttttaattag

SEQ ID NO: 138289 - DNA, 26 bp, Artificial sequence
  SiRNA target sequence
taaataatgaaaaatttttaattagg

SEQ ID NO: 138290 - DNA, 26 bp, Artificial sequence
  SiRNA target sequence
aaataatgaaaaatttttaattaggt

SEQ ID NO: 138291 - DNA, 26 bp, Artificial sequence
  SiRNA target sequence
aataatgaaaaatttttaattaggtg

SEQ ID NO: 138292 - DNA, 26 bp, Artificial sequence
  SiRNA target sequence
ataatgaaaaatttttaattaggtgt

SEQ ID NO: 138293 - DNA, 26 bp, Artificial sequence
  SiRNA target sequence
taatgaaaaatttttaattaggtgta

SEQ ID NO: 138294 - DNA, 26 bp, Artificial sequence
  SiRNA target sequence
aatgaaaaatttttaattaggtgtaa

SEQ ID NO: 138295 - DNA, 26 bp, Artificial sequence
  SiRNA target sequence
atgaaaaatttttaattaggtgtaaa

SEQ ID NO: 138296 - DNA, 26 bp, Artificial sequence
  SiRNA target sequence
tgaaaaatttttaattaggtgtaaag

SEQ ID NO: 138297 - DNA, 26 bp, Artificial sequence
  SiRNA target sequence
gaaaaatttttaattaggtgtaaagt

SEQ ID NO: 138298 - DNA, 26 bp, Artificial sequence
  SiRNA target sequence
aaaaatttttaattaggtgtaaagtt

SEQ ID NO: 138299 - DNA, 26 bp, Artificial sequence
  SiRNA target sequence
aaaatttttaattaggtgtaaagttt

SEQ ID NO: 138300 - DNA, 26 bp, Artificial sequence
  SiRNA target sequence
aaatttttaattaggtgtaaagtttt

SEQ ID NO: 138301 - DNA, 26 bp, Artificial sequence
  SiRNA target sequence
aatttttaattaggtgtaaagtttta

SEQ ID NO: 138302 - DNA, 26 bp, Artificial sequence
  SiRNA target sequence
atttttaattaggtgtaaagttttaa

SEQ ID NO: 138303 - DNA, 26 bp, Artificial sequence
  SiRNA target sequence
tttttaattaggtgtaaagttttaat

SEQ ID NO: 138304 - DNA, 26 bp, Artificial sequence
  SiRNA target sequence
ttttaattaggtgtaaagttttaata

SEQ ID NO: 138305 - DNA, 26 bp, Artificial sequence
  SiRNA target sequence
tttaattaggtgtaaagttttaataa

SEQ ID NO: 138306 - DNA, 26 bp, Artificial sequence
  SiRNA target sequence
ttaattaggtgtaaagttttaataaa

SEQ ID NO: 138307 - DNA, 26 bp, Artificial sequence
  SiRNA target sequence
taattaggtgtaaagttttaataaat

SEQ ID NO: 138308 - DNA, 26 bp, Artificial sequence
  SiRNA target sequence
aattaggtgtaaagttttaataaata

SEQ ID NO: 138309 - DNA, 26 bp, Artificial sequence
  SiRNA target sequence
attaggtgtaaagttttaataaatac

SEQ ID NO: 138310 - DNA, 26 bp, Artificial sequence
  SiRNA target sequence
ttaggtgtaaagttttaataaatact

SEQ ID NO: 138311 - DNA, 26 bp, Artificial sequence
  SiRNA target sequence
taggtgtaaagttttaataaatactt

SEQ ID NO: 138312 - DNA, 26 bp, Artificial sequence
  SiRNA target sequence
aggtgtaaagttttaataaatacttc

SEQ ID NO: 138313 - DNA, 26 bp, Artificial sequence
  SiRNA target sequence
ggtgtaaagttttaataaatacttct

SEQ ID NO: 138314 - DNA, 26 bp, Artificial sequence
  SiRNA target sequence
gtgtaaagttttaataaatacttctg

SEQ ID NO: 138315 - DNA, 26 bp, Artificial sequence
  SiRNA target sequence
tgtaaagttttaataaatacttctgg

SEQ ID NO: 138316 - DNA, 26 bp, Artificial sequence
  SiRNA target sequence
gtaaagttttaataaatacttctggc

SEQ ID NO: 138317 - DNA, 26 bp, Artificial sequence
  SiRNA target sequence
taaagttttaataaatacttctggcc

SEQ ID NO: 138318 - DNA, 26 bp, Artificial sequence
  SiRNA target sequence
aaagttttaataaatacttctggccc

SEQ ID NO: 138319 - DNA, 26 bp, Artificial sequence
  SiRNA target sequence
aagttttaataaatacttctggccct

SEQ ID NO: 138320 - DNA, 26 bp, Artificial sequence
  SiRNA target sequence
agttttaataaatacttctggccctt

SEQ ID NO: 138321 - DNA, 26 bp, Artificial sequence
  SiRNA target sequence
gttttaataaatacttctggcccttt

SEQ ID NO: 138322 - DNA, 26 bp, Artificial sequence
  SiRNA target sequence
ttttaataaatacttctggccctttt

SEQ ID NO: 138323 - DNA, 26 bp, Artificial sequence
  SiRNA target sequence
tttaataaatacttctggcccttttg

SEQ ID NO: 138324 - DNA, 26 bp, Artificial sequence
  SiRNA target sequence
ttaataaatacttctggcccttttgc

SEQ ID NO: 138325 - DNA, 26 bp, Artificial sequence
  SiRNA target sequence
taataaatacttctggcccttttgct

SEQ ID NO: 138326 - DNA, 26 bp, Artificial sequence
  SiRNA target sequence
aataaatacttctggcccttttgctg

SEQ ID NO: 138327 - DNA, 26 bp, Artificial sequence
  SiRNA target sequence
ataaatacttctggcccttttgctga

SEQ ID NO: 138328 - DNA, 26 bp, Artificial sequence
  SiRNA target sequence
taaatacttctggcccttttgctgac

SEQ ID NO: 138329 - DNA, 26 bp, Artificial sequence
  SiRNA target sequence
aaatacttctggcccttttgctgacg

SEQ ID NO: 138330 - DNA, 26 bp, Artificial sequence
  SiRNA target sequence
aatacttctggcccttttgctgacga

SEQ ID NO: 138331 - DNA, 26 bp, Artificial sequence
  SiRNA target sequence
atacttctggcccttttgctgacgag

SEQ ID NO: 138332 - DNA, 26 bp, Artificial sequence
  SiRNA target sequence
tacttctggcccttttgctgacgagg

SEQ ID NO: 138333 - DNA, 26 bp, Artificial sequence
  SiRNA target sequence
acttctggcccttttgctgacgaggt

SEQ ID NO: 138334 - DNA, 26 bp, Artificial sequence
  SiRNA target sequence
cttctggcccttttgctgacgaggtt

SEQ ID NO: 138335 - DNA, 26 bp, Artificial sequence
  SiRNA target sequence
ttctggcccttttgctgacgaggttc

SEQ ID NO: 138336 - DNA, 26 bp, Artificial sequence
  SiRNA target sequence
tctggcccttttgctgacgaggttcg

SEQ ID NO: 138337 - DNA, 26 bp, Artificial sequence
  SiRNA target sequence
ctggcccttttgctgacgaggttcga

SEQ ID NO: 138338 - DNA, 26 bp, Artificial sequence
  SiRNA target sequence
tggcccttttgctgacgaggttcgaa

SEQ ID NO: 138339 - DNA, 26 bp, Artificial sequence
  SiRNA target sequence
ggcccttttgctgacgaggttcgaaa

SEQ ID NO: 138340 - DNA, 26 bp, Artificial sequence
  SiRNA target sequence
gcccttttgctgacgaggttcgaaat

SEQ ID NO: 138341 - DNA, 26 bp, Artificial sequence
  SiRNA target sequence
cccttttgctgacgaggttcgaaata

SEQ ID NO: 138342 - DNA, 26 bp, Artificial sequence
  SiRNA target sequence
ccttttgctgacgaggttcgaaatac

SEQ ID NO: 138343 - DNA, 26 bp, Artificial sequence
  SiRNA target sequence
cttttgctgacgaggttcgaaataca

SEQ ID NO: 138344 - DNA, 26 bp, Artificial sequence
  SiRNA target sequence
ttttgctgacgaggttcgaaatacat

SEQ ID NO: 138345 - DNA, 26 bp, Artificial sequence
  SiRNA target sequence
tttgctgacgaggttcgaaatacatc

SEQ ID NO: 138346 - DNA, 26 bp, Artificial sequence
  SiRNA target sequence
ttgctgacgaggttcgaaatacatca

SEQ ID NO: 138347 - DNA, 26 bp, Artificial sequence
  SiRNA target sequence
tgctgacgaggttcgaaatacatcaa

SEQ ID NO: 138348 - DNA, 26 bp, Artificial sequence
  SiRNA target sequence
gctgacgaggttcgaaatacatcaat

SEQ ID NO: 138349 - DNA, 26 bp, Artificial sequence
  SiRNA target sequence
ctgacgaggttcgaaatacatcaatt

SEQ ID NO: 138350 - DNA, 26 bp, Artificial sequence
  SiRNA target sequence
tgacgaggttcgaaatacatcaattg

SEQ ID NO: 138351 - DNA, 26 bp, Artificial sequence
  SiRNA target sequence
gacgaggttcgaaatacatcaattga

SEQ ID NO: 138352 - DNA, 26 bp, Artificial sequence
  SiRNA target sequence
acgaggttcgaaatacatcaattgaa

SEQ ID NO: 138353 - DNA, 26 bp, Artificial sequence
  SiRNA target sequence
cgaggttcgaaatacatcaattgaaa

SEQ ID NO: 138354 - DNA, 26 bp, Artificial sequence
  SiRNA target sequence
gaggttcgaaatacatcaattgaaaa

SEQ ID NO: 138355 - DNA, 26 bp, Artificial sequence
  SiRNA target sequence
aggttcgaaatacatcaattgaaaac

SEQ ID NO: 138356 - DNA, 26 bp, Artificial sequence
  SiRNA target sequence
ggttcgaaatacatcaattgaaaact

SEQ ID NO: 138357 - DNA, 26 bp, Artificial sequence
  SiRNA target sequence
gttcgaaatacatcaattgaaaactg

SEQ ID NO: 138358 - DNA, 26 bp, Artificial sequence
  SiRNA target sequence
ttcgaaatacatcaattgaaaactgt

SEQ ID NO: 138359 - DNA, 26 bp, Artificial sequence
  SiRNA target sequence
tcgaaatacatcaattgaaaactgtc

SEQ ID NO: 138360 - DNA, 26 bp, Artificial sequence
  SiRNA target sequence
cgaaatacatcaattgaaaactgtca

SEQ ID NO: 138361 - DNA, 26 bp, Artificial sequence
  SiRNA target sequence
gaaatacatcaattgaaaactgtcaa

SEQ ID NO: 138362 - DNA, 26 bp, Artificial sequence
  SiRNA target sequence
aaatacatcaattgaaaactgtcaac

SEQ ID NO: 138363 - DNA, 26 bp, Artificial sequence
  SiRNA target sequence
aatacatcaattgaaaactgtcaacc

SEQ ID NO: 138364 - DNA, 26 bp, Artificial sequence
  SiRNA target sequence
atacatcaattgaaaactgtcaacca

SEQ ID NO: 138365 - DNA, 26 bp, Artificial sequence
  SiRNA target sequence
tacatcaattgaaaactgtcaaccaa

SEQ ID NO: 138366 - DNA, 26 bp, Artificial sequence
  SiRNA target sequence
acatcaattgaaaactgtcaaccaat

SEQ ID NO: 138367 - DNA, 26 bp, Artificial sequence
  SiRNA target sequence
catcaattgaaaactgtcaaccaata

SEQ ID NO: 138368 - DNA, 26 bp, Artificial sequence
  SiRNA target sequence
atcaattgaaaactgtcaaccaatac

SEQ ID NO: 138369 - DNA, 26 bp, Artificial sequence
  SiRNA target sequence
tcaattgaaaactgtcaaccaatact

SEQ ID NO: 138370 - DNA, 26 bp, Artificial sequence
  SiRNA target sequence
caattgaaaactgtcaaccaatactc

SEQ ID NO: 138371 - DNA, 26 bp, Artificial sequence
  SiRNA target sequence
aattgaaaactgtcaaccaatactcc

SEQ ID NO: 138372 - DNA, 26 bp, Artificial sequence
  SiRNA target sequence
attgaaaactgtcaaccaatactcca

SEQ ID NO: 138373 - DNA, 26 bp, Artificial sequence
  SiRNA target sequence
ttgaaaactgtcaaccaatactccaa

SEQ ID NO: 138374 - DNA, 26 bp, Artificial sequence
  SiRNA target sequence
tgaaaactgtcaaccaatactccaac

SEQ ID NO: 138375 - DNA, 26 bp, Artificial sequence
  SiRNA target sequence
gaaaactgtcaaccaatactccaaca

SEQ ID NO: 138376 - DNA, 26 bp, Artificial sequence
  SiRNA target sequence
aaaactgtcaaccaatactccaacat

SEQ ID NO: 138377 - DNA, 26 bp, Artificial sequence
  SiRNA target sequence
aaactgtcaaccaatactccaacata

SEQ ID NO: 138378 - DNA, 26 bp, Artificial sequence
  SiRNA target sequence
aactgtcaaccaatactccaacatag

SEQ ID NO: 138379 - DNA, 26 bp, Artificial sequence
  SiRNA target sequence
actgtcaaccaatactccaacatagt

SEQ ID NO: 138380 - DNA, 26 bp, Artificial sequence
  SiRNA target sequence
ctgtcaaccaatactccaacatagtt

SEQ ID NO: 138381 - DNA, 26 bp, Artificial sequence
  SiRNA target sequence
tgtcaaccaatactccaacatagtta

SEQ ID NO: 138382 - DNA, 26 bp, Artificial sequence
  SiRNA target sequence
gtcaaccaatactccaacatagttat

SEQ ID NO: 138383 - DNA, 26 bp, Artificial sequence
  SiRNA target sequence
tcaaccaatactccaacatagttatg

SEQ ID NO: 138384 - DNA, 26 bp, Artificial sequence
  SiRNA target sequence
caaccaatactccaacatagttatgg

SEQ ID NO: 138385 - DNA, 26 bp, Artificial sequence
  SiRNA target sequence
aaccaatactccaacatagttatggt

SEQ ID NO: 138386 - DNA, 26 bp, Artificial sequence
  SiRNA target sequence
accaatactccaacatagttatggta

SEQ ID NO: 138387 - DNA, 26 bp, Artificial sequence
  SiRNA target sequence
ccaatactccaacatagttatggtac

SEQ ID NO: 138388 - DNA, 26 bp, Artificial sequence
  SiRNA target sequence
caatactccaacatagttatggtaca

SEQ ID NO: 138389 - DNA, 26 bp, Artificial sequence
  SiRNA target sequence
aatactccaacatagttatggtacac

SEQ ID NO: 138390 - DNA, 26 bp, Artificial sequence
  SiRNA target sequence
atactccaacatagttatggtacaca

SEQ ID NO: 138391 - DNA, 26 bp, Artificial sequence
  SiRNA target sequence
tactccaacatagttatggtacacat

SEQ ID NO: 138392 - DNA, 26 bp, Artificial sequence
  SiRNA target sequence
actccaacatagttatggtacacata

SEQ ID NO: 138393 - DNA, 26 bp, Artificial sequence
  SiRNA target sequence
ctccaacatagttatggtacacatat

SEQ ID NO: 138394 - DNA, 26 bp, Artificial sequence
  SiRNA target sequence
tccaacatagttatggtacacatatt

SEQ ID NO: 138395 - DNA, 26 bp, Artificial sequence
  SiRNA target sequence
ccaacatagttatggtacacatattg

SEQ ID NO: 138396 - DNA, 26 bp, Artificial sequence
  SiRNA target sequence
caacatagttatggtacacatattgt

SEQ ID NO: 138397 - DNA, 26 bp, Artificial sequence
  SiRNA target sequence
aacatagttatggtacacatattgta

SEQ ID NO: 138398 - DNA, 26 bp, Artificial sequence
  SiRNA target sequence
acatagttatggtacacatattgtag

SEQ ID NO: 138399 - DNA, 26 bp, Artificial sequence
  SiRNA target sequence
catagttatggtacacatattgtagt

SEQ ID NO: 138400 - DNA, 26 bp, Artificial sequence
  SiRNA target sequence
atagttatggtacacatattgtagtt

SEQ ID NO: 138401 - DNA, 26 bp, Artificial sequence
  SiRNA target sequence
tagttatggtacacatattgtagttc

SEQ ID NO: 138402 - DNA, 26 bp, Artificial sequence
  SiRNA target sequence
agttatggtacacatattgtagttcc

SEQ ID NO: 138403 - DNA, 26 bp, Artificial sequence
  SiRNA target sequence
gttatggtacacatattgtagttcct

SEQ ID NO: 138404 - DNA, 26 bp, Artificial sequence
  SiRNA target sequence
ttatggtacacatattgtagttcctg

SEQ ID NO: 138405 - DNA, 26 bp, Artificial sequence
  SiRNA target sequence
tatggtacacatattgtagttcctgc

SEQ ID NO: 138406 - DNA, 26 bp, Artificial sequence
  SiRNA target sequence
atggtacacatattgtagttcctgcg

SEQ ID NO: 138407 - DNA, 26 bp, Artificial sequence
  SiRNA target sequence
tggtacacatattgtagttcctgcga

SEQ ID NO: 138408 - DNA, 26 bp, Artificial sequence
  SiRNA target sequence
ggtacacatattgtagttcctgcgat

SEQ ID NO: 138409 - DNA, 26 bp, Artificial sequence
  SiRNA target sequence
gtacacatattgtagttcctgcgata

SEQ ID NO: 138410 - DNA, 26 bp, Artificial sequence
  SiRNA target sequence
tacacatattgtagttcctgcgatat

SEQ ID NO: 138411 - DNA, 26 bp, Artificial sequence
  SiRNA target sequence
acacatattgtagttcctgcgatatt

SEQ ID NO: 138412 - DNA, 26 bp, Artificial sequence
  SiRNA target sequence
cacatattgtagttcctgcgatattt

SEQ ID NO: 138413 - DNA, 26 bp, Artificial sequence
  SiRNA target sequence
acatattgtagttcctgcgatatttt

SEQ ID NO: 138414 - DNA, 26 bp, Artificial sequence
  SiRNA target sequence
catattgtagttcctgcgatattttc

SEQ ID NO: 138415 - DNA, 26 bp, Artificial sequence
  SiRNA target sequence
atattgtagttcctgcgatattttcg

SEQ ID NO: 138416 - DNA, 26 bp, Artificial sequence
  SiRNA target sequence
tattgtagttcctgcgatattttcgc

SEQ ID NO: 138417 - DNA, 26 bp, Artificial sequence
  SiRNA target sequence
attgtagttcctgcgatattttcgcc

SEQ ID NO: 138418 - DNA, 26 bp, Artificial sequence
  SiRNA target sequence
ttgtagttcctgcgatattttcgcct

SEQ ID NO: 138419 - DNA, 26 bp, Artificial sequence
  SiRNA target sequence
tgtagttcctgcgatattttcgccta

SEQ ID NO: 138420 - DNA, 26 bp, Artificial sequence
  SiRNA target sequence
gtagttcctgcgatattttcgcctaa

SEQ ID NO: 138421 - DNA, 26 bp, Artificial sequence
  SiRNA target sequence
tagttcctgcgatattttcgcctaaa

SEQ ID NO: 138422 - DNA, 26 bp, Artificial sequence
  SiRNA target sequence
agttcctgcgatattttcgcctaaaa

SEQ ID NO: 138423 - DNA, 26 bp, Artificial sequence
  SiRNA target sequence
gttcctgcgatattttcgcctaaaaa

SEQ ID NO: 138424 - DNA, 26 bp, Artificial sequence
  SiRNA target sequence
ttcctgcgatattttcgcctaaaaat

SEQ ID NO: 138425 - DNA, 26 bp, Artificial sequence
  SiRNA target sequence
tcctgcgatattttcgcctaaaaata

SEQ ID NO: 138426 - DNA, 26 bp, Artificial sequence
  SiRNA target sequence
cctgcgatattttcgcctaaaaatat

SEQ ID NO: 138427 - DNA, 26 bp, Artificial sequence
  SiRNA target sequence
ctgcgatattttcgcctaaaaatatg

SEQ ID NO: 138428 - DNA, 26 bp, Artificial sequence
  SiRNA target sequence
tgcgatattttcgcctaaaaatatgg

SEQ ID NO: 138429 - DNA, 26 bp, Artificial sequence
  SiRNA target sequence
gcgatattttcgcctaaaaatatggg

SEQ ID NO: 138430 - DNA, 26 bp, Artificial sequence
  SiRNA target sequence
cgatattttcgcctaaaaatatgggc

SEQ ID NO: 138431 - DNA, 26 bp, Artificial sequence
  SiRNA target sequence
gatattttcgcctaaaaatatgggct

SEQ ID NO: 138432 - DNA, 26 bp, Artificial sequence
  SiRNA target sequence
atattttcgcctaaaaatatgggctt

SEQ ID NO: 138433 - DNA, 26 bp, Artificial sequence
  SiRNA target sequence
tattttcgcctaaaaatatgggcttt

SEQ ID NO: 138434 - DNA, 26 bp, Artificial sequence
  SiRNA target sequence
attttcgcctaaaaatatgggctttg

SEQ ID NO: 138435 - DNA, 26 bp, Artificial sequence
  SiRNA target sequence
ttttcgcctaaaaatatgggctttgt

SEQ ID NO: 138436 - DNA, 26 bp, Artificial sequence
  SiRNA target sequence
tttcgcctaaaaatatgggctttgtt

SEQ ID NO: 138437 - DNA, 26 bp, Artificial sequence
  SiRNA target sequence
ttcgcctaaaaatatgggctttgttg

SEQ ID NO: 138438 - DNA, 26 bp, Artificial sequence
  SiRNA target sequence
tcgcctaaaaatatgggctttgttga

SEQ ID NO: 138439 - DNA, 26 bp, Artificial sequence
  SiRNA target sequence
cgcctaaaaatatgggctttgttgat

SEQ ID NO: 138440 - DNA, 26 bp, Artificial sequence
  SiRNA target sequence
gcctaaaaatatgggctttgttgatc

SEQ ID NO: 138441 - DNA, 26 bp, Artificial sequence
  SiRNA target sequence
cctaaaaatatgggctttgttgatcc

SEQ ID NO: 138442 - DNA, 26 bp, Artificial sequence
  SiRNA target sequence
ctaaaaatatgggctttgttgatcca

SEQ ID NO: 138443 - DNA, 26 bp, Artificial sequence
  SiRNA target sequence
taaaaatatgggctttgttgatccaa

SEQ ID NO: 138444 - DNA, 26 bp, Artificial sequence
  SiRNA target sequence
aaaaatatgggctttgttgatccaag

SEQ ID NO: 138445 - DNA, 26 bp, Artificial sequence
  SiRNA target sequence
aaaatatgggctttgttgatccaagc

SEQ ID NO: 138446 - DNA, 26 bp, Artificial sequence
  SiRNA target sequence
aaatatgggctttgttgatccaagca

SEQ ID NO: 138447 - DNA, 26 bp, Artificial sequence
  SiRNA target sequence
aatatgggctttgttgatccaagcac

SEQ ID NO: 138448 - DNA, 26 bp, Artificial sequence
  SiRNA target sequence
atatgggctttgttgatccaagcacg

SEQ ID NO: 138449 - DNA, 26 bp, Artificial sequence
  SiRNA target sequence
tatgggctttgttgatccaagcacga

SEQ ID NO: 138450 - DNA, 26 bp, Artificial sequence
  SiRNA target sequence
atgggctttgttgatccaagcacgag

SEQ ID NO: 138451 - DNA, 26 bp, Artificial sequence
  SiRNA target sequence
tgggctttgttgatccaagcacgagt

SEQ ID NO: 138452 - DNA, 26 bp, Artificial sequence
  SiRNA target sequence
gggctttgttgatccaagcacgagtg

SEQ ID NO: 138453 - DNA, 26 bp, Artificial sequence
  SiRNA target sequence
ggctttgttgatccaagcacgagtga

SEQ ID NO: 138454 - DNA, 26 bp, Artificial sequence
  SiRNA target sequence
gctttgttgatccaagcacgagtgat

SEQ ID NO: 138455 - DNA, 26 bp, Artificial sequence
  SiRNA target sequence
ctttgttgatccaagcacgagtgatg

SEQ ID NO: 138456 - DNA, 26 bp, Artificial sequence
  SiRNA target sequence
tttgttgatccaagcacgagtgatgg

SEQ ID NO: 138457 - DNA, 26 bp, Artificial sequence
  SiRNA target sequence
ttgttgatccaagcacgagtgatgga

SEQ ID NO: 138458 - DNA, 26 bp, Artificial sequence
  SiRNA target sequence
tgttgatccaagcacgagtgatggaa

SEQ ID NO: 138459 - DNA, 26 bp, Artificial sequence
  SiRNA target sequence
gttgatccaagcacgagtgatggaag

SEQ ID NO: 138460 - DNA, 26 bp, Artificial sequence
  SiRNA target sequence
ttgatccaagcacgagtgatggaaga

SEQ ID NO: 138461 - DNA, 26 bp, Artificial sequence
  SiRNA target sequence
tgatccaagcacgagtgatggaagaa

SEQ ID NO: 138462 - DNA, 26 bp, Artificial sequence
  SiRNA target sequence
gatccaagcacgagtgatggaagaat

SEQ ID NO: 138463 - DNA, 26 bp, Artificial sequence
  SiRNA target sequence
atccaagcacgagtgatggaagaatc

SEQ ID NO: 138464 - DNA, 26 bp, Artificial sequence
  SiRNA target sequence
tccaagcacgagtgatggaagaatcg

SEQ ID NO: 138465 - DNA, 26 bp, Artificial sequence
  SiRNA target sequence
ccaagcacgagtgatggaagaatcgc

SEQ ID NO: 138466 - DNA, 26 bp, Artificial sequence
  SiRNA target sequence
caagcacgagtgatggaagaatcgca

SEQ ID NO: 138467 - DNA, 26 bp, Artificial sequence
  SiRNA target sequence
aagcacgagtgatggaagaatcgcat

SEQ ID NO: 138468 - DNA, 26 bp, Artificial sequence
  SiRNA target sequence
agcacgagtgatggaagaatcgcatt

SEQ ID NO: 138469 - DNA, 26 bp, Artificial sequence
  SiRNA target sequence
gcacgagtgatggaagaatcgcattt

SEQ ID NO: 138470 - DNA, 26 bp, Artificial sequence
  SiRNA target sequence
cacgagtgatggaagaatcgcatttt

SEQ ID NO: 138471 - DNA, 26 bp, Artificial sequence
  SiRNA target sequence
acgagtgatggaagaatcgcattttt

SEQ ID NO: 138472 - DNA, 26 bp, Artificial sequence
  SiRNA target sequence
cgagtgatggaagaatcgcatttttt

SEQ ID NO: 138473 - DNA, 26 bp, Artificial sequence
  SiRNA target sequence
gagtgatggaagaatcgcatttttta

SEQ ID NO: 138474 - DNA, 26 bp, Artificial sequence
  SiRNA target sequence
agtgatggaagaatcgcattttttat

SEQ ID NO: 138475 - DNA, 26 bp, Artificial sequence
  SiRNA target sequence
gtgatggaagaatcgcattttttatg

SEQ ID NO: 138476 - DNA, 26 bp, Artificial sequence
  SiRNA target sequence
tgatggaagaatcgcattttttatga

SEQ ID NO: 138477 - DNA, 26 bp, Artificial sequence
  SiRNA target sequence
gatggaagaatcgcattttttatgaa

SEQ ID NO: 138478 - DNA, 26 bp, Artificial sequence
  SiRNA target sequence
atggaagaatcgcattttttatgaat

SEQ ID NO: 138479 - DNA, 26 bp, Artificial sequence
  SiRNA target sequence
tggaagaatcgcattttttatgaatt

SEQ ID NO: 138480 - DNA, 26 bp, Artificial sequence
  SiRNA target sequence
ggaagaatcgcattttttatgaattt

SEQ ID NO: 138481 - DNA, 26 bp, Artificial sequence
  SiRNA target sequence
gaagaatcgcattttttatgaatttt

SEQ ID NO: 138482 - DNA, 26 bp, Artificial sequence
  SiRNA target sequence
aagaatcgcattttttatgaatttta

SEQ ID NO: 138483 - DNA, 26 bp, Artificial sequence
  SiRNA target sequence
agaatcgcattttttatgaattttaa

SEQ ID NO: 138484 - DNA, 26 bp, Artificial sequence
  SiRNA target sequence
gaatcgcattttttatgaattttaaa

SEQ ID NO: 138485 - DNA, 26 bp, Artificial sequence
  SiRNA target sequence
aatcgcattttttatgaattttaaag

SEQ ID NO: 138486 - DNA, 26 bp, Artificial sequence
  SiRNA target sequence
atcgcattttttatgaattttaaagg

SEQ ID NO: 138487 - DNA, 26 bp, Artificial sequence
  SiRNA target sequence
tcgcattttttatgaattttaaaggt

SEQ ID NO: 138488 - DNA, 26 bp, Artificial sequence
  SiRNA target sequence
cgcattttttatgaattttaaaggta

SEQ ID NO: 138489 - DNA, 26 bp, Artificial sequence
  SiRNA target sequence
gcattttttatgaattttaaaggtaa

SEQ ID NO: 138490 - DNA, 26 bp, Artificial sequence
  SiRNA target sequence
cattttttatgaattttaaaggtaaa

SEQ ID NO: 138491 - DNA, 26 bp, Artificial sequence
  SiRNA target sequence
attttttatgaattttaaaggtaaaa

SEQ ID NO: 138492 - DNA, 26 bp, Artificial sequence
  SiRNA target sequence
ttttttatgaattttaaaggtaaaac

SEQ ID NO: 138493 - DNA, 26 bp, Artificial sequence
  SiRNA target sequence
tttttatgaattttaaaggtaaaaca

SEQ ID NO: 138494 - DNA, 26 bp, Artificial sequence
  SiRNA target sequence
ttttatgaattttaaaggtaaaacat

SEQ ID NO: 138495 - DNA, 26 bp, Artificial sequence
  SiRNA target sequence
tttatgaattttaaaggtaaaacatt

SEQ ID NO: 138496 - DNA, 26 bp, Artificial sequence
  SiRNA target sequence
ttatgaattttaaaggtaaaacattg

SEQ ID NO: 138497 - DNA, 26 bp, Artificial sequence
  SiRNA target sequence
tatgaattttaaaggtaaaacattga

SEQ ID NO: 138498 - DNA, 26 bp, Artificial sequence
  SiRNA target sequence
atgaattttaaaggtaaaacattgat

SEQ ID NO: 138499 - DNA, 26 bp, Artificial sequence
  SiRNA target sequence
tgaattttaaaggtaaaacattgatt

SEQ ID NO: 138500 - DNA, 26 bp, Artificial sequence
  SiRNA target sequence
gaattttaaaggtaaaacattgattg

SEQ ID NO: 138501 - DNA, 26 bp, Artificial sequence
  SiRNA target sequence
aattttaaaggtaaaacattgattgg

SEQ ID NO: 138502 - DNA, 26 bp, Artificial sequence
  SiRNA target sequence
attttaaaggtaaaacattgattgga

SEQ ID NO: 138503 - DNA, 26 bp, Artificial sequence
  SiRNA target sequence
ttttaaaggtaaaacattgattggag

SEQ ID NO: 138504 - DNA, 26 bp, Artificial sequence
  SiRNA target sequence
tttaaaggtaaaacattgattggagg

SEQ ID NO: 138505 - DNA, 26 bp, Artificial sequence
  SiRNA target sequence
ttaaaggtaaaacattgattggagga

SEQ ID NO: 138506 - DNA, 26 bp, Artificial sequence
  SiRNA target sequence
taaaggtaaaacattgattggaggaa

SEQ ID NO: 138507 - DNA, 26 bp, Artificial sequence
  SiRNA target sequence
aaaggtaaaacattgattggaggaac

SEQ ID NO: 138508 - DNA, 26 bp, Artificial sequence
  SiRNA target sequence
aaggtaaaacattgattggaggaaca

SEQ ID NO: 138509 - DNA, 26 bp, Artificial sequence
  SiRNA target sequence
aggtaaaacattgattggaggaacag

SEQ ID NO: 138510 - DNA, 26 bp, Artificial sequence
  SiRNA target sequence
ggtaaaacattgattggaggaacaga

SEQ ID NO: 138511 - DNA, 26 bp, Artificial sequence
  SiRNA target sequence
gtaaaacattgattggaggaacagat

SEQ ID NO: 138512 - DNA, 26 bp, Artificial sequence
  SiRNA target sequence
taaaacattgattggaggaacagatg

SEQ ID NO: 138513 - DNA, 26 bp, Artificial sequence
  SiRNA target sequence
aaaacattgattggaggaacagatgt

SEQ ID NO: 138514 - DNA, 26 bp, Artificial sequence
  SiRNA target sequence
aaacattgattggaggaacagatgtt

SEQ ID NO: 138515 - DNA, 26 bp, Artificial sequence
  SiRNA target sequence
aacattgattggaggaacagatgtta

SEQ ID NO: 138516 - DNA, 26 bp, Artificial sequence
  SiRNA target sequence
acattgattggaggaacagatgttaa

SEQ ID NO: 138517 - DNA, 26 bp, Artificial sequence
  SiRNA target sequence
cattgattggaggaacagatgttaag

SEQ ID NO: 138518 - DNA, 26 bp, Artificial sequence
  SiRNA target sequence
attgattggaggaacagatgttaagt

SEQ ID NO: 138519 - DNA, 26 bp, Artificial sequence
  SiRNA target sequence
ttgattggaggaacagatgttaagtg

SEQ ID NO: 138520 - DNA, 26 bp, Artificial sequence
  SiRNA target sequence
tgattggaggaacagatgttaagtgt

SEQ ID NO: 138521 - DNA, 26 bp, Artificial sequence
  SiRNA target sequence
gattggaggaacagatgttaagtgta

SEQ ID NO: 138522 - DNA, 26 bp, Artificial sequence
  SiRNA target sequence
attggaggaacagatgttaagtgtaa

SEQ ID NO: 138523 - DNA, 26 bp, Artificial sequence
  SiRNA target sequence
ttggaggaacagatgttaagtgtaaa

SEQ ID NO: 138524 - DNA, 26 bp, Artificial sequence
  SiRNA target sequence
tggaggaacagatgttaagtgtaaag

SEQ ID NO: 138525 - DNA, 26 bp, Artificial sequence
  SiRNA target sequence
ggaggaacagatgttaagtgtaaagt

SEQ ID NO: 138526 - DNA, 26 bp, Artificial sequence
  SiRNA target sequence
gaggaacagatgttaagtgtaaagtt

SEQ ID NO: 138527 - DNA, 26 bp, Artificial sequence
  SiRNA target sequence
aggaacagatgttaagtgtaaagttg

SEQ ID NO: 138528 - DNA, 26 bp, Artificial sequence
  SiRNA target sequence
ggaacagatgttaagtgtaaagttga

SEQ ID NO: 138529 - DNA, 26 bp, Artificial sequence
  SiRNA target sequence
gaacagatgttaagtgtaaagttgaa

SEQ ID NO: 138530 - DNA, 26 bp, Artificial sequence
  SiRNA target sequence
aacagatgttaagtgtaaagttgaag

SEQ ID NO: 138531 - DNA, 26 bp, Artificial sequence
  SiRNA target sequence
acagatgttaagtgtaaagttgaaga

SEQ ID NO: 138532 - DNA, 26 bp, Artificial sequence
  SiRNA target sequence
cagatgttaagtgtaaagttgaagat

SEQ ID NO: 138533 - DNA, 26 bp, Artificial sequence
  SiRNA target sequence
agatgttaagtgtaaagttgaagatt

SEQ ID NO: 138534 - DNA, 26 bp, Artificial sequence
  SiRNA target sequence
gatgttaagtgtaaagttgaagattt

SEQ ID NO: 138535 - DNA, 26 bp, Artificial sequence
  SiRNA target sequence
atgttaagtgtaaagttgaagattta

SEQ ID NO: 138536 - DNA, 26 bp, Artificial sequence
  SiRNA target sequence
tgttaagtgtaaagttgaagatttaa

SEQ ID NO: 138537 - DNA, 26 bp, Artificial sequence
  SiRNA target sequence
gttaagtgtaaagttgaagatttaat

SEQ ID NO: 138538 - DNA, 26 bp, Artificial sequence
  SiRNA target sequence
ttaagtgtaaagttgaagatttaata

SEQ ID NO: 138539 - DNA, 26 bp, Artificial sequence
  SiRNA target sequence
taagtgtaaagttgaagatttaataa

SEQ ID NO: 138540 - DNA, 26 bp, Artificial sequence
  SiRNA target sequence
aagtgtaaagttgaagatttaataaa

SEQ ID NO: 138541 - DNA, 26 bp, Artificial sequence
  SiRNA target sequence
agtgtaaagttgaagatttaataaaa

SEQ ID NO: 138542 - DNA, 26 bp, Artificial sequence
  SiRNA target sequence
gtgtaaagttgaagatttaataaaac

SEQ ID NO: 138543 - DNA, 26 bp, Artificial sequence
  SiRNA target sequence
tgtaaagttgaagatttaataaaacc

SEQ ID NO: 138544 - DNA, 26 bp, Artificial sequence
  SiRNA target sequence
gtaaagttgaagatttaataaaaccg

SEQ ID NO: 138545 - DNA, 26 bp, Artificial sequence
  SiRNA target sequence
taaagttgaagatttaataaaaccga

SEQ ID NO: 138546 - DNA, 26 bp, Artificial sequence
  SiRNA target sequence
aaagttgaagatttaataaaaccgac

SEQ ID NO: 138547 - DNA, 26 bp, Artificial sequence
  SiRNA target sequence
aagttgaagatttaataaaaccgact

SEQ ID NO: 138548 - DNA, 26 bp, Artificial sequence
  SiRNA target sequence
agttgaagatttaataaaaccgactg

SEQ ID NO: 138549 - DNA, 26 bp, Artificial sequence
  SiRNA target sequence
gttgaagatttaataaaaccgactga

SEQ ID NO: 138550 - DNA, 26 bp, Artificial sequence
  SiRNA target sequence
ttgaagatttaataaaaccgactgaa

SEQ ID NO: 138551 - DNA, 26 bp, Artificial sequence
  SiRNA target sequence
tgaagatttaataaaaccgactgaag

SEQ ID NO: 138552 - DNA, 26 bp, Artificial sequence
  SiRNA target sequence
gaagatttaataaaaccgactgaaga

SEQ ID NO: 138553 - DNA, 26 bp, Artificial sequence
  SiRNA target sequence
aagatttaataaaaccgactgaagaa

SEQ ID NO: 138554 - DNA, 26 bp, Artificial sequence
  SiRNA target sequence
agatttaataaaaccgactgaagaag

SEQ ID NO: 138555 - DNA, 26 bp, Artificial sequence
  SiRNA target sequence
gatttaataaaaccgactgaagaaga

SEQ ID NO: 138556 - DNA, 26 bp, Artificial sequence
  SiRNA target sequence
atttaataaaaccgactgaagaagat

SEQ ID NO: 138557 - DNA, 26 bp, Artificial sequence
  SiRNA target sequence
tttaataaaaccgactgaagaagatc

SEQ ID NO: 138558 - DNA, 26 bp, Artificial sequence
  SiRNA target sequence
ttaataaaaccgactgaagaagatct

SEQ ID NO: 138559 - DNA, 26 bp, Artificial sequence
  SiRNA target sequence
taataaaaccgactgaagaagatcta

SEQ ID NO: 138560 - DNA, 26 bp, Artificial sequence
  SiRNA target sequence
aataaaaccgactgaagaagatctaa

SEQ ID NO: 138561 - DNA, 26 bp, Artificial sequence
  SiRNA target sequence
ataaaaccgactgaagaagatctaaa

SEQ ID NO: 138562 - DNA, 26 bp, Artificial sequence
  SiRNA target sequence
taaaaccgactgaagaagatctaaac

SEQ ID NO: 138563 - DNA, 26 bp, Artificial sequence
  SiRNA target sequence
aaaaccgactgaagaagatctaaact

SEQ ID NO: 138564 - DNA, 26 bp, Artificial sequence
  SiRNA target sequence
aaaccgactgaagaagatctaaactt

SEQ ID NO: 138565 - DNA, 26 bp, Artificial sequence
  SiRNA target sequence
aaccgactgaagaagatctaaacttt

SEQ ID NO: 138566 - DNA, 26 bp, Artificial sequence
  SiRNA target sequence
accgactgaagaagatctaaactttc

SEQ ID NO: 138567 - DNA, 26 bp, Artificial sequence
  SiRNA target sequence
ccgactgaagaagatctaaactttct

SEQ ID NO: 138568 - DNA, 26 bp, Artificial sequence
  SiRNA target sequence
cgactgaagaagatctaaactttctt

SEQ ID NO: 138569 - DNA, 26 bp, Artificial sequence
  SiRNA target sequence
gactgaagaagatctaaactttctta

SEQ ID NO: 138570 - DNA, 26 bp, Artificial sequence
  SiRNA target sequence
actgaagaagatctaaactttcttat

SEQ ID NO: 138571 - DNA, 26 bp, Artificial sequence
  SiRNA target sequence
ctgaagaagatctaaactttcttatt

SEQ ID NO: 138572 - DNA, 26 bp, Artificial sequence
  SiRNA target sequence
tgaagaagatctaaactttcttattc

SEQ ID NO: 138573 - DNA, 26 bp, Artificial sequence
  SiRNA target sequence
gaagaagatctaaactttcttattca

SEQ ID NO: 138574 - DNA, 26 bp, Artificial sequence
  SiRNA target sequence
aagaagatctaaactttcttattcac

SEQ ID NO: 138575 - DNA, 26 bp, Artificial sequence
  SiRNA target sequence
agaagatctaaactttcttattcacg

SEQ ID NO: 138576 - DNA, 26 bp, Artificial sequence
  SiRNA target sequence
gaagatctaaactttcttattcacga

SEQ ID NO: 138577 - DNA, 26 bp, Artificial sequence
  SiRNA target sequence
aagatctaaactttcttattcacgag

SEQ ID NO: 138578 - DNA, 26 bp, Artificial sequence
  SiRNA target sequence
agatctaaactttcttattcacgagg

SEQ ID NO: 138579 - DNA, 26 bp, Artificial sequence
  SiRNA target sequence
gatctaaactttcttattcacgaggc

SEQ ID NO: 138580 - DNA, 26 bp, Artificial sequence
  SiRNA target sequence
atctaaactttcttattcacgaggcc

SEQ ID NO: 138581 - DNA, 26 bp, Artificial sequence
  SiRNA target sequence
tctaaactttcttattcacgaggcca

SEQ ID NO: 138582 - DNA, 26 bp, Artificial sequence
  SiRNA target sequence
ctaaactttcttattcacgaggccaa

SEQ ID NO: 138583 - DNA, 26 bp, Artificial sequence
  SiRNA target sequence
taaactttcttattcacgaggccaat

SEQ ID NO: 138584 - DNA, 26 bp, Artificial sequence
  SiRNA target sequence
aaactttcttattcacgaggccaatt

SEQ ID NO: 138585 - DNA, 26 bp, Artificial sequence
  SiRNA target sequence
aactttcttattcacgaggccaatta

SEQ ID NO: 138586 - DNA, 26 bp, Artificial sequence
  SiRNA target sequence
actttcttattcacgaggccaattat

SEQ ID NO: 138587 - DNA, 26 bp, Artificial sequence
  SiRNA target sequence
ctttcttattcacgaggccaattatt

SEQ ID NO: 138588 - DNA, 26 bp, Artificial sequence
  SiRNA target sequence
tttcttattcacgaggccaattattt

SEQ ID NO: 138589 - DNA, 26 bp, Artificial sequence
  SiRNA target sequence
ttcttattcacgaggccaattatttt

SEQ ID NO: 138590 - DNA, 26 bp, Artificial sequence
  SiRNA target sequence
tcttattcacgaggccaattatttta

SEQ ID NO: 138591 - DNA, 26 bp, Artificial sequence
  SiRNA target sequence
cttattcacgaggccaattattttac

SEQ ID NO: 138592 - DNA, 26 bp, Artificial sequence
  SiRNA target sequence
ttattcacgaggccaattattttaca

SEQ ID NO: 138593 - DNA, 26 bp, Artificial sequence
  SiRNA target sequence
tattcacgaggccaattattttacag

SEQ ID NO: 138594 - DNA, 26 bp, Artificial sequence
  SiRNA target sequence
attcacgaggccaattattttacaga

SEQ ID NO: 138595 - DNA, 26 bp, Artificial sequence
  SiRNA target sequence
ttcacgaggccaattattttacagat

SEQ ID NO: 138596 - DNA, 26 bp, Artificial sequence
  SiRNA target sequence
tcacgaggccaattattttacagatc

SEQ ID NO: 138597 - DNA, 26 bp, Artificial sequence
  SiRNA target sequence
cacgaggccaattattttacagatca

SEQ ID NO: 138598 - DNA, 26 bp, Artificial sequence
  SiRNA target sequence
acgaggccaattattttacagatcac

SEQ ID NO: 138599 - DNA, 26 bp, Artificial sequence
  SiRNA target sequence
cgaggccaattattttacagatcaca

SEQ ID NO: 138600 - DNA, 26 bp, Artificial sequence
  SiRNA target sequence
gaggccaattattttacagatcacaa

SEQ ID NO: 138601 - DNA, 26 bp, Artificial sequence
  SiRNA target sequence
aggccaattattttacagatcacaat

SEQ ID NO: 138602 - DNA, 26 bp, Artificial sequence
  SiRNA target sequence
ggccaattattttacagatcacaatt

SEQ ID NO: 138603 - DNA, 26 bp, Artificial sequence
  SiRNA target sequence
gccaattattttacagatcacaattt

SEQ ID NO: 138604 - DNA, 26 bp, Artificial sequence
  SiRNA target sequence
ccaattattttacagatcacaattta

SEQ ID NO: 138605 - DNA, 26 bp, Artificial sequence
  SiRNA target sequence
caattattttacagatcacaatttaa

SEQ ID NO: 138606 - DNA, 26 bp, Artificial sequence
  SiRNA target sequence
aattattttacagatcacaatttaaa

SEQ ID NO: 138607 - DNA, 26 bp, Artificial sequence
  SiRNA target sequence
attattttacagatcacaatttaaaa

SEQ ID NO: 138608 - DNA, 26 bp, Artificial sequence
  SiRNA target sequence
ttattttacagatcacaatttaaaat

SEQ ID NO: 138609 - DNA, 26 bp, Artificial sequence
  SiRNA target sequence
tattttacagatcacaatttaaaatt

SEQ ID NO: 138610 - DNA, 26 bp, Artificial sequence
  SiRNA target sequence
attttacagatcacaatttaaaatta

SEQ ID NO: 138611 - DNA, 26 bp, Artificial sequence
  SiRNA target sequence
ttttacagatcacaatttaaaattaa

SEQ ID NO: 138612 - DNA, 26 bp, Artificial sequence
  SiRNA target sequence
tttacagatcacaatttaaaattaac

SEQ ID NO: 138613 - DNA, 26 bp, Artificial sequence
  SiRNA target sequence
ttacagatcacaatttaaaattaaca

SEQ ID NO: 138614 - DNA, 26 bp, Artificial sequence
  SiRNA target sequence
tacagatcacaatttaaaattaacaa

SEQ ID NO: 138615 - DNA, 26 bp, Artificial sequence
  SiRNA target sequence
acagatcacaatttaaaattaacaaa

SEQ ID NO: 138616 - DNA, 26 bp, Artificial sequence
  SiRNA target sequence
cagatcacaatttaaaattaacaaaa

SEQ ID NO: 138617 - DNA, 26 bp, Artificial sequence
  SiRNA target sequence
agatcacaatttaaaattaacaaaaa

SEQ ID NO: 138618 - DNA, 26 bp, Artificial sequence
  SiRNA target sequence
gatcacaatttaaaattaacaaaaaa

SEQ ID NO: 138619 - DNA, 26 bp, Artificial sequence
  SiRNA target sequence
atcacaatttaaaattaacaaaaaaa

SEQ ID NO: 138620 - DNA, 26 bp, Artificial sequence
  SiRNA target sequence
tcacaatttaaaattaacaaaaaaag

SEQ ID NO: 138621 - DNA, 26 bp, Artificial sequence
  SiRNA target sequence
cacaatttaaaattaacaaaaaaaga

SEQ ID NO: 138622 - DNA, 26 bp, Artificial sequence
  SiRNA target sequence
acaatttaaaattaacaaaaaaagat

SEQ ID NO: 138623 - DNA, 26 bp, Artificial sequence
  SiRNA target sequence
caatttaaaattaacaaaaaaagatg

SEQ ID NO: 138624 - DNA, 26 bp, Artificial sequence
  SiRNA target sequence
aatttaaaattaacaaaaaaagatgt

SEQ ID NO: 138625 - DNA, 26 bp, Artificial sequence
  SiRNA target sequence
atttaaaattaacaaaaaaagatgtt

SEQ ID NO: 138626 - DNA, 26 bp, Artificial sequence
  SiRNA target sequence
tttaaaattaacaaaaaaagatgttt

SEQ ID NO: 138627 - DNA, 26 bp, Artificial sequence
  SiRNA target sequence
ttaaaattaacaaaaaaagatgtttt

SEQ ID NO: 138628 - DNA, 26 bp, Artificial sequence
  SiRNA target sequence
taaaattaacaaaaaaagatgttttg

SEQ ID NO: 138629 - DNA, 26 bp, Artificial sequence
  SiRNA target sequence
aaaattaacaaaaaaagatgttttgt

SEQ ID NO: 138630 - DNA, 26 bp, Artificial sequence
  SiRNA target sequence
aaattaacaaaaaaagatgttttgtc

SEQ ID NO: 138631 - DNA, 26 bp, Artificial sequence
  SiRNA target sequence
aattaacaaaaaaagatgttttgtct

SEQ ID NO: 138632 - DNA, 26 bp, Artificial sequence
  SiRNA target sequence
attaacaaaaaaagatgttttgtctg

SEQ ID NO: 138633 - DNA, 26 bp, Artificial sequence
  SiRNA target sequence
ttaacaaaaaaagatgttttgtctgt

SEQ ID NO: 138634 - DNA, 26 bp, Artificial sequence
  SiRNA target sequence
taacaaaaaaagatgttttgtctgtt

SEQ ID NO: 138635 - DNA, 26 bp, Artificial sequence
  SiRNA target sequence
aacaaaaaaagatgttttgtctgttt

SEQ ID NO: 138636 - DNA, 26 bp, Artificial sequence
  SiRNA target sequence
acaaaaaaagatgttttgtctgtttg

SEQ ID NO: 138637 - DNA, 26 bp, Artificial sequence
  SiRNA target sequence
caaaaaaagatgttttgtctgtttgg

SEQ ID NO: 138638 - DNA, 26 bp, Artificial sequence
  SiRNA target sequence
aaaaaaagatgttttgtctgtttgga

SEQ ID NO: 138639 - DNA, 26 bp, Artificial sequence
  SiRNA target sequence
aaaaaagatgttttgtctgtttggac

SEQ ID NO: 138640 - DNA, 26 bp, Artificial sequence
  SiRNA target sequence
aaaaagatgttttgtctgtttggaca

SEQ ID NO: 138641 - DNA, 26 bp, Artificial sequence
  SiRNA target sequence
aaaagatgttttgtctgtttggacag

SEQ ID NO: 138642 - DNA, 26 bp, Artificial sequence
  SiRNA target sequence
aaagatgttttgtctgtttggacagg

SEQ ID NO: 138643 - DNA, 26 bp, Artificial sequence
  SiRNA target sequence
aagatgttttgtctgtttggacaggt

SEQ ID NO: 138644 - DNA, 26 bp, Artificial sequence
  SiRNA target sequence
agatgttttgtctgtttggacaggta

SEQ ID NO: 138645 - DNA, 26 bp, Artificial sequence
  SiRNA target sequence
gatgttttgtctgtttggacaggtat

SEQ ID NO: 138646 - DNA, 26 bp, Artificial sequence
  SiRNA target sequence
atgttttgtctgtttggacaggtatt

SEQ ID NO: 138647 - DNA, 26 bp, Artificial sequence
  SiRNA target sequence
tgttttgtctgtttggacaggtatta

SEQ ID NO: 138648 - DNA, 26 bp, Artificial sequence
  SiRNA target sequence
gttttgtctgtttggacaggtattag

SEQ ID NO: 138649 - DNA, 26 bp, Artificial sequence
  SiRNA target sequence
ttttgtctgtttggacaggtattaga

SEQ ID NO: 138650 - DNA, 26 bp, Artificial sequence
  SiRNA target sequence
tttgtctgtttggacaggtattagac

SEQ ID NO: 138651 - DNA, 26 bp, Artificial sequence
  SiRNA target sequence
ttgtctgtttggacaggtattagacc

SEQ ID NO: 138652 - DNA, 26 bp, Artificial sequence
  SiRNA target sequence
tgtctgtttggacaggtattagaccg

SEQ ID NO: 138653 - DNA, 26 bp, Artificial sequence
  SiRNA target sequence
gtctgtttggacaggtattagaccgt

SEQ ID NO: 138654 - DNA, 26 bp, Artificial sequence
  SiRNA target sequence
tctgtttggacaggtattagaccgtt

SEQ ID NO: 138655 - DNA, 26 bp, Artificial sequence
  SiRNA target sequence
ctgtttggacaggtattagaccgtta

SEQ ID NO: 138656 - DNA, 26 bp, Artificial sequence
  SiRNA target sequence
tgtttggacaggtattagaccgttag

SEQ ID NO: 138657 - DNA, 26 bp, Artificial sequence
  SiRNA target sequence
gtttggacaggtattagaccgttagt

SEQ ID NO: 138658 - DNA, 26 bp, Artificial sequence
  SiRNA target sequence
tttggacaggtattagaccgttagtc

SEQ ID NO: 138659 - DNA, 26 bp, Artificial sequence
  SiRNA target sequence
ttggacaggtattagaccgttagtca

SEQ ID NO: 138660 - DNA, 26 bp, Artificial sequence
  SiRNA target sequence
tggacaggtattagaccgttagtcaa

SEQ ID NO: 138661 - DNA, 26 bp, Artificial sequence
  SiRNA target sequence
ggacaggtattagaccgttagtcaag

SEQ ID NO: 138662 - DNA, 26 bp, Artificial sequence
  SiRNA target sequence
gacaggtattagaccgttagtcaagg

SEQ ID NO: 138663 - DNA, 26 bp, Artificial sequence
  SiRNA target sequence
acaggtattagaccgttagtcaagga

SEQ ID NO: 138664 - DNA, 26 bp, Artificial sequence
  SiRNA target sequence
caggtattagaccgttagtcaaggat

SEQ ID NO: 138665 - DNA, 26 bp, Artificial sequence
  SiRNA target sequence
aggtattagaccgttagtcaaggatt

SEQ ID NO: 138666 - DNA, 26 bp, Artificial sequence
  SiRNA target sequence
ggtattagaccgttagtcaaggattt

SEQ ID NO: 138667 - DNA, 26 bp, Artificial sequence
  SiRNA target sequence
gtattagaccgttagtcaaggattta

SEQ ID NO: 138668 - DNA, 26 bp, Artificial sequence
  SiRNA target sequence
tattagaccgttagtcaaggatttat

SEQ ID NO: 138669 - DNA, 26 bp, Artificial sequence
  SiRNA target sequence
attagaccgttagtcaaggatttatc

SEQ ID NO: 138670 - DNA, 26 bp, Artificial sequence
  SiRNA target sequence
ttagaccgttagtcaaggatttatcg

SEQ ID NO: 138671 - DNA, 26 bp, Artificial sequence
  SiRNA target sequence
tagaccgttagtcaaggatttatcga

SEQ ID NO: 138672 - DNA, 26 bp, Artificial sequence
  SiRNA target sequence
agaccgttagtcaaggatttatcgaa

SEQ ID NO: 138673 - DNA, 26 bp, Artificial sequence
  SiRNA target sequence
gaccgttagtcaaggatttatcgaaa

SEQ ID NO: 138674 - DNA, 26 bp, Artificial sequence
  SiRNA target sequence
accgttagtcaaggatttatcgaaaa

SEQ ID NO: 138675 - DNA, 26 bp, Artificial sequence
  SiRNA target sequence
ccgttagtcaaggatttatcgaaaag

SEQ ID NO: 138676 - DNA, 26 bp, Artificial sequence
  SiRNA target sequence
cgttagtcaaggatttatcgaaaagt

SEQ ID NO: 138677 - DNA, 26 bp, Artificial sequence
  SiRNA target sequence
gttagtcaaggatttatcgaaaagtt

SEQ ID NO: 138678 - DNA, 26 bp, Artificial sequence
  SiRNA target sequence
ttagtcaaggatttatcgaaaagttc

SEQ ID NO: 138679 - DNA, 26 bp, Artificial sequence
  SiRNA target sequence
tagtcaaggatttatcgaaaagttca

SEQ ID NO: 138680 - DNA, 26 bp, Artificial sequence
  SiRNA target sequence
agtcaaggatttatcgaaaagttcaa

SEQ ID NO: 138681 - DNA, 26 bp, Artificial sequence
  SiRNA target sequence
gtcaaggatttatcgaaaagttcaac

SEQ ID NO: 138682 - DNA, 26 bp, Artificial sequence
  SiRNA target sequence
tcaaggatttatcgaaaagttcaaca

SEQ ID NO: 138683 - DNA, 26 bp, Artificial sequence
  SiRNA target sequence
caaggatttatcgaaaagttcaacag

SEQ ID NO: 138684 - DNA, 26 bp, Artificial sequence
  SiRNA target sequence
aaggatttatcgaaaagttcaacaga

SEQ ID NO: 138685 - DNA, 26 bp, Artificial sequence
  SiRNA target sequence
aggatttatcgaaaagttcaacagaa

SEQ ID NO: 138686 - DNA, 26 bp, Artificial sequence
  SiRNA target sequence
ggatttatcgaaaagttcaacagaaa

SEQ ID NO: 138687 - DNA, 26 bp, Artificial sequence
  SiRNA target sequence
gatttatcgaaaagttcaacagaaaa

SEQ ID NO: 138688 - DNA, 26 bp, Artificial sequence
  SiRNA target sequence
atttatcgaaaagttcaacagaaaag

SEQ ID NO: 138689 - DNA, 26 bp, Artificial sequence
  SiRNA target sequence
tttatcgaaaagttcaacagaaaaga

SEQ ID NO: 138690 - DNA, 26 bp, Artificial sequence
  SiRNA target sequence
ttatcgaaaagttcaacagaaaagat

SEQ ID NO: 138691 - DNA, 26 bp, Artificial sequence
  SiRNA target sequence
tatcgaaaagttcaacagaaaagata

SEQ ID NO: 138692 - DNA, 26 bp, Artificial sequence
  SiRNA target sequence
atcgaaaagttcaacagaaaagatat

SEQ ID NO: 138693 - DNA, 26 bp, Artificial sequence
  SiRNA target sequence
tcgaaaagttcaacagaaaagatatg

SEQ ID NO: 138694 - DNA, 26 bp, Artificial sequence
  SiRNA target sequence
cgaaaagttcaacagaaaagatatgt

SEQ ID NO: 138695 - DNA, 26 bp, Artificial sequence
  SiRNA target sequence
gaaaagttcaacagaaaagatatgta

SEQ ID NO: 138696 - DNA, 26 bp, Artificial sequence
  SiRNA target sequence
aaaagttcaacagaaaagatatgtag

SEQ ID NO: 138697 - DNA, 26 bp, Artificial sequence
  SiRNA target sequence
aaagttcaacagaaaagatatgtaga

SEQ ID NO: 138698 - DNA, 26 bp, Artificial sequence
  SiRNA target sequence
aagttcaacagaaaagatatgtagaa

SEQ ID NO: 138699 - DNA, 26 bp, Artificial sequence
  SiRNA target sequence
agttcaacagaaaagatatgtagaaa

SEQ ID NO: 138700 - DNA, 26 bp, Artificial sequence
  SiRNA target sequence
gttcaacagaaaagatatgtagaaaa

SEQ ID NO: 138701 - DNA, 26 bp, Artificial sequence
  SiRNA target sequence
ttcaacagaaaagatatgtagaaaac

SEQ ID NO: 138702 - DNA, 26 bp, Artificial sequence
  SiRNA target sequence
tcaacagaaaagatatgtagaaaaca

SEQ ID NO: 138703 - DNA, 26 bp, Artificial sequence
  SiRNA target sequence
caacagaaaagatatgtagaaaacat

SEQ ID NO: 138704 - DNA, 26 bp, Artificial sequence
  SiRNA target sequence
aacagaaaagatatgtagaaaacata

SEQ ID NO: 138705 - DNA, 26 bp, Artificial sequence
  SiRNA target sequence
acagaaaagatatgtagaaaacatac

SEQ ID NO: 138706 - DNA, 26 bp, Artificial sequence
  SiRNA target sequence
cagaaaagatatgtagaaaacatact

SEQ ID NO: 138707 - DNA, 26 bp, Artificial sequence
  SiRNA target sequence
agaaaagatatgtagaaaacatacta

SEQ ID NO: 138708 - DNA, 26 bp, Artificial sequence
  SiRNA target sequence
gaaaagatatgtagaaaacatactat

SEQ ID NO: 138709 - DNA, 26 bp, Artificial sequence
  SiRNA target sequence
aaaagatatgtagaaaacatactata

SEQ ID NO: 138710 - DNA, 26 bp, Artificial sequence
  SiRNA target sequence
aaagatatgtagaaaacatactataa

SEQ ID NO: 138711 - DNA, 26 bp, Artificial sequence
  SiRNA target sequence
aagatatgtagaaaacatactataag

SEQ ID NO: 138712 - DNA, 26 bp, Artificial sequence
  SiRNA target sequence
agatatgtagaaaacatactataaga

SEQ ID NO: 138713 - DNA, 26 bp, Artificial sequence
  SiRNA target sequence
gatatgtagaaaacatactataagaa

SEQ ID NO: 138714 - DNA, 26 bp, Artificial sequence
  SiRNA target sequence
atatgtagaaaacatactataagaat

SEQ ID NO: 138715 - DNA, 26 bp, Artificial sequence
  SiRNA target sequence
tatgtagaaaacatactataagaata

SEQ ID NO: 138716 - DNA, 26 bp, Artificial sequence
  SiRNA target sequence
atgtagaaaacatactataagaatag

SEQ ID NO: 138717 - DNA, 26 bp, Artificial sequence
  SiRNA target sequence
tgtagaaaacatactataagaataga

SEQ ID NO: 138718 - DNA, 26 bp, Artificial sequence
  SiRNA target sequence
gtagaaaacatactataagaatagat

SEQ ID NO: 138719 - DNA, 26 bp, Artificial sequence
  SiRNA target sequence
tagaaaacatactataagaatagata

SEQ ID NO: 138720 - DNA, 26 bp, Artificial sequence
  SiRNA target sequence
agaaaacatactataagaatagataa

SEQ ID NO: 138721 - DNA, 26 bp, Artificial sequence
  SiRNA target sequence
gaaaacatactataagaatagataaa

SEQ ID NO: 138722 - DNA, 26 bp, Artificial sequence
  SiRNA target sequence
aaaacatactataagaatagataaag

SEQ ID NO: 138723 - DNA, 26 bp, Artificial sequence
  SiRNA target sequence
aaacatactataagaatagataaaga

SEQ ID NO: 138724 - DNA, 26 bp, Artificial sequence
  SiRNA target sequence
aacatactataagaatagataaagac

SEQ ID NO: 138725 - DNA, 26 bp, Artificial sequence
  SiRNA target sequence
acatactataagaatagataaagaca

SEQ ID NO: 138726 - DNA, 26 bp, Artificial sequence
  SiRNA target sequence
catactataagaatagataaagacaa

SEQ ID NO: 138727 - DNA, 26 bp, Artificial sequence
  SiRNA target sequence
atactataagaatagataaagacaat

SEQ ID NO: 138728 - DNA, 26 bp, Artificial sequence
  SiRNA target sequence
tactataagaatagataaagacaata

SEQ ID NO: 138729 - DNA, 26 bp, Artificial sequence
  SiRNA target sequence
actataagaatagataaagacaatat

SEQ ID NO: 138730 - DNA, 26 bp, Artificial sequence
  SiRNA target sequence
ctataagaatagataaagacaatatg

SEQ ID NO: 138731 - DNA, 26 bp, Artificial sequence
  SiRNA target sequence
tataagaatagataaagacaatatgg

SEQ ID NO: 138732 - DNA, 26 bp, Artificial sequence
  SiRNA target sequence
ataagaatagataaagacaatatggt

SEQ ID NO: 138733 - DNA, 26 bp, Artificial sequence
  SiRNA target sequence
taagaatagataaagacaatatggta

SEQ ID NO: 138734 - DNA, 26 bp, Artificial sequence
  SiRNA target sequence
aagaatagataaagacaatatggtaa

SEQ ID NO: 138735 - DNA, 26 bp, Artificial sequence
  SiRNA target sequence
agaatagataaagacaatatggtaac

SEQ ID NO: 138736 - DNA, 26 bp, Artificial sequence
  SiRNA target sequence
gaatagataaagacaatatggtaact

SEQ ID NO: 138737 - DNA, 26 bp, Artificial sequence
  SiRNA target sequence
aatagataaagacaatatggtaactg

SEQ ID NO: 138738 - DNA, 26 bp, Artificial sequence
  SiRNA target sequence
atagataaagacaatatggtaactgt

SEQ ID NO: 138739 - DNA, 26 bp, Artificial sequence
  SiRNA target sequence
tagataaagacaatatggtaactgta

SEQ ID NO: 138740 - DNA, 26 bp, Artificial sequence
  SiRNA target sequence
agataaagacaatatggtaactgtaa

SEQ ID NO: 138741 - DNA, 26 bp, Artificial sequence
  SiRNA target sequence
gataaagacaatatggtaactgtaac

SEQ ID NO: 138742 - DNA, 26 bp, Artificial sequence
  SiRNA target sequence
ataaagacaatatggtaactgtaaca

SEQ ID NO: 138743 - DNA, 26 bp, Artificial sequence
  SiRNA target sequence
taaagacaatatggtaactgtaacag

SEQ ID NO: 138744 - DNA, 26 bp, Artificial sequence
  SiRNA target sequence
aaagacaatatggtaactgtaacagg

SEQ ID NO: 138745 - DNA, 26 bp, Artificial sequence
  SiRNA target sequence
aagacaatatggtaactgtaacaggt

SEQ ID NO: 138746 - DNA, 26 bp, Artificial sequence
  SiRNA target sequence
agacaatatggtaactgtaacaggtg

SEQ ID NO: 138747 - DNA, 26 bp, Artificial sequence
  SiRNA target sequence
gacaatatggtaactgtaacaggtgg

SEQ ID NO: 138748 - DNA, 26 bp, Artificial sequence
  SiRNA target sequence
acaatatggtaactgtaacaggtggt

SEQ ID NO: 138749 - DNA, 26 bp, Artificial sequence
  SiRNA target sequence
caatatggtaactgtaacaggtggta

SEQ ID NO: 138750 - DNA, 26 bp, Artificial sequence
  SiRNA target sequence
aatatggtaactgtaacaggtggtaa

SEQ ID NO: 138751 - DNA, 26 bp, Artificial sequence
  SiRNA target sequence
atatggtaactgtaacaggtggtaag

SEQ ID NO: 138752 - DNA, 26 bp, Artificial sequence
  SiRNA target sequence
tatggtaactgtaacaggtggtaagt

SEQ ID NO: 138753 - DNA, 26 bp, Artificial sequence
  SiRNA target sequence
atggtaactgtaacaggtggtaagtg

SEQ ID NO: 138754 - DNA, 26 bp, Artificial sequence
  SiRNA target sequence
tggtaactgtaacaggtggtaagtgg

SEQ ID NO: 138755 - DNA, 26 bp, Artificial sequence
  SiRNA target sequence
ggtaactgtaacaggtggtaagtgga

SEQ ID NO: 138756 - DNA, 26 bp, Artificial sequence
  SiRNA target sequence
gtaactgtaacaggtggtaagtggac

SEQ ID NO: 138757 - DNA, 26 bp, Artificial sequence
  SiRNA target sequence
taactgtaacaggtggtaagtggaca

SEQ ID NO: 138758 - DNA, 26 bp, Artificial sequence
  SiRNA target sequence
aactgtaacaggtggtaagtggacaa

SEQ ID NO: 138759 - DNA, 26 bp, Artificial sequence
  SiRNA target sequence
actgtaacaggtggtaagtggacaat

SEQ ID NO: 138760 - DNA, 26 bp, Artificial sequence
  SiRNA target sequence
ctgtaacaggtggtaagtggacaatt

SEQ ID NO: 138761 - DNA, 26 bp, Artificial sequence
  SiRNA target sequence
tgtaacaggtggtaagtggacaattt

SEQ ID NO: 138762 - DNA, 26 bp, Artificial sequence
  SiRNA target sequence
gtaacaggtggtaagtggacaatttt

SEQ ID NO: 138763 - DNA, 26 bp, Artificial sequence
  SiRNA target sequence
taacaggtggtaagtggacaattttt

SEQ ID NO: 138764 - DNA, 26 bp, Artificial sequence
  SiRNA target sequence
aacaggtggtaagtggacaatttttc

SEQ ID NO: 138765 - DNA, 26 bp, Artificial sequence
  SiRNA target sequence
acaggtggtaagtggacaatttttcg

SEQ ID NO: 138766 - DNA, 26 bp, Artificial sequence
  SiRNA target sequence
caggtggtaagtggacaatttttcga

SEQ ID NO: 138767 - DNA, 26 bp, Artificial sequence
  SiRNA target sequence
aggtggtaagtggacaatttttcgac

SEQ ID NO: 138768 - DNA, 26 bp, Artificial sequence
  SiRNA target sequence
ggtggtaagtggacaatttttcgact

SEQ ID NO: 138769 - DNA, 26 bp, Artificial sequence
  SiRNA target sequence
gtggtaagtggacaatttttcgactt

SEQ ID NO: 138770 - DNA, 26 bp, Artificial sequence
  SiRNA target sequence
tggtaagtggacaatttttcgactta

SEQ ID NO: 138771 - DNA, 26 bp, Artificial sequence
  SiRNA target sequence
ggtaagtggacaatttttcgacttat

SEQ ID NO: 138772 - DNA, 26 bp, Artificial sequence
  SiRNA target sequence
gtaagtggacaatttttcgacttatg

SEQ ID NO: 138773 - DNA, 26 bp, Artificial sequence
  SiRNA target sequence
taagtggacaatttttcgacttatgg

SEQ ID NO: 138774 - DNA, 26 bp, Artificial sequence
  SiRNA target sequence
aagtggacaatttttcgacttatggg

SEQ ID NO: 138775 - DNA, 26 bp, Artificial sequence
  SiRNA target sequence
agtggacaatttttcgacttatggga

SEQ ID NO: 138776 - DNA, 26 bp, Artificial sequence
  SiRNA target sequence
gtggacaatttttcgacttatgggag

SEQ ID NO: 138777 - DNA, 26 bp, Artificial sequence
  SiRNA target sequence
tggacaatttttcgacttatgggaga

SEQ ID NO: 138778 - DNA, 26 bp, Artificial sequence
  SiRNA target sequence
ggacaatttttcgacttatgggagaa

SEQ ID NO: 138779 - DNA, 26 bp, Artificial sequence
  SiRNA target sequence
gacaatttttcgacttatgggagaac

SEQ ID NO: 138780 - DNA, 26 bp, Artificial sequence
  SiRNA target sequence
acaatttttcgacttatgggagaaca

SEQ ID NO: 138781 - DNA, 26 bp, Artificial sequence
  SiRNA target sequence
caatttttcgacttatgggagaacag

SEQ ID NO: 138782 - DNA, 26 bp, Artificial sequence
  SiRNA target sequence
aatttttcgacttatgggagaacaga

SEQ ID NO: 138783 - DNA, 26 bp, Artificial sequence
  SiRNA target sequence
atttttcgacttatgggagaacagac

SEQ ID NO: 138784 - DNA, 26 bp, Artificial sequence
  SiRNA target sequence
tttttcgacttatgggagaacagaca

SEQ ID NO: 138785 - DNA, 26 bp, Artificial sequence
  SiRNA target sequence
ttttcgacttatgggagaacagacaa

SEQ ID NO: 138786 - DNA, 26 bp, Artificial sequence
  SiRNA target sequence
tttcgacttatgggagaacagacaat

SEQ ID NO: 138787 - DNA, 26 bp, Artificial sequence
  SiRNA target sequence
ttcgacttatgggagaacagacaata

SEQ ID NO: 138788 - DNA, 26 bp, Artificial sequence
  SiRNA target sequence
tcgacttatgggagaacagacaataa

SEQ ID NO: 138789 - DNA, 26 bp, Artificial sequence
  SiRNA target sequence
cgacttatgggagaacagacaataaa

SEQ ID NO: 138790 - DNA, 26 bp, Artificial sequence
  SiRNA target sequence
gacttatgggagaacagacaataaat

SEQ ID NO: 138791 - DNA, 26 bp, Artificial sequence
  SiRNA target sequence
acttatgggagaacagacaataaatc

SEQ ID NO: 138792 - DNA, 26 bp, Artificial sequence
  SiRNA target sequence
cttatgggagaacagacaataaatca

SEQ ID NO: 138793 - DNA, 26 bp, Artificial sequence
  SiRNA target sequence
ttatgggagaacagacaataaatcaa

SEQ ID NO: 138794 - DNA, 26 bp, Artificial sequence
  SiRNA target sequence
tatgggagaacagacaataaatcaaa

SEQ ID NO: 138795 - DNA, 26 bp, Artificial sequence
  SiRNA target sequence
atgggagaacagacaataaatcaaat

SEQ ID NO: 138796 - DNA, 26 bp, Artificial sequence
  SiRNA target sequence
tgggagaacagacaataaatcaaatt

SEQ ID NO: 138797 - DNA, 26 bp, Artificial sequence
  SiRNA target sequence
gggagaacagacaataaatcaaatta

SEQ ID NO: 138798 - DNA, 26 bp, Artificial sequence
  SiRNA target sequence
ggagaacagacaataaatcaaattat

SEQ ID NO: 138799 - DNA, 26 bp, Artificial sequence
  SiRNA target sequence
gagaacagacaataaatcaaattata

SEQ ID NO: 138800 - DNA, 26 bp, Artificial sequence
  SiRNA target sequence
agaacagacaataaatcaaattataa

SEQ ID NO: 138801 - DNA, 26 bp, Artificial sequence
  SiRNA target sequence
gaacagacaataaatcaaattataaa

SEQ ID NO: 138802 - DNA, 26 bp, Artificial sequence
  SiRNA target sequence
aacagacaataaatcaaattataaaa

SEQ ID NO: 138803 - DNA, 26 bp, Artificial sequence
  SiRNA target sequence
acagacaataaatcaaattataaaag

SEQ ID NO: 138804 - DNA, 26 bp, Artificial sequence
  SiRNA target sequence
cagacaataaatcaaattataaaagt

SEQ ID NO: 138805 - DNA, 26 bp, Artificial sequence
  SiRNA target sequence
agacaataaatcaaattataaaagtt

SEQ ID NO: 138806 - DNA, 26 bp, Artificial sequence
  SiRNA target sequence
gacaataaatcaaattataaaagttt

SEQ ID NO: 138807 - DNA, 26 bp, Artificial sequence
  SiRNA target sequence
acaataaatcaaattataaaagtttt

SEQ ID NO: 138808 - DNA, 26 bp, Artificial sequence
  SiRNA target sequence
caataaatcaaattataaaagttttt

SEQ ID NO: 138809 - DNA, 26 bp, Artificial sequence
  SiRNA target sequence
aataaatcaaattataaaagttttta

SEQ ID NO: 138810 - DNA, 26 bp, Artificial sequence
  SiRNA target sequence
ataaatcaaattataaaagtttttaa

SEQ ID NO: 138811 - DNA, 26 bp, Artificial sequence
  SiRNA target sequence
taaatcaaattataaaagtttttaat

SEQ ID NO: 138812 - DNA, 26 bp, Artificial sequence
  SiRNA target sequence
aaatcaaattataaaagtttttaata

SEQ ID NO: 138813 - DNA, 26 bp, Artificial sequence
  SiRNA target sequence
aatcaaattataaaagtttttaatat

SEQ ID NO: 138814 - DNA, 26 bp, Artificial sequence
  SiRNA target sequence
atcaaattataaaagtttttaatata

SEQ ID NO: 138815 - DNA, 26 bp, Artificial sequence
  SiRNA target sequence
tcaaattataaaagtttttaatataa

SEQ ID NO: 138816 - DNA, 26 bp, Artificial sequence
  SiRNA target sequence
caaattataaaagtttttaatataaa

SEQ ID NO: 138817 - DNA, 26 bp, Artificial sequence
  SiRNA target sequence
aaattataaaagtttttaatataaag

SEQ ID NO: 138818 - DNA, 26 bp, Artificial sequence
  SiRNA target sequence
aattataaaagtttttaatataaagt

SEQ ID NO: 138819 - DNA, 26 bp, Artificial sequence
  SiRNA target sequence
attataaaagtttttaatataaagtc

SEQ ID NO: 138820 - DNA, 26 bp, Artificial sequence
  SiRNA target sequence
ttataaaagtttttaatataaagtct

SEQ ID NO: 138821 - DNA, 26 bp, Artificial sequence
  SiRNA target sequence
tataaaagtttttaatataaagtcta

SEQ ID NO: 138822 - DNA, 26 bp, Artificial sequence
  SiRNA target sequence
ataaaagtttttaatataaagtctaa

SEQ ID NO: 138823 - DNA, 26 bp, Artificial sequence
  SiRNA target sequence
taaaagtttttaatataaagtctaat

SEQ ID NO: 138824 - DNA, 26 bp, Artificial sequence
  SiRNA target sequence
aaaagtttttaatataaagtctaata

SEQ ID NO: 138825 - DNA, 26 bp, Artificial sequence
  SiRNA target sequence
aaagtttttaatataaagtctaataa

SEQ ID NO: 138826 - DNA, 26 bp, Artificial sequence
  SiRNA target sequence
aagtttttaatataaagtctaataaa

SEQ ID NO: 138827 - DNA, 26 bp, Artificial sequence
  SiRNA target sequence
agtttttaatataaagtctaataaac

SEQ ID NO: 138828 - DNA, 26 bp, Artificial sequence
  SiRNA target sequence
gtttttaatataaagtctaataaacc

SEQ ID NO: 138829 - DNA, 26 bp, Artificial sequence
  SiRNA target sequence
tttttaatataaagtctaataaacca

SEQ ID NO: 138830 - DNA, 26 bp, Artificial sequence
  SiRNA target sequence
ttttaatataaagtctaataaaccaa

SEQ ID NO: 138831 - DNA, 26 bp, Artificial sequence
  SiRNA target sequence
tttaatataaagtctaataaaccaag

SEQ ID NO: 138832 - DNA, 26 bp, Artificial sequence
  SiRNA target sequence
ttaatataaagtctaataaaccaagt

SEQ ID NO: 138833 - DNA, 26 bp, Artificial sequence
  SiRNA target sequence
taatataaagtctaataaaccaagta

SEQ ID NO: 138834 - DNA, 26 bp, Artificial sequence
  SiRNA target sequence
aatataaagtctaataaaccaagtat

SEQ ID NO: 138835 - DNA, 26 bp, Artificial sequence
  SiRNA target sequence
atataaagtctaataaaccaagtata

SEQ ID NO: 138836 - DNA, 26 bp, Artificial sequence
  SiRNA target sequence
tataaagtctaataaaccaagtataa

SEQ ID NO: 138837 - DNA, 26 bp, Artificial sequence
  SiRNA target sequence
ataaagtctaataaaccaagtataac

SEQ ID NO: 138838 - DNA, 26 bp, Artificial sequence
  SiRNA target sequence
taaagtctaataaaccaagtataaca

SEQ ID NO: 138839 - DNA, 26 bp, Artificial sequence
  SiRNA target sequence
aaagtctaataaaccaagtataacac

SEQ ID NO: 138840 - DNA, 26 bp, Artificial sequence
  SiRNA target sequence
aagtctaataaaccaagtataacaca

SEQ ID NO: 138841 - DNA, 26 bp, Artificial sequence
  SiRNA target sequence
agtctaataaaccaagtataacacaa

SEQ ID NO: 138842 - DNA, 26 bp, Artificial sequence
  SiRNA target sequence
gtctaataaaccaagtataacacaat

SEQ ID NO: 138843 - DNA, 26 bp, Artificial sequence
  SiRNA target sequence
tctaataaaccaagtataacacaata

SEQ ID NO: 138844 - DNA, 26 bp, Artificial sequence
  SiRNA target sequence
ctaataaaccaagtataacacaatat

SEQ ID NO: 138845 - DNA, 26 bp, Artificial sequence
  SiRNA target sequence
taataaaccaagtataacacaatatc

SEQ ID NO: 138846 - DNA, 26 bp, Artificial sequence
  SiRNA target sequence
aataaaccaagtataacacaatatct

SEQ ID NO: 138847 - DNA, 26 bp, Artificial sequence
  SiRNA target sequence
ataaaccaagtataacacaatatctt

SEQ ID NO: 138848 - DNA, 26 bp, Artificial sequence
  SiRNA target sequence
taaaccaagtataacacaatatcttc

SEQ ID NO: 138849 - DNA, 26 bp, Artificial sequence
  SiRNA target sequence
aaaccaagtataacacaatatcttcc

SEQ ID NO: 138850 - DNA, 26 bp, Artificial sequence
  SiRNA target sequence
aaccaagtataacacaatatcttcct

SEQ ID NO: 138851 - DNA, 26 bp, Artificial sequence
  SiRNA target sequence
accaagtataacacaatatcttcctg

SEQ ID NO: 138852 - DNA, 26 bp, Artificial sequence
  SiRNA target sequence
ccaagtataacacaatatcttcctgt

SEQ ID NO: 138853 - DNA, 26 bp, Artificial sequence
  SiRNA target sequence
caagtataacacaatatcttcctgtt

SEQ ID NO: 138854 - DNA, 26 bp, Artificial sequence
  SiRNA target sequence
aagtataacacaatatcttcctgttt

SEQ ID NO: 138855 - DNA, 26 bp, Artificial sequence
  SiRNA target sequence
agtataacacaatatcttcctgtttt

SEQ ID NO: 138856 - DNA, 26 bp, Artificial sequence
  SiRNA target sequence
gtataacacaatatcttcctgttttg

SEQ ID NO: 138857 - DNA, 26 bp, Artificial sequence
  SiRNA target sequence
tataacacaatatcttcctgttttgg

SEQ ID NO: 138858 - DNA, 26 bp, Artificial sequence
  SiRNA target sequence
ataacacaatatcttcctgttttggg

SEQ ID NO: 138859 - DNA, 26 bp, Artificial sequence
  SiRNA target sequence
taacacaatatcttcctgttttggga

SEQ ID NO: 138860 - DNA, 26 bp, Artificial sequence
  SiRNA target sequence
aacacaatatcttcctgttttgggat

SEQ ID NO: 138861 - DNA, 26 bp, Artificial sequence
  SiRNA target sequence
acacaatatcttcctgttttgggatc

SEQ ID NO: 138862 - DNA, 26 bp, Artificial sequence
  SiRNA target sequence
cacaatatcttcctgttttgggatca

SEQ ID NO: 138863 - DNA, 26 bp, Artificial sequence
  SiRNA target sequence
acaatatcttcctgttttgggatcac

SEQ ID NO: 138864 - DNA, 26 bp, Artificial sequence
  SiRNA target sequence
caatatcttcctgttttgggatcaca

SEQ ID NO: 138865 - DNA, 26 bp, Artificial sequence
  SiRNA target sequence
aatatcttcctgttttgggatcacag

SEQ ID NO: 138866 - DNA, 26 bp, Artificial sequence
  SiRNA target sequence
atatcttcctgttttgggatcacagg

SEQ ID NO: 138867 - DNA, 26 bp, Artificial sequence
  SiRNA target sequence
tatcttcctgttttgggatcacaggg

SEQ ID NO: 138868 - DNA, 26 bp, Artificial sequence
  SiRNA target sequence
atcttcctgttttgggatcacaggga

SEQ ID NO: 138869 - DNA, 26 bp, Artificial sequence
  SiRNA target sequence
tcttcctgttttgggatcacagggat

SEQ ID NO: 138870 - DNA, 26 bp, Artificial sequence
  SiRNA target sequence
cttcctgttttgggatcacagggata

SEQ ID NO: 138871 - DNA, 26 bp, Artificial sequence
  SiRNA target sequence
ttcctgttttgggatcacagggatat

SEQ ID NO: 138872 - DNA, 26 bp, Artificial sequence
  SiRNA target sequence
tcctgttttgggatcacagggatata

SEQ ID NO: 138873 - DNA, 26 bp, Artificial sequence
  SiRNA target sequence
cctgttttgggatcacagggatatac

SEQ ID NO: 138874 - DNA, 26 bp, Artificial sequence
  SiRNA target sequence
ctgttttgggatcacagggatatact

SEQ ID NO: 138875 - DNA, 26 bp, Artificial sequence
  SiRNA target sequence
tgttttgggatcacagggatatacta

SEQ ID NO: 138876 - DNA, 26 bp, Artificial sequence
  SiRNA target sequence
gttttgggatcacagggatatactaa

SEQ ID NO: 138877 - DNA, 26 bp, Artificial sequence
  SiRNA target sequence
ttttgggatcacagggatatactaaa

SEQ ID NO: 138878 - DNA, 26 bp, Artificial sequence
  SiRNA target sequence
tttgggatcacagggatatactaaag

SEQ ID NO: 138879 - DNA, 26 bp, Artificial sequence
  SiRNA target sequence
ttgggatcacagggatatactaaagc

SEQ ID NO: 138880 - DNA, 26 bp, Artificial sequence
  SiRNA target sequence
tgggatcacagggatatactaaagct

SEQ ID NO: 138881 - DNA, 26 bp, Artificial sequence
  SiRNA target sequence
gggatcacagggatatactaaagcta

SEQ ID NO: 138882 - DNA, 26 bp, Artificial sequence
  SiRNA target sequence
ggatcacagggatatactaaagctac

SEQ ID NO: 138883 - DNA, 26 bp, Artificial sequence
  SiRNA target sequence
gatcacagggatatactaaagctaca

SEQ ID NO: 138884 - DNA, 26 bp, Artificial sequence
  SiRNA target sequence
atcacagggatatactaaagctacag

SEQ ID NO: 138885 - DNA, 26 bp, Artificial sequence
  SiRNA target sequence
tcacagggatatactaaagctacaga

SEQ ID NO: 138886 - DNA, 26 bp, Artificial sequence
  SiRNA target sequence
cacagggatatactaaagctacagaa

SEQ ID NO: 138887 - DNA, 26 bp, Artificial sequence
  SiRNA target sequence
acagggatatactaaagctacagaat

SEQ ID NO: 138888 - DNA, 26 bp, Artificial sequence
  SiRNA target sequence
cagggatatactaaagctacagaatt

SEQ ID NO: 138889 - DNA, 26 bp, Artificial sequence
  SiRNA target sequence
agggatatactaaagctacagaattt

SEQ ID NO: 138890 - DNA, 26 bp, Artificial sequence
  SiRNA target sequence
gggatatactaaagctacagaatttg

SEQ ID NO: 138891 - DNA, 26 bp, Artificial sequence
  SiRNA target sequence
ggatatactaaagctacagaatttga

SEQ ID NO: 138892 - DNA, 26 bp, Artificial sequence
  SiRNA target sequence
gatatactaaagctacagaatttgat

SEQ ID NO: 138893 - DNA, 26 bp, Artificial sequence
  SiRNA target sequence
atatactaaagctacagaatttgatt

SEQ ID NO: 138894 - DNA, 26 bp, Artificial sequence
  SiRNA target sequence
tatactaaagctacagaatttgattt

SEQ ID NO: 138895 - DNA, 26 bp, Artificial sequence
  SiRNA target sequence
atactaaagctacagaatttgatttg

SEQ ID NO: 138896 - DNA, 26 bp, Artificial sequence
  SiRNA target sequence
tactaaagctacagaatttgatttgg

SEQ ID NO: 138897 - DNA, 26 bp, Artificial sequence
  SiRNA target sequence
actaaagctacagaatttgatttggc

SEQ ID NO: 138898 - DNA, 26 bp, Artificial sequence
  SiRNA target sequence
ctaaagctacagaatttgatttggca

SEQ ID NO: 138899 - DNA, 26 bp, Artificial sequence
  SiRNA target sequence
taaagctacagaatttgatttggcac

SEQ ID NO: 138900 - DNA, 26 bp, Artificial sequence
  SiRNA target sequence
aaagctacagaatttgatttggcact

SEQ ID NO: 138901 - DNA, 26 bp, Artificial sequence
  SiRNA target sequence
aagctacagaatttgatttggcactt

SEQ ID NO: 138902 - DNA, 26 bp, Artificial sequence
  SiRNA target sequence
agctacagaatttgatttggcactta

SEQ ID NO: 138903 - DNA, 26 bp, Artificial sequence
  SiRNA target sequence
gctacagaatttgatttggcacttac

SEQ ID NO: 138904 - DNA, 26 bp, Artificial sequence
  SiRNA target sequence
ctacagaatttgatttggcacttact

SEQ ID NO: 138905 - DNA, 26 bp, Artificial sequence
  SiRNA target sequence
tacagaatttgatttggcacttactt

SEQ ID NO: 138906 - DNA, 26 bp, Artificial sequence
  SiRNA target sequence
acagaatttgatttggcacttacttt

SEQ ID NO: 138907 - DNA, 26 bp, Artificial sequence
  SiRNA target sequence
cagaatttgatttggcacttacttta

SEQ ID NO: 138908 - DNA, 26 bp, Artificial sequence
  SiRNA target sequence
agaatttgatttggcacttactttaa

SEQ ID NO: 138909 - DNA, 26 bp, Artificial sequence
  SiRNA target sequence
gaatttgatttggcacttactttaaa

SEQ ID NO: 138910 - DNA, 26 bp, Artificial sequence
  SiRNA target sequence
aatttgatttggcacttactttaaat

SEQ ID NO: 138911 - DNA, 26 bp, Artificial sequence
  SiRNA target sequence
atttgatttggcacttactttaaata

SEQ ID NO: 138912 - DNA, 26 bp, Artificial sequence
  SiRNA target sequence
tttgatttggcacttactttaaatat

SEQ ID NO: 138913 - DNA, 26 bp, Artificial sequence
  SiRNA target sequence
ttgatttggcacttactttaaatatt

SEQ ID NO: 138914 - DNA, 26 bp, Artificial sequence
  SiRNA target sequence
tgatttggcacttactttaaatattc

SEQ ID NO: 138915 - DNA, 26 bp, Artificial sequence
  SiRNA target sequence
gatttggcacttactttaaatattcc

SEQ ID NO: 138916 - DNA, 26 bp, Artificial sequence
  SiRNA target sequence
atttggcacttactttaaatattcca

SEQ ID NO: 138917 - DNA, 26 bp, Artificial sequence
  SiRNA target sequence
tttggcacttactttaaatattccag

SEQ ID NO: 138918 - DNA, 26 bp, Artificial sequence
  SiRNA target sequence
ttggcacttactttaaatattccaga

SEQ ID NO: 138919 - DNA, 26 bp, Artificial sequence
  SiRNA target sequence
tggcacttactttaaatattccagaa

SEQ ID NO: 138920 - DNA, 26 bp, Artificial sequence
  SiRNA target sequence
ggcacttactttaaatattccagaag

SEQ ID NO: 138921 - DNA, 26 bp, Artificial sequence
  SiRNA target sequence
gcacttactttaaatattccagaaga

SEQ ID NO: 138922 - DNA, 26 bp, Artificial sequence
  SiRNA target sequence
cacttactttaaatattccagaagat

SEQ ID NO: 138923 - DNA, 26 bp, Artificial sequence
  SiRNA target sequence
acttactttaaatattccagaagata

SEQ ID NO: 138924 - DNA, 26 bp, Artificial sequence
  SiRNA target sequence
cttactttaaatattccagaagatat

SEQ ID NO: 138925 - DNA, 26 bp, Artificial sequence
  SiRNA target sequence
ttactttaaatattccagaagatata

SEQ ID NO: 138926 - DNA, 26 bp, Artificial sequence
  SiRNA target sequence
tactttaaatattccagaagatatag

SEQ ID NO: 138927 - DNA, 26 bp, Artificial sequence
  SiRNA target sequence
actttaaatattccagaagatatagc

SEQ ID NO: 138928 - DNA, 26 bp, Artificial sequence
  SiRNA target sequence
ctttaaatattccagaagatatagct

SEQ ID NO: 138929 - DNA, 26 bp, Artificial sequence
  SiRNA target sequence
tttaaatattccagaagatatagcta

SEQ ID NO: 138930 - DNA, 26 bp, Artificial sequence
  SiRNA target sequence
ttaaatattccagaagatatagctaa

SEQ ID NO: 138931 - DNA, 26 bp, Artificial sequence
  SiRNA target sequence
taaatattccagaagatatagctaag

SEQ ID NO: 138932 - DNA, 26 bp, Artificial sequence
  SiRNA target sequence
aaatattccagaagatatagctaagc

SEQ ID NO: 138933 - DNA, 26 bp, Artificial sequence
  SiRNA target sequence
aatattccagaagatatagctaagca

SEQ ID NO: 138934 - DNA, 26 bp, Artificial sequence
  SiRNA target sequence
atattccagaagatatagctaagcat

SEQ ID NO: 138935 - DNA, 26 bp, Artificial sequence
  SiRNA target sequence
tattccagaagatatagctaagcatt

SEQ ID NO: 138936 - DNA, 26 bp, Artificial sequence
  SiRNA target sequence
attccagaagatatagctaagcattt

SEQ ID NO: 138937 - DNA, 26 bp, Artificial sequence
  SiRNA target sequence
ttccagaagatatagctaagcattta

SEQ ID NO: 138938 - DNA, 26 bp, Artificial sequence
  SiRNA target sequence
tccagaagatatagctaagcatttag

SEQ ID NO: 138939 - DNA, 26 bp, Artificial sequence
  SiRNA target sequence
ccagaagatatagctaagcatttagc

SEQ ID NO: 138940 - DNA, 26 bp, Artificial sequence
  SiRNA target sequence
cagaagatatagctaagcatttagct

SEQ ID NO: 138941 - DNA, 26 bp, Artificial sequence
  SiRNA target sequence
agaagatatagctaagcatttagcta

SEQ ID NO: 138942 - DNA, 26 bp, Artificial sequence
  SiRNA target sequence
gaagatatagctaagcatttagctac

SEQ ID NO: 138943 - DNA, 26 bp, Artificial sequence
  SiRNA target sequence
aagatatagctaagcatttagctaca

SEQ ID NO: 138944 - DNA, 26 bp, Artificial sequence
  SiRNA target sequence
agatatagctaagcatttagctacaa

SEQ ID NO: 138945 - DNA, 26 bp, Artificial sequence
  SiRNA target sequence
gatatagctaagcatttagctacaac

SEQ ID NO: 138946 - DNA, 26 bp, Artificial sequence
  SiRNA target sequence
atatagctaagcatttagctacaact

SEQ ID NO: 138947 - DNA, 26 bp, Artificial sequence
  SiRNA target sequence
tatagctaagcatttagctacaactt

SEQ ID NO: 138948 - DNA, 26 bp, Artificial sequence
  SiRNA target sequence
atagctaagcatttagctacaactta

SEQ ID NO: 138949 - DNA, 26 bp, Artificial sequence
  SiRNA target sequence
tagctaagcatttagctacaacttat

SEQ ID NO: 138950 - DNA, 26 bp, Artificial sequence
  SiRNA target sequence
agctaagcatttagctacaacttatg

SEQ ID NO: 138951 - DNA, 26 bp, Artificial sequence
  SiRNA target sequence
gctaagcatttagctacaacttatgg

SEQ ID NO: 138952 - DNA, 26 bp, Artificial sequence
  SiRNA target sequence
ctaagcatttagctacaacttatggt

SEQ ID NO: 138953 - DNA, 26 bp, Artificial sequence
  SiRNA target sequence
taagcatttagctacaacttatggta

SEQ ID NO: 138954 - DNA, 26 bp, Artificial sequence
  SiRNA target sequence
aagcatttagctacaacttatggtac

SEQ ID NO: 138955 - DNA, 26 bp, Artificial sequence
  SiRNA target sequence
agcatttagctacaacttatggtacc

SEQ ID NO: 138956 - DNA, 26 bp, Artificial sequence
  SiRNA target sequence
gcatttagctacaacttatggtacca

SEQ ID NO: 138957 - DNA, 26 bp, Artificial sequence
  SiRNA target sequence
catttagctacaacttatggtaccaa

SEQ ID NO: 138958 - DNA, 26 bp, Artificial sequence
  SiRNA target sequence
atttagctacaacttatggtaccaaa

SEQ ID NO: 138959 - DNA, 26 bp, Artificial sequence
  SiRNA target sequence
tttagctacaacttatggtaccaaag

SEQ ID NO: 138960 - DNA, 26 bp, Artificial sequence
  SiRNA target sequence
ttagctacaacttatggtaccaaagc

SEQ ID NO: 138961 - DNA, 26 bp, Artificial sequence
  SiRNA target sequence
tagctacaacttatggtaccaaagct

SEQ ID NO: 138962 - DNA, 26 bp, Artificial sequence
  SiRNA target sequence
agctacaacttatggtaccaaagctt

SEQ ID NO: 138963 - DNA, 26 bp, Artificial sequence
  SiRNA target sequence
gctacaacttatggtaccaaagctta

SEQ ID NO: 138964 - DNA, 26 bp, Artificial sequence
  SiRNA target sequence
ctacaacttatggtaccaaagcttac

SEQ ID NO: 138965 - DNA, 26 bp, Artificial sequence
  SiRNA target sequence
tacaacttatggtaccaaagcttaca

SEQ ID NO: 138966 - DNA, 26 bp, Artificial sequence
  SiRNA target sequence
acaacttatggtaccaaagcttacaa

SEQ ID NO: 138967 - DNA, 26 bp, Artificial sequence
  SiRNA target sequence
caacttatggtaccaaagcttacaat

SEQ ID NO: 138968 - DNA, 26 bp, Artificial sequence
  SiRNA target sequence
aacttatggtaccaaagcttacaatt

SEQ ID NO: 138969 - DNA, 26 bp, Artificial sequence
  SiRNA target sequence
acttatggtaccaaagcttacaattt

SEQ ID NO: 138970 - DNA, 26 bp, Artificial sequence
  SiRNA target sequence
cttatggtaccaaagcttacaatttc

SEQ ID NO: 138971 - DNA, 26 bp, Artificial sequence
  SiRNA target sequence
ttatggtaccaaagcttacaatttct

SEQ ID NO: 138972 - DNA, 26 bp, Artificial sequence
  SiRNA target sequence
tatggtaccaaagcttacaatttctc

SEQ ID NO: 138973 - DNA, 26 bp, Artificial sequence
  SiRNA target sequence
atggtaccaaagcttacaatttctct

SEQ ID NO: 138974 - DNA, 26 bp, Artificial sequence
  SiRNA target sequence
tggtaccaaagcttacaatttctctg

SEQ ID NO: 138975 - DNA, 26 bp, Artificial sequence
  SiRNA target sequence
ggtaccaaagcttacaatttctctga

SEQ ID NO: 138976 - DNA, 26 bp, Artificial sequence
  SiRNA target sequence
gtaccaaagcttacaatttctctgaa

SEQ ID NO: 138977 - DNA, 26 bp, Artificial sequence
  SiRNA target sequence
taccaaagcttacaatttctctgaat

SEQ ID NO: 138978 - DNA, 26 bp, Artificial sequence
  SiRNA target sequence
accaaagcttacaatttctctgaata

SEQ ID NO: 138979 - DNA, 26 bp, Artificial sequence
  SiRNA target sequence
ccaaagcttacaatttctctgaatac

SEQ ID NO: 138980 - DNA, 26 bp, Artificial sequence
  SiRNA target sequence
caaagcttacaatttctctgaatact

SEQ ID NO: 138981 - DNA, 26 bp, Artificial sequence
  SiRNA target sequence
aaagcttacaatttctctgaatactt

SEQ ID NO: 138982 - DNA, 26 bp, Artificial sequence
  SiRNA target sequence
aagcttacaatttctctgaatacttt

SEQ ID NO: 138983 - DNA, 26 bp, Artificial sequence
  SiRNA target sequence
agcttacaatttctctgaatacttta

SEQ ID NO: 138984 - DNA, 26 bp, Artificial sequence
  SiRNA target sequence
gcttacaatttctctgaatactttaa

SEQ ID NO: 138985 - DNA, 26 bp, Artificial sequence
  SiRNA target sequence
cttacaatttctctgaatactttaat

SEQ ID NO: 138986 - DNA, 26 bp, Artificial sequence
  SiRNA target sequence
ttacaatttctctgaatactttaatg

SEQ ID NO: 138987 - DNA, 26 bp, Artificial sequence
  SiRNA target sequence
tacaatttctctgaatactttaatgg

SEQ ID NO: 138988 - DNA, 26 bp, Artificial sequence
  SiRNA target sequence
acaatttctctgaatactttaatggg

SEQ ID NO: 138989 - DNA, 26 bp, Artificial sequence
  SiRNA target sequence
caatttctctgaatactttaatgggt

SEQ ID NO: 138990 - DNA, 26 bp, Artificial sequence
  SiRNA target sequence
aatttctctgaatactttaatgggtc

SEQ ID NO: 138991 - DNA, 26 bp, Artificial sequence
  SiRNA target sequence
atttctctgaatactttaatgggtca

SEQ ID NO: 138992 - DNA, 26 bp, Artificial sequence
  SiRNA target sequence
tttctctgaatactttaatgggtcat

SEQ ID NO: 138993 - DNA, 26 bp, Artificial sequence
  SiRNA target sequence
ttctctgaatactttaatgggtcata

SEQ ID NO: 138994 - DNA, 26 bp, Artificial sequence
  SiRNA target sequence
tctctgaatactttaatgggtcatac

SEQ ID NO: 138995 - DNA, 26 bp, Artificial sequence
  SiRNA target sequence
ctctgaatactttaatgggtcataca

SEQ ID NO: 138996 - DNA, 26 bp, Artificial sequence
  SiRNA target sequence
tctgaatactttaatgggtcatacac

SEQ ID NO: 138997 - DNA, 26 bp, Artificial sequence
  SiRNA target sequence
ctgaatactttaatgggtcatacacc

SEQ ID NO: 138998 - DNA, 26 bp, Artificial sequence
  SiRNA target sequence
tgaatactttaatgggtcatacacca

SEQ ID NO: 138999 - DNA, 26 bp, Artificial sequence
  SiRNA target sequence
gaatactttaatgggtcatacaccag

SEQ ID NO: 139000 - DNA, 26 bp, Artificial sequence
  SiRNA target sequence
aatactttaatgggtcatacaccaga

SEQ ID NO: 139001 - DNA, 26 bp, Artificial sequence
  SiRNA target sequence
atactttaatgggtcatacaccagac

SEQ ID NO: 139002 - DNA, 26 bp, Artificial sequence
  SiRNA target sequence
tactttaatgggtcatacaccagact

SEQ ID NO: 139003 - DNA, 26 bp, Artificial sequence
  SiRNA target sequence
actttaatgggtcatacaccagactt

SEQ ID NO: 139004 - DNA, 26 bp, Artificial sequence
  SiRNA target sequence
ctttaatgggtcatacaccagactta

SEQ ID NO: 139005 - DNA, 26 bp, Artificial sequence
  SiRNA target sequence
tttaatgggtcatacaccagacttac

SEQ ID NO: 139006 - DNA, 26 bp, Artificial sequence
  SiRNA target sequence
ttaatgggtcatacaccagacttaca

SEQ ID NO: 139007 - DNA, 26 bp, Artificial sequence
  SiRNA target sequence
taatgggtcatacaccagacttacag

SEQ ID NO: 139008 - DNA, 26 bp, Artificial sequence
  SiRNA target sequence
aatgggtcatacaccagacttacaga

SEQ ID NO: 139009 - DNA, 26 bp, Artificial sequence
  SiRNA target sequence
atgggtcatacaccagacttacagat

SEQ ID NO: 139010 - DNA, 26 bp, Artificial sequence
  SiRNA target sequence
tgggtcatacaccagacttacagatg

SEQ ID NO: 139011 - DNA, 26 bp, Artificial sequence
  SiRNA target sequence
gggtcatacaccagacttacagatgg

SEQ ID NO: 139012 - DNA, 26 bp, Artificial sequence
  SiRNA target sequence
ggtcatacaccagacttacagatggt

SEQ ID NO: 139013 - DNA, 26 bp, Artificial sequence
  SiRNA target sequence
gtcatacaccagacttacagatggtt

SEQ ID NO: 139014 - DNA, 26 bp, Artificial sequence
  SiRNA target sequence
tcatacaccagacttacagatggtta

SEQ ID NO: 139015 - DNA, 26 bp, Artificial sequence
  SiRNA target sequence
catacaccagacttacagatggttat

SEQ ID NO: 139016 - DNA, 26 bp, Artificial sequence
  SiRNA target sequence
atacaccagacttacagatggttatc

SEQ ID NO: 139017 - DNA, 26 bp, Artificial sequence
  SiRNA target sequence
tacaccagacttacagatggttatcc

SEQ ID NO: 139018 - DNA, 26 bp, Artificial sequence
  SiRNA target sequence
acaccagacttacagatggttatcct

SEQ ID NO: 139019 - DNA, 26 bp, Artificial sequence
  SiRNA target sequence
caccagacttacagatggttatcctt

SEQ ID NO: 139020 - DNA, 26 bp, Artificial sequence
  SiRNA target sequence
accagacttacagatggttatcctta

SEQ ID NO: 139021 - DNA, 26 bp, Artificial sequence
  SiRNA target sequence
ccagacttacagatggttatccttat

SEQ ID NO: 139022 - DNA, 26 bp, Artificial sequence
  SiRNA target sequence
cagacttacagatggttatccttata

SEQ ID NO: 139023 - DNA, 26 bp, Artificial sequence
  SiRNA target sequence
agacttacagatggttatccttatac

SEQ ID NO: 139024 - DNA, 26 bp, Artificial sequence
  SiRNA target sequence
gacttacagatggttatccttataca

SEQ ID NO: 139025 - DNA, 26 bp, Artificial sequence
  SiRNA target sequence
acttacagatggttatccttatacaa

SEQ ID NO: 139026 - DNA, 26 bp, Artificial sequence
  SiRNA target sequence
cttacagatggttatccttatacaaa

SEQ ID NO: 139027 - DNA, 26 bp, Artificial sequence
  SiRNA target sequence
ttacagatggttatccttatacaaaa

SEQ ID NO: 139028 - DNA, 26 bp, Artificial sequence
  SiRNA target sequence
tacagatggttatccttatacaaaag

SEQ ID NO: 139029 - DNA, 26 bp, Artificial sequence
  SiRNA target sequence
acagatggttatccttatacaaaaga

SEQ ID NO: 139030 - DNA, 26 bp, Artificial sequence
  SiRNA target sequence
cagatggttatccttatacaaaagaa

SEQ ID NO: 139031 - DNA, 26 bp, Artificial sequence
  SiRNA target sequence
agatggttatccttatacaaaagaag

SEQ ID NO: 139032 - DNA, 26 bp, Artificial sequence
  SiRNA target sequence
gatggttatccttatacaaaagaaga

SEQ ID NO: 139033 - DNA, 26 bp, Artificial sequence
  SiRNA target sequence
atggttatccttatacaaaagaagaa

SEQ ID NO: 139034 - DNA, 26 bp, Artificial sequence
  SiRNA target sequence
tggttatccttatacaaaagaagaaa

SEQ ID NO: 139035 - DNA, 26 bp, Artificial sequence
  SiRNA target sequence
ggttatccttatacaaaagaagaaat

SEQ ID NO: 139036 - DNA, 26 bp, Artificial sequence
  SiRNA target sequence
gttatccttatacaaaagaagaaata

SEQ ID NO: 139037 - DNA, 26 bp, Artificial sequence
  SiRNA target sequence
ttatccttatacaaaagaagaaatag

SEQ ID NO: 139038 - DNA, 26 bp, Artificial sequence
  SiRNA target sequence
tatccttatacaaaagaagaaatagt

SEQ ID NO: 139039 - DNA, 26 bp, Artificial sequence
  SiRNA target sequence
atccttatacaaaagaagaaatagta

SEQ ID NO: 139040 - DNA, 26 bp, Artificial sequence
  SiRNA target sequence
tccttatacaaaagaagaaatagtat

SEQ ID NO: 139041 - DNA, 26 bp, Artificial sequence
  SiRNA target sequence
ccttatacaaaagaagaaatagtata

SEQ ID NO: 139042 - DNA, 26 bp, Artificial sequence
  SiRNA target sequence
cttatacaaaagaagaaatagtatat

SEQ ID NO: 139043 - DNA, 26 bp, Artificial sequence
  SiRNA target sequence
ttatacaaaagaagaaatagtatatt

SEQ ID NO: 139044 - DNA, 26 bp, Artificial sequence
  SiRNA target sequence
tatacaaaagaagaaatagtatattg

SEQ ID NO: 139045 - DNA, 26 bp, Artificial sequence
  SiRNA target sequence
atacaaaagaagaaatagtatattgt

SEQ ID NO: 139046 - DNA, 26 bp, Artificial sequence
  SiRNA target sequence
tacaaaagaagaaatagtatattgta

SEQ ID NO: 139047 - DNA, 26 bp, Artificial sequence
  SiRNA target sequence
acaaaagaagaaatagtatattgtat

SEQ ID NO: 139048 - DNA, 26 bp, Artificial sequence
  SiRNA target sequence
caaaagaagaaatagtatattgtatc

SEQ ID NO: 139049 - DNA, 26 bp, Artificial sequence
  SiRNA target sequence
aaaagaagaaatagtatattgtatcg

SEQ ID NO: 139050 - DNA, 26 bp, Artificial sequence
  SiRNA target sequence
aaagaagaaatagtatattgtatcga

SEQ ID NO: 139051 - DNA, 26 bp, Artificial sequence
  SiRNA target sequence
aagaagaaatagtatattgtatcgaa

SEQ ID NO: 139052 - DNA, 26 bp, Artificial sequence
  SiRNA target sequence
agaagaaatagtatattgtatcgaac

SEQ ID NO: 139053 - DNA, 26 bp, Artificial sequence
  SiRNA target sequence
gaagaaatagtatattgtatcgaaca

SEQ ID NO: 139054 - DNA, 26 bp, Artificial sequence
  SiRNA target sequence
aagaaatagtatattgtatcgaacat

SEQ ID NO: 139055 - DNA, 26 bp, Artificial sequence
  SiRNA target sequence
agaaatagtatattgtatcgaacatg

SEQ ID NO: 139056 - DNA, 26 bp, Artificial sequence
  SiRNA target sequence
gaaatagtatattgtatcgaacatga

SEQ ID NO: 139057 - DNA, 26 bp, Artificial sequence
  SiRNA target sequence
aaatagtatattgtatcgaacatgaa

SEQ ID NO: 139058 - DNA, 26 bp, Artificial sequence
  SiRNA target sequence
aatagtatattgtatcgaacatgaat

SEQ ID NO: 139059 - DNA, 26 bp, Artificial sequence
  SiRNA target sequence
atagtatattgtatcgaacatgaatt

SEQ ID NO: 139060 - DNA, 26 bp, Artificial sequence
  SiRNA target sequence
tagtatattgtatcgaacatgaattg

SEQ ID NO: 139061 - DNA, 26 bp, Artificial sequence
  SiRNA target sequence
agtatattgtatcgaacatgaattgg

SEQ ID NO: 139062 - DNA, 26 bp, Artificial sequence
  SiRNA target sequence
gtatattgtatcgaacatgaattggc

SEQ ID NO: 139063 - DNA, 26 bp, Artificial sequence
  SiRNA target sequence
tatattgtatcgaacatgaattggct

SEQ ID NO: 139064 - DNA, 26 bp, Artificial sequence
  SiRNA target sequence
atattgtatcgaacatgaattggctt

SEQ ID NO: 139065 - DNA, 26 bp, Artificial sequence
  SiRNA target sequence
tattgtatcgaacatgaattggctta

SEQ ID NO: 139066 - DNA, 26 bp, Artificial sequence
  SiRNA target sequence
attgtatcgaacatgaattggcttat

SEQ ID NO: 139067 - DNA, 26 bp, Artificial sequence
  SiRNA target sequence
ttgtatcgaacatgaattggcttatc

SEQ ID NO: 139068 - DNA, 26 bp, Artificial sequence
  SiRNA target sequence
tgtatcgaacatgaattggcttatcg

SEQ ID NO: 139069 - DNA, 26 bp, Artificial sequence
  SiRNA target sequence
gtatcgaacatgaattggcttatcgc

SEQ ID NO: 139070 - DNA, 26 bp, Artificial sequence
  SiRNA target sequence
tatcgaacatgaattggcttatcgca

SEQ ID NO: 139071 - DNA, 26 bp, Artificial sequence
  SiRNA target sequence
atcgaacatgaattggcttatcgcat

SEQ ID NO: 139072 - DNA, 26 bp, Artificial sequence
  SiRNA target sequence
tcgaacatgaattggcttatcgcatc

SEQ ID NO: 139073 - DNA, 26 bp, Artificial sequence
  SiRNA target sequence
cgaacatgaattggcttatcgcatca

SEQ ID NO: 139074 - DNA, 26 bp, Artificial sequence
  SiRNA target sequence
gaacatgaattggcttatcgcatcag

SEQ ID NO: 139075 - DNA, 26 bp, Artificial sequence
  SiRNA target sequence
aacatgaattggcttatcgcatcagt

SEQ ID NO: 139076 - DNA, 26 bp, Artificial sequence
  SiRNA target sequence
acatgaattggcttatcgcatcagtg

SEQ ID NO: 139077 - DNA, 26 bp, Artificial sequence
  SiRNA target sequence
catgaattggcttatcgcatcagtga

SEQ ID NO: 139078 - DNA, 26 bp, Artificial sequence
  SiRNA target sequence
atgaattggcttatcgcatcagtgat

SEQ ID NO: 139079 - DNA, 26 bp, Artificial sequence
  SiRNA target sequence
tgaattggcttatcgcatcagtgata

SEQ ID NO: 139080 - DNA, 26 bp, Artificial sequence
  SiRNA target sequence
gaattggcttatcgcatcagtgatat

SEQ ID NO: 139081 - DNA, 26 bp, Artificial sequence
  SiRNA target sequence
aattggcttatcgcatcagtgatata

SEQ ID NO: 139082 - DNA, 26 bp, Artificial sequence
  SiRNA target sequence
attggcttatcgcatcagtgatatat

SEQ ID NO: 139083 - DNA, 26 bp, Artificial sequence
  SiRNA target sequence
ttggcttatcgcatcagtgatatatt

SEQ ID NO: 139084 - DNA, 26 bp, Artificial sequence
  SiRNA target sequence
tggcttatcgcatcagtgatatatta

SEQ ID NO: 139085 - DNA, 26 bp, Artificial sequence
  SiRNA target sequence
ggcttatcgcatcagtgatatattat

SEQ ID NO: 139086 - DNA, 26 bp, Artificial sequence
  SiRNA target sequence
gcttatcgcatcagtgatatattatt

SEQ ID NO: 139087 - DNA, 26 bp, Artificial sequence
  SiRNA target sequence
cttatcgcatcagtgatatattattt

SEQ ID NO: 139088 - DNA, 26 bp, Artificial sequence
  SiRNA target sequence
ttatcgcatcagtgatatattattta

SEQ ID NO: 139089 - DNA, 26 bp, Artificial sequence
  SiRNA target sequence
tatcgcatcagtgatatattatttaa

SEQ ID NO: 139090 - DNA, 26 bp, Artificial sequence
  SiRNA target sequence
atcgcatcagtgatatattatttaat

SEQ ID NO: 139091 - DNA, 26 bp, Artificial sequence
  SiRNA target sequence
tcgcatcagtgatatattatttaata

SEQ ID NO: 139092 - DNA, 26 bp, Artificial sequence
  SiRNA target sequence
cgcatcagtgatatattatttaatag

SEQ ID NO: 139093 - DNA, 26 bp, Artificial sequence
  SiRNA target sequence
gcatcagtgatatattatttaatagg

SEQ ID NO: 139094 - DNA, 26 bp, Artificial sequence
  SiRNA target sequence
catcagtgatatattatttaatagga

SEQ ID NO: 139095 - DNA, 26 bp, Artificial sequence
  SiRNA target sequence
atcagtgatatattatttaataggat

SEQ ID NO: 139096 - DNA, 26 bp, Artificial sequence
  SiRNA target sequence
tcagtgatatattatttaataggatg

SEQ ID NO: 139097 - DNA, 26 bp, Artificial sequence
  SiRNA target sequence
cagtgatatattatttaataggatga

SEQ ID NO: 139098 - DNA, 26 bp, Artificial sequence
  SiRNA target sequence
agtgatatattatttaataggatgat

SEQ ID NO: 139099 - DNA, 26 bp, Artificial sequence
  SiRNA target sequence
gtgatatattatttaataggatgatg

SEQ ID NO: 139100 - DNA, 26 bp, Artificial sequence
  SiRNA target sequence
tgatatattatttaataggatgatga

SEQ ID NO: 139101 - DNA, 26 bp, Artificial sequence
  SiRNA target sequence
gatatattatttaataggatgatgat

SEQ ID NO: 139102 - DNA, 26 bp, Artificial sequence
  SiRNA target sequence
atatattatttaataggatgatgata

SEQ ID NO: 139103 - DNA, 26 bp, Artificial sequence
  SiRNA target sequence
tatattatttaataggatgatgatag

SEQ ID NO: 139104 - DNA, 26 bp, Artificial sequence
  SiRNA target sequence
atattatttaataggatgatgatagg

SEQ ID NO: 139105 - DNA, 26 bp, Artificial sequence
  SiRNA target sequence
tattatttaataggatgatgatagga

SEQ ID NO: 139106 - DNA, 26 bp, Artificial sequence
  SiRNA target sequence
attatttaataggatgatgataggat

SEQ ID NO: 139107 - DNA, 26 bp, Artificial sequence
  SiRNA target sequence
ttatttaataggatgatgataggata

SEQ ID NO: 139108 - DNA, 26 bp, Artificial sequence
  SiRNA target sequence
tatttaataggatgatgataggatac

SEQ ID NO: 139109 - DNA, 26 bp, Artificial sequence
  SiRNA target sequence
atttaataggatgatgataggataca

SEQ ID NO: 139110 - DNA, 26 bp, Artificial sequence
  SiRNA target sequence
tttaataggatgatgataggatacat

SEQ ID NO: 139111 - DNA, 26 bp, Artificial sequence
  SiRNA target sequence
ttaataggatgatgataggatacatt

SEQ ID NO: 139112 - DNA, 26 bp, Artificial sequence
  SiRNA target sequence
taataggatgatgataggatacattg

SEQ ID NO: 139113 - DNA, 26 bp, Artificial sequence
  SiRNA target sequence
aataggatgatgataggatacattga

SEQ ID NO: 139114 - DNA, 26 bp, Artificial sequence
  SiRNA target sequence
ataggatgatgataggatacattgac

SEQ ID NO: 139115 - DNA, 26 bp, Artificial sequence
  SiRNA target sequence
taggatgatgataggatacattgacg

SEQ ID NO: 139116 - DNA, 26 bp, Artificial sequence
  SiRNA target sequence
aggatgatgataggatacattgacgt

SEQ ID NO: 139117 - DNA, 26 bp, Artificial sequence
  SiRNA target sequence
ggatgatgataggatacattgacgtc

SEQ ID NO: 139118 - DNA, 26 bp, Artificial sequence
  SiRNA target sequence
gatgatgataggatacattgacgtca

SEQ ID NO: 139119 - DNA, 26 bp, Artificial sequence
  SiRNA target sequence
atgatgataggatacattgacgtcag

SEQ ID NO: 139120 - DNA, 26 bp, Artificial sequence
  SiRNA target sequence
tgatgataggatacattgacgtcaga

SEQ ID NO: 139121 - DNA, 26 bp, Artificial sequence
  SiRNA target sequence
gatgataggatacattgacgtcagaa

SEQ ID NO: 139122 - DNA, 26 bp, Artificial sequence
  SiRNA target sequence
atgataggatacattgacgtcagaag

SEQ ID NO: 139123 - DNA, 26 bp, Artificial sequence
  SiRNA target sequence
tgataggatacattgacgtcagaaga

SEQ ID NO: 139124 - DNA, 26 bp, Artificial sequence
  SiRNA target sequence
gataggatacattgacgtcagaagag

SEQ ID NO: 139125 - DNA, 26 bp, Artificial sequence
  SiRNA target sequence
ataggatacattgacgtcagaagagc

SEQ ID NO: 139126 - DNA, 26 bp, Artificial sequence
  SiRNA target sequence
taggatacattgacgtcagaagagca

SEQ ID NO: 139127 - DNA, 26 bp, Artificial sequence
  SiRNA target sequence
aggatacattgacgtcagaagagcat

SEQ ID NO: 139128 - DNA, 26 bp, Artificial sequence
  SiRNA target sequence
ggatacattgacgtcagaagagcatt

SEQ ID NO: 139129 - DNA, 26 bp, Artificial sequence
  SiRNA target sequence
gatacattgacgtcagaagagcattt

SEQ ID NO: 139130 - DNA, 26 bp, Artificial sequence
  SiRNA target sequence
atacattgacgtcagaagagcatttg

SEQ ID NO: 139131 - DNA, 26 bp, Artificial sequence
  SiRNA target sequence
tacattgacgtcagaagagcatttga

SEQ ID NO: 139132 - DNA, 26 bp, Artificial sequence
  SiRNA target sequence
acattgacgtcagaagagcatttgat

SEQ ID NO: 139133 - DNA, 26 bp, Artificial sequence
  SiRNA target sequence
cattgacgtcagaagagcatttgatt

SEQ ID NO: 139134 - DNA, 26 bp, Artificial sequence
  SiRNA target sequence
attgacgtcagaagagcatttgattt

SEQ ID NO: 139135 - DNA, 26 bp, Artificial sequence
  SiRNA target sequence
ttgacgtcagaagagcatttgattta

SEQ ID NO: 139136 - DNA, 26 bp, Artificial sequence
  SiRNA target sequence
tgacgtcagaagagcatttgatttaa

SEQ ID NO: 139137 - DNA, 26 bp, Artificial sequence
  SiRNA target sequence
gacgtcagaagagcatttgatttaat

SEQ ID NO: 139138 - DNA, 26 bp, Artificial sequence
  SiRNA target sequence
acgtcagaagagcatttgatttaatt

SEQ ID NO: 139139 - DNA, 26 bp, Artificial sequence
  SiRNA target sequence
cgtcagaagagcatttgatttaattg

SEQ ID NO: 139140 - DNA, 26 bp, Artificial sequence
  SiRNA target sequence
gtcagaagagcatttgatttaattgg

SEQ ID NO: 139141 - DNA, 26 bp, Artificial sequence
  SiRNA target sequence
tcagaagagcatttgatttaattggt

SEQ ID NO: 139142 - DNA, 26 bp, Artificial sequence
  SiRNA target sequence
cagaagagcatttgatttaattggta

SEQ ID NO: 139143 - DNA, 26 bp, Artificial sequence
  SiRNA target sequence
agaagagcatttgatttaattggtat

SEQ ID NO: 139144 - DNA, 26 bp, Artificial sequence
  SiRNA target sequence
gaagagcatttgatttaattggtata

SEQ ID NO: 139145 - DNA, 26 bp, Artificial sequence
  SiRNA target sequence
aagagcatttgatttaattggtatag

SEQ ID NO: 139146 - DNA, 26 bp, Artificial sequence
  SiRNA target sequence
agagcatttgatttaattggtatagt

SEQ ID NO: 139147 - DNA, 26 bp, Artificial sequence
  SiRNA target sequence
gagcatttgatttaattggtatagta

SEQ ID NO: 139148 - DNA, 26 bp, Artificial sequence
  SiRNA target sequence
agcatttgatttaattggtatagtag

SEQ ID NO: 139149 - DNA, 26 bp, Artificial sequence
  SiRNA target sequence
gcatttgatttaattggtatagtagc

SEQ ID NO: 139150 - DNA, 26 bp, Artificial sequence
  SiRNA target sequence
catttgatttaattggtatagtagct

SEQ ID NO: 139151 - DNA, 26 bp, Artificial sequence
  SiRNA target sequence
atttgatttaattggtatagtagctg

SEQ ID NO: 139152 - DNA, 26 bp, Artificial sequence
  SiRNA target sequence
tttgatttaattggtatagtagctga

SEQ ID NO: 139153 - DNA, 26 bp, Artificial sequence
  SiRNA target sequence
ttgatttaattggtatagtagctgaa

SEQ ID NO: 139154 - DNA, 26 bp, Artificial sequence
  SiRNA target sequence
tgatttaattggtatagtagctgaag

SEQ ID NO: 139155 - DNA, 26 bp, Artificial sequence
  SiRNA target sequence
gatttaattggtatagtagctgaagt

SEQ ID NO: 139156 - DNA, 26 bp, Artificial sequence
  SiRNA target sequence
atttaattggtatagtagctgaagta

SEQ ID NO: 139157 - DNA, 26 bp, Artificial sequence
  SiRNA target sequence
tttaattggtatagtagctgaagtaa

SEQ ID NO: 139158 - DNA, 26 bp, Artificial sequence
  SiRNA target sequence
ttaattggtatagtagctgaagtaat

SEQ ID NO: 139159 - DNA, 26 bp, Artificial sequence
  SiRNA target sequence
taattggtatagtagctgaagtaatg

SEQ ID NO: 139160 - DNA, 26 bp, Artificial sequence
  SiRNA target sequence
aattggtatagtagctgaagtaatga

SEQ ID NO: 139161 - DNA, 26 bp, Artificial sequence
  SiRNA target sequence
attggtatagtagctgaagtaatgaa

SEQ ID NO: 139162 - DNA, 26 bp, Artificial sequence
  SiRNA target sequence
ttggtatagtagctgaagtaatgaaa

SEQ ID NO: 139163 - DNA, 26 bp, Artificial sequence
  SiRNA target sequence
tggtatagtagctgaagtaatgaaag

SEQ ID NO: 139164 - DNA, 26 bp, Artificial sequence
  SiRNA target sequence
ggtatagtagctgaagtaatgaaaga

SEQ ID NO: 139165 - DNA, 26 bp, Artificial sequence
  SiRNA target sequence
gtatagtagctgaagtaatgaaagac

SEQ ID NO: 139166 - DNA, 26 bp, Artificial sequence
  SiRNA target sequence
tatagtagctgaagtaatgaaagact

SEQ ID NO: 139167 - DNA, 26 bp, Artificial sequence
  SiRNA target sequence
atagtagctgaagtaatgaaagacta

SEQ ID NO: 139168 - DNA, 26 bp, Artificial sequence
  SiRNA target sequence
tagtagctgaagtaatgaaagactat

SEQ ID NO: 139169 - DNA, 26 bp, Artificial sequence
  SiRNA target sequence
agtagctgaagtaatgaaagactatt

SEQ ID NO: 139170 - DNA, 26 bp, Artificial sequence
  SiRNA target sequence
gtagctgaagtaatgaaagactatta

SEQ ID NO: 139171 - DNA, 26 bp, Artificial sequence
  SiRNA target sequence
tagctgaagtaatgaaagactattac

SEQ ID NO: 139172 - DNA, 26 bp, Artificial sequence
  SiRNA target sequence
agctgaagtaatgaaagactattacg

SEQ ID NO: 139173 - DNA, 26 bp, Artificial sequence
  SiRNA target sequence
gctgaagtaatgaaagactattacgg

SEQ ID NO: 139174 - DNA, 26 bp, Artificial sequence
  SiRNA target sequence
ctgaagtaatgaaagactattacgga

SEQ ID NO: 139175 - DNA, 26 bp, Artificial sequence
  SiRNA target sequence
tgaagtaatgaaagactattacggat

SEQ ID NO: 139176 - DNA, 26 bp, Artificial sequence
  SiRNA target sequence
gaagtaatgaaagactattacggatg

SEQ ID NO: 139177 - DNA, 26 bp, Artificial sequence
  SiRNA target sequence
aagtaatgaaagactattacggatgg

SEQ ID NO: 139178 - DNA, 26 bp, Artificial sequence
  SiRNA target sequence
agtaatgaaagactattacggatggg

SEQ ID NO: 139179 - DNA, 26 bp, Artificial sequence
  SiRNA target sequence
gtaatgaaagactattacggatggga

SEQ ID NO: 139180 - DNA, 26 bp, Artificial sequence
  SiRNA target sequence
taatgaaagactattacggatgggat

SEQ ID NO: 139181 - DNA, 26 bp, Artificial sequence
  SiRNA target sequence
aatgaaagactattacggatgggatc

SEQ ID NO: 139182 - DNA, 26 bp, Artificial sequence
  SiRNA target sequence
atgaaagactattacggatgggatca

SEQ ID NO: 139183 - DNA, 26 bp, Artificial sequence
  SiRNA target sequence
tgaaagactattacggatgggatcag

SEQ ID NO: 139184 - DNA, 26 bp, Artificial sequence
  SiRNA target sequence
gaaagactattacggatgggatcagc

SEQ ID NO: 139185 - DNA, 26 bp, Artificial sequence
  SiRNA target sequence
aaagactattacggatgggatcagca

SEQ ID NO: 139186 - DNA, 26 bp, Artificial sequence
  SiRNA target sequence
aagactattacggatgggatcagcaa

SEQ ID NO: 139187 - DNA, 26 bp, Artificial sequence
  SiRNA target sequence
agactattacggatgggatcagcaaa

SEQ ID NO: 139188 - DNA, 26 bp, Artificial sequence
  SiRNA target sequence
gactattacggatgggatcagcaaag

SEQ ID NO: 139189 - DNA, 26 bp, Artificial sequence
  SiRNA target sequence
actattacggatgggatcagcaaaga

SEQ ID NO: 139190 - DNA, 26 bp, Artificial sequence
  SiRNA target sequence
ctattacggatgggatcagcaaagat

SEQ ID NO: 139191 - DNA, 26 bp, Artificial sequence
  SiRNA target sequence
tattacggatgggatcagcaaagata

SEQ ID NO: 139192 - DNA, 26 bp, Artificial sequence
  SiRNA target sequence
attacggatgggatcagcaaagatat

SEQ ID NO: 139193 - DNA, 26 bp, Artificial sequence
  SiRNA target sequence
ttacggatgggatcagcaaagatata

SEQ ID NO: 139194 - DNA, 26 bp, Artificial sequence
  SiRNA target sequence
tacggatgggatcagcaaagatataa

SEQ ID NO: 139195 - DNA, 26 bp, Artificial sequence
  SiRNA target sequence
acggatgggatcagcaaagatataat

SEQ ID NO: 139196 - DNA, 26 bp, Artificial sequence
  SiRNA target sequence
cggatgggatcagcaaagatataatg

SEQ ID NO: 139197 - DNA, 26 bp, Artificial sequence
  SiRNA target sequence
ggatgggatcagcaaagatataatga

SEQ ID NO: 139198 - DNA, 26 bp, Artificial sequence
  SiRNA target sequence
gatgggatcagcaaagatataatgaa

SEQ ID NO: 139199 - DNA, 26 bp, Artificial sequence
  SiRNA target sequence
atgggatcagcaaagatataatgaag

SEQ ID NO: 139200 - DNA, 26 bp, Artificial sequence
  SiRNA target sequence
tgggatcagcaaagatataatgaaga

SEQ ID NO: 139201 - DNA, 26 bp, Artificial sequence
  SiRNA target sequence
gggatcagcaaagatataatgaagaa

SEQ ID NO: 139202 - DNA, 26 bp, Artificial sequence
  SiRNA target sequence
ggatcagcaaagatataatgaagaaa

SEQ ID NO: 139203 - DNA, 26 bp, Artificial sequence
  SiRNA target sequence
gatcagcaaagatataatgaagaaac

SEQ ID NO: 139204 - DNA, 26 bp, Artificial sequence
  SiRNA target sequence
atcagcaaagatataatgaagaaaca

SEQ ID NO: 139205 - DNA, 26 bp, Artificial sequence
  SiRNA target sequence
tcagcaaagatataatgaagaaacaa

SEQ ID NO: 139206 - DNA, 26 bp, Artificial sequence
  SiRNA target sequence
cagcaaagatataatgaagaaacaaa

SEQ ID NO: 139207 - DNA, 26 bp, Artificial sequence
  SiRNA target sequence
agcaaagatataatgaagaaacaaaa

SEQ ID NO: 139208 - DNA, 26 bp, Artificial sequence
  SiRNA target sequence
gcaaagatataatgaagaaacaaaat

SEQ ID NO: 139209 - DNA, 26 bp, Artificial sequence
  SiRNA target sequence
caaagatataatgaagaaacaaaatt

SEQ ID NO: 139210 - DNA, 26 bp, Artificial sequence
  SiRNA target sequence
aaagatataatgaagaaacaaaatta

SEQ ID NO: 139211 - DNA, 26 bp, Artificial sequence
  SiRNA target sequence
aagatataatgaagaaacaaaattat

SEQ ID NO: 139212 - DNA, 26 bp, Artificial sequence
  SiRNA target sequence
agatataatgaagaaacaaaattatg

SEQ ID NO: 139213 - DNA, 26 bp, Artificial sequence
  SiRNA target sequence
gatataatgaagaaacaaaattatgc

SEQ ID NO: 139214 - DNA, 26 bp, Artificial sequence
  SiRNA target sequence
atataatgaagaaacaaaattatgca

SEQ ID NO: 139215 - DNA, 26 bp, Artificial sequence
  SiRNA target sequence
tataatgaagaaacaaaattatgcat

SEQ ID NO: 139216 - DNA, 26 bp, Artificial sequence
  SiRNA target sequence
ataatgaagaaacaaaattatgcatg

SEQ ID NO: 139217 - DNA, 26 bp, Artificial sequence
  SiRNA target sequence
taatgaagaaacaaaattatgcatgg

SEQ ID NO: 139218 - DNA, 26 bp, Artificial sequence
  SiRNA target sequence
aatgaagaaacaaaattatgcatgga

SEQ ID NO: 139219 - DNA, 26 bp, Artificial sequence
  SiRNA target sequence
atgaagaaacaaaattatgcatggaa

SEQ ID NO: 139220 - DNA, 26 bp, Artificial sequence
  SiRNA target sequence
tgaagaaacaaaattatgcatggaaa

SEQ ID NO: 139221 - DNA, 26 bp, Artificial sequence
  SiRNA target sequence
gaagaaacaaaattatgcatggaaat

SEQ ID NO: 139222 - DNA, 26 bp, Artificial sequence
  SiRNA target sequence
aagaaacaaaattatgcatggaaatg

SEQ ID NO: 139223 - DNA, 26 bp, Artificial sequence
  SiRNA target sequence
agaaacaaaattatgcatggaaatga

SEQ ID NO: 139224 - DNA, 26 bp, Artificial sequence
  SiRNA target sequence
gaaacaaaattatgcatggaaatgat

SEQ ID NO: 139225 - DNA, 26 bp, Artificial sequence
  SiRNA target sequence
aaacaaaattatgcatggaaatgatg

SEQ ID NO: 139226 - DNA, 26 bp, Artificial sequence
  SiRNA target sequence
aacaaaattatgcatggaaatgatgg

SEQ ID NO: 139227 - DNA, 26 bp, Artificial sequence
  SiRNA target sequence
acaaaattatgcatggaaatgatgga

SEQ ID NO: 139228 - DNA, 26 bp, Artificial sequence
  SiRNA target sequence
caaaattatgcatggaaatgatggaa

SEQ ID NO: 139229 - DNA, 26 bp, Artificial sequence
  SiRNA target sequence
aaaattatgcatggaaatgatggaaa

SEQ ID NO: 139230 - DNA, 26 bp, Artificial sequence
  SiRNA target sequence
aaattatgcatggaaatgatggaaac

SEQ ID NO: 139231 - DNA, 26 bp, Artificial sequence
  SiRNA target sequence
aattatgcatggaaatgatggaaact

SEQ ID NO: 139232 - DNA, 26 bp, Artificial sequence
  SiRNA target sequence
attatgcatggaaatgatggaaactt

SEQ ID NO: 139233 - DNA, 26 bp, Artificial sequence
  SiRNA target sequence
ttatgcatggaaatgatggaaacttg

SEQ ID NO: 139234 - DNA, 26 bp, Artificial sequence
  SiRNA target sequence
tatgcatggaaatgatggaaacttgt

SEQ ID NO: 139235 - DNA, 26 bp, Artificial sequence
  SiRNA target sequence
atgcatggaaatgatggaaacttgtg

SEQ ID NO: 139236 - DNA, 26 bp, Artificial sequence
  SiRNA target sequence
tgcatggaaatgatggaaacttgtgg

SEQ ID NO: 139237 - DNA, 26 bp, Artificial sequence
  SiRNA target sequence
gcatggaaatgatggaaacttgtggt

SEQ ID NO: 139238 - DNA, 26 bp, Artificial sequence
  SiRNA target sequence
catggaaatgatggaaacttgtggtt

SEQ ID NO: 139239 - DNA, 26 bp, Artificial sequence
  SiRNA target sequence
atggaaatgatggaaacttgtggtta

SEQ ID NO: 139240 - DNA, 26 bp, Artificial sequence
  SiRNA target sequence
tggaaatgatggaaacttgtggttat

SEQ ID NO: 139241 - DNA, 26 bp, Artificial sequence
  SiRNA target sequence
ggaaatgatggaaacttgtggttata

SEQ ID NO: 139242 - DNA, 26 bp, Artificial sequence
  SiRNA target sequence
gaaatgatggaaacttgtggttatag

SEQ ID NO: 139243 - DNA, 26 bp, Artificial sequence
  SiRNA target sequence
aaatgatggaaacttgtggttatagt

SEQ ID NO: 139244 - DNA, 26 bp, Artificial sequence
  SiRNA target sequence
aatgatggaaacttgtggttatagtt

SEQ ID NO: 139245 - DNA, 26 bp, Artificial sequence
  SiRNA target sequence
atgatggaaacttgtggttatagttt

SEQ ID NO: 139246 - DNA, 26 bp, Artificial sequence
  SiRNA target sequence
tgatggaaacttgtggttatagttta

SEQ ID NO: 139247 - DNA, 26 bp, Artificial sequence
  SiRNA target sequence
gatggaaacttgtggttatagtttat

SEQ ID NO: 139248 - DNA, 26 bp, Artificial sequence
  SiRNA target sequence
atggaaacttgtggttatagtttatt

SEQ ID NO: 139249 - DNA, 26 bp, Artificial sequence
  SiRNA target sequence
tggaaacttgtggttatagtttatta

SEQ ID NO: 139250 - DNA, 26 bp, Artificial sequence
  SiRNA target sequence
ggaaacttgtggttatagtttattaa

SEQ ID NO: 139251 - DNA, 26 bp, Artificial sequence
  SiRNA target sequence
gaaacttgtggttatagtttattaaa

SEQ ID NO: 139252 - DNA, 26 bp, Artificial sequence
  SiRNA target sequence
aaacttgtggttatagtttattaaaa

SEQ ID NO: 139253 - DNA, 26 bp, Artificial sequence
  SiRNA target sequence
aacttgtggttatagtttattaaaaa

SEQ ID NO: 139254 - DNA, 26 bp, Artificial sequence
  SiRNA target sequence
acttgtggttatagtttattaaaaaa

SEQ ID NO: 139255 - DNA, 26 bp, Artificial sequence
  SiRNA target sequence
cttgtggttatagtttattaaaaaat

SEQ ID NO: 139256 - DNA, 26 bp, Artificial sequence
  SiRNA target sequence
ttgtggttatagtttattaaaaaatt

SEQ ID NO: 139257 - DNA, 26 bp, Artificial sequence
  SiRNA target sequence
tgtggttatagtttattaaaaaatta

SEQ ID NO: 139258 - DNA, 26 bp, Artificial sequence
  SiRNA target sequence
gtggttatagtttattaaaaaattaa

SEQ ID NO: 139259 - DNA, 27 bp, Artificial sequence
  SiRNA target sequence
atggtgtataaggttttatttacagta

SEQ ID NO: 139260 - DNA, 27 bp, Artificial sequence
  SiRNA target sequence
tggtgtataaggttttatttacagtaa

SEQ ID NO: 139261 - DNA, 27 bp, Artificial sequence
  SiRNA target sequence
ggtgtataaggttttatttacagtaat

SEQ ID NO: 139262 - DNA, 27 bp, Artificial sequence
  SiRNA target sequence
gtgtataaggttttatttacagtaata

SEQ ID NO: 139263 - DNA, 27 bp, Artificial sequence
  SiRNA target sequence
tgtataaggttttatttacagtaatag

SEQ ID NO: 139264 - DNA, 27 bp, Artificial sequence
  SiRNA target sequence
gtataaggttttatttacagtaatagg

SEQ ID NO: 139265 - DNA, 27 bp, Artificial sequence
  SiRNA target sequence
tataaggttttatttacagtaatagga

SEQ ID NO: 139266 - DNA, 27 bp, Artificial sequence
  SiRNA target sequence
ataaggttttatttacagtaataggat

SEQ ID NO: 139267 - DNA, 27 bp, Artificial sequence
  SiRNA target sequence
taaggttttatttacagtaataggatt

SEQ ID NO: 139268 - DNA, 27 bp, Artificial sequence
  SiRNA target sequence
aaggttttatttacagtaataggatta

SEQ ID NO: 139269 - DNA, 27 bp, Artificial sequence
  SiRNA target sequence
aggttttatttacagtaataggattaa

SEQ ID NO: 139270 - DNA, 27 bp, Artificial sequence
  SiRNA target sequence
ggttttatttacagtaataggattaat

SEQ ID NO: 139271 - DNA, 27 bp, Artificial sequence
  SiRNA target sequence
gttttatttacagtaataggattaata

SEQ ID NO: 139272 - DNA, 27 bp, Artificial sequence
  SiRNA target sequence
ttttatttacagtaataggattaatat

SEQ ID NO: 139273 - DNA, 27 bp, Artificial sequence
  SiRNA target sequence
tttatttacagtaataggattaatatg

SEQ ID NO: 139274 - DNA, 27 bp, Artificial sequence
  SiRNA target sequence
ttatttacagtaataggattaatatgt

SEQ ID NO: 139275 - DNA, 27 bp, Artificial sequence
  SiRNA target sequence
tatttacagtaataggattaatatgtg

SEQ ID NO: 139276 - DNA, 27 bp, Artificial sequence
  SiRNA target sequence
atttacagtaataggattaatatgtgg

SEQ ID NO: 139277 - DNA, 27 bp, Artificial sequence
  SiRNA target sequence
tttacagtaataggattaatatgtggt

SEQ ID NO: 139278 - DNA, 27 bp, Artificial sequence
  SiRNA target sequence
ttacagtaataggattaatatgtggta

SEQ ID NO: 139279 - DNA, 27 bp, Artificial sequence
  SiRNA target sequence
tacagtaataggattaatatgtggtat

SEQ ID NO: 139280 - DNA, 27 bp, Artificial sequence
  SiRNA target sequence
acagtaataggattaatatgtggtata

SEQ ID NO: 139281 - DNA, 27 bp, Artificial sequence
  SiRNA target sequence
cagtaataggattaatatgtggtatac

SEQ ID NO: 139282 - DNA, 27 bp, Artificial sequence
  SiRNA target sequence
agtaataggattaatatgtggtatact

SEQ ID NO: 139283 - DNA, 27 bp, Artificial sequence
  SiRNA target sequence
gtaataggattaatatgtggtatactt

SEQ ID NO: 139284 - DNA, 27 bp, Artificial sequence
  SiRNA target sequence
taataggattaatatgtggtatactta

SEQ ID NO: 139285 - DNA, 27 bp, Artificial sequence
  SiRNA target sequence
aataggattaatatgtggtatacttac

SEQ ID NO: 139286 - DNA, 27 bp, Artificial sequence
  SiRNA target sequence
ataggattaatatgtggtatacttaca

SEQ ID NO: 139287 - DNA, 27 bp, Artificial sequence
  SiRNA target sequence
taggattaatatgtggtatacttacaa

SEQ ID NO: 139288 - DNA, 27 bp, Artificial sequence
  SiRNA target sequence
aggattaatatgtggtatacttacaat

SEQ ID NO: 139289 - DNA, 27 bp, Artificial sequence
  SiRNA target sequence
ggattaatatgtggtatacttacaata

SEQ ID NO: 139290 - DNA, 27 bp, Artificial sequence
  SiRNA target sequence
gattaatatgtggtatacttacaataa

SEQ ID NO: 139291 - DNA, 27 bp, Artificial sequence
  SiRNA target sequence
attaatatgtggtatacttacaataat

SEQ ID NO: 139292 - DNA, 27 bp, Artificial sequence
  SiRNA target sequence
ttaatatgtggtatacttacaataatt

SEQ ID NO: 139293 - DNA, 27 bp, Artificial sequence
  SiRNA target sequence
taatatgtggtatacttacaataatta

SEQ ID NO: 139294 - DNA, 27 bp, Artificial sequence
  SiRNA target sequence
aatatgtggtatacttacaataattaa

SEQ ID NO: 139295 - DNA, 27 bp, Artificial sequence
  SiRNA target sequence
atatgtggtatacttacaataattaaa

SEQ ID NO: 139296 - DNA, 27 bp, Artificial sequence
  SiRNA target sequence
tatgtggtatacttacaataattaaac

SEQ ID NO: 139297 - DNA, 27 bp, Artificial sequence
  SiRNA target sequence
atgtggtatacttacaataattaaacg

SEQ ID NO: 139298 - DNA, 27 bp, Artificial sequence
  SiRNA target sequence
tgtggtatacttacaataattaaacga

SEQ ID NO: 139299 - DNA, 27 bp, Artificial sequence
  SiRNA target sequence
gtggtatacttacaataattaaacgat

SEQ ID NO: 139300 - DNA, 27 bp, Artificial sequence
  SiRNA target sequence
tggtatacttacaataattaaacgata

SEQ ID NO: 139301 - DNA, 27 bp, Artificial sequence
  SiRNA target sequence
ggtatacttacaataattaaacgatac

SEQ ID NO: 139302 - DNA, 27 bp, Artificial sequence
  SiRNA target sequence
gtatacttacaataattaaacgataca

SEQ ID NO: 139303 - DNA, 27 bp, Artificial sequence
  SiRNA target sequence
tatacttacaataattaaacgatacaa

SEQ ID NO: 139304 - DNA, 27 bp, Artificial sequence
  SiRNA target sequence
atacttacaataattaaacgatacaag

SEQ ID NO: 139305 - DNA, 27 bp, Artificial sequence
  SiRNA target sequence
tacttacaataattaaacgatacaagt

SEQ ID NO: 139306 - DNA, 27 bp, Artificial sequence
  SiRNA target sequence
acttacaataattaaacgatacaagta

SEQ ID NO: 139307 - DNA, 27 bp, Artificial sequence
  SiRNA target sequence
cttacaataattaaacgatacaagtat

SEQ ID NO: 139308 - DNA, 27 bp, Artificial sequence
  SiRNA target sequence
ttacaataattaaacgatacaagtatt

SEQ ID NO: 139309 - DNA, 27 bp, Artificial sequence
  SiRNA target sequence
tacaataattaaacgatacaagtattt

SEQ ID NO: 139310 - DNA, 27 bp, Artificial sequence
  SiRNA target sequence
acaataattaaacgatacaagtatttt

SEQ ID NO: 139311 - DNA, 27 bp, Artificial sequence
  SiRNA target sequence
caataattaaacgatacaagtatttta

SEQ ID NO: 139312 - DNA, 27 bp, Artificial sequence
  SiRNA target sequence
aataattaaacgatacaagtattttaa

SEQ ID NO: 139313 - DNA, 27 bp, Artificial sequence
  SiRNA target sequence
ataattaaacgatacaagtattttaag

SEQ ID NO: 139314 - DNA, 27 bp, Artificial sequence
  SiRNA target sequence
taattaaacgatacaagtattttaaga

SEQ ID NO: 139315 - DNA, 27 bp, Artificial sequence
  SiRNA target sequence
aattaaacgatacaagtattttaagat

SEQ ID NO: 139316 - DNA, 27 bp, Artificial sequence
  SiRNA target sequence
attaaacgatacaagtattttaagata

SEQ ID NO: 139317 - DNA, 27 bp, Artificial sequence
  SiRNA target sequence
ttaaacgatacaagtattttaagataa

SEQ ID NO: 139318 - DNA, 27 bp, Artificial sequence
  SiRNA target sequence
taaacgatacaagtattttaagataaa

SEQ ID NO: 139319 - DNA, 27 bp, Artificial sequence
  SiRNA target sequence
aaacgatacaagtattttaagataaaa

SEQ ID NO: 139320 - DNA, 27 bp, Artificial sequence
  SiRNA target sequence
aacgatacaagtattttaagataaaaa

SEQ ID NO: 139321 - DNA, 27 bp, Artificial sequence
  SiRNA target sequence
acgatacaagtattttaagataaaaaa

SEQ ID NO: 139322 - DNA, 27 bp, Artificial sequence
  SiRNA target sequence
cgatacaagtattttaagataaaaaaa

SEQ ID NO: 139323 - DNA, 27 bp, Artificial sequence
  SiRNA target sequence
gatacaagtattttaagataaaaaaat

SEQ ID NO: 139324 - DNA, 27 bp, Artificial sequence
  SiRNA target sequence
atacaagtattttaagataaaaaaatt

SEQ ID NO: 139325 - DNA, 27 bp, Artificial sequence
  SiRNA target sequence
tacaagtattttaagataaaaaaattg

SEQ ID NO: 139326 - DNA, 27 bp, Artificial sequence
  SiRNA target sequence
acaagtattttaagataaaaaaattgg

SEQ ID NO: 139327 - DNA, 27 bp, Artificial sequence
  SiRNA target sequence
caagtattttaagataaaaaaattggc

SEQ ID NO: 139328 - DNA, 27 bp, Artificial sequence
  SiRNA target sequence
aagtattttaagataaaaaaattggcc

SEQ ID NO: 139329 - DNA, 27 bp, Artificial sequence
  SiRNA target sequence
agtattttaagataaaaaaattggcct

SEQ ID NO: 139330 - DNA, 27 bp, Artificial sequence
  SiRNA target sequence
gtattttaagataaaaaaattggcctt

SEQ ID NO: 139331 - DNA, 27 bp, Artificial sequence
  SiRNA target sequence
tattttaagataaaaaaattggcctta

SEQ ID NO: 139332 - DNA, 27 bp, Artificial sequence
  SiRNA target sequence
attttaagataaaaaaattggccttaa

SEQ ID NO: 139333 - DNA, 27 bp, Artificial sequence
  SiRNA target sequence
ttttaagataaaaaaattggccttaac

SEQ ID NO: 139334 - DNA, 27 bp, Artificial sequence
  SiRNA target sequence
tttaagataaaaaaattggccttaact

SEQ ID NO: 139335 - DNA, 27 bp, Artificial sequence
  SiRNA target sequence
ttaagataaaaaaattggccttaactt

SEQ ID NO: 139336 - DNA, 27 bp, Artificial sequence
  SiRNA target sequence
taagataaaaaaattggccttaactta

SEQ ID NO: 139337 - DNA, 27 bp, Artificial sequence
  SiRNA target sequence
aagataaaaaaattggccttaacttac

SEQ ID NO: 139338 - DNA, 27 bp, Artificial sequence
  SiRNA target sequence
agataaaaaaattggccttaacttact

SEQ ID NO: 139339 - DNA, 27 bp, Artificial sequence
  SiRNA target sequence
gataaaaaaattggccttaacttactt

SEQ ID NO: 139340 - DNA, 27 bp, Artificial sequence
  SiRNA target sequence
ataaaaaaattggccttaacttacttc

SEQ ID NO: 139341 - DNA, 27 bp, Artificial sequence
  SiRNA target sequence
taaaaaaattggccttaacttacttcg

SEQ ID NO: 139342 - DNA, 27 bp, Artificial sequence
  SiRNA target sequence
aaaaaaattggccttaacttacttcgg

SEQ ID NO: 139343 - DNA, 27 bp, Artificial sequence
  SiRNA target sequence
aaaaaattggccttaacttacttcggg

SEQ ID NO: 139344 - DNA, 27 bp, Artificial sequence
  SiRNA target sequence
aaaaattggccttaacttacttcggga

SEQ ID NO: 139345 - DNA, 27 bp, Artificial sequence
  SiRNA target sequence
aaaattggccttaacttacttcgggaa

SEQ ID NO: 139346 - DNA, 27 bp, Artificial sequence
  SiRNA target sequence
aaattggccttaacttacttcgggaaa

SEQ ID NO: 139347 - DNA, 27 bp, Artificial sequence
  SiRNA target sequence
aattggccttaacttacttcgggaaac

SEQ ID NO: 139348 - DNA, 27 bp, Artificial sequence
  SiRNA target sequence
attggccttaacttacttcgggaaaca

SEQ ID NO: 139349 - DNA, 27 bp, Artificial sequence
  SiRNA target sequence
ttggccttaacttacttcgggaaacaa

SEQ ID NO: 139350 - DNA, 27 bp, Artificial sequence
  SiRNA target sequence
tggccttaacttacttcgggaaacaag

SEQ ID NO: 139351 - DNA, 27 bp, Artificial sequence
  SiRNA target sequence
ggccttaacttacttcgggaaacaaga

SEQ ID NO: 139352 - DNA, 27 bp, Artificial sequence
  SiRNA target sequence
gccttaacttacttcgggaaacaagac

SEQ ID NO: 139353 - DNA, 27 bp, Artificial sequence
  SiRNA target sequence
ccttaacttacttcgggaaacaagact

SEQ ID NO: 139354 - DNA, 27 bp, Artificial sequence
  SiRNA target sequence
cttaacttacttcgggaaacaagactt

SEQ ID NO: 139355 - DNA, 27 bp, Artificial sequence
  SiRNA target sequence
ttaacttacttcgggaaacaagacttg

SEQ ID NO: 139356 - DNA, 27 bp, Artificial sequence
  SiRNA target sequence
taacttacttcgggaaacaagacttgc

SEQ ID NO: 139357 - DNA, 27 bp, Artificial sequence
  SiRNA target sequence
aacttacttcgggaaacaagacttgca

SEQ ID NO: 139358 - DNA, 27 bp, Artificial sequence
  SiRNA target sequence
acttacttcgggaaacaagacttgcaa

SEQ ID NO: 139359 - DNA, 27 bp, Artificial sequence
  SiRNA target sequence
cttacttcgggaaacaagacttgcaat

SEQ ID NO: 139360 - DNA, 27 bp, Artificial sequence
  SiRNA target sequence
ttacttcgggaaacaagacttgcaatg

SEQ ID NO: 139361 - DNA, 27 bp, Artificial sequence
  SiRNA target sequence
tacttcgggaaacaagacttgcaatgg

SEQ ID NO: 139362 - DNA, 27 bp, Artificial sequence
  SiRNA target sequence
acttcgggaaacaagacttgcaatgga

SEQ ID NO: 139363 - DNA, 27 bp, Artificial sequence
  SiRNA target sequence
cttcgggaaacaagacttgcaatggaa

SEQ ID NO: 139364 - DNA, 27 bp, Artificial sequence
  SiRNA target sequence
ttcgggaaacaagacttgcaatggaaa

SEQ ID NO: 139365 - DNA, 27 bp, Artificial sequence
  SiRNA target sequence
tcgggaaacaagacttgcaatggaaac

SEQ ID NO: 139366 - DNA, 27 bp, Artificial sequence
  SiRNA target sequence
cgggaaacaagacttgcaatggaaacc

SEQ ID NO: 139367 - DNA, 27 bp, Artificial sequence
  SiRNA target sequence
gggaaacaagacttgcaatggaaacct

SEQ ID NO: 139368 - DNA, 27 bp, Artificial sequence
  SiRNA target sequence
ggaaacaagacttgcaatggaaaccta

SEQ ID NO: 139369 - DNA, 27 bp, Artificial sequence
  SiRNA target sequence
gaaacaagacttgcaatggaaacctaa

SEQ ID NO: 139370 - DNA, 27 bp, Artificial sequence
  SiRNA target sequence
aaacaagacttgcaatggaaacctaaa

SEQ ID NO: 139371 - DNA, 27 bp, Artificial sequence
  SiRNA target sequence
aacaagacttgcaatggaaacctaaaa

SEQ ID NO: 139372 - DNA, 27 bp, Artificial sequence
  SiRNA target sequence
acaagacttgcaatggaaacctaaaag

SEQ ID NO: 139373 - DNA, 27 bp, Artificial sequence
  SiRNA target sequence
caagacttgcaatggaaacctaaaagt

SEQ ID NO: 139374 - DNA, 27 bp, Artificial sequence
  SiRNA target sequence
aagacttgcaatggaaacctaaaagtc

SEQ ID NO: 139375 - DNA, 27 bp, Artificial sequence
  SiRNA target sequence
agacttgcaatggaaacctaaaagtcg

SEQ ID NO: 139376 - DNA, 27 bp, Artificial sequence
  SiRNA target sequence
gacttgcaatggaaacctaaaagtcgg

SEQ ID NO: 139377 - DNA, 27 bp, Artificial sequence
  SiRNA target sequence
acttgcaatggaaacctaaaagtcggt

SEQ ID NO: 139378 - DNA, 27 bp, Artificial sequence
  SiRNA target sequence
cttgcaatggaaacctaaaagtcggtc

SEQ ID NO: 139379 - DNA, 27 bp, Artificial sequence
  SiRNA target sequence
ttgcaatggaaacctaaaagtcggtca

SEQ ID NO: 139380 - DNA, 27 bp, Artificial sequence
  SiRNA target sequence
tgcaatggaaacctaaaagtcggtcag

SEQ ID NO: 139381 - DNA, 27 bp, Artificial sequence
  SiRNA target sequence
gcaatggaaacctaaaagtcggtcaga

SEQ ID NO: 139382 - DNA, 27 bp, Artificial sequence
  SiRNA target sequence
caatggaaacctaaaagtcggtcagaa

SEQ ID NO: 139383 - DNA, 27 bp, Artificial sequence
  SiRNA target sequence
aatggaaacctaaaagtcggtcagaaa

SEQ ID NO: 139384 - DNA, 27 bp, Artificial sequence
  SiRNA target sequence
atggaaacctaaaagtcggtcagaaat

SEQ ID NO: 139385 - DNA, 27 bp, Artificial sequence
  SiRNA target sequence
tggaaacctaaaagtcggtcagaaatt

SEQ ID NO: 139386 - DNA, 27 bp, Artificial sequence
  SiRNA target sequence
ggaaacctaaaagtcggtcagaaatta

SEQ ID NO: 139387 - DNA, 27 bp, Artificial sequence
  SiRNA target sequence
gaaacctaaaagtcggtcagaaattat

SEQ ID NO: 139388 - DNA, 27 bp, Artificial sequence
  SiRNA target sequence
aaacctaaaagtcggtcagaaattatt

SEQ ID NO: 139389 - DNA, 27 bp, Artificial sequence
  SiRNA target sequence
aacctaaaagtcggtcagaaattatta

SEQ ID NO: 139390 - DNA, 27 bp, Artificial sequence
  SiRNA target sequence
acctaaaagtcggtcagaaattattaa

SEQ ID NO: 139391 - DNA, 27 bp, Artificial sequence
  SiRNA target sequence
cctaaaagtcggtcagaaattattaac

SEQ ID NO: 139392 - DNA, 27 bp, Artificial sequence
  SiRNA target sequence
ctaaaagtcggtcagaaattattaacg

SEQ ID NO: 139393 - DNA, 27 bp, Artificial sequence
  SiRNA target sequence
taaaagtcggtcagaaattattaacga

SEQ ID NO: 139394 - DNA, 27 bp, Artificial sequence
  SiRNA target sequence
aaaagtcggtcagaaattattaacgat

SEQ ID NO: 139395 - DNA, 27 bp, Artificial sequence
  SiRNA target sequence
aaagtcggtcagaaattattaacgatt

SEQ ID NO: 139396 - DNA, 27 bp, Artificial sequence
  SiRNA target sequence
aagtcggtcagaaattattaacgattt

SEQ ID NO: 139397 - DNA, 27 bp, Artificial sequence
  SiRNA target sequence
agtcggtcagaaattattaacgattta

SEQ ID NO: 139398 - DNA, 27 bp, Artificial sequence
  SiRNA target sequence
gtcggtcagaaattattaacgatttaa

SEQ ID NO: 139399 - DNA, 27 bp, Artificial sequence
  SiRNA target sequence
tcggtcagaaattattaacgatttaaa

SEQ ID NO: 139400 - DNA, 27 bp, Artificial sequence
  SiRNA target sequence
cggtcagaaattattaacgatttaaaa

SEQ ID NO: 139401 - DNA, 27 bp, Artificial sequence
  SiRNA target sequence
ggtcagaaattattaacgatttaaaaa

SEQ ID NO: 139402 - DNA, 27 bp, Artificial sequence
  SiRNA target sequence
gtcagaaattattaacgatttaaaaaa

SEQ ID NO: 139403 - DNA, 27 bp, Artificial sequence
  SiRNA target sequence
tcagaaattattaacgatttaaaaaat

SEQ ID NO: 139404 - DNA, 27 bp, Artificial sequence
  SiRNA target sequence
cagaaattattaacgatttaaaaaata

SEQ ID NO: 139405 - DNA, 27 bp, Artificial sequence
  SiRNA target sequence
agaaattattaacgatttaaaaaatac

SEQ ID NO: 139406 - DNA, 27 bp, Artificial sequence
  SiRNA target sequence
gaaattattaacgatttaaaaaataca

SEQ ID NO: 139407 - DNA, 27 bp, Artificial sequence
  SiRNA target sequence
aaattattaacgatttaaaaaatacaa

SEQ ID NO: 139408 - DNA, 27 bp, Artificial sequence
  SiRNA target sequence
aattattaacgatttaaaaaatacaaa

SEQ ID NO: 139409 - DNA, 27 bp, Artificial sequence
  SiRNA target sequence
attattaacgatttaaaaaatacaaac

SEQ ID NO: 139410 - DNA, 27 bp, Artificial sequence
  SiRNA target sequence
ttattaacgatttaaaaaatacaaact

SEQ ID NO: 139411 - DNA, 27 bp, Artificial sequence
  SiRNA target sequence
tattaacgatttaaaaaatacaaactt

SEQ ID NO: 139412 - DNA, 27 bp, Artificial sequence
  SiRNA target sequence
attaacgatttaaaaaatacaaacttt

SEQ ID NO: 139413 - DNA, 27 bp, Artificial sequence
  SiRNA target sequence
ttaacgatttaaaaaatacaaactttg

SEQ ID NO: 139414 - DNA, 27 bp, Artificial sequence
  SiRNA target sequence
taacgatttaaaaaatacaaactttga

SEQ ID NO: 139415 - DNA, 27 bp, Artificial sequence
  SiRNA target sequence
aacgatttaaaaaatacaaactttgac

SEQ ID NO: 139416 - DNA, 27 bp, Artificial sequence
  SiRNA target sequence
acgatttaaaaaatacaaactttgaca

SEQ ID NO: 139417 - DNA, 27 bp, Artificial sequence
  SiRNA target sequence
cgatttaaaaaatacaaactttgacat

SEQ ID NO: 139418 - DNA, 27 bp, Artificial sequence
  SiRNA target sequence
gatttaaaaaatacaaactttgacata

SEQ ID NO: 139419 - DNA, 27 bp, Artificial sequence
  SiRNA target sequence
atttaaaaaatacaaactttgacatat

SEQ ID NO: 139420 - DNA, 27 bp, Artificial sequence
  SiRNA target sequence
tttaaaaaatacaaactttgacatatt

SEQ ID NO: 139421 - DNA, 27 bp, Artificial sequence
  SiRNA target sequence
ttaaaaaatacaaactttgacatattg

SEQ ID NO: 139422 - DNA, 27 bp, Artificial sequence
  SiRNA target sequence
taaaaaatacaaactttgacatattga

SEQ ID NO: 139423 - DNA, 27 bp, Artificial sequence
  SiRNA target sequence
aaaaaatacaaactttgacatattgat

SEQ ID NO: 139424 - DNA, 27 bp, Artificial sequence
  SiRNA target sequence
aaaaatacaaactttgacatattgatt

SEQ ID NO: 139425 - DNA, 27 bp, Artificial sequence
  SiRNA target sequence
aaaatacaaactttgacatattgatta

SEQ ID NO: 139426 - DNA, 27 bp, Artificial sequence
  SiRNA target sequence
aaatacaaactttgacatattgattat

SEQ ID NO: 139427 - DNA, 27 bp, Artificial sequence
  SiRNA target sequence
aatacaaactttgacatattgattatt

SEQ ID NO: 139428 - DNA, 27 bp, Artificial sequence
  SiRNA target sequence
atacaaactttgacatattgattattg

SEQ ID NO: 139429 - DNA, 27 bp, Artificial sequence
  SiRNA target sequence
tacaaactttgacatattgattattgg

SEQ ID NO: 139430 - DNA, 27 bp, Artificial sequence
  SiRNA target sequence
acaaactttgacatattgattattggt

SEQ ID NO: 139431 - DNA, 27 bp, Artificial sequence
  SiRNA target sequence
caaactttgacatattgattattggtg

SEQ ID NO: 139432 - DNA, 27 bp, Artificial sequence
  SiRNA target sequence
aaactttgacatattgattattggtgg

SEQ ID NO: 139433 - DNA, 27 bp, Artificial sequence
  SiRNA target sequence
aactttgacatattgattattggtggc

SEQ ID NO: 139434 - DNA, 27 bp, Artificial sequence
  SiRNA target sequence
actttgacatattgattattggtggcg

SEQ ID NO: 139435 - DNA, 27 bp, Artificial sequence
  SiRNA target sequence
ctttgacatattgattattggtggcgg

SEQ ID NO: 139436 - DNA, 27 bp, Artificial sequence
  SiRNA target sequence
tttgacatattgattattggtggcggt

SEQ ID NO: 139437 - DNA, 27 bp, Artificial sequence
  SiRNA target sequence
ttgacatattgattattggtggcggtt

SEQ ID NO: 139438 - DNA, 27 bp, Artificial sequence
  SiRNA target sequence
tgacatattgattattggtggcggttc

SEQ ID NO: 139439 - DNA, 27 bp, Artificial sequence
  SiRNA target sequence
gacatattgattattggtggcggttca

SEQ ID NO: 139440 - DNA, 27 bp, Artificial sequence
  SiRNA target sequence
acatattgattattggtggcggttcaa

SEQ ID NO: 139441 - DNA, 27 bp, Artificial sequence
  SiRNA target sequence
catattgattattggtggcggttcaac

SEQ ID NO: 139442 - DNA, 27 bp, Artificial sequence
  SiRNA target sequence
atattgattattggtggcggttcaacg

SEQ ID NO: 139443 - DNA, 27 bp, Artificial sequence
  SiRNA target sequence
tattgattattggtggcggttcaacgg

SEQ ID NO: 139444 - DNA, 27 bp, Artificial sequence
  SiRNA target sequence
attgattattggtggcggttcaacggg

SEQ ID NO: 139445 - DNA, 27 bp, Artificial sequence
  SiRNA target sequence
ttgattattggtggcggttcaacggga

SEQ ID NO: 139446 - DNA, 27 bp, Artificial sequence
  SiRNA target sequence
tgattattggtggcggttcaacgggaa

SEQ ID NO: 139447 - DNA, 27 bp, Artificial sequence
  SiRNA target sequence
gattattggtggcggttcaacgggaat

SEQ ID NO: 139448 - DNA, 27 bp, Artificial sequence
  SiRNA target sequence
attattggtggcggttcaacgggaatg

SEQ ID NO: 139449 - DNA, 27 bp, Artificial sequence
  SiRNA target sequence
ttattggtggcggttcaacgggaatgg

SEQ ID NO: 139450 - DNA, 27 bp, Artificial sequence
  SiRNA target sequence
tattggtggcggttcaacgggaatggg

SEQ ID NO: 139451 - DNA, 27 bp, Artificial sequence
  SiRNA target sequence
attggtggcggttcaacgggaatggga

SEQ ID NO: 139452 - DNA, 27 bp, Artificial sequence
  SiRNA target sequence
ttggtggcggttcaacgggaatgggat

SEQ ID NO: 139453 - DNA, 27 bp, Artificial sequence
  SiRNA target sequence
tggtggcggttcaacgggaatgggatg

SEQ ID NO: 139454 - DNA, 27 bp, Artificial sequence
  SiRNA target sequence
ggtggcggttcaacgggaatgggatgt

SEQ ID NO: 139455 - DNA, 27 bp, Artificial sequence
  SiRNA target sequence
gtggcggttcaacgggaatgggatgtg

SEQ ID NO: 139456 - DNA, 27 bp, Artificial sequence
  SiRNA target sequence
tggcggttcaacgggaatgggatgtgc

SEQ ID NO: 139457 - DNA, 27 bp, Artificial sequence
  SiRNA target sequence
ggcggttcaacgggaatgggatgtgca

SEQ ID NO: 139458 - DNA, 27 bp, Artificial sequence
  SiRNA target sequence
gcggttcaacgggaatgggatgtgcaa

SEQ ID NO: 139459 - DNA, 27 bp, Artificial sequence
  SiRNA target sequence
cggttcaacgggaatgggatgtgcaat

SEQ ID NO: 139460 - DNA, 27 bp, Artificial sequence
  SiRNA target sequence
ggttcaacgggaatgggatgtgcaatc

SEQ ID NO: 139461 - DNA, 27 bp, Artificial sequence
  SiRNA target sequence
gttcaacgggaatgggatgtgcaatcg

SEQ ID NO: 139462 - DNA, 27 bp, Artificial sequence
  SiRNA target sequence
ttcaacgggaatgggatgtgcaatcga

SEQ ID NO: 139463 - DNA, 27 bp, Artificial sequence
  SiRNA target sequence
tcaacgggaatgggatgtgcaatcgaa

SEQ ID NO: 139464 - DNA, 27 bp, Artificial sequence
  SiRNA target sequence
caacgggaatgggatgtgcaatcgaag

SEQ ID NO: 139465 - DNA, 27 bp, Artificial sequence
  SiRNA target sequence
aacgggaatgggatgtgcaatcgaagc

SEQ ID NO: 139466 - DNA, 27 bp, Artificial sequence
  SiRNA target sequence
acgggaatgggatgtgcaatcgaagca

SEQ ID NO: 139467 - DNA, 27 bp, Artificial sequence
  SiRNA target sequence
cgggaatgggatgtgcaatcgaagcag

SEQ ID NO: 139468 - DNA, 27 bp, Artificial sequence
  SiRNA target sequence
gggaatgggatgtgcaatcgaagcagc

SEQ ID NO: 139469 - DNA, 27 bp, Artificial sequence
  SiRNA target sequence
ggaatgggatgtgcaatcgaagcagct

SEQ ID NO: 139470 - DNA, 27 bp, Artificial sequence
  SiRNA target sequence
gaatgggatgtgcaatcgaagcagcta

SEQ ID NO: 139471 - DNA, 27 bp, Artificial sequence
  SiRNA target sequence
aatgggatgtgcaatcgaagcagctac

SEQ ID NO: 139472 - DNA, 27 bp, Artificial sequence
  SiRNA target sequence
atgggatgtgcaatcgaagcagctaca

SEQ ID NO: 139473 - DNA, 27 bp, Artificial sequence
  SiRNA target sequence
tgggatgtgcaatcgaagcagctacac

SEQ ID NO: 139474 - DNA, 27 bp, Artificial sequence
  SiRNA target sequence
gggatgtgcaatcgaagcagctacacg

SEQ ID NO: 139475 - DNA, 27 bp, Artificial sequence
  SiRNA target sequence
ggatgtgcaatcgaagcagctacacga

SEQ ID NO: 139476 - DNA, 27 bp, Artificial sequence
  SiRNA target sequence
gatgtgcaatcgaagcagctacacgag

SEQ ID NO: 139477 - DNA, 27 bp, Artificial sequence
  SiRNA target sequence
atgtgcaatcgaagcagctacacgagg

SEQ ID NO: 139478 - DNA, 27 bp, Artificial sequence
  SiRNA target sequence
tgtgcaatcgaagcagctacacgaggt

SEQ ID NO: 139479 - DNA, 27 bp, Artificial sequence
  SiRNA target sequence
gtgcaatcgaagcagctacacgaggta

SEQ ID NO: 139480 - DNA, 27 bp, Artificial sequence
  SiRNA target sequence
tgcaatcgaagcagctacacgaggtat

SEQ ID NO: 139481 - DNA, 27 bp, Artificial sequence
  SiRNA target sequence
gcaatcgaagcagctacacgaggtata

SEQ ID NO: 139482 - DNA, 27 bp, Artificial sequence
  SiRNA target sequence
caatcgaagcagctacacgaggtataa

SEQ ID NO: 139483 - DNA, 27 bp, Artificial sequence
  SiRNA target sequence
aatcgaagcagctacacgaggtataag

SEQ ID NO: 139484 - DNA, 27 bp, Artificial sequence
  SiRNA target sequence
atcgaagcagctacacgaggtataagt

SEQ ID NO: 139485 - DNA, 27 bp, Artificial sequence
  SiRNA target sequence
tcgaagcagctacacgaggtataagtg

SEQ ID NO: 139486 - DNA, 27 bp, Artificial sequence
  SiRNA target sequence
cgaagcagctacacgaggtataagtgt

SEQ ID NO: 139487 - DNA, 27 bp, Artificial sequence
  SiRNA target sequence
gaagcagctacacgaggtataagtgtt

SEQ ID NO: 139488 - DNA, 27 bp, Artificial sequence
  SiRNA target sequence
aagcagctacacgaggtataagtgttg

SEQ ID NO: 139489 - DNA, 27 bp, Artificial sequence
  SiRNA target sequence
agcagctacacgaggtataagtgttgg

SEQ ID NO: 139490 - DNA, 27 bp, Artificial sequence
  SiRNA target sequence
gcagctacacgaggtataagtgttggc

SEQ ID NO: 139491 - DNA, 27 bp, Artificial sequence
  SiRNA target sequence
cagctacacgaggtataagtgttggcc

SEQ ID NO: 139492 - DNA, 27 bp, Artificial sequence
  SiRNA target sequence
agctacacgaggtataagtgttggcct

SEQ ID NO: 139493 - DNA, 27 bp, Artificial sequence
  SiRNA target sequence
gctacacgaggtataagtgttggcctg

SEQ ID NO: 139494 - DNA, 27 bp, Artificial sequence
  SiRNA target sequence
ctacacgaggtataagtgttggcctga

SEQ ID NO: 139495 - DNA, 27 bp, Artificial sequence
  SiRNA target sequence
tacacgaggtataagtgttggcctgat

SEQ ID NO: 139496 - DNA, 27 bp, Artificial sequence
  SiRNA target sequence
acacgaggtataagtgttggcctgata

SEQ ID NO: 139497 - DNA, 27 bp, Artificial sequence
  SiRNA target sequence
cacgaggtataagtgttggcctgatag

SEQ ID NO: 139498 - DNA, 27 bp, Artificial sequence
  SiRNA target sequence
acgaggtataagtgttggcctgataga

SEQ ID NO: 139499 - DNA, 27 bp, Artificial sequence
  SiRNA target sequence
cgaggtataagtgttggcctgatagaa

SEQ ID NO: 139500 - DNA, 27 bp, Artificial sequence
  SiRNA target sequence
gaggtataagtgttggcctgatagaag

SEQ ID NO: 139501 - DNA, 27 bp, Artificial sequence
  SiRNA target sequence
aggtataagtgttggcctgatagaagc

SEQ ID NO: 139502 - DNA, 27 bp, Artificial sequence
  SiRNA target sequence
ggtataagtgttggcctgatagaagca

SEQ ID NO: 139503 - DNA, 27 bp, Artificial sequence
  SiRNA target sequence
gtataagtgttggcctgatagaagcac

SEQ ID NO: 139504 - DNA, 27 bp, Artificial sequence
  SiRNA target sequence
tataagtgttggcctgatagaagcaca

SEQ ID NO: 139505 - DNA, 27 bp, Artificial sequence
  SiRNA target sequence
ataagtgttggcctgatagaagcacat

SEQ ID NO: 139506 - DNA, 27 bp, Artificial sequence
  SiRNA target sequence
taagtgttggcctgatagaagcacatg

SEQ ID NO: 139507 - DNA, 27 bp, Artificial sequence
  SiRNA target sequence
aagtgttggcctgatagaagcacatga

SEQ ID NO: 139508 - DNA, 27 bp, Artificial sequence
  SiRNA target sequence
agtgttggcctgatagaagcacatgat

SEQ ID NO: 139509 - DNA, 27 bp, Artificial sequence
  SiRNA target sequence
gtgttggcctgatagaagcacatgatt

SEQ ID NO: 139510 - DNA, 27 bp, Artificial sequence
  SiRNA target sequence
tgttggcctgatagaagcacatgattt

SEQ ID NO: 139511 - DNA, 27 bp, Artificial sequence
  SiRNA target sequence
gttggcctgatagaagcacatgatttt

SEQ ID NO: 139512 - DNA, 27 bp, Artificial sequence
  SiRNA target sequence
ttggcctgatagaagcacatgattttg

SEQ ID NO: 139513 - DNA, 27 bp, Artificial sequence
  SiRNA target sequence
tggcctgatagaagcacatgattttgg

SEQ ID NO: 139514 - DNA, 27 bp, Artificial sequence
  SiRNA target sequence
ggcctgatagaagcacatgattttggt

SEQ ID NO: 139515 - DNA, 27 bp, Artificial sequence
  SiRNA target sequence
gcctgatagaagcacatgattttggtt

SEQ ID NO: 139516 - DNA, 27 bp, Artificial sequence
  SiRNA target sequence
cctgatagaagcacatgattttggttc

SEQ ID NO: 139517 - DNA, 27 bp, Artificial sequence
  SiRNA target sequence
ctgatagaagcacatgattttggttcg

SEQ ID NO: 139518 - DNA, 27 bp, Artificial sequence
  SiRNA target sequence
tgatagaagcacatgattttggttcgg

SEQ ID NO: 139519 - DNA, 27 bp, Artificial sequence
  SiRNA target sequence
gatagaagcacatgattttggttcggg

SEQ ID NO: 139520 - DNA, 27 bp, Artificial sequence
  SiRNA target sequence
atagaagcacatgattttggttcgggc

SEQ ID NO: 139521 - DNA, 27 bp, Artificial sequence
  SiRNA target sequence
tagaagcacatgattttggttcgggca

SEQ ID NO: 139522 - DNA, 27 bp, Artificial sequence
  SiRNA target sequence
agaagcacatgattttggttcgggcac

SEQ ID NO: 139523 - DNA, 27 bp, Artificial sequence
  SiRNA target sequence
gaagcacatgattttggttcgggcacg

SEQ ID NO: 139524 - DNA, 27 bp, Artificial sequence
  SiRNA target sequence
aagcacatgattttggttcgggcacga

SEQ ID NO: 139525 - DNA, 27 bp, Artificial sequence
  SiRNA target sequence
agcacatgattttggttcgggcacgag

SEQ ID NO: 139526 - DNA, 27 bp, Artificial sequence
  SiRNA target sequence
gcacatgattttggttcgggcacgagt

SEQ ID NO: 139527 - DNA, 27 bp, Artificial sequence
  SiRNA target sequence
cacatgattttggttcgggcacgagtt

SEQ ID NO: 139528 - DNA, 27 bp, Artificial sequence
  SiRNA target sequence
acatgattttggttcgggcacgagttc

SEQ ID NO: 139529 - DNA, 27 bp, Artificial sequence
  SiRNA target sequence
catgattttggttcgggcacgagttca

SEQ ID NO: 139530 - DNA, 27 bp, Artificial sequence
  SiRNA target sequence
atgattttggttcgggcacgagttcaa

SEQ ID NO: 139531 - DNA, 27 bp, Artificial sequence
  SiRNA target sequence
tgattttggttcgggcacgagttcaaa

SEQ ID NO: 139532 - DNA, 27 bp, Artificial sequence
  SiRNA target sequence
gattttggttcgggcacgagttcaaaa

SEQ ID NO: 139533 - DNA, 27 bp, Artificial sequence
  SiRNA target sequence
attttggttcgggcacgagttcaaaat

SEQ ID NO: 139534 - DNA, 27 bp, Artificial sequence
  SiRNA target sequence
ttttggttcgggcacgagttcaaaatc

SEQ ID NO: 139535 - DNA, 27 bp, Artificial sequence
  SiRNA target sequence
tttggttcgggcacgagttcaaaatct

SEQ ID NO: 139536 - DNA, 27 bp, Artificial sequence
  SiRNA target sequence
ttggttcgggcacgagttcaaaatcta

SEQ ID NO: 139537 - DNA, 27 bp, Artificial sequence
  SiRNA target sequence
tggttcgggcacgagttcaaaatctac

SEQ ID NO: 139538 - DNA, 27 bp, Artificial sequence
  SiRNA target sequence
ggttcgggcacgagttcaaaatctaca

SEQ ID NO: 139539 - DNA, 27 bp, Artificial sequence
  SiRNA target sequence
gttcgggcacgagttcaaaatctacaa

SEQ ID NO: 139540 - DNA, 27 bp, Artificial sequence
  SiRNA target sequence
ttcgggcacgagttcaaaatctacaaa

SEQ ID NO: 139541 - DNA, 27 bp, Artificial sequence
  SiRNA target sequence
tcgggcacgagttcaaaatctacaaaa

SEQ ID NO: 139542 - DNA, 27 bp, Artificial sequence
  SiRNA target sequence
cgggcacgagttcaaaatctacaaaac

SEQ ID NO: 139543 - DNA, 27 bp, Artificial sequence
  SiRNA target sequence
gggcacgagttcaaaatctacaaaact

SEQ ID NO: 139544 - DNA, 27 bp, Artificial sequence
  SiRNA target sequence
ggcacgagttcaaaatctacaaaactt

SEQ ID NO: 139545 - DNA, 27 bp, Artificial sequence
  SiRNA target sequence
gcacgagttcaaaatctacaaaacttt

SEQ ID NO: 139546 - DNA, 27 bp, Artificial sequence
  SiRNA target sequence
cacgagttcaaaatctacaaaactttt

SEQ ID NO: 139547 - DNA, 27 bp, Artificial sequence
  SiRNA target sequence
acgagttcaaaatctacaaaacttttt

SEQ ID NO: 139548 - DNA, 27 bp, Artificial sequence
  SiRNA target sequence
cgagttcaaaatctacaaaactttttc

SEQ ID NO: 139549 - DNA, 27 bp, Artificial sequence
  SiRNA target sequence
gagttcaaaatctacaaaactttttca

SEQ ID NO: 139550 - DNA, 27 bp, Artificial sequence
  SiRNA target sequence
agttcaaaatctacaaaactttttcat

SEQ ID NO: 139551 - DNA, 27 bp, Artificial sequence
  SiRNA target sequence
gttcaaaatctacaaaactttttcatg

SEQ ID NO: 139552 - DNA, 27 bp, Artificial sequence
  SiRNA target sequence
ttcaaaatctacaaaactttttcatgg

SEQ ID NO: 139553 - DNA, 27 bp, Artificial sequence
  SiRNA target sequence
tcaaaatctacaaaactttttcatggc

SEQ ID NO: 139554 - DNA, 27 bp, Artificial sequence
  SiRNA target sequence
caaaatctacaaaactttttcatggcg

SEQ ID NO: 139555 - DNA, 27 bp, Artificial sequence
  SiRNA target sequence
aaaatctacaaaactttttcatggcgg

SEQ ID NO: 139556 - DNA, 27 bp, Artificial sequence
  SiRNA target sequence
aaatctacaaaactttttcatggcggt

SEQ ID NO: 139557 - DNA, 27 bp, Artificial sequence
  SiRNA target sequence
aatctacaaaactttttcatggcggtg

SEQ ID NO: 139558 - DNA, 27 bp, Artificial sequence
  SiRNA target sequence
atctacaaaactttttcatggcggtgt

SEQ ID NO: 139559 - DNA, 27 bp, Artificial sequence
  SiRNA target sequence
tctacaaaactttttcatggcggtgta

SEQ ID NO: 139560 - DNA, 27 bp, Artificial sequence
  SiRNA target sequence
ctacaaaactttttcatggcggtgtac

SEQ ID NO: 139561 - DNA, 27 bp, Artificial sequence
  SiRNA target sequence
tacaaaactttttcatggcggtgtacg

SEQ ID NO: 139562 - DNA, 27 bp, Artificial sequence
  SiRNA target sequence
acaaaactttttcatggcggtgtacgc

SEQ ID NO: 139563 - DNA, 27 bp, Artificial sequence
  SiRNA target sequence
caaaactttttcatggcggtgtacgct

SEQ ID NO: 139564 - DNA, 27 bp, Artificial sequence
  SiRNA target sequence
aaaactttttcatggcggtgtacgcta

SEQ ID NO: 139565 - DNA, 27 bp, Artificial sequence
  SiRNA target sequence
aaactttttcatggcggtgtacgctac

SEQ ID NO: 139566 - DNA, 27 bp, Artificial sequence
  SiRNA target sequence
aactttttcatggcggtgtacgctacc

SEQ ID NO: 139567 - DNA, 27 bp, Artificial sequence
  SiRNA target sequence
actttttcatggcggtgtacgctacct

SEQ ID NO: 139568 - DNA, 27 bp, Artificial sequence
  SiRNA target sequence
ctttttcatggcggtgtacgctacctt

SEQ ID NO: 139569 - DNA, 27 bp, Artificial sequence
  SiRNA target sequence
tttttcatggcggtgtacgctaccttg

SEQ ID NO: 139570 - DNA, 27 bp, Artificial sequence
  SiRNA target sequence
ttttcatggcggtgtacgctaccttga

SEQ ID NO: 139571 - DNA, 27 bp, Artificial sequence
  SiRNA target sequence
tttcatggcggtgtacgctaccttgaa

SEQ ID NO: 139572 - DNA, 27 bp, Artificial sequence
  SiRNA target sequence
ttcatggcggtgtacgctaccttgaaa

SEQ ID NO: 139573 - DNA, 27 bp, Artificial sequence
  SiRNA target sequence
tcatggcggtgtacgctaccttgaaaa

SEQ ID NO: 139574 - DNA, 27 bp, Artificial sequence
  SiRNA target sequence
catggcggtgtacgctaccttgaaaaa

SEQ ID NO: 139575 - DNA, 27 bp, Artificial sequence
  SiRNA target sequence
atggcggtgtacgctaccttgaaaaag

SEQ ID NO: 139576 - DNA, 27 bp, Artificial sequence
  SiRNA target sequence
tggcggtgtacgctaccttgaaaaagc

SEQ ID NO: 139577 - DNA, 27 bp, Artificial sequence
  SiRNA target sequence
ggcggtgtacgctaccttgaaaaagct

SEQ ID NO: 139578 - DNA, 27 bp, Artificial sequence
  SiRNA target sequence
gcggtgtacgctaccttgaaaaagctg

SEQ ID NO: 139579 - DNA, 27 bp, Artificial sequence
  SiRNA target sequence
cggtgtacgctaccttgaaaaagctgt

SEQ ID NO: 139580 - DNA, 27 bp, Artificial sequence
  SiRNA target sequence
ggtgtacgctaccttgaaaaagctgtt

SEQ ID NO: 139581 - DNA, 27 bp, Artificial sequence
  SiRNA target sequence
gtgtacgctaccttgaaaaagctgtta

SEQ ID NO: 139582 - DNA, 27 bp, Artificial sequence
  SiRNA target sequence
tgtacgctaccttgaaaaagctgttaa

SEQ ID NO: 139583 - DNA, 27 bp, Artificial sequence
  SiRNA target sequence
gtacgctaccttgaaaaagctgttaat

SEQ ID NO: 139584 - DNA, 27 bp, Artificial sequence
  SiRNA target sequence
tacgctaccttgaaaaagctgttaatg

SEQ ID NO: 139585 - DNA, 27 bp, Artificial sequence
  SiRNA target sequence
acgctaccttgaaaaagctgttaatga

SEQ ID NO: 139586 - DNA, 27 bp, Artificial sequence
  SiRNA target sequence
cgctaccttgaaaaagctgttaatgat

SEQ ID NO: 139587 - DNA, 27 bp, Artificial sequence
  SiRNA target sequence
gctaccttgaaaaagctgttaatgatt

SEQ ID NO: 139588 - DNA, 27 bp, Artificial sequence
  SiRNA target sequence
ctaccttgaaaaagctgttaatgattt

SEQ ID NO: 139589 - DNA, 27 bp, Artificial sequence
  SiRNA target sequence
taccttgaaaaagctgttaatgattta

SEQ ID NO: 139590 - DNA, 27 bp, Artificial sequence
  SiRNA target sequence
accttgaaaaagctgttaatgatttag

SEQ ID NO: 139591 - DNA, 27 bp, Artificial sequence
  SiRNA target sequence
ccttgaaaaagctgttaatgatttaga

SEQ ID NO: 139592 - DNA, 27 bp, Artificial sequence
  SiRNA target sequence
cttgaaaaagctgttaatgatttagat

SEQ ID NO: 139593 - DNA, 27 bp, Artificial sequence
  SiRNA target sequence
ttgaaaaagctgttaatgatttagata

SEQ ID NO: 139594 - DNA, 27 bp, Artificial sequence
  SiRNA target sequence
tgaaaaagctgttaatgatttagatag

SEQ ID NO: 139595 - DNA, 27 bp, Artificial sequence
  SiRNA target sequence
gaaaaagctgttaatgatttagataga

SEQ ID NO: 139596 - DNA, 27 bp, Artificial sequence
  SiRNA target sequence
aaaaagctgttaatgatttagatagat

SEQ ID NO: 139597 - DNA, 27 bp, Artificial sequence
  SiRNA target sequence
aaaagctgttaatgatttagatagatc

SEQ ID NO: 139598 - DNA, 27 bp, Artificial sequence
  SiRNA target sequence
aaagctgttaatgatttagatagatct

SEQ ID NO: 139599 - DNA, 27 bp, Artificial sequence
  SiRNA target sequence
aagctgttaatgatttagatagatctc

SEQ ID NO: 139600 - DNA, 27 bp, Artificial sequence
  SiRNA target sequence
agctgttaatgatttagatagatctca

SEQ ID NO: 139601 - DNA, 27 bp, Artificial sequence
  SiRNA target sequence
gctgttaatgatttagatagatctcag

SEQ ID NO: 139602 - DNA, 27 bp, Artificial sequence
  SiRNA target sequence
ctgttaatgatttagatagatctcagt

SEQ ID NO: 139603 - DNA, 27 bp, Artificial sequence
  SiRNA target sequence
tgttaatgatttagatagatctcagtt

SEQ ID NO: 139604 - DNA, 27 bp, Artificial sequence
  SiRNA target sequence
gttaatgatttagatagatctcagttt

SEQ ID NO: 139605 - DNA, 27 bp, Artificial sequence
  SiRNA target sequence
ttaatgatttagatagatctcagtttg

SEQ ID NO: 139606 - DNA, 27 bp, Artificial sequence
  SiRNA target sequence
taatgatttagatagatctcagtttga

SEQ ID NO: 139607 - DNA, 27 bp, Artificial sequence
  SiRNA target sequence
aatgatttagatagatctcagtttgac

SEQ ID NO: 139608 - DNA, 27 bp, Artificial sequence
  SiRNA target sequence
atgatttagatagatctcagtttgact

SEQ ID NO: 139609 - DNA, 27 bp, Artificial sequence
  SiRNA target sequence
tgatttagatagatctcagtttgactt

SEQ ID NO: 139610 - DNA, 27 bp, Artificial sequence
  SiRNA target sequence
gatttagatagatctcagtttgacttg

SEQ ID NO: 139611 - DNA, 27 bp, Artificial sequence
  SiRNA target sequence
atttagatagatctcagtttgacttgg

SEQ ID NO: 139612 - DNA, 27 bp, Artificial sequence
  SiRNA target sequence
tttagatagatctcagtttgacttggt

SEQ ID NO: 139613 - DNA, 27 bp, Artificial sequence
  SiRNA target sequence
ttagatagatctcagtttgacttggta

SEQ ID NO: 139614 - DNA, 27 bp, Artificial sequence
  SiRNA target sequence
tagatagatctcagtttgacttggtat

SEQ ID NO: 139615 - DNA, 27 bp, Artificial sequence
  SiRNA target sequence
agatagatctcagtttgacttggtatc

SEQ ID NO: 139616 - DNA, 27 bp, Artificial sequence
  SiRNA target sequence
gatagatctcagtttgacttggtatct

SEQ ID NO: 139617 - DNA, 27 bp, Artificial sequence
  SiRNA target sequence
atagatctcagtttgacttggtatctg

SEQ ID NO: 139618 - DNA, 27 bp, Artificial sequence
  SiRNA target sequence
tagatctcagtttgacttggtatctga

SEQ ID NO: 139619 - DNA, 27 bp, Artificial sequence
  SiRNA target sequence
agatctcagtttgacttggtatctgaa

SEQ ID NO: 139620 - DNA, 27 bp, Artificial sequence
  SiRNA target sequence
gatctcagtttgacttggtatctgaag

SEQ ID NO: 139621 - DNA, 27 bp, Artificial sequence
  SiRNA target sequence
atctcagtttgacttggtatctgaagc

SEQ ID NO: 139622 - DNA, 27 bp, Artificial sequence
  SiRNA target sequence
tctcagtttgacttggtatctgaagca

SEQ ID NO: 139623 - DNA, 27 bp, Artificial sequence
  SiRNA target sequence
ctcagtttgacttggtatctgaagcat

SEQ ID NO: 139624 - DNA, 27 bp, Artificial sequence
  SiRNA target sequence
tcagtttgacttggtatctgaagcatt

SEQ ID NO: 139625 - DNA, 27 bp, Artificial sequence
  SiRNA target sequence
cagtttgacttggtatctgaagcatta

SEQ ID NO: 139626 - DNA, 27 bp, Artificial sequence
  SiRNA target sequence
agtttgacttggtatctgaagcattaa

SEQ ID NO: 139627 - DNA, 27 bp, Artificial sequence
  SiRNA target sequence
gtttgacttggtatctgaagcattaag

SEQ ID NO: 139628 - DNA, 27 bp, Artificial sequence
  SiRNA target sequence
tttgacttggtatctgaagcattaagt

SEQ ID NO: 139629 - DNA, 27 bp, Artificial sequence
  SiRNA target sequence
ttgacttggtatctgaagcattaagtg

SEQ ID NO: 139630 - DNA, 27 bp, Artificial sequence
  SiRNA target sequence
tgacttggtatctgaagcattaagtga

SEQ ID NO: 139631 - DNA, 27 bp, Artificial sequence
  SiRNA target sequence
gacttggtatctgaagcattaagtgaa

SEQ ID NO: 139632 - DNA, 27 bp, Artificial sequence
  SiRNA target sequence
acttggtatctgaagcattaagtgaac

SEQ ID NO: 139633 - DNA, 27 bp, Artificial sequence
  SiRNA target sequence
cttggtatctgaagcattaagtgaacg

SEQ ID NO: 139634 - DNA, 27 bp, Artificial sequence
  SiRNA target sequence
ttggtatctgaagcattaagtgaacga

SEQ ID NO: 139635 - DNA, 27 bp, Artificial sequence
  SiRNA target sequence
tggtatctgaagcattaagtgaacgaa

SEQ ID NO: 139636 - DNA, 27 bp, Artificial sequence
  SiRNA target sequence
ggtatctgaagcattaagtgaacgaaa

SEQ ID NO: 139637 - DNA, 27 bp, Artificial sequence
  SiRNA target sequence
gtatctgaagcattaagtgaacgaaaa

SEQ ID NO: 139638 - DNA, 27 bp, Artificial sequence
  SiRNA target sequence
tatctgaagcattaagtgaacgaaaaa

SEQ ID NO: 139639 - DNA, 27 bp, Artificial sequence
  SiRNA target sequence
atctgaagcattaagtgaacgaaaaat

SEQ ID NO: 139640 - DNA, 27 bp, Artificial sequence
  SiRNA target sequence
tctgaagcattaagtgaacgaaaaatt

SEQ ID NO: 139641 - DNA, 27 bp, Artificial sequence
  SiRNA target sequence
ctgaagcattaagtgaacgaaaaattg

SEQ ID NO: 139642 - DNA, 27 bp, Artificial sequence
  SiRNA target sequence
tgaagcattaagtgaacgaaaaattgt

SEQ ID NO: 139643 - DNA, 27 bp, Artificial sequence
  SiRNA target sequence
gaagcattaagtgaacgaaaaattgtt

SEQ ID NO: 139644 - DNA, 27 bp, Artificial sequence
  SiRNA target sequence
aagcattaagtgaacgaaaaattgtta

SEQ ID NO: 139645 - DNA, 27 bp, Artificial sequence
  SiRNA target sequence
agcattaagtgaacgaaaaattgttat

SEQ ID NO: 139646 - DNA, 27 bp, Artificial sequence
  SiRNA target sequence
gcattaagtgaacgaaaaattgttatg

SEQ ID NO: 139647 - DNA, 27 bp, Artificial sequence
  SiRNA target sequence
cattaagtgaacgaaaaattgttatga

SEQ ID NO: 139648 - DNA, 27 bp, Artificial sequence
  SiRNA target sequence
attaagtgaacgaaaaattgttatgaa

SEQ ID NO: 139649 - DNA, 27 bp, Artificial sequence
  SiRNA target sequence
ttaagtgaacgaaaaattgttatgaat

SEQ ID NO: 139650 - DNA, 27 bp, Artificial sequence
  SiRNA target sequence
taagtgaacgaaaaattgttatgaata

SEQ ID NO: 139651 - DNA, 27 bp, Artificial sequence
  SiRNA target sequence
aagtgaacgaaaaattgttatgaatat

SEQ ID NO: 139652 - DNA, 27 bp, Artificial sequence
  SiRNA target sequence
agtgaacgaaaaattgttatgaatatg

SEQ ID NO: 139653 - DNA, 27 bp, Artificial sequence
  SiRNA target sequence
gtgaacgaaaaattgttatgaatatgt

SEQ ID NO: 139654 - DNA, 27 bp, Artificial sequence
  SiRNA target sequence
tgaacgaaaaattgttatgaatatgtg

SEQ ID NO: 139655 - DNA, 27 bp, Artificial sequence
  SiRNA target sequence
gaacgaaaaattgttatgaatatgtgt

SEQ ID NO: 139656 - DNA, 27 bp, Artificial sequence
  SiRNA target sequence
aacgaaaaattgttatgaatatgtgtc

SEQ ID NO: 139657 - DNA, 27 bp, Artificial sequence
  SiRNA target sequence
acgaaaaattgttatgaatatgtgtcc

SEQ ID NO: 139658 - DNA, 27 bp, Artificial sequence
  SiRNA target sequence
cgaaaaattgttatgaatatgtgtcct

SEQ ID NO: 139659 - DNA, 27 bp, Artificial sequence
  SiRNA target sequence
gaaaaattgttatgaatatgtgtcctt

SEQ ID NO: 139660 - DNA, 27 bp, Artificial sequence
  SiRNA target sequence
aaaaattgttatgaatatgtgtccttt

SEQ ID NO: 139661 - DNA, 27 bp, Artificial sequence
  SiRNA target sequence
aaaattgttatgaatatgtgtcctttt

SEQ ID NO: 139662 - DNA, 27 bp, Artificial sequence
  SiRNA target sequence
aaattgttatgaatatgtgtccttttc

SEQ ID NO: 139663 - DNA, 27 bp, Artificial sequence
  SiRNA target sequence
aattgttatgaatatgtgtccttttct

SEQ ID NO: 139664 - DNA, 27 bp, Artificial sequence
  SiRNA target sequence
attgttatgaatatgtgtccttttcta

SEQ ID NO: 139665 - DNA, 27 bp, Artificial sequence
  SiRNA target sequence
ttgttatgaatatgtgtccttttctag

SEQ ID NO: 139666 - DNA, 27 bp, Artificial sequence
  SiRNA target sequence
tgttatgaatatgtgtccttttctagt

SEQ ID NO: 139667 - DNA, 27 bp, Artificial sequence
  SiRNA target sequence
gttatgaatatgtgtccttttctagta

SEQ ID NO: 139668 - DNA, 27 bp, Artificial sequence
  SiRNA target sequence
ttatgaatatgtgtccttttctagtaa

SEQ ID NO: 139669 - DNA, 27 bp, Artificial sequence
  SiRNA target sequence
tatgaatatgtgtccttttctagtaag

SEQ ID NO: 139670 - DNA, 27 bp, Artificial sequence
  SiRNA target sequence
atgaatatgtgtccttttctagtaagg

SEQ ID NO: 139671 - DNA, 27 bp, Artificial sequence
  SiRNA target sequence
tgaatatgtgtccttttctagtaaggt

SEQ ID NO: 139672 - DNA, 27 bp, Artificial sequence
  SiRNA target sequence
gaatatgtgtccttttctagtaaggtc

SEQ ID NO: 139673 - DNA, 27 bp, Artificial sequence
  SiRNA target sequence
aatatgtgtccttttctagtaaggtcg

SEQ ID NO: 139674 - DNA, 27 bp, Artificial sequence
  SiRNA target sequence
atatgtgtccttttctagtaaggtcga

SEQ ID NO: 139675 - DNA, 27 bp, Artificial sequence
  SiRNA target sequence
tatgtgtccttttctagtaaggtcgat

SEQ ID NO: 139676 - DNA, 27 bp, Artificial sequence
  SiRNA target sequence
atgtgtccttttctagtaaggtcgatg

SEQ ID NO: 139677 - DNA, 27 bp, Artificial sequence
  SiRNA target sequence
tgtgtccttttctagtaaggtcgatgg

SEQ ID NO: 139678 - DNA, 27 bp, Artificial sequence
  SiRNA target sequence
gtgtccttttctagtaaggtcgatgga

SEQ ID NO: 139679 - DNA, 27 bp, Artificial sequence
  SiRNA target sequence
tgtccttttctagtaaggtcgatggaa

SEQ ID NO: 139680 - DNA, 27 bp, Artificial sequence
  SiRNA target sequence
gtccttttctagtaaggtcgatggaaa

SEQ ID NO: 139681 - DNA, 27 bp, Artificial sequence
  SiRNA target sequence
tccttttctagtaaggtcgatggaaat

SEQ ID NO: 139682 - DNA, 27 bp, Artificial sequence
  SiRNA target sequence
ccttttctagtaaggtcgatggaaata

SEQ ID NO: 139683 - DNA, 27 bp, Artificial sequence
  SiRNA target sequence
cttttctagtaaggtcgatggaaatat

SEQ ID NO: 139684 - DNA, 27 bp, Artificial sequence
  SiRNA target sequence
ttttctagtaaggtcgatggaaatatt

SEQ ID NO: 139685 - DNA, 27 bp, Artificial sequence
  SiRNA target sequence
tttctagtaaggtcgatggaaatatta

SEQ ID NO: 139686 - DNA, 27 bp, Artificial sequence
  SiRNA target sequence
ttctagtaaggtcgatggaaatattat

SEQ ID NO: 139687 - DNA, 27 bp, Artificial sequence
  SiRNA target sequence
tctagtaaggtcgatggaaatattatt

SEQ ID NO: 139688 - DNA, 27 bp, Artificial sequence
  SiRNA target sequence
ctagtaaggtcgatggaaatattattt

SEQ ID NO: 139689 - DNA, 27 bp, Artificial sequence
  SiRNA target sequence
tagtaaggtcgatggaaatattatttc

SEQ ID NO: 139690 - DNA, 27 bp, Artificial sequence
  SiRNA target sequence
agtaaggtcgatggaaatattatttcc

SEQ ID NO: 139691 - DNA, 27 bp, Artificial sequence
  SiRNA target sequence
gtaaggtcgatggaaatattatttccg

SEQ ID NO: 139692 - DNA, 27 bp, Artificial sequence
  SiRNA target sequence
taaggtcgatggaaatattatttccgg

SEQ ID NO: 139693 - DNA, 27 bp, Artificial sequence
  SiRNA target sequence
aaggtcgatggaaatattatttccggt

SEQ ID NO: 139694 - DNA, 27 bp, Artificial sequence
  SiRNA target sequence
aggtcgatggaaatattatttccggtt

SEQ ID NO: 139695 - DNA, 27 bp, Artificial sequence
  SiRNA target sequence
ggtcgatggaaatattatttccggttt

SEQ ID NO: 139696 - DNA, 27 bp, Artificial sequence
  SiRNA target sequence
gtcgatggaaatattatttccggttta

SEQ ID NO: 139697 - DNA, 27 bp, Artificial sequence
  SiRNA target sequence
tcgatggaaatattatttccggtttat

SEQ ID NO: 139698 - DNA, 27 bp, Artificial sequence
  SiRNA target sequence
cgatggaaatattatttccggtttata

SEQ ID NO: 139699 - DNA, 27 bp, Artificial sequence
  SiRNA target sequence
gatggaaatattatttccggtttataa

SEQ ID NO: 139700 - DNA, 27 bp, Artificial sequence
  SiRNA target sequence
atggaaatattatttccggtttataaa

SEQ ID NO: 139701 - DNA, 27 bp, Artificial sequence
  SiRNA target sequence
tggaaatattatttccggtttataaaa

SEQ ID NO: 139702 - DNA, 27 bp, Artificial sequence
  SiRNA target sequence
ggaaatattatttccggtttataaaag

SEQ ID NO: 139703 - DNA, 27 bp, Artificial sequence
  SiRNA target sequence
gaaatattatttccggtttataaaagg

SEQ ID NO: 139704 - DNA, 27 bp, Artificial sequence
  SiRNA target sequence
aaatattatttccggtttataaaaggc

SEQ ID NO: 139705 - DNA, 27 bp, Artificial sequence
  SiRNA target sequence
aatattatttccggtttataaaaggct

SEQ ID NO: 139706 - DNA, 27 bp, Artificial sequence
  SiRNA target sequence
atattatttccggtttataaaaggctt

SEQ ID NO: 139707 - DNA, 27 bp, Artificial sequence
  SiRNA target sequence
tattatttccggtttataaaaggcttt

SEQ ID NO: 139708 - DNA, 27 bp, Artificial sequence
  SiRNA target sequence
attatttccggtttataaaaggctttt

SEQ ID NO: 139709 - DNA, 27 bp, Artificial sequence
  SiRNA target sequence
ttatttccggtttataaaaggctttta

SEQ ID NO: 139710 - DNA, 27 bp, Artificial sequence
  SiRNA target sequence
tatttccggtttataaaaggcttttaa

SEQ ID NO: 139711 - DNA, 27 bp, Artificial sequence
  SiRNA target sequence
atttccggtttataaaaggcttttaat

SEQ ID NO: 139712 - DNA, 27 bp, Artificial sequence
  SiRNA target sequence
tttccggtttataaaaggcttttaatt

SEQ ID NO: 139713 - DNA, 27 bp, Artificial sequence
  SiRNA target sequence
ttccggtttataaaaggcttttaattc

SEQ ID NO: 139714 - DNA, 27 bp, Artificial sequence
  SiRNA target sequence
tccggtttataaaaggcttttaattcc

SEQ ID NO: 139715 - DNA, 27 bp, Artificial sequence
  SiRNA target sequence
ccggtttataaaaggcttttaattcct

SEQ ID NO: 139716 - DNA, 27 bp, Artificial sequence
  SiRNA target sequence
cggtttataaaaggcttttaattcctt

SEQ ID NO: 139717 - DNA, 27 bp, Artificial sequence
  SiRNA target sequence
ggtttataaaaggcttttaattcctta

SEQ ID NO: 139718 - DNA, 27 bp, Artificial sequence
  SiRNA target sequence
gtttataaaaggcttttaattccttac

SEQ ID NO: 139719 - DNA, 27 bp, Artificial sequence
  SiRNA target sequence
tttataaaaggcttttaattccttact

SEQ ID NO: 139720 - DNA, 27 bp, Artificial sequence
  SiRNA target sequence
ttataaaaggcttttaattccttacta

SEQ ID NO: 139721 - DNA, 27 bp, Artificial sequence
  SiRNA target sequence
tataaaaggcttttaattccttactac

SEQ ID NO: 139722 - DNA, 27 bp, Artificial sequence
  SiRNA target sequence
ataaaaggcttttaattccttactact

SEQ ID NO: 139723 - DNA, 27 bp, Artificial sequence
  SiRNA target sequence
taaaaggcttttaattccttactacta

SEQ ID NO: 139724 - DNA, 27 bp, Artificial sequence
  SiRNA target sequence
aaaaggcttttaattccttactactat

SEQ ID NO: 139725 - DNA, 27 bp, Artificial sequence
  SiRNA target sequence
aaaggcttttaattccttactactata

SEQ ID NO: 139726 - DNA, 27 bp, Artificial sequence
  SiRNA target sequence
aaggcttttaattccttactactatat

SEQ ID NO: 139727 - DNA, 27 bp, Artificial sequence
  SiRNA target sequence
aggcttttaattccttactactatatt

SEQ ID NO: 139728 - DNA, 27 bp, Artificial sequence
  SiRNA target sequence
ggcttttaattccttactactatattg

SEQ ID NO: 139729 - DNA, 27 bp, Artificial sequence
  SiRNA target sequence
gcttttaattccttactactatattgg

SEQ ID NO: 139730 - DNA, 27 bp, Artificial sequence
  SiRNA target sequence
cttttaattccttactactatattggc

SEQ ID NO: 139731 - DNA, 27 bp, Artificial sequence
  SiRNA target sequence
ttttaattccttactactatattggcc

SEQ ID NO: 139732 - DNA, 27 bp, Artificial sequence
  SiRNA target sequence
tttaattccttactactatattggcct

SEQ ID NO: 139733 - DNA, 27 bp, Artificial sequence
  SiRNA target sequence
ttaattccttactactatattggcctt

SEQ ID NO: 139734 - DNA, 27 bp, Artificial sequence
  SiRNA target sequence
taattccttactactatattggcctta

SEQ ID NO: 139735 - DNA, 27 bp, Artificial sequence
  SiRNA target sequence
aattccttactactatattggccttaa

SEQ ID NO: 139736 - DNA, 27 bp, Artificial sequence
  SiRNA target sequence
attccttactactatattggccttaaa

SEQ ID NO: 139737 - DNA, 27 bp, Artificial sequence
  SiRNA target sequence
ttccttactactatattggccttaaat

SEQ ID NO: 139738 - DNA, 27 bp, Artificial sequence
  SiRNA target sequence
tccttactactatattggccttaaatt

SEQ ID NO: 139739 - DNA, 27 bp, Artificial sequence
  SiRNA target sequence
ccttactactatattggccttaaattt

SEQ ID NO: 139740 - DNA, 27 bp, Artificial sequence
  SiRNA target sequence
cttactactatattggccttaaatttt

SEQ ID NO: 139741 - DNA, 27 bp, Artificial sequence
  SiRNA target sequence
ttactactatattggccttaaatttta

SEQ ID NO: 139742 - DNA, 27 bp, Artificial sequence
  SiRNA target sequence
tactactatattggccttaaattttat

SEQ ID NO: 139743 - DNA, 27 bp, Artificial sequence
  SiRNA target sequence
actactatattggccttaaattttatg

SEQ ID NO: 139744 - DNA, 27 bp, Artificial sequence
  SiRNA target sequence
ctactatattggccttaaattttatga

SEQ ID NO: 139745 - DNA, 27 bp, Artificial sequence
  SiRNA target sequence
tactatattggccttaaattttatgat

SEQ ID NO: 139746 - DNA, 27 bp, Artificial sequence
  SiRNA target sequence
actatattggccttaaattttatgatt

SEQ ID NO: 139747 - DNA, 27 bp, Artificial sequence
  SiRNA target sequence
ctatattggccttaaattttatgattg

SEQ ID NO: 139748 - DNA, 27 bp, Artificial sequence
  SiRNA target sequence
tatattggccttaaattttatgattgg

SEQ ID NO: 139749 - DNA, 27 bp, Artificial sequence
  SiRNA target sequence
atattggccttaaattttatgattgga

SEQ ID NO: 139750 - DNA, 27 bp, Artificial sequence
  SiRNA target sequence
tattggccttaaattttatgattggat

SEQ ID NO: 139751 - DNA, 27 bp, Artificial sequence
  SiRNA target sequence
attggccttaaattttatgattggatt

SEQ ID NO: 139752 - DNA, 27 bp, Artificial sequence
  SiRNA target sequence
ttggccttaaattttatgattggattt

SEQ ID NO: 139753 - DNA, 27 bp, Artificial sequence
  SiRNA target sequence
tggccttaaattttatgattggatttc

SEQ ID NO: 139754 - DNA, 27 bp, Artificial sequence
  SiRNA target sequence
ggccttaaattttatgattggatttct

SEQ ID NO: 139755 - DNA, 27 bp, Artificial sequence
  SiRNA target sequence
gccttaaattttatgattggatttctg

SEQ ID NO: 139756 - DNA, 27 bp, Artificial sequence
  SiRNA target sequence
ccttaaattttatgattggatttctgg

SEQ ID NO: 139757 - DNA, 27 bp, Artificial sequence
  SiRNA target sequence
cttaaattttatgattggatttctggg

SEQ ID NO: 139758 - DNA, 27 bp, Artificial sequence
  SiRNA target sequence
ttaaattttatgattggatttctgggc

SEQ ID NO: 139759 - DNA, 27 bp, Artificial sequence
  SiRNA target sequence
taaattttatgattggatttctgggca

SEQ ID NO: 139760 - DNA, 27 bp, Artificial sequence
  SiRNA target sequence
aaattttatgattggatttctgggcaa

SEQ ID NO: 139761 - DNA, 27 bp, Artificial sequence
  SiRNA target sequence
aattttatgattggatttctgggcaac

SEQ ID NO: 139762 - DNA, 27 bp, Artificial sequence
  SiRNA target sequence
attttatgattggatttctgggcaacg

SEQ ID NO: 139763 - DNA, 27 bp, Artificial sequence
  SiRNA target sequence
ttttatgattggatttctgggcaacgg

SEQ ID NO: 139764 - DNA, 27 bp, Artificial sequence
  SiRNA target sequence
tttatgattggatttctgggcaacggt

SEQ ID NO: 139765 - DNA, 27 bp, Artificial sequence
  SiRNA target sequence
ttatgattggatttctgggcaacggtc

SEQ ID NO: 139766 - DNA, 27 bp, Artificial sequence
  SiRNA target sequence
tatgattggatttctgggcaacggtcc

SEQ ID NO: 139767 - DNA, 27 bp, Artificial sequence
  SiRNA target sequence
atgattggatttctgggcaacggtccc

SEQ ID NO: 139768 - DNA, 27 bp, Artificial sequence
  SiRNA target sequence
tgattggatttctgggcaacggtccct

SEQ ID NO: 139769 - DNA, 27 bp, Artificial sequence
  SiRNA target sequence
gattggatttctgggcaacggtccctt

SEQ ID NO: 139770 - DNA, 27 bp, Artificial sequence
  SiRNA target sequence
attggatttctgggcaacggtcccttg

SEQ ID NO: 139771 - DNA, 27 bp, Artificial sequence
  SiRNA target sequence
ttggatttctgggcaacggtcccttgg

SEQ ID NO: 139772 - DNA, 27 bp, Artificial sequence
  SiRNA target sequence
tggatttctgggcaacggtcccttggg

SEQ ID NO: 139773 - DNA, 27 bp, Artificial sequence
  SiRNA target sequence
ggatttctgggcaacggtcccttgggc

SEQ ID NO: 139774 - DNA, 27 bp, Artificial sequence
  SiRNA target sequence
gatttctgggcaacggtcccttgggcg

SEQ ID NO: 139775 - DNA, 27 bp, Artificial sequence
  SiRNA target sequence
atttctgggcaacggtcccttgggcga

SEQ ID NO: 139776 - DNA, 27 bp, Artificial sequence
  SiRNA target sequence
tttctgggcaacggtcccttgggcgaa

SEQ ID NO: 139777 - DNA, 27 bp, Artificial sequence
  SiRNA target sequence
ttctgggcaacggtcccttgggcgaag

SEQ ID NO: 139778 - DNA, 27 bp, Artificial sequence
  SiRNA target sequence
tctgggcaacggtcccttgggcgaagt

SEQ ID NO: 139779 - DNA, 27 bp, Artificial sequence
  SiRNA target sequence
ctgggcaacggtcccttgggcgaagta

SEQ ID NO: 139780 - DNA, 27 bp, Artificial sequence
  SiRNA target sequence
tgggcaacggtcccttgggcgaagtaa

SEQ ID NO: 139781 - DNA, 27 bp, Artificial sequence
  SiRNA target sequence
gggcaacggtcccttgggcgaagtaaa

SEQ ID NO: 139782 - DNA, 27 bp, Artificial sequence
  SiRNA target sequence
ggcaacggtcccttgggcgaagtaaat

SEQ ID NO: 139783 - DNA, 27 bp, Artificial sequence
  SiRNA target sequence
gcaacggtcccttgggcgaagtaaatt

SEQ ID NO: 139784 - DNA, 27 bp, Artificial sequence
  SiRNA target sequence
caacggtcccttgggcgaagtaaattt

SEQ ID NO: 139785 - DNA, 27 bp, Artificial sequence
  SiRNA target sequence
aacggtcccttgggcgaagtaaatttt

SEQ ID NO: 139786 - DNA, 27 bp, Artificial sequence
  SiRNA target sequence
acggtcccttgggcgaagtaaattttt

SEQ ID NO: 139787 - DNA, 27 bp, Artificial sequence
  SiRNA target sequence
cggtcccttgggcgaagtaaatttttg

SEQ ID NO: 139788 - DNA, 27 bp, Artificial sequence
  SiRNA target sequence
ggtcccttgggcgaagtaaatttttgt

SEQ ID NO: 139789 - DNA, 27 bp, Artificial sequence
  SiRNA target sequence
gtcccttgggcgaagtaaatttttgtc

SEQ ID NO: 139790 - DNA, 27 bp, Artificial sequence
  SiRNA target sequence
tcccttgggcgaagtaaatttttgtcg

SEQ ID NO: 139791 - DNA, 27 bp, Artificial sequence
  SiRNA target sequence
cccttgggcgaagtaaatttttgtcgc

SEQ ID NO: 139792 - DNA, 27 bp, Artificial sequence
  SiRNA target sequence
ccttgggcgaagtaaatttttgtcgcg

SEQ ID NO: 139793 - DNA, 27 bp, Artificial sequence
  SiRNA target sequence
cttgggcgaagtaaatttttgtcgcgg

SEQ ID NO: 139794 - DNA, 27 bp, Artificial sequence
  SiRNA target sequence
ttgggcgaagtaaatttttgtcgcggc

SEQ ID NO: 139795 - DNA, 27 bp, Artificial sequence
  SiRNA target sequence
tgggcgaagtaaatttttgtcgcggca

SEQ ID NO: 139796 - DNA, 27 bp, Artificial sequence
  SiRNA target sequence
gggcgaagtaaatttttgtcgcggcaa

SEQ ID NO: 139797 - DNA, 27 bp, Artificial sequence
  SiRNA target sequence
ggcgaagtaaatttttgtcgcggcaac

SEQ ID NO: 139798 - DNA, 27 bp, Artificial sequence
  SiRNA target sequence
gcgaagtaaatttttgtcgcggcaaca

SEQ ID NO: 139799 - DNA, 27 bp, Artificial sequence
  SiRNA target sequence
cgaagtaaatttttgtcgcggcaacaa

SEQ ID NO: 139800 - DNA, 27 bp, Artificial sequence
  SiRNA target sequence
gaagtaaatttttgtcgcggcaacaaa

SEQ ID NO: 139801 - DNA, 27 bp, Artificial sequence
  SiRNA target sequence
aagtaaatttttgtcgcggcaacaaac

SEQ ID NO: 139802 - DNA, 27 bp, Artificial sequence
  SiRNA target sequence
agtaaatttttgtcgcggcaacaaact

SEQ ID NO: 139803 - DNA, 27 bp, Artificial sequence
  SiRNA target sequence
gtaaatttttgtcgcggcaacaaacta

SEQ ID NO: 139804 - DNA, 27 bp, Artificial sequence
  SiRNA target sequence
taaatttttgtcgcggcaacaaactat

SEQ ID NO: 139805 - DNA, 27 bp, Artificial sequence
  SiRNA target sequence
aaatttttgtcgcggcaacaaactatt

SEQ ID NO: 139806 - DNA, 27 bp, Artificial sequence
  SiRNA target sequence
aatttttgtcgcggcaacaaactatta

SEQ ID NO: 139807 - DNA, 27 bp, Artificial sequence
  SiRNA target sequence
atttttgtcgcggcaacaaactattac

SEQ ID NO: 139808 - DNA, 27 bp, Artificial sequence
  SiRNA target sequence
tttttgtcgcggcaacaaactattaca

SEQ ID NO: 139809 - DNA, 27 bp, Artificial sequence
  SiRNA target sequence
ttttgtcgcggcaacaaactattacaa

SEQ ID NO: 139810 - DNA, 27 bp, Artificial sequence
  SiRNA target sequence
tttgtcgcggcaacaaactattacaaa

SEQ ID NO: 139811 - DNA, 27 bp, Artificial sequence
  SiRNA target sequence
ttgtcgcggcaacaaactattacaaaa

SEQ ID NO: 139812 - DNA, 27 bp, Artificial sequence
  SiRNA target sequence
tgtcgcggcaacaaactattacaaaat

SEQ ID NO: 139813 - DNA, 27 bp, Artificial sequence
  SiRNA target sequence
gtcgcggcaacaaactattacaaaatt

SEQ ID NO: 139814 - DNA, 27 bp, Artificial sequence
  SiRNA target sequence
tcgcggcaacaaactattacaaaattt

SEQ ID NO: 139815 - DNA, 27 bp, Artificial sequence
  SiRNA target sequence
cgcggcaacaaactattacaaaatttc

SEQ ID NO: 139816 - DNA, 27 bp, Artificial sequence
  SiRNA target sequence
gcggcaacaaactattacaaaatttcc

SEQ ID NO: 139817 - DNA, 27 bp, Artificial sequence
  SiRNA target sequence
cggcaacaaactattacaaaatttcct

SEQ ID NO: 139818 - DNA, 27 bp, Artificial sequence
  SiRNA target sequence
ggcaacaaactattacaaaatttccta

SEQ ID NO: 139819 - DNA, 27 bp, Artificial sequence
  SiRNA target sequence
gcaacaaactattacaaaatttcctaa

SEQ ID NO: 139820 - DNA, 27 bp, Artificial sequence
  SiRNA target sequence
caacaaactattacaaaatttcctaat

SEQ ID NO: 139821 - DNA, 27 bp, Artificial sequence
  SiRNA target sequence
aacaaactattacaaaatttcctaatg

SEQ ID NO: 139822 - DNA, 27 bp, Artificial sequence
  SiRNA target sequence
acaaactattacaaaatttcctaatgt

SEQ ID NO: 139823 - DNA, 27 bp, Artificial sequence
  SiRNA target sequence
caaactattacaaaatttcctaatgtg

SEQ ID NO: 139824 - DNA, 27 bp, Artificial sequence
  SiRNA target sequence
aaactattacaaaatttcctaatgtga

SEQ ID NO: 139825 - DNA, 27 bp, Artificial sequence
  SiRNA target sequence
aactattacaaaatttcctaatgtgag

SEQ ID NO: 139826 - DNA, 27 bp, Artificial sequence
  SiRNA target sequence
actattacaaaatttcctaatgtgaga

SEQ ID NO: 139827 - DNA, 27 bp, Artificial sequence
  SiRNA target sequence
ctattacaaaatttcctaatgtgagaa

SEQ ID NO: 139828 - DNA, 27 bp, Artificial sequence
  SiRNA target sequence
tattacaaaatttcctaatgtgagaaa

SEQ ID NO: 139829 - DNA, 27 bp, Artificial sequence
  SiRNA target sequence
attacaaaatttcctaatgtgagaaaa

SEQ ID NO: 139830 - DNA, 27 bp, Artificial sequence
  SiRNA target sequence
ttacaaaatttcctaatgtgagaaaaa

SEQ ID NO: 139831 - DNA, 27 bp, Artificial sequence
  SiRNA target sequence
tacaaaatttcctaatgtgagaaaaat

SEQ ID NO: 139832 - DNA, 27 bp, Artificial sequence
  SiRNA target sequence
acaaaatttcctaatgtgagaaaaatc

SEQ ID NO: 139833 - DNA, 27 bp, Artificial sequence
  SiRNA target sequence
caaaatttcctaatgtgagaaaaatcg

SEQ ID NO: 139834 - DNA, 27 bp, Artificial sequence
  SiRNA target sequence
aaaatttcctaatgtgagaaaaatcga

SEQ ID NO: 139835 - DNA, 27 bp, Artificial sequence
  SiRNA target sequence
aaatttcctaatgtgagaaaaatcgac

SEQ ID NO: 139836 - DNA, 27 bp, Artificial sequence
  SiRNA target sequence
aatttcctaatgtgagaaaaatcgacc

SEQ ID NO: 139837 - DNA, 27 bp, Artificial sequence
  SiRNA target sequence
atttcctaatgtgagaaaaatcgacct

SEQ ID NO: 139838 - DNA, 27 bp, Artificial sequence
  SiRNA target sequence
tttcctaatgtgagaaaaatcgacctt

SEQ ID NO: 139839 - DNA, 27 bp, Artificial sequence
  SiRNA target sequence
ttcctaatgtgagaaaaatcgaccttg

SEQ ID NO: 139840 - DNA, 27 bp, Artificial sequence
  SiRNA target sequence
tcctaatgtgagaaaaatcgaccttgt

SEQ ID NO: 139841 - DNA, 27 bp, Artificial sequence
  SiRNA target sequence
cctaatgtgagaaaaatcgaccttgta

SEQ ID NO: 139842 - DNA, 27 bp, Artificial sequence
  SiRNA target sequence
ctaatgtgagaaaaatcgaccttgtag

SEQ ID NO: 139843 - DNA, 27 bp, Artificial sequence
  SiRNA target sequence
taatgtgagaaaaatcgaccttgtagg

SEQ ID NO: 139844 - DNA, 27 bp, Artificial sequence
  SiRNA target sequence
aatgtgagaaaaatcgaccttgtagga

SEQ ID NO: 139845 - DNA, 27 bp, Artificial sequence
  SiRNA target sequence
atgtgagaaaaatcgaccttgtaggat

SEQ ID NO: 139846 - DNA, 27 bp, Artificial sequence
  SiRNA target sequence
tgtgagaaaaatcgaccttgtaggatc

SEQ ID NO: 139847 - DNA, 27 bp, Artificial sequence
  SiRNA target sequence
gtgagaaaaatcgaccttgtaggatcc

SEQ ID NO: 139848 - DNA, 27 bp, Artificial sequence
  SiRNA target sequence
tgagaaaaatcgaccttgtaggatccg

SEQ ID NO: 139849 - DNA, 27 bp, Artificial sequence
  SiRNA target sequence
gagaaaaatcgaccttgtaggatccgt

SEQ ID NO: 139850 - DNA, 27 bp, Artificial sequence
  SiRNA target sequence
agaaaaatcgaccttgtaggatccgtt

SEQ ID NO: 139851 - DNA, 27 bp, Artificial sequence
  SiRNA target sequence
gaaaaatcgaccttgtaggatccgttt

SEQ ID NO: 139852 - DNA, 27 bp, Artificial sequence
  SiRNA target sequence
aaaaatcgaccttgtaggatccgtttc

SEQ ID NO: 139853 - DNA, 27 bp, Artificial sequence
  SiRNA target sequence
aaaatcgaccttgtaggatccgtttcg

SEQ ID NO: 139854 - DNA, 27 bp, Artificial sequence
  SiRNA target sequence
aaatcgaccttgtaggatccgtttcgt

SEQ ID NO: 139855 - DNA, 27 bp, Artificial sequence
  SiRNA target sequence
aatcgaccttgtaggatccgtttcgta

SEQ ID NO: 139856 - DNA, 27 bp, Artificial sequence
  SiRNA target sequence
atcgaccttgtaggatccgtttcgtat

SEQ ID NO: 139857 - DNA, 27 bp, Artificial sequence
  SiRNA target sequence
tcgaccttgtaggatccgtttcgtatc

SEQ ID NO: 139858 - DNA, 27 bp, Artificial sequence
  SiRNA target sequence
cgaccttgtaggatccgtttcgtatcg

SEQ ID NO: 139859 - DNA, 27 bp, Artificial sequence
  SiRNA target sequence
gaccttgtaggatccgtttcgtatcgt

SEQ ID NO: 139860 - DNA, 27 bp, Artificial sequence
  SiRNA target sequence
accttgtaggatccgtttcgtatcgtg

SEQ ID NO: 139861 - DNA, 27 bp, Artificial sequence
  SiRNA target sequence
ccttgtaggatccgtttcgtatcgtga

SEQ ID NO: 139862 - DNA, 27 bp, Artificial sequence
  SiRNA target sequence
cttgtaggatccgtttcgtatcgtgat

SEQ ID NO: 139863 - DNA, 27 bp, Artificial sequence
  SiRNA target sequence
ttgtaggatccgtttcgtatcgtgatg

SEQ ID NO: 139864 - DNA, 27 bp, Artificial sequence
  SiRNA target sequence
tgtaggatccgtttcgtatcgtgatgg

SEQ ID NO: 139865 - DNA, 27 bp, Artificial sequence
  SiRNA target sequence
gtaggatccgtttcgtatcgtgatggc

SEQ ID NO: 139866 - DNA, 27 bp, Artificial sequence
  SiRNA target sequence
taggatccgtttcgtatcgtgatggcc

SEQ ID NO: 139867 - DNA, 27 bp, Artificial sequence
  SiRNA target sequence
aggatccgtttcgtatcgtgatggcca

SEQ ID NO: 139868 - DNA, 27 bp, Artificial sequence
  SiRNA target sequence
ggatccgtttcgtatcgtgatggccaa

SEQ ID NO: 139869 - DNA, 27 bp, Artificial sequence
  SiRNA target sequence
gatccgtttcgtatcgtgatggccaat

SEQ ID NO: 139870 - DNA, 27 bp, Artificial sequence
  SiRNA target sequence
atccgtttcgtatcgtgatggccaatt

SEQ ID NO: 139871 - DNA, 27 bp, Artificial sequence
  SiRNA target sequence
tccgtttcgtatcgtgatggccaattt

SEQ ID NO: 139872 - DNA, 27 bp, Artificial sequence
  SiRNA target sequence
ccgtttcgtatcgtgatggccaatttt

SEQ ID NO: 139873 - DNA, 27 bp, Artificial sequence
  SiRNA target sequence
cgtttcgtatcgtgatggccaatttta

SEQ ID NO: 139874 - DNA, 27 bp, Artificial sequence
  SiRNA target sequence
gtttcgtatcgtgatggccaattttat

SEQ ID NO: 139875 - DNA, 27 bp, Artificial sequence
  SiRNA target sequence
tttcgtatcgtgatggccaattttatg

SEQ ID NO: 139876 - DNA, 27 bp, Artificial sequence
  SiRNA target sequence
ttcgtatcgtgatggccaattttatga

SEQ ID NO: 139877 - DNA, 27 bp, Artificial sequence
  SiRNA target sequence
tcgtatcgtgatggccaattttatgat

SEQ ID NO: 139878 - DNA, 27 bp, Artificial sequence
  SiRNA target sequence
cgtatcgtgatggccaattttatgatg

SEQ ID NO: 139879 - DNA, 27 bp, Artificial sequence
  SiRNA target sequence
gtatcgtgatggccaattttatgatgc

SEQ ID NO: 139880 - DNA, 27 bp, Artificial sequence
  SiRNA target sequence
tatcgtgatggccaattttatgatgct

SEQ ID NO: 139881 - DNA, 27 bp, Artificial sequence
  SiRNA target sequence
atcgtgatggccaattttatgatgcta

SEQ ID NO: 139882 - DNA, 27 bp, Artificial sequence
  SiRNA target sequence
tcgtgatggccaattttatgatgctaa

SEQ ID NO: 139883 - DNA, 27 bp, Artificial sequence
  SiRNA target sequence
cgtgatggccaattttatgatgctaaa

SEQ ID NO: 139884 - DNA, 27 bp, Artificial sequence
  SiRNA target sequence
gtgatggccaattttatgatgctaaat

SEQ ID NO: 139885 - DNA, 27 bp, Artificial sequence
  SiRNA target sequence
tgatggccaattttatgatgctaaata

SEQ ID NO: 139886 - DNA, 27 bp, Artificial sequence
  SiRNA target sequence
gatggccaattttatgatgctaaatac

SEQ ID NO: 139887 - DNA, 27 bp, Artificial sequence
  SiRNA target sequence
atggccaattttatgatgctaaataca

SEQ ID NO: 139888 - DNA, 27 bp, Artificial sequence
  SiRNA target sequence
tggccaattttatgatgctaaatacaa

SEQ ID NO: 139889 - DNA, 27 bp, Artificial sequence
  SiRNA target sequence
ggccaattttatgatgctaaatacaat

SEQ ID NO: 139890 - DNA, 27 bp, Artificial sequence
  SiRNA target sequence
gccaattttatgatgctaaatacaatg

SEQ ID NO: 139891 - DNA, 27 bp, Artificial sequence
  SiRNA target sequence
ccaattttatgatgctaaatacaatgt

SEQ ID NO: 139892 - DNA, 27 bp, Artificial sequence
  SiRNA target sequence
caattttatgatgctaaatacaatgtt

SEQ ID NO: 139893 - DNA, 27 bp, Artificial sequence
  SiRNA target sequence
aattttatgatgctaaatacaatgttc

SEQ ID NO: 139894 - DNA, 27 bp, Artificial sequence
  SiRNA target sequence
attttatgatgctaaatacaatgttct

SEQ ID NO: 139895 - DNA, 27 bp, Artificial sequence
  SiRNA target sequence
ttttatgatgctaaatacaatgttcta

SEQ ID NO: 139896 - DNA, 27 bp, Artificial sequence
  SiRNA target sequence
tttatgatgctaaatacaatgttctat

SEQ ID NO: 139897 - DNA, 27 bp, Artificial sequence
  SiRNA target sequence
ttatgatgctaaatacaatgttctatt

SEQ ID NO: 139898 - DNA, 27 bp, Artificial sequence
  SiRNA target sequence
tatgatgctaaatacaatgttctattg

SEQ ID NO: 139899 - DNA, 27 bp, Artificial sequence
  SiRNA target sequence
atgatgctaaatacaatgttctattgg

SEQ ID NO: 139900 - DNA, 27 bp, Artificial sequence
  SiRNA target sequence
tgatgctaaatacaatgttctattggg

SEQ ID NO: 139901 - DNA, 27 bp, Artificial sequence
  SiRNA target sequence
gatgctaaatacaatgttctattgggt

SEQ ID NO: 139902 - DNA, 27 bp, Artificial sequence
  SiRNA target sequence
atgctaaatacaatgttctattgggtg

SEQ ID NO: 139903 - DNA, 27 bp, Artificial sequence
  SiRNA target sequence
tgctaaatacaatgttctattgggtgt

SEQ ID NO: 139904 - DNA, 27 bp, Artificial sequence
  SiRNA target sequence
gctaaatacaatgttctattgggtgtc

SEQ ID NO: 139905 - DNA, 27 bp, Artificial sequence
  SiRNA target sequence
ctaaatacaatgttctattgggtgtca

SEQ ID NO: 139906 - DNA, 27 bp, Artificial sequence
  SiRNA target sequence
taaatacaatgttctattgggtgtcac

SEQ ID NO: 139907 - DNA, 27 bp, Artificial sequence
  SiRNA target sequence
aaatacaatgttctattgggtgtcaca

SEQ ID NO: 139908 - DNA, 27 bp, Artificial sequence
  SiRNA target sequence
aatacaatgttctattgggtgtcacag

SEQ ID NO: 139909 - DNA, 27 bp, Artificial sequence
  SiRNA target sequence
atacaatgttctattgggtgtcacagc

SEQ ID NO: 139910 - DNA, 27 bp, Artificial sequence
  SiRNA target sequence
tacaatgttctattgggtgtcacagct

SEQ ID NO: 139911 - DNA, 27 bp, Artificial sequence
  SiRNA target sequence
acaatgttctattgggtgtcacagcta

SEQ ID NO: 139912 - DNA, 27 bp, Artificial sequence
  SiRNA target sequence
caatgttctattgggtgtcacagctac

SEQ ID NO: 139913 - DNA, 27 bp, Artificial sequence
  SiRNA target sequence
aatgttctattgggtgtcacagctacc

SEQ ID NO: 139914 - DNA, 27 bp, Artificial sequence
  SiRNA target sequence
atgttctattgggtgtcacagctacct

SEQ ID NO: 139915 - DNA, 27 bp, Artificial sequence
  SiRNA target sequence
tgttctattgggtgtcacagctaccta

SEQ ID NO: 139916 - DNA, 27 bp, Artificial sequence
  SiRNA target sequence
gttctattgggtgtcacagctacctac

SEQ ID NO: 139917 - DNA, 27 bp, Artificial sequence
  SiRNA target sequence
ttctattgggtgtcacagctacctact

SEQ ID NO: 139918 - DNA, 27 bp, Artificial sequence
  SiRNA target sequence
tctattgggtgtcacagctacctacta

SEQ ID NO: 139919 - DNA, 27 bp, Artificial sequence
  SiRNA target sequence
ctattgggtgtcacagctacctactat

SEQ ID NO: 139920 - DNA, 27 bp, Artificial sequence
  SiRNA target sequence
tattgggtgtcacagctacctactatg

SEQ ID NO: 139921 - DNA, 27 bp, Artificial sequence
  SiRNA target sequence
attgggtgtcacagctacctactatgg

SEQ ID NO: 139922 - DNA, 27 bp, Artificial sequence
  SiRNA target sequence
ttgggtgtcacagctacctactatgga

SEQ ID NO: 139923 - DNA, 27 bp, Artificial sequence
  SiRNA target sequence
tgggtgtcacagctacctactatggag

SEQ ID NO: 139924 - DNA, 27 bp, Artificial sequence
  SiRNA target sequence
gggtgtcacagctacctactatggagc

SEQ ID NO: 139925 - DNA, 27 bp, Artificial sequence
  SiRNA target sequence
ggtgtcacagctacctactatggagct

SEQ ID NO: 139926 - DNA, 27 bp, Artificial sequence
  SiRNA target sequence
gtgtcacagctacctactatggagctg

SEQ ID NO: 139927 - DNA, 27 bp, Artificial sequence
  SiRNA target sequence
tgtcacagctacctactatggagctgt

SEQ ID NO: 139928 - DNA, 27 bp, Artificial sequence
  SiRNA target sequence
gtcacagctacctactatggagctgtt

SEQ ID NO: 139929 - DNA, 27 bp, Artificial sequence
  SiRNA target sequence
tcacagctacctactatggagctgttg

SEQ ID NO: 139930 - DNA, 27 bp, Artificial sequence
  SiRNA target sequence
cacagctacctactatggagctgttgt

SEQ ID NO: 139931 - DNA, 27 bp, Artificial sequence
  SiRNA target sequence
acagctacctactatggagctgttgta

SEQ ID NO: 139932 - DNA, 27 bp, Artificial sequence
  SiRNA target sequence
cagctacctactatggagctgttgtat

SEQ ID NO: 139933 - DNA, 27 bp, Artificial sequence
  SiRNA target sequence
agctacctactatggagctgttgtatt

SEQ ID NO: 139934 - DNA, 27 bp, Artificial sequence
  SiRNA target sequence
gctacctactatggagctgttgtatta

SEQ ID NO: 139935 - DNA, 27 bp, Artificial sequence
  SiRNA target sequence
ctacctactatggagctgttgtattaa

SEQ ID NO: 139936 - DNA, 27 bp, Artificial sequence
  SiRNA target sequence
tacctactatggagctgttgtattaaa

SEQ ID NO: 139937 - DNA, 27 bp, Artificial sequence
  SiRNA target sequence
acctactatggagctgttgtattaaat

SEQ ID NO: 139938 - DNA, 27 bp, Artificial sequence
  SiRNA target sequence
cctactatggagctgttgtattaaatc

SEQ ID NO: 139939 - DNA, 27 bp, Artificial sequence
  SiRNA target sequence
ctactatggagctgttgtattaaatca

SEQ ID NO: 139940 - DNA, 27 bp, Artificial sequence
  SiRNA target sequence
tactatggagctgttgtattaaatcat

SEQ ID NO: 139941 - DNA, 27 bp, Artificial sequence
  SiRNA target sequence
actatggagctgttgtattaaatcatg

SEQ ID NO: 139942 - DNA, 27 bp, Artificial sequence
  SiRNA target sequence
ctatggagctgttgtattaaatcatgc

SEQ ID NO: 139943 - DNA, 27 bp, Artificial sequence
  SiRNA target sequence
tatggagctgttgtattaaatcatgca

SEQ ID NO: 139944 - DNA, 27 bp, Artificial sequence
  SiRNA target sequence
atggagctgttgtattaaatcatgcaa

SEQ ID NO: 139945 - DNA, 27 bp, Artificial sequence
  SiRNA target sequence
tggagctgttgtattaaatcatgcaaa

SEQ ID NO: 139946 - DNA, 27 bp, Artificial sequence
  SiRNA target sequence
ggagctgttgtattaaatcatgcaaaa

SEQ ID NO: 139947 - DNA, 27 bp, Artificial sequence
  SiRNA target sequence
gagctgttgtattaaatcatgcaaaat

SEQ ID NO: 139948 - DNA, 27 bp, Artificial sequence
  SiRNA target sequence
agctgttgtattaaatcatgcaaaatt

SEQ ID NO: 139949 - DNA, 27 bp, Artificial sequence
  SiRNA target sequence
gctgttgtattaaatcatgcaaaattc

SEQ ID NO: 139950 - DNA, 27 bp, Artificial sequence
  SiRNA target sequence
ctgttgtattaaatcatgcaaaattct

SEQ ID NO: 139951 - DNA, 27 bp, Artificial sequence
  SiRNA target sequence
tgttgtattaaatcatgcaaaattctt

SEQ ID NO: 139952 - DNA, 27 bp, Artificial sequence
  SiRNA target sequence
gttgtattaaatcatgcaaaattcttg

SEQ ID NO: 139953 - DNA, 27 bp, Artificial sequence
  SiRNA target sequence
ttgtattaaatcatgcaaaattcttgt

SEQ ID NO: 139954 - DNA, 27 bp, Artificial sequence
  SiRNA target sequence
tgtattaaatcatgcaaaattcttgtc

SEQ ID NO: 139955 - DNA, 27 bp, Artificial sequence
  SiRNA target sequence
gtattaaatcatgcaaaattcttgtca

SEQ ID NO: 139956 - DNA, 27 bp, Artificial sequence
  SiRNA target sequence
tattaaatcatgcaaaattcttgtcag

SEQ ID NO: 139957 - DNA, 27 bp, Artificial sequence
  SiRNA target sequence
attaaatcatgcaaaattcttgtcagt

SEQ ID NO: 139958 - DNA, 27 bp, Artificial sequence
  SiRNA target sequence
ttaaatcatgcaaaattcttgtcagta

SEQ ID NO: 139959 - DNA, 27 bp, Artificial sequence
  SiRNA target sequence
taaatcatgcaaaattcttgtcagtaa

SEQ ID NO: 139960 - DNA, 27 bp, Artificial sequence
  SiRNA target sequence
aaatcatgcaaaattcttgtcagtaac

SEQ ID NO: 139961 - DNA, 27 bp, Artificial sequence
  SiRNA target sequence
aatcatgcaaaattcttgtcagtaaca

SEQ ID NO: 139962 - DNA, 27 bp, Artificial sequence
  SiRNA target sequence
atcatgcaaaattcttgtcagtaacaa

SEQ ID NO: 139963 - DNA, 27 bp, Artificial sequence
  SiRNA target sequence
tcatgcaaaattcttgtcagtaacaaa

SEQ ID NO: 139964 - DNA, 27 bp, Artificial sequence
  SiRNA target sequence
catgcaaaattcttgtcagtaacaaaa

SEQ ID NO: 139965 - DNA, 27 bp, Artificial sequence
  SiRNA target sequence
atgcaaaattcttgtcagtaacaaaag

SEQ ID NO: 139966 - DNA, 27 bp, Artificial sequence
  SiRNA target sequence
tgcaaaattcttgtcagtaacaaaaga

SEQ ID NO: 139967 - DNA, 27 bp, Artificial sequence
  SiRNA target sequence
gcaaaattcttgtcagtaacaaaagat

SEQ ID NO: 139968 - DNA, 27 bp, Artificial sequence
  SiRNA target sequence
caaaattcttgtcagtaacaaaagatg

SEQ ID NO: 139969 - DNA, 27 bp, Artificial sequence
  SiRNA target sequence
aaaattcttgtcagtaacaaaagatgg

SEQ ID NO: 139970 - DNA, 27 bp, Artificial sequence
  SiRNA target sequence
aaattcttgtcagtaacaaaagatggc

SEQ ID NO: 139971 - DNA, 27 bp, Artificial sequence
  SiRNA target sequence
aattcttgtcagtaacaaaagatggcg

SEQ ID NO: 139972 - DNA, 27 bp, Artificial sequence
  SiRNA target sequence
attcttgtcagtaacaaaagatggcga

SEQ ID NO: 139973 - DNA, 27 bp, Artificial sequence
  SiRNA target sequence
ttcttgtcagtaacaaaagatggcgat

SEQ ID NO: 139974 - DNA, 27 bp, Artificial sequence
  SiRNA target sequence
tcttgtcagtaacaaaagatggcgata

SEQ ID NO: 139975 - DNA, 27 bp, Artificial sequence
  SiRNA target sequence
cttgtcagtaacaaaagatggcgataa

SEQ ID NO: 139976 - DNA, 27 bp, Artificial sequence
  SiRNA target sequence
ttgtcagtaacaaaagatggcgataaa

SEQ ID NO: 139977 - DNA, 27 bp, Artificial sequence
  SiRNA target sequence
tgtcagtaacaaaagatggcgataaaa

SEQ ID NO: 139978 - DNA, 27 bp, Artificial sequence
  SiRNA target sequence
gtcagtaacaaaagatggcgataaaat

SEQ ID NO: 139979 - DNA, 27 bp, Artificial sequence
  SiRNA target sequence
tcagtaacaaaagatggcgataaaatt

SEQ ID NO: 139980 - DNA, 27 bp, Artificial sequence
  SiRNA target sequence
cagtaacaaaagatggcgataaaatta

SEQ ID NO: 139981 - DNA, 27 bp, Artificial sequence
  SiRNA target sequence
agtaacaaaagatggcgataaaattaa

SEQ ID NO: 139982 - DNA, 27 bp, Artificial sequence
  SiRNA target sequence
gtaacaaaagatggcgataaaattaat

SEQ ID NO: 139983 - DNA, 27 bp, Artificial sequence
  SiRNA target sequence
taacaaaagatggcgataaaattaatg

SEQ ID NO: 139984 - DNA, 27 bp, Artificial sequence
  SiRNA target sequence
aacaaaagatggcgataaaattaatgg

SEQ ID NO: 139985 - DNA, 27 bp, Artificial sequence
  SiRNA target sequence
acaaaagatggcgataaaattaatgga

SEQ ID NO: 139986 - DNA, 27 bp, Artificial sequence
  SiRNA target sequence
caaaagatggcgataaaattaatggaa

SEQ ID NO: 139987 - DNA, 27 bp, Artificial sequence
  SiRNA target sequence
aaaagatggcgataaaattaatggaat

SEQ ID NO: 139988 - DNA, 27 bp, Artificial sequence
  SiRNA target sequence
aaagatggcgataaaattaatggaatt

SEQ ID NO: 139989 - DNA, 27 bp, Artificial sequence
  SiRNA target sequence
aagatggcgataaaattaatggaatta

SEQ ID NO: 139990 - DNA, 27 bp, Artificial sequence
  SiRNA target sequence
agatggcgataaaattaatggaattaa

SEQ ID NO: 139991 - DNA, 27 bp, Artificial sequence
  SiRNA target sequence
gatggcgataaaattaatggaattaaa

SEQ ID NO: 139992 - DNA, 27 bp, Artificial sequence
  SiRNA target sequence
atggcgataaaattaatggaattaaat

SEQ ID NO: 139993 - DNA, 27 bp, Artificial sequence
  SiRNA target sequence
tggcgataaaattaatggaattaaatg

SEQ ID NO: 139994 - DNA, 27 bp, Artificial sequence
  SiRNA target sequence
ggcgataaaattaatggaattaaatgt

SEQ ID NO: 139995 - DNA, 27 bp, Artificial sequence
  SiRNA target sequence
gcgataaaattaatggaattaaatgtc

SEQ ID NO: 139996 - DNA, 27 bp, Artificial sequence
  SiRNA target sequence
cgataaaattaatggaattaaatgtca

SEQ ID NO: 139997 - DNA, 27 bp, Artificial sequence
  SiRNA target sequence
gataaaattaatggaattaaatgtcaa

SEQ ID NO: 139998 - DNA, 27 bp, Artificial sequence
  SiRNA target sequence
ataaaattaatggaattaaatgtcaag

SEQ ID NO: 139999 - DNA, 27 bp, Artificial sequence
  SiRNA target sequence
taaaattaatggaattaaatgtcaaga

SEQ ID NO: 140000 - DNA, 27 bp, Artificial sequence
  SiRNA target sequence
aaaattaatggaattaaatgtcaagat

SEQ ID NO: 140001 - DNA, 27 bp, Artificial sequence
  SiRNA target sequence
aaattaatggaattaaatgtcaagatt

SEQ ID NO: 140002 - DNA, 27 bp, Artificial sequence
  SiRNA target sequence
aattaatggaattaaatgtcaagattc

SEQ ID NO: 140003 - DNA, 27 bp, Artificial sequence
  SiRNA target sequence
attaatggaattaaatgtcaagattca

SEQ ID NO: 140004 - DNA, 27 bp, Artificial sequence
  SiRNA target sequence
ttaatggaattaaatgtcaagattcaa

SEQ ID NO: 140005 - DNA, 27 bp, Artificial sequence
  SiRNA target sequence
taatggaattaaatgtcaagattcaat

SEQ ID NO: 140006 - DNA, 27 bp, Artificial sequence
  SiRNA target sequence
aatggaattaaatgtcaagattcaata

SEQ ID NO: 140007 - DNA, 27 bp, Artificial sequence
  SiRNA target sequence
atggaattaaatgtcaagattcaataa

SEQ ID NO: 140008 - DNA, 27 bp, Artificial sequence
  SiRNA target sequence
tggaattaaatgtcaagattcaataaa

SEQ ID NO: 140009 - DNA, 27 bp, Artificial sequence
  SiRNA target sequence
ggaattaaatgtcaagattcaataaat

SEQ ID NO: 140010 - DNA, 27 bp, Artificial sequence
  SiRNA target sequence
gaattaaatgtcaagattcaataaata

SEQ ID NO: 140011 - DNA, 27 bp, Artificial sequence
  SiRNA target sequence
aattaaatgtcaagattcaataaataa

SEQ ID NO: 140012 - DNA, 27 bp, Artificial sequence
  SiRNA target sequence
attaaatgtcaagattcaataaataat

SEQ ID NO: 140013 - DNA, 27 bp, Artificial sequence
  SiRNA target sequence
ttaaatgtcaagattcaataaataatg

SEQ ID NO: 140014 - DNA, 27 bp, Artificial sequence
  SiRNA target sequence
taaatgtcaagattcaataaataatga

SEQ ID NO: 140015 - DNA, 27 bp, Artificial sequence
  SiRNA target sequence
aaatgtcaagattcaataaataatgaa

SEQ ID NO: 140016 - DNA, 27 bp, Artificial sequence
  SiRNA target sequence
aatgtcaagattcaataaataatgaaa

SEQ ID NO: 140017 - DNA, 27 bp, Artificial sequence
  SiRNA target sequence
atgtcaagattcaataaataatgaaaa

SEQ ID NO: 140018 - DNA, 27 bp, Artificial sequence
  SiRNA target sequence
tgtcaagattcaataaataatgaaaaa

SEQ ID NO: 140019 - DNA, 27 bp, Artificial sequence
  SiRNA target sequence
gtcaagattcaataaataatgaaaaat

SEQ ID NO: 140020 - DNA, 27 bp, Artificial sequence
  SiRNA target sequence
tcaagattcaataaataatgaaaaatt

SEQ ID NO: 140021 - DNA, 27 bp, Artificial sequence
  SiRNA target sequence
caagattcaataaataatgaaaaattt

SEQ ID NO: 140022 - DNA, 27 bp, Artificial sequence
  SiRNA target sequence
aagattcaataaataatgaaaaatttt

SEQ ID NO: 140023 - DNA, 27 bp, Artificial sequence
  SiRNA target sequence
agattcaataaataatgaaaaattttt

SEQ ID NO: 140024 - DNA, 27 bp, Artificial sequence
  SiRNA target sequence
gattcaataaataatgaaaaattttta

SEQ ID NO: 140025 - DNA, 27 bp, Artificial sequence
  SiRNA target sequence
attcaataaataatgaaaaatttttaa

SEQ ID NO: 140026 - DNA, 27 bp, Artificial sequence
  SiRNA target sequence
ttcaataaataatgaaaaatttttaat

SEQ ID NO: 140027 - DNA, 27 bp, Artificial sequence
  SiRNA target sequence
tcaataaataatgaaaaatttttaatt

SEQ ID NO: 140028 - DNA, 27 bp, Artificial sequence
  SiRNA target sequence
caataaataatgaaaaatttttaatta

SEQ ID NO: 140029 - DNA, 27 bp, Artificial sequence
  SiRNA target sequence
aataaataatgaaaaatttttaattag

SEQ ID NO: 140030 - DNA, 27 bp, Artificial sequence
  SiRNA target sequence
ataaataatgaaaaatttttaattagg

SEQ ID NO: 140031 - DNA, 27 bp, Artificial sequence
  SiRNA target sequence
taaataatgaaaaatttttaattaggt

SEQ ID NO: 140032 - DNA, 27 bp, Artificial sequence
  SiRNA target sequence
aaataatgaaaaatttttaattaggtg

SEQ ID NO: 140033 - DNA, 27 bp, Artificial sequence
  SiRNA target sequence
aataatgaaaaatttttaattaggtgt

SEQ ID NO: 140034 - DNA, 27 bp, Artificial sequence
  SiRNA target sequence
ataatgaaaaatttttaattaggtgta

SEQ ID NO: 140035 - DNA, 27 bp, Artificial sequence
  SiRNA target sequence
taatgaaaaatttttaattaggtgtaa

SEQ ID NO: 140036 - DNA, 27 bp, Artificial sequence
  SiRNA target sequence
aatgaaaaatttttaattaggtgtaaa

SEQ ID NO: 140037 - DNA, 27 bp, Artificial sequence
  SiRNA target sequence
atgaaaaatttttaattaggtgtaaag

SEQ ID NO: 140038 - DNA, 27 bp, Artificial sequence
  SiRNA target sequence
tgaaaaatttttaattaggtgtaaagt

SEQ ID NO: 140039 - DNA, 27 bp, Artificial sequence
  SiRNA target sequence
gaaaaatttttaattaggtgtaaagtt

SEQ ID NO: 140040 - DNA, 27 bp, Artificial sequence
  SiRNA target sequence
aaaaatttttaattaggtgtaaagttt

SEQ ID NO: 140041 - DNA, 27 bp, Artificial sequence
  SiRNA target sequence
aaaatttttaattaggtgtaaagtttt

SEQ ID NO: 140042 - DNA, 27 bp, Artificial sequence
  SiRNA target sequence
aaatttttaattaggtgtaaagtttta

SEQ ID NO: 140043 - DNA, 27 bp, Artificial sequence
  SiRNA target sequence
aatttttaattaggtgtaaagttttaa

SEQ ID NO: 140044 - DNA, 27 bp, Artificial sequence
  SiRNA target sequence
atttttaattaggtgtaaagttttaat

SEQ ID NO: 140045 - DNA, 27 bp, Artificial sequence
  SiRNA target sequence
tttttaattaggtgtaaagttttaata

SEQ ID NO: 140046 - DNA, 27 bp, Artificial sequence
  SiRNA target sequence
ttttaattaggtgtaaagttttaataa

SEQ ID NO: 140047 - DNA, 27 bp, Artificial sequence
  SiRNA target sequence
tttaattaggtgtaaagttttaataaa

SEQ ID NO: 140048 - DNA, 27 bp, Artificial sequence
  SiRNA target sequence
ttaattaggtgtaaagttttaataaat

SEQ ID NO: 140049 - DNA, 27 bp, Artificial sequence
  SiRNA target sequence
taattaggtgtaaagttttaataaata

SEQ ID NO: 140050 - DNA, 27 bp, Artificial sequence
  SiRNA target sequence
aattaggtgtaaagttttaataaatac

SEQ ID NO: 140051 - DNA, 27 bp, Artificial sequence
  SiRNA target sequence
attaggtgtaaagttttaataaatact

SEQ ID NO: 140052 - DNA, 27 bp, Artificial sequence
  SiRNA target sequence
ttaggtgtaaagttttaataaatactt

SEQ ID NO: 140053 - DNA, 27 bp, Artificial sequence
  SiRNA target sequence
taggtgtaaagttttaataaatacttc

SEQ ID NO: 140054 - DNA, 27 bp, Artificial sequence
  SiRNA target sequence
aggtgtaaagttttaataaatacttct

SEQ ID NO: 140055 - DNA, 27 bp, Artificial sequence
  SiRNA target sequence
ggtgtaaagttttaataaatacttctg

SEQ ID NO: 140056 - DNA, 27 bp, Artificial sequence
  SiRNA target sequence
gtgtaaagttttaataaatacttctgg

SEQ ID NO: 140057 - DNA, 27 bp, Artificial sequence
  SiRNA target sequence
tgtaaagttttaataaatacttctggc

SEQ ID NO: 140058 - DNA, 27 bp, Artificial sequence
  SiRNA target sequence
gtaaagttttaataaatacttctggcc

SEQ ID NO: 140059 - DNA, 27 bp, Artificial sequence
  SiRNA target sequence
taaagttttaataaatacttctggccc

SEQ ID NO: 140060 - DNA, 27 bp, Artificial sequence
  SiRNA target sequence
aaagttttaataaatacttctggccct

SEQ ID NO: 140061 - DNA, 27 bp, Artificial sequence
  SiRNA target sequence
aagttttaataaatacttctggccctt

SEQ ID NO: 140062 - DNA, 27 bp, Artificial sequence
  SiRNA target sequence
agttttaataaatacttctggcccttt

SEQ ID NO: 140063 - DNA, 27 bp, Artificial sequence
  SiRNA target sequence
gttttaataaatacttctggccctttt

SEQ ID NO: 140064 - DNA, 27 bp, Artificial sequence
  SiRNA target sequence
ttttaataaatacttctggcccttttg

SEQ ID NO: 140065 - DNA, 27 bp, Artificial sequence
  SiRNA target sequence
tttaataaatacttctggcccttttgc

SEQ ID NO: 140066 - DNA, 27 bp, Artificial sequence
  SiRNA target sequence
ttaataaatacttctggcccttttgct

SEQ ID NO: 140067 - DNA, 27 bp, Artificial sequence
  SiRNA target sequence
taataaatacttctggcccttttgctg

SEQ ID NO: 140068 - DNA, 27 bp, Artificial sequence
  SiRNA target sequence
aataaatacttctggcccttttgctga

SEQ ID NO: 140069 - DNA, 27 bp, Artificial sequence
  SiRNA target sequence
ataaatacttctggcccttttgctgac

SEQ ID NO: 140070 - DNA, 27 bp, Artificial sequence
  SiRNA target sequence
taaatacttctggcccttttgctgacg

SEQ ID NO: 140071 - DNA, 27 bp, Artificial sequence
  SiRNA target sequence
aaatacttctggcccttttgctgacga

SEQ ID NO: 140072 - DNA, 27 bp, Artificial sequence
  SiRNA target sequence
aatacttctggcccttttgctgacgag

SEQ ID NO: 140073 - DNA, 27 bp, Artificial sequence
  SiRNA target sequence
atacttctggcccttttgctgacgagg

SEQ ID NO: 140074 - DNA, 27 bp, Artificial sequence
  SiRNA target sequence
tacttctggcccttttgctgacgaggt

SEQ ID NO: 140075 - DNA, 27 bp, Artificial sequence
  SiRNA target sequence
acttctggcccttttgctgacgaggtt

SEQ ID NO: 140076 - DNA, 27 bp, Artificial sequence
  SiRNA target sequence
cttctggcccttttgctgacgaggttc

SEQ ID NO: 140077 - DNA, 27 bp, Artificial sequence
  SiRNA target sequence
ttctggcccttttgctgacgaggttcg

SEQ ID NO: 140078 - DNA, 27 bp, Artificial sequence
  SiRNA target sequence
tctggcccttttgctgacgaggttcga

SEQ ID NO: 140079 - DNA, 27 bp, Artificial sequence
  SiRNA target sequence
ctggcccttttgctgacgaggttcgaa

SEQ ID NO: 140080 - DNA, 27 bp, Artificial sequence
  SiRNA target sequence
tggcccttttgctgacgaggttcgaaa

SEQ ID NO: 140081 - DNA, 27 bp, Artificial sequence
  SiRNA target sequence
ggcccttttgctgacgaggttcgaaat

SEQ ID NO: 140082 - DNA, 27 bp, Artificial sequence
  SiRNA target sequence
gcccttttgctgacgaggttcgaaata

SEQ ID NO: 140083 - DNA, 27 bp, Artificial sequence
  SiRNA target sequence
cccttttgctgacgaggttcgaaatac

SEQ ID NO: 140084 - DNA, 27 bp, Artificial sequence
  SiRNA target sequence
ccttttgctgacgaggttcgaaataca

SEQ ID NO: 140085 - DNA, 27 bp, Artificial sequence
  SiRNA target sequence
cttttgctgacgaggttcgaaatacat

SEQ ID NO: 140086 - DNA, 27 bp, Artificial sequence
  SiRNA target sequence
ttttgctgacgaggttcgaaatacatc

SEQ ID NO: 140087 - DNA, 27 bp, Artificial sequence
  SiRNA target sequence
tttgctgacgaggttcgaaatacatca

SEQ ID NO: 140088 - DNA, 27 bp, Artificial sequence
  SiRNA target sequence
ttgctgacgaggttcgaaatacatcaa

SEQ ID NO: 140089 - DNA, 27 bp, Artificial sequence
  SiRNA target sequence
tgctgacgaggttcgaaatacatcaat

SEQ ID NO: 140090 - DNA, 27 bp, Artificial sequence
  SiRNA target sequence
gctgacgaggttcgaaatacatcaatt

SEQ ID NO: 140091 - DNA, 27 bp, Artificial sequence
  SiRNA target sequence
ctgacgaggttcgaaatacatcaattg

SEQ ID NO: 140092 - DNA, 27 bp, Artificial sequence
  SiRNA target sequence
tgacgaggttcgaaatacatcaattga

SEQ ID NO: 140093 - DNA, 27 bp, Artificial sequence
  SiRNA target sequence
gacgaggttcgaaatacatcaattgaa

SEQ ID NO: 140094 - DNA, 27 bp, Artificial sequence
  SiRNA target sequence
acgaggttcgaaatacatcaattgaaa

SEQ ID NO: 140095 - DNA, 27 bp, Artificial sequence
  SiRNA target sequence
cgaggttcgaaatacatcaattgaaaa

SEQ ID NO: 140096 - DNA, 27 bp, Artificial sequence
  SiRNA target sequence
gaggttcgaaatacatcaattgaaaac

SEQ ID NO: 140097 - DNA, 27 bp, Artificial sequence
  SiRNA target sequence
aggttcgaaatacatcaattgaaaact

SEQ ID NO: 140098 - DNA, 27 bp, Artificial sequence
  SiRNA target sequence
ggttcgaaatacatcaattgaaaactg

SEQ ID NO: 140099 - DNA, 27 bp, Artificial sequence
  SiRNA target sequence
gttcgaaatacatcaattgaaaactgt

SEQ ID NO: 140100 - DNA, 27 bp, Artificial sequence
  SiRNA target sequence
ttcgaaatacatcaattgaaaactgtc

SEQ ID NO: 140101 - DNA, 27 bp, Artificial sequence
  SiRNA target sequence
tcgaaatacatcaattgaaaactgtca

SEQ ID NO: 140102 - DNA, 27 bp, Artificial sequence
  SiRNA target sequence
cgaaatacatcaattgaaaactgtcaa

SEQ ID NO: 140103 - DNA, 27 bp, Artificial sequence
  SiRNA target sequence
gaaatacatcaattgaaaactgtcaac

SEQ ID NO: 140104 - DNA, 27 bp, Artificial sequence
  SiRNA target sequence
aaatacatcaattgaaaactgtcaacc

SEQ ID NO: 140105 - DNA, 27 bp, Artificial sequence
  SiRNA target sequence
aatacatcaattgaaaactgtcaacca

SEQ ID NO: 140106 - DNA, 27 bp, Artificial sequence
  SiRNA target sequence
atacatcaattgaaaactgtcaaccaa

SEQ ID NO: 140107 - DNA, 27 bp, Artificial sequence
  SiRNA target sequence
tacatcaattgaaaactgtcaaccaat

SEQ ID NO: 140108 - DNA, 27 bp, Artificial sequence
  SiRNA target sequence
acatcaattgaaaactgtcaaccaata

SEQ ID NO: 140109 - DNA, 27 bp, Artificial sequence
  SiRNA target sequence
catcaattgaaaactgtcaaccaatac

SEQ ID NO: 140110 - DNA, 27 bp, Artificial sequence
  SiRNA target sequence
atcaattgaaaactgtcaaccaatact

SEQ ID NO: 140111 - DNA, 27 bp, Artificial sequence
  SiRNA target sequence
tcaattgaaaactgtcaaccaatactc

SEQ ID NO: 140112 - DNA, 27 bp, Artificial sequence
  SiRNA target sequence
caattgaaaactgtcaaccaatactcc

SEQ ID NO: 140113 - DNA, 27 bp, Artificial sequence
  SiRNA target sequence
aattgaaaactgtcaaccaatactcca

SEQ ID NO: 140114 - DNA, 27 bp, Artificial sequence
  SiRNA target sequence
attgaaaactgtcaaccaatactccaa

SEQ ID NO: 140115 - DNA, 27 bp, Artificial sequence
  SiRNA target sequence
ttgaaaactgtcaaccaatactccaac

SEQ ID NO: 140116 - DNA, 27 bp, Artificial sequence
  SiRNA target sequence
tgaaaactgtcaaccaatactccaaca

SEQ ID NO: 140117 - DNA, 27 bp, Artificial sequence
  SiRNA target sequence
gaaaactgtcaaccaatactccaacat

SEQ ID NO: 140118 - DNA, 27 bp, Artificial sequence
  SiRNA target sequence
aaaactgtcaaccaatactccaacata

SEQ ID NO: 140119 - DNA, 27 bp, Artificial sequence
  SiRNA target sequence
aaactgtcaaccaatactccaacatag

SEQ ID NO: 140120 - DNA, 27 bp, Artificial sequence
  SiRNA target sequence
aactgtcaaccaatactccaacatagt

SEQ ID NO: 140121 - DNA, 27 bp, Artificial sequence
  SiRNA target sequence
actgtcaaccaatactccaacatagtt

SEQ ID NO: 140122 - DNA, 27 bp, Artificial sequence
  SiRNA target sequence
ctgtcaaccaatactccaacatagtta

SEQ ID NO: 140123 - DNA, 27 bp, Artificial sequence
  SiRNA target sequence
tgtcaaccaatactccaacatagttat

SEQ ID NO: 140124 - DNA, 27 bp, Artificial sequence
  SiRNA target sequence
gtcaaccaatactccaacatagttatg

SEQ ID NO: 140125 - DNA, 27 bp, Artificial sequence
  SiRNA target sequence
tcaaccaatactccaacatagttatgg

SEQ ID NO: 140126 - DNA, 27 bp, Artificial sequence
  SiRNA target sequence
caaccaatactccaacatagttatggt

SEQ ID NO: 140127 - DNA, 27 bp, Artificial sequence
  SiRNA target sequence
aaccaatactccaacatagttatggta

SEQ ID NO: 140128 - DNA, 27 bp, Artificial sequence
  SiRNA target sequence
accaatactccaacatagttatggtac

SEQ ID NO: 140129 - DNA, 27 bp, Artificial sequence
  SiRNA target sequence
ccaatactccaacatagttatggtaca

SEQ ID NO: 140130 - DNA, 27 bp, Artificial sequence
  SiRNA target sequence
caatactccaacatagttatggtacac

SEQ ID NO: 140131 - DNA, 27 bp, Artificial sequence
  SiRNA target sequence
aatactccaacatagttatggtacaca

SEQ ID NO: 140132 - DNA, 27 bp, Artificial sequence
  SiRNA target sequence
atactccaacatagttatggtacacat

SEQ ID NO: 140133 - DNA, 27 bp, Artificial sequence
  SiRNA target sequence
tactccaacatagttatggtacacata

SEQ ID NO: 140134 - DNA, 27 bp, Artificial sequence
  SiRNA target sequence
actccaacatagttatggtacacatat

SEQ ID NO: 140135 - DNA, 27 bp, Artificial sequence
  SiRNA target sequence
ctccaacatagttatggtacacatatt

SEQ ID NO: 140136 - DNA, 27 bp, Artificial sequence
  SiRNA target sequence
tccaacatagttatggtacacatattg

SEQ ID NO: 140137 - DNA, 27 bp, Artificial sequence
  SiRNA target sequence
ccaacatagttatggtacacatattgt

SEQ ID NO: 140138 - DNA, 27 bp, Artificial sequence
  SiRNA target sequence
caacatagttatggtacacatattgta

SEQ ID NO: 140139 - DNA, 27 bp, Artificial sequence
  SiRNA target sequence
aacatagttatggtacacatattgtag

SEQ ID NO: 140140 - DNA, 27 bp, Artificial sequence
  SiRNA target sequence
acatagttatggtacacatattgtagt

SEQ ID NO: 140141 - DNA, 27 bp, Artificial sequence
  SiRNA target sequence
catagttatggtacacatattgtagtt

SEQ ID NO: 140142 - DNA, 27 bp, Artificial sequence
  SiRNA target sequence
atagttatggtacacatattgtagttc

SEQ ID NO: 140143 - DNA, 27 bp, Artificial sequence
  SiRNA target sequence
tagttatggtacacatattgtagttcc

SEQ ID NO: 140144 - DNA, 27 bp, Artificial sequence
  SiRNA target sequence
agttatggtacacatattgtagttcct

SEQ ID NO: 140145 - DNA, 27 bp, Artificial sequence
  SiRNA target sequence
gttatggtacacatattgtagttcctg

SEQ ID NO: 140146 - DNA, 27 bp, Artificial sequence
  SiRNA target sequence
ttatggtacacatattgtagttcctgc

SEQ ID NO: 140147 - DNA, 27 bp, Artificial sequence
  SiRNA target sequence
tatggtacacatattgtagttcctgcg

SEQ ID NO: 140148 - DNA, 27 bp, Artificial sequence
  SiRNA target sequence
atggtacacatattgtagttcctgcga

SEQ ID NO: 140149 - DNA, 27 bp, Artificial sequence
  SiRNA target sequence
tggtacacatattgtagttcctgcgat

SEQ ID NO: 140150 - DNA, 27 bp, Artificial sequence
  SiRNA target sequence
ggtacacatattgtagttcctgcgata

SEQ ID NO: 140151 - DNA, 27 bp, Artificial sequence
  SiRNA target sequence
gtacacatattgtagttcctgcgatat

SEQ ID NO: 140152 - DNA, 27 bp, Artificial sequence
  SiRNA target sequence
tacacatattgtagttcctgcgatatt

SEQ ID NO: 140153 - DNA, 27 bp, Artificial sequence
  SiRNA target sequence
acacatattgtagttcctgcgatattt

SEQ ID NO: 140154 - DNA, 27 bp, Artificial sequence
  SiRNA target sequence
cacatattgtagttcctgcgatatttt

SEQ ID NO: 140155 - DNA, 27 bp, Artificial sequence
  SiRNA target sequence
acatattgtagttcctgcgatattttc

SEQ ID NO: 140156 - DNA, 27 bp, Artificial sequence
  SiRNA target sequence
catattgtagttcctgcgatattttcg

SEQ ID NO: 140157 - DNA, 27 bp, Artificial sequence
  SiRNA target sequence
atattgtagttcctgcgatattttcgc

SEQ ID NO: 140158 - DNA, 27 bp, Artificial sequence
  SiRNA target sequence
tattgtagttcctgcgatattttcgcc

SEQ ID NO: 140159 - DNA, 27 bp, Artificial sequence
  SiRNA target sequence
attgtagttcctgcgatattttcgcct

SEQ ID NO: 140160 - DNA, 27 bp, Artificial sequence
  SiRNA target sequence
ttgtagttcctgcgatattttcgccta

SEQ ID NO: 140161 - DNA, 27 bp, Artificial sequence
  SiRNA target sequence
tgtagttcctgcgatattttcgcctaa

SEQ ID NO: 140162 - DNA, 27 bp, Artificial sequence
  SiRNA target sequence
gtagttcctgcgatattttcgcctaaa

SEQ ID NO: 140163 - DNA, 27 bp, Artificial sequence
  SiRNA target sequence
tagttcctgcgatattttcgcctaaaa

SEQ ID NO: 140164 - DNA, 27 bp, Artificial sequence
  SiRNA target sequence
agttcctgcgatattttcgcctaaaaa

SEQ ID NO: 140165 - DNA, 27 bp, Artificial sequence
  SiRNA target sequence
gttcctgcgatattttcgcctaaaaat

SEQ ID NO: 140166 - DNA, 27 bp, Artificial sequence
  SiRNA target sequence
ttcctgcgatattttcgcctaaaaata

SEQ ID NO: 140167 - DNA, 27 bp, Artificial sequence
  SiRNA target sequence
tcctgcgatattttcgcctaaaaatat

SEQ ID NO: 140168 - DNA, 27 bp, Artificial sequence
  SiRNA target sequence
cctgcgatattttcgcctaaaaatatg

SEQ ID NO: 140169 - DNA, 27 bp, Artificial sequence
  SiRNA target sequence
ctgcgatattttcgcctaaaaatatgg

SEQ ID NO: 140170 - DNA, 27 bp, Artificial sequence
  SiRNA target sequence
tgcgatattttcgcctaaaaatatggg

SEQ ID NO: 140171 - DNA, 27 bp, Artificial sequence
  SiRNA target sequence
gcgatattttcgcctaaaaatatgggc

SEQ ID NO: 140172 - DNA, 27 bp, Artificial sequence
  SiRNA target sequence
cgatattttcgcctaaaaatatgggct

SEQ ID NO: 140173 - DNA, 27 bp, Artificial sequence
  SiRNA target sequence
gatattttcgcctaaaaatatgggctt

SEQ ID NO: 140174 - DNA, 27 bp, Artificial sequence
  SiRNA target sequence
atattttcgcctaaaaatatgggcttt

SEQ ID NO: 140175 - DNA, 27 bp, Artificial sequence
  SiRNA target sequence
tattttcgcctaaaaatatgggctttg

SEQ ID NO: 140176 - DNA, 27 bp, Artificial sequence
  SiRNA target sequence
attttcgcctaaaaatatgggctttgt

SEQ ID NO: 140177 - DNA, 27 bp, Artificial sequence
  SiRNA target sequence
ttttcgcctaaaaatatgggctttgtt

SEQ ID NO: 140178 - DNA, 27 bp, Artificial sequence
  SiRNA target sequence
tttcgcctaaaaatatgggctttgttg

SEQ ID NO: 140179 - DNA, 27 bp, Artificial sequence
  SiRNA target sequence
ttcgcctaaaaatatgggctttgttga

SEQ ID NO: 140180 - DNA, 27 bp, Artificial sequence
  SiRNA target sequence
tcgcctaaaaatatgggctttgttgat

SEQ ID NO: 140181 - DNA, 27 bp, Artificial sequence
  SiRNA target sequence
cgcctaaaaatatgggctttgttgatc

SEQ ID NO: 140182 - DNA, 27 bp, Artificial sequence
  SiRNA target sequence
gcctaaaaatatgggctttgttgatcc

SEQ ID NO: 140183 - DNA, 27 bp, Artificial sequence
  SiRNA target sequence
cctaaaaatatgggctttgttgatcca

SEQ ID NO: 140184 - DNA, 27 bp, Artificial sequence
  SiRNA target sequence
ctaaaaatatgggctttgttgatccaa

SEQ ID NO: 140185 - DNA, 27 bp, Artificial sequence
  SiRNA target sequence
taaaaatatgggctttgttgatccaag

SEQ ID NO: 140186 - DNA, 27 bp, Artificial sequence
  SiRNA target sequence
aaaaatatgggctttgttgatccaagc

SEQ ID NO: 140187 - DNA, 27 bp, Artificial sequence
  SiRNA target sequence
aaaatatgggctttgttgatccaagca

SEQ ID NO: 140188 - DNA, 27 bp, Artificial sequence
  SiRNA target sequence
aaatatgggctttgttgatccaagcac

SEQ ID NO: 140189 - DNA, 27 bp, Artificial sequence
  SiRNA target sequence
aatatgggctttgttgatccaagcacg

SEQ ID NO: 140190 - DNA, 27 bp, Artificial sequence
  SiRNA target sequence
atatgggctttgttgatccaagcacga

SEQ ID NO: 140191 - DNA, 27 bp, Artificial sequence
  SiRNA target sequence
tatgggctttgttgatccaagcacgag

SEQ ID NO: 140192 - DNA, 27 bp, Artificial sequence
  SiRNA target sequence
atgggctttgttgatccaagcacgagt

SEQ ID NO: 140193 - DNA, 27 bp, Artificial sequence
  SiRNA target sequence
tgggctttgttgatccaagcacgagtg

SEQ ID NO: 140194 - DNA, 27 bp, Artificial sequence
  SiRNA target sequence
gggctttgttgatccaagcacgagtga

SEQ ID NO: 140195 - DNA, 27 bp, Artificial sequence
  SiRNA target sequence
ggctttgttgatccaagcacgagtgat

SEQ ID NO: 140196 - DNA, 27 bp, Artificial sequence
  SiRNA target sequence
gctttgttgatccaagcacgagtgatg

SEQ ID NO: 140197 - DNA, 27 bp, Artificial sequence
  SiRNA target sequence
ctttgttgatccaagcacgagtgatgg

SEQ ID NO: 140198 - DNA, 27 bp, Artificial sequence
  SiRNA target sequence
tttgttgatccaagcacgagtgatgga

SEQ ID NO: 140199 - DNA, 27 bp, Artificial sequence
  SiRNA target sequence
ttgttgatccaagcacgagtgatggaa

SEQ ID NO: 140200 - DNA, 27 bp, Artificial sequence
  SiRNA target sequence
tgttgatccaagcacgagtgatggaag

SEQ ID NO: 140201 - DNA, 27 bp, Artificial sequence
  SiRNA target sequence
gttgatccaagcacgagtgatggaaga

SEQ ID NO: 140202 - DNA, 27 bp, Artificial sequence
  SiRNA target sequence
ttgatccaagcacgagtgatggaagaa

SEQ ID NO: 140203 - DNA, 27 bp, Artificial sequence
  SiRNA target sequence
tgatccaagcacgagtgatggaagaat

SEQ ID NO: 140204 - DNA, 27 bp, Artificial sequence
  SiRNA target sequence
gatccaagcacgagtgatggaagaatc

SEQ ID NO: 140205 - DNA, 27 bp, Artificial sequence
  SiRNA target sequence
atccaagcacgagtgatggaagaatcg

SEQ ID NO: 140206 - DNA, 27 bp, Artificial sequence
  SiRNA target sequence
tccaagcacgagtgatggaagaatcgc

SEQ ID NO: 140207 - DNA, 27 bp, Artificial sequence
  SiRNA target sequence
ccaagcacgagtgatggaagaatcgca

SEQ ID NO: 140208 - DNA, 27 bp, Artificial sequence
  SiRNA target sequence
caagcacgagtgatggaagaatcgcat

SEQ ID NO: 140209 - DNA, 27 bp, Artificial sequence
  SiRNA target sequence
aagcacgagtgatggaagaatcgcatt

SEQ ID NO: 140210 - DNA, 27 bp, Artificial sequence
  SiRNA target sequence
agcacgagtgatggaagaatcgcattt

SEQ ID NO: 140211 - DNA, 27 bp, Artificial sequence
  SiRNA target sequence
gcacgagtgatggaagaatcgcatttt

SEQ ID NO: 140212 - DNA, 27 bp, Artificial sequence
  SiRNA target sequence
cacgagtgatggaagaatcgcattttt

SEQ ID NO: 140213 - DNA, 27 bp, Artificial sequence
  SiRNA target sequence
acgagtgatggaagaatcgcatttttt

SEQ ID NO: 140214 - DNA, 27 bp, Artificial sequence
  SiRNA target sequence
cgagtgatggaagaatcgcatttttta

SEQ ID NO: 140215 - DNA, 27 bp, Artificial sequence
  SiRNA target sequence
gagtgatggaagaatcgcattttttat

SEQ ID NO: 140216 - DNA, 27 bp, Artificial sequence
  SiRNA target sequence
agtgatggaagaatcgcattttttatg

SEQ ID NO: 140217 - DNA, 27 bp, Artificial sequence
  SiRNA target sequence
gtgatggaagaatcgcattttttatga

SEQ ID NO: 140218 - DNA, 27 bp, Artificial sequence
  SiRNA target sequence
tgatggaagaatcgcattttttatgaa

SEQ ID NO: 140219 - DNA, 27 bp, Artificial sequence
  SiRNA target sequence
gatggaagaatcgcattttttatgaat

SEQ ID NO: 140220 - DNA, 27 bp, Artificial sequence
  SiRNA target sequence
atggaagaatcgcattttttatgaatt

SEQ ID NO: 140221 - DNA, 27 bp, Artificial sequence
  SiRNA target sequence
tggaagaatcgcattttttatgaattt

SEQ ID NO: 140222 - DNA, 27 bp, Artificial sequence
  SiRNA target sequence
ggaagaatcgcattttttatgaatttt

SEQ ID NO: 140223 - DNA, 27 bp, Artificial sequence
  SiRNA target sequence
gaagaatcgcattttttatgaatttta

SEQ ID NO: 140224 - DNA, 27 bp, Artificial sequence
  SiRNA target sequence
aagaatcgcattttttatgaattttaa

SEQ ID NO: 140225 - DNA, 27 bp, Artificial sequence
  SiRNA target sequence
agaatcgcattttttatgaattttaaa

SEQ ID NO: 140226 - DNA, 27 bp, Artificial sequence
  SiRNA target sequence
gaatcgcattttttatgaattttaaag

SEQ ID NO: 140227 - DNA, 27 bp, Artificial sequence
  SiRNA target sequence
aatcgcattttttatgaattttaaagg

SEQ ID NO: 140228 - DNA, 27 bp, Artificial sequence
  SiRNA target sequence
atcgcattttttatgaattttaaaggt

SEQ ID NO: 140229 - DNA, 27 bp, Artificial sequence
  SiRNA target sequence
tcgcattttttatgaattttaaaggta

SEQ ID NO: 140230 - DNA, 27 bp, Artificial sequence
  SiRNA target sequence
cgcattttttatgaattttaaaggtaa

SEQ ID NO: 140231 - DNA, 27 bp, Artificial sequence
  SiRNA target sequence
gcattttttatgaattttaaaggtaaa

SEQ ID NO: 140232 - DNA, 27 bp, Artificial sequence
  SiRNA target sequence
cattttttatgaattttaaaggtaaaa

SEQ ID NO: 140233 - DNA, 27 bp, Artificial sequence
  SiRNA target sequence
attttttatgaattttaaaggtaaaac

SEQ ID NO: 140234 - DNA, 27 bp, Artificial sequence
  SiRNA target sequence
ttttttatgaattttaaaggtaaaaca

SEQ ID NO: 140235 - DNA, 27 bp, Artificial sequence
  SiRNA target sequence
tttttatgaattttaaaggtaaaacat

SEQ ID NO: 140236 - DNA, 27 bp, Artificial sequence
  SiRNA target sequence
ttttatgaattttaaaggtaaaacatt

SEQ ID NO: 140237 - DNA, 27 bp, Artificial sequence
  SiRNA target sequence
tttatgaattttaaaggtaaaacattg

SEQ ID NO: 140238 - DNA, 27 bp, Artificial sequence
  SiRNA target sequence
ttatgaattttaaaggtaaaacattga

SEQ ID NO: 140239 - DNA, 27 bp, Artificial sequence
  SiRNA target sequence
tatgaattttaaaggtaaaacattgat

SEQ ID NO: 140240 - DNA, 27 bp, Artificial sequence
  SiRNA target sequence
atgaattttaaaggtaaaacattgatt

SEQ ID NO: 140241 - DNA, 27 bp, Artificial sequence
  SiRNA target sequence
tgaattttaaaggtaaaacattgattg

SEQ ID NO: 140242 - DNA, 27 bp, Artificial sequence
  SiRNA target sequence
gaattttaaaggtaaaacattgattgg

SEQ ID NO: 140243 - DNA, 27 bp, Artificial sequence
  SiRNA target sequence
aattttaaaggtaaaacattgattgga

SEQ ID NO: 140244 - DNA, 27 bp, Artificial sequence
  SiRNA target sequence
attttaaaggtaaaacattgattggag

SEQ ID NO: 140245 - DNA, 27 bp, Artificial sequence
  SiRNA target sequence
ttttaaaggtaaaacattgattggagg

SEQ ID NO: 140246 - DNA, 27 bp, Artificial sequence
  SiRNA target sequence
tttaaaggtaaaacattgattggagga

SEQ ID NO: 140247 - DNA, 27 bp, Artificial sequence
  SiRNA target sequence
ttaaaggtaaaacattgattggaggaa

SEQ ID NO: 140248 - DNA, 27 bp, Artificial sequence
  SiRNA target sequence
taaaggtaaaacattgattggaggaac

SEQ ID NO: 140249 - DNA, 27 bp, Artificial sequence
  SiRNA target sequence
aaaggtaaaacattgattggaggaaca

SEQ ID NO: 140250 - DNA, 27 bp, Artificial sequence
  SiRNA target sequence
aaggtaaaacattgattggaggaacag

SEQ ID NO: 140251 - DNA, 27 bp, Artificial sequence
  SiRNA target sequence
aggtaaaacattgattggaggaacaga

SEQ ID NO: 140252 - DNA, 27 bp, Artificial sequence
  SiRNA target sequence
ggtaaaacattgattggaggaacagat

SEQ ID NO: 140253 - DNA, 27 bp, Artificial sequence
  SiRNA target sequence
gtaaaacattgattggaggaacagatg

SEQ ID NO: 140254 - DNA, 27 bp, Artificial sequence
  SiRNA target sequence
taaaacattgattggaggaacagatgt

SEQ ID NO: 140255 - DNA, 27 bp, Artificial sequence
  SiRNA target sequence
aaaacattgattggaggaacagatgtt

SEQ ID NO: 140256 - DNA, 27 bp, Artificial sequence
  SiRNA target sequence
aaacattgattggaggaacagatgtta

SEQ ID NO: 140257 - DNA, 27 bp, Artificial sequence
  SiRNA target sequence
aacattgattggaggaacagatgttaa

SEQ ID NO: 140258 - DNA, 27 bp, Artificial sequence
  SiRNA target sequence
acattgattggaggaacagatgttaag

SEQ ID NO: 140259 - DNA, 27 bp, Artificial sequence
  SiRNA target sequence
cattgattggaggaacagatgttaagt

SEQ ID NO: 140260 - DNA, 27 bp, Artificial sequence
  SiRNA target sequence
attgattggaggaacagatgttaagtg

SEQ ID NO: 140261 - DNA, 27 bp, Artificial sequence
  SiRNA target sequence
ttgattggaggaacagatgttaagtgt

SEQ ID NO: 140262 - DNA, 27 bp, Artificial sequence
  SiRNA target sequence
tgattggaggaacagatgttaagtgta

SEQ ID NO: 140263 - DNA, 27 bp, Artificial sequence
  SiRNA target sequence
gattggaggaacagatgttaagtgtaa

SEQ ID NO: 140264 - DNA, 27 bp, Artificial sequence
  SiRNA target sequence
attggaggaacagatgttaagtgtaaa

SEQ ID NO: 140265 - DNA, 27 bp, Artificial sequence
  SiRNA target sequence
ttggaggaacagatgttaagtgtaaag

SEQ ID NO: 140266 - DNA, 27 bp, Artificial sequence
  SiRNA target sequence
tggaggaacagatgttaagtgtaaagt

SEQ ID NO: 140267 - DNA, 27 bp, Artificial sequence
  SiRNA target sequence
ggaggaacagatgttaagtgtaaagtt

SEQ ID NO: 140268 - DNA, 27 bp, Artificial sequence
  SiRNA target sequence
gaggaacagatgttaagtgtaaagttg

SEQ ID NO: 140269 - DNA, 27 bp, Artificial sequence
  SiRNA target sequence
aggaacagatgttaagtgtaaagttga

SEQ ID NO: 140270 - DNA, 27 bp, Artificial sequence
  SiRNA target sequence
ggaacagatgttaagtgtaaagttgaa

SEQ ID NO: 140271 - DNA, 27 bp, Artificial sequence
  SiRNA target sequence
gaacagatgttaagtgtaaagttgaag

SEQ ID NO: 140272 - DNA, 27 bp, Artificial sequence
  SiRNA target sequence
aacagatgttaagtgtaaagttgaaga

SEQ ID NO: 140273 - DNA, 27 bp, Artificial sequence
  SiRNA target sequence
acagatgttaagtgtaaagttgaagat

SEQ ID NO: 140274 - DNA, 27 bp, Artificial sequence
  SiRNA target sequence
cagatgttaagtgtaaagttgaagatt

SEQ ID NO: 140275 - DNA, 27 bp, Artificial sequence
  SiRNA target sequence
agatgttaagtgtaaagttgaagattt

SEQ ID NO: 140276 - DNA, 27 bp, Artificial sequence
  SiRNA target sequence
gatgttaagtgtaaagttgaagattta

SEQ ID NO: 140277 - DNA, 27 bp, Artificial sequence
  SiRNA target sequence
atgttaagtgtaaagttgaagatttaa

SEQ ID NO: 140278 - DNA, 27 bp, Artificial sequence
  SiRNA target sequence
tgttaagtgtaaagttgaagatttaat

SEQ ID NO: 140279 - DNA, 27 bp, Artificial sequence
  SiRNA target sequence
gttaagtgtaaagttgaagatttaata

SEQ ID NO: 140280 - DNA, 27 bp, Artificial sequence
  SiRNA target sequence
ttaagtgtaaagttgaagatttaataa

SEQ ID NO: 140281 - DNA, 27 bp, Artificial sequence
  SiRNA target sequence
taagtgtaaagttgaagatttaataaa

SEQ ID NO: 140282 - DNA, 27 bp, Artificial sequence
  SiRNA target sequence
aagtgtaaagttgaagatttaataaaa

SEQ ID NO: 140283 - DNA, 27 bp, Artificial sequence
  SiRNA target sequence
agtgtaaagttgaagatttaataaaac

SEQ ID NO: 140284 - DNA, 27 bp, Artificial sequence
  SiRNA target sequence
gtgtaaagttgaagatttaataaaacc

SEQ ID NO: 140285 - DNA, 27 bp, Artificial sequence
  SiRNA target sequence
tgtaaagttgaagatttaataaaaccg

SEQ ID NO: 140286 - DNA, 27 bp, Artificial sequence
  SiRNA target sequence
gtaaagttgaagatttaataaaaccga

SEQ ID NO: 140287 - DNA, 27 bp, Artificial sequence
  SiRNA target sequence
taaagttgaagatttaataaaaccgac

SEQ ID NO: 140288 - DNA, 27 bp, Artificial sequence
  SiRNA target sequence
aaagttgaagatttaataaaaccgact

SEQ ID NO: 140289 - DNA, 27 bp, Artificial sequence
  SiRNA target sequence
aagttgaagatttaataaaaccgactg

SEQ ID NO: 140290 - DNA, 27 bp, Artificial sequence
  SiRNA target sequence
agttgaagatttaataaaaccgactga

SEQ ID NO: 140291 - DNA, 27 bp, Artificial sequence
  SiRNA target sequence
gttgaagatttaataaaaccgactgaa

SEQ ID NO: 140292 - DNA, 27 bp, Artificial sequence
  SiRNA target sequence
ttgaagatttaataaaaccgactgaag

SEQ ID NO: 140293 - DNA, 27 bp, Artificial sequence
  SiRNA target sequence
tgaagatttaataaaaccgactgaaga

SEQ ID NO: 140294 - DNA, 27 bp, Artificial sequence
  SiRNA target sequence
gaagatttaataaaaccgactgaagaa

SEQ ID NO: 140295 - DNA, 27 bp, Artificial sequence
  SiRNA target sequence
aagatttaataaaaccgactgaagaag

SEQ ID NO: 140296 - DNA, 27 bp, Artificial sequence
  SiRNA target sequence
agatttaataaaaccgactgaagaaga

SEQ ID NO: 140297 - DNA, 27 bp, Artificial sequence
  SiRNA target sequence
gatttaataaaaccgactgaagaagat

SEQ ID NO: 140298 - DNA, 27 bp, Artificial sequence
  SiRNA target sequence
atttaataaaaccgactgaagaagatc

SEQ ID NO: 140299 - DNA, 27 bp, Artificial sequence
  SiRNA target sequence
tttaataaaaccgactgaagaagatct

SEQ ID NO: 140300 - DNA, 27 bp, Artificial sequence
  SiRNA target sequence
ttaataaaaccgactgaagaagatcta

SEQ ID NO: 140301 - DNA, 27 bp, Artificial sequence
  SiRNA target sequence
taataaaaccgactgaagaagatctaa

SEQ ID NO: 140302 - DNA, 27 bp, Artificial sequence
  SiRNA target sequence
aataaaaccgactgaagaagatctaaa

SEQ ID NO: 140303 - DNA, 27 bp, Artificial sequence
  SiRNA target sequence
ataaaaccgactgaagaagatctaaac

SEQ ID NO: 140304 - DNA, 27 bp, Artificial sequence
  SiRNA target sequence
taaaaccgactgaagaagatctaaact

SEQ ID NO: 140305 - DNA, 27 bp, Artificial sequence
  SiRNA target sequence
aaaaccgactgaagaagatctaaactt

SEQ ID NO: 140306 - DNA, 27 bp, Artificial sequence
  SiRNA target sequence
aaaccgactgaagaagatctaaacttt

SEQ ID NO: 140307 - DNA, 27 bp, Artificial sequence
  SiRNA target sequence
aaccgactgaagaagatctaaactttc

SEQ ID NO: 140308 - DNA, 27 bp, Artificial sequence
  SiRNA target sequence
accgactgaagaagatctaaactttct

SEQ ID NO: 140309 - DNA, 27 bp, Artificial sequence
  SiRNA target sequence
ccgactgaagaagatctaaactttctt

SEQ ID NO: 140310 - DNA, 27 bp, Artificial sequence
  SiRNA target sequence
cgactgaagaagatctaaactttctta

SEQ ID NO: 140311 - DNA, 27 bp, Artificial sequence
  SiRNA target sequence
gactgaagaagatctaaactttcttat

SEQ ID NO: 140312 - DNA, 27 bp, Artificial sequence
  SiRNA target sequence
actgaagaagatctaaactttcttatt

SEQ ID NO: 140313 - DNA, 27 bp, Artificial sequence
  SiRNA target sequence
ctgaagaagatctaaactttcttattc

SEQ ID NO: 140314 - DNA, 27 bp, Artificial sequence
  SiRNA target sequence
tgaagaagatctaaactttcttattca

SEQ ID NO: 140315 - DNA, 27 bp, Artificial sequence
  SiRNA target sequence
gaagaagatctaaactttcttattcac

SEQ ID NO: 140316 - DNA, 27 bp, Artificial sequence
  SiRNA target sequence
aagaagatctaaactttcttattcacg

SEQ ID NO: 140317 - DNA, 27 bp, Artificial sequence
  SiRNA target sequence
agaagatctaaactttcttattcacga

SEQ ID NO: 140318 - DNA, 27 bp, Artificial sequence
  SiRNA target sequence
gaagatctaaactttcttattcacgag

SEQ ID NO: 140319 - DNA, 27 bp, Artificial sequence
  SiRNA target sequence
aagatctaaactttcttattcacgagg

SEQ ID NO: 140320 - DNA, 27 bp, Artificial sequence
  SiRNA target sequence
agatctaaactttcttattcacgaggc

SEQ ID NO: 140321 - DNA, 27 bp, Artificial sequence
  SiRNA target sequence
gatctaaactttcttattcacgaggcc

SEQ ID NO: 140322 - DNA, 27 bp, Artificial sequence
  SiRNA target sequence
atctaaactttcttattcacgaggcca

SEQ ID NO: 140323 - DNA, 27 bp, Artificial sequence
  SiRNA target sequence
tctaaactttcttattcacgaggccaa

SEQ ID NO: 140324 - DNA, 27 bp, Artificial sequence
  SiRNA target sequence
ctaaactttcttattcacgaggccaat

SEQ ID NO: 140325 - DNA, 27 bp, Artificial sequence
  SiRNA target sequence
taaactttcttattcacgaggccaatt

SEQ ID NO: 140326 - DNA, 27 bp, Artificial sequence
  SiRNA target sequence
aaactttcttattcacgaggccaatta

SEQ ID NO: 140327 - DNA, 27 bp, Artificial sequence
  SiRNA target sequence
aactttcttattcacgaggccaattat

SEQ ID NO: 140328 - DNA, 27 bp, Artificial sequence
  SiRNA target sequence
actttcttattcacgaggccaattatt

SEQ ID NO: 140329 - DNA, 27 bp, Artificial sequence
  SiRNA target sequence
ctttcttattcacgaggccaattattt

SEQ ID NO: 140330 - DNA, 27 bp, Artificial sequence
  SiRNA target sequence
tttcttattcacgaggccaattatttt

SEQ ID NO: 140331 - DNA, 27 bp, Artificial sequence
  SiRNA target sequence
ttcttattcacgaggccaattatttta

SEQ ID NO: 140332 - DNA, 27 bp, Artificial sequence
  SiRNA target sequence
tcttattcacgaggccaattattttac

SEQ ID NO: 140333 - DNA, 27 bp, Artificial sequence
  SiRNA target sequence
cttattcacgaggccaattattttaca

SEQ ID NO: 140334 - DNA, 27 bp, Artificial sequence
  SiRNA target sequence
ttattcacgaggccaattattttacag

SEQ ID NO: 140335 - DNA, 27 bp, Artificial sequence
  SiRNA target sequence
tattcacgaggccaattattttacaga

SEQ ID NO: 140336 - DNA, 27 bp, Artificial sequence
  SiRNA target sequence
attcacgaggccaattattttacagat

SEQ ID NO: 140337 - DNA, 27 bp, Artificial sequence
  SiRNA target sequence
ttcacgaggccaattattttacagatc

SEQ ID NO: 140338 - DNA, 27 bp, Artificial sequence
  SiRNA target sequence
tcacgaggccaattattttacagatca

SEQ ID NO: 140339 - DNA, 27 bp, Artificial sequence
  SiRNA target sequence
cacgaggccaattattttacagatcac

SEQ ID NO: 140340 - DNA, 27 bp, Artificial sequence
  SiRNA target sequence
acgaggccaattattttacagatcaca

SEQ ID NO: 140341 - DNA, 27 bp, Artificial sequence
  SiRNA target sequence
cgaggccaattattttacagatcacaa

SEQ ID NO: 140342 - DNA, 27 bp, Artificial sequence
  SiRNA target sequence
gaggccaattattttacagatcacaat

SEQ ID NO: 140343 - DNA, 27 bp, Artificial sequence
  SiRNA target sequence
aggccaattattttacagatcacaatt

SEQ ID NO: 140344 - DNA, 27 bp, Artificial sequence
  SiRNA target sequence
ggccaattattttacagatcacaattt

SEQ ID NO: 140345 - DNA, 27 bp, Artificial sequence
  SiRNA target sequence
gccaattattttacagatcacaattta

SEQ ID NO: 140346 - DNA, 27 bp, Artificial sequence
  SiRNA target sequence
ccaattattttacagatcacaatttaa

SEQ ID NO: 140347 - DNA, 27 bp, Artificial sequence
  SiRNA target sequence
caattattttacagatcacaatttaaa

SEQ ID NO: 140348 - DNA, 27 bp, Artificial sequence
  SiRNA target sequence
aattattttacagatcacaatttaaaa

SEQ ID NO: 140349 - DNA, 27 bp, Artificial sequence
  SiRNA target sequence
attattttacagatcacaatttaaaat

SEQ ID NO: 140350 - DNA, 27 bp, Artificial sequence
  SiRNA target sequence
ttattttacagatcacaatttaaaatt

SEQ ID NO: 140351 - DNA, 27 bp, Artificial sequence
  SiRNA target sequence
tattttacagatcacaatttaaaatta

SEQ ID NO: 140352 - DNA, 27 bp, Artificial sequence
  SiRNA target sequence
attttacagatcacaatttaaaattaa

SEQ ID NO: 140353 - DNA, 27 bp, Artificial sequence
  SiRNA target sequence
ttttacagatcacaatttaaaattaac

SEQ ID NO: 140354 - DNA, 27 bp, Artificial sequence
  SiRNA target sequence
tttacagatcacaatttaaaattaaca

SEQ ID NO: 140355 - DNA, 27 bp, Artificial sequence
  SiRNA target sequence
ttacagatcacaatttaaaattaacaa

SEQ ID NO: 140356 - DNA, 27 bp, Artificial sequence
  SiRNA target sequence
tacagatcacaatttaaaattaacaaa

SEQ ID NO: 140357 - DNA, 27 bp, Artificial sequence
  SiRNA target sequence
acagatcacaatttaaaattaacaaaa

SEQ ID NO: 140358 - DNA, 27 bp, Artificial sequence
  SiRNA target sequence
cagatcacaatttaaaattaacaaaaa

SEQ ID NO: 140359 - DNA, 27 bp, Artificial sequence
  SiRNA target sequence
agatcacaatttaaaattaacaaaaaa

SEQ ID NO: 140360 - DNA, 27 bp, Artificial sequence
  SiRNA target sequence
gatcacaatttaaaattaacaaaaaaa

SEQ ID NO: 140361 - DNA, 27 bp, Artificial sequence
  SiRNA target sequence
atcacaatttaaaattaacaaaaaaag

SEQ ID NO: 140362 - DNA, 27 bp, Artificial sequence
  SiRNA target sequence
tcacaatttaaaattaacaaaaaaaga

SEQ ID NO: 140363 - DNA, 27 bp, Artificial sequence
  SiRNA target sequence
cacaatttaaaattaacaaaaaaagat

SEQ ID NO: 140364 - DNA, 27 bp, Artificial sequence
  SiRNA target sequence
acaatttaaaattaacaaaaaaagatg

SEQ ID NO: 140365 - DNA, 27 bp, Artificial sequence
  SiRNA target sequence
caatttaaaattaacaaaaaaagatgt

SEQ ID NO: 140366 - DNA, 27 bp, Artificial sequence
  SiRNA target sequence
aatttaaaattaacaaaaaaagatgtt

SEQ ID NO: 140367 - DNA, 27 bp, Artificial sequence
  SiRNA target sequence
atttaaaattaacaaaaaaagatgttt

SEQ ID NO: 140368 - DNA, 27 bp, Artificial sequence
  SiRNA target sequence
tttaaaattaacaaaaaaagatgtttt

SEQ ID NO: 140369 - DNA, 27 bp, Artificial sequence
  SiRNA target sequence
ttaaaattaacaaaaaaagatgttttg

SEQ ID NO: 140370 - DNA, 27 bp, Artificial sequence
  SiRNA target sequence
taaaattaacaaaaaaagatgttttgt

SEQ ID NO: 140371 - DNA, 27 bp, Artificial sequence
  SiRNA target sequence
aaaattaacaaaaaaagatgttttgtc

SEQ ID NO: 140372 - DNA, 27 bp, Artificial sequence
  SiRNA target sequence
aaattaacaaaaaaagatgttttgtct

SEQ ID NO: 140373 - DNA, 27 bp, Artificial sequence
  SiRNA target sequence
aattaacaaaaaaagatgttttgtctg

SEQ ID NO: 140374 - DNA, 27 bp, Artificial sequence
  SiRNA target sequence
attaacaaaaaaagatgttttgtctgt

SEQ ID NO: 140375 - DNA, 27 bp, Artificial sequence
  SiRNA target sequence
ttaacaaaaaaagatgttttgtctgtt

SEQ ID NO: 140376 - DNA, 27 bp, Artificial sequence
  SiRNA target sequence
taacaaaaaaagatgttttgtctgttt

SEQ ID NO: 140377 - DNA, 27 bp, Artificial sequence
  SiRNA target sequence
aacaaaaaaagatgttttgtctgtttg

SEQ ID NO: 140378 - DNA, 27 bp, Artificial sequence
  SiRNA target sequence
acaaaaaaagatgttttgtctgtttgg

SEQ ID NO: 140379 - DNA, 27 bp, Artificial sequence
  SiRNA target sequence
caaaaaaagatgttttgtctgtttgga

SEQ ID NO: 140380 - DNA, 27 bp, Artificial sequence
  SiRNA target sequence
aaaaaaagatgttttgtctgtttggac

SEQ ID NO: 140381 - DNA, 27 bp, Artificial sequence
  SiRNA target sequence
aaaaaagatgttttgtctgtttggaca

SEQ ID NO: 140382 - DNA, 27 bp, Artificial sequence
  SiRNA target sequence
aaaaagatgttttgtctgtttggacag

SEQ ID NO: 140383 - DNA, 27 bp, Artificial sequence
  SiRNA target sequence
aaaagatgttttgtctgtttggacagg

SEQ ID NO: 140384 - DNA, 27 bp, Artificial sequence
  SiRNA target sequence
aaagatgttttgtctgtttggacaggt

SEQ ID NO: 140385 - DNA, 27 bp, Artificial sequence
  SiRNA target sequence
aagatgttttgtctgtttggacaggta

SEQ ID NO: 140386 - DNA, 27 bp, Artificial sequence
  SiRNA target sequence
agatgttttgtctgtttggacaggtat

SEQ ID NO: 140387 - DNA, 27 bp, Artificial sequence
  SiRNA target sequence
gatgttttgtctgtttggacaggtatt

SEQ ID NO: 140388 - DNA, 27 bp, Artificial sequence
  SiRNA target sequence
atgttttgtctgtttggacaggtatta

SEQ ID NO: 140389 - DNA, 27 bp, Artificial sequence
  SiRNA target sequence
tgttttgtctgtttggacaggtattag

SEQ ID NO: 140390 - DNA, 27 bp, Artificial sequence
  SiRNA target sequence
gttttgtctgtttggacaggtattaga

SEQ ID NO: 140391 - DNA, 27 bp, Artificial sequence
  SiRNA target sequence
ttttgtctgtttggacaggtattagac

SEQ ID NO: 140392 - DNA, 27 bp, Artificial sequence
  SiRNA target sequence
tttgtctgtttggacaggtattagacc

SEQ ID NO: 140393 - DNA, 27 bp, Artificial sequence
  SiRNA target sequence
ttgtctgtttggacaggtattagaccg

SEQ ID NO: 140394 - DNA, 27 bp, Artificial sequence
  SiRNA target sequence
tgtctgtttggacaggtattagaccgt

SEQ ID NO: 140395 - DNA, 27 bp, Artificial sequence
  SiRNA target sequence
gtctgtttggacaggtattagaccgtt

SEQ ID NO: 140396 - DNA, 27 bp, Artificial sequence
  SiRNA target sequence
tctgtttggacaggtattagaccgtta

SEQ ID NO: 140397 - DNA, 27 bp, Artificial sequence
  SiRNA target sequence
ctgtttggacaggtattagaccgttag

SEQ ID NO: 140398 - DNA, 27 bp, Artificial sequence
  SiRNA target sequence
tgtttggacaggtattagaccgttagt

SEQ ID NO: 140399 - DNA, 27 bp, Artificial sequence
  SiRNA target sequence
gtttggacaggtattagaccgttagtc

SEQ ID NO: 140400 - DNA, 27 bp, Artificial sequence
  SiRNA target sequence
tttggacaggtattagaccgttagtca

SEQ ID NO: 140401 - DNA, 27 bp, Artificial sequence
  SiRNA target sequence
ttggacaggtattagaccgttagtcaa

SEQ ID NO: 140402 - DNA, 27 bp, Artificial sequence
  SiRNA target sequence
tggacaggtattagaccgttagtcaag

SEQ ID NO: 140403 - DNA, 27 bp, Artificial sequence
  SiRNA target sequence
ggacaggtattagaccgttagtcaagg

SEQ ID NO: 140404 - DNA, 27 bp, Artificial sequence
  SiRNA target sequence
gacaggtattagaccgttagtcaagga

SEQ ID NO: 140405 - DNA, 27 bp, Artificial sequence
  SiRNA target sequence
acaggtattagaccgttagtcaaggat

SEQ ID NO: 140406 - DNA, 27 bp, Artificial sequence
  SiRNA target sequence
caggtattagaccgttagtcaaggatt

SEQ ID NO: 140407 - DNA, 27 bp, Artificial sequence
  SiRNA target sequence
aggtattagaccgttagtcaaggattt

SEQ ID NO: 140408 - DNA, 27 bp, Artificial sequence
  SiRNA target sequence
ggtattagaccgttagtcaaggattta

SEQ ID NO: 140409 - DNA, 27 bp, Artificial sequence
  SiRNA target sequence
gtattagaccgttagtcaaggatttat

SEQ ID NO: 140410 - DNA, 27 bp, Artificial sequence
  SiRNA target sequence
tattagaccgttagtcaaggatttatc

SEQ ID NO: 140411 - DNA, 27 bp, Artificial sequence
  SiRNA target sequence
attagaccgttagtcaaggatttatcg

SEQ ID NO: 140412 - DNA, 27 bp, Artificial sequence
  SiRNA target sequence
ttagaccgttagtcaaggatttatcga

SEQ ID NO: 140413 - DNA, 27 bp, Artificial sequence
  SiRNA target sequence
tagaccgttagtcaaggatttatcgaa

SEQ ID NO: 140414 - DNA, 27 bp, Artificial sequence
  SiRNA target sequence
agaccgttagtcaaggatttatcgaaa

SEQ ID NO: 140415 - DNA, 27 bp, Artificial sequence
  SiRNA target sequence
gaccgttagtcaaggatttatcgaaaa

SEQ ID NO: 140416 - DNA, 27 bp, Artificial sequence
  SiRNA target sequence
accgttagtcaaggatttatcgaaaag

SEQ ID NO: 140417 - DNA, 27 bp, Artificial sequence
  SiRNA target sequence
ccgttagtcaaggatttatcgaaaagt

SEQ ID NO: 140418 - DNA, 27 bp, Artificial sequence
  SiRNA target sequence
cgttagtcaaggatttatcgaaaagtt

SEQ ID NO: 140419 - DNA, 27 bp, Artificial sequence
  SiRNA target sequence
gttagtcaaggatttatcgaaaagttc

SEQ ID NO: 140420 - DNA, 27 bp, Artificial sequence
  SiRNA target sequence
ttagtcaaggatttatcgaaaagttca

SEQ ID NO: 140421 - DNA, 27 bp, Artificial sequence
  SiRNA target sequence
tagtcaaggatttatcgaaaagttcaa

SEQ ID NO: 140422 - DNA, 27 bp, Artificial sequence
  SiRNA target sequence
agtcaaggatttatcgaaaagttcaac

SEQ ID NO: 140423 - DNA, 27 bp, Artificial sequence
  SiRNA target sequence
gtcaaggatttatcgaaaagttcaaca

SEQ ID NO: 140424 - DNA, 27 bp, Artificial sequence
  SiRNA target sequence
tcaaggatttatcgaaaagttcaacag

SEQ ID NO: 140425 - DNA, 27 bp, Artificial sequence
  SiRNA target sequence
caaggatttatcgaaaagttcaacaga

SEQ ID NO: 140426 - DNA, 27 bp, Artificial sequence
  SiRNA target sequence
aaggatttatcgaaaagttcaacagaa

SEQ ID NO: 140427 - DNA, 27 bp, Artificial sequence
  SiRNA target sequence
aggatttatcgaaaagttcaacagaaa

SEQ ID NO: 140428 - DNA, 27 bp, Artificial sequence
  SiRNA target sequence
ggatttatcgaaaagttcaacagaaaa

SEQ ID NO: 140429 - DNA, 27 bp, Artificial sequence
  SiRNA target sequence
gatttatcgaaaagttcaacagaaaag

SEQ ID NO: 140430 - DNA, 27 bp, Artificial sequence
  SiRNA target sequence
atttatcgaaaagttcaacagaaaaga

SEQ ID NO: 140431 - DNA, 27 bp, Artificial sequence
  SiRNA target sequence
tttatcgaaaagttcaacagaaaagat

SEQ ID NO: 140432 - DNA, 27 bp, Artificial sequence
  SiRNA target sequence
ttatcgaaaagttcaacagaaaagata

SEQ ID NO: 140433 - DNA, 27 bp, Artificial sequence
  SiRNA target sequence
tatcgaaaagttcaacagaaaagatat

SEQ ID NO: 140434 - DNA, 27 bp, Artificial sequence
  SiRNA target sequence
atcgaaaagttcaacagaaaagatatg

SEQ ID NO: 140435 - DNA, 27 bp, Artificial sequence
  SiRNA target sequence
tcgaaaagttcaacagaaaagatatgt

SEQ ID NO: 140436 - DNA, 27 bp, Artificial sequence
  SiRNA target sequence
cgaaaagttcaacagaaaagatatgta

SEQ ID NO: 140437 - DNA, 27 bp, Artificial sequence
  SiRNA target sequence
gaaaagttcaacagaaaagatatgtag

SEQ ID NO: 140438 - DNA, 27 bp, Artificial sequence
  SiRNA target sequence
aaaagttcaacagaaaagatatgtaga

SEQ ID NO: 140439 - DNA, 27 bp, Artificial sequence
  SiRNA target sequence
aaagttcaacagaaaagatatgtagaa

SEQ ID NO: 140440 - DNA, 27 bp, Artificial sequence
  SiRNA target sequence
aagttcaacagaaaagatatgtagaaa

SEQ ID NO: 140441 - DNA, 27 bp, Artificial sequence
  SiRNA target sequence
agttcaacagaaaagatatgtagaaaa

SEQ ID NO: 140442 - DNA, 27 bp, Artificial sequence
  SiRNA target sequence
gttcaacagaaaagatatgtagaaaac

SEQ ID NO: 140443 - DNA, 27 bp, Artificial sequence
  SiRNA target sequence
ttcaacagaaaagatatgtagaaaaca

SEQ ID NO: 140444 - DNA, 27 bp, Artificial sequence
  SiRNA target sequence
tcaacagaaaagatatgtagaaaacat

SEQ ID NO: 140445 - DNA, 27 bp, Artificial sequence
  SiRNA target sequence
caacagaaaagatatgtagaaaacata

SEQ ID NO: 140446 - DNA, 27 bp, Artificial sequence
  SiRNA target sequence
aacagaaaagatatgtagaaaacatac

SEQ ID NO: 140447 - DNA, 27 bp, Artificial sequence
  SiRNA target sequence
acagaaaagatatgtagaaaacatact

SEQ ID NO: 140448 - DNA, 27 bp, Artificial sequence
  SiRNA target sequence
cagaaaagatatgtagaaaacatacta

SEQ ID NO: 140449 - DNA, 27 bp, Artificial sequence
  SiRNA target sequence
agaaaagatatgtagaaaacatactat

SEQ ID NO: 140450 - DNA, 27 bp, Artificial sequence
  SiRNA target sequence
gaaaagatatgtagaaaacatactata

SEQ ID NO: 140451 - DNA, 27 bp, Artificial sequence
  SiRNA target sequence
aaaagatatgtagaaaacatactataa

SEQ ID NO: 140452 - DNA, 27 bp, Artificial sequence
  SiRNA target sequence
aaagatatgtagaaaacatactataag

SEQ ID NO: 140453 - DNA, 27 bp, Artificial sequence
  SiRNA target sequence
aagatatgtagaaaacatactataaga

SEQ ID NO: 140454 - DNA, 27 bp, Artificial sequence
  SiRNA target sequence
agatatgtagaaaacatactataagaa

SEQ ID NO: 140455 - DNA, 27 bp, Artificial sequence
  SiRNA target sequence
gatatgtagaaaacatactataagaat

SEQ ID NO: 140456 - DNA, 27 bp, Artificial sequence
  SiRNA target sequence
atatgtagaaaacatactataagaata

SEQ ID NO: 140457 - DNA, 27 bp, Artificial sequence
  SiRNA target sequence
tatgtagaaaacatactataagaatag

SEQ ID NO: 140458 - DNA, 27 bp, Artificial sequence
  SiRNA target sequence
atgtagaaaacatactataagaataga

SEQ ID NO: 140459 - DNA, 27 bp, Artificial sequence
  SiRNA target sequence
tgtagaaaacatactataagaatagat

SEQ ID NO: 140460 - DNA, 27 bp, Artificial sequence
  SiRNA target sequence
gtagaaaacatactataagaatagata

SEQ ID NO: 140461 - DNA, 27 bp, Artificial sequence
  SiRNA target sequence
tagaaaacatactataagaatagataa

SEQ ID NO: 140462 - DNA, 27 bp, Artificial sequence
  SiRNA target sequence
agaaaacatactataagaatagataaa

SEQ ID NO: 140463 - DNA, 27 bp, Artificial sequence
  SiRNA target sequence
gaaaacatactataagaatagataaag

SEQ ID NO: 140464 - DNA, 27 bp, Artificial sequence
  SiRNA target sequence
aaaacatactataagaatagataaaga

SEQ ID NO: 140465 - DNA, 27 bp, Artificial sequence
  SiRNA target sequence
aaacatactataagaatagataaagac

SEQ ID NO: 140466 - DNA, 27 bp, Artificial sequence
  SiRNA target sequence
aacatactataagaatagataaagaca

SEQ ID NO: 140467 - DNA, 27 bp, Artificial sequence
  SiRNA target sequence
acatactataagaatagataaagacaa

SEQ ID NO: 140468 - DNA, 27 bp, Artificial sequence
  SiRNA target sequence
catactataagaatagataaagacaat

SEQ ID NO: 140469 - DNA, 27 bp, Artificial sequence
  SiRNA target sequence
atactataagaatagataaagacaata

SEQ ID NO: 140470 - DNA, 27 bp, Artificial sequence
  SiRNA target sequence
tactataagaatagataaagacaatat

SEQ ID NO: 140471 - DNA, 27 bp, Artificial sequence
  SiRNA target sequence
actataagaatagataaagacaatatg

SEQ ID NO: 140472 - DNA, 27 bp, Artificial sequence
  SiRNA target sequence
ctataagaatagataaagacaatatgg

SEQ ID NO: 140473 - DNA, 27 bp, Artificial sequence
  SiRNA target sequence
tataagaatagataaagacaatatggt

SEQ ID NO: 140474 - DNA, 27 bp, Artificial sequence
  SiRNA target sequence
ataagaatagataaagacaatatggta

SEQ ID NO: 140475 - DNA, 27 bp, Artificial sequence
  SiRNA target sequence
taagaatagataaagacaatatggtaa

SEQ ID NO: 140476 - DNA, 27 bp, Artificial sequence
  SiRNA target sequence
aagaatagataaagacaatatggtaac

SEQ ID NO: 140477 - DNA, 27 bp, Artificial sequence
  SiRNA target sequence
agaatagataaagacaatatggtaact

SEQ ID NO: 140478 - DNA, 27 bp, Artificial sequence
  SiRNA target sequence
gaatagataaagacaatatggtaactg

SEQ ID NO: 140479 - DNA, 27 bp, Artificial sequence
  SiRNA target sequence
aatagataaagacaatatggtaactgt

SEQ ID NO: 140480 - DNA, 27 bp, Artificial sequence
  SiRNA target sequence
atagataaagacaatatggtaactgta

SEQ ID NO: 140481 - DNA, 27 bp, Artificial sequence
  SiRNA target sequence
tagataaagacaatatggtaactgtaa

SEQ ID NO: 140482 - DNA, 27 bp, Artificial sequence
  SiRNA target sequence
agataaagacaatatggtaactgtaac

SEQ ID NO: 140483 - DNA, 27 bp, Artificial sequence
  SiRNA target sequence
gataaagacaatatggtaactgtaaca

SEQ ID NO: 140484 - DNA, 27 bp, Artificial sequence
  SiRNA target sequence
ataaagacaatatggtaactgtaacag

SEQ ID NO: 140485 - DNA, 27 bp, Artificial sequence
  SiRNA target sequence
taaagacaatatggtaactgtaacagg

SEQ ID NO: 140486 - DNA, 27 bp, Artificial sequence
  SiRNA target sequence
aaagacaatatggtaactgtaacaggt

SEQ ID NO: 140487 - DNA, 27 bp, Artificial sequence
  SiRNA target sequence
aagacaatatggtaactgtaacaggtg

SEQ ID NO: 140488 - DNA, 27 bp, Artificial sequence
  SiRNA target sequence
agacaatatggtaactgtaacaggtgg

SEQ ID NO: 140489 - DNA, 27 bp, Artificial sequence
  SiRNA target sequence
gacaatatggtaactgtaacaggtggt

SEQ ID NO: 140490 - DNA, 27 bp, Artificial sequence
  SiRNA target sequence
acaatatggtaactgtaacaggtggta

SEQ ID NO: 140491 - DNA, 27 bp, Artificial sequence
  SiRNA target sequence
caatatggtaactgtaacaggtggtaa

SEQ ID NO: 140492 - DNA, 27 bp, Artificial sequence
  SiRNA target sequence
aatatggtaactgtaacaggtggtaag

SEQ ID NO: 140493 - DNA, 27 bp, Artificial sequence
  SiRNA target sequence
atatggtaactgtaacaggtggtaagt

SEQ ID NO: 140494 - DNA, 27 bp, Artificial sequence
  SiRNA target sequence
tatggtaactgtaacaggtggtaagtg

SEQ ID NO: 140495 - DNA, 27 bp, Artificial sequence
  SiRNA target sequence
atggtaactgtaacaggtggtaagtgg

SEQ ID NO: 140496 - DNA, 27 bp, Artificial sequence
  SiRNA target sequence
tggtaactgtaacaggtggtaagtgga

SEQ ID NO: 140497 - DNA, 27 bp, Artificial sequence
  SiRNA target sequence
ggtaactgtaacaggtggtaagtggac

SEQ ID NO: 140498 - DNA, 27 bp, Artificial sequence
  SiRNA target sequence
gtaactgtaacaggtggtaagtggaca

SEQ ID NO: 140499 - DNA, 27 bp, Artificial sequence
  SiRNA target sequence
taactgtaacaggtggtaagtggacaa

SEQ ID NO: 140500 - DNA, 27 bp, Artificial sequence
  SiRNA target sequence
aactgtaacaggtggtaagtggacaat

SEQ ID NO: 140501 - DNA, 27 bp, Artificial sequence
  SiRNA target sequence
actgtaacaggtggtaagtggacaatt

SEQ ID NO: 140502 - DNA, 27 bp, Artificial sequence
  SiRNA target sequence
ctgtaacaggtggtaagtggacaattt

SEQ ID NO: 140503 - DNA, 27 bp, Artificial sequence
  SiRNA target sequence
tgtaacaggtggtaagtggacaatttt

SEQ ID NO: 140504 - DNA, 27 bp, Artificial sequence
  SiRNA target sequence
gtaacaggtggtaagtggacaattttt

SEQ ID NO: 140505 - DNA, 27 bp, Artificial sequence
  SiRNA target sequence
taacaggtggtaagtggacaatttttc

SEQ ID NO: 140506 - DNA, 27 bp, Artificial sequence
  SiRNA target sequence
aacaggtggtaagtggacaatttttcg

SEQ ID NO: 140507 - DNA, 27 bp, Artificial sequence
  SiRNA target sequence
acaggtggtaagtggacaatttttcga

SEQ ID NO: 140508 - DNA, 27 bp, Artificial sequence
  SiRNA target sequence
caggtggtaagtggacaatttttcgac

SEQ ID NO: 140509 - DNA, 27 bp, Artificial sequence
  SiRNA target sequence
aggtggtaagtggacaatttttcgact

SEQ ID NO: 140510 - DNA, 27 bp, Artificial sequence
  SiRNA target sequence
ggtggtaagtggacaatttttcgactt

SEQ ID NO: 140511 - DNA, 27 bp, Artificial sequence
  SiRNA target sequence
gtggtaagtggacaatttttcgactta

SEQ ID NO: 140512 - DNA, 27 bp, Artificial sequence
  SiRNA target sequence
tggtaagtggacaatttttcgacttat

SEQ ID NO: 140513 - DNA, 27 bp, Artificial sequence
  SiRNA target sequence
ggtaagtggacaatttttcgacttatg

SEQ ID NO: 140514 - DNA, 27 bp, Artificial sequence
  SiRNA target sequence
gtaagtggacaatttttcgacttatgg

SEQ ID NO: 140515 - DNA, 27 bp, Artificial sequence
  SiRNA target sequence
taagtggacaatttttcgacttatggg

SEQ ID NO: 140516 - DNA, 27 bp, Artificial sequence
  SiRNA target sequence
aagtggacaatttttcgacttatggga

SEQ ID NO: 140517 - DNA, 27 bp, Artificial sequence
  SiRNA target sequence
agtggacaatttttcgacttatgggag

SEQ ID NO: 140518 - DNA, 27 bp, Artificial sequence
  SiRNA target sequence
gtggacaatttttcgacttatgggaga

SEQ ID NO: 140519 - DNA, 27 bp, Artificial sequence
  SiRNA target sequence
tggacaatttttcgacttatgggagaa

SEQ ID NO: 140520 - DNA, 27 bp, Artificial sequence
  SiRNA target sequence
ggacaatttttcgacttatgggagaac

SEQ ID NO: 140521 - DNA, 27 bp, Artificial sequence
  SiRNA target sequence
gacaatttttcgacttatgggagaaca

SEQ ID NO: 140522 - DNA, 27 bp, Artificial sequence
  SiRNA target sequence
acaatttttcgacttatgggagaacag

SEQ ID NO: 140523 - DNA, 27 bp, Artificial sequence
  SiRNA target sequence
caatttttcgacttatgggagaacaga

SEQ ID NO: 140524 - DNA, 27 bp, Artificial sequence
  SiRNA target sequence
aatttttcgacttatgggagaacagac

SEQ ID NO: 140525 - DNA, 27 bp, Artificial sequence
  SiRNA target sequence
atttttcgacttatgggagaacagaca

SEQ ID NO: 140526 - DNA, 27 bp, Artificial sequence
  SiRNA target sequence
tttttcgacttatgggagaacagacaa

SEQ ID NO: 140527 - DNA, 27 bp, Artificial sequence
  SiRNA target sequence
ttttcgacttatgggagaacagacaat

SEQ ID NO: 140528 - DNA, 27 bp, Artificial sequence
  SiRNA target sequence
tttcgacttatgggagaacagacaata

SEQ ID NO: 140529 - DNA, 27 bp, Artificial sequence
  SiRNA target sequence
ttcgacttatgggagaacagacaataa

SEQ ID NO: 140530 - DNA, 27 bp, Artificial sequence
  SiRNA target sequence
tcgacttatgggagaacagacaataaa

SEQ ID NO: 140531 - DNA, 27 bp, Artificial sequence
  SiRNA target sequence
cgacttatgggagaacagacaataaat

SEQ ID NO: 140532 - DNA, 27 bp, Artificial sequence
  SiRNA target sequence
gacttatgggagaacagacaataaatc

SEQ ID NO: 140533 - DNA, 27 bp, Artificial sequence
  SiRNA target sequence
acttatgggagaacagacaataaatca

SEQ ID NO: 140534 - DNA, 27 bp, Artificial sequence
  SiRNA target sequence
cttatgggagaacagacaataaatcaa

SEQ ID NO: 140535 - DNA, 27 bp, Artificial sequence
  SiRNA target sequence
ttatgggagaacagacaataaatcaaa

SEQ ID NO: 140536 - DNA, 27 bp, Artificial sequence
  SiRNA target sequence
tatgggagaacagacaataaatcaaat

SEQ ID NO: 140537 - DNA, 27 bp, Artificial sequence
  SiRNA target sequence
atgggagaacagacaataaatcaaatt

SEQ ID NO: 140538 - DNA, 27 bp, Artificial sequence
  SiRNA target sequence
tgggagaacagacaataaatcaaatta

SEQ ID NO: 140539 - DNA, 27 bp, Artificial sequence
  SiRNA target sequence
gggagaacagacaataaatcaaattat

SEQ ID NO: 140540 - DNA, 27 bp, Artificial sequence
  SiRNA target sequence
ggagaacagacaataaatcaaattata

SEQ ID NO: 140541 - DNA, 27 bp, Artificial sequence
  SiRNA target sequence
gagaacagacaataaatcaaattataa

SEQ ID NO: 140542 - DNA, 27 bp, Artificial sequence
  SiRNA target sequence
agaacagacaataaatcaaattataaa

SEQ ID NO: 140543 - DNA, 27 bp, Artificial sequence
  SiRNA target sequence
gaacagacaataaatcaaattataaaa

SEQ ID NO: 140544 - DNA, 27 bp, Artificial sequence
  SiRNA target sequence
aacagacaataaatcaaattataaaag

SEQ ID NO: 140545 - DNA, 27 bp, Artificial sequence
  SiRNA target sequence
acagacaataaatcaaattataaaagt

SEQ ID NO: 140546 - DNA, 27 bp, Artificial sequence
  SiRNA target sequence
cagacaataaatcaaattataaaagtt

SEQ ID NO: 140547 - DNA, 27 bp, Artificial sequence
  SiRNA target sequence
agacaataaatcaaattataaaagttt

SEQ ID NO: 140548 - DNA, 27 bp, Artificial sequence
  SiRNA target sequence
gacaataaatcaaattataaaagtttt

SEQ ID NO: 140549 - DNA, 27 bp, Artificial sequence
  SiRNA target sequence
acaataaatcaaattataaaagttttt

SEQ ID NO: 140550 - DNA, 27 bp, Artificial sequence
  SiRNA target sequence
caataaatcaaattataaaagttttta

SEQ ID NO: 140551 - DNA, 27 bp, Artificial sequence
  SiRNA target sequence
aataaatcaaattataaaagtttttaa

SEQ ID NO: 140552 - DNA, 27 bp, Artificial sequence
  SiRNA target sequence
ataaatcaaattataaaagtttttaat

SEQ ID NO: 140553 - DNA, 27 bp, Artificial sequence
  SiRNA target sequence
taaatcaaattataaaagtttttaata

SEQ ID NO: 140554 - DNA, 27 bp, Artificial sequence
  SiRNA target sequence
aaatcaaattataaaagtttttaatat

SEQ ID NO: 140555 - DNA, 27 bp, Artificial sequence
  SiRNA target sequence
aatcaaattataaaagtttttaatata

SEQ ID NO: 140556 - DNA, 27 bp, Artificial sequence
  SiRNA target sequence
atcaaattataaaagtttttaatataa

SEQ ID NO: 140557 - DNA, 27 bp, Artificial sequence
  SiRNA target sequence
tcaaattataaaagtttttaatataaa

SEQ ID NO: 140558 - DNA, 27 bp, Artificial sequence
  SiRNA target sequence
caaattataaaagtttttaatataaag

SEQ ID NO: 140559 - DNA, 27 bp, Artificial sequence
  SiRNA target sequence
aaattataaaagtttttaatataaagt

SEQ ID NO: 140560 - DNA, 27 bp, Artificial sequence
  SiRNA target sequence
aattataaaagtttttaatataaagtc

SEQ ID NO: 140561 - DNA, 27 bp, Artificial sequence
  SiRNA target sequence
attataaaagtttttaatataaagtct

SEQ ID NO: 140562 - DNA, 27 bp, Artificial sequence
  SiRNA target sequence
ttataaaagtttttaatataaagtcta

SEQ ID NO: 140563 - DNA, 27 bp, Artificial sequence
  SiRNA target sequence
tataaaagtttttaatataaagtctaa

SEQ ID NO: 140564 - DNA, 27 bp, Artificial sequence
  SiRNA target sequence
ataaaagtttttaatataaagtctaat

SEQ ID NO: 140565 - DNA, 27 bp, Artificial sequence
  SiRNA target sequence
taaaagtttttaatataaagtctaata

SEQ ID NO: 140566 - DNA, 27 bp, Artificial sequence
  SiRNA target sequence
aaaagtttttaatataaagtctaataa

SEQ ID NO: 140567 - DNA, 27 bp, Artificial sequence
  SiRNA target sequence
aaagtttttaatataaagtctaataaa

SEQ ID NO: 140568 - DNA, 27 bp, Artificial sequence
  SiRNA target sequence
aagtttttaatataaagtctaataaac

SEQ ID NO: 140569 - DNA, 27 bp, Artificial sequence
  SiRNA target sequence
agtttttaatataaagtctaataaacc

SEQ ID NO: 140570 - DNA, 27 bp, Artificial sequence
  SiRNA target sequence
gtttttaatataaagtctaataaacca

SEQ ID NO: 140571 - DNA, 27 bp, Artificial sequence
  SiRNA target sequence
tttttaatataaagtctaataaaccaa

SEQ ID NO: 140572 - DNA, 27 bp, Artificial sequence
  SiRNA target sequence
ttttaatataaagtctaataaaccaag

SEQ ID NO: 140573 - DNA, 27 bp, Artificial sequence
  SiRNA target sequence
tttaatataaagtctaataaaccaagt

SEQ ID NO: 140574 - DNA, 27 bp, Artificial sequence
  SiRNA target sequence
ttaatataaagtctaataaaccaagta

SEQ ID NO: 140575 - DNA, 27 bp, Artificial sequence
  SiRNA target sequence
taatataaagtctaataaaccaagtat

SEQ ID NO: 140576 - DNA, 27 bp, Artificial sequence
  SiRNA target sequence
aatataaagtctaataaaccaagtata

SEQ ID NO: 140577 - DNA, 27 bp, Artificial sequence
  SiRNA target sequence
atataaagtctaataaaccaagtataa

SEQ ID NO: 140578 - DNA, 27 bp, Artificial sequence
  SiRNA target sequence
tataaagtctaataaaccaagtataac

SEQ ID NO: 140579 - DNA, 27 bp, Artificial sequence
  SiRNA target sequence
ataaagtctaataaaccaagtataaca

SEQ ID NO: 140580 - DNA, 27 bp, Artificial sequence
  SiRNA target sequence
taaagtctaataaaccaagtataacac

SEQ ID NO: 140581 - DNA, 27 bp, Artificial sequence
  SiRNA target sequence
aaagtctaataaaccaagtataacaca

SEQ ID NO: 140582 - DNA, 27 bp, Artificial sequence
  SiRNA target sequence
aagtctaataaaccaagtataacacaa

SEQ ID NO: 140583 - DNA, 27 bp, Artificial sequence
  SiRNA target sequence
agtctaataaaccaagtataacacaat

SEQ ID NO: 140584 - DNA, 27 bp, Artificial sequence
  SiRNA target sequence
gtctaataaaccaagtataacacaata

SEQ ID NO: 140585 - DNA, 27 bp, Artificial sequence
  SiRNA target sequence
tctaataaaccaagtataacacaatat

SEQ ID NO: 140586 - DNA, 27 bp, Artificial sequence
  SiRNA target sequence
ctaataaaccaagtataacacaatatc

SEQ ID NO: 140587 - DNA, 27 bp, Artificial sequence
  SiRNA target sequence
taataaaccaagtataacacaatatct

SEQ ID NO: 140588 - DNA, 27 bp, Artificial sequence
  SiRNA target sequence
aataaaccaagtataacacaatatctt

SEQ ID NO: 140589 - DNA, 27 bp, Artificial sequence
  SiRNA target sequence
ataaaccaagtataacacaatatcttc

SEQ ID NO: 140590 - DNA, 27 bp, Artificial sequence
  SiRNA target sequence
taaaccaagtataacacaatatcttcc

SEQ ID NO: 140591 - DNA, 27 bp, Artificial sequence
  SiRNA target sequence
aaaccaagtataacacaatatcttcct

SEQ ID NO: 140592 - DNA, 27 bp, Artificial sequence
  SiRNA target sequence
aaccaagtataacacaatatcttcctg

SEQ ID NO: 140593 - DNA, 27 bp, Artificial sequence
  SiRNA target sequence
accaagtataacacaatatcttcctgt

SEQ ID NO: 140594 - DNA, 27 bp, Artificial sequence
  SiRNA target sequence
ccaagtataacacaatatcttcctgtt

SEQ ID NO: 140595 - DNA, 27 bp, Artificial sequence
  SiRNA target sequence
caagtataacacaatatcttcctgttt

SEQ ID NO: 140596 - DNA, 27 bp, Artificial sequence
  SiRNA target sequence
aagtataacacaatatcttcctgtttt

SEQ ID NO: 140597 - DNA, 27 bp, Artificial sequence
  SiRNA target sequence
agtataacacaatatcttcctgttttg

SEQ ID NO: 140598 - DNA, 27 bp, Artificial sequence
  SiRNA target sequence
gtataacacaatatcttcctgttttgg

SEQ ID NO: 140599 - DNA, 27 bp, Artificial sequence
  SiRNA target sequence
tataacacaatatcttcctgttttggg

SEQ ID NO: 140600 - DNA, 27 bp, Artificial sequence
  SiRNA target sequence
ataacacaatatcttcctgttttggga

SEQ ID NO: 140601 - DNA, 27 bp, Artificial sequence
  SiRNA target sequence
taacacaatatcttcctgttttgggat

SEQ ID NO: 140602 - DNA, 27 bp, Artificial sequence
  SiRNA target sequence
aacacaatatcttcctgttttgggatc

SEQ ID NO: 140603 - DNA, 27 bp, Artificial sequence
  SiRNA target sequence
acacaatatcttcctgttttgggatca

SEQ ID NO: 140604 - DNA, 27 bp, Artificial sequence
  SiRNA target sequence
cacaatatcttcctgttttgggatcac

SEQ ID NO: 140605 - DNA, 27 bp, Artificial sequence
  SiRNA target sequence
acaatatcttcctgttttgggatcaca

SEQ ID NO: 140606 - DNA, 27 bp, Artificial sequence
  SiRNA target sequence
caatatcttcctgttttgggatcacag

SEQ ID NO: 140607 - DNA, 27 bp, Artificial sequence
  SiRNA target sequence
aatatcttcctgttttgggatcacagg

SEQ ID NO: 140608 - DNA, 27 bp, Artificial sequence
  SiRNA target sequence
atatcttcctgttttgggatcacaggg

SEQ ID NO: 140609 - DNA, 27 bp, Artificial sequence
  SiRNA target sequence
tatcttcctgttttgggatcacaggga

SEQ ID NO: 140610 - DNA, 27 bp, Artificial sequence
  SiRNA target sequence
atcttcctgttttgggatcacagggat

SEQ ID NO: 140611 - DNA, 27 bp, Artificial sequence
  SiRNA target sequence
tcttcctgttttgggatcacagggata

SEQ ID NO: 140612 - DNA, 27 bp, Artificial sequence
  SiRNA target sequence
cttcctgttttgggatcacagggatat

SEQ ID NO: 140613 - DNA, 27 bp, Artificial sequence
  SiRNA target sequence
ttcctgttttgggatcacagggatata

SEQ ID NO: 140614 - DNA, 27 bp, Artificial sequence
  SiRNA target sequence
tcctgttttgggatcacagggatatac

SEQ ID NO: 140615 - DNA, 27 bp, Artificial sequence
  SiRNA target sequence
cctgttttgggatcacagggatatact

SEQ ID NO: 140616 - DNA, 27 bp, Artificial sequence
  SiRNA target sequence
ctgttttgggatcacagggatatacta

SEQ ID NO: 140617 - DNA, 27 bp, Artificial sequence
  SiRNA target sequence
tgttttgggatcacagggatatactaa

SEQ ID NO: 140618 - DNA, 27 bp, Artificial sequence
  SiRNA target sequence
gttttgggatcacagggatatactaaa

SEQ ID NO: 140619 - DNA, 27 bp, Artificial sequence
  SiRNA target sequence
ttttgggatcacagggatatactaaag

SEQ ID NO: 140620 - DNA, 27 bp, Artificial sequence
  SiRNA target sequence
tttgggatcacagggatatactaaagc

SEQ ID NO: 140621 - DNA, 27 bp, Artificial sequence
  SiRNA target sequence
ttgggatcacagggatatactaaagct

SEQ ID NO: 140622 - DNA, 27 bp, Artificial sequence
  SiRNA target sequence
tgggatcacagggatatactaaagcta

SEQ ID NO: 140623 - DNA, 27 bp, Artificial sequence
  SiRNA target sequence
gggatcacagggatatactaaagctac

SEQ ID NO: 140624 - DNA, 27 bp, Artificial sequence
  SiRNA target sequence
ggatcacagggatatactaaagctaca

SEQ ID NO: 140625 - DNA, 27 bp, Artificial sequence
  SiRNA target sequence
gatcacagggatatactaaagctacag

SEQ ID NO: 140626 - DNA, 27 bp, Artificial sequence
  SiRNA target sequence
atcacagggatatactaaagctacaga

SEQ ID NO: 140627 - DNA, 27 bp, Artificial sequence
  SiRNA target sequence
tcacagggatatactaaagctacagaa

SEQ ID NO: 140628 - DNA, 27 bp, Artificial sequence
  SiRNA target sequence
cacagggatatactaaagctacagaat

SEQ ID NO: 140629 - DNA, 27 bp, Artificial sequence
  SiRNA target sequence
acagggatatactaaagctacagaatt

SEQ ID NO: 140630 - DNA, 27 bp, Artificial sequence
  SiRNA target sequence
cagggatatactaaagctacagaattt

SEQ ID NO: 140631 - DNA, 27 bp, Artificial sequence
  SiRNA target sequence
agggatatactaaagctacagaatttg

SEQ ID NO: 140632 - DNA, 27 bp, Artificial sequence
  SiRNA target sequence
gggatatactaaagctacagaatttga

SEQ ID NO: 140633 - DNA, 27 bp, Artificial sequence
  SiRNA target sequence
ggatatactaaagctacagaatttgat

SEQ ID NO: 140634 - DNA, 27 bp, Artificial sequence
  SiRNA target sequence
gatatactaaagctacagaatttgatt

SEQ ID NO: 140635 - DNA, 27 bp, Artificial sequence
  SiRNA target sequence
atatactaaagctacagaatttgattt

SEQ ID NO: 140636 - DNA, 27 bp, Artificial sequence
  SiRNA target sequence
tatactaaagctacagaatttgatttg

SEQ ID NO: 140637 - DNA, 27 bp, Artificial sequence
  SiRNA target sequence
atactaaagctacagaatttgatttgg

SEQ ID NO: 140638 - DNA, 27 bp, Artificial sequence
  SiRNA target sequence
tactaaagctacagaatttgatttggc

SEQ ID NO: 140639 - DNA, 27 bp, Artificial sequence
  SiRNA target sequence
actaaagctacagaatttgatttggca

SEQ ID NO: 140640 - DNA, 27 bp, Artificial sequence
  SiRNA target sequence
ctaaagctacagaatttgatttggcac

SEQ ID NO: 140641 - DNA, 27 bp, Artificial sequence
  SiRNA target sequence
taaagctacagaatttgatttggcact

SEQ ID NO: 140642 - DNA, 27 bp, Artificial sequence
  SiRNA target sequence
aaagctacagaatttgatttggcactt

SEQ ID NO: 140643 - DNA, 27 bp, Artificial sequence
  SiRNA target sequence
aagctacagaatttgatttggcactta

SEQ ID NO: 140644 - DNA, 27 bp, Artificial sequence
  SiRNA target sequence
agctacagaatttgatttggcacttac

SEQ ID NO: 140645 - DNA, 27 bp, Artificial sequence
  SiRNA target sequence
gctacagaatttgatttggcacttact

SEQ ID NO: 140646 - DNA, 27 bp, Artificial sequence
  SiRNA target sequence
ctacagaatttgatttggcacttactt

SEQ ID NO: 140647 - DNA, 27 bp, Artificial sequence
  SiRNA target sequence
tacagaatttgatttggcacttacttt

SEQ ID NO: 140648 - DNA, 27 bp, Artificial sequence
  SiRNA target sequence
acagaatttgatttggcacttacttta

SEQ ID NO: 140649 - DNA, 27 bp, Artificial sequence
  SiRNA target sequence
cagaatttgatttggcacttactttaa

SEQ ID NO: 140650 - DNA, 27 bp, Artificial sequence
  SiRNA target sequence
agaatttgatttggcacttactttaaa

SEQ ID NO: 140651 - DNA, 27 bp, Artificial sequence
  SiRNA target sequence
gaatttgatttggcacttactttaaat

SEQ ID NO: 140652 - DNA, 27 bp, Artificial sequence
  SiRNA target sequence
aatttgatttggcacttactttaaata

SEQ ID NO: 140653 - DNA, 27 bp, Artificial sequence
  SiRNA target sequence
atttgatttggcacttactttaaatat

SEQ ID NO: 140654 - DNA, 27 bp, Artificial sequence
  SiRNA target sequence
tttgatttggcacttactttaaatatt

SEQ ID NO: 140655 - DNA, 27 bp, Artificial sequence
  SiRNA target sequence
ttgatttggcacttactttaaatattc

SEQ ID NO: 140656 - DNA, 27 bp, Artificial sequence
  SiRNA target sequence
tgatttggcacttactttaaatattcc

SEQ ID NO: 140657 - DNA, 27 bp, Artificial sequence
  SiRNA target sequence
gatttggcacttactttaaatattcca

SEQ ID NO: 140658 - DNA, 27 bp, Artificial sequence
  SiRNA target sequence
atttggcacttactttaaatattccag

SEQ ID NO: 140659 - DNA, 27 bp, Artificial sequence
  SiRNA target sequence
tttggcacttactttaaatattccaga

SEQ ID NO: 140660 - DNA, 27 bp, Artificial sequence
  SiRNA target sequence
ttggcacttactttaaatattccagaa

SEQ ID NO: 140661 - DNA, 27 bp, Artificial sequence
  SiRNA target sequence
tggcacttactttaaatattccagaag

SEQ ID NO: 140662 - DNA, 27 bp, Artificial sequence
  SiRNA target sequence
ggcacttactttaaatattccagaaga

SEQ ID NO: 140663 - DNA, 27 bp, Artificial sequence
  SiRNA target sequence
gcacttactttaaatattccagaagat

SEQ ID NO: 140664 - DNA, 27 bp, Artificial sequence
  SiRNA target sequence
cacttactttaaatattccagaagata

SEQ ID NO: 140665 - DNA, 27 bp, Artificial sequence
  SiRNA target sequence
acttactttaaatattccagaagatat

SEQ ID NO: 140666 - DNA, 27 bp, Artificial sequence
  SiRNA target sequence
cttactttaaatattccagaagatata

SEQ ID NO: 140667 - DNA, 27 bp, Artificial sequence
  SiRNA target sequence
ttactttaaatattccagaagatatag

SEQ ID NO: 140668 - DNA, 27 bp, Artificial sequence
  SiRNA target sequence
tactttaaatattccagaagatatagc

SEQ ID NO: 140669 - DNA, 27 bp, Artificial sequence
  SiRNA target sequence
actttaaatattccagaagatatagct

SEQ ID NO: 140670 - DNA, 27 bp, Artificial sequence
  SiRNA target sequence
ctttaaatattccagaagatatagcta

SEQ ID NO: 140671 - DNA, 27 bp, Artificial sequence
  SiRNA target sequence
tttaaatattccagaagatatagctaa

SEQ ID NO: 140672 - DNA, 27 bp, Artificial sequence
  SiRNA target sequence
ttaaatattccagaagatatagctaag

SEQ ID NO: 140673 - DNA, 27 bp, Artificial sequence
  SiRNA target sequence
taaatattccagaagatatagctaagc

SEQ ID NO: 140674 - DNA, 27 bp, Artificial sequence
  SiRNA target sequence
aaatattccagaagatatagctaagca

SEQ ID NO: 140675 - DNA, 27 bp, Artificial sequence
  SiRNA target sequence
aatattccagaagatatagctaagcat

SEQ ID NO: 140676 - DNA, 27 bp, Artificial sequence
  SiRNA target sequence
atattccagaagatatagctaagcatt

SEQ ID NO: 140677 - DNA, 27 bp, Artificial sequence
  SiRNA target sequence
tattccagaagatatagctaagcattt

SEQ ID NO: 140678 - DNA, 27 bp, Artificial sequence
  SiRNA target sequence
attccagaagatatagctaagcattta

SEQ ID NO: 140679 - DNA, 27 bp, Artificial sequence
  SiRNA target sequence
ttccagaagatatagctaagcatttag

SEQ ID NO: 140680 - DNA, 27 bp, Artificial sequence
  SiRNA target sequence
tccagaagatatagctaagcatttagc

SEQ ID NO: 140681 - DNA, 27 bp, Artificial sequence
  SiRNA target sequence
ccagaagatatagctaagcatttagct

SEQ ID NO: 140682 - DNA, 27 bp, Artificial sequence
  SiRNA target sequence
cagaagatatagctaagcatttagcta

SEQ ID NO: 140683 - DNA, 27 bp, Artificial sequence
  SiRNA target sequence
agaagatatagctaagcatttagctac

SEQ ID NO: 140684 - DNA, 27 bp, Artificial sequence
  SiRNA target sequence
gaagatatagctaagcatttagctaca

SEQ ID NO: 140685 - DNA, 27 bp, Artificial sequence
  SiRNA target sequence
aagatatagctaagcatttagctacaa

SEQ ID NO: 140686 - DNA, 27 bp, Artificial sequence
  SiRNA target sequence
agatatagctaagcatttagctacaac

SEQ ID NO: 140687 - DNA, 27 bp, Artificial sequence
  SiRNA target sequence
gatatagctaagcatttagctacaact

SEQ ID NO: 140688 - DNA, 27 bp, Artificial sequence
  SiRNA target sequence
atatagctaagcatttagctacaactt

SEQ ID NO: 140689 - DNA, 27 bp, Artificial sequence
  SiRNA target sequence
tatagctaagcatttagctacaactta

SEQ ID NO: 140690 - DNA, 27 bp, Artificial sequence
  SiRNA target sequence
atagctaagcatttagctacaacttat

SEQ ID NO: 140691 - DNA, 27 bp, Artificial sequence
  SiRNA target sequence
tagctaagcatttagctacaacttatg

SEQ ID NO: 140692 - DNA, 27 bp, Artificial sequence
  SiRNA target sequence
agctaagcatttagctacaacttatgg

SEQ ID NO: 140693 - DNA, 27 bp, Artificial sequence
  SiRNA target sequence
gctaagcatttagctacaacttatggt

SEQ ID NO: 140694 - DNA, 27 bp, Artificial sequence
  SiRNA target sequence
ctaagcatttagctacaacttatggta

SEQ ID NO: 140695 - DNA, 27 bp, Artificial sequence
  SiRNA target sequence
taagcatttagctacaacttatggtac

SEQ ID NO: 140696 - DNA, 27 bp, Artificial sequence
  SiRNA target sequence
aagcatttagctacaacttatggtacc

SEQ ID NO: 140697 - DNA, 27 bp, Artificial sequence
  SiRNA target sequence
agcatttagctacaacttatggtacca

SEQ ID NO: 140698 - DNA, 27 bp, Artificial sequence
  SiRNA target sequence
gcatttagctacaacttatggtaccaa

SEQ ID NO: 140699 - DNA, 27 bp, Artificial sequence
  SiRNA target sequence
catttagctacaacttatggtaccaaa

SEQ ID NO: 140700 - DNA, 27 bp, Artificial sequence
  SiRNA target sequence
atttagctacaacttatggtaccaaag

SEQ ID NO: 140701 - DNA, 27 bp, Artificial sequence
  SiRNA target sequence
tttagctacaacttatggtaccaaagc

SEQ ID NO: 140702 - DNA, 27 bp, Artificial sequence
  SiRNA target sequence
ttagctacaacttatggtaccaaagct

SEQ ID NO: 140703 - DNA, 27 bp, Artificial sequence
  SiRNA target sequence
tagctacaacttatggtaccaaagctt

SEQ ID NO: 140704 - DNA, 27 bp, Artificial sequence
  SiRNA target sequence
agctacaacttatggtaccaaagctta

SEQ ID NO: 140705 - DNA, 27 bp, Artificial sequence
  SiRNA target sequence
gctacaacttatggtaccaaagcttac

SEQ ID NO: 140706 - DNA, 27 bp, Artificial sequence
  SiRNA target sequence
ctacaacttatggtaccaaagcttaca

SEQ ID NO: 140707 - DNA, 27 bp, Artificial sequence
  SiRNA target sequence
tacaacttatggtaccaaagcttacaa

SEQ ID NO: 140708 - DNA, 27 bp, Artificial sequence
  SiRNA target sequence
acaacttatggtaccaaagcttacaat

SEQ ID NO: 140709 - DNA, 27 bp, Artificial sequence
  SiRNA target sequence
caacttatggtaccaaagcttacaatt

SEQ ID NO: 140710 - DNA, 27 bp, Artificial sequence
  SiRNA target sequence
aacttatggtaccaaagcttacaattt

SEQ ID NO: 140711 - DNA, 27 bp, Artificial sequence
  SiRNA target sequence
acttatggtaccaaagcttacaatttc

SEQ ID NO: 140712 - DNA, 27 bp, Artificial sequence
  SiRNA target sequence
cttatggtaccaaagcttacaatttct

SEQ ID NO: 140713 - DNA, 27 bp, Artificial sequence
  SiRNA target sequence
ttatggtaccaaagcttacaatttctc

SEQ ID NO: 140714 - DNA, 27 bp, Artificial sequence
  SiRNA target sequence
tatggtaccaaagcttacaatttctct

SEQ ID NO: 140715 - DNA, 27 bp, Artificial sequence
  SiRNA target sequence
atggtaccaaagcttacaatttctctg

SEQ ID NO: 140716 - DNA, 27 bp, Artificial sequence
  SiRNA target sequence
tggtaccaaagcttacaatttctctga

SEQ ID NO: 140717 - DNA, 27 bp, Artificial sequence
  SiRNA target sequence
ggtaccaaagcttacaatttctctgaa

SEQ ID NO: 140718 - DNA, 27 bp, Artificial sequence
  SiRNA target sequence
gtaccaaagcttacaatttctctgaat

SEQ ID NO: 140719 - DNA, 27 bp, Artificial sequence
  SiRNA target sequence
taccaaagcttacaatttctctgaata

SEQ ID NO: 140720 - DNA, 27 bp, Artificial sequence
  SiRNA target sequence
accaaagcttacaatttctctgaatac

SEQ ID NO: 140721 - DNA, 27 bp, Artificial sequence
  SiRNA target sequence
ccaaagcttacaatttctctgaatact

SEQ ID NO: 140722 - DNA, 27 bp, Artificial sequence
  SiRNA target sequence
caaagcttacaatttctctgaatactt

SEQ ID NO: 140723 - DNA, 27 bp, Artificial sequence
  SiRNA target sequence
aaagcttacaatttctctgaatacttt

SEQ ID NO: 140724 - DNA, 27 bp, Artificial sequence
  SiRNA target sequence
aagcttacaatttctctgaatacttta

SEQ ID NO: 140725 - DNA, 27 bp, Artificial sequence
  SiRNA target sequence
agcttacaatttctctgaatactttaa

SEQ ID NO: 140726 - DNA, 27 bp, Artificial sequence
  SiRNA target sequence
gcttacaatttctctgaatactttaat

SEQ ID NO: 140727 - DNA, 27 bp, Artificial sequence
  SiRNA target sequence
cttacaatttctctgaatactttaatg

SEQ ID NO: 140728 - DNA, 27 bp, Artificial sequence
  SiRNA target sequence
ttacaatttctctgaatactttaatgg

SEQ ID NO: 140729 - DNA, 27 bp, Artificial sequence
  SiRNA target sequence
tacaatttctctgaatactttaatggg

SEQ ID NO: 140730 - DNA, 27 bp, Artificial sequence
  SiRNA target sequence
acaatttctctgaatactttaatgggt

SEQ ID NO: 140731 - DNA, 27 bp, Artificial sequence
  SiRNA target sequence
caatttctctgaatactttaatgggtc

SEQ ID NO: 140732 - DNA, 27 bp, Artificial sequence
  SiRNA target sequence
aatttctctgaatactttaatgggtca

SEQ ID NO: 140733 - DNA, 27 bp, Artificial sequence
  SiRNA target sequence
atttctctgaatactttaatgggtcat

SEQ ID NO: 140734 - DNA, 27 bp, Artificial sequence
  SiRNA target sequence
tttctctgaatactttaatgggtcata

SEQ ID NO: 140735 - DNA, 27 bp, Artificial sequence
  SiRNA target sequence
ttctctgaatactttaatgggtcatac

SEQ ID NO: 140736 - DNA, 27 bp, Artificial sequence
  SiRNA target sequence
tctctgaatactttaatgggtcataca

SEQ ID NO: 140737 - DNA, 27 bp, Artificial sequence
  SiRNA target sequence
ctctgaatactttaatgggtcatacac

SEQ ID NO: 140738 - DNA, 27 bp, Artificial sequence
  SiRNA target sequence
tctgaatactttaatgggtcatacacc

SEQ ID NO: 140739 - DNA, 27 bp, Artificial sequence
  SiRNA target sequence
ctgaatactttaatgggtcatacacca

SEQ ID NO: 140740 - DNA, 27 bp, Artificial sequence
  SiRNA target sequence
tgaatactttaatgggtcatacaccag

SEQ ID NO: 140741 - DNA, 27 bp, Artificial sequence
  SiRNA target sequence
gaatactttaatgggtcatacaccaga

SEQ ID NO: 140742 - DNA, 27 bp, Artificial sequence
  SiRNA target sequence
aatactttaatgggtcatacaccagac

SEQ ID NO: 140743 - DNA, 27 bp, Artificial sequence
  SiRNA target sequence
atactttaatgggtcatacaccagact

SEQ ID NO: 140744 - DNA, 27 bp, Artificial sequence
  SiRNA target sequence
tactttaatgggtcatacaccagactt

SEQ ID NO: 140745 - DNA, 27 bp, Artificial sequence
  SiRNA target sequence
actttaatgggtcatacaccagactta

SEQ ID NO: 140746 - DNA, 27 bp, Artificial sequence
  SiRNA target sequence
ctttaatgggtcatacaccagacttac

SEQ ID NO: 140747 - DNA, 27 bp, Artificial sequence
  SiRNA target sequence
tttaatgggtcatacaccagacttaca

SEQ ID NO: 140748 - DNA, 27 bp, Artificial sequence
  SiRNA target sequence
ttaatgggtcatacaccagacttacag

SEQ ID NO: 140749 - DNA, 27 bp, Artificial sequence
  SiRNA target sequence
taatgggtcatacaccagacttacaga

SEQ ID NO: 140750 - DNA, 27 bp, Artificial sequence
  SiRNA target sequence
aatgggtcatacaccagacttacagat

SEQ ID NO: 140751 - DNA, 27 bp, Artificial sequence
  SiRNA target sequence
atgggtcatacaccagacttacagatg

SEQ ID NO: 140752 - DNA, 27 bp, Artificial sequence
  SiRNA target sequence
tgggtcatacaccagacttacagatgg

SEQ ID NO: 140753 - DNA, 27 bp, Artificial sequence
  SiRNA target sequence
gggtcatacaccagacttacagatggt

SEQ ID NO: 140754 - DNA, 27 bp, Artificial sequence
  SiRNA target sequence
ggtcatacaccagacttacagatggtt

SEQ ID NO: 140755 - DNA, 27 bp, Artificial sequence
  SiRNA target sequence
gtcatacaccagacttacagatggtta

SEQ ID NO: 140756 - DNA, 27 bp, Artificial sequence
  SiRNA target sequence
tcatacaccagacttacagatggttat

SEQ ID NO: 140757 - DNA, 27 bp, Artificial sequence
  SiRNA target sequence
catacaccagacttacagatggttatc

SEQ ID NO: 140758 - DNA, 27 bp, Artificial sequence
  SiRNA target sequence
atacaccagacttacagatggttatcc

SEQ ID NO: 140759 - DNA, 27 bp, Artificial sequence
  SiRNA target sequence
tacaccagacttacagatggttatcct

SEQ ID NO: 140760 - DNA, 27 bp, Artificial sequence
  SiRNA target sequence
acaccagacttacagatggttatcctt

SEQ ID NO: 140761 - DNA, 27 bp, Artificial sequence
  SiRNA target sequence
caccagacttacagatggttatcctta

SEQ ID NO: 140762 - DNA, 27 bp, Artificial sequence
  SiRNA target sequence
accagacttacagatggttatccttat

SEQ ID NO: 140763 - DNA, 27 bp, Artificial sequence
  SiRNA target sequence
ccagacttacagatggttatccttata

SEQ ID NO: 140764 - DNA, 27 bp, Artificial sequence
  SiRNA target sequence
cagacttacagatggttatccttatac

SEQ ID NO: 140765 - DNA, 27 bp, Artificial sequence
  SiRNA target sequence
agacttacagatggttatccttataca

SEQ ID NO: 140766 - DNA, 27 bp, Artificial sequence
  SiRNA target sequence
gacttacagatggttatccttatacaa

SEQ ID NO: 140767 - DNA, 27 bp, Artificial sequence
  SiRNA target sequence
acttacagatggttatccttatacaaa

SEQ ID NO: 140768 - DNA, 27 bp, Artificial sequence
  SiRNA target sequence
cttacagatggttatccttatacaaaa

SEQ ID NO: 140769 - DNA, 27 bp, Artificial sequence
  SiRNA target sequence
ttacagatggttatccttatacaaaag

SEQ ID NO: 140770 - DNA, 27 bp, Artificial sequence
  SiRNA target sequence
tacagatggttatccttatacaaaaga

SEQ ID NO: 140771 - DNA, 27 bp, Artificial sequence
  SiRNA target sequence
acagatggttatccttatacaaaagaa

SEQ ID NO: 140772 - DNA, 27 bp, Artificial sequence
  SiRNA target sequence
cagatggttatccttatacaaaagaag

SEQ ID NO: 140773 - DNA, 27 bp, Artificial sequence
  SiRNA target sequence
agatggttatccttatacaaaagaaga

SEQ ID NO: 140774 - DNA, 27 bp, Artificial sequence
  SiRNA target sequence
gatggttatccttatacaaaagaagaa

SEQ ID NO: 140775 - DNA, 27 bp, Artificial sequence
  SiRNA target sequence
atggttatccttatacaaaagaagaaa

SEQ ID NO: 140776 - DNA, 27 bp, Artificial sequence
  SiRNA target sequence
tggttatccttatacaaaagaagaaat

SEQ ID NO: 140777 - DNA, 27 bp, Artificial sequence
  SiRNA target sequence
ggttatccttatacaaaagaagaaata

SEQ ID NO: 140778 - DNA, 27 bp, Artificial sequence
  SiRNA target sequence
gttatccttatacaaaagaagaaatag

SEQ ID NO: 140779 - DNA, 27 bp, Artificial sequence
  SiRNA target sequence
ttatccttatacaaaagaagaaatagt

SEQ ID NO: 140780 - DNA, 27 bp, Artificial sequence
  SiRNA target sequence
tatccttatacaaaagaagaaatagta

SEQ ID NO: 140781 - DNA, 27 bp, Artificial sequence
  SiRNA target sequence
atccttatacaaaagaagaaatagtat

SEQ ID NO: 140782 - DNA, 27 bp, Artificial sequence
  SiRNA target sequence
tccttatacaaaagaagaaatagtata

SEQ ID NO: 140783 - DNA, 27 bp, Artificial sequence
  SiRNA target sequence
ccttatacaaaagaagaaatagtatat

SEQ ID NO: 140784 - DNA, 27 bp, Artificial sequence
  SiRNA target sequence
cttatacaaaagaagaaatagtatatt

SEQ ID NO: 140785 - DNA, 27 bp, Artificial sequence
  SiRNA target sequence
ttatacaaaagaagaaatagtatattg

SEQ ID NO: 140786 - DNA, 27 bp, Artificial sequence
  SiRNA target sequence
tatacaaaagaagaaatagtatattgt

SEQ ID NO: 140787 - DNA, 27 bp, Artificial sequence
  SiRNA target sequence
atacaaaagaagaaatagtatattgta

SEQ ID NO: 140788 - DNA, 27 bp, Artificial sequence
  SiRNA target sequence
tacaaaagaagaaatagtatattgtat

SEQ ID NO: 140789 - DNA, 27 bp, Artificial sequence
  SiRNA target sequence
acaaaagaagaaatagtatattgtatc

SEQ ID NO: 140790 - DNA, 27 bp, Artificial sequence
  SiRNA target sequence
caaaagaagaaatagtatattgtatcg

SEQ ID NO: 140791 - DNA, 27 bp, Artificial sequence
  SiRNA target sequence
aaaagaagaaatagtatattgtatcga

SEQ ID NO: 140792 - DNA, 27 bp, Artificial sequence
  SiRNA target sequence
aaagaagaaatagtatattgtatcgaa

SEQ ID NO: 140793 - DNA, 27 bp, Artificial sequence
  SiRNA target sequence
aagaagaaatagtatattgtatcgaac

SEQ ID NO: 140794 - DNA, 27 bp, Artificial sequence
  SiRNA target sequence
agaagaaatagtatattgtatcgaaca

SEQ ID NO: 140795 - DNA, 27 bp, Artificial sequence
  SiRNA target sequence
gaagaaatagtatattgtatcgaacat

SEQ ID NO: 140796 - DNA, 27 bp, Artificial sequence
  SiRNA target sequence
aagaaatagtatattgtatcgaacatg

SEQ ID NO: 140797 - DNA, 27 bp, Artificial sequence
  SiRNA target sequence
agaaatagtatattgtatcgaacatga

SEQ ID NO: 140798 - DNA, 27 bp, Artificial sequence
  SiRNA target sequence
gaaatagtatattgtatcgaacatgaa

SEQ ID NO: 140799 - DNA, 27 bp, Artificial sequence
  SiRNA target sequence
aaatagtatattgtatcgaacatgaat

SEQ ID NO: 140800 - DNA, 27 bp, Artificial sequence
  SiRNA target sequence
aatagtatattgtatcgaacatgaatt

SEQ ID NO: 140801 - DNA, 27 bp, Artificial sequence
  SiRNA target sequence
atagtatattgtatcgaacatgaattg

SEQ ID NO: 140802 - DNA, 27 bp, Artificial sequence
  SiRNA target sequence
tagtatattgtatcgaacatgaattgg

SEQ ID NO: 140803 - DNA, 27 bp, Artificial sequence
  SiRNA target sequence
agtatattgtatcgaacatgaattggc

SEQ ID NO: 140804 - DNA, 27 bp, Artificial sequence
  SiRNA target sequence
gtatattgtatcgaacatgaattggct

SEQ ID NO: 140805 - DNA, 27 bp, Artificial sequence
  SiRNA target sequence
tatattgtatcgaacatgaattggctt

SEQ ID NO: 140806 - DNA, 27 bp, Artificial sequence
  SiRNA target sequence
atattgtatcgaacatgaattggctta

SEQ ID NO: 140807 - DNA, 27 bp, Artificial sequence
  SiRNA target sequence
tattgtatcgaacatgaattggcttat

SEQ ID NO: 140808 - DNA, 27 bp, Artificial sequence
  SiRNA target sequence
attgtatcgaacatgaattggcttatc

SEQ ID NO: 140809 - DNA, 27 bp, Artificial sequence
  SiRNA target sequence
ttgtatcgaacatgaattggcttatcg

SEQ ID NO: 140810 - DNA, 27 bp, Artificial sequence
  SiRNA target sequence
tgtatcgaacatgaattggcttatcgc

SEQ ID NO: 140811 - DNA, 27 bp, Artificial sequence
  SiRNA target sequence
gtatcgaacatgaattggcttatcgca

SEQ ID NO: 140812 - DNA, 27 bp, Artificial sequence
  SiRNA target sequence
tatcgaacatgaattggcttatcgcat

SEQ ID NO: 140813 - DNA, 27 bp, Artificial sequence
  SiRNA target sequence
atcgaacatgaattggcttatcgcatc

SEQ ID NO: 140814 - DNA, 27 bp, Artificial sequence
  SiRNA target sequence
tcgaacatgaattggcttatcgcatca

SEQ ID NO: 140815 - DNA, 27 bp, Artificial sequence
  SiRNA target sequence
cgaacatgaattggcttatcgcatcag

SEQ ID NO: 140816 - DNA, 27 bp, Artificial sequence
  SiRNA target sequence
gaacatgaattggcttatcgcatcagt

SEQ ID NO: 140817 - DNA, 27 bp, Artificial sequence
  SiRNA target sequence
aacatgaattggcttatcgcatcagtg

SEQ ID NO: 140818 - DNA, 27 bp, Artificial sequence
  SiRNA target sequence
acatgaattggcttatcgcatcagtga

SEQ ID NO: 140819 - DNA, 27 bp, Artificial sequence
  SiRNA target sequence
catgaattggcttatcgcatcagtgat

SEQ ID NO: 140820 - DNA, 27 bp, Artificial sequence
  SiRNA target sequence
atgaattggcttatcgcatcagtgata

SEQ ID NO: 140821 - DNA, 27 bp, Artificial sequence
  SiRNA target sequence
tgaattggcttatcgcatcagtgatat

SEQ ID NO: 140822 - DNA, 27 bp, Artificial sequence
  SiRNA target sequence
gaattggcttatcgcatcagtgatata

SEQ ID NO: 140823 - DNA, 27 bp, Artificial sequence
  SiRNA target sequence
aattggcttatcgcatcagtgatatat

SEQ ID NO: 140824 - DNA, 27 bp, Artificial sequence
  SiRNA target sequence
attggcttatcgcatcagtgatatatt

SEQ ID NO: 140825 - DNA, 27 bp, Artificial sequence
  SiRNA target sequence
ttggcttatcgcatcagtgatatatta

SEQ ID NO: 140826 - DNA, 27 bp, Artificial sequence
  SiRNA target sequence
tggcttatcgcatcagtgatatattat

SEQ ID NO: 140827 - DNA, 27 bp, Artificial sequence
  SiRNA target sequence
ggcttatcgcatcagtgatatattatt

SEQ ID NO: 140828 - DNA, 27 bp, Artificial sequence
  SiRNA target sequence
gcttatcgcatcagtgatatattattt

SEQ ID NO: 140829 - DNA, 27 bp, Artificial sequence
  SiRNA target sequence
cttatcgcatcagtgatatattattta

SEQ ID NO: 140830 - DNA, 27 bp, Artificial sequence
  SiRNA target sequence
ttatcgcatcagtgatatattatttaa

SEQ ID NO: 140831 - DNA, 27 bp, Artificial sequence
  SiRNA target sequence
tatcgcatcagtgatatattatttaat

SEQ ID NO: 140832 - DNA, 27 bp, Artificial sequence
  SiRNA target sequence
atcgcatcagtgatatattatttaata

SEQ ID NO: 140833 - DNA, 27 bp, Artificial sequence
  SiRNA target sequence
tcgcatcagtgatatattatttaatag

SEQ ID NO: 140834 - DNA, 27 bp, Artificial sequence
  SiRNA target sequence
cgcatcagtgatatattatttaatagg

SEQ ID NO: 140835 - DNA, 27 bp, Artificial sequence
  SiRNA target sequence
gcatcagtgatatattatttaatagga

SEQ ID NO: 140836 - DNA, 27 bp, Artificial sequence
  SiRNA target sequence
catcagtgatatattatttaataggat

SEQ ID NO: 140837 - DNA, 27 bp, Artificial sequence
  SiRNA target sequence
atcagtgatatattatttaataggatg

SEQ ID NO: 140838 - DNA, 27 bp, Artificial sequence
  SiRNA target sequence
tcagtgatatattatttaataggatga

SEQ ID NO: 140839 - DNA, 27 bp, Artificial sequence
  SiRNA target sequence
cagtgatatattatttaataggatgat

SEQ ID NO: 140840 - DNA, 27 bp, Artificial sequence
  SiRNA target sequence
agtgatatattatttaataggatgatg

SEQ ID NO: 140841 - DNA, 27 bp, Artificial sequence
  SiRNA target sequence
gtgatatattatttaataggatgatga

SEQ ID NO: 140842 - DNA, 27 bp, Artificial sequence
  SiRNA target sequence
tgatatattatttaataggatgatgat

SEQ ID NO: 140843 - DNA, 27 bp, Artificial sequence
  SiRNA target sequence
gatatattatttaataggatgatgata

SEQ ID NO: 140844 - DNA, 27 bp, Artificial sequence
  SiRNA target sequence
atatattatttaataggatgatgatag

SEQ ID NO: 140845 - DNA, 27 bp, Artificial sequence
  SiRNA target sequence
tatattatttaataggatgatgatagg

SEQ ID NO: 140846 - DNA, 27 bp, Artificial sequence
  SiRNA target sequence
atattatttaataggatgatgatagga

SEQ ID NO: 140847 - DNA, 27 bp, Artificial sequence
  SiRNA target sequence
tattatttaataggatgatgataggat

SEQ ID NO: 140848 - DNA, 27 bp, Artificial sequence
  SiRNA target sequence
attatttaataggatgatgataggata

SEQ ID NO: 140849 - DNA, 27 bp, Artificial sequence
  SiRNA target sequence
ttatttaataggatgatgataggatac

SEQ ID NO: 140850 - DNA, 27 bp, Artificial sequence
  SiRNA target sequence
tatttaataggatgatgataggataca

SEQ ID NO: 140851 - DNA, 27 bp, Artificial sequence
  SiRNA target sequence
atttaataggatgatgataggatacat

SEQ ID NO: 140852 - DNA, 27 bp, Artificial sequence
  SiRNA target sequence
tttaataggatgatgataggatacatt

SEQ ID NO: 140853 - DNA, 27 bp, Artificial sequence
  SiRNA target sequence
ttaataggatgatgataggatacattg

SEQ ID NO: 140854 - DNA, 27 bp, Artificial sequence
  SiRNA target sequence
taataggatgatgataggatacattga

SEQ ID NO: 140855 - DNA, 27 bp, Artificial sequence
  SiRNA target sequence
aataggatgatgataggatacattgac

SEQ ID NO: 140856 - DNA, 27 bp, Artificial sequence
  SiRNA target sequence
ataggatgatgataggatacattgacg

SEQ ID NO: 140857 - DNA, 27 bp, Artificial sequence
  SiRNA target sequence
taggatgatgataggatacattgacgt

SEQ ID NO: 140858 - DNA, 27 bp, Artificial sequence
  SiRNA target sequence
aggatgatgataggatacattgacgtc

SEQ ID NO: 140859 - DNA, 27 bp, Artificial sequence
  SiRNA target sequence
ggatgatgataggatacattgacgtca

SEQ ID NO: 140860 - DNA, 27 bp, Artificial sequence
  SiRNA target sequence
gatgatgataggatacattgacgtcag

SEQ ID NO: 140861 - DNA, 27 bp, Artificial sequence
  SiRNA target sequence
atgatgataggatacattgacgtcaga

SEQ ID NO: 140862 - DNA, 27 bp, Artificial sequence
  SiRNA target sequence
tgatgataggatacattgacgtcagaa

SEQ ID NO: 140863 - DNA, 27 bp, Artificial sequence
  SiRNA target sequence
gatgataggatacattgacgtcagaag

SEQ ID NO: 140864 - DNA, 27 bp, Artificial sequence
  SiRNA target sequence
atgataggatacattgacgtcagaaga

SEQ ID NO: 140865 - DNA, 27 bp, Artificial sequence
  SiRNA target sequence
tgataggatacattgacgtcagaagag

SEQ ID NO: 140866 - DNA, 27 bp, Artificial sequence
  SiRNA target sequence
gataggatacattgacgtcagaagagc

SEQ ID NO: 140867 - DNA, 27 bp, Artificial sequence
  SiRNA target sequence
ataggatacattgacgtcagaagagca

SEQ ID NO: 140868 - DNA, 27 bp, Artificial sequence
  SiRNA target sequence
taggatacattgacgtcagaagagcat

SEQ ID NO: 140869 - DNA, 27 bp, Artificial sequence
  SiRNA target sequence
aggatacattgacgtcagaagagcatt

SEQ ID NO: 140870 - DNA, 27 bp, Artificial sequence
  SiRNA target sequence
ggatacattgacgtcagaagagcattt

SEQ ID NO: 140871 - DNA, 27 bp, Artificial sequence
  SiRNA target sequence
gatacattgacgtcagaagagcatttg

SEQ ID NO: 140872 - DNA, 27 bp, Artificial sequence
  SiRNA target sequence
atacattgacgtcagaagagcatttga

SEQ ID NO: 140873 - DNA, 27 bp, Artificial sequence
  SiRNA target sequence
tacattgacgtcagaagagcatttgat

SEQ ID NO: 140874 - DNA, 27 bp, Artificial sequence
  SiRNA target sequence
acattgacgtcagaagagcatttgatt

SEQ ID NO: 140875 - DNA, 27 bp, Artificial sequence
  SiRNA target sequence
cattgacgtcagaagagcatttgattt

SEQ ID NO: 140876 - DNA, 27 bp, Artificial sequence
  SiRNA target sequence
attgacgtcagaagagcatttgattta

SEQ ID NO: 140877 - DNA, 27 bp, Artificial sequence
  SiRNA target sequence
ttgacgtcagaagagcatttgatttaa

SEQ ID NO: 140878 - DNA, 27 bp, Artificial sequence
  SiRNA target sequence
tgacgtcagaagagcatttgatttaat

SEQ ID NO: 140879 - DNA, 27 bp, Artificial sequence
  SiRNA target sequence
gacgtcagaagagcatttgatttaatt

SEQ ID NO: 140880 - DNA, 27 bp, Artificial sequence
  SiRNA target sequence
acgtcagaagagcatttgatttaattg

SEQ ID NO: 140881 - DNA, 27 bp, Artificial sequence
  SiRNA target sequence
cgtcagaagagcatttgatttaattgg

SEQ ID NO: 140882 - DNA, 27 bp, Artificial sequence
  SiRNA target sequence
gtcagaagagcatttgatttaattggt

SEQ ID NO: 140883 - DNA, 27 bp, Artificial sequence
  SiRNA target sequence
tcagaagagcatttgatttaattggta

SEQ ID NO: 140884 - DNA, 27 bp, Artificial sequence
  SiRNA target sequence
cagaagagcatttgatttaattggtat

SEQ ID NO: 140885 - DNA, 27 bp, Artificial sequence
  SiRNA target sequence
agaagagcatttgatttaattggtata

SEQ ID NO: 140886 - DNA, 27 bp, Artificial sequence
  SiRNA target sequence
gaagagcatttgatttaattggtatag

SEQ ID NO: 140887 - DNA, 27 bp, Artificial sequence
  SiRNA target sequence
aagagcatttgatttaattggtatagt

SEQ ID NO: 140888 - DNA, 27 bp, Artificial sequence
  SiRNA target sequence
agagcatttgatttaattggtatagta

SEQ ID NO: 140889 - DNA, 27 bp, Artificial sequence
  SiRNA target sequence
gagcatttgatttaattggtatagtag

SEQ ID NO: 140890 - DNA, 27 bp, Artificial sequence
  SiRNA target sequence
agcatttgatttaattggtatagtagc

SEQ ID NO: 140891 - DNA, 27 bp, Artificial sequence
  SiRNA target sequence
gcatttgatttaattggtatagtagct

SEQ ID NO: 140892 - DNA, 27 bp, Artificial sequence
  SiRNA target sequence
catttgatttaattggtatagtagctg

SEQ ID NO: 140893 - DNA, 27 bp, Artificial sequence
  SiRNA target sequence
atttgatttaattggtatagtagctga

SEQ ID NO: 140894 - DNA, 27 bp, Artificial sequence
  SiRNA target sequence
tttgatttaattggtatagtagctgaa

SEQ ID NO: 140895 - DNA, 27 bp, Artificial sequence
  SiRNA target sequence
ttgatttaattggtatagtagctgaag

SEQ ID NO: 140896 - DNA, 27 bp, Artificial sequence
  SiRNA target sequence
tgatttaattggtatagtagctgaagt

SEQ ID NO: 140897 - DNA, 27 bp, Artificial sequence
  SiRNA target sequence
gatttaattggtatagtagctgaagta

SEQ ID NO: 140898 - DNA, 27 bp, Artificial sequence
  SiRNA target sequence
atttaattggtatagtagctgaagtaa

SEQ ID NO: 140899 - DNA, 27 bp, Artificial sequence
  SiRNA target sequence
tttaattggtatagtagctgaagtaat

SEQ ID NO: 140900 - DNA, 27 bp, Artificial sequence
  SiRNA target sequence
ttaattggtatagtagctgaagtaatg

SEQ ID NO: 140901 - DNA, 27 bp, Artificial sequence
  SiRNA target sequence
taattggtatagtagctgaagtaatga

SEQ ID NO: 140902 - DNA, 27 bp, Artificial sequence
  SiRNA target sequence
aattggtatagtagctgaagtaatgaa

SEQ ID NO: 140903 - DNA, 27 bp, Artificial sequence
  SiRNA target sequence
attggtatagtagctgaagtaatgaaa

SEQ ID NO: 140904 - DNA, 27 bp, Artificial sequence
  SiRNA target sequence
ttggtatagtagctgaagtaatgaaag

SEQ ID NO: 140905 - DNA, 27 bp, Artificial sequence
  SiRNA target sequence
tggtatagtagctgaagtaatgaaaga

SEQ ID NO: 140906 - DNA, 27 bp, Artificial sequence
  SiRNA target sequence
ggtatagtagctgaagtaatgaaagac

SEQ ID NO: 140907 - DNA, 27 bp, Artificial sequence
  SiRNA target sequence
gtatagtagctgaagtaatgaaagact

SEQ ID NO: 140908 - DNA, 27 bp, Artificial sequence
  SiRNA target sequence
tatagtagctgaagtaatgaaagacta

SEQ ID NO: 140909 - DNA, 27 bp, Artificial sequence
  SiRNA target sequence
atagtagctgaagtaatgaaagactat

SEQ ID NO: 140910 - DNA, 27 bp, Artificial sequence
  SiRNA target sequence
tagtagctgaagtaatgaaagactatt

SEQ ID NO: 140911 - DNA, 27 bp, Artificial sequence
  SiRNA target sequence
agtagctgaagtaatgaaagactatta

SEQ ID NO: 140912 - DNA, 27 bp, Artificial sequence
  SiRNA target sequence
gtagctgaagtaatgaaagactattac

SEQ ID NO: 140913 - DNA, 27 bp, Artificial sequence
  SiRNA target sequence
tagctgaagtaatgaaagactattacg

SEQ ID NO: 140914 - DNA, 27 bp, Artificial sequence
  SiRNA target sequence
agctgaagtaatgaaagactattacgg

SEQ ID NO: 140915 - DNA, 27 bp, Artificial sequence
  SiRNA target sequence
gctgaagtaatgaaagactattacgga

SEQ ID NO: 140916 - DNA, 27 bp, Artificial sequence
  SiRNA target sequence
ctgaagtaatgaaagactattacggat

SEQ ID NO: 140917 - DNA, 27 bp, Artificial sequence
  SiRNA target sequence
tgaagtaatgaaagactattacggatg

SEQ ID NO: 140918 - DNA, 27 bp, Artificial sequence
  SiRNA target sequence
gaagtaatgaaagactattacggatgg

SEQ ID NO: 140919 - DNA, 27 bp, Artificial sequence
  SiRNA target sequence
aagtaatgaaagactattacggatggg

SEQ ID NO: 140920 - DNA, 27 bp, Artificial sequence
  SiRNA target sequence
agtaatgaaagactattacggatggga

SEQ ID NO: 140921 - DNA, 27 bp, Artificial sequence
  SiRNA target sequence
gtaatgaaagactattacggatgggat

SEQ ID NO: 140922 - DNA, 27 bp, Artificial sequence
  SiRNA target sequence
taatgaaagactattacggatgggatc

SEQ ID NO: 140923 - DNA, 27 bp, Artificial sequence
  SiRNA target sequence
aatgaaagactattacggatgggatca

SEQ ID NO: 140924 - DNA, 27 bp, Artificial sequence
  SiRNA target sequence
atgaaagactattacggatgggatcag

SEQ ID NO: 140925 - DNA, 27 bp, Artificial sequence
  SiRNA target sequence
tgaaagactattacggatgggatcagc

SEQ ID NO: 140926 - DNA, 27 bp, Artificial sequence
  SiRNA target sequence
gaaagactattacggatgggatcagca

SEQ ID NO: 140927 - DNA, 27 bp, Artificial sequence
  SiRNA target sequence
aaagactattacggatgggatcagcaa

SEQ ID NO: 140928 - DNA, 27 bp, Artificial sequence
  SiRNA target sequence
aagactattacggatgggatcagcaaa

SEQ ID NO: 140929 - DNA, 27 bp, Artificial sequence
  SiRNA target sequence
agactattacggatgggatcagcaaag

SEQ ID NO: 140930 - DNA, 27 bp, Artificial sequence
  SiRNA target sequence
gactattacggatgggatcagcaaaga

SEQ ID NO: 140931 - DNA, 27 bp, Artificial sequence
  SiRNA target sequence
actattacggatgggatcagcaaagat

SEQ ID NO: 140932 - DNA, 27 bp, Artificial sequence
  SiRNA target sequence
ctattacggatgggatcagcaaagata

SEQ ID NO: 140933 - DNA, 27 bp, Artificial sequence
  SiRNA target sequence
tattacggatgggatcagcaaagatat

SEQ ID NO: 140934 - DNA, 27 bp, Artificial sequence
  SiRNA target sequence
attacggatgggatcagcaaagatata

SEQ ID NO: 140935 - DNA, 27 bp, Artificial sequence
  SiRNA target sequence
ttacggatgggatcagcaaagatataa

SEQ ID NO: 140936 - DNA, 27 bp, Artificial sequence
  SiRNA target sequence
tacggatgggatcagcaaagatataat

SEQ ID NO: 140937 - DNA, 27 bp, Artificial sequence
  SiRNA target sequence
acggatgggatcagcaaagatataatg

SEQ ID NO: 140938 - DNA, 27 bp, Artificial sequence
  SiRNA target sequence
cggatgggatcagcaaagatataatga

SEQ ID NO: 140939 - DNA, 27 bp, Artificial sequence
  SiRNA target sequence
ggatgggatcagcaaagatataatgaa

SEQ ID NO: 140940 - DNA, 27 bp, Artificial sequence
  SiRNA target sequence
gatgggatcagcaaagatataatgaag

SEQ ID NO: 140941 - DNA, 27 bp, Artificial sequence
  SiRNA target sequence
atgggatcagcaaagatataatgaaga

SEQ ID NO: 140942 - DNA, 27 bp, Artificial sequence
  SiRNA target sequence
tgggatcagcaaagatataatgaagaa

SEQ ID NO: 140943 - DNA, 27 bp, Artificial sequence
  SiRNA target sequence
gggatcagcaaagatataatgaagaaa

SEQ ID NO: 140944 - DNA, 27 bp, Artificial sequence
  SiRNA target sequence
ggatcagcaaagatataatgaagaaac

SEQ ID NO: 140945 - DNA, 27 bp, Artificial sequence
  SiRNA target sequence
gatcagcaaagatataatgaagaaaca

SEQ ID NO: 140946 - DNA, 27 bp, Artificial sequence
  SiRNA target sequence
atcagcaaagatataatgaagaaacaa

SEQ ID NO: 140947 - DNA, 27 bp, Artificial sequence
  SiRNA target sequence
tcagcaaagatataatgaagaaacaaa

SEQ ID NO: 140948 - DNA, 27 bp, Artificial sequence
  SiRNA target sequence
cagcaaagatataatgaagaaacaaaa

SEQ ID NO: 140949 - DNA, 27 bp, Artificial sequence
  SiRNA target sequence
agcaaagatataatgaagaaacaaaat

SEQ ID NO: 140950 - DNA, 27 bp, Artificial sequence
  SiRNA target sequence
gcaaagatataatgaagaaacaaaatt

SEQ ID NO: 140951 - DNA, 27 bp, Artificial sequence
  SiRNA target sequence
caaagatataatgaagaaacaaaatta

SEQ ID NO: 140952 - DNA, 27 bp, Artificial sequence
  SiRNA target sequence
aaagatataatgaagaaacaaaattat

SEQ ID NO: 140953 - DNA, 27 bp, Artificial sequence
  SiRNA target sequence
aagatataatgaagaaacaaaattatg

SEQ ID NO: 140954 - DNA, 27 bp, Artificial sequence
  SiRNA target sequence
agatataatgaagaaacaaaattatgc

SEQ ID NO: 140955 - DNA, 27 bp, Artificial sequence
  SiRNA target sequence
gatataatgaagaaacaaaattatgca

SEQ ID NO: 140956 - DNA, 27 bp, Artificial sequence
  SiRNA target sequence
atataatgaagaaacaaaattatgcat

SEQ ID NO: 140957 - DNA, 27 bp, Artificial sequence
  SiRNA target sequence
tataatgaagaaacaaaattatgcatg

SEQ ID NO: 140958 - DNA, 27 bp, Artificial sequence
  SiRNA target sequence
ataatgaagaaacaaaattatgcatgg

SEQ ID NO: 140959 - DNA, 27 bp, Artificial sequence
  SiRNA target sequence
taatgaagaaacaaaattatgcatgga

SEQ ID NO: 140960 - DNA, 27 bp, Artificial sequence
  SiRNA target sequence
aatgaagaaacaaaattatgcatggaa

SEQ ID NO: 140961 - DNA, 27 bp, Artificial sequence
  SiRNA target sequence
atgaagaaacaaaattatgcatggaaa

SEQ ID NO: 140962 - DNA, 27 bp, Artificial sequence
  SiRNA target sequence
tgaagaaacaaaattatgcatggaaat

SEQ ID NO: 140963 - DNA, 27 bp, Artificial sequence
  SiRNA target sequence
gaagaaacaaaattatgcatggaaatg

SEQ ID NO: 140964 - DNA, 27 bp, Artificial sequence
  SiRNA target sequence
aagaaacaaaattatgcatggaaatga

SEQ ID NO: 140965 - DNA, 27 bp, Artificial sequence
  SiRNA target sequence
agaaacaaaattatgcatggaaatgat

SEQ ID NO: 140966 - DNA, 27 bp, Artificial sequence
  SiRNA target sequence
gaaacaaaattatgcatggaaatgatg

SEQ ID NO: 140967 - DNA, 27 bp, Artificial sequence
  SiRNA target sequence
aaacaaaattatgcatggaaatgatgg

SEQ ID NO: 140968 - DNA, 27 bp, Artificial sequence
  SiRNA target sequence
aacaaaattatgcatggaaatgatgga

SEQ ID NO: 140969 - DNA, 27 bp, Artificial sequence
  SiRNA target sequence
acaaaattatgcatggaaatgatggaa

SEQ ID NO: 140970 - DNA, 27 bp, Artificial sequence
  SiRNA target sequence
caaaattatgcatggaaatgatggaaa

SEQ ID NO: 140971 - DNA, 27 bp, Artificial sequence
  SiRNA target sequence
aaaattatgcatggaaatgatggaaac

SEQ ID NO: 140972 - DNA, 27 bp, Artificial sequence
  SiRNA target sequence
aaattatgcatggaaatgatggaaact

SEQ ID NO: 140973 - DNA, 27 bp, Artificial sequence
  SiRNA target sequence
aattatgcatggaaatgatggaaactt

SEQ ID NO: 140974 - DNA, 27 bp, Artificial sequence
  SiRNA target sequence
attatgcatggaaatgatggaaacttg

SEQ ID NO: 140975 - DNA, 27 bp, Artificial sequence
  SiRNA target sequence
ttatgcatggaaatgatggaaacttgt

SEQ ID NO: 140976 - DNA, 27 bp, Artificial sequence
  SiRNA target sequence
tatgcatggaaatgatggaaacttgtg

SEQ ID NO: 140977 - DNA, 27 bp, Artificial sequence
  SiRNA target sequence
atgcatggaaatgatggaaacttgtgg

SEQ ID NO: 140978 - DNA, 27 bp, Artificial sequence
  SiRNA target sequence
tgcatggaaatgatggaaacttgtggt

SEQ ID NO: 140979 - DNA, 27 bp, Artificial sequence
  SiRNA target sequence
gcatggaaatgatggaaacttgtggtt

SEQ ID NO: 140980 - DNA, 27 bp, Artificial sequence
  SiRNA target sequence
catggaaatgatggaaacttgtggtta

SEQ ID NO: 140981 - DNA, 27 bp, Artificial sequence
  SiRNA target sequence
atggaaatgatggaaacttgtggttat

SEQ ID NO: 140982 - DNA, 27 bp, Artificial sequence
  SiRNA target sequence
tggaaatgatggaaacttgtggttata

SEQ ID NO: 140983 - DNA, 27 bp, Artificial sequence
  SiRNA target sequence
ggaaatgatggaaacttgtggttatag

SEQ ID NO: 140984 - DNA, 27 bp, Artificial sequence
  SiRNA target sequence
gaaatgatggaaacttgtggttatagt

SEQ ID NO: 140985 - DNA, 27 bp, Artificial sequence
  SiRNA target sequence
aaatgatggaaacttgtggttatagtt

SEQ ID NO: 140986 - DNA, 27 bp, Artificial sequence
  SiRNA target sequence
aatgatggaaacttgtggttatagttt

SEQ ID NO: 140987 - DNA, 27 bp, Artificial sequence
  SiRNA target sequence
atgatggaaacttgtggttatagttta

SEQ ID NO: 140988 - DNA, 27 bp, Artificial sequence
  SiRNA target sequence
tgatggaaacttgtggttatagtttat

SEQ ID NO: 140989 - DNA, 27 bp, Artificial sequence
  SiRNA target sequence
gatggaaacttgtggttatagtttatt

SEQ ID NO: 140990 - DNA, 27 bp, Artificial sequence
  SiRNA target sequence
atggaaacttgtggttatagtttatta

SEQ ID NO: 140991 - DNA, 27 bp, Artificial sequence
  SiRNA target sequence
tggaaacttgtggttatagtttattaa

SEQ ID NO: 140992 - DNA, 27 bp, Artificial sequence
  SiRNA target sequence
ggaaacttgtggttatagtttattaaa

SEQ ID NO: 140993 - DNA, 27 bp, Artificial sequence
  SiRNA target sequence
gaaacttgtggttatagtttattaaaa

SEQ ID NO: 140994 - DNA, 27 bp, Artificial sequence
  SiRNA target sequence
aaacttgtggttatagtttattaaaaa

SEQ ID NO: 140995 - DNA, 27 bp, Artificial sequence
  SiRNA target sequence
aacttgtggttatagtttattaaaaaa

SEQ ID NO: 140996 - DNA, 27 bp, Artificial sequence
  SiRNA target sequence
acttgtggttatagtttattaaaaaat

SEQ ID NO: 140997 - DNA, 27 bp, Artificial sequence
  SiRNA target sequence
cttgtggttatagtttattaaaaaatt

SEQ ID NO: 140998 - DNA, 27 bp, Artificial sequence
  SiRNA target sequence
ttgtggttatagtttattaaaaaatta

SEQ ID NO: 140999 - DNA, 27 bp, Artificial sequence
  SiRNA target sequence
tgtggttatagtttattaaaaaattaa

SEQ ID NO: 141000 - DNA, 19 bp, Artificial sequence
  SiRNA target sequence
ttaatttatgcataattga

SEQ ID NO: 141001 - DNA, 19 bp, Artificial sequence
  SiRNA target sequence
taatttatgcataattgac

SEQ ID NO: 141002 - DNA, 19 bp, Artificial sequence
  SiRNA target sequence
aatttatgcataattgacc

SEQ ID NO: 141003 - DNA, 19 bp, Artificial sequence
  SiRNA target sequence
atttatgcataattgacca

SEQ ID NO: 141004 - DNA, 19 bp, Artificial sequence
  SiRNA target sequence
tttatgcataattgaccat

SEQ ID NO: 141005 - DNA, 19 bp, Artificial sequence
  SiRNA target sequence
ttatgcataattgaccatc

SEQ ID NO: 141006 - DNA, 19 bp, Artificial sequence
  SiRNA target sequence
tatgcataattgaccatca

SEQ ID NO: 141007 - DNA, 19 bp, Artificial sequence
  SiRNA target sequence
atgcataattgaccatcat

SEQ ID NO: 141008 - DNA, 19 bp, Artificial sequence
  SiRNA target sequence
tgcataattgaccatcatc

SEQ ID NO: 141009 - DNA, 19 bp, Artificial sequence
  SiRNA target sequence
gcataattgaccatcatca

SEQ ID NO: 141010 - DNA, 19 bp, Artificial sequence
  SiRNA target sequence
cataattgaccatcatcag

SEQ ID NO: 141011 - DNA, 19 bp, Artificial sequence
  SiRNA target sequence
ataattgaccatcatcagt

SEQ ID NO: 141012 - DNA, 19 bp, Artificial sequence
  SiRNA target sequence
taattgaccatcatcagta

SEQ ID NO: 141013 - DNA, 19 bp, Artificial sequence
  SiRNA target sequence
aattgaccatcatcagtaa

SEQ ID NO: 141014 - DNA, 19 bp, Artificial sequence
  SiRNA target sequence
attgaccatcatcagtaat

SEQ ID NO: 141015 - DNA, 19 bp, Artificial sequence
  SiRNA target sequence
ttgaccatcatcagtaata

SEQ ID NO: 141016 - DNA, 19 bp, Artificial sequence
  SiRNA target sequence
tgaccatcatcagtaataa

SEQ ID NO: 141017 - DNA, 19 bp, Artificial sequence
  SiRNA target sequence
gaccatcatcagtaataaa

SEQ ID NO: 141018 - DNA, 19 bp, Artificial sequence
  SiRNA target sequence
accatcatcagtaataaac

SEQ ID NO: 141019 - DNA, 19 bp, Artificial sequence
  SiRNA target sequence
ccatcatcagtaataaaca

SEQ ID NO: 141020 - DNA, 19 bp, Artificial sequence
  SiRNA target sequence
catcatcagtaataaacac

SEQ ID NO: 141021 - DNA, 19 bp, Artificial sequence
  SiRNA target sequence
atcatcagtaataaacaca

SEQ ID NO: 141022 - DNA, 19 bp, Artificial sequence
  SiRNA target sequence
tcatcagtaataaacacat

SEQ ID NO: 141023 - DNA, 19 bp, Artificial sequence
  SiRNA target sequence
catcagtaataaacacatt

SEQ ID NO: 141024 - DNA, 19 bp, Artificial sequence
  SiRNA target sequence
atcagtaataaacacatta

SEQ ID NO: 141025 - DNA, 19 bp, Artificial sequence
  SiRNA target sequence
tcagtaataaacacattac

SEQ ID NO: 141026 - DNA, 19 bp, Artificial sequence
  SiRNA target sequence
cagtaataaacacattacc

SEQ ID NO: 141027 - DNA, 19 bp, Artificial sequence
  SiRNA target sequence
agtaataaacacattacct

SEQ ID NO: 141028 - DNA, 19 bp, Artificial sequence
  SiRNA target sequence
gtaataaacacattacctt

SEQ ID NO: 141029 - DNA, 19 bp, Artificial sequence
  SiRNA target sequence
taataaacacattaccttt

SEQ ID NO: 141030 - DNA, 19 bp, Artificial sequence
  SiRNA target sequence
aataaacacattacctttc

SEQ ID NO: 141031 - DNA, 19 bp, Artificial sequence
  SiRNA target sequence
ataaacacattacctttct

SEQ ID NO: 141032 - DNA, 19 bp, Artificial sequence
  SiRNA target sequence
taaacacattacctttctt

SEQ ID NO: 141033 - DNA, 19 bp, Artificial sequence
  SiRNA target sequence
aaacacattacctttcttt

SEQ ID NO: 141034 - DNA, 19 bp, Artificial sequence
  SiRNA target sequence
aacacattacctttctttt

SEQ ID NO: 141035 - DNA, 19 bp, Artificial sequence
  SiRNA target sequence
acacattacctttcttttc

SEQ ID NO: 141036 - DNA, 19 bp, Artificial sequence
  SiRNA target sequence
cacattacctttcttttct

SEQ ID NO: 141037 - DNA, 19 bp, Artificial sequence
  SiRNA target sequence
acattacctttcttttcta

SEQ ID NO: 141038 - DNA, 19 bp, Artificial sequence
  SiRNA target sequence
cattacctttcttttctac

SEQ ID NO: 141039 - DNA, 19 bp, Artificial sequence
  SiRNA target sequence
attacctttcttttctacc

SEQ ID NO: 141040 - DNA, 19 bp, Artificial sequence
  SiRNA target sequence
ttacctttcttttctacca

SEQ ID NO: 141041 - DNA, 19 bp, Artificial sequence
  SiRNA target sequence
tacctttcttttctaccac

SEQ ID NO: 141042 - DNA, 19 bp, Artificial sequence
  SiRNA target sequence
acctttcttttctaccaca

SEQ ID NO: 141043 - DNA, 19 bp, Artificial sequence
  SiRNA target sequence
cctttcttttctaccacac

SEQ ID NO: 141044 - DNA, 19 bp, Artificial sequence
  SiRNA target sequence
ctttcttttctaccacaca

SEQ ID NO: 141045 - DNA, 19 bp, Artificial sequence
  SiRNA target sequence
tttcttttctaccacacat

SEQ ID NO: 141046 - DNA, 19 bp, Artificial sequence
  SiRNA target sequence
ttcttttctaccacacatt

SEQ ID NO: 141047 - DNA, 19 bp, Artificial sequence
  SiRNA target sequence
tcttttctaccacacattt

SEQ ID NO: 141048 - DNA, 19 bp, Artificial sequence
  SiRNA target sequence
cttttctaccacacatttt

SEQ ID NO: 141049 - DNA, 19 bp, Artificial sequence
  SiRNA target sequence
ttttctaccacacattttt

SEQ ID NO: 141050 - DNA, 19 bp, Artificial sequence
  SiRNA target sequence
tttctaccacacatttttg

SEQ ID NO: 141051 - DNA, 19 bp, Artificial sequence
  SiRNA target sequence
ttctaccacacatttttga

SEQ ID NO: 141052 - DNA, 19 bp, Artificial sequence
  SiRNA target sequence
tctaccacacatttttgat

SEQ ID NO: 141053 - DNA, 19 bp, Artificial sequence
  SiRNA target sequence
ctaccacacatttttgata

SEQ ID NO: 141054 - DNA, 19 bp, Artificial sequence
  SiRNA target sequence
taccacacatttttgatat

SEQ ID NO: 141055 - DNA, 19 bp, Artificial sequence
  SiRNA target sequence
accacacatttttgatata

SEQ ID NO: 141056 - DNA, 19 bp, Artificial sequence
  SiRNA target sequence
ccacacatttttgatatat

SEQ ID NO: 141057 - DNA, 19 bp, Artificial sequence
  SiRNA target sequence
cacacatttttgatatatt

SEQ ID NO: 141058 - DNA, 19 bp, Artificial sequence
  SiRNA target sequence
acacatttttgatatattt

SEQ ID NO: 141059 - DNA, 19 bp, Artificial sequence
  SiRNA target sequence
cacatttttgatatatttc

SEQ ID NO: 141060 - DNA, 19 bp, Artificial sequence
  SiRNA target sequence
acatttttgatatatttca

SEQ ID NO: 141061 - DNA, 19 bp, Artificial sequence
  SiRNA target sequence
catttttgatatatttcat

SEQ ID NO: 141062 - DNA, 19 bp, Artificial sequence
  SiRNA target sequence
atttttgatatatttcatt

SEQ ID NO: 141063 - DNA, 19 bp, Artificial sequence
  SiRNA target sequence
tttttgatatatttcatta

SEQ ID NO: 141064 - DNA, 19 bp, Artificial sequence
  SiRNA target sequence
ttttgatatatttcattaa

SEQ ID NO: 141065 - DNA, 19 bp, Artificial sequence
  SiRNA target sequence
tttgatatatttcattaac

SEQ ID NO: 141066 - DNA, 19 bp, Artificial sequence
  SiRNA target sequence
ttgatatatttcattaact

SEQ ID NO: 141067 - DNA, 19 bp, Artificial sequence
  SiRNA target sequence
tgatatatttcattaacta

SEQ ID NO: 141068 - DNA, 19 bp, Artificial sequence
  SiRNA target sequence
gatatatttcattaactac

SEQ ID NO: 141069 - DNA, 19 bp, Artificial sequence
  SiRNA target sequence
atatatttcattaactaca

SEQ ID NO: 141070 - DNA, 19 bp, Artificial sequence
  SiRNA target sequence
tatatttcattaactacat

SEQ ID NO: 141071 - DNA, 19 bp, Artificial sequence
  SiRNA target sequence
atatttcattaactacatc

SEQ ID NO: 141072 - DNA, 19 bp, Artificial sequence
  SiRNA target sequence
tatttcattaactacatcc

SEQ ID NO: 141073 - DNA, 19 bp, Artificial sequence
  SiRNA target sequence
atttcattaactacatccc

SEQ ID NO: 141074 - DNA, 19 bp, Artificial sequence
  SiRNA target sequence
tttcattaactacatccca

SEQ ID NO: 141075 - DNA, 19 bp, Artificial sequence
  SiRNA target sequence
ttcattaactacatcccaa

SEQ ID NO: 141076 - DNA, 19 bp, Artificial sequence
  SiRNA target sequence
tcattaactacatcccaat

SEQ ID NO: 141077 - DNA, 19 bp, Artificial sequence
  SiRNA target sequence
cattaactacatcccaatc

SEQ ID NO: 141078 - DNA, 19 bp, Artificial sequence
  SiRNA target sequence
attaactacatcccaatca

SEQ ID NO: 141079 - DNA, 19 bp, Artificial sequence
  SiRNA target sequence
ttaactacatcccaatcaa

SEQ ID NO: 141080 - DNA, 19 bp, Artificial sequence
  SiRNA target sequence
taactacatcccaatcaat

SEQ ID NO: 141081 - DNA, 19 bp, Artificial sequence
  SiRNA target sequence
aactacatcccaatcaatt

SEQ ID NO: 141082 - DNA, 19 bp, Artificial sequence
  SiRNA target sequence
actacatcccaatcaatta

SEQ ID NO: 141083 - DNA, 19 bp, Artificial sequence
  SiRNA target sequence
ctacatcccaatcaattac

SEQ ID NO: 141084 - DNA, 19 bp, Artificial sequence
  SiRNA target sequence
tacatcccaatcaattaca

SEQ ID NO: 141085 - DNA, 19 bp, Artificial sequence
  SiRNA target sequence
acatcccaatcaattacat

SEQ ID NO: 141086 - DNA, 19 bp, Artificial sequence
  SiRNA target sequence
catcccaatcaattacatt

SEQ ID NO: 141087 - DNA, 19 bp, Artificial sequence
  SiRNA target sequence
atcccaatcaattacattc

SEQ ID NO: 141088 - DNA, 19 bp, Artificial sequence
  SiRNA target sequence
tcccaatcaattacattcc

SEQ ID NO: 141089 - DNA, 19 bp, Artificial sequence
  SiRNA target sequence
cccaatcaattacattcca

SEQ ID NO: 141090 - DNA, 19 bp, Artificial sequence
  SiRNA target sequence
ccaatcaattacattccac

SEQ ID NO: 141091 - DNA, 19 bp, Artificial sequence
  SiRNA target sequence
caatcaattacattccacc

SEQ ID NO: 141092 - DNA, 19 bp, Artificial sequence
  SiRNA target sequence
aatcaattacattccacca

SEQ ID NO: 141093 - DNA, 19 bp, Artificial sequence
  SiRNA target sequence
atcaattacattccaccat

SEQ ID NO: 141094 - DNA, 19 bp, Artificial sequence
  SiRNA target sequence
tcaattacattccaccatt

SEQ ID NO: 141095 - DNA, 19 bp, Artificial sequence
  SiRNA target sequence
caattacattccaccattc

SEQ ID NO: 141096 - DNA, 19 bp, Artificial sequence
  SiRNA target sequence
aattacattccaccattca

SEQ ID NO: 141097 - DNA, 19 bp, Artificial sequence
  SiRNA target sequence
attacattccaccattcat

SEQ ID NO: 141098 - DNA, 19 bp, Artificial sequence
  SiRNA target sequence
ttacattccaccattcatt

SEQ ID NO: 141099 - DNA, 19 bp, Artificial sequence
  SiRNA target sequence
tacattccaccattcatta

SEQ ID NO: 141100 - DNA, 19 bp, Artificial sequence
  SiRNA target sequence
acattccaccattcattaa

SEQ ID NO: 141101 - DNA, 19 bp, Artificial sequence
  SiRNA target sequence
cattccaccattcattaat

SEQ ID NO: 141102 - DNA, 19 bp, Artificial sequence
  SiRNA target sequence
attccaccattcattaatg

SEQ ID NO: 141103 - DNA, 19 bp, Artificial sequence
  SiRNA target sequence
ttccaccattcattaatgt

SEQ ID NO: 141104 - DNA, 19 bp, Artificial sequence
  SiRNA target sequence
tccaccattcattaatgta

SEQ ID NO: 141105 - DNA, 19 bp, Artificial sequence
  SiRNA target sequence
ccaccattcattaatgtat

SEQ ID NO: 141106 - DNA, 19 bp, Artificial sequence
  SiRNA target sequence
caccattcattaatgtatt

SEQ ID NO: 141107 - DNA, 19 bp, Artificial sequence
  SiRNA target sequence
accattcattaatgtattc

SEQ ID NO: 141108 - DNA, 19 bp, Artificial sequence
  SiRNA target sequence
ccattcattaatgtattct

SEQ ID NO: 141109 - DNA, 19 bp, Artificial sequence
  SiRNA target sequence
cattcattaatgtattctt

SEQ ID NO: 141110 - DNA, 19 bp, Artificial sequence
  SiRNA target sequence
attcattaatgtattcttt

SEQ ID NO: 141111 - DNA, 19 bp, Artificial sequence
  SiRNA target sequence
ttcattaatgtattctttt

SEQ ID NO: 141112 - DNA, 19 bp, Artificial sequence
  SiRNA target sequence
tcattaatgtattcttttc

SEQ ID NO: 141113 - DNA, 19 bp, Artificial sequence
  SiRNA target sequence
cattaatgtattcttttct

SEQ ID NO: 141114 - DNA, 19 bp, Artificial sequence
  SiRNA target sequence
attaatgtattcttttctc

SEQ ID NO: 141115 - DNA, 19 bp, Artificial sequence
  SiRNA target sequence
ttaatgtattcttttctcc

SEQ ID NO: 141116 - DNA, 19 bp, Artificial sequence
  SiRNA target sequence
taatgtattcttttctcct

SEQ ID NO: 141117 - DNA, 19 bp, Artificial sequence
  SiRNA target sequence
aatgtattcttttctccta

SEQ ID NO: 141118 - DNA, 19 bp, Artificial sequence
  SiRNA target sequence
atgtattcttttctcctat

SEQ ID NO: 141119 - DNA, 19 bp, Artificial sequence
  SiRNA target sequence
tgtattcttttctcctatt

SEQ ID NO: 141120 - DNA, 19 bp, Artificial sequence
  SiRNA target sequence
gtattcttttctcctattt

SEQ ID NO: 141121 - DNA, 19 bp, Artificial sequence
  SiRNA target sequence
tattcttttctcctatttt

SEQ ID NO: 141122 - DNA, 19 bp, Artificial sequence
  SiRNA target sequence
attcttttctcctattttt

SEQ ID NO: 141123 - DNA, 19 bp, Artificial sequence
  SiRNA target sequence
ttcttttctcctattttta

SEQ ID NO: 141124 - DNA, 19 bp, Artificial sequence
  SiRNA target sequence
tcttttctcctatttttat

SEQ ID NO: 141125 - DNA, 19 bp, Artificial sequence
  SiRNA target sequence
cttttctcctatttttata

SEQ ID NO: 141126 - DNA, 19 bp, Artificial sequence
  SiRNA target sequence
ttttctcctatttttatac

SEQ ID NO: 141127 - DNA, 19 bp, Artificial sequence
  SiRNA target sequence
tttctcctatttttatact

SEQ ID NO: 141128 - DNA, 19 bp, Artificial sequence
  SiRNA target sequence
ttctcctatttttatactg

SEQ ID NO: 141129 - DNA, 19 bp, Artificial sequence
  SiRNA target sequence
tctcctatttttatactgt

SEQ ID NO: 141130 - DNA, 19 bp, Artificial sequence
  SiRNA target sequence
ctcctatttttatactgta

SEQ ID NO: 141131 - DNA, 19 bp, Artificial sequence
  SiRNA target sequence
tcctatttttatactgtaa

SEQ ID NO: 141132 - DNA, 19 bp, Artificial sequence
  SiRNA target sequence
cctatttttatactgtaaa

SEQ ID NO: 141133 - DNA, 19 bp, Artificial sequence
  SiRNA target sequence
ctatttttatactgtaaat

SEQ ID NO: 141134 - DNA, 19 bp, Artificial sequence
  SiRNA target sequence
tatttttatactgtaaata

SEQ ID NO: 141135 - DNA, 19 bp, Artificial sequence
  SiRNA target sequence
atttttatactgtaaataa

SEQ ID NO: 141136 - DNA, 19 bp, Artificial sequence
  SiRNA target sequence
tttttatactgtaaataat

SEQ ID NO: 141137 - DNA, 19 bp, Artificial sequence
  SiRNA target sequence
ttttatactgtaaataata

SEQ ID NO: 141138 - DNA, 19 bp, Artificial sequence
  SiRNA target sequence
tttatactgtaaataatac

SEQ ID NO: 141139 - DNA, 19 bp, Artificial sequence
  SiRNA target sequence
ttatactgtaaataatacg

SEQ ID NO: 141140 - DNA, 19 bp, Artificial sequence
  SiRNA target sequence
tatactgtaaataatacgc

SEQ ID NO: 141141 - DNA, 19 bp, Artificial sequence
  SiRNA target sequence
atactgtaaataatacgca

SEQ ID NO: 141142 - DNA, 19 bp, Artificial sequence
  SiRNA target sequence
tactgtaaataatacgcat

SEQ ID NO: 141143 - DNA, 19 bp, Artificial sequence
  SiRNA target sequence
actgtaaataatacgcatg

SEQ ID NO: 141144 - DNA, 19 bp, Artificial sequence
  SiRNA target sequence
ctgtaaataatacgcatgt

SEQ ID NO: 141145 - DNA, 19 bp, Artificial sequence
  SiRNA target sequence
tgtaaataatacgcatgtt

SEQ ID NO: 141146 - DNA, 19 bp, Artificial sequence
  SiRNA target sequence
gtaaataatacgcatgttc

SEQ ID NO: 141147 - DNA, 19 bp, Artificial sequence
  SiRNA target sequence
taaataatacgcatgttcc

SEQ ID NO: 141148 - DNA, 19 bp, Artificial sequence
  SiRNA target sequence
aaataatacgcatgttccc

SEQ ID NO: 141149 - DNA, 19 bp, Artificial sequence
  SiRNA target sequence
aataatacgcatgttccca

SEQ ID NO: 141150 - DNA, 19 bp, Artificial sequence
  SiRNA target sequence
ataatacgcatgttcccat

SEQ ID NO: 141151 - DNA, 19 bp, Artificial sequence
  SiRNA target sequence
taatacgcatgttcccata

SEQ ID NO: 141152 - DNA, 19 bp, Artificial sequence
  SiRNA target sequence
aatacgcatgttcccatac

SEQ ID NO: 141153 - DNA, 19 bp, Artificial sequence
  SiRNA target sequence
atacgcatgttcccataca

SEQ ID NO: 141154 - DNA, 19 bp, Artificial sequence
  SiRNA target sequence
tacgcatgttcccatacat

SEQ ID NO: 141155 - DNA, 19 bp, Artificial sequence
  SiRNA target sequence
acgcatgttcccatacatc

SEQ ID NO: 141156 - DNA, 19 bp, Artificial sequence
  SiRNA target sequence
cgcatgttcccatacatca

SEQ ID NO: 141157 - DNA, 19 bp, Artificial sequence
  SiRNA target sequence
gcatgttcccatacatcaa

SEQ ID NO: 141158 - DNA, 19 bp, Artificial sequence
  SiRNA target sequence
catgttcccatacatcaag

SEQ ID NO: 141159 - DNA, 19 bp, Artificial sequence
  SiRNA target sequence
atgttcccatacatcaaga

SEQ ID NO: 141160 - DNA, 19 bp, Artificial sequence
  SiRNA target sequence
tgttcccatacatcaagac

SEQ ID NO: 141161 - DNA, 19 bp, Artificial sequence
  SiRNA target sequence
gttcccatacatcaagaca

SEQ ID NO: 141162 - DNA, 19 bp, Artificial sequence
  SiRNA target sequence
ttcccatacatcaagacat

SEQ ID NO: 141163 - DNA, 19 bp, Artificial sequence
  SiRNA target sequence
tcccatacatcaagacata

SEQ ID NO: 141164 - DNA, 19 bp, Artificial sequence
  SiRNA target sequence
cccatacatcaagacatag

SEQ ID NO: 141165 - DNA, 19 bp, Artificial sequence
  SiRNA target sequence
ccatacatcaagacatagt

SEQ ID NO: 141166 - DNA, 19 bp, Artificial sequence
  SiRNA target sequence
catacatcaagacatagta

SEQ ID NO: 141167 - DNA, 19 bp, Artificial sequence
  SiRNA target sequence
atacatcaagacatagtaa

SEQ ID NO: 141168 - DNA, 19 bp, Artificial sequence
  SiRNA target sequence
tacatcaagacatagtaaa

SEQ ID NO: 141169 - DNA, 19 bp, Artificial sequence
  SiRNA target sequence
acatcaagacatagtaaag

SEQ ID NO: 141170 - DNA, 19 bp, Artificial sequence
  SiRNA target sequence
catcaagacatagtaaagg

SEQ ID NO: 141171 - DNA, 19 bp, Artificial sequence
  SiRNA target sequence
atcaagacatagtaaagga

SEQ ID NO: 141172 - DNA, 19 bp, Artificial sequence
  SiRNA target sequence
tcaagacatagtaaaggaa

SEQ ID NO: 141173 - DNA, 19 bp, Artificial sequence
  SiRNA target sequence
caagacatagtaaaggaat

SEQ ID NO: 141174 - DNA, 19 bp, Artificial sequence
  SiRNA target sequence
aagacatagtaaaggaata

SEQ ID NO: 141175 - DNA, 19 bp, Artificial sequence
  SiRNA target sequence
agacatagtaaaggaatac

SEQ ID NO: 141176 - DNA, 19 bp, Artificial sequence
  SiRNA target sequence
gacatagtaaaggaataca

SEQ ID NO: 141177 - DNA, 19 bp, Artificial sequence
  SiRNA target sequence
acatagtaaaggaatacat

SEQ ID NO: 141178 - DNA, 19 bp, Artificial sequence
  SiRNA target sequence
catagtaaaggaatacatt

SEQ ID NO: 141179 - DNA, 19 bp, Artificial sequence
  SiRNA target sequence
atagtaaaggaatacattc

SEQ ID NO: 141180 - DNA, 19 bp, Artificial sequence
  SiRNA target sequence
tagtaaaggaatacattca

SEQ ID NO: 141181 - DNA, 19 bp, Artificial sequence
  SiRNA target sequence
agtaaaggaatacattcac

SEQ ID NO: 141182 - DNA, 19 bp, Artificial sequence
  SiRNA target sequence
gtaaaggaatacattcacc

SEQ ID NO: 141183 - DNA, 19 bp, Artificial sequence
  SiRNA target sequence
taaaggaatacattcacca

SEQ ID NO: 141184 - DNA, 19 bp, Artificial sequence
  SiRNA target sequence
aaaggaatacattcaccat

SEQ ID NO: 141185 - DNA, 19 bp, Artificial sequence
  SiRNA target sequence
aaggaatacattcaccatc

SEQ ID NO: 141186 - DNA, 19 bp, Artificial sequence
  SiRNA target sequence
aggaatacattcaccatcc

SEQ ID NO: 141187 - DNA, 19 bp, Artificial sequence
  SiRNA target sequence
ggaatacattcaccatcct

SEQ ID NO: 141188 - DNA, 19 bp, Artificial sequence
  SiRNA target sequence
gaatacattcaccatcctc

SEQ ID NO: 141189 - DNA, 19 bp, Artificial sequence
  SiRNA target sequence
aatacattcaccatcctcc

SEQ ID NO: 141190 - DNA, 19 bp, Artificial sequence
  SiRNA target sequence
atacattcaccatcctcca

SEQ ID NO: 141191 - DNA, 19 bp, Artificial sequence
  SiRNA target sequence
tacattcaccatcctccat

SEQ ID NO: 141192 - DNA, 19 bp, Artificial sequence
  SiRNA target sequence
acattcaccatcctccatc

SEQ ID NO: 141193 - DNA, 19 bp, Artificial sequence
  SiRNA target sequence
cattcaccatcctccatca

SEQ ID NO: 141194 - DNA, 19 bp, Artificial sequence
  SiRNA target sequence
attcaccatcctccatcat

SEQ ID NO: 141195 - DNA, 19 bp, Artificial sequence
  SiRNA target sequence
ttcaccatcctccatcata

SEQ ID NO: 141196 - DNA, 19 bp, Artificial sequence
  SiRNA target sequence
tcaccatcctccatcatag

SEQ ID NO: 141197 - DNA, 19 bp, Artificial sequence
  SiRNA target sequence
caccatcctccatcatagg

SEQ ID NO: 141198 - DNA, 19 bp, Artificial sequence
  SiRNA target sequence
accatcctccatcatagga

SEQ ID NO: 141199 - DNA, 19 bp, Artificial sequence
  SiRNA target sequence
ccatcctccatcataggat

SEQ ID NO: 141200 - DNA, 19 bp, Artificial sequence
  SiRNA target sequence
catcctccatcataggatt

SEQ ID NO: 141201 - DNA, 19 bp, Artificial sequence
  SiRNA target sequence
atcctccatcataggattg

SEQ ID NO: 141202 - DNA, 19 bp, Artificial sequence
  SiRNA target sequence
tcctccatcataggattgt

SEQ ID NO: 141203 - DNA, 19 bp, Artificial sequence
  SiRNA target sequence
cctccatcataggattgtc

SEQ ID NO: 141204 - DNA, 19 bp, Artificial sequence
  SiRNA target sequence
ctccatcataggattgtct

SEQ ID NO: 141205 - DNA, 19 bp, Artificial sequence
  SiRNA target sequence
tccatcataggattgtctt

SEQ ID NO: 141206 - DNA, 19 bp, Artificial sequence
  SiRNA target sequence
ccatcataggattgtcttg

SEQ ID NO: 141207 - DNA, 19 bp, Artificial sequence
  SiRNA target sequence
catcataggattgtcttga

SEQ ID NO: 141208 - DNA, 19 bp, Artificial sequence
  SiRNA target sequence
atcataggattgtcttgat

SEQ ID NO: 141209 - DNA, 19 bp, Artificial sequence
  SiRNA target sequence
tcataggattgtcttgatt

SEQ ID NO: 141210 - DNA, 19 bp, Artificial sequence
  SiRNA target sequence
cataggattgtcttgatta

SEQ ID NO: 141211 - DNA, 19 bp, Artificial sequence
  SiRNA target sequence
ataggattgtcttgattaa

SEQ ID NO: 141212 - DNA, 19 bp, Artificial sequence
  SiRNA target sequence
taggattgtcttgattaac

SEQ ID NO: 141213 - DNA, 19 bp, Artificial sequence
  SiRNA target sequence
aggattgtcttgattaaca

SEQ ID NO: 141214 - DNA, 19 bp, Artificial sequence
  SiRNA target sequence
ggattgtcttgattaacac

SEQ ID NO: 141215 - DNA, 19 bp, Artificial sequence
  SiRNA target sequence
gattgtcttgattaacact

SEQ ID NO: 141216 - DNA, 19 bp, Artificial sequence
  SiRNA target sequence
attgtcttgattaacactg

SEQ ID NO: 141217 - DNA, 19 bp, Artificial sequence
  SiRNA target sequence
ttgtcttgattaacactgg

SEQ ID NO: 141218 - DNA, 19 bp, Artificial sequence
  SiRNA target sequence
tgtcttgattaacactggt

SEQ ID NO: 141219 - DNA, 19 bp, Artificial sequence
  SiRNA target sequence
gtcttgattaacactggtc

SEQ ID NO: 141220 - DNA, 19 bp, Artificial sequence
  SiRNA target sequence
tcttgattaacactggtct

SEQ ID NO: 141221 - DNA, 19 bp, Artificial sequence
  SiRNA target sequence
cttgattaacactggtctt

SEQ ID NO: 141222 - DNA, 19 bp, Artificial sequence
  SiRNA target sequence
ttgattaacactggtctta

SEQ ID NO: 141223 - DNA, 19 bp, Artificial sequence
  SiRNA target sequence
tgattaacactggtcttaa

SEQ ID NO: 141224 - DNA, 19 bp, Artificial sequence
  SiRNA target sequence
gattaacactggtcttaat

SEQ ID NO: 141225 - DNA, 19 bp, Artificial sequence
  SiRNA target sequence
attaacactggtcttaata

SEQ ID NO: 141226 - DNA, 19 bp, Artificial sequence
  SiRNA target sequence
ttaacactggtcttaatac

SEQ ID NO: 141227 - DNA, 19 bp, Artificial sequence
  SiRNA target sequence
taacactggtcttaataca

SEQ ID NO: 141228 - DNA, 19 bp, Artificial sequence
  SiRNA target sequence
aacactggtcttaatacac

SEQ ID NO: 141229 - DNA, 19 bp, Artificial sequence
  SiRNA target sequence
acactggtcttaatacaca

SEQ ID NO: 141230 - DNA, 19 bp, Artificial sequence
  SiRNA target sequence
cactggtcttaatacacaa

SEQ ID NO: 141231 - DNA, 19 bp, Artificial sequence
  SiRNA target sequence
actggtcttaatacacaat

SEQ ID NO: 141232 - DNA, 19 bp, Artificial sequence
  SiRNA target sequence
ctggtcttaatacacaatt

SEQ ID NO: 141233 - DNA, 19 bp, Artificial sequence
  SiRNA target sequence
tggtcttaatacacaattt

SEQ ID NO: 141234 - DNA, 19 bp, Artificial sequence
  SiRNA target sequence
ggtcttaatacacaattta

SEQ ID NO: 141235 - DNA, 19 bp, Artificial sequence
  SiRNA target sequence
gtcttaatacacaatttat

SEQ ID NO: 141236 - DNA, 19 bp, Artificial sequence
  SiRNA target sequence
tcttaatacacaatttatc

SEQ ID NO: 141237 - DNA, 19 bp, Artificial sequence
  SiRNA target sequence
cttaatacacaatttatct

SEQ ID NO: 141238 - DNA, 19 bp, Artificial sequence
  SiRNA target sequence
ttaatacacaatttatctt

SEQ ID NO: 141239 - DNA, 19 bp, Artificial sequence
  SiRNA target sequence
taatacacaatttatcttt

SEQ ID NO: 141240 - DNA, 19 bp, Artificial sequence
  SiRNA target sequence
aatacacaatttatcttta

SEQ ID NO: 141241 - DNA, 19 bp, Artificial sequence
  SiRNA target sequence
atacacaatttatctttat

SEQ ID NO: 141242 - DNA, 19 bp, Artificial sequence
  SiRNA target sequence
tacacaatttatctttata

SEQ ID NO: 141243 - DNA, 19 bp, Artificial sequence
  SiRNA target sequence
acacaatttatctttatat

SEQ ID NO: 141244 - DNA, 19 bp, Artificial sequence
  SiRNA target sequence
cacaatttatctttatata

SEQ ID NO: 141245 - DNA, 19 bp, Artificial sequence
  SiRNA target sequence
acaatttatctttatatat

SEQ ID NO: 141246 - DNA, 19 bp, Artificial sequence
  SiRNA target sequence
caatttatctttatatatc

SEQ ID NO: 141247 - DNA, 19 bp, Artificial sequence
  SiRNA target sequence
aatttatctttatatatca

SEQ ID NO: 141248 - DNA, 19 bp, Artificial sequence
  SiRNA target sequence
atttatctttatatatcaa

SEQ ID NO: 141249 - DNA, 19 bp, Artificial sequence
  SiRNA target sequence
tttatctttatatatcaac

SEQ ID NO: 141250 - DNA, 19 bp, Artificial sequence
  SiRNA target sequence
ttatctttatatatcaacc

SEQ ID NO: 141251 - DNA, 19 bp, Artificial sequence
  SiRNA target sequence
tatctttatatatcaacca

SEQ ID NO: 141252 - DNA, 19 bp, Artificial sequence
  SiRNA target sequence
atctttatatatcaaccac

SEQ ID NO: 141253 - DNA, 19 bp, Artificial sequence
  SiRNA target sequence
tctttatatatcaaccaca

SEQ ID NO: 141254 - DNA, 19 bp, Artificial sequence
  SiRNA target sequence
ctttatatatcaaccacac

SEQ ID NO: 141255 - DNA, 19 bp, Artificial sequence
  SiRNA target sequence
tttatatatcaaccacacc

SEQ ID NO: 141256 - DNA, 19 bp, Artificial sequence
  SiRNA target sequence
ttatatatcaaccacaccc

SEQ ID NO: 141257 - DNA, 19 bp, Artificial sequence
  SiRNA target sequence
tatatatcaaccacaccca

SEQ ID NO: 141258 - DNA, 19 bp, Artificial sequence
  SiRNA target sequence
atatatcaaccacacccat

SEQ ID NO: 141259 - DNA, 19 bp, Artificial sequence
  SiRNA target sequence
tatatcaaccacacccatc

SEQ ID NO: 141260 - DNA, 19 bp, Artificial sequence
  SiRNA target sequence
atatcaaccacacccatcc

SEQ ID NO: 141261 - DNA, 19 bp, Artificial sequence
  SiRNA target sequence
tatcaaccacacccatcct

SEQ ID NO: 141262 - DNA, 19 bp, Artificial sequence
  SiRNA target sequence
atcaaccacacccatcctg

SEQ ID NO: 141263 - DNA, 19 bp, Artificial sequence
  SiRNA target sequence
tcaaccacacccatcctga

SEQ ID NO: 141264 - DNA, 19 bp, Artificial sequence
  SiRNA target sequence
caaccacacccatcctgat

SEQ ID NO: 141265 - DNA, 19 bp, Artificial sequence
  SiRNA target sequence
aaccacacccatcctgatc

SEQ ID NO: 141266 - DNA, 19 bp, Artificial sequence
  SiRNA target sequence
accacacccatcctgatcc

SEQ ID NO: 141267 - DNA, 19 bp, Artificial sequence
  SiRNA target sequence
ccacacccatcctgatcca

SEQ ID NO: 141268 - DNA, 19 bp, Artificial sequence
  SiRNA target sequence
cacacccatcctgatccaa

SEQ ID NO: 141269 - DNA, 19 bp, Artificial sequence
  SiRNA target sequence
acacccatcctgatccaaa

SEQ ID NO: 141270 - DNA, 19 bp, Artificial sequence
  SiRNA target sequence
cacccatcctgatccaaat

SEQ ID NO: 141271 - DNA, 19 bp, Artificial sequence
  SiRNA target sequence
acccatcctgatccaaata

SEQ ID NO: 141272 - DNA, 19 bp, Artificial sequence
  SiRNA target sequence
cccatcctgatccaaataa

SEQ ID NO: 141273 - DNA, 19 bp, Artificial sequence
  SiRNA target sequence
ccatcctgatccaaataat

SEQ ID NO: 141274 - DNA, 19 bp, Artificial sequence
  SiRNA target sequence
catcctgatccaaataatt

SEQ ID NO: 141275 - DNA, 19 bp, Artificial sequence
  SiRNA target sequence
atcctgatccaaataattt

SEQ ID NO: 141276 - DNA, 19 bp, Artificial sequence
  SiRNA target sequence
tcctgatccaaataatttt

SEQ ID NO: 141277 - DNA, 19 bp, Artificial sequence
  SiRNA target sequence
cctgatccaaataatttta

SEQ ID NO: 141278 - DNA, 19 bp, Artificial sequence
  SiRNA target sequence
ctgatccaaataattttac

SEQ ID NO: 141279 - DNA, 19 bp, Artificial sequence
  SiRNA target sequence
tgatccaaataattttaca

SEQ ID NO: 141280 - DNA, 19 bp, Artificial sequence
  SiRNA target sequence
gatccaaataattttacag

SEQ ID NO: 141281 - DNA, 19 bp, Artificial sequence
  SiRNA target sequence
atccaaataattttacagc

SEQ ID NO: 141282 - DNA, 19 bp, Artificial sequence
  SiRNA target sequence
tccaaataattttacagct

SEQ ID NO: 141283 - DNA, 19 bp, Artificial sequence
  SiRNA target sequence
ccaaataattttacagctt

SEQ ID NO: 141284 - DNA, 19 bp, Artificial sequence
  SiRNA target sequence
caaataattttacagcttc

SEQ ID NO: 141285 - DNA, 19 bp, Artificial sequence
  SiRNA target sequence
aaataattttacagcttca

SEQ ID NO: 141286 - DNA, 19 bp, Artificial sequence
  SiRNA target sequence
aataattttacagcttcag

SEQ ID NO: 141287 - DNA, 19 bp, Artificial sequence
  SiRNA target sequence
ataattttacagcttcagt

SEQ ID NO: 141288 - DNA, 19 bp, Artificial sequence
  SiRNA target sequence
taattttacagcttcagta

SEQ ID NO: 141289 - DNA, 19 bp, Artificial sequence
  SiRNA target sequence
aattttacagcttcagtat

SEQ ID NO: 141290 - DNA, 19 bp, Artificial sequence
  SiRNA target sequence
attttacagcttcagtatt

SEQ ID NO: 141291 - DNA, 19 bp, Artificial sequence
  SiRNA target sequence
ttttacagcttcagtatta

SEQ ID NO: 141292 - DNA, 19 bp, Artificial sequence
  SiRNA target sequence
tttacagcttcagtattaa

SEQ ID NO: 141293 - DNA, 19 bp, Artificial sequence
  SiRNA target sequence
ttacagcttcagtattaaa

SEQ ID NO: 141294 - DNA, 19 bp, Artificial sequence
  SiRNA target sequence
tacagcttcagtattaaaa

SEQ ID NO: 141295 - DNA, 19 bp, Artificial sequence
  SiRNA target sequence
acagcttcagtattaaaat

SEQ ID NO: 141296 - DNA, 19 bp, Artificial sequence
  SiRNA target sequence
cagcttcagtattaaaatt

SEQ ID NO: 141297 - DNA, 19 bp, Artificial sequence
  SiRNA target sequence
agcttcagtattaaaattc

SEQ ID NO: 141298 - DNA, 19 bp, Artificial sequence
  SiRNA target sequence
gcttcagtattaaaattct

SEQ ID NO: 141299 - DNA, 19 bp, Artificial sequence
  SiRNA target sequence
cttcagtattaaaattctc

SEQ ID NO: 141300 - DNA, 19 bp, Artificial sequence
  SiRNA target sequence
ttcagtattaaaattctcc

SEQ ID NO: 141301 - DNA, 19 bp, Artificial sequence
  SiRNA target sequence
tcagtattaaaattctcct

SEQ ID NO: 141302 - DNA, 19 bp, Artificial sequence
  SiRNA target sequence
cagtattaaaattctcctt

SEQ ID NO: 141303 - DNA, 19 bp, Artificial sequence
  SiRNA target sequence
agtattaaaattctcctta

SEQ ID NO: 141304 - DNA, 19 bp, Artificial sequence
  SiRNA target sequence
gtattaaaattctccttaa

SEQ ID NO: 141305 - DNA, 19 bp, Artificial sequence
  SiRNA target sequence
tattaaaattctccttaaa

SEQ ID NO: 141306 - DNA, 19 bp, Artificial sequence
  SiRNA target sequence
attaaaattctccttaaat

SEQ ID NO: 141307 - DNA, 19 bp, Artificial sequence
  SiRNA target sequence
ttaaaattctccttaaatt

SEQ ID NO: 141308 - DNA, 19 bp, Artificial sequence
  SiRNA target sequence
taaaattctccttaaattt

SEQ ID NO: 141309 - DNA, 19 bp, Artificial sequence
  SiRNA target sequence
aaaattctccttaaattta

SEQ ID NO: 141310 - DNA, 19 bp, Artificial sequence
  SiRNA target sequence
aaattctccttaaatttat

SEQ ID NO: 141311 - DNA, 19 bp, Artificial sequence
  SiRNA target sequence
aattctccttaaatttatt

SEQ ID NO: 141312 - DNA, 19 bp, Artificial sequence
  SiRNA target sequence
attctccttaaatttattt

SEQ ID NO: 141313 - DNA, 19 bp, Artificial sequence
  SiRNA target sequence
ttctccttaaatttattta

SEQ ID NO: 141314 - DNA, 19 bp, Artificial sequence
  SiRNA target sequence
tctccttaaatttatttat

SEQ ID NO: 141315 - DNA, 19 bp, Artificial sequence
  SiRNA target sequence
ctccttaaatttatttatt

SEQ ID NO: 141316 - DNA, 19 bp, Artificial sequence
  SiRNA target sequence
tccttaaatttatttattg

SEQ ID NO: 141317 - DNA, 19 bp, Artificial sequence
  SiRNA target sequence
ccttaaatttatttattga

SEQ ID NO: 141318 - DNA, 19 bp, Artificial sequence
  SiRNA target sequence
cttaaatttatttattgat

SEQ ID NO: 141319 - DNA, 19 bp, Artificial sequence
  SiRNA target sequence
ttaaatttatttattgatc

SEQ ID NO: 141320 - DNA, 19 bp, Artificial sequence
  SiRNA target sequence
taaatttatttattgatcc

SEQ ID NO: 141321 - DNA, 19 bp, Artificial sequence
  SiRNA target sequence
aaatttatttattgatcca

SEQ ID NO: 141322 - DNA, 19 bp, Artificial sequence
  SiRNA target sequence
aatttatttattgatccaa

SEQ ID NO: 141323 - DNA, 19 bp, Artificial sequence
  SiRNA target sequence
atttatttattgatccaaa

SEQ ID NO: 141324 - DNA, 19 bp, Artificial sequence
  SiRNA target sequence
tttatttattgatccaaag

SEQ ID NO: 141325 - DNA, 19 bp, Artificial sequence
  SiRNA target sequence
ttatttattgatccaaagt

SEQ ID NO: 141326 - DNA, 19 bp, Artificial sequence
  SiRNA target sequence
tatttattgatccaaagtc

SEQ ID NO: 141327 - DNA, 19 bp, Artificial sequence
  SiRNA target sequence
atttattgatccaaagtct

SEQ ID NO: 141328 - DNA, 19 bp, Artificial sequence
  SiRNA target sequence
tttattgatccaaagtctt

SEQ ID NO: 141329 - DNA, 19 bp, Artificial sequence
  SiRNA target sequence
ttattgatccaaagtcttt

SEQ ID NO: 141330 - DNA, 19 bp, Artificial sequence
  SiRNA target sequence
tattgatccaaagtctttt

SEQ ID NO: 141331 - DNA, 19 bp, Artificial sequence
  SiRNA target sequence
attgatccaaagtctttta

SEQ ID NO: 141332 - DNA, 19 bp, Artificial sequence
  SiRNA target sequence
ttgatccaaagtcttttat

SEQ ID NO: 141333 - DNA, 19 bp, Artificial sequence
  SiRNA target sequence
tgatccaaagtcttttatt

SEQ ID NO: 141334 - DNA, 19 bp, Artificial sequence
  SiRNA target sequence
gatccaaagtcttttatta

SEQ ID NO: 141335 - DNA, 19 bp, Artificial sequence
  SiRNA target sequence
atccaaagtcttttattat

SEQ ID NO: 141336 - DNA, 19 bp, Artificial sequence
  SiRNA target sequence
tccaaagtcttttattata

SEQ ID NO: 141337 - DNA, 19 bp, Artificial sequence
  SiRNA target sequence
ccaaagtcttttattatag

SEQ ID NO: 141338 - DNA, 19 bp, Artificial sequence
  SiRNA target sequence
caaagtcttttattatagc

SEQ ID NO: 141339 - DNA, 19 bp, Artificial sequence
  SiRNA target sequence
aaagtcttttattatagca

SEQ ID NO: 141340 - DNA, 19 bp, Artificial sequence
  SiRNA target sequence
aagtcttttattatagcac

SEQ ID NO: 141341 - DNA, 19 bp, Artificial sequence
  SiRNA target sequence
agtcttttattatagcact

SEQ ID NO: 141342 - DNA, 19 bp, Artificial sequence
  SiRNA target sequence
gtcttttattatagcactt

SEQ ID NO: 141343 - DNA, 19 bp, Artificial sequence
  SiRNA target sequence
tcttttattatagcacttt

SEQ ID NO: 141344 - DNA, 19 bp, Artificial sequence
  SiRNA target sequence
cttttattatagcactttc

SEQ ID NO: 141345 - DNA, 19 bp, Artificial sequence
  SiRNA target sequence
ttttattatagcactttcc

SEQ ID NO: 141346 - DNA, 19 bp, Artificial sequence
  SiRNA target sequence
tttattatagcactttcca

SEQ ID NO: 141347 - DNA, 19 bp, Artificial sequence
  SiRNA target sequence
ttattatagcactttccaa

SEQ ID NO: 141348 - DNA, 19 bp, Artificial sequence
  SiRNA target sequence
tattatagcactttccaac

SEQ ID NO: 141349 - DNA, 19 bp, Artificial sequence
  SiRNA target sequence
attatagcactttccaact

SEQ ID NO: 141350 - DNA, 19 bp, Artificial sequence
  SiRNA target sequence
ttatagcactttccaactg

SEQ ID NO: 141351 - DNA, 19 bp, Artificial sequence
  SiRNA target sequence
tatagcactttccaactgg

SEQ ID NO: 141352 - DNA, 19 bp, Artificial sequence
  SiRNA target sequence
atagcactttccaactggg

SEQ ID NO: 141353 - DNA, 19 bp, Artificial sequence
  SiRNA target sequence
tagcactttccaactggga

SEQ ID NO: 141354 - DNA, 19 bp, Artificial sequence
  SiRNA target sequence
agcactttccaactgggaa

SEQ ID NO: 141355 - DNA, 19 bp, Artificial sequence
  SiRNA target sequence
gcactttccaactgggaag

SEQ ID NO: 141356 - DNA, 19 bp, Artificial sequence
  SiRNA target sequence
cactttccaactgggaaga

SEQ ID NO: 141357 - DNA, 19 bp, Artificial sequence
  SiRNA target sequence
actttccaactgggaagaa

SEQ ID NO: 141358 - DNA, 19 bp, Artificial sequence
  SiRNA target sequence
ctttccaactgggaagaaa

SEQ ID NO: 141359 - DNA, 19 bp, Artificial sequence
  SiRNA target sequence
tttccaactgggaagaaat

SEQ ID NO: 141360 - DNA, 19 bp, Artificial sequence
  SiRNA target sequence
ttccaactgggaagaaatc

SEQ ID NO: 141361 - DNA, 19 bp, Artificial sequence
  SiRNA target sequence
tccaactgggaagaaatct

SEQ ID NO: 141362 - DNA, 19 bp, Artificial sequence
  SiRNA target sequence
ccaactgggaagaaatctt

SEQ ID NO: 141363 - DNA, 19 bp, Artificial sequence
  SiRNA target sequence
caactgggaagaaatcttt

SEQ ID NO: 141364 - DNA, 19 bp, Artificial sequence
  SiRNA target sequence
aactgggaagaaatctttt

SEQ ID NO: 141365 - DNA, 19 bp, Artificial sequence
  SiRNA target sequence
actgggaagaaatcttttt

SEQ ID NO: 141366 - DNA, 19 bp, Artificial sequence
  SiRNA target sequence
ctgggaagaaatcttttta

SEQ ID NO: 141367 - DNA, 19 bp, Artificial sequence
  SiRNA target sequence
tgggaagaaatctttttat

SEQ ID NO: 141368 - DNA, 19 bp, Artificial sequence
  SiRNA target sequence
gggaagaaatctttttatt

SEQ ID NO: 141369 - DNA, 19 bp, Artificial sequence
  SiRNA target sequence
ggaagaaatctttttattt

SEQ ID NO: 141370 - DNA, 19 bp, Artificial sequence
  SiRNA target sequence
gaagaaatctttttatttt

SEQ ID NO: 141371 - DNA, 19 bp, Artificial sequence
  SiRNA target sequence
aagaaatctttttattttc

SEQ ID NO: 141372 - DNA, 19 bp, Artificial sequence
  SiRNA target sequence
agaaatctttttattttct

SEQ ID NO: 141373 - DNA, 19 bp, Artificial sequence
  SiRNA target sequence
gaaatctttttattttctg

SEQ ID NO: 141374 - DNA, 19 bp, Artificial sequence
  SiRNA target sequence
aaatctttttattttctgg

SEQ ID NO: 141375 - DNA, 19 bp, Artificial sequence
  SiRNA target sequence
aatctttttattttctggt

SEQ ID NO: 141376 - DNA, 19 bp, Artificial sequence
  SiRNA target sequence
atctttttattttctggtg

SEQ ID NO: 141377 - DNA, 19 bp, Artificial sequence
  SiRNA target sequence
tctttttattttctggtga

SEQ ID NO: 141378 - DNA, 19 bp, Artificial sequence
  SiRNA target sequence
ctttttattttctggtgac

SEQ ID NO: 141379 - DNA, 19 bp, Artificial sequence
  SiRNA target sequence
tttttattttctggtgaca

SEQ ID NO: 141380 - DNA, 19 bp, Artificial sequence
  SiRNA target sequence
ttttattttctggtgacat

SEQ ID NO: 141381 - DNA, 19 bp, Artificial sequence
  SiRNA target sequence
tttattttctggtgacatt

SEQ ID NO: 141382 - DNA, 19 bp, Artificial sequence
  SiRNA target sequence
ttattttctggtgacatta

SEQ ID NO: 141383 - DNA, 19 bp, Artificial sequence
  SiRNA target sequence
tattttctggtgacattac

SEQ ID NO: 141384 - DNA, 19 bp, Artificial sequence
  SiRNA target sequence
attttctggtgacattacc

SEQ ID NO: 141385 - DNA, 19 bp, Artificial sequence
  SiRNA target sequence
ttttctggtgacattacca

SEQ ID NO: 141386 - DNA, 19 bp, Artificial sequence
  SiRNA target sequence
tttctggtgacattaccaa

SEQ ID NO: 141387 - DNA, 19 bp, Artificial sequence
  SiRNA target sequence
ttctggtgacattaccaac

SEQ ID NO: 141388 - DNA, 19 bp, Artificial sequence
  SiRNA target sequence
tctggtgacattaccaacc

SEQ ID NO: 141389 - DNA, 19 bp, Artificial sequence
  SiRNA target sequence
ctggtgacattaccaacca

SEQ ID NO: 141390 - DNA, 19 bp, Artificial sequence
  SiRNA target sequence
tggtgacattaccaaccag

SEQ ID NO: 141391 - DNA, 19 bp, Artificial sequence
  SiRNA target sequence
ggtgacattaccaaccaga

SEQ ID NO: 141392 - DNA, 19 bp, Artificial sequence
  SiRNA target sequence
gtgacattaccaaccagaa

SEQ ID NO: 141393 - DNA, 19 bp, Artificial sequence
  SiRNA target sequence
tgacattaccaaccagaaa

SEQ ID NO: 141394 - DNA, 19 bp, Artificial sequence
  SiRNA target sequence
gacattaccaaccagaaaa

SEQ ID NO: 141395 - DNA, 19 bp, Artificial sequence
  SiRNA target sequence
acattaccaaccagaaaag

SEQ ID NO: 141396 - DNA, 19 bp, Artificial sequence
  SiRNA target sequence
cattaccaaccagaaaaga

SEQ ID NO: 141397 - DNA, 19 bp, Artificial sequence
  SiRNA target sequence
attaccaaccagaaaagac

SEQ ID NO: 141398 - DNA, 19 bp, Artificial sequence
  SiRNA target sequence
ttaccaaccagaaaagact

SEQ ID NO: 141399 - DNA, 19 bp, Artificial sequence
  SiRNA target sequence
taccaaccagaaaagacta

SEQ ID NO: 141400 - DNA, 19 bp, Artificial sequence
  SiRNA target sequence
accaaccagaaaagactat

SEQ ID NO: 141401 - DNA, 19 bp, Artificial sequence
  SiRNA target sequence
ccaaccagaaaagactatg

SEQ ID NO: 141402 - DNA, 19 bp, Artificial sequence
  SiRNA target sequence
caaccagaaaagactatgg

SEQ ID NO: 141403 - DNA, 19 bp, Artificial sequence
  SiRNA target sequence
aaccagaaaagactatggt

SEQ ID NO: 141404 - DNA, 19 bp, Artificial sequence
  SiRNA target sequence
accagaaaagactatggtt

SEQ ID NO: 141405 - DNA, 19 bp, Artificial sequence
  SiRNA target sequence
ccagaaaagactatggttg

SEQ ID NO: 141406 - DNA, 19 bp, Artificial sequence
  SiRNA target sequence
cagaaaagactatggttgt

SEQ ID NO: 141407 - DNA, 19 bp, Artificial sequence
  SiRNA target sequence
agaaaagactatggttgta

SEQ ID NO: 141408 - DNA, 19 bp, Artificial sequence
  SiRNA target sequence
gaaaagactatggttgtaa

SEQ ID NO: 141409 - DNA, 19 bp, Artificial sequence
  SiRNA target sequence
aaaagactatggttgtaat

SEQ ID NO: 141410 - DNA, 19 bp, Artificial sequence
  SiRNA target sequence
aaagactatggttgtaatg

SEQ ID NO: 141411 - DNA, 19 bp, Artificial sequence
  SiRNA target sequence
aagactatggttgtaatga

SEQ ID NO: 141412 - DNA, 19 bp, Artificial sequence
  SiRNA target sequence
agactatggttgtaatgac

SEQ ID NO: 141413 - DNA, 19 bp, Artificial sequence
  SiRNA target sequence
gactatggttgtaatgacc

SEQ ID NO: 141414 - DNA, 19 bp, Artificial sequence
  SiRNA target sequence
actatggttgtaatgacca

SEQ ID NO: 141415 - DNA, 19 bp, Artificial sequence
  SiRNA target sequence
ctatggttgtaatgaccac

SEQ ID NO: 141416 - DNA, 19 bp, Artificial sequence
  SiRNA target sequence
tatggttgtaatgaccacc

SEQ ID NO: 141417 - DNA, 19 bp, Artificial sequence
  SiRNA target sequence
atggttgtaatgaccacca

SEQ ID NO: 141418 - DNA, 19 bp, Artificial sequence
  SiRNA target sequence
tggttgtaatgaccaccac

SEQ ID NO: 141419 - DNA, 19 bp, Artificial sequence
  SiRNA target sequence
ggttgtaatgaccaccacc

SEQ ID NO: 141420 - DNA, 19 bp, Artificial sequence
  SiRNA target sequence
gttgtaatgaccaccacca

SEQ ID NO: 141421 - DNA, 19 bp, Artificial sequence
  SiRNA target sequence
ttgtaatgaccaccaccat

SEQ ID NO: 141422 - DNA, 19 bp, Artificial sequence
  SiRNA target sequence
tgtaatgaccaccaccata

SEQ ID NO: 141423 - DNA, 19 bp, Artificial sequence
  SiRNA target sequence
gtaatgaccaccaccataa

SEQ ID NO: 141424 - DNA, 19 bp, Artificial sequence
  SiRNA target sequence
taatgaccaccaccataat

SEQ ID NO: 141425 - DNA, 19 bp, Artificial sequence
  SiRNA target sequence
aatgaccaccaccataatc

SEQ ID NO: 141426 - DNA, 19 bp, Artificial sequence
  SiRNA target sequence
atgaccaccaccataatct

SEQ ID NO: 141427 - DNA, 19 bp, Artificial sequence
  SiRNA target sequence
tgaccaccaccataatctc

SEQ ID NO: 141428 - DNA, 19 bp, Artificial sequence
  SiRNA target sequence
gaccaccaccataatctct

SEQ ID NO: 141429 - DNA, 19 bp, Artificial sequence
  SiRNA target sequence
accaccaccataatctctt

SEQ ID NO: 141430 - DNA, 19 bp, Artificial sequence
  SiRNA target sequence
ccaccaccataatctctta

SEQ ID NO: 141431 - DNA, 19 bp, Artificial sequence
  SiRNA target sequence
caccaccataatctcttaa

SEQ ID NO: 141432 - DNA, 19 bp, Artificial sequence
  SiRNA target sequence
accaccataatctcttaat

SEQ ID NO: 141433 - DNA, 19 bp, Artificial sequence
  SiRNA target sequence
ccaccataatctcttaatt

SEQ ID NO: 141434 - DNA, 19 bp, Artificial sequence
  SiRNA target sequence
caccataatctcttaattg

SEQ ID NO: 141435 - DNA, 19 bp, Artificial sequence
  SiRNA target sequence
accataatctcttaattgt

SEQ ID NO: 141436 - DNA, 19 bp, Artificial sequence
  SiRNA target sequence
ccataatctcttaattgtt

SEQ ID NO: 141437 - DNA, 19 bp, Artificial sequence
  SiRNA target sequence
cataatctcttaattgttt

SEQ ID NO: 141438 - DNA, 19 bp, Artificial sequence
  SiRNA target sequence
ataatctcttaattgttta

SEQ ID NO: 141439 - DNA, 19 bp, Artificial sequence
  SiRNA target sequence
taatctcttaattgtttat

SEQ ID NO: 141440 - DNA, 19 bp, Artificial sequence
  SiRNA target sequence
aatctcttaattgtttatc

SEQ ID NO: 141441 - DNA, 19 bp, Artificial sequence
  SiRNA target sequence
atctcttaattgtttatca

SEQ ID NO: 141442 - DNA, 19 bp, Artificial sequence
  SiRNA target sequence
tctcttaattgtttatcaa

SEQ ID NO: 141443 - DNA, 19 bp, Artificial sequence
  SiRNA target sequence
ctcttaattgtttatcaac

SEQ ID NO: 141444 - DNA, 19 bp, Artificial sequence
  SiRNA target sequence
tcttaattgtttatcaaca

SEQ ID NO: 141445 - DNA, 19 bp, Artificial sequence
  SiRNA target sequence
cttaattgtttatcaacaa

SEQ ID NO: 141446 - DNA, 19 bp, Artificial sequence
  SiRNA target sequence
ttaattgtttatcaacaag

SEQ ID NO: 141447 - DNA, 19 bp, Artificial sequence
  SiRNA target sequence
taattgtttatcaacaagt

SEQ ID NO: 141448 - DNA, 19 bp, Artificial sequence
  SiRNA target sequence
aattgtttatcaacaagtg

SEQ ID NO: 141449 - DNA, 19 bp, Artificial sequence
  SiRNA target sequence
attgtttatcaacaagtgc

SEQ ID NO: 141450 - DNA, 19 bp, Artificial sequence
  SiRNA target sequence
ttgtttatcaacaagtgca

SEQ ID NO: 141451 - DNA, 19 bp, Artificial sequence
  SiRNA target sequence
tgtttatcaacaagtgcat

SEQ ID NO: 141452 - DNA, 19 bp, Artificial sequence
  SiRNA target sequence
gtttatcaacaagtgcatt

SEQ ID NO: 141453 - DNA, 19 bp, Artificial sequence
  SiRNA target sequence
tttatcaacaagtgcattt

SEQ ID NO: 141454 - DNA, 19 bp, Artificial sequence
  SiRNA target sequence
ttatcaacaagtgcatttc

SEQ ID NO: 141455 - DNA, 19 bp, Artificial sequence
  SiRNA target sequence
tatcaacaagtgcatttcc

SEQ ID NO: 141456 - DNA, 19 bp, Artificial sequence
  SiRNA target sequence
atcaacaagtgcatttcct

SEQ ID NO: 141457 - DNA, 19 bp, Artificial sequence
  SiRNA target sequence
tcaacaagtgcatttcctt

SEQ ID NO: 141458 - DNA, 19 bp, Artificial sequence
  SiRNA target sequence
caacaagtgcatttccttt

SEQ ID NO: 141459 - DNA, 19 bp, Artificial sequence
  SiRNA target sequence
aacaagtgcatttccttta

SEQ ID NO: 141460 - DNA, 19 bp, Artificial sequence
  SiRNA target sequence
acaagtgcatttcctttat

SEQ ID NO: 141461 - DNA, 19 bp, Artificial sequence
  SiRNA target sequence
caagtgcatttcctttatt

SEQ ID NO: 141462 - DNA, 19 bp, Artificial sequence
  SiRNA target sequence
aagtgcatttcctttatta

SEQ ID NO: 141463 - DNA, 19 bp, Artificial sequence
  SiRNA target sequence
agtgcatttcctttattat

SEQ ID NO: 141464 - DNA, 19 bp, Artificial sequence
  SiRNA target sequence
gtgcatttcctttattatt

SEQ ID NO: 141465 - DNA, 19 bp, Artificial sequence
  SiRNA target sequence
tgcatttcctttattatta

SEQ ID NO: 141466 - DNA, 19 bp, Artificial sequence
  SiRNA target sequence
gcatttcctttattattaa

SEQ ID NO: 141467 - DNA, 19 bp, Artificial sequence
  SiRNA target sequence
catttcctttattattaaa

SEQ ID NO: 141468 - DNA, 19 bp, Artificial sequence
  SiRNA target sequence
atttcctttattattaaaa

SEQ ID NO: 141469 - DNA, 19 bp, Artificial sequence
  SiRNA target sequence
tttcctttattattaaaaa

SEQ ID NO: 141470 - DNA, 19 bp, Artificial sequence
  SiRNA target sequence
ttcctttattattaaaaag

SEQ ID NO: 141471 - DNA, 19 bp, Artificial sequence
  SiRNA target sequence
tcctttattattaaaaagt

SEQ ID NO: 141472 - DNA, 19 bp, Artificial sequence
  SiRNA target sequence
cctttattattaaaaagta

SEQ ID NO: 141473 - DNA, 19 bp, Artificial sequence
  SiRNA target sequence
ctttattattaaaaagtaa

SEQ ID NO: 141474 - DNA, 19 bp, Artificial sequence
  SiRNA target sequence
tttattattaaaaagtaat

SEQ ID NO: 141475 - DNA, 19 bp, Artificial sequence
  SiRNA target sequence
ttattattaaaaagtaatg

SEQ ID NO: 141476 - DNA, 19 bp, Artificial sequence
  SiRNA target sequence
tattattaaaaagtaatga

SEQ ID NO: 141477 - DNA, 19 bp, Artificial sequence
  SiRNA target sequence
attattaaaaagtaatgaa

SEQ ID NO: 141478 - DNA, 19 bp, Artificial sequence
  SiRNA target sequence
ttattaaaaagtaatgaat

SEQ ID NO: 141479 - DNA, 19 bp, Artificial sequence
  SiRNA target sequence
tattaaaaagtaatgaatt

SEQ ID NO: 141480 - DNA, 19 bp, Artificial sequence
  SiRNA target sequence
attaaaaagtaatgaattt

SEQ ID NO: 141481 - DNA, 19 bp, Artificial sequence
  SiRNA target sequence
ttaaaaagtaatgaattta

SEQ ID NO: 141482 - DNA, 19 bp, Artificial sequence
  SiRNA target sequence
taaaaagtaatgaatttaa

SEQ ID NO: 141483 - DNA, 19 bp, Artificial sequence
  SiRNA target sequence
aaaaagtaatgaatttaat

SEQ ID NO: 141484 - DNA, 19 bp, Artificial sequence
  SiRNA target sequence
aaaagtaatgaatttaatg

SEQ ID NO: 141485 - DNA, 19 bp, Artificial sequence
  SiRNA target sequence
aaagtaatgaatttaatga

SEQ ID NO: 141486 - DNA, 19 bp, Artificial sequence
  SiRNA target sequence
aagtaatgaatttaatgat

SEQ ID NO: 141487 - DNA, 19 bp, Artificial sequence
  SiRNA target sequence
agtaatgaatttaatgatt

SEQ ID NO: 141488 - DNA, 19 bp, Artificial sequence
  SiRNA target sequence
gtaatgaatttaatgattt

SEQ ID NO: 141489 - DNA, 19 bp, Artificial sequence
  SiRNA target sequence
taatgaatttaatgattta

SEQ ID NO: 141490 - DNA, 19 bp, Artificial sequence
  SiRNA target sequence
aatgaatttaatgatttac

SEQ ID NO: 141491 - DNA, 19 bp, Artificial sequence
  SiRNA target sequence
atgaatttaatgatttacc

SEQ ID NO: 141492 - DNA, 19 bp, Artificial sequence
  SiRNA target sequence
tgaatttaatgatttacca

SEQ ID NO: 141493 - DNA, 19 bp, Artificial sequence
  SiRNA target sequence
gaatttaatgatttaccac

SEQ ID NO: 141494 - DNA, 19 bp, Artificial sequence
  SiRNA target sequence
aatttaatgatttaccaca

SEQ ID NO: 141495 - DNA, 19 bp, Artificial sequence
  SiRNA target sequence
atttaatgatttaccacac

SEQ ID NO: 141496 - DNA, 19 bp, Artificial sequence
  SiRNA target sequence
tttaatgatttaccacaca

SEQ ID NO: 141497 - DNA, 19 bp, Artificial sequence
  SiRNA target sequence
ttaatgatttaccacacaa

SEQ ID NO: 141498 - DNA, 19 bp, Artificial sequence
  SiRNA target sequence
taatgatttaccacacaaa

SEQ ID NO: 141499 - DNA, 19 bp, Artificial sequence
  SiRNA target sequence
aatgatttaccacacaaat

SEQ ID NO: 141500 - DNA, 19 bp, Artificial sequence
  SiRNA target sequence
atgatttaccacacaaatt

SEQ ID NO: 141501 - DNA, 19 bp, Artificial sequence
  SiRNA target sequence
tgatttaccacacaaattg

SEQ ID NO: 141502 - DNA, 19 bp, Artificial sequence
  SiRNA target sequence
gatttaccacacaaattgt

SEQ ID NO: 141503 - DNA, 19 bp, Artificial sequence
  SiRNA target sequence
atttaccacacaaattgtt

SEQ ID NO: 141504 - DNA, 19 bp, Artificial sequence
  SiRNA target sequence
tttaccacacaaattgtta

SEQ ID NO: 141505 - DNA, 19 bp, Artificial sequence
  SiRNA target sequence
ttaccacacaaattgttat

SEQ ID NO: 141506 - DNA, 19 bp, Artificial sequence
  SiRNA target sequence
taccacacaaattgttatc

SEQ ID NO: 141507 - DNA, 19 bp, Artificial sequence
  SiRNA target sequence
accacacaaattgttatct

SEQ ID NO: 141508 - DNA, 19 bp, Artificial sequence
  SiRNA target sequence
ccacacaaattgttatcta

SEQ ID NO: 141509 - DNA, 19 bp, Artificial sequence
  SiRNA target sequence
cacacaaattgttatctaa

SEQ ID NO: 141510 - DNA, 19 bp, Artificial sequence
  SiRNA target sequence
acacaaattgttatctaat

SEQ ID NO: 141511 - DNA, 19 bp, Artificial sequence
  SiRNA target sequence
cacaaattgttatctaata

SEQ ID NO: 141512 - DNA, 19 bp, Artificial sequence
  SiRNA target sequence
acaaattgttatctaatat

SEQ ID NO: 141513 - DNA, 19 bp, Artificial sequence
  SiRNA target sequence
caaattgttatctaatatt

SEQ ID NO: 141514 - DNA, 19 bp, Artificial sequence
  SiRNA target sequence
aaattgttatctaatatta

SEQ ID NO: 141515 - DNA, 19 bp, Artificial sequence
  SiRNA target sequence
aattgttatctaatattat

SEQ ID NO: 141516 - DNA, 19 bp, Artificial sequence
  SiRNA target sequence
attgttatctaatattatt

SEQ ID NO: 141517 - DNA, 19 bp, Artificial sequence
  SiRNA target sequence
ttgttatctaatattattt

SEQ ID NO: 141518 - DNA, 19 bp, Artificial sequence
  SiRNA target sequence
tgttatctaatattatttt

SEQ ID NO: 141519 - DNA, 19 bp, Artificial sequence
  SiRNA target sequence
gttatctaatattatttta

SEQ ID NO: 141520 - DNA, 19 bp, Artificial sequence
  SiRNA target sequence
ttatctaatattattttat

SEQ ID NO: 141521 - DNA, 19 bp, Artificial sequence
  SiRNA target sequence
tatctaatattattttatt

SEQ ID NO: 141522 - DNA, 19 bp, Artificial sequence
  SiRNA target sequence
atctaatattattttatta

SEQ ID NO: 141523 - DNA, 19 bp, Artificial sequence
  SiRNA target sequence
tctaatattattttattaa

SEQ ID NO: 141524 - DNA, 19 bp, Artificial sequence
  SiRNA target sequence
ctaatattattttattaag

SEQ ID NO: 141525 - DNA, 19 bp, Artificial sequence
  SiRNA target sequence
taatattattttattaaga

SEQ ID NO: 141526 - DNA, 19 bp, Artificial sequence
  SiRNA target sequence
aatattattttattaagag

SEQ ID NO: 141527 - DNA, 19 bp, Artificial sequence
  SiRNA target sequence
atattattttattaagagt

SEQ ID NO: 141528 - DNA, 19 bp, Artificial sequence
  SiRNA target sequence
tattattttattaagagtg

SEQ ID NO: 141529 - DNA, 19 bp, Artificial sequence
  SiRNA target sequence
attattttattaagagtgt

SEQ ID NO: 141530 - DNA, 19 bp, Artificial sequence
  SiRNA target sequence
ttattttattaagagtgtc

SEQ ID NO: 141531 - DNA, 19 bp, Artificial sequence
  SiRNA target sequence
tattttattaagagtgtct

SEQ ID NO: 141532 - DNA, 19 bp, Artificial sequence
  SiRNA target sequence
attttattaagagtgtcta

SEQ ID NO: 141533 - DNA, 19 bp, Artificial sequence
  SiRNA target sequence
ttttattaagagtgtctac

SEQ ID NO: 141534 - DNA, 19 bp, Artificial sequence
  SiRNA target sequence
tttattaagagtgtctaca

SEQ ID NO: 141535 - DNA, 19 bp, Artificial sequence
  SiRNA target sequence
ttattaagagtgtctacat

SEQ ID NO: 141536 - DNA, 19 bp, Artificial sequence
  SiRNA target sequence
tattaagagtgtctacata

SEQ ID NO: 141537 - DNA, 19 bp, Artificial sequence
  SiRNA target sequence
attaagagtgtctacatac

SEQ ID NO: 141538 - DNA, 19 bp, Artificial sequence
  SiRNA target sequence
ttaagagtgtctacatacg

SEQ ID NO: 141539 - DNA, 19 bp, Artificial sequence
  SiRNA target sequence
taagagtgtctacatacgc

SEQ ID NO: 141540 - DNA, 19 bp, Artificial sequence
  SiRNA target sequence
aagagtgtctacatacgct

SEQ ID NO: 141541 - DNA, 19 bp, Artificial sequence
  SiRNA target sequence
agagtgtctacatacgctt

SEQ ID NO: 141542 - DNA, 19 bp, Artificial sequence
  SiRNA target sequence
gagtgtctacatacgcttg

SEQ ID NO: 141543 - DNA, 19 bp, Artificial sequence
  SiRNA target sequence
agtgtctacatacgcttga

SEQ ID NO: 141544 - DNA, 19 bp, Artificial sequence
  SiRNA target sequence
gtgtctacatacgcttgat

SEQ ID NO: 141545 - DNA, 19 bp, Artificial sequence
  SiRNA target sequence
tgtctacatacgcttgatg

SEQ ID NO: 141546 - DNA, 19 bp, Artificial sequence
  SiRNA target sequence
gtctacatacgcttgatgg

SEQ ID NO: 141547 - DNA, 19 bp, Artificial sequence
  SiRNA target sequence
tctacatacgcttgatggt

SEQ ID NO: 141548 - DNA, 19 bp, Artificial sequence
  SiRNA target sequence
ctacatacgcttgatggtg

SEQ ID NO: 141549 - DNA, 19 bp, Artificial sequence
  SiRNA target sequence
tacatacgcttgatggtgc

SEQ ID NO: 141550 - DNA, 19 bp, Artificial sequence
  SiRNA target sequence
acatacgcttgatggtgct

SEQ ID NO: 141551 - DNA, 19 bp, Artificial sequence
  SiRNA target sequence
catacgcttgatggtgctt

SEQ ID NO: 141552 - DNA, 19 bp, Artificial sequence
  SiRNA target sequence
atacgcttgatggtgctta

SEQ ID NO: 141553 - DNA, 19 bp, Artificial sequence
  SiRNA target sequence
tacgcttgatggtgcttag

SEQ ID NO: 141554 - DNA, 19 bp, Artificial sequence
  SiRNA target sequence
acgcttgatggtgcttaga

SEQ ID NO: 141555 - DNA, 19 bp, Artificial sequence
  SiRNA target sequence
cgcttgatggtgcttagag

SEQ ID NO: 141556 - DNA, 19 bp, Artificial sequence
  SiRNA target sequence
gcttgatggtgcttagagt

SEQ ID NO: 141557 - DNA, 19 bp, Artificial sequence
  SiRNA target sequence
cttgatggtgcttagagtg

SEQ ID NO: 141558 - DNA, 19 bp, Artificial sequence
  SiRNA target sequence
ttgatggtgcttagagtgg

SEQ ID NO: 141559 - DNA, 19 bp, Artificial sequence
  SiRNA target sequence
tgatggtgcttagagtggt

SEQ ID NO: 141560 - DNA, 19 bp, Artificial sequence
  SiRNA target sequence
gatggtgcttagagtggtg

SEQ ID NO: 141561 - DNA, 19 bp, Artificial sequence
  SiRNA target sequence
atggtgcttagagtggtgg

SEQ ID NO: 141562 - DNA, 19 bp, Artificial sequence
  SiRNA target sequence
tggtgcttagagtggtggg

SEQ ID NO: 141563 - DNA, 19 bp, Artificial sequence
  SiRNA target sequence
ggtgcttagagtggtgggt

SEQ ID NO: 141564 - DNA, 19 bp, Artificial sequence
  SiRNA target sequence
gtgcttagagtggtgggtc

SEQ ID NO: 141565 - DNA, 19 bp, Artificial sequence
  SiRNA target sequence
tgcttagagtggtgggtct

SEQ ID NO: 141566 - DNA, 19 bp, Artificial sequence
  SiRNA target sequence
gcttagagtggtgggtctc

SEQ ID NO: 141567 - DNA, 19 bp, Artificial sequence
  SiRNA target sequence
cttagagtggtgggtctcc

SEQ ID NO: 141568 - DNA, 19 bp, Artificial sequence
  SiRNA target sequence
ttagagtggtgggtctcca

SEQ ID NO: 141569 - DNA, 19 bp, Artificial sequence
  SiRNA target sequence
tagagtggtgggtctccat

SEQ ID NO: 141570 - DNA, 19 bp, Artificial sequence
  SiRNA target sequence
agagtggtgggtctccatt

SEQ ID NO: 141571 - DNA, 19 bp, Artificial sequence
  SiRNA target sequence
gagtggtgggtctccatta

SEQ ID NO: 141572 - DNA, 19 bp, Artificial sequence
  SiRNA target sequence
agtggtgggtctccattat

SEQ ID NO: 141573 - DNA, 19 bp, Artificial sequence
  SiRNA target sequence
gtggtgggtctccattata

SEQ ID NO: 141574 - DNA, 19 bp, Artificial sequence
  SiRNA target sequence
tggtgggtctccattatat

SEQ ID NO: 141575 - DNA, 19 bp, Artificial sequence
  SiRNA target sequence
ggtgggtctccattatatc

SEQ ID NO: 141576 - DNA, 19 bp, Artificial sequence
  SiRNA target sequence
gtgggtctccattatatct

SEQ ID NO: 141577 - DNA, 19 bp, Artificial sequence
  SiRNA target sequence
tgggtctccattatatctt

SEQ ID NO: 141578 - DNA, 19 bp, Artificial sequence
  SiRNA target sequence
gggtctccattatatcttc

SEQ ID NO: 141579 - DNA, 19 bp, Artificial sequence
  SiRNA target sequence
ggtctccattatatcttca

SEQ ID NO: 141580 - DNA, 19 bp, Artificial sequence
  SiRNA target sequence
gtctccattatatcttcac

SEQ ID NO: 141581 - DNA, 19 bp, Artificial sequence
  SiRNA target sequence
tctccattatatcttcact

SEQ ID NO: 141582 - DNA, 19 bp, Artificial sequence
  SiRNA target sequence
ctccattatatcttcactt

SEQ ID NO: 141583 - DNA, 19 bp, Artificial sequence
  SiRNA target sequence
tccattatatcttcactta

SEQ ID NO: 141584 - DNA, 19 bp, Artificial sequence
  SiRNA target sequence
ccattatatcttcacttat

SEQ ID NO: 141585 - DNA, 19 bp, Artificial sequence
  SiRNA target sequence
cattatatcttcacttata

SEQ ID NO: 141586 - DNA, 19 bp, Artificial sequence
  SiRNA target sequence
attatatcttcacttatat

SEQ ID NO: 141587 - DNA, 19 bp, Artificial sequence
  SiRNA target sequence
ttatatcttcacttatata

SEQ ID NO: 141588 - DNA, 19 bp, Artificial sequence
  SiRNA target sequence
tatatcttcacttatataa

SEQ ID NO: 141589 - DNA, 19 bp, Artificial sequence
  SiRNA target sequence
atatcttcacttatataag

SEQ ID NO: 141590 - DNA, 19 bp, Artificial sequence
  SiRNA target sequence
tatcttcacttatataagg

SEQ ID NO: 141591 - DNA, 19 bp, Artificial sequence
  SiRNA target sequence
atcttcacttatataaggc

SEQ ID NO: 141592 - DNA, 19 bp, Artificial sequence
  SiRNA target sequence
tcttcacttatataaggct

SEQ ID NO: 141593 - DNA, 19 bp, Artificial sequence
  SiRNA target sequence
cttcacttatataaggctc

SEQ ID NO: 141594 - DNA, 19 bp, Artificial sequence
  SiRNA target sequence
ttcacttatataaggctct

SEQ ID NO: 141595 - DNA, 19 bp, Artificial sequence
  SiRNA target sequence
tcacttatataaggctcta

SEQ ID NO: 141596 - DNA, 19 bp, Artificial sequence
  SiRNA target sequence
cacttatataaggctctag

SEQ ID NO: 141597 - DNA, 19 bp, Artificial sequence
  SiRNA target sequence
acttatataaggctctaga

SEQ ID NO: 141598 - DNA, 19 bp, Artificial sequence
  SiRNA target sequence
cttatataaggctctagag

SEQ ID NO: 141599 - DNA, 19 bp, Artificial sequence
  SiRNA target sequence
ttatataaggctctagaga

SEQ ID NO: 141600 - DNA, 19 bp, Artificial sequence
  SiRNA target sequence
tatataaggctctagagat

SEQ ID NO: 141601 - DNA, 19 bp, Artificial sequence
  SiRNA target sequence
atataaggctctagagatt

SEQ ID NO: 141602 - DNA, 19 bp, Artificial sequence
  SiRNA target sequence
tataaggctctagagattt

SEQ ID NO: 141603 - DNA, 19 bp, Artificial sequence
  SiRNA target sequence
ataaggctctagagattta

SEQ ID NO: 141604 - DNA, 19 bp, Artificial sequence
  SiRNA target sequence
taaggctctagagatttat

SEQ ID NO: 141605 - DNA, 19 bp, Artificial sequence
  SiRNA target sequence
aaggctctagagatttata

SEQ ID NO: 141606 - DNA, 19 bp, Artificial sequence
  SiRNA target sequence
aggctctagagatttataa

SEQ ID NO: 141607 - DNA, 19 bp, Artificial sequence
  SiRNA target sequence
ggctctagagatttataac

SEQ ID NO: 141608 - DNA, 19 bp, Artificial sequence
  SiRNA target sequence
gctctagagatttataact

SEQ ID NO: 141609 - DNA, 19 bp, Artificial sequence
  SiRNA target sequence
ctctagagatttataacta

SEQ ID NO: 141610 - DNA, 19 bp, Artificial sequence
  SiRNA target sequence
tctagagatttataactat

SEQ ID NO: 141611 - DNA, 19 bp, Artificial sequence
  SiRNA target sequence
ctagagatttataactata

SEQ ID NO: 141612 - DNA, 19 bp, Artificial sequence
  SiRNA target sequence
tagagatttataactatat

SEQ ID NO: 141613 - DNA, 19 bp, Artificial sequence
  SiRNA target sequence
agagatttataactatatt

SEQ ID NO: 141614 - DNA, 19 bp, Artificial sequence
  SiRNA target sequence
gagatttataactatattt

SEQ ID NO: 141615 - DNA, 19 bp, Artificial sequence
  SiRNA target sequence
agatttataactatatttc

SEQ ID NO: 141616 - DNA, 19 bp, Artificial sequence
  SiRNA target sequence
gatttataactatatttca

SEQ ID NO: 141617 - DNA, 19 bp, Artificial sequence
  SiRNA target sequence
atttataactatatttcag

SEQ ID NO: 141618 - DNA, 19 bp, Artificial sequence
  SiRNA target sequence
tttataactatatttcaga

SEQ ID NO: 141619 - DNA, 19 bp, Artificial sequence
  SiRNA target sequence
ttataactatatttcagat

SEQ ID NO: 141620 - DNA, 19 bp, Artificial sequence
  SiRNA target sequence
tataactatatttcagatt

SEQ ID NO: 141621 - DNA, 19 bp, Artificial sequence
  SiRNA target sequence
ataactatatttcagattt

SEQ ID NO: 141622 - DNA, 19 bp, Artificial sequence
  SiRNA target sequence
taactatatttcagatttg

SEQ ID NO: 141623 - DNA, 19 bp, Artificial sequence
  SiRNA target sequence
aactatatttcagatttgg

SEQ ID NO: 141624 - DNA, 19 bp, Artificial sequence
  SiRNA target sequence
actatatttcagatttgga

SEQ ID NO: 141625 - DNA, 19 bp, Artificial sequence
  SiRNA target sequence
ctatatttcagatttggaa

SEQ ID NO: 141626 - DNA, 19 bp, Artificial sequence
  SiRNA target sequence
tatatttcagatttggaag

SEQ ID NO: 141627 - DNA, 19 bp, Artificial sequence
  SiRNA target sequence
atatttcagatttggaaga

SEQ ID NO: 141628 - DNA, 19 bp, Artificial sequence
  SiRNA target sequence
tatttcagatttggaagag

SEQ ID NO: 141629 - DNA, 19 bp, Artificial sequence
  SiRNA target sequence
atttcagatttggaagagt

SEQ ID NO: 141630 - DNA, 19 bp, Artificial sequence
  SiRNA target sequence
tttcagatttggaagagtg

SEQ ID NO: 141631 - DNA, 19 bp, Artificial sequence
  SiRNA target sequence
ttcagatttggaagagtga

SEQ ID NO: 141632 - DNA, 19 bp, Artificial sequence
  SiRNA target sequence
tcagatttggaagagtgaa

SEQ ID NO: 141633 - DNA, 19 bp, Artificial sequence
  SiRNA target sequence
cagatttggaagagtgaac

SEQ ID NO: 141634 - DNA, 19 bp, Artificial sequence
  SiRNA target sequence
agatttggaagagtgaaca

SEQ ID NO: 141635 - DNA, 19 bp, Artificial sequence
  SiRNA target sequence
gatttggaagagtgaacat

SEQ ID NO: 141636 - DNA, 20 bp, Artificial sequence
  SiRNA target sequence
ttaatttatgcataattgac

SEQ ID NO: 141637 - DNA, 20 bp, Artificial sequence
  SiRNA target sequence
taatttatgcataattgacc

SEQ ID NO: 141638 - DNA, 20 bp, Artificial sequence
  SiRNA target sequence
aatttatgcataattgacca

SEQ ID NO: 141639 - DNA, 20 bp, Artificial sequence
  SiRNA target sequence
atttatgcataattgaccat

SEQ ID NO: 141640 - DNA, 20 bp, Artificial sequence
  SiRNA target sequence
tttatgcataattgaccatc

SEQ ID NO: 141641 - DNA, 20 bp, Artificial sequence
  SiRNA target sequence
ttatgcataattgaccatca

SEQ ID NO: 141642 - DNA, 20 bp, Artificial sequence
  SiRNA target sequence
tatgcataattgaccatcat

SEQ ID NO: 141643 - DNA, 20 bp, Artificial sequence
  SiRNA target sequence
atgcataattgaccatcatc

SEQ ID NO: 141644 - DNA, 20 bp, Artificial sequence
  SiRNA target sequence
tgcataattgaccatcatca

SEQ ID NO: 141645 - DNA, 20 bp, Artificial sequence
  SiRNA target sequence
gcataattgaccatcatcag

SEQ ID NO: 141646 - DNA, 20 bp, Artificial sequence
  SiRNA target sequence
cataattgaccatcatcagt

SEQ ID NO: 141647 - DNA, 20 bp, Artificial sequence
  SiRNA target sequence
ataattgaccatcatcagta

SEQ ID NO: 141648 - DNA, 20 bp, Artificial sequence
  SiRNA target sequence
taattgaccatcatcagtaa

SEQ ID NO: 141649 - DNA, 20 bp, Artificial sequence
  SiRNA target sequence
aattgaccatcatcagtaat

SEQ ID NO: 141650 - DNA, 20 bp, Artificial sequence
  SiRNA target sequence
attgaccatcatcagtaata

SEQ ID NO: 141651 - DNA, 20 bp, Artificial sequence
  SiRNA target sequence
ttgaccatcatcagtaataa

SEQ ID NO: 141652 - DNA, 20 bp, Artificial sequence
  SiRNA target sequence
tgaccatcatcagtaataaa

SEQ ID NO: 141653 - DNA, 20 bp, Artificial sequence
  SiRNA target sequence
gaccatcatcagtaataaac

SEQ ID NO: 141654 - DNA, 20 bp, Artificial sequence
  SiRNA target sequence
accatcatcagtaataaaca

SEQ ID NO: 141655 - DNA, 20 bp, Artificial sequence
  SiRNA target sequence
ccatcatcagtaataaacac

SEQ ID NO: 141656 - DNA, 20 bp, Artificial sequence
  SiRNA target sequence
catcatcagtaataaacaca

SEQ ID NO: 141657 - DNA, 20 bp, Artificial sequence
  SiRNA target sequence
atcatcagtaataaacacat

SEQ ID NO: 141658 - DNA, 20 bp, Artificial sequence
  SiRNA target sequence
tcatcagtaataaacacatt

SEQ ID NO: 141659 - DNA, 20 bp, Artificial sequence
  SiRNA target sequence
catcagtaataaacacatta

SEQ ID NO: 141660 - DNA, 20 bp, Artificial sequence
  SiRNA target sequence
atcagtaataaacacattac

SEQ ID NO: 141661 - DNA, 20 bp, Artificial sequence
  SiRNA target sequence
tcagtaataaacacattacc

SEQ ID NO: 141662 - DNA, 20 bp, Artificial sequence
  SiRNA target sequence
cagtaataaacacattacct

SEQ ID NO: 141663 - DNA, 20 bp, Artificial sequence
  SiRNA target sequence
agtaataaacacattacctt

SEQ ID NO: 141664 - DNA, 20 bp, Artificial sequence
  SiRNA target sequence
gtaataaacacattaccttt

SEQ ID NO: 141665 - DNA, 20 bp, Artificial sequence
  SiRNA target sequence
taataaacacattacctttc

SEQ ID NO: 141666 - DNA, 20 bp, Artificial sequence
  SiRNA target sequence
aataaacacattacctttct

SEQ ID NO: 141667 - DNA, 20 bp, Artificial sequence
  SiRNA target sequence
ataaacacattacctttctt

SEQ ID NO: 141668 - DNA, 20 bp, Artificial sequence
  SiRNA target sequence
taaacacattacctttcttt

SEQ ID NO: 141669 - DNA, 20 bp, Artificial sequence
  SiRNA target sequence
aaacacattacctttctttt

SEQ ID NO: 141670 - DNA, 20 bp, Artificial sequence
  SiRNA target sequence
aacacattacctttcttttc

SEQ ID NO: 141671 - DNA, 20 bp, Artificial sequence
  SiRNA target sequence
acacattacctttcttttct

SEQ ID NO: 141672 - DNA, 20 bp, Artificial sequence
  SiRNA target sequence
cacattacctttcttttcta

SEQ ID NO: 141673 - DNA, 20 bp, Artificial sequence
  SiRNA target sequence
acattacctttcttttctac

SEQ ID NO: 141674 - DNA, 20 bp, Artificial sequence
  SiRNA target sequence
cattacctttcttttctacc

SEQ ID NO: 141675 - DNA, 20 bp, Artificial sequence
  SiRNA target sequence
attacctttcttttctacca

SEQ ID NO: 141676 - DNA, 20 bp, Artificial sequence
  SiRNA target sequence
ttacctttcttttctaccac

SEQ ID NO: 141677 - DNA, 20 bp, Artificial sequence
  SiRNA target sequence
tacctttcttttctaccaca

SEQ ID NO: 141678 - DNA, 20 bp, Artificial sequence
  SiRNA target sequence
acctttcttttctaccacac

SEQ ID NO: 141679 - DNA, 20 bp, Artificial sequence
  SiRNA target sequence
cctttcttttctaccacaca

SEQ ID NO: 141680 - DNA, 20 bp, Artificial sequence
  SiRNA target sequence
ctttcttttctaccacacat

SEQ ID NO: 141681 - DNA, 20 bp, Artificial sequence
  SiRNA target sequence
tttcttttctaccacacatt

SEQ ID NO: 141682 - DNA, 20 bp, Artificial sequence
  SiRNA target sequence
ttcttttctaccacacattt

SEQ ID NO: 141683 - DNA, 20 bp, Artificial sequence
  SiRNA target sequence
tcttttctaccacacatttt

SEQ ID NO: 141684 - DNA, 20 bp, Artificial sequence
  SiRNA target sequence
cttttctaccacacattttt

SEQ ID NO: 141685 - DNA, 20 bp, Artificial sequence
  SiRNA target sequence
ttttctaccacacatttttg

SEQ ID NO: 141686 - DNA, 20 bp, Artificial sequence
  SiRNA target sequence
tttctaccacacatttttga

SEQ ID NO: 141687 - DNA, 20 bp, Artificial sequence
  SiRNA target sequence
ttctaccacacatttttgat

SEQ ID NO: 141688 - DNA, 20 bp, Artificial sequence
  SiRNA target sequence
tctaccacacatttttgata

SEQ ID NO: 141689 - DNA, 20 bp, Artificial sequence
  SiRNA target sequence
ctaccacacatttttgatat

SEQ ID NO: 141690 - DNA, 20 bp, Artificial sequence
  SiRNA target sequence
taccacacatttttgatata

SEQ ID NO: 141691 - DNA, 20 bp, Artificial sequence
  SiRNA target sequence
accacacatttttgatatat

SEQ ID NO: 141692 - DNA, 20 bp, Artificial sequence
  SiRNA target sequence
ccacacatttttgatatatt

SEQ ID NO: 141693 - DNA, 20 bp, Artificial sequence
  SiRNA target sequence
cacacatttttgatatattt

SEQ ID NO: 141694 - DNA, 20 bp, Artificial sequence
  SiRNA target sequence
acacatttttgatatatttc

SEQ ID NO: 141695 - DNA, 20 bp, Artificial sequence
  SiRNA target sequence
cacatttttgatatatttca

SEQ ID NO: 141696 - DNA, 20 bp, Artificial sequence
  SiRNA target sequence
acatttttgatatatttcat

SEQ ID NO: 141697 - DNA, 20 bp, Artificial sequence
  SiRNA target sequence
catttttgatatatttcatt

SEQ ID NO: 141698 - DNA, 20 bp, Artificial sequence
  SiRNA target sequence
atttttgatatatttcatta

SEQ ID NO: 141699 - DNA, 20 bp, Artificial sequence
  SiRNA target sequence
tttttgatatatttcattaa

SEQ ID NO: 141700 - DNA, 20 bp, Artificial sequence
  SiRNA target sequence
ttttgatatatttcattaac

SEQ ID NO: 141701 - DNA, 20 bp, Artificial sequence
  SiRNA target sequence
tttgatatatttcattaact

SEQ ID NO: 141702 - DNA, 20 bp, Artificial sequence
  SiRNA target sequence
ttgatatatttcattaacta

SEQ ID NO: 141703 - DNA, 20 bp, Artificial sequence
  SiRNA target sequence
tgatatatttcattaactac

SEQ ID NO: 141704 - DNA, 20 bp, Artificial sequence
  SiRNA target sequence
gatatatttcattaactaca

SEQ ID NO: 141705 - DNA, 20 bp, Artificial sequence
  SiRNA target sequence
atatatttcattaactacat

SEQ ID NO: 141706 - DNA, 20 bp, Artificial sequence
  SiRNA target sequence
tatatttcattaactacatc

SEQ ID NO: 141707 - DNA, 20 bp, Artificial sequence
  SiRNA target sequence
atatttcattaactacatcc

SEQ ID NO: 141708 - DNA, 20 bp, Artificial sequence
  SiRNA target sequence
tatttcattaactacatccc

SEQ ID NO: 141709 - DNA, 20 bp, Artificial sequence
  SiRNA target sequence
atttcattaactacatccca

SEQ ID NO: 141710 - DNA, 20 bp, Artificial sequence
  SiRNA target sequence
tttcattaactacatcccaa

SEQ ID NO: 141711 - DNA, 20 bp, Artificial sequence
  SiRNA target sequence
ttcattaactacatcccaat

SEQ ID NO: 141712 - DNA, 20 bp, Artificial sequence
  SiRNA target sequence
tcattaactacatcccaatc

SEQ ID NO: 141713 - DNA, 20 bp, Artificial sequence
  SiRNA target sequence
cattaactacatcccaatca

SEQ ID NO: 141714 - DNA, 20 bp, Artificial sequence
  SiRNA target sequence
attaactacatcccaatcaa

SEQ ID NO: 141715 - DNA, 20 bp, Artificial sequence
  SiRNA target sequence
ttaactacatcccaatcaat

SEQ ID NO: 141716 - DNA, 20 bp, Artificial sequence
  SiRNA target sequence
taactacatcccaatcaatt

SEQ ID NO: 141717 - DNA, 20 bp, Artificial sequence
  SiRNA target sequence
aactacatcccaatcaatta

SEQ ID NO: 141718 - DNA, 20 bp, Artificial sequence
  SiRNA target sequence
actacatcccaatcaattac

SEQ ID NO: 141719 - DNA, 20 bp, Artificial sequence
  SiRNA target sequence
ctacatcccaatcaattaca

SEQ ID NO: 141720 - DNA, 20 bp, Artificial sequence
  SiRNA target sequence
tacatcccaatcaattacat

SEQ ID NO: 141721 - DNA, 20 bp, Artificial sequence
  SiRNA target sequence
acatcccaatcaattacatt

SEQ ID NO: 141722 - DNA, 20 bp, Artificial sequence
  SiRNA target sequence
catcccaatcaattacattc

SEQ ID NO: 141723 - DNA, 20 bp, Artificial sequence
  SiRNA target sequence
atcccaatcaattacattcc

SEQ ID NO: 141724 - DNA, 20 bp, Artificial sequence
  SiRNA target sequence
tcccaatcaattacattcca

SEQ ID NO: 141725 - DNA, 20 bp, Artificial sequence
  SiRNA target sequence
cccaatcaattacattccac

SEQ ID NO: 141726 - DNA, 20 bp, Artificial sequence
  SiRNA target sequence
ccaatcaattacattccacc

SEQ ID NO: 141727 - DNA, 20 bp, Artificial sequence
  SiRNA target sequence
caatcaattacattccacca

SEQ ID NO: 141728 - DNA, 20 bp, Artificial sequence
  SiRNA target sequence
aatcaattacattccaccat

SEQ ID NO: 141729 - DNA, 20 bp, Artificial sequence
  SiRNA target sequence
atcaattacattccaccatt

SEQ ID NO: 141730 - DNA, 20 bp, Artificial sequence
  SiRNA target sequence
tcaattacattccaccattc

SEQ ID NO: 141731 - DNA, 20 bp, Artificial sequence
  SiRNA target sequence
caattacattccaccattca

SEQ ID NO: 141732 - DNA, 20 bp, Artificial sequence
  SiRNA target sequence
aattacattccaccattcat

SEQ ID NO: 141733 - DNA, 20 bp, Artificial sequence
  SiRNA target sequence
attacattccaccattcatt

SEQ ID NO: 141734 - DNA, 20 bp, Artificial sequence
  SiRNA target sequence
ttacattccaccattcatta

SEQ ID NO: 141735 - DNA, 20 bp, Artificial sequence
  SiRNA target sequence
tacattccaccattcattaa

SEQ ID NO: 141736 - DNA, 20 bp, Artificial sequence
  SiRNA target sequence
acattccaccattcattaat

SEQ ID NO: 141737 - DNA, 20 bp, Artificial sequence
  SiRNA target sequence
cattccaccattcattaatg

SEQ ID NO: 141738 - DNA, 20 bp, Artificial sequence
  SiRNA target sequence
attccaccattcattaatgt

SEQ ID NO: 141739 - DNA, 20 bp, Artificial sequence
  SiRNA target sequence
ttccaccattcattaatgta

SEQ ID NO: 141740 - DNA, 20 bp, Artificial sequence
  SiRNA target sequence
tccaccattcattaatgtat

SEQ ID NO: 141741 - DNA, 20 bp, Artificial sequence
  SiRNA target sequence
ccaccattcattaatgtatt

SEQ ID NO: 141742 - DNA, 20 bp, Artificial sequence
  SiRNA target sequence
caccattcattaatgtattc

SEQ ID NO: 141743 - DNA, 20 bp, Artificial sequence
  SiRNA target sequence
accattcattaatgtattct

SEQ ID NO: 141744 - DNA, 20 bp, Artificial sequence
  SiRNA target sequence
ccattcattaatgtattctt

SEQ ID NO: 141745 - DNA, 20 bp, Artificial sequence
  SiRNA target sequence
cattcattaatgtattcttt

SEQ ID NO: 141746 - DNA, 20 bp, Artificial sequence
  SiRNA target sequence
attcattaatgtattctttt

SEQ ID NO: 141747 - DNA, 20 bp, Artificial sequence
  SiRNA target sequence
ttcattaatgtattcttttc

SEQ ID NO: 141748 - DNA, 20 bp, Artificial sequence
  SiRNA target sequence
tcattaatgtattcttttct

SEQ ID NO: 141749 - DNA, 20 bp, Artificial sequence
  SiRNA target sequence
cattaatgtattcttttctc

SEQ ID NO: 141750 - DNA, 20 bp, Artificial sequence
  SiRNA target sequence
attaatgtattcttttctcc

SEQ ID NO: 141751 - DNA, 20 bp, Artificial sequence
  SiRNA target sequence
ttaatgtattcttttctcct

SEQ ID NO: 141752 - DNA, 20 bp, Artificial sequence
  SiRNA target sequence
taatgtattcttttctccta

SEQ ID NO: 141753 - DNA, 20 bp, Artificial sequence
  SiRNA target sequence
aatgtattcttttctcctat

SEQ ID NO: 141754 - DNA, 20 bp, Artificial sequence
  SiRNA target sequence
atgtattcttttctcctatt

SEQ ID NO: 141755 - DNA, 20 bp, Artificial sequence
  SiRNA target sequence
tgtattcttttctcctattt

SEQ ID NO: 141756 - DNA, 20 bp, Artificial sequence
  SiRNA target sequence
gtattcttttctcctatttt

SEQ ID NO: 141757 - DNA, 20 bp, Artificial sequence
  SiRNA target sequence
tattcttttctcctattttt

SEQ ID NO: 141758 - DNA, 20 bp, Artificial sequence
  SiRNA target sequence
attcttttctcctattttta

SEQ ID NO: 141759 - DNA, 20 bp, Artificial sequence
  SiRNA target sequence
ttcttttctcctatttttat

SEQ ID NO: 141760 - DNA, 20 bp, Artificial sequence
  SiRNA target sequence
tcttttctcctatttttata

SEQ ID NO: 141761 - DNA, 20 bp, Artificial sequence
  SiRNA target sequence
cttttctcctatttttatac

SEQ ID NO: 141762 - DNA, 20 bp, Artificial sequence
  SiRNA target sequence
ttttctcctatttttatact

SEQ ID NO: 141763 - DNA, 20 bp, Artificial sequence
  SiRNA target sequence
tttctcctatttttatactg

SEQ ID NO: 141764 - DNA, 20 bp, Artificial sequence
  SiRNA target sequence
ttctcctatttttatactgt

SEQ ID NO: 141765 - DNA, 20 bp, Artificial sequence
  SiRNA target sequence
tctcctatttttatactgta

SEQ ID NO: 141766 - DNA, 20 bp, Artificial sequence
  SiRNA target sequence
ctcctatttttatactgtaa

SEQ ID NO: 141767 - DNA, 20 bp, Artificial sequence
  SiRNA target sequence
tcctatttttatactgtaaa

SEQ ID NO: 141768 - DNA, 20 bp, Artificial sequence
  SiRNA target sequence
cctatttttatactgtaaat

SEQ ID NO: 141769 - DNA, 20 bp, Artificial sequence
  SiRNA target sequence
ctatttttatactgtaaata

SEQ ID NO: 141770 - DNA, 20 bp, Artificial sequence
  SiRNA target sequence
tatttttatactgtaaataa

SEQ ID NO: 141771 - DNA, 20 bp, Artificial sequence
  SiRNA target sequence
atttttatactgtaaataat

SEQ ID NO: 141772 - DNA, 20 bp, Artificial sequence
  SiRNA target sequence
tttttatactgtaaataata

SEQ ID NO: 141773 - DNA, 20 bp, Artificial sequence
  SiRNA target sequence
ttttatactgtaaataatac

SEQ ID NO: 141774 - DNA, 20 bp, Artificial sequence
  SiRNA target sequence
tttatactgtaaataatacg

SEQ ID NO: 141775 - DNA, 20 bp, Artificial sequence
  SiRNA target sequence
ttatactgtaaataatacgc

SEQ ID NO: 141776 - DNA, 20 bp, Artificial sequence
  SiRNA target sequence
tatactgtaaataatacgca

SEQ ID NO: 141777 - DNA, 20 bp, Artificial sequence
  SiRNA target sequence
atactgtaaataatacgcat

SEQ ID NO: 141778 - DNA, 20 bp, Artificial sequence
  SiRNA target sequence
tactgtaaataatacgcatg

SEQ ID NO: 141779 - DNA, 20 bp, Artificial sequence
  SiRNA target sequence
actgtaaataatacgcatgt

SEQ ID NO: 141780 - DNA, 20 bp, Artificial sequence
  SiRNA target sequence
ctgtaaataatacgcatgtt

SEQ ID NO: 141781 - DNA, 20 bp, Artificial sequence
  SiRNA target sequence
tgtaaataatacgcatgttc

SEQ ID NO: 141782 - DNA, 20 bp, Artificial sequence
  SiRNA target sequence
gtaaataatacgcatgttcc

SEQ ID NO: 141783 - DNA, 20 bp, Artificial sequence
  SiRNA target sequence
taaataatacgcatgttccc

SEQ ID NO: 141784 - DNA, 20 bp, Artificial sequence
  SiRNA target sequence
aaataatacgcatgttccca

SEQ ID NO: 141785 - DNA, 20 bp, Artificial sequence
  SiRNA target sequence
aataatacgcatgttcccat

SEQ ID NO: 141786 - DNA, 20 bp, Artificial sequence
  SiRNA target sequence
ataatacgcatgttcccata

SEQ ID NO: 141787 - DNA, 20 bp, Artificial sequence
  SiRNA target sequence
taatacgcatgttcccatac

SEQ ID NO: 141788 - DNA, 20 bp, Artificial sequence
  SiRNA target sequence
aatacgcatgttcccataca

SEQ ID NO: 141789 - DNA, 20 bp, Artificial sequence
  SiRNA target sequence
atacgcatgttcccatacat

SEQ ID NO: 141790 - DNA, 20 bp, Artificial sequence
  SiRNA target sequence
tacgcatgttcccatacatc

SEQ ID NO: 141791 - DNA, 20 bp, Artificial sequence
  SiRNA target sequence
acgcatgttcccatacatca

SEQ ID NO: 141792 - DNA, 20 bp, Artificial sequence
  SiRNA target sequence
cgcatgttcccatacatcaa

SEQ ID NO: 141793 - DNA, 20 bp, Artificial sequence
  SiRNA target sequence
gcatgttcccatacatcaag

SEQ ID NO: 141794 - DNA, 20 bp, Artificial sequence
  SiRNA target sequence
catgttcccatacatcaaga

SEQ ID NO: 141795 - DNA, 20 bp, Artificial sequence
  SiRNA target sequence
atgttcccatacatcaagac

SEQ ID NO: 141796 - DNA, 20 bp, Artificial sequence
  SiRNA target sequence
tgttcccatacatcaagaca

SEQ ID NO: 141797 - DNA, 20 bp, Artificial sequence
  SiRNA target sequence
gttcccatacatcaagacat

SEQ ID NO: 141798 - DNA, 20 bp, Artificial sequence
  SiRNA target sequence
ttcccatacatcaagacata

SEQ ID NO: 141799 - DNA, 20 bp, Artificial sequence
  SiRNA target sequence
tcccatacatcaagacatag

SEQ ID NO: 141800 - DNA, 20 bp, Artificial sequence
  SiRNA target sequence
cccatacatcaagacatagt

SEQ ID NO: 141801 - DNA, 20 bp, Artificial sequence
  SiRNA target sequence
ccatacatcaagacatagta

SEQ ID NO: 141802 - DNA, 20 bp, Artificial sequence
  SiRNA target sequence
catacatcaagacatagtaa

SEQ ID NO: 141803 - DNA, 20 bp, Artificial sequence
  SiRNA target sequence
atacatcaagacatagtaaa

SEQ ID NO: 141804 - DNA, 20 bp, Artificial sequence
  SiRNA target sequence
tacatcaagacatagtaaag

SEQ ID NO: 141805 - DNA, 20 bp, Artificial sequence
  SiRNA target sequence
acatcaagacatagtaaagg

SEQ ID NO: 141806 - DNA, 20 bp, Artificial sequence
  SiRNA target sequence
catcaagacatagtaaagga

SEQ ID NO: 141807 - DNA, 20 bp, Artificial sequence
  SiRNA target sequence
atcaagacatagtaaaggaa

SEQ ID NO: 141808 - DNA, 20 bp, Artificial sequence
  SiRNA target sequence
tcaagacatagtaaaggaat

SEQ ID NO: 141809 - DNA, 20 bp, Artificial sequence
  SiRNA target sequence
caagacatagtaaaggaata

SEQ ID NO: 141810 - DNA, 20 bp, Artificial sequence
  SiRNA target sequence
aagacatagtaaaggaatac

SEQ ID NO: 141811 - DNA, 20 bp, Artificial sequence
  SiRNA target sequence
agacatagtaaaggaataca

SEQ ID NO: 141812 - DNA, 20 bp, Artificial sequence
  SiRNA target sequence
gacatagtaaaggaatacat

SEQ ID NO: 141813 - DNA, 20 bp, Artificial sequence
  SiRNA target sequence
acatagtaaaggaatacatt

SEQ ID NO: 141814 - DNA, 20 bp, Artificial sequence
  SiRNA target sequence
catagtaaaggaatacattc

SEQ ID NO: 141815 - DNA, 20 bp, Artificial sequence
  SiRNA target sequence
atagtaaaggaatacattca

SEQ ID NO: 141816 - DNA, 20 bp, Artificial sequence
  SiRNA target sequence
tagtaaaggaatacattcac

SEQ ID NO: 141817 - DNA, 20 bp, Artificial sequence
  SiRNA target sequence
agtaaaggaatacattcacc

SEQ ID NO: 141818 - DNA, 20 bp, Artificial sequence
  SiRNA target sequence
gtaaaggaatacattcacca

SEQ ID NO: 141819 - DNA, 20 bp, Artificial sequence
  SiRNA target sequence
taaaggaatacattcaccat

SEQ ID NO: 141820 - DNA, 20 bp, Artificial sequence
  SiRNA target sequence
aaaggaatacattcaccatc

SEQ ID NO: 141821 - DNA, 20 bp, Artificial sequence
  SiRNA target sequence
aaggaatacattcaccatcc

SEQ ID NO: 141822 - DNA, 20 bp, Artificial sequence
  SiRNA target sequence
aggaatacattcaccatcct

SEQ ID NO: 141823 - DNA, 20 bp, Artificial sequence
  SiRNA target sequence
ggaatacattcaccatcctc

SEQ ID NO: 141824 - DNA, 20 bp, Artificial sequence
  SiRNA target sequence
gaatacattcaccatcctcc

SEQ ID NO: 141825 - DNA, 20 bp, Artificial sequence
  SiRNA target sequence
aatacattcaccatcctcca

SEQ ID NO: 141826 - DNA, 20 bp, Artificial sequence
  SiRNA target sequence
atacattcaccatcctccat

SEQ ID NO: 141827 - DNA, 20 bp, Artificial sequence
  SiRNA target sequence
tacattcaccatcctccatc

SEQ ID NO: 141828 - DNA, 20 bp, Artificial sequence
  SiRNA target sequence
acattcaccatcctccatca

SEQ ID NO: 141829 - DNA, 20 bp, Artificial sequence
  SiRNA target sequence
cattcaccatcctccatcat

SEQ ID NO: 141830 - DNA, 20 bp, Artificial sequence
  SiRNA target sequence
attcaccatcctccatcata

SEQ ID NO: 141831 - DNA, 20 bp, Artificial sequence
  SiRNA target sequence
ttcaccatcctccatcatag

SEQ ID NO: 141832 - DNA, 20 bp, Artificial sequence
  SiRNA target sequence
tcaccatcctccatcatagg

SEQ ID NO: 141833 - DNA, 20 bp, Artificial sequence
  SiRNA target sequence
caccatcctccatcatagga

SEQ ID NO: 141834 - DNA, 20 bp, Artificial sequence
  SiRNA target sequence
accatcctccatcataggat

SEQ ID NO: 141835 - DNA, 20 bp, Artificial sequence
  SiRNA target sequence
ccatcctccatcataggatt

SEQ ID NO: 141836 - DNA, 20 bp, Artificial sequence
  SiRNA target sequence
catcctccatcataggattg

SEQ ID NO: 141837 - DNA, 20 bp, Artificial sequence
  SiRNA target sequence
atcctccatcataggattgt

SEQ ID NO: 141838 - DNA, 20 bp, Artificial sequence
  SiRNA target sequence
tcctccatcataggattgtc

SEQ ID NO: 141839 - DNA, 20 bp, Artificial sequence
  SiRNA target sequence
cctccatcataggattgtct

SEQ ID NO: 141840 - DNA, 20 bp, Artificial sequence
  SiRNA target sequence
ctccatcataggattgtctt

SEQ ID NO: 141841 - DNA, 20 bp, Artificial sequence
  SiRNA target sequence
tccatcataggattgtcttg

SEQ ID NO: 141842 - DNA, 20 bp, Artificial sequence
  SiRNA target sequence
ccatcataggattgtcttga

SEQ ID NO: 141843 - DNA, 20 bp, Artificial sequence
  SiRNA target sequence
catcataggattgtcttgat

SEQ ID NO: 141844 - DNA, 20 bp, Artificial sequence
  SiRNA target sequence
atcataggattgtcttgatt

SEQ ID NO: 141845 - DNA, 20 bp, Artificial sequence
  SiRNA target sequence
tcataggattgtcttgatta

SEQ ID NO: 141846 - DNA, 20 bp, Artificial sequence
  SiRNA target sequence
cataggattgtcttgattaa

SEQ ID NO: 141847 - DNA, 20 bp, Artificial sequence
  SiRNA target sequence
ataggattgtcttgattaac

SEQ ID NO: 141848 - DNA, 20 bp, Artificial sequence
  SiRNA target sequence
taggattgtcttgattaaca

SEQ ID NO: 141849 - DNA, 20 bp, Artificial sequence
  SiRNA target sequence
aggattgtcttgattaacac

SEQ ID NO: 141850 - DNA, 20 bp, Artificial sequence
  SiRNA target sequence
ggattgtcttgattaacact

SEQ ID NO: 141851 - DNA, 20 bp, Artificial sequence
  SiRNA target sequence
gattgtcttgattaacactg

SEQ ID NO: 141852 - DNA, 20 bp, Artificial sequence
  SiRNA target sequence
attgtcttgattaacactgg

SEQ ID NO: 141853 - DNA, 20 bp, Artificial sequence
  SiRNA target sequence
ttgtcttgattaacactggt

SEQ ID NO: 141854 - DNA, 20 bp, Artificial sequence
  SiRNA target sequence
tgtcttgattaacactggtc

SEQ ID NO: 141855 - DNA, 20 bp, Artificial sequence
  SiRNA target sequence
gtcttgattaacactggtct

SEQ ID NO: 141856 - DNA, 20 bp, Artificial sequence
  SiRNA target sequence
tcttgattaacactggtctt

SEQ ID NO: 141857 - DNA, 20 bp, Artificial sequence
  SiRNA target sequence
cttgattaacactggtctta

SEQ ID NO: 141858 - DNA, 20 bp, Artificial sequence
  SiRNA target sequence
ttgattaacactggtcttaa

SEQ ID NO: 141859 - DNA, 20 bp, Artificial sequence
  SiRNA target sequence
tgattaacactggtcttaat

SEQ ID NO: 141860 - DNA, 20 bp, Artificial sequence
  SiRNA target sequence
gattaacactggtcttaata

SEQ ID NO: 141861 - DNA, 20 bp, Artificial sequence
  SiRNA target sequence
attaacactggtcttaatac

SEQ ID NO: 141862 - DNA, 20 bp, Artificial sequence
  SiRNA target sequence
ttaacactggtcttaataca

SEQ ID NO: 141863 - DNA, 20 bp, Artificial sequence
  SiRNA target sequence
taacactggtcttaatacac

SEQ ID NO: 141864 - DNA, 20 bp, Artificial sequence
  SiRNA target sequence
aacactggtcttaatacaca

SEQ ID NO: 141865 - DNA, 20 bp, Artificial sequence
  SiRNA target sequence
acactggtcttaatacacaa

SEQ ID NO: 141866 - DNA, 20 bp, Artificial sequence
  SiRNA target sequence
cactggtcttaatacacaat

SEQ ID NO: 141867 - DNA, 20 bp, Artificial sequence
  SiRNA target sequence
actggtcttaatacacaatt

SEQ ID NO: 141868 - DNA, 20 bp, Artificial sequence
  SiRNA target sequence
ctggtcttaatacacaattt

SEQ ID NO: 141869 - DNA, 20 bp, Artificial sequence
  SiRNA target sequence
tggtcttaatacacaattta

SEQ ID NO: 141870 - DNA, 20 bp, Artificial sequence
  SiRNA target sequence
ggtcttaatacacaatttat

SEQ ID NO: 141871 - DNA, 20 bp, Artificial sequence
  SiRNA target sequence
gtcttaatacacaatttatc

SEQ ID NO: 141872 - DNA, 20 bp, Artificial sequence
  SiRNA target sequence
tcttaatacacaatttatct

SEQ ID NO: 141873 - DNA, 20 bp, Artificial sequence
  SiRNA target sequence
cttaatacacaatttatctt

SEQ ID NO: 141874 - DNA, 20 bp, Artificial sequence
  SiRNA target sequence
ttaatacacaatttatcttt

SEQ ID NO: 141875 - DNA, 20 bp, Artificial sequence
  SiRNA target sequence
taatacacaatttatcttta

SEQ ID NO: 141876 - DNA, 20 bp, Artificial sequence
  SiRNA target sequence
aatacacaatttatctttat

SEQ ID NO: 141877 - DNA, 20 bp, Artificial sequence
  SiRNA target sequence
atacacaatttatctttata

SEQ ID NO: 141878 - DNA, 20 bp, Artificial sequence
  SiRNA target sequence
tacacaatttatctttatat

SEQ ID NO: 141879 - DNA, 20 bp, Artificial sequence
  SiRNA target sequence
acacaatttatctttatata

SEQ ID NO: 141880 - DNA, 20 bp, Artificial sequence
  SiRNA target sequence
cacaatttatctttatatat

SEQ ID NO: 141881 - DNA, 20 bp, Artificial sequence
  SiRNA target sequence
acaatttatctttatatatc

SEQ ID NO: 141882 - DNA, 20 bp, Artificial sequence
  SiRNA target sequence
caatttatctttatatatca

SEQ ID NO: 141883 - DNA, 20 bp, Artificial sequence
  SiRNA target sequence
aatttatctttatatatcaa

SEQ ID NO: 141884 - DNA, 20 bp, Artificial sequence
  SiRNA target sequence
atttatctttatatatcaac

SEQ ID NO: 141885 - DNA, 20 bp, Artificial sequence
  SiRNA target sequence
tttatctttatatatcaacc

SEQ ID NO: 141886 - DNA, 20 bp, Artificial sequence
  SiRNA target sequence
ttatctttatatatcaacca

SEQ ID NO: 141887 - DNA, 20 bp, Artificial sequence
  SiRNA target sequence
tatctttatatatcaaccac

SEQ ID NO: 141888 - DNA, 20 bp, Artificial sequence
  SiRNA target sequence
atctttatatatcaaccaca

SEQ ID NO: 141889 - DNA, 20 bp, Artificial sequence
  SiRNA target sequence
tctttatatatcaaccacac

SEQ ID NO: 141890 - DNA, 20 bp, Artificial sequence
  SiRNA target sequence
ctttatatatcaaccacacc

SEQ ID NO: 141891 - DNA, 20 bp, Artificial sequence
  SiRNA target sequence
tttatatatcaaccacaccc

SEQ ID NO: 141892 - DNA, 20 bp, Artificial sequence
  SiRNA target sequence
ttatatatcaaccacaccca

SEQ ID NO: 141893 - DNA, 20 bp, Artificial sequence
  SiRNA target sequence
tatatatcaaccacacccat

SEQ ID NO: 141894 - DNA, 20 bp, Artificial sequence
  SiRNA target sequence
atatatcaaccacacccatc

SEQ ID NO: 141895 - DNA, 20 bp, Artificial sequence
  SiRNA target sequence
tatatcaaccacacccatcc

SEQ ID NO: 141896 - DNA, 20 bp, Artificial sequence
  SiRNA target sequence
atatcaaccacacccatcct

SEQ ID NO: 141897 - DNA, 20 bp, Artificial sequence
  SiRNA target sequence
tatcaaccacacccatcctg

SEQ ID NO: 141898 - DNA, 20 bp, Artificial sequence
  SiRNA target sequence
atcaaccacacccatcctga

SEQ ID NO: 141899 - DNA, 20 bp, Artificial sequence
  SiRNA target sequence
tcaaccacacccatcctgat

SEQ ID NO: 141900 - DNA, 20 bp, Artificial sequence
  SiRNA target sequence
caaccacacccatcctgatc

SEQ ID NO: 141901 - DNA, 20 bp, Artificial sequence
  SiRNA target sequence
aaccacacccatcctgatcc

SEQ ID NO: 141902 - DNA, 20 bp, Artificial sequence
  SiRNA target sequence
accacacccatcctgatcca

SEQ ID NO: 141903 - DNA, 20 bp, Artificial sequence
  SiRNA target sequence
ccacacccatcctgatccaa

SEQ ID NO: 141904 - DNA, 20 bp, Artificial sequence
  SiRNA target sequence
cacacccatcctgatccaaa

SEQ ID NO: 141905 - DNA, 20 bp, Artificial sequence
  SiRNA target sequence
acacccatcctgatccaaat

SEQ ID NO: 141906 - DNA, 20 bp, Artificial sequence
  SiRNA target sequence
cacccatcctgatccaaata

SEQ ID NO: 141907 - DNA, 20 bp, Artificial sequence
  SiRNA target sequence
acccatcctgatccaaataa

SEQ ID NO: 141908 - DNA, 20 bp, Artificial sequence
  SiRNA target sequence
cccatcctgatccaaataat

SEQ ID NO: 141909 - DNA, 20 bp, Artificial sequence
  SiRNA target sequence
ccatcctgatccaaataatt

SEQ ID NO: 141910 - DNA, 20 bp, Artificial sequence
  SiRNA target sequence
catcctgatccaaataattt

SEQ ID NO: 141911 - DNA, 20 bp, Artificial sequence
  SiRNA target sequence
atcctgatccaaataatttt

SEQ ID NO: 141912 - DNA, 20 bp, Artificial sequence
  SiRNA target sequence
tcctgatccaaataatttta

SEQ ID NO: 141913 - DNA, 20 bp, Artificial sequence
  SiRNA target sequence
cctgatccaaataattttac

SEQ ID NO: 141914 - DNA, 20 bp, Artificial sequence
  SiRNA target sequence
ctgatccaaataattttaca

SEQ ID NO: 141915 - DNA, 20 bp, Artificial sequence
  SiRNA target sequence
tgatccaaataattttacag

SEQ ID NO: 141916 - DNA, 20 bp, Artificial sequence
  SiRNA target sequence
gatccaaataattttacagc

SEQ ID NO: 141917 - DNA, 20 bp, Artificial sequence
  SiRNA target sequence
atccaaataattttacagct

SEQ ID NO: 141918 - DNA, 20 bp, Artificial sequence
  SiRNA target sequence
tccaaataattttacagctt

SEQ ID NO: 141919 - DNA, 20 bp, Artificial sequence
  SiRNA target sequence
ccaaataattttacagcttc

SEQ ID NO: 141920 - DNA, 20 bp, Artificial sequence
  SiRNA target sequence
caaataattttacagcttca

SEQ ID NO: 141921 - DNA, 20 bp, Artificial sequence
  SiRNA target sequence
aaataattttacagcttcag

SEQ ID NO: 141922 - DNA, 20 bp, Artificial sequence
  SiRNA target sequence
aataattttacagcttcagt

SEQ ID NO: 141923 - DNA, 20 bp, Artificial sequence
  SiRNA target sequence
ataattttacagcttcagta

SEQ ID NO: 141924 - DNA, 20 bp, Artificial sequence
  SiRNA target sequence
taattttacagcttcagtat

SEQ ID NO: 141925 - DNA, 20 bp, Artificial sequence
  SiRNA target sequence
aattttacagcttcagtatt

SEQ ID NO: 141926 - DNA, 20 bp, Artificial sequence
  SiRNA target sequence
attttacagcttcagtatta

SEQ ID NO: 141927 - DNA, 20 bp, Artificial sequence
  SiRNA target sequence
ttttacagcttcagtattaa

SEQ ID NO: 141928 - DNA, 20 bp, Artificial sequence
  SiRNA target sequence
tttacagcttcagtattaaa

SEQ ID NO: 141929 - DNA, 20 bp, Artificial sequence
  SiRNA target sequence
ttacagcttcagtattaaaa

SEQ ID NO: 141930 - DNA, 20 bp, Artificial sequence
  SiRNA target sequence
tacagcttcagtattaaaat

SEQ ID NO: 141931 - DNA, 20 bp, Artificial sequence
  SiRNA target sequence
acagcttcagtattaaaatt

SEQ ID NO: 141932 - DNA, 20 bp, Artificial sequence
  SiRNA target sequence
cagcttcagtattaaaattc

SEQ ID NO: 141933 - DNA, 20 bp, Artificial sequence
  SiRNA target sequence
agcttcagtattaaaattct

SEQ ID NO: 141934 - DNA, 20 bp, Artificial sequence
  SiRNA target sequence
gcttcagtattaaaattctc

SEQ ID NO: 141935 - DNA, 20 bp, Artificial sequence
  SiRNA target sequence
cttcagtattaaaattctcc

SEQ ID NO: 141936 - DNA, 20 bp, Artificial sequence
  SiRNA target sequence
ttcagtattaaaattctcct

SEQ ID NO: 141937 - DNA, 20 bp, Artificial sequence
  SiRNA target sequence
tcagtattaaaattctcctt

SEQ ID NO: 141938 - DNA, 20 bp, Artificial sequence
  SiRNA target sequence
cagtattaaaattctcctta

SEQ ID NO: 141939 - DNA, 20 bp, Artificial sequence
  SiRNA target sequence
agtattaaaattctccttaa

SEQ ID NO: 141940 - DNA, 20 bp, Artificial sequence
  SiRNA target sequence
gtattaaaattctccttaaa

SEQ ID NO: 141941 - DNA, 20 bp, Artificial sequence
  SiRNA target sequence
tattaaaattctccttaaat

SEQ ID NO: 141942 - DNA, 20 bp, Artificial sequence
  SiRNA target sequence
attaaaattctccttaaatt

SEQ ID NO: 141943 - DNA, 20 bp, Artificial sequence
  SiRNA target sequence
ttaaaattctccttaaattt

SEQ ID NO: 141944 - DNA, 20 bp, Artificial sequence
  SiRNA target sequence
taaaattctccttaaattta

SEQ ID NO: 141945 - DNA, 20 bp, Artificial sequence
  SiRNA target sequence
aaaattctccttaaatttat

SEQ ID NO: 141946 - DNA, 20 bp, Artificial sequence
  SiRNA target sequence
aaattctccttaaatttatt

SEQ ID NO: 141947 - DNA, 20 bp, Artificial sequence
  SiRNA target sequence
aattctccttaaatttattt

SEQ ID NO: 141948 - DNA, 20 bp, Artificial sequence
  SiRNA target sequence
attctccttaaatttattta

SEQ ID NO: 141949 - DNA, 20 bp, Artificial sequence
  SiRNA target sequence
ttctccttaaatttatttat

SEQ ID NO: 141950 - DNA, 20 bp, Artificial sequence
  SiRNA target sequence
tctccttaaatttatttatt

SEQ ID NO: 141951 - DNA, 20 bp, Artificial sequence
  SiRNA target sequence
ctccttaaatttatttattg

SEQ ID NO: 141952 - DNA, 20 bp, Artificial sequence
  SiRNA target sequence
tccttaaatttatttattga

SEQ ID NO: 141953 - DNA, 20 bp, Artificial sequence
  SiRNA target sequence
ccttaaatttatttattgat

SEQ ID NO: 141954 - DNA, 20 bp, Artificial sequence
  SiRNA target sequence
cttaaatttatttattgatc

SEQ ID NO: 141955 - DNA, 20 bp, Artificial sequence
  SiRNA target sequence
ttaaatttatttattgatcc

SEQ ID NO: 141956 - DNA, 20 bp, Artificial sequence
  SiRNA target sequence
taaatttatttattgatcca

SEQ ID NO: 141957 - DNA, 20 bp, Artificial sequence
  SiRNA target sequence
aaatttatttattgatccaa

SEQ ID NO: 141958 - DNA, 20 bp, Artificial sequence
  SiRNA target sequence
aatttatttattgatccaaa

SEQ ID NO: 141959 - DNA, 20 bp, Artificial sequence
  SiRNA target sequence
atttatttattgatccaaag

SEQ ID NO: 141960 - DNA, 20 bp, Artificial sequence
  SiRNA target sequence
tttatttattgatccaaagt

SEQ ID NO: 141961 - DNA, 20 bp, Artificial sequence
  SiRNA target sequence
ttatttattgatccaaagtc

SEQ ID NO: 141962 - DNA, 20 bp, Artificial sequence
  SiRNA target sequence
tatttattgatccaaagtct

SEQ ID NO: 141963 - DNA, 20 bp, Artificial sequence
  SiRNA target sequence
atttattgatccaaagtctt

SEQ ID NO: 141964 - DNA, 20 bp, Artificial sequence
  SiRNA target sequence
tttattgatccaaagtcttt

SEQ ID NO: 141965 - DNA, 20 bp, Artificial sequence
  SiRNA target sequence
ttattgatccaaagtctttt

SEQ ID NO: 141966 - DNA, 20 bp, Artificial sequence
  SiRNA target sequence
tattgatccaaagtctttta

SEQ ID NO: 141967 - DNA, 20 bp, Artificial sequence
  SiRNA target sequence
attgatccaaagtcttttat

SEQ ID NO: 141968 - DNA, 20 bp, Artificial sequence
  SiRNA target sequence
ttgatccaaagtcttttatt

SEQ ID NO: 141969 - DNA, 20 bp, Artificial sequence
  SiRNA target sequence
tgatccaaagtcttttatta

SEQ ID NO: 141970 - DNA, 20 bp, Artificial sequence
  SiRNA target sequence
gatccaaagtcttttattat

SEQ ID NO: 141971 - DNA, 20 bp, Artificial sequence
  SiRNA target sequence
atccaaagtcttttattata

SEQ ID NO: 141972 - DNA, 20 bp, Artificial sequence
  SiRNA target sequence
tccaaagtcttttattatag

SEQ ID NO: 141973 - DNA, 20 bp, Artificial sequence
  SiRNA target sequence
ccaaagtcttttattatagc

SEQ ID NO: 141974 - DNA, 20 bp, Artificial sequence
  SiRNA target sequence
caaagtcttttattatagca

SEQ ID NO: 141975 - DNA, 20 bp, Artificial sequence
  SiRNA target sequence
aaagtcttttattatagcac

SEQ ID NO: 141976 - DNA, 20 bp, Artificial sequence
  SiRNA target sequence
aagtcttttattatagcact

SEQ ID NO: 141977 - DNA, 20 bp, Artificial sequence
  SiRNA target sequence
agtcttttattatagcactt

SEQ ID NO: 141978 - DNA, 20 bp, Artificial sequence
  SiRNA target sequence
gtcttttattatagcacttt

SEQ ID NO: 141979 - DNA, 20 bp, Artificial sequence
  SiRNA target sequence
tcttttattatagcactttc

SEQ ID NO: 141980 - DNA, 20 bp, Artificial sequence
  SiRNA target sequence
cttttattatagcactttcc

SEQ ID NO: 141981 - DNA, 20 bp, Artificial sequence
  SiRNA target sequence
ttttattatagcactttcca

SEQ ID NO: 141982 - DNA, 20 bp, Artificial sequence
  SiRNA target sequence
tttattatagcactttccaa

SEQ ID NO: 141983 - DNA, 20 bp, Artificial sequence
  SiRNA target sequence
ttattatagcactttccaac

SEQ ID NO: 141984 - DNA, 20 bp, Artificial sequence
  SiRNA target sequence
tattatagcactttccaact

SEQ ID NO: 141985 - DNA, 20 bp, Artificial sequence
  SiRNA target sequence
attatagcactttccaactg

SEQ ID NO: 141986 - DNA, 20 bp, Artificial sequence
  SiRNA target sequence
ttatagcactttccaactgg

SEQ ID NO: 141987 - DNA, 20 bp, Artificial sequence
  SiRNA target sequence
tatagcactttccaactggg

SEQ ID NO: 141988 - DNA, 20 bp, Artificial sequence
  SiRNA target sequence
atagcactttccaactggga

SEQ ID NO: 141989 - DNA, 20 bp, Artificial sequence
  SiRNA target sequence
tagcactttccaactgggaa

SEQ ID NO: 141990 - DNA, 20 bp, Artificial sequence
  SiRNA target sequence
agcactttccaactgggaag

SEQ ID NO: 141991 - DNA, 20 bp, Artificial sequence
  SiRNA target sequence
gcactttccaactgggaaga

SEQ ID NO: 141992 - DNA, 20 bp, Artificial sequence
  SiRNA target sequence
cactttccaactgggaagaa

SEQ ID NO: 141993 - DNA, 20 bp, Artificial sequence
  SiRNA target sequence
actttccaactgggaagaaa

SEQ ID NO: 141994 - DNA, 20 bp, Artificial sequence
  SiRNA target sequence
ctttccaactgggaagaaat

SEQ ID NO: 141995 - DNA, 20 bp, Artificial sequence
  SiRNA target sequence
tttccaactgggaagaaatc

SEQ ID NO: 141996 - DNA, 20 bp, Artificial sequence
  SiRNA target sequence
ttccaactgggaagaaatct

SEQ ID NO: 141997 - DNA, 20 bp, Artificial sequence
  SiRNA target sequence
tccaactgggaagaaatctt

SEQ ID NO: 141998 - DNA, 20 bp, Artificial sequence
  SiRNA target sequence
ccaactgggaagaaatcttt

SEQ ID NO: 141999 - DNA, 20 bp, Artificial sequence
  SiRNA target sequence
caactgggaagaaatctttt

SEQ ID NO: 142000 - DNA, 20 bp, Artificial sequence
  SiRNA target sequence
aactgggaagaaatcttttt

SEQ ID NO: 142001 - DNA, 20 bp, Artificial sequence
  SiRNA target sequence
actgggaagaaatcttttta

SEQ ID NO: 142002 - DNA, 20 bp, Artificial sequence
  SiRNA target sequence
ctgggaagaaatctttttat

SEQ ID NO: 142003 - DNA, 20 bp, Artificial sequence
  SiRNA target sequence
tgggaagaaatctttttatt

SEQ ID NO: 142004 - DNA, 20 bp, Artificial sequence
  SiRNA target sequence
gggaagaaatctttttattt

SEQ ID NO: 142005 - DNA, 20 bp, Artificial sequence
  SiRNA target sequence
ggaagaaatctttttatttt

SEQ ID NO: 142006 - DNA, 20 bp, Artificial sequence
  SiRNA target sequence
gaagaaatctttttattttc

SEQ ID NO: 142007 - DNA, 20 bp, Artificial sequence
  SiRNA target sequence
aagaaatctttttattttct

SEQ ID NO: 142008 - DNA, 20 bp, Artificial sequence
  SiRNA target sequence
agaaatctttttattttctg

SEQ ID NO: 142009 - DNA, 20 bp, Artificial sequence
  SiRNA target sequence
gaaatctttttattttctgg

SEQ ID NO: 142010 - DNA, 20 bp, Artificial sequence
  SiRNA target sequence
aaatctttttattttctggt

SEQ ID NO: 142011 - DNA, 20 bp, Artificial sequence
  SiRNA target sequence
aatctttttattttctggtg

SEQ ID NO: 142012 - DNA, 20 bp, Artificial sequence
  SiRNA target sequence
atctttttattttctggtga

SEQ ID NO: 142013 - DNA, 20 bp, Artificial sequence
  SiRNA target sequence
tctttttattttctggtgac

SEQ ID NO: 142014 - DNA, 20 bp, Artificial sequence
  SiRNA target sequence
ctttttattttctggtgaca

SEQ ID NO: 142015 - DNA, 20 bp, Artificial sequence
  SiRNA target sequence
tttttattttctggtgacat

SEQ ID NO: 142016 - DNA, 20 bp, Artificial sequence
  SiRNA target sequence
ttttattttctggtgacatt

SEQ ID NO: 142017 - DNA, 20 bp, Artificial sequence
  SiRNA target sequence
tttattttctggtgacatta

SEQ ID NO: 142018 - DNA, 20 bp, Artificial sequence
  SiRNA target sequence
ttattttctggtgacattac

SEQ ID NO: 142019 - DNA, 20 bp, Artificial sequence
  SiRNA target sequence
tattttctggtgacattacc

SEQ ID NO: 142020 - DNA, 20 bp, Artificial sequence
  SiRNA target sequence
attttctggtgacattacca

SEQ ID NO: 142021 - DNA, 20 bp, Artificial sequence
  SiRNA target sequence
ttttctggtgacattaccaa

SEQ ID NO: 142022 - DNA, 20 bp, Artificial sequence
  SiRNA target sequence
tttctggtgacattaccaac

SEQ ID NO: 142023 - DNA, 20 bp, Artificial sequence
  SiRNA target sequence
ttctggtgacattaccaacc

SEQ ID NO: 142024 - DNA, 20 bp, Artificial sequence
  SiRNA target sequence
tctggtgacattaccaacca

SEQ ID NO: 142025 - DNA, 20 bp, Artificial sequence
  SiRNA target sequence
ctggtgacattaccaaccag

SEQ ID NO: 142026 - DNA, 20 bp, Artificial sequence
  SiRNA target sequence
tggtgacattaccaaccaga

SEQ ID NO: 142027 - DNA, 20 bp, Artificial sequence
  SiRNA target sequence
ggtgacattaccaaccagaa

SEQ ID NO: 142028 - DNA, 20 bp, Artificial sequence
  SiRNA target sequence
gtgacattaccaaccagaaa

SEQ ID NO: 142029 - DNA, 20 bp, Artificial sequence
  SiRNA target sequence
tgacattaccaaccagaaaa

SEQ ID NO: 142030 - DNA, 20 bp, Artificial sequence
  SiRNA target sequence
gacattaccaaccagaaaag

SEQ ID NO: 142031 - DNA, 20 bp, Artificial sequence
  SiRNA target sequence
acattaccaaccagaaaaga

SEQ ID NO: 142032 - DNA, 20 bp, Artificial sequence
  SiRNA target sequence
cattaccaaccagaaaagac

SEQ ID NO: 142033 - DNA, 20 bp, Artificial sequence
  SiRNA target sequence
attaccaaccagaaaagact

SEQ ID NO: 142034 - DNA, 20 bp, Artificial sequence
  SiRNA target sequence
ttaccaaccagaaaagacta

SEQ ID NO: 142035 - DNA, 20 bp, Artificial sequence
  SiRNA target sequence
taccaaccagaaaagactat

SEQ ID NO: 142036 - DNA, 20 bp, Artificial sequence
  SiRNA target sequence
accaaccagaaaagactatg

SEQ ID NO: 142037 - DNA, 20 bp, Artificial sequence
  SiRNA target sequence
ccaaccagaaaagactatgg

SEQ ID NO: 142038 - DNA, 20 bp, Artificial sequence
  SiRNA target sequence
caaccagaaaagactatggt

SEQ ID NO: 142039 - DNA, 20 bp, Artificial sequence
  SiRNA target sequence
aaccagaaaagactatggtt

SEQ ID NO: 142040 - DNA, 20 bp, Artificial sequence
  SiRNA target sequence
accagaaaagactatggttg

SEQ ID NO: 142041 - DNA, 20 bp, Artificial sequence
  SiRNA target sequence
ccagaaaagactatggttgt

SEQ ID NO: 142042 - DNA, 20 bp, Artificial sequence
  SiRNA target sequence
cagaaaagactatggttgta

SEQ ID NO: 142043 - DNA, 20 bp, Artificial sequence
  SiRNA target sequence
agaaaagactatggttgtaa

SEQ ID NO: 142044 - DNA, 20 bp, Artificial sequence
  SiRNA target sequence
gaaaagactatggttgtaat

SEQ ID NO: 142045 - DNA, 20 bp, Artificial sequence
  SiRNA target sequence
aaaagactatggttgtaatg

SEQ ID NO: 142046 - DNA, 20 bp, Artificial sequence
  SiRNA target sequence
aaagactatggttgtaatga

SEQ ID NO: 142047 - DNA, 20 bp, Artificial sequence
  SiRNA target sequence
aagactatggttgtaatgac

SEQ ID NO: 142048 - DNA, 20 bp, Artificial sequence
  SiRNA target sequence
agactatggttgtaatgacc

SEQ ID NO: 142049 - DNA, 20 bp, Artificial sequence
  SiRNA target sequence
gactatggttgtaatgacca

SEQ ID NO: 142050 - DNA, 20 bp, Artificial sequence
  SiRNA target sequence
actatggttgtaatgaccac

SEQ ID NO: 142051 - DNA, 20 bp, Artificial sequence
  SiRNA target sequence
ctatggttgtaatgaccacc

SEQ ID NO: 142052 - DNA, 20 bp, Artificial sequence
  SiRNA target sequence
tatggttgtaatgaccacca

SEQ ID NO: 142053 - DNA, 20 bp, Artificial sequence
  SiRNA target sequence
atggttgtaatgaccaccac

SEQ ID NO: 142054 - DNA, 20 bp, Artificial sequence
  SiRNA target sequence
tggttgtaatgaccaccacc

SEQ ID NO: 142055 - DNA, 20 bp, Artificial sequence
  SiRNA target sequence
ggttgtaatgaccaccacca

SEQ ID NO: 142056 - DNA, 20 bp, Artificial sequence
  SiRNA target sequence
gttgtaatgaccaccaccat

SEQ ID NO: 142057 - DNA, 20 bp, Artificial sequence
  SiRNA target sequence
ttgtaatgaccaccaccata

SEQ ID NO: 142058 - DNA, 20 bp, Artificial sequence
  SiRNA target sequence
tgtaatgaccaccaccataa

SEQ ID NO: 142059 - DNA, 20 bp, Artificial sequence
  SiRNA target sequence
gtaatgaccaccaccataat

SEQ ID NO: 142060 - DNA, 20 bp, Artificial sequence
  SiRNA target sequence
taatgaccaccaccataatc

SEQ ID NO: 142061 - DNA, 20 bp, Artificial sequence
  SiRNA target sequence
aatgaccaccaccataatct

SEQ ID NO: 142062 - DNA, 20 bp, Artificial sequence
  SiRNA target sequence
atgaccaccaccataatctc

SEQ ID NO: 142063 - DNA, 20 bp, Artificial sequence
  SiRNA target sequence
tgaccaccaccataatctct

SEQ ID NO: 142064 - DNA, 20 bp, Artificial sequence
  SiRNA target sequence
gaccaccaccataatctctt

SEQ ID NO: 142065 - DNA, 20 bp, Artificial sequence
  SiRNA target sequence
accaccaccataatctctta

SEQ ID NO: 142066 - DNA, 20 bp, Artificial sequence
  SiRNA target sequence
ccaccaccataatctcttaa

SEQ ID NO: 142067 - DNA, 20 bp, Artificial sequence
  SiRNA target sequence
caccaccataatctcttaat

SEQ ID NO: 142068 - DNA, 20 bp, Artificial sequence
  SiRNA target sequence
accaccataatctcttaatt

SEQ ID NO: 142069 - DNA, 20 bp, Artificial sequence
  SiRNA target sequence
ccaccataatctcttaattg

SEQ ID NO: 142070 - DNA, 20 bp, Artificial sequence
  SiRNA target sequence
caccataatctcttaattgt

SEQ ID NO: 142071 - DNA, 20 bp, Artificial sequence
  SiRNA target sequence
accataatctcttaattgtt

SEQ ID NO: 142072 - DNA, 20 bp, Artificial sequence
  SiRNA target sequence
ccataatctcttaattgttt

SEQ ID NO: 142073 - DNA, 20 bp, Artificial sequence
  SiRNA target sequence
cataatctcttaattgttta

SEQ ID NO: 142074 - DNA, 20 bp, Artificial sequence
  SiRNA target sequence
ataatctcttaattgtttat

SEQ ID NO: 142075 - DNA, 20 bp, Artificial sequence
  SiRNA target sequence
taatctcttaattgtttatc

SEQ ID NO: 142076 - DNA, 20 bp, Artificial sequence
  SiRNA target sequence
aatctcttaattgtttatca

SEQ ID NO: 142077 - DNA, 20 bp, Artificial sequence
  SiRNA target sequence
atctcttaattgtttatcaa

SEQ ID NO: 142078 - DNA, 20 bp, Artificial sequence
  SiRNA target sequence
tctcttaattgtttatcaac

SEQ ID NO: 142079 - DNA, 20 bp, Artificial sequence
  SiRNA target sequence
ctcttaattgtttatcaaca

SEQ ID NO: 142080 - DNA, 20 bp, Artificial sequence
  SiRNA target sequence
tcttaattgtttatcaacaa

SEQ ID NO: 142081 - DNA, 20 bp, Artificial sequence
  SiRNA target sequence
cttaattgtttatcaacaag

SEQ ID NO: 142082 - DNA, 20 bp, Artificial sequence
  SiRNA target sequence
ttaattgtttatcaacaagt

SEQ ID NO: 142083 - DNA, 20 bp, Artificial sequence
  SiRNA target sequence
taattgtttatcaacaagtg

SEQ ID NO: 142084 - DNA, 20 bp, Artificial sequence
  SiRNA target sequence
aattgtttatcaacaagtgc

SEQ ID NO: 142085 - DNA, 20 bp, Artificial sequence
  SiRNA target sequence
attgtttatcaacaagtgca

SEQ ID NO: 142086 - DNA, 20 bp, Artificial sequence
  SiRNA target sequence
ttgtttatcaacaagtgcat

SEQ ID NO: 142087 - DNA, 20 bp, Artificial sequence
  SiRNA target sequence
tgtttatcaacaagtgcatt

SEQ ID NO: 142088 - DNA, 20 bp, Artificial sequence
  SiRNA target sequence
gtttatcaacaagtgcattt

SEQ ID NO: 142089 - DNA, 20 bp, Artificial sequence
  SiRNA target sequence
tttatcaacaagtgcatttc

SEQ ID NO: 142090 - DNA, 20 bp, Artificial sequence
  SiRNA target sequence
ttatcaacaagtgcatttcc

SEQ ID NO: 142091 - DNA, 20 bp, Artificial sequence
  SiRNA target sequence
tatcaacaagtgcatttcct

SEQ ID NO: 142092 - DNA, 20 bp, Artificial sequence
  SiRNA target sequence
atcaacaagtgcatttcctt

SEQ ID NO: 142093 - DNA, 20 bp, Artificial sequence
  SiRNA target sequence
tcaacaagtgcatttccttt

SEQ ID NO: 142094 - DNA, 20 bp, Artificial sequence
  SiRNA target sequence
caacaagtgcatttccttta

SEQ ID NO: 142095 - DNA, 20 bp, Artificial sequence
  SiRNA target sequence
aacaagtgcatttcctttat

SEQ ID NO: 142096 - DNA, 20 bp, Artificial sequence
  SiRNA target sequence
acaagtgcatttcctttatt

SEQ ID NO: 142097 - DNA, 20 bp, Artificial sequence
  SiRNA target sequence
caagtgcatttcctttatta

SEQ ID NO: 142098 - DNA, 20 bp, Artificial sequence
  SiRNA target sequence
aagtgcatttcctttattat

SEQ ID NO: 142099 - DNA, 20 bp, Artificial sequence
  SiRNA target sequence
agtgcatttcctttattatt

SEQ ID NO: 142100 - DNA, 20 bp, Artificial sequence
  SiRNA target sequence
gtgcatttcctttattatta

SEQ ID NO: 142101 - DNA, 20 bp, Artificial sequence
  SiRNA target sequence
tgcatttcctttattattaa

SEQ ID NO: 142102 - DNA, 20 bp, Artificial sequence
  SiRNA target sequence
gcatttcctttattattaaa

SEQ ID NO: 142103 - DNA, 20 bp, Artificial sequence
  SiRNA target sequence
catttcctttattattaaaa

SEQ ID NO: 142104 - DNA, 20 bp, Artificial sequence
  SiRNA target sequence
atttcctttattattaaaaa

SEQ ID NO: 142105 - DNA, 20 bp, Artificial sequence
  SiRNA target sequence
tttcctttattattaaaaag

SEQ ID NO: 142106 - DNA, 20 bp, Artificial sequence
  SiRNA target sequence
ttcctttattattaaaaagt

SEQ ID NO: 142107 - DNA, 20 bp, Artificial sequence
  SiRNA target sequence
tcctttattattaaaaagta

SEQ ID NO: 142108 - DNA, 20 bp, Artificial sequence
  SiRNA target sequence
cctttattattaaaaagtaa

SEQ ID NO: 142109 - DNA, 20 bp, Artificial sequence
  SiRNA target sequence
ctttattattaaaaagtaat

SEQ ID NO: 142110 - DNA, 20 bp, Artificial sequence
  SiRNA target sequence
tttattattaaaaagtaatg

SEQ ID NO: 142111 - DNA, 20 bp, Artificial sequence
  SiRNA target sequence
ttattattaaaaagtaatga

SEQ ID NO: 142112 - DNA, 20 bp, Artificial sequence
  SiRNA target sequence
tattattaaaaagtaatgaa

SEQ ID NO: 142113 - DNA, 20 bp, Artificial sequence
  SiRNA target sequence
attattaaaaagtaatgaat

SEQ ID NO: 142114 - DNA, 20 bp, Artificial sequence
  SiRNA target sequence
ttattaaaaagtaatgaatt

SEQ ID NO: 142115 - DNA, 20 bp, Artificial sequence
  SiRNA target sequence
tattaaaaagtaatgaattt

SEQ ID NO: 142116 - DNA, 20 bp, Artificial sequence
  SiRNA target sequence
attaaaaagtaatgaattta

SEQ ID NO: 142117 - DNA, 20 bp, Artificial sequence
  SiRNA target sequence
ttaaaaagtaatgaatttaa

SEQ ID NO: 142118 - DNA, 20 bp, Artificial sequence
  SiRNA target sequence
taaaaagtaatgaatttaat

SEQ ID NO: 142119 - DNA, 20 bp, Artificial sequence
  SiRNA target sequence
aaaaagtaatgaatttaatg

SEQ ID NO: 142120 - DNA, 20 bp, Artificial sequence
  SiRNA target sequence
aaaagtaatgaatttaatga

SEQ ID NO: 142121 - DNA, 20 bp, Artificial sequence
  SiRNA target sequence
aaagtaatgaatttaatgat

SEQ ID NO: 142122 - DNA, 20 bp, Artificial sequence
  SiRNA target sequence
aagtaatgaatttaatgatt

SEQ ID NO: 142123 - DNA, 20 bp, Artificial sequence
  SiRNA target sequence
agtaatgaatttaatgattt

SEQ ID NO: 142124 - DNA, 20 bp, Artificial sequence
  SiRNA target sequence
gtaatgaatttaatgattta

SEQ ID NO: 142125 - DNA, 20 bp, Artificial sequence
  SiRNA target sequence
taatgaatttaatgatttac

SEQ ID NO: 142126 - DNA, 20 bp, Artificial sequence
  SiRNA target sequence
aatgaatttaatgatttacc

SEQ ID NO: 142127 - DNA, 20 bp, Artificial sequence
  SiRNA target sequence
atgaatttaatgatttacca

SEQ ID NO: 142128 - DNA, 20 bp, Artificial sequence
  SiRNA target sequence
tgaatttaatgatttaccac

SEQ ID NO: 142129 - DNA, 20 bp, Artificial sequence
  SiRNA target sequence
gaatttaatgatttaccaca

SEQ ID NO: 142130 - DNA, 20 bp, Artificial sequence
  SiRNA target sequence
aatttaatgatttaccacac

SEQ ID NO: 142131 - DNA, 20 bp, Artificial sequence
  SiRNA target sequence
atttaatgatttaccacaca

SEQ ID NO: 142132 - DNA, 20 bp, Artificial sequence
  SiRNA target sequence
tttaatgatttaccacacaa

SEQ ID NO: 142133 - DNA, 20 bp, Artificial sequence
  SiRNA target sequence
ttaatgatttaccacacaaa

SEQ ID NO: 142134 - DNA, 20 bp, Artificial sequence
  SiRNA target sequence
taatgatttaccacacaaat

SEQ ID NO: 142135 - DNA, 20 bp, Artificial sequence
  SiRNA target sequence
aatgatttaccacacaaatt

SEQ ID NO: 142136 - DNA, 20 bp, Artificial sequence
  SiRNA target sequence
atgatttaccacacaaattg

SEQ ID NO: 142137 - DNA, 20 bp, Artificial sequence
  SiRNA target sequence
tgatttaccacacaaattgt

SEQ ID NO: 142138 - DNA, 20 bp, Artificial sequence
  SiRNA target sequence
gatttaccacacaaattgtt

SEQ ID NO: 142139 - DNA, 20 bp, Artificial sequence
  SiRNA target sequence
atttaccacacaaattgtta

SEQ ID NO: 142140 - DNA, 20 bp, Artificial sequence
  SiRNA target sequence
tttaccacacaaattgttat

SEQ ID NO: 142141 - DNA, 20 bp, Artificial sequence
  SiRNA target sequence
ttaccacacaaattgttatc

SEQ ID NO: 142142 - DNA, 20 bp, Artificial sequence
  SiRNA target sequence
taccacacaaattgttatct

SEQ ID NO: 142143 - DNA, 20 bp, Artificial sequence
  SiRNA target sequence
accacacaaattgttatcta

SEQ ID NO: 142144 - DNA, 20 bp, Artificial sequence
  SiRNA target sequence
ccacacaaattgttatctaa

SEQ ID NO: 142145 - DNA, 20 bp, Artificial sequence
  SiRNA target sequence
cacacaaattgttatctaat

SEQ ID NO: 142146 - DNA, 20 bp, Artificial sequence
  SiRNA target sequence
acacaaattgttatctaata

SEQ ID NO: 142147 - DNA, 20 bp, Artificial sequence
  SiRNA target sequence
cacaaattgttatctaatat

SEQ ID NO: 142148 - DNA, 20 bp, Artificial sequence
  SiRNA target sequence
acaaattgttatctaatatt

SEQ ID NO: 142149 - DNA, 20 bp, Artificial sequence
  SiRNA target sequence
caaattgttatctaatatta

SEQ ID NO: 142150 - DNA, 20 bp, Artificial sequence
  SiRNA target sequence
aaattgttatctaatattat

SEQ ID NO: 142151 - DNA, 20 bp, Artificial sequence
  SiRNA target sequence
aattgttatctaatattatt

SEQ ID NO: 142152 - DNA, 20 bp, Artificial sequence
  SiRNA target sequence
attgttatctaatattattt

SEQ ID NO: 142153 - DNA, 20 bp, Artificial sequence
  SiRNA target sequence
ttgttatctaatattatttt

SEQ ID NO: 142154 - DNA, 20 bp, Artificial sequence
  SiRNA target sequence
tgttatctaatattatttta

SEQ ID NO: 142155 - DNA, 20 bp, Artificial sequence
  SiRNA target sequence
gttatctaatattattttat

SEQ ID NO: 142156 - DNA, 20 bp, Artificial sequence
  SiRNA target sequence
ttatctaatattattttatt

SEQ ID NO: 142157 - DNA, 20 bp, Artificial sequence
  SiRNA target sequence
tatctaatattattttatta

SEQ ID NO: 142158 - DNA, 20 bp, Artificial sequence
  SiRNA target sequence
atctaatattattttattaa

SEQ ID NO: 142159 - DNA, 20 bp, Artificial sequence
  SiRNA target sequence
tctaatattattttattaag

SEQ ID NO: 142160 - DNA, 20 bp, Artificial sequence
  SiRNA target sequence
ctaatattattttattaaga

SEQ ID NO: 142161 - DNA, 20 bp, Artificial sequence
  SiRNA target sequence
taatattattttattaagag

SEQ ID NO: 142162 - DNA, 20 bp, Artificial sequence
  SiRNA target sequence
aatattattttattaagagt

SEQ ID NO: 142163 - DNA, 20 bp, Artificial sequence
  SiRNA target sequence
atattattttattaagagtg

SEQ ID NO: 142164 - DNA, 20 bp, Artificial sequence
  SiRNA target sequence
tattattttattaagagtgt

SEQ ID NO: 142165 - DNA, 20 bp, Artificial sequence
  SiRNA target sequence
attattttattaagagtgtc

SEQ ID NO: 142166 - DNA, 20 bp, Artificial sequence
  SiRNA target sequence
ttattttattaagagtgtct

SEQ ID NO: 142167 - DNA, 20 bp, Artificial sequence
  SiRNA target sequence
tattttattaagagtgtcta

SEQ ID NO: 142168 - DNA, 20 bp, Artificial sequence
  SiRNA target sequence
attttattaagagtgtctac

SEQ ID NO: 142169 - DNA, 20 bp, Artificial sequence
  SiRNA target sequence
ttttattaagagtgtctaca

SEQ ID NO: 142170 - DNA, 20 bp, Artificial sequence
  SiRNA target sequence
tttattaagagtgtctacat

SEQ ID NO: 142171 - DNA, 20 bp, Artificial sequence
  SiRNA target sequence
ttattaagagtgtctacata

SEQ ID NO: 142172 - DNA, 20 bp, Artificial sequence
  SiRNA target sequence
tattaagagtgtctacatac

SEQ ID NO: 142173 - DNA, 20 bp, Artificial sequence
  SiRNA target sequence
attaagagtgtctacatacg

SEQ ID NO: 142174 - DNA, 20 bp, Artificial sequence
  SiRNA target sequence
ttaagagtgtctacatacgc

SEQ ID NO: 142175 - DNA, 20 bp, Artificial sequence
  SiRNA target sequence
taagagtgtctacatacgct

SEQ ID NO: 142176 - DNA, 20 bp, Artificial sequence
  SiRNA target sequence
aagagtgtctacatacgctt

SEQ ID NO: 142177 - DNA, 20 bp, Artificial sequence
  SiRNA target sequence
agagtgtctacatacgcttg

SEQ ID NO: 142178 - DNA, 20 bp, Artificial sequence
  SiRNA target sequence
gagtgtctacatacgcttga

SEQ ID NO: 142179 - DNA, 20 bp, Artificial sequence
  SiRNA target sequence
agtgtctacatacgcttgat

SEQ ID NO: 142180 - DNA, 20 bp, Artificial sequence
  SiRNA target sequence
gtgtctacatacgcttgatg

SEQ ID NO: 142181 - DNA, 20 bp, Artificial sequence
  SiRNA target sequence
tgtctacatacgcttgatgg

SEQ ID NO: 142182 - DNA, 20 bp, Artificial sequence
  SiRNA target sequence
gtctacatacgcttgatggt

SEQ ID NO: 142183 - DNA, 20 bp, Artificial sequence
  SiRNA target sequence
tctacatacgcttgatggtg

SEQ ID NO: 142184 - DNA, 20 bp, Artificial sequence
  SiRNA target sequence
ctacatacgcttgatggtgc

SEQ ID NO: 142185 - DNA, 20 bp, Artificial sequence
  SiRNA target sequence
tacatacgcttgatggtgct

SEQ ID NO: 142186 - DNA, 20 bp, Artificial sequence
  SiRNA target sequence
acatacgcttgatggtgctt

SEQ ID NO: 142187 - DNA, 20 bp, Artificial sequence
  SiRNA target sequence
catacgcttgatggtgctta

SEQ ID NO: 142188 - DNA, 20 bp, Artificial sequence
  SiRNA target sequence
atacgcttgatggtgcttag

SEQ ID NO: 142189 - DNA, 20 bp, Artificial sequence
  SiRNA target sequence
tacgcttgatggtgcttaga

SEQ ID NO: 142190 - DNA, 20 bp, Artificial sequence
  SiRNA target sequence
acgcttgatggtgcttagag

SEQ ID NO: 142191 - DNA, 20 bp, Artificial sequence
  SiRNA target sequence
cgcttgatggtgcttagagt

SEQ ID NO: 142192 - DNA, 20 bp, Artificial sequence
  SiRNA target sequence
gcttgatggtgcttagagtg

SEQ ID NO: 142193 - DNA, 20 bp, Artificial sequence
  SiRNA target sequence
cttgatggtgcttagagtgg

SEQ ID NO: 142194 - DNA, 20 bp, Artificial sequence
  SiRNA target sequence
ttgatggtgcttagagtggt

SEQ ID NO: 142195 - DNA, 20 bp, Artificial sequence
  SiRNA target sequence
tgatggtgcttagagtggtg

SEQ ID NO: 142196 - DNA, 20 bp, Artificial sequence
  SiRNA target sequence
gatggtgcttagagtggtgg

SEQ ID NO: 142197 - DNA, 20 bp, Artificial sequence
  SiRNA target sequence
atggtgcttagagtggtggg

SEQ ID NO: 142198 - DNA, 20 bp, Artificial sequence
  SiRNA target sequence
tggtgcttagagtggtgggt

SEQ ID NO: 142199 - DNA, 20 bp, Artificial sequence
  SiRNA target sequence
ggtgcttagagtggtgggtc

SEQ ID NO: 142200 - DNA, 20 bp, Artificial sequence
  SiRNA target sequence
gtgcttagagtggtgggtct

SEQ ID NO: 142201 - DNA, 20 bp, Artificial sequence
  SiRNA target sequence
tgcttagagtggtgggtctc

SEQ ID NO: 142202 - DNA, 20 bp, Artificial sequence
  SiRNA target sequence
gcttagagtggtgggtctcc

SEQ ID NO: 142203 - DNA, 20 bp, Artificial sequence
  SiRNA target sequence
cttagagtggtgggtctcca

SEQ ID NO: 142204 - DNA, 20 bp, Artificial sequence
  SiRNA target sequence
ttagagtggtgggtctccat

SEQ ID NO: 142205 - DNA, 20 bp, Artificial sequence
  SiRNA target sequence
tagagtggtgggtctccatt

SEQ ID NO: 142206 - DNA, 20 bp, Artificial sequence
  SiRNA target sequence
agagtggtgggtctccatta

SEQ ID NO: 142207 - DNA, 20 bp, Artificial sequence
  SiRNA target sequence
gagtggtgggtctccattat

SEQ ID NO: 142208 - DNA, 20 bp, Artificial sequence
  SiRNA target sequence
agtggtgggtctccattata

SEQ ID NO: 142209 - DNA, 20 bp, Artificial sequence
  SiRNA target sequence
gtggtgggtctccattatat

SEQ ID NO: 142210 - DNA, 20 bp, Artificial sequence
  SiRNA target sequence
tggtgggtctccattatatc

SEQ ID NO: 142211 - DNA, 20 bp, Artificial sequence
  SiRNA target sequence
ggtgggtctccattatatct

SEQ ID NO: 142212 - DNA, 20 bp, Artificial sequence
  SiRNA target sequence
gtgggtctccattatatctt

SEQ ID NO: 142213 - DNA, 20 bp, Artificial sequence
  SiRNA target sequence
tgggtctccattatatcttc

SEQ ID NO: 142214 - DNA, 20 bp, Artificial sequence
  SiRNA target sequence
gggtctccattatatcttca

SEQ ID NO: 142215 - DNA, 20 bp, Artificial sequence
  SiRNA target sequence
ggtctccattatatcttcac

SEQ ID NO: 142216 - DNA, 20 bp, Artificial sequence
  SiRNA target sequence
gtctccattatatcttcact

SEQ ID NO: 142217 - DNA, 20 bp, Artificial sequence
  SiRNA target sequence
tctccattatatcttcactt

SEQ ID NO: 142218 - DNA, 20 bp, Artificial sequence
  SiRNA target sequence
ctccattatatcttcactta

SEQ ID NO: 142219 - DNA, 20 bp, Artificial sequence
  SiRNA target sequence
tccattatatcttcacttat

SEQ ID NO: 142220 - DNA, 20 bp, Artificial sequence
  SiRNA target sequence
ccattatatcttcacttata

SEQ ID NO: 142221 - DNA, 20 bp, Artificial sequence
  SiRNA target sequence
cattatatcttcacttatat

SEQ ID NO: 142222 - DNA, 20 bp, Artificial sequence
  SiRNA target sequence
attatatcttcacttatata

SEQ ID NO: 142223 - DNA, 20 bp, Artificial sequence
  SiRNA target sequence
ttatatcttcacttatataa

SEQ ID NO: 142224 - DNA, 20 bp, Artificial sequence
  SiRNA target sequence
tatatcttcacttatataag

SEQ ID NO: 142225 - DNA, 20 bp, Artificial sequence
  SiRNA target sequence
atatcttcacttatataagg

SEQ ID NO: 142226 - DNA, 20 bp, Artificial sequence
  SiRNA target sequence
tatcttcacttatataaggc

SEQ ID NO: 142227 - DNA, 20 bp, Artificial sequence
  SiRNA target sequence
atcttcacttatataaggct

SEQ ID NO: 142228 - DNA, 20 bp, Artificial sequence
  SiRNA target sequence
tcttcacttatataaggctc

SEQ ID NO: 142229 - DNA, 20 bp, Artificial sequence
  SiRNA target sequence
cttcacttatataaggctct

SEQ ID NO: 142230 - DNA, 20 bp, Artificial sequence
  SiRNA target sequence
ttcacttatataaggctcta

SEQ ID NO: 142231 - DNA, 20 bp, Artificial sequence
  SiRNA target sequence
tcacttatataaggctctag

SEQ ID NO: 142232 - DNA, 20 bp, Artificial sequence
  SiRNA target sequence
cacttatataaggctctaga

SEQ ID NO: 142233 - DNA, 20 bp, Artificial sequence
  SiRNA target sequence
acttatataaggctctagag

SEQ ID NO: 142234 - DNA, 20 bp, Artificial sequence
  SiRNA target sequence
cttatataaggctctagaga

SEQ ID NO: 142235 - DNA, 20 bp, Artificial sequence
  SiRNA target sequence
ttatataaggctctagagat

SEQ ID NO: 142236 - DNA, 20 bp, Artificial sequence
  SiRNA target sequence
tatataaggctctagagatt

SEQ ID NO: 142237 - DNA, 20 bp, Artificial sequence
  SiRNA target sequence
atataaggctctagagattt

SEQ ID NO: 142238 - DNA, 20 bp, Artificial sequence
  SiRNA target sequence
tataaggctctagagattta

SEQ ID NO: 142239 - DNA, 20 bp, Artificial sequence
  SiRNA target sequence
ataaggctctagagatttat

SEQ ID NO: 142240 - DNA, 20 bp, Artificial sequence
  SiRNA target sequence
taaggctctagagatttata

SEQ ID NO: 142241 - DNA, 20 bp, Artificial sequence
  SiRNA target sequence
aaggctctagagatttataa

SEQ ID NO: 142242 - DNA, 20 bp, Artificial sequence
  SiRNA target sequence
aggctctagagatttataac

SEQ ID NO: 142243 - DNA, 20 bp, Artificial sequence
  SiRNA target sequence
ggctctagagatttataact

SEQ ID NO: 142244 - DNA, 20 bp, Artificial sequence
  SiRNA target sequence
gctctagagatttataacta

SEQ ID NO: 142245 - DNA, 20 bp, Artificial sequence
  SiRNA target sequence
ctctagagatttataactat

SEQ ID NO: 142246 - DNA, 20 bp, Artificial sequence
  SiRNA target sequence
tctagagatttataactata

SEQ ID NO: 142247 - DNA, 20 bp, Artificial sequence
  SiRNA target sequence
ctagagatttataactatat

SEQ ID NO: 142248 - DNA, 20 bp, Artificial sequence
  SiRNA target sequence
tagagatttataactatatt

SEQ ID NO: 142249 - DNA, 20 bp, Artificial sequence
  SiRNA target sequence
agagatttataactatattt

SEQ ID NO: 142250 - DNA, 20 bp, Artificial sequence
  SiRNA target sequence
gagatttataactatatttc

SEQ ID NO: 142251 - DNA, 20 bp, Artificial sequence
  SiRNA target sequence
agatttataactatatttca

SEQ ID NO: 142252 - DNA, 20 bp, Artificial sequence
  SiRNA target sequence
gatttataactatatttcag

SEQ ID NO: 142253 - DNA, 20 bp, Artificial sequence
  SiRNA target sequence
atttataactatatttcaga

SEQ ID NO: 142254 - DNA, 20 bp, Artificial sequence
  SiRNA target sequence
tttataactatatttcagat

SEQ ID NO: 142255 - DNA, 20 bp, Artificial sequence
  SiRNA target sequence
ttataactatatttcagatt

SEQ ID NO: 142256 - DNA, 20 bp, Artificial sequence
  SiRNA target sequence
tataactatatttcagattt

SEQ ID NO: 142257 - DNA, 20 bp, Artificial sequence
  SiRNA target sequence
ataactatatttcagatttg

SEQ ID NO: 142258 - DNA, 20 bp, Artificial sequence
  SiRNA target sequence
taactatatttcagatttgg

SEQ ID NO: 142259 - DNA, 20 bp, Artificial sequence
  SiRNA target sequence
aactatatttcagatttgga

SEQ ID NO: 142260 - DNA, 20 bp, Artificial sequence
  SiRNA target sequence
actatatttcagatttggaa

SEQ ID NO: 142261 - DNA, 20 bp, Artificial sequence
  SiRNA target sequence
ctatatttcagatttggaag

SEQ ID NO: 142262 - DNA, 20 bp, Artificial sequence
  SiRNA target sequence
tatatttcagatttggaaga

SEQ ID NO: 142263 - DNA, 20 bp, Artificial sequence
  SiRNA target sequence
atatttcagatttggaagag

SEQ ID NO: 142264 - DNA, 20 bp, Artificial sequence
  SiRNA target sequence
tatttcagatttggaagagt

SEQ ID NO: 142265 - DNA, 20 bp, Artificial sequence
  SiRNA target sequence
atttcagatttggaagagtg

SEQ ID NO: 142266 - DNA, 20 bp, Artificial sequence
  SiRNA target sequence
tttcagatttggaagagtga

SEQ ID NO: 142267 - DNA, 20 bp, Artificial sequence
  SiRNA target sequence
ttcagatttggaagagtgaa

SEQ ID NO: 142268 - DNA, 20 bp, Artificial sequence
  SiRNA target sequence
tcagatttggaagagtgaac

SEQ ID NO: 142269 - DNA, 20 bp, Artificial sequence
  SiRNA target sequence
cagatttggaagagtgaaca

SEQ ID NO: 142270 - DNA, 20 bp, Artificial sequence
  SiRNA target sequence
agatttggaagagtgaacat

SEQ ID NO: 142271 - DNA, 21 bp, Artificial sequence
  SiRNA target sequence
ttaatttatgcataattgacc

SEQ ID NO: 142272 - DNA, 21 bp, Artificial sequence
  SiRNA target sequence
taatttatgcataattgacca

SEQ ID NO: 142273 - DNA, 21 bp, Artificial sequence
  SiRNA target sequence
aatttatgcataattgaccat

SEQ ID NO: 142274 - DNA, 21 bp, Artificial sequence
  SiRNA target sequence
atttatgcataattgaccatc

SEQ ID NO: 142275 - DNA, 21 bp, Artificial sequence
  SiRNA target sequence
tttatgcataattgaccatca

SEQ ID NO: 142276 - DNA, 21 bp, Artificial sequence
  SiRNA target sequence
ttatgcataattgaccatcat

SEQ ID NO: 142277 - DNA, 21 bp, Artificial sequence
  SiRNA target sequence
tatgcataattgaccatcatc

SEQ ID NO: 142278 - DNA, 21 bp, Artificial sequence
  SiRNA target sequence
atgcataattgaccatcatca

SEQ ID NO: 142279 - DNA, 21 bp, Artificial sequence
  SiRNA target sequence
tgcataattgaccatcatcag

SEQ ID NO: 142280 - DNA, 21 bp, Artificial sequence
  SiRNA target sequence
gcataattgaccatcatcagt

SEQ ID NO: 142281 - DNA, 21 bp, Artificial sequence
  SiRNA target sequence
cataattgaccatcatcagta

SEQ ID NO: 142282 - DNA, 21 bp, Artificial sequence
  SiRNA target sequence
ataattgaccatcatcagtaa

SEQ ID NO: 142283 - DNA, 21 bp, Artificial sequence
  SiRNA target sequence
taattgaccatcatcagtaat

SEQ ID NO: 142284 - DNA, 21 bp, Artificial sequence
  SiRNA target sequence
aattgaccatcatcagtaata

SEQ ID NO: 142285 - DNA, 21 bp, Artificial sequence
  SiRNA target sequence
attgaccatcatcagtaataa

SEQ ID NO: 142286 - DNA, 21 bp, Artificial sequence
  SiRNA target sequence
ttgaccatcatcagtaataaa

SEQ ID NO: 142287 - DNA, 21 bp, Artificial sequence
  SiRNA target sequence
tgaccatcatcagtaataaac

SEQ ID NO: 142288 - DNA, 21 bp, Artificial sequence
  SiRNA target sequence
gaccatcatcagtaataaaca

SEQ ID NO: 142289 - DNA, 21 bp, Artificial sequence
  SiRNA target sequence
accatcatcagtaataaacac

SEQ ID NO: 142290 - DNA, 21 bp, Artificial sequence
  SiRNA target sequence
ccatcatcagtaataaacaca

SEQ ID NO: 142291 - DNA, 21 bp, Artificial sequence
  SiRNA target sequence
catcatcagtaataaacacat

SEQ ID NO: 142292 - DNA, 21 bp, Artificial sequence
  SiRNA target sequence
atcatcagtaataaacacatt

SEQ ID NO: 142293 - DNA, 21 bp, Artificial sequence
  SiRNA target sequence
tcatcagtaataaacacatta

SEQ ID NO: 142294 - DNA, 21 bp, Artificial sequence
  SiRNA target sequence
catcagtaataaacacattac

SEQ ID NO: 142295 - DNA, 21 bp, Artificial sequence
  SiRNA target sequence
atcagtaataaacacattacc

SEQ ID NO: 142296 - DNA, 21 bp, Artificial sequence
  SiRNA target sequence
tcagtaataaacacattacct

SEQ ID NO: 142297 - DNA, 21 bp, Artificial sequence
  SiRNA target sequence
cagtaataaacacattacctt

SEQ ID NO: 142298 - DNA, 21 bp, Artificial sequence
  SiRNA target sequence
agtaataaacacattaccttt

SEQ ID NO: 142299 - DNA, 21 bp, Artificial sequence
  SiRNA target sequence
gtaataaacacattacctttc

SEQ ID NO: 142300 - DNA, 21 bp, Artificial sequence
  SiRNA target sequence
taataaacacattacctttct

SEQ ID NO: 142301 - DNA, 21 bp, Artificial sequence
  SiRNA target sequence
aataaacacattacctttctt

SEQ ID NO: 142302 - DNA, 21 bp, Artificial sequence
  SiRNA target sequence
ataaacacattacctttcttt

SEQ ID NO: 142303 - DNA, 21 bp, Artificial sequence
  SiRNA target sequence
taaacacattacctttctttt

SEQ ID NO: 142304 - DNA, 21 bp, Artificial sequence
  SiRNA target sequence
aaacacattacctttcttttc

SEQ ID NO: 142305 - DNA, 21 bp, Artificial sequence
  SiRNA target sequence
aacacattacctttcttttct

SEQ ID NO: 142306 - DNA, 21 bp, Artificial sequence
  SiRNA target sequence
acacattacctttcttttcta

SEQ ID NO: 142307 - DNA, 21 bp, Artificial sequence
  SiRNA target sequence
cacattacctttcttttctac

SEQ ID NO: 142308 - DNA, 21 bp, Artificial sequence
  SiRNA target sequence
acattacctttcttttctacc

SEQ ID NO: 142309 - DNA, 21 bp, Artificial sequence
  SiRNA target sequence
cattacctttcttttctacca

SEQ ID NO: 142310 - DNA, 21 bp, Artificial sequence
  SiRNA target sequence
attacctttcttttctaccac

SEQ ID NO: 142311 - DNA, 21 bp, Artificial sequence
  SiRNA target sequence
ttacctttcttttctaccaca

SEQ ID NO: 142312 - DNA, 21 bp, Artificial sequence
  SiRNA target sequence
tacctttcttttctaccacac

SEQ ID NO: 142313 - DNA, 21 bp, Artificial sequence
  SiRNA target sequence
acctttcttttctaccacaca

SEQ ID NO: 142314 - DNA, 21 bp, Artificial sequence
  SiRNA target sequence
cctttcttttctaccacacat

SEQ ID NO: 142315 - DNA, 21 bp, Artificial sequence
  SiRNA target sequence
ctttcttttctaccacacatt

SEQ ID NO: 142316 - DNA, 21 bp, Artificial sequence
  SiRNA target sequence
tttcttttctaccacacattt

SEQ ID NO: 142317 - DNA, 21 bp, Artificial sequence
  SiRNA target sequence
ttcttttctaccacacatttt

SEQ ID NO: 142318 - DNA, 21 bp, Artificial sequence
  SiRNA target sequence
tcttttctaccacacattttt

SEQ ID NO: 142319 - DNA, 21 bp, Artificial sequence
  SiRNA target sequence
cttttctaccacacatttttg

SEQ ID NO: 142320 - DNA, 21 bp, Artificial sequence
  SiRNA target sequence
ttttctaccacacatttttga

SEQ ID NO: 142321 - DNA, 21 bp, Artificial sequence
  SiRNA target sequence
tttctaccacacatttttgat

SEQ ID NO: 142322 - DNA, 21 bp, Artificial sequence
  SiRNA target sequence
ttctaccacacatttttgata

SEQ ID NO: 142323 - DNA, 21 bp, Artificial sequence
  SiRNA target sequence
tctaccacacatttttgatat

SEQ ID NO: 142324 - DNA, 21 bp, Artificial sequence
  SiRNA target sequence
ctaccacacatttttgatata

SEQ ID NO: 142325 - DNA, 21 bp, Artificial sequence
  SiRNA target sequence
taccacacatttttgatatat

SEQ ID NO: 142326 - DNA, 21 bp, Artificial sequence
  SiRNA target sequence
accacacatttttgatatatt

SEQ ID NO: 142327 - DNA, 21 bp, Artificial sequence
  SiRNA target sequence
ccacacatttttgatatattt

SEQ ID NO: 142328 - DNA, 21 bp, Artificial sequence
  SiRNA target sequence
cacacatttttgatatatttc

SEQ ID NO: 142329 - DNA, 21 bp, Artificial sequence
  SiRNA target sequence
acacatttttgatatatttca

SEQ ID NO: 142330 - DNA, 21 bp, Artificial sequence
  SiRNA target sequence
cacatttttgatatatttcat

SEQ ID NO: 142331 - DNA, 21 bp, Artificial sequence
  SiRNA target sequence
acatttttgatatatttcatt

SEQ ID NO: 142332 - DNA, 21 bp, Artificial sequence
  SiRNA target sequence
catttttgatatatttcatta

SEQ ID NO: 142333 - DNA, 21 bp, Artificial sequence
  SiRNA target sequence
atttttgatatatttcattaa

SEQ ID NO: 142334 - DNA, 21 bp, Artificial sequence
  SiRNA target sequence
tttttgatatatttcattaac

SEQ ID NO: 142335 - DNA, 21 bp, Artificial sequence
  SiRNA target sequence
ttttgatatatttcattaact

SEQ ID NO: 142336 - DNA, 21 bp, Artificial sequence
  SiRNA target sequence
tttgatatatttcattaacta

SEQ ID NO: 142337 - DNA, 21 bp, Artificial sequence
  SiRNA target sequence
ttgatatatttcattaactac

SEQ ID NO: 142338 - DNA, 21 bp, Artificial sequence
  SiRNA target sequence
tgatatatttcattaactaca

SEQ ID NO: 142339 - DNA, 21 bp, Artificial sequence
  SiRNA target sequence
gatatatttcattaactacat

SEQ ID NO: 142340 - DNA, 21 bp, Artificial sequence
  SiRNA target sequence
atatatttcattaactacatc

SEQ ID NO: 142341 - DNA, 21 bp, Artificial sequence
  SiRNA target sequence
tatatttcattaactacatcc

SEQ ID NO: 142342 - DNA, 21 bp, Artificial sequence
  SiRNA target sequence
atatttcattaactacatccc

SEQ ID NO: 142343 - DNA, 21 bp, Artificial sequence
  SiRNA target sequence
tatttcattaactacatccca

SEQ ID NO: 142344 - DNA, 21 bp, Artificial sequence
  SiRNA target sequence
atttcattaactacatcccaa

SEQ ID NO: 142345 - DNA, 21 bp, Artificial sequence
  SiRNA target sequence
tttcattaactacatcccaat

SEQ ID NO: 142346 - DNA, 21 bp, Artificial sequence
  SiRNA target sequence
ttcattaactacatcccaatc

SEQ ID NO: 142347 - DNA, 21 bp, Artificial sequence
  SiRNA target sequence
tcattaactacatcccaatca

SEQ ID NO: 142348 - DNA, 21 bp, Artificial sequence
  SiRNA target sequence
cattaactacatcccaatcaa

SEQ ID NO: 142349 - DNA, 21 bp, Artificial sequence
  SiRNA target sequence
attaactacatcccaatcaat

SEQ ID NO: 142350 - DNA, 21 bp, Artificial sequence
  SiRNA target sequence
ttaactacatcccaatcaatt

SEQ ID NO: 142351 - DNA, 21 bp, Artificial sequence
  SiRNA target sequence
taactacatcccaatcaatta

SEQ ID NO: 142352 - DNA, 21 bp, Artificial sequence
  SiRNA target sequence
aactacatcccaatcaattac

SEQ ID NO: 142353 - DNA, 21 bp, Artificial sequence
  SiRNA target sequence
actacatcccaatcaattaca

SEQ ID NO: 142354 - DNA, 21 bp, Artificial sequence
  SiRNA target sequence
ctacatcccaatcaattacat

SEQ ID NO: 142355 - DNA, 21 bp, Artificial sequence
  SiRNA target sequence
tacatcccaatcaattacatt

SEQ ID NO: 142356 - DNA, 21 bp, Artificial sequence
  SiRNA target sequence
acatcccaatcaattacattc

SEQ ID NO: 142357 - DNA, 21 bp, Artificial sequence
  SiRNA target sequence
catcccaatcaattacattcc

SEQ ID NO: 142358 - DNA, 21 bp, Artificial sequence
  SiRNA target sequence
atcccaatcaattacattcca

SEQ ID NO: 142359 - DNA, 21 bp, Artificial sequence
  SiRNA target sequence
tcccaatcaattacattccac

SEQ ID NO: 142360 - DNA, 21 bp, Artificial sequence
  SiRNA target sequence
cccaatcaattacattccacc

SEQ ID NO: 142361 - DNA, 21 bp, Artificial sequence
  SiRNA target sequence
ccaatcaattacattccacca

SEQ ID NO: 142362 - DNA, 21 bp, Artificial sequence
  SiRNA target sequence
caatcaattacattccaccat

SEQ ID NO: 142363 - DNA, 21 bp, Artificial sequence
  SiRNA target sequence
aatcaattacattccaccatt

SEQ ID NO: 142364 - DNA, 21 bp, Artificial sequence
  SiRNA target sequence
atcaattacattccaccattc

SEQ ID NO: 142365 - DNA, 21 bp, Artificial sequence
  SiRNA target sequence
tcaattacattccaccattca

SEQ ID NO: 142366 - DNA, 21 bp, Artificial sequence
  SiRNA target sequence
caattacattccaccattcat

SEQ ID NO: 142367 - DNA, 21 bp, Artificial sequence
  SiRNA target sequence
aattacattccaccattcatt

SEQ ID NO: 142368 - DNA, 21 bp, Artificial sequence
  SiRNA target sequence
attacattccaccattcatta

SEQ ID NO: 142369 - DNA, 21 bp, Artificial sequence
  SiRNA target sequence
ttacattccaccattcattaa

SEQ ID NO: 142370 - DNA, 21 bp, Artificial sequence
  SiRNA target sequence
tacattccaccattcattaat

SEQ ID NO: 142371 - DNA, 21 bp, Artificial sequence
  SiRNA target sequence
acattccaccattcattaatg

SEQ ID NO: 142372 - DNA, 21 bp, Artificial sequence
  SiRNA target sequence
cattccaccattcattaatgt

SEQ ID NO: 142373 - DNA, 21 bp, Artificial sequence
  SiRNA target sequence
attccaccattcattaatgta

SEQ ID NO: 142374 - DNA, 21 bp, Artificial sequence
  SiRNA target sequence
ttccaccattcattaatgtat

SEQ ID NO: 142375 - DNA, 21 bp, Artificial sequence
  SiRNA target sequence
tccaccattcattaatgtatt

SEQ ID NO: 142376 - DNA, 21 bp, Artificial sequence
  SiRNA target sequence
ccaccattcattaatgtattc

SEQ ID NO: 142377 - DNA, 21 bp, Artificial sequence
  SiRNA target sequence
caccattcattaatgtattct

SEQ ID NO: 142378 - DNA, 21 bp, Artificial sequence
  SiRNA target sequence
accattcattaatgtattctt

SEQ ID NO: 142379 - DNA, 21 bp, Artificial sequence
  SiRNA target sequence
ccattcattaatgtattcttt

SEQ ID NO: 142380 - DNA, 21 bp, Artificial sequence
  SiRNA target sequence
cattcattaatgtattctttt

SEQ ID NO: 142381 - DNA, 21 bp, Artificial sequence
  SiRNA target sequence
attcattaatgtattcttttc

SEQ ID NO: 142382 - DNA, 21 bp, Artificial sequence
  SiRNA target sequence
ttcattaatgtattcttttct

SEQ ID NO: 142383 - DNA, 21 bp, Artificial sequence
  SiRNA target sequence
tcattaatgtattcttttctc

SEQ ID NO: 142384 - DNA, 21 bp, Artificial sequence
  SiRNA target sequence
cattaatgtattcttttctcc

SEQ ID NO: 142385 - DNA, 21 bp, Artificial sequence
  SiRNA target sequence
attaatgtattcttttctcct

SEQ ID NO: 142386 - DNA, 21 bp, Artificial sequence
  SiRNA target sequence
ttaatgtattcttttctccta

SEQ ID NO: 142387 - DNA, 21 bp, Artificial sequence
  SiRNA target sequence
taatgtattcttttctcctat

SEQ ID NO: 142388 - DNA, 21 bp, Artificial sequence
  SiRNA target sequence
aatgtattcttttctcctatt

SEQ ID NO: 142389 - DNA, 21 bp, Artificial sequence
  SiRNA target sequence
atgtattcttttctcctattt

SEQ ID NO: 142390 - DNA, 21 bp, Artificial sequence
  SiRNA target sequence
tgtattcttttctcctatttt

SEQ ID NO: 142391 - DNA, 21 bp, Artificial sequence
  SiRNA target sequence
gtattcttttctcctattttt

SEQ ID NO: 142392 - DNA, 21 bp, Artificial sequence
  SiRNA target sequence
tattcttttctcctattttta

SEQ ID NO: 142393 - DNA, 21 bp, Artificial sequence
  SiRNA target sequence
attcttttctcctatttttat

SEQ ID NO: 142394 - DNA, 21 bp, Artificial sequence
  SiRNA target sequence
ttcttttctcctatttttata

SEQ ID NO: 142395 - DNA, 21 bp, Artificial sequence
  SiRNA target sequence
tcttttctcctatttttatac

SEQ ID NO: 142396 - DNA, 21 bp, Artificial sequence
  SiRNA target sequence
cttttctcctatttttatact

SEQ ID NO: 142397 - DNA, 21 bp, Artificial sequence
  SiRNA target sequence
ttttctcctatttttatactg

SEQ ID NO: 142398 - DNA, 21 bp, Artificial sequence
  SiRNA target sequence
tttctcctatttttatactgt

SEQ ID NO: 142399 - DNA, 21 bp, Artificial sequence
  SiRNA target sequence
ttctcctatttttatactgta

SEQ ID NO: 142400 - DNA, 21 bp, Artificial sequence
  SiRNA target sequence
tctcctatttttatactgtaa

SEQ ID NO: 142401 - DNA, 21 bp, Artificial sequence
  SiRNA target sequence
ctcctatttttatactgtaaa

SEQ ID NO: 142402 - DNA, 21 bp, Artificial sequence
  SiRNA target sequence
tcctatttttatactgtaaat

SEQ ID NO: 142403 - DNA, 21 bp, Artificial sequence
  SiRNA target sequence
cctatttttatactgtaaata

SEQ ID NO: 142404 - DNA, 21 bp, Artificial sequence
  SiRNA target sequence
ctatttttatactgtaaataa

SEQ ID NO: 142405 - DNA, 21 bp, Artificial sequence
  SiRNA target sequence
tatttttatactgtaaataat

SEQ ID NO: 142406 - DNA, 21 bp, Artificial sequence
  SiRNA target sequence
atttttatactgtaaataata

SEQ ID NO: 142407 - DNA, 21 bp, Artificial sequence
  SiRNA target sequence
tttttatactgtaaataatac

SEQ ID NO: 142408 - DNA, 21 bp, Artificial sequence
  SiRNA target sequence
ttttatactgtaaataatacg

SEQ ID NO: 142409 - DNA, 21 bp, Artificial sequence
  SiRNA target sequence
tttatactgtaaataatacgc

SEQ ID NO: 142410 - DNA, 21 bp, Artificial sequence
  SiRNA target sequence
ttatactgtaaataatacgca

SEQ ID NO: 142411 - DNA, 21 bp, Artificial sequence
  SiRNA target sequence
tatactgtaaataatacgcat

SEQ ID NO: 142412 - DNA, 21 bp, Artificial sequence
  SiRNA target sequence
atactgtaaataatacgcatg

SEQ ID NO: 142413 - DNA, 21 bp, Artificial sequence
  SiRNA target sequence
tactgtaaataatacgcatgt

SEQ ID NO: 142414 - DNA, 21 bp, Artificial sequence
  SiRNA target sequence
actgtaaataatacgcatgtt

SEQ ID NO: 142415 - DNA, 21 bp, Artificial sequence
  SiRNA target sequence
ctgtaaataatacgcatgttc

SEQ ID NO: 142416 - DNA, 21 bp, Artificial sequence
  SiRNA target sequence
tgtaaataatacgcatgttcc

SEQ ID NO: 142417 - DNA, 21 bp, Artificial sequence
  SiRNA target sequence
gtaaataatacgcatgttccc

SEQ ID NO: 142418 - DNA, 21 bp, Artificial sequence
  SiRNA target sequence
taaataatacgcatgttccca

SEQ ID NO: 142419 - DNA, 21 bp, Artificial sequence
  SiRNA target sequence
aaataatacgcatgttcccat

SEQ ID NO: 142420 - DNA, 21 bp, Artificial sequence
  SiRNA target sequence
aataatacgcatgttcccata

SEQ ID NO: 142421 - DNA, 21 bp, Artificial sequence
  SiRNA target sequence
ataatacgcatgttcccatac

SEQ ID NO: 142422 - DNA, 21 bp, Artificial sequence
  SiRNA target sequence
taatacgcatgttcccataca

SEQ ID NO: 142423 - DNA, 21 bp, Artificial sequence
  SiRNA target sequence
aatacgcatgttcccatacat

SEQ ID NO: 142424 - DNA, 21 bp, Artificial sequence
  SiRNA target sequence
atacgcatgttcccatacatc

SEQ ID NO: 142425 - DNA, 21 bp, Artificial sequence
  SiRNA target sequence
tacgcatgttcccatacatca

SEQ ID NO: 142426 - DNA, 21 bp, Artificial sequence
  SiRNA target sequence
acgcatgttcccatacatcaa

SEQ ID NO: 142427 - DNA, 21 bp, Artificial sequence
  SiRNA target sequence
cgcatgttcccatacatcaag

SEQ ID NO: 142428 - DNA, 21 bp, Artificial sequence
  SiRNA target sequence
gcatgttcccatacatcaaga

SEQ ID NO: 142429 - DNA, 21 bp, Artificial sequence
  SiRNA target sequence
catgttcccatacatcaagac

SEQ ID NO: 142430 - DNA, 21 bp, Artificial sequence
  SiRNA target sequence
atgttcccatacatcaagaca

SEQ ID NO: 142431 - DNA, 21 bp, Artificial sequence
  SiRNA target sequence
tgttcccatacatcaagacat

SEQ ID NO: 142432 - DNA, 21 bp, Artificial sequence
  SiRNA target sequence
gttcccatacatcaagacata

SEQ ID NO: 142433 - DNA, 21 bp, Artificial sequence
  SiRNA target sequence
ttcccatacatcaagacatag

SEQ ID NO: 142434 - DNA, 21 bp, Artificial sequence
  SiRNA target sequence
tcccatacatcaagacatagt

SEQ ID NO: 142435 - DNA, 21 bp, Artificial sequence
  SiRNA target sequence
cccatacatcaagacatagta

SEQ ID NO: 142436 - DNA, 21 bp, Artificial sequence
  SiRNA target sequence
ccatacatcaagacatagtaa

SEQ ID NO: 142437 - DNA, 21 bp, Artificial sequence
  SiRNA target sequence
catacatcaagacatagtaaa

SEQ ID NO: 142438 - DNA, 21 bp, Artificial sequence
  SiRNA target sequence
atacatcaagacatagtaaag

SEQ ID NO: 142439 - DNA, 21 bp, Artificial sequence
  SiRNA target sequence
tacatcaagacatagtaaagg

SEQ ID NO: 142440 - DNA, 21 bp, Artificial sequence
  SiRNA target sequence
acatcaagacatagtaaagga

SEQ ID NO: 142441 - DNA, 21 bp, Artificial sequence
  SiRNA target sequence
catcaagacatagtaaaggaa

SEQ ID NO: 142442 - DNA, 21 bp, Artificial sequence
  SiRNA target sequence
atcaagacatagtaaaggaat

SEQ ID NO: 142443 - DNA, 21 bp, Artificial sequence
  SiRNA target sequence
tcaagacatagtaaaggaata

SEQ ID NO: 142444 - DNA, 21 bp, Artificial sequence
  SiRNA target sequence
caagacatagtaaaggaatac

SEQ ID NO: 142445 - DNA, 21 bp, Artificial sequence
  SiRNA target sequence
aagacatagtaaaggaataca

SEQ ID NO: 142446 - DNA, 21 bp, Artificial sequence
  SiRNA target sequence
agacatagtaaaggaatacat

SEQ ID NO: 142447 - DNA, 21 bp, Artificial sequence
  SiRNA target sequence
gacatagtaaaggaatacatt

SEQ ID NO: 142448 - DNA, 21 bp, Artificial sequence
  SiRNA target sequence
acatagtaaaggaatacattc

SEQ ID NO: 142449 - DNA, 21 bp, Artificial sequence
  SiRNA target sequence
catagtaaaggaatacattca

SEQ ID NO: 142450 - DNA, 21 bp, Artificial sequence
  SiRNA target sequence
atagtaaaggaatacattcac

SEQ ID NO: 142451 - DNA, 21 bp, Artificial sequence
  SiRNA target sequence
tagtaaaggaatacattcacc

SEQ ID NO: 142452 - DNA, 21 bp, Artificial sequence
  SiRNA target sequence
agtaaaggaatacattcacca

SEQ ID NO: 142453 - DNA, 21 bp, Artificial sequence
  SiRNA target sequence
gtaaaggaatacattcaccat

SEQ ID NO: 142454 - DNA, 21 bp, Artificial sequence
  SiRNA target sequence
taaaggaatacattcaccatc

SEQ ID NO: 142455 - DNA, 21 bp, Artificial sequence
  SiRNA target sequence
aaaggaatacattcaccatcc

SEQ ID NO: 142456 - DNA, 21 bp, Artificial sequence
  SiRNA target sequence
aaggaatacattcaccatcct

SEQ ID NO: 142457 - DNA, 21 bp, Artificial sequence
  SiRNA target sequence
aggaatacattcaccatcctc

SEQ ID NO: 142458 - DNA, 21 bp, Artificial sequence
  SiRNA target sequence
ggaatacattcaccatcctcc

SEQ ID NO: 142459 - DNA, 21 bp, Artificial sequence
  SiRNA target sequence
gaatacattcaccatcctcca

SEQ ID NO: 142460 - DNA, 21 bp, Artificial sequence
  SiRNA target sequence
aatacattcaccatcctccat

SEQ ID NO: 142461 - DNA, 21 bp, Artificial sequence
  SiRNA target sequence
atacattcaccatcctccatc

SEQ ID NO: 142462 - DNA, 21 bp, Artificial sequence
  SiRNA target sequence
tacattcaccatcctccatca

SEQ ID NO: 142463 - DNA, 21 bp, Artificial sequence
  SiRNA target sequence
acattcaccatcctccatcat

SEQ ID NO: 142464 - DNA, 21 bp, Artificial sequence
  SiRNA target sequence
cattcaccatcctccatcata

SEQ ID NO: 142465 - DNA, 21 bp, Artificial sequence
  SiRNA target sequence
attcaccatcctccatcatag

SEQ ID NO: 142466 - DNA, 21 bp, Artificial sequence
  SiRNA target sequence
ttcaccatcctccatcatagg

SEQ ID NO: 142467 - DNA, 21 bp, Artificial sequence
  SiRNA target sequence
tcaccatcctccatcatagga

SEQ ID NO: 142468 - DNA, 21 bp, Artificial sequence
  SiRNA target sequence
caccatcctccatcataggat

SEQ ID NO: 142469 - DNA, 21 bp, Artificial sequence
  SiRNA target sequence
accatcctccatcataggatt

SEQ ID NO: 142470 - DNA, 21 bp, Artificial sequence
  SiRNA target sequence
ccatcctccatcataggattg

SEQ ID NO: 142471 - DNA, 21 bp, Artificial sequence
  SiRNA target sequence
catcctccatcataggattgt

SEQ ID NO: 142472 - DNA, 21 bp, Artificial sequence
  SiRNA target sequence
atcctccatcataggattgtc

SEQ ID NO: 142473 - DNA, 21 bp, Artificial sequence
  SiRNA target sequence
tcctccatcataggattgtct

SEQ ID NO: 142474 - DNA, 21 bp, Artificial sequence
  SiRNA target sequence
cctccatcataggattgtctt

SEQ ID NO: 142475 - DNA, 21 bp, Artificial sequence
  SiRNA target sequence
ctccatcataggattgtcttg

SEQ ID NO: 142476 - DNA, 21 bp, Artificial sequence
  SiRNA target sequence
tccatcataggattgtcttga

SEQ ID NO: 142477 - DNA, 21 bp, Artificial sequence
  SiRNA target sequence
ccatcataggattgtcttgat

SEQ ID NO: 142478 - DNA, 21 bp, Artificial sequence
  SiRNA target sequence
catcataggattgtcttgatt

SEQ ID NO: 142479 - DNA, 21 bp, Artificial sequence
  SiRNA target sequence
atcataggattgtcttgatta

SEQ ID NO: 142480 - DNA, 21 bp, Artificial sequence
  SiRNA target sequence
tcataggattgtcttgattaa

SEQ ID NO: 142481 - DNA, 21 bp, Artificial sequence
  SiRNA target sequence
cataggattgtcttgattaac

SEQ ID NO: 142482 - DNA, 21 bp, Artificial sequence
  SiRNA target sequence
ataggattgtcttgattaaca

SEQ ID NO: 142483 - DNA, 21 bp, Artificial sequence
  SiRNA target sequence
taggattgtcttgattaacac

SEQ ID NO: 142484 - DNA, 21 bp, Artificial sequence
  SiRNA target sequence
aggattgtcttgattaacact

SEQ ID NO: 142485 - DNA, 21 bp, Artificial sequence
  SiRNA target sequence
ggattgtcttgattaacactg

SEQ ID NO: 142486 - DNA, 21 bp, Artificial sequence
  SiRNA target sequence
gattgtcttgattaacactgg

SEQ ID NO: 142487 - DNA, 21 bp, Artificial sequence
  SiRNA target sequence
attgtcttgattaacactggt

SEQ ID NO: 142488 - DNA, 21 bp, Artificial sequence
  SiRNA target sequence
ttgtcttgattaacactggtc

SEQ ID NO: 142489 - DNA, 21 bp, Artificial sequence
  SiRNA target sequence
tgtcttgattaacactggtct

SEQ ID NO: 142490 - DNA, 21 bp, Artificial sequence
  SiRNA target sequence
gtcttgattaacactggtctt

SEQ ID NO: 142491 - DNA, 21 bp, Artificial sequence
  SiRNA target sequence
tcttgattaacactggtctta

SEQ ID NO: 142492 - DNA, 21 bp, Artificial sequence
  SiRNA target sequence
cttgattaacactggtcttaa

SEQ ID NO: 142493 - DNA, 21 bp, Artificial sequence
  SiRNA target sequence
ttgattaacactggtcttaat

SEQ ID NO: 142494 - DNA, 21 bp, Artificial sequence
  SiRNA target sequence
tgattaacactggtcttaata

SEQ ID NO: 142495 - DNA, 21 bp, Artificial sequence
  SiRNA target sequence
gattaacactggtcttaatac

SEQ ID NO: 142496 - DNA, 21 bp, Artificial sequence
  SiRNA target sequence
attaacactggtcttaataca

SEQ ID NO: 142497 - DNA, 21 bp, Artificial sequence
  SiRNA target sequence
ttaacactggtcttaatacac

SEQ ID NO: 142498 - DNA, 21 bp, Artificial sequence
  SiRNA target sequence
taacactggtcttaatacaca

SEQ ID NO: 142499 - DNA, 21 bp, Artificial sequence
  SiRNA target sequence
aacactggtcttaatacacaa

SEQ ID NO: 142500 - DNA, 21 bp, Artificial sequence
  SiRNA target sequence
acactggtcttaatacacaat

SEQ ID NO: 142501 - DNA, 21 bp, Artificial sequence
  SiRNA target sequence
cactggtcttaatacacaatt

SEQ ID NO: 142502 - DNA, 21 bp, Artificial sequence
  SiRNA target sequence
actggtcttaatacacaattt

SEQ ID NO: 142503 - DNA, 21 bp, Artificial sequence
  SiRNA target sequence
ctggtcttaatacacaattta

SEQ ID NO: 142504 - DNA, 21 bp, Artificial sequence
  SiRNA target sequence
tggtcttaatacacaatttat

SEQ ID NO: 142505 - DNA, 21 bp, Artificial sequence
  SiRNA target sequence
ggtcttaatacacaatttatc

SEQ ID NO: 142506 - DNA, 21 bp, Artificial sequence
  SiRNA target sequence
gtcttaatacacaatttatct

SEQ ID NO: 142507 - DNA, 21 bp, Artificial sequence
  SiRNA target sequence
tcttaatacacaatttatctt

SEQ ID NO: 142508 - DNA, 21 bp, Artificial sequence
  SiRNA target sequence
cttaatacacaatttatcttt

SEQ ID NO: 142509 - DNA, 21 bp, Artificial sequence
  SiRNA target sequence
ttaatacacaatttatcttta

SEQ ID NO: 142510 - DNA, 21 bp, Artificial sequence
  SiRNA target sequence
taatacacaatttatctttat

SEQ ID NO: 142511 - DNA, 21 bp, Artificial sequence
  SiRNA target sequence
aatacacaatttatctttata

SEQ ID NO: 142512 - DNA, 21 bp, Artificial sequence
  SiRNA target sequence
atacacaatttatctttatat

SEQ ID NO: 142513 - DNA, 21 bp, Artificial sequence
  SiRNA target sequence
tacacaatttatctttatata

SEQ ID NO: 142514 - DNA, 21 bp, Artificial sequence
  SiRNA target sequence
acacaatttatctttatatat

SEQ ID NO: 142515 - DNA, 21 bp, Artificial sequence
  SiRNA target sequence
cacaatttatctttatatatc

SEQ ID NO: 142516 - DNA, 21 bp, Artificial sequence
  SiRNA target sequence
acaatttatctttatatatca

SEQ ID NO: 142517 - DNA, 21 bp, Artificial sequence
  SiRNA target sequence
caatttatctttatatatcaa

SEQ ID NO: 142518 - DNA, 21 bp, Artificial sequence
  SiRNA target sequence
aatttatctttatatatcaac

SEQ ID NO: 142519 - DNA, 21 bp, Artificial sequence
  SiRNA target sequence
atttatctttatatatcaacc

SEQ ID NO: 142520 - DNA, 21 bp, Artificial sequence
  SiRNA target sequence
tttatctttatatatcaacca

SEQ ID NO: 142521 - DNA, 21 bp, Artificial sequence
  SiRNA target sequence
ttatctttatatatcaaccac

SEQ ID NO: 142522 - DNA, 21 bp, Artificial sequence
  SiRNA target sequence
tatctttatatatcaaccaca

SEQ ID NO: 142523 - DNA, 21 bp, Artificial sequence
  SiRNA target sequence
atctttatatatcaaccacac

SEQ ID NO: 142524 - DNA, 21 bp, Artificial sequence
  SiRNA target sequence
tctttatatatcaaccacacc

SEQ ID NO: 142525 - DNA, 21 bp, Artificial sequence
  SiRNA target sequence
ctttatatatcaaccacaccc

SEQ ID NO: 142526 - DNA, 21 bp, Artificial sequence
  SiRNA target sequence
tttatatatcaaccacaccca

SEQ ID NO: 142527 - DNA, 21 bp, Artificial sequence
  SiRNA target sequence
ttatatatcaaccacacccat

SEQ ID NO: 142528 - DNA, 21 bp, Artificial sequence
  SiRNA target sequence
tatatatcaaccacacccatc

SEQ ID NO: 142529 - DNA, 21 bp, Artificial sequence
  SiRNA target sequence
atatatcaaccacacccatcc

SEQ ID NO: 142530 - DNA, 21 bp, Artificial sequence
  SiRNA target sequence
tatatcaaccacacccatcct

SEQ ID NO: 142531 - DNA, 21 bp, Artificial sequence
  SiRNA target sequence
atatcaaccacacccatcctg

SEQ ID NO: 142532 - DNA, 21 bp, Artificial sequence
  SiRNA target sequence
tatcaaccacacccatcctga

SEQ ID NO: 142533 - DNA, 21 bp, Artificial sequence
  SiRNA target sequence
atcaaccacacccatcctgat

SEQ ID NO: 142534 - DNA, 21 bp, Artificial sequence
  SiRNA target sequence
tcaaccacacccatcctgatc

SEQ ID NO: 142535 - DNA, 21 bp, Artificial sequence
  SiRNA target sequence
caaccacacccatcctgatcc

SEQ ID NO: 142536 - DNA, 21 bp, Artificial sequence
  SiRNA target sequence
aaccacacccatcctgatcca

SEQ ID NO: 142537 - DNA, 21 bp, Artificial sequence
  SiRNA target sequence
accacacccatcctgatccaa

SEQ ID NO: 142538 - DNA, 21 bp, Artificial sequence
  SiRNA target sequence
ccacacccatcctgatccaaa

SEQ ID NO: 142539 - DNA, 21 bp, Artificial sequence
  SiRNA target sequence
cacacccatcctgatccaaat

SEQ ID NO: 142540 - DNA, 21 bp, Artificial sequence
  SiRNA target sequence
acacccatcctgatccaaata

SEQ ID NO: 142541 - DNA, 21 bp, Artificial sequence
  SiRNA target sequence
cacccatcctgatccaaataa

SEQ ID NO: 142542 - DNA, 21 bp, Artificial sequence
  SiRNA target sequence
acccatcctgatccaaataat

SEQ ID NO: 142543 - DNA, 21 bp, Artificial sequence
  SiRNA target sequence
cccatcctgatccaaataatt

SEQ ID NO: 142544 - DNA, 21 bp, Artificial sequence
  SiRNA target sequence
ccatcctgatccaaataattt

SEQ ID NO: 142545 - DNA, 21 bp, Artificial sequence
  SiRNA target sequence
catcctgatccaaataatttt

SEQ ID NO: 142546 - DNA, 21 bp, Artificial sequence
  SiRNA target sequence
atcctgatccaaataatttta

SEQ ID NO: 142547 - DNA, 21 bp, Artificial sequence
  SiRNA target sequence
tcctgatccaaataattttac

SEQ ID NO: 142548 - DNA, 21 bp, Artificial sequence
  SiRNA target sequence
cctgatccaaataattttaca

SEQ ID NO: 142549 - DNA, 21 bp, Artificial sequence
  SiRNA target sequence
ctgatccaaataattttacag

SEQ ID NO: 142550 - DNA, 21 bp, Artificial sequence
  SiRNA target sequence
tgatccaaataattttacagc

SEQ ID NO: 142551 - DNA, 21 bp, Artificial sequence
  SiRNA target sequence
gatccaaataattttacagct

SEQ ID NO: 142552 - DNA, 21 bp, Artificial sequence
  SiRNA target sequence
atccaaataattttacagctt

SEQ ID NO: 142553 - DNA, 21 bp, Artificial sequence
  SiRNA target sequence
tccaaataattttacagcttc

SEQ ID NO: 142554 - DNA, 21 bp, Artificial sequence
  SiRNA target sequence
ccaaataattttacagcttca

SEQ ID NO: 142555 - DNA, 21 bp, Artificial sequence
  SiRNA target sequence
caaataattttacagcttcag

SEQ ID NO: 142556 - DNA, 21 bp, Artificial sequence
  SiRNA target sequence
aaataattttacagcttcagt

SEQ ID NO: 142557 - DNA, 21 bp, Artificial sequence
  SiRNA target sequence
aataattttacagcttcagta

SEQ ID NO: 142558 - DNA, 21 bp, Artificial sequence
  SiRNA target sequence
ataattttacagcttcagtat

SEQ ID NO: 142559 - DNA, 21 bp, Artificial sequence
  SiRNA target sequence
taattttacagcttcagtatt

SEQ ID NO: 142560 - DNA, 21 bp, Artificial sequence
  SiRNA target sequence
aattttacagcttcagtatta

SEQ ID NO: 142561 - DNA, 21 bp, Artificial sequence
  SiRNA target sequence
attttacagcttcagtattaa

SEQ ID NO: 142562 - DNA, 21 bp, Artificial sequence
  SiRNA target sequence
ttttacagcttcagtattaaa

SEQ ID NO: 142563 - DNA, 21 bp, Artificial sequence
  SiRNA target sequence
tttacagcttcagtattaaaa

SEQ ID NO: 142564 - DNA, 21 bp, Artificial sequence
  SiRNA target sequence
ttacagcttcagtattaaaat

SEQ ID NO: 142565 - DNA, 21 bp, Artificial sequence
  SiRNA target sequence
tacagcttcagtattaaaatt

SEQ ID NO: 142566 - DNA, 21 bp, Artificial sequence
  SiRNA target sequence
acagcttcagtattaaaattc

SEQ ID NO: 142567 - DNA, 21 bp, Artificial sequence
  SiRNA target sequence
cagcttcagtattaaaattct

SEQ ID NO: 142568 - DNA, 21 bp, Artificial sequence
  SiRNA target sequence
agcttcagtattaaaattctc

SEQ ID NO: 142569 - DNA, 21 bp, Artificial sequence
  SiRNA target sequence
gcttcagtattaaaattctcc

SEQ ID NO: 142570 - DNA, 21 bp, Artificial sequence
  SiRNA target sequence
cttcagtattaaaattctcct

SEQ ID NO: 142571 - DNA, 21 bp, Artificial sequence
  SiRNA target sequence
ttcagtattaaaattctcctt

SEQ ID NO: 142572 - DNA, 21 bp, Artificial sequence
  SiRNA target sequence
tcagtattaaaattctcctta

SEQ ID NO: 142573 - DNA, 21 bp, Artificial sequence
  SiRNA target sequence
cagtattaaaattctccttaa

SEQ ID NO: 142574 - DNA, 21 bp, Artificial sequence
  SiRNA target sequence
agtattaaaattctccttaaa

SEQ ID NO: 142575 - DNA, 21 bp, Artificial sequence
  SiRNA target sequence
gtattaaaattctccttaaat

SEQ ID NO: 142576 - DNA, 21 bp, Artificial sequence
  SiRNA target sequence
tattaaaattctccttaaatt

SEQ ID NO: 142577 - DNA, 21 bp, Artificial sequence
  SiRNA target sequence
attaaaattctccttaaattt

SEQ ID NO: 142578 - DNA, 21 bp, Artificial sequence
  SiRNA target sequence
ttaaaattctccttaaattta

SEQ ID NO: 142579 - DNA, 21 bp, Artificial sequence
  SiRNA target sequence
taaaattctccttaaatttat

SEQ ID NO: 142580 - DNA, 21 bp, Artificial sequence
  SiRNA target sequence
aaaattctccttaaatttatt

SEQ ID NO: 142581 - DNA, 21 bp, Artificial sequence
  SiRNA target sequence
aaattctccttaaatttattt

SEQ ID NO: 142582 - DNA, 21 bp, Artificial sequence
  SiRNA target sequence
aattctccttaaatttattta

SEQ ID NO: 142583 - DNA, 21 bp, Artificial sequence
  SiRNA target sequence
attctccttaaatttatttat

SEQ ID NO: 142584 - DNA, 21 bp, Artificial sequence
  SiRNA target sequence
ttctccttaaatttatttatt

SEQ ID NO: 142585 - DNA, 21 bp, Artificial sequence
  SiRNA target sequence
tctccttaaatttatttattg

SEQ ID NO: 142586 - DNA, 21 bp, Artificial sequence
  SiRNA target sequence
ctccttaaatttatttattga

SEQ ID NO: 142587 - DNA, 21 bp, Artificial sequence
  SiRNA target sequence
tccttaaatttatttattgat

SEQ ID NO: 142588 - DNA, 21 bp, Artificial sequence
  SiRNA target sequence
ccttaaatttatttattgatc

SEQ ID NO: 142589 - DNA, 21 bp, Artificial sequence
  SiRNA target sequence
cttaaatttatttattgatcc

SEQ ID NO: 142590 - DNA, 21 bp, Artificial sequence
  SiRNA target sequence
ttaaatttatttattgatcca

SEQ ID NO: 142591 - DNA, 21 bp, Artificial sequence
  SiRNA target sequence
taaatttatttattgatccaa

SEQ ID NO: 142592 - DNA, 21 bp, Artificial sequence
  SiRNA target sequence
aaatttatttattgatccaaa

SEQ ID NO: 142593 - DNA, 21 bp, Artificial sequence
  SiRNA target sequence
aatttatttattgatccaaag

SEQ ID NO: 142594 - DNA, 21 bp, Artificial sequence
  SiRNA target sequence
atttatttattgatccaaagt

SEQ ID NO: 142595 - DNA, 21 bp, Artificial sequence
  SiRNA target sequence
tttatttattgatccaaagtc

SEQ ID NO: 142596 - DNA, 21 bp, Artificial sequence
  SiRNA target sequence
ttatttattgatccaaagtct

SEQ ID NO: 142597 - DNA, 21 bp, Artificial sequence
  SiRNA target sequence
tatttattgatccaaagtctt

SEQ ID NO: 142598 - DNA, 21 bp, Artificial sequence
  SiRNA target sequence
atttattgatccaaagtcttt

SEQ ID NO: 142599 - DNA, 21 bp, Artificial sequence
  SiRNA target sequence
tttattgatccaaagtctttt

SEQ ID NO: 142600 - DNA, 21 bp, Artificial sequence
  SiRNA target sequence
ttattgatccaaagtctttta

SEQ ID NO: 142601 - DNA, 21 bp, Artificial sequence
  SiRNA target sequence
tattgatccaaagtcttttat

SEQ ID NO: 142602 - DNA, 21 bp, Artificial sequence
  SiRNA target sequence
attgatccaaagtcttttatt

SEQ ID NO: 142603 - DNA, 21 bp, Artificial sequence
  SiRNA target sequence
ttgatccaaagtcttttatta

SEQ ID NO: 142604 - DNA, 21 bp, Artificial sequence
  SiRNA target sequence
tgatccaaagtcttttattat

SEQ ID NO: 142605 - DNA, 21 bp, Artificial sequence
  SiRNA target sequence
gatccaaagtcttttattata

SEQ ID NO: 142606 - DNA, 21 bp, Artificial sequence
  SiRNA target sequence
atccaaagtcttttattatag

SEQ ID NO: 142607 - DNA, 21 bp, Artificial sequence
  SiRNA target sequence
tccaaagtcttttattatagc

SEQ ID NO: 142608 - DNA, 21 bp, Artificial sequence
  SiRNA target sequence
ccaaagtcttttattatagca

SEQ ID NO: 142609 - DNA, 21 bp, Artificial sequence
  SiRNA target sequence
caaagtcttttattatagcac

SEQ ID NO: 142610 - DNA, 21 bp, Artificial sequence
  SiRNA target sequence
aaagtcttttattatagcact

SEQ ID NO: 142611 - DNA, 21 bp, Artificial sequence
  SiRNA target sequence
aagtcttttattatagcactt

SEQ ID NO: 142612 - DNA, 21 bp, Artificial sequence
  SiRNA target sequence
agtcttttattatagcacttt

SEQ ID NO: 142613 - DNA, 21 bp, Artificial sequence
  SiRNA target sequence
gtcttttattatagcactttc

SEQ ID NO: 142614 - DNA, 21 bp, Artificial sequence
  SiRNA target sequence
tcttttattatagcactttcc

SEQ ID NO: 142615 - DNA, 21 bp, Artificial sequence
  SiRNA target sequence
cttttattatagcactttcca

SEQ ID NO: 142616 - DNA, 21 bp, Artificial sequence
  SiRNA target sequence
ttttattatagcactttccaa

SEQ ID NO: 142617 - DNA, 21 bp, Artificial sequence
  SiRNA target sequence
tttattatagcactttccaac

SEQ ID NO: 142618 - DNA, 21 bp, Artificial sequence
  SiRNA target sequence
ttattatagcactttccaact

SEQ ID NO: 142619 - DNA, 21 bp, Artificial sequence
  SiRNA target sequence
tattatagcactttccaactg

SEQ ID NO: 142620 - DNA, 21 bp, Artificial sequence
  SiRNA target sequence
attatagcactttccaactgg

SEQ ID NO: 142621 - DNA, 21 bp, Artificial sequence
  SiRNA target sequence
ttatagcactttccaactggg

SEQ ID NO: 142622 - DNA, 21 bp, Artificial sequence
  SiRNA target sequence
tatagcactttccaactggga

SEQ ID NO: 142623 - DNA, 21 bp, Artificial sequence
  SiRNA target sequence
atagcactttccaactgggaa

SEQ ID NO: 142624 - DNA, 21 bp, Artificial sequence
  SiRNA target sequence
tagcactttccaactgggaag

SEQ ID NO: 142625 - DNA, 21 bp, Artificial sequence
  SiRNA target sequence
agcactttccaactgggaaga

SEQ ID NO: 142626 - DNA, 21 bp, Artificial sequence
  SiRNA target sequence
gcactttccaactgggaagaa

SEQ ID NO: 142627 - DNA, 21 bp, Artificial sequence
  SiRNA target sequence
cactttccaactgggaagaaa

SEQ ID NO: 142628 - DNA, 21 bp, Artificial sequence
  SiRNA target sequence
actttccaactgggaagaaat

SEQ ID NO: 142629 - DNA, 21 bp, Artificial sequence
  SiRNA target sequence
ctttccaactgggaagaaatc

SEQ ID NO: 142630 - DNA, 21 bp, Artificial sequence
  SiRNA target sequence
tttccaactgggaagaaatct

SEQ ID NO: 142631 - DNA, 21 bp, Artificial sequence
  SiRNA target sequence
ttccaactgggaagaaatctt

SEQ ID NO: 142632 - DNA, 21 bp, Artificial sequence
  SiRNA target sequence
tccaactgggaagaaatcttt

SEQ ID NO: 142633 - DNA, 21 bp, Artificial sequence
  SiRNA target sequence
ccaactgggaagaaatctttt

SEQ ID NO: 142634 - DNA, 21 bp, Artificial sequence
  SiRNA target sequence
caactgggaagaaatcttttt

SEQ ID NO: 142635 - DNA, 21 bp, Artificial sequence
  SiRNA target sequence
aactgggaagaaatcttttta

SEQ ID NO: 142636 - DNA, 21 bp, Artificial sequence
  SiRNA target sequence
actgggaagaaatctttttat

SEQ ID NO: 142637 - DNA, 21 bp, Artificial sequence
  SiRNA target sequence
ctgggaagaaatctttttatt

SEQ ID NO: 142638 - DNA, 21 bp, Artificial sequence
  SiRNA target sequence
tgggaagaaatctttttattt

SEQ ID NO: 142639 - DNA, 21 bp, Artificial sequence
  SiRNA target sequence
gggaagaaatctttttatttt

SEQ ID NO: 142640 - DNA, 21 bp, Artificial sequence
  SiRNA target sequence
ggaagaaatctttttattttc

SEQ ID NO: 142641 - DNA, 21 bp, Artificial sequence
  SiRNA target sequence
gaagaaatctttttattttct

SEQ ID NO: 142642 - DNA, 21 bp, Artificial sequence
  SiRNA target sequence
aagaaatctttttattttctg

SEQ ID NO: 142643 - DNA, 21 bp, Artificial sequence
  SiRNA target sequence
agaaatctttttattttctgg

SEQ ID NO: 142644 - DNA, 21 bp, Artificial sequence
  SiRNA target sequence
gaaatctttttattttctggt

SEQ ID NO: 142645 - DNA, 21 bp, Artificial sequence
  SiRNA target sequence
aaatctttttattttctggtg

SEQ ID NO: 142646 - DNA, 21 bp, Artificial sequence
  SiRNA target sequence
aatctttttattttctggtga

SEQ ID NO: 142647 - DNA, 21 bp, Artificial sequence
  SiRNA target sequence
atctttttattttctggtgac

SEQ ID NO: 142648 - DNA, 21 bp, Artificial sequence
  SiRNA target sequence
tctttttattttctggtgaca

SEQ ID NO: 142649 - DNA, 21 bp, Artificial sequence
  SiRNA target sequence
ctttttattttctggtgacat

SEQ ID NO: 142650 - DNA, 21 bp, Artificial sequence
  SiRNA target sequence
tttttattttctggtgacatt

SEQ ID NO: 142651 - DNA, 21 bp, Artificial sequence
  SiRNA target sequence
ttttattttctggtgacatta

SEQ ID NO: 142652 - DNA, 21 bp, Artificial sequence
  SiRNA target sequence
tttattttctggtgacattac

SEQ ID NO: 142653 - DNA, 21 bp, Artificial sequence
  SiRNA target sequence
ttattttctggtgacattacc

SEQ ID NO: 142654 - DNA, 21 bp, Artificial sequence
  SiRNA target sequence
tattttctggtgacattacca

SEQ ID NO: 142655 - DNA, 21 bp, Artificial sequence
  SiRNA target sequence
attttctggtgacattaccaa

SEQ ID NO: 142656 - DNA, 21 bp, Artificial sequence
  SiRNA target sequence
ttttctggtgacattaccaac

SEQ ID NO: 142657 - DNA, 21 bp, Artificial sequence
  SiRNA target sequence
tttctggtgacattaccaacc

SEQ ID NO: 142658 - DNA, 21 bp, Artificial sequence
  SiRNA target sequence
ttctggtgacattaccaacca

SEQ ID NO: 142659 - DNA, 21 bp, Artificial sequence
  SiRNA target sequence
tctggtgacattaccaaccag

SEQ ID NO: 142660 - DNA, 21 bp, Artificial sequence
  SiRNA target sequence
ctggtgacattaccaaccaga

SEQ ID NO: 142661 - DNA, 21 bp, Artificial sequence
  SiRNA target sequence
tggtgacattaccaaccagaa

SEQ ID NO: 142662 - DNA, 21 bp, Artificial sequence
  SiRNA target sequence
ggtgacattaccaaccagaaa

SEQ ID NO: 142663 - DNA, 21 bp, Artificial sequence
  SiRNA target sequence
gtgacattaccaaccagaaaa

SEQ ID NO: 142664 - DNA, 21 bp, Artificial sequence
  SiRNA target sequence
tgacattaccaaccagaaaag

SEQ ID NO: 142665 - DNA, 21 bp, Artificial sequence
  SiRNA target sequence
gacattaccaaccagaaaaga

SEQ ID NO: 142666 - DNA, 21 bp, Artificial sequence
  SiRNA target sequence
acattaccaaccagaaaagac

SEQ ID NO: 142667 - DNA, 21 bp, Artificial sequence
  SiRNA target sequence
cattaccaaccagaaaagact

SEQ ID NO: 142668 - DNA, 21 bp, Artificial sequence
  SiRNA target sequence
attaccaaccagaaaagacta

SEQ ID NO: 142669 - DNA, 21 bp, Artificial sequence
  SiRNA target sequence
ttaccaaccagaaaagactat

SEQ ID NO: 142670 - DNA, 21 bp, Artificial sequence
  SiRNA target sequence
taccaaccagaaaagactatg

SEQ ID NO: 142671 - DNA, 21 bp, Artificial sequence
  SiRNA target sequence
accaaccagaaaagactatgg

SEQ ID NO: 142672 - DNA, 21 bp, Artificial sequence
  SiRNA target sequence
ccaaccagaaaagactatggt

SEQ ID NO: 142673 - DNA, 21 bp, Artificial sequence
  SiRNA target sequence
caaccagaaaagactatggtt

SEQ ID NO: 142674 - DNA, 21 bp, Artificial sequence
  SiRNA target sequence
aaccagaaaagactatggttg

SEQ ID NO: 142675 - DNA, 21 bp, Artificial sequence
  SiRNA target sequence
accagaaaagactatggttgt

SEQ ID NO: 142676 - DNA, 21 bp, Artificial sequence
  SiRNA target sequence
ccagaaaagactatggttgta

SEQ ID NO: 142677 - DNA, 21 bp, Artificial sequence
  SiRNA target sequence
cagaaaagactatggttgtaa

SEQ ID NO: 142678 - DNA, 21 bp, Artificial sequence
  SiRNA target sequence
agaaaagactatggttgtaat

SEQ ID NO: 142679 - DNA, 21 bp, Artificial sequence
  SiRNA target sequence
gaaaagactatggttgtaatg

SEQ ID NO: 142680 - DNA, 21 bp, Artificial sequence
  SiRNA target sequence
aaaagactatggttgtaatga

SEQ ID NO: 142681 - DNA, 21 bp, Artificial sequence
  SiRNA target sequence
aaagactatggttgtaatgac

SEQ ID NO: 142682 - DNA, 21 bp, Artificial sequence
  SiRNA target sequence
aagactatggttgtaatgacc

SEQ ID NO: 142683 - DNA, 21 bp, Artificial sequence
  SiRNA target sequence
agactatggttgtaatgacca

SEQ ID NO: 142684 - DNA, 21 bp, Artificial sequence
  SiRNA target sequence
gactatggttgtaatgaccac

SEQ ID NO: 142685 - DNA, 21 bp, Artificial sequence
  SiRNA target sequence
actatggttgtaatgaccacc

SEQ ID NO: 142686 - DNA, 21 bp, Artificial sequence
  SiRNA target sequence
ctatggttgtaatgaccacca

SEQ ID NO: 142687 - DNA, 21 bp, Artificial sequence
  SiRNA target sequence
tatggttgtaatgaccaccac

SEQ ID NO: 142688 - DNA, 21 bp, Artificial sequence
  SiRNA target sequence
atggttgtaatgaccaccacc

SEQ ID NO: 142689 - DNA, 21 bp, Artificial sequence
  SiRNA target sequence
tggttgtaatgaccaccacca

SEQ ID NO: 142690 - DNA, 21 bp, Artificial sequence
  SiRNA target sequence
ggttgtaatgaccaccaccat

SEQ ID NO: 142691 - DNA, 21 bp, Artificial sequence
  SiRNA target sequence
gttgtaatgaccaccaccata

SEQ ID NO: 142692 - DNA, 21 bp, Artificial sequence
  SiRNA target sequence
ttgtaatgaccaccaccataa

SEQ ID NO: 142693 - DNA, 21 bp, Artificial sequence
  SiRNA target sequence
tgtaatgaccaccaccataat

SEQ ID NO: 142694 - DNA, 21 bp, Artificial sequence
  SiRNA target sequence
gtaatgaccaccaccataatc

SEQ ID NO: 142695 - DNA, 21 bp, Artificial sequence
  SiRNA target sequence
taatgaccaccaccataatct

SEQ ID NO: 142696 - DNA, 21 bp, Artificial sequence
  SiRNA target sequence
aatgaccaccaccataatctc

SEQ ID NO: 142697 - DNA, 21 bp, Artificial sequence
  SiRNA target sequence
atgaccaccaccataatctct

SEQ ID NO: 142698 - DNA, 21 bp, Artificial sequence
  SiRNA target sequence
tgaccaccaccataatctctt

SEQ ID NO: 142699 - DNA, 21 bp, Artificial sequence
  SiRNA target sequence
gaccaccaccataatctctta

SEQ ID NO: 142700 - DNA, 21 bp, Artificial sequence
  SiRNA target sequence
accaccaccataatctcttaa

SEQ ID NO: 142701 - DNA, 21 bp, Artificial sequence
  SiRNA target sequence
ccaccaccataatctcttaat

SEQ ID NO: 142702 - DNA, 21 bp, Artificial sequence
  SiRNA target sequence
caccaccataatctcttaatt

SEQ ID NO: 142703 - DNA, 21 bp, Artificial sequence
  SiRNA target sequence
accaccataatctcttaattg

SEQ ID NO: 142704 - DNA, 21 bp, Artificial sequence
  SiRNA target sequence
ccaccataatctcttaattgt

SEQ ID NO: 142705 - DNA, 21 bp, Artificial sequence
  SiRNA target sequence
caccataatctcttaattgtt

SEQ ID NO: 142706 - DNA, 21 bp, Artificial sequence
  SiRNA target sequence
accataatctcttaattgttt

SEQ ID NO: 142707 - DNA, 21 bp, Artificial sequence
  SiRNA target sequence
ccataatctcttaattgttta

SEQ ID NO: 142708 - DNA, 21 bp, Artificial sequence
  SiRNA target sequence
cataatctcttaattgtttat

SEQ ID NO: 142709 - DNA, 21 bp, Artificial sequence
  SiRNA target sequence
ataatctcttaattgtttatc

SEQ ID NO: 142710 - DNA, 21 bp, Artificial sequence
  SiRNA target sequence
taatctcttaattgtttatca

SEQ ID NO: 142711 - DNA, 21 bp, Artificial sequence
  SiRNA target sequence
aatctcttaattgtttatcaa

SEQ ID NO: 142712 - DNA, 21 bp, Artificial sequence
  SiRNA target sequence
atctcttaattgtttatcaac

SEQ ID NO: 142713 - DNA, 21 bp, Artificial sequence
  SiRNA target sequence
tctcttaattgtttatcaaca

SEQ ID NO: 142714 - DNA, 21 bp, Artificial sequence
  SiRNA target sequence
ctcttaattgtttatcaacaa

SEQ ID NO: 142715 - DNA, 21 bp, Artificial sequence
  SiRNA target sequence
tcttaattgtttatcaacaag

SEQ ID NO: 142716 - DNA, 21 bp, Artificial sequence
  SiRNA target sequence
cttaattgtttatcaacaagt

SEQ ID NO: 142717 - DNA, 21 bp, Artificial sequence
  SiRNA target sequence
ttaattgtttatcaacaagtg

SEQ ID NO: 142718 - DNA, 21 bp, Artificial sequence
  SiRNA target sequence
taattgtttatcaacaagtgc

SEQ ID NO: 142719 - DNA, 21 bp, Artificial sequence
  SiRNA target sequence
aattgtttatcaacaagtgca

SEQ ID NO: 142720 - DNA, 21 bp, Artificial sequence
  SiRNA target sequence
attgtttatcaacaagtgcat

SEQ ID NO: 142721 - DNA, 21 bp, Artificial sequence
  SiRNA target sequence
ttgtttatcaacaagtgcatt

SEQ ID NO: 142722 - DNA, 21 bp, Artificial sequence
  SiRNA target sequence
tgtttatcaacaagtgcattt

SEQ ID NO: 142723 - DNA, 21 bp, Artificial sequence
  SiRNA target sequence
gtttatcaacaagtgcatttc

SEQ ID NO: 142724 - DNA, 21 bp, Artificial sequence
  SiRNA target sequence
tttatcaacaagtgcatttcc

SEQ ID NO: 142725 - DNA, 21 bp, Artificial sequence
  SiRNA target sequence
ttatcaacaagtgcatttcct

SEQ ID NO: 142726 - DNA, 21 bp, Artificial sequence
  SiRNA target sequence
tatcaacaagtgcatttcctt

SEQ ID NO: 142727 - DNA, 21 bp, Artificial sequence
  SiRNA target sequence
atcaacaagtgcatttccttt

SEQ ID NO: 142728 - DNA, 21 bp, Artificial sequence
  SiRNA target sequence
tcaacaagtgcatttccttta

SEQ ID NO: 142729 - DNA, 21 bp, Artificial sequence
  SiRNA target sequence
caacaagtgcatttcctttat

SEQ ID NO: 142730 - DNA, 21 bp, Artificial sequence
  SiRNA target sequence
aacaagtgcatttcctttatt

SEQ ID NO: 142731 - DNA, 21 bp, Artificial sequence
  SiRNA target sequence
acaagtgcatttcctttatta

SEQ ID NO: 142732 - DNA, 21 bp, Artificial sequence
  SiRNA target sequence
caagtgcatttcctttattat

SEQ ID NO: 142733 - DNA, 21 bp, Artificial sequence
  SiRNA target sequence
aagtgcatttcctttattatt

SEQ ID NO: 142734 - DNA, 21 bp, Artificial sequence
  SiRNA target sequence
agtgcatttcctttattatta

SEQ ID NO: 142735 - DNA, 21 bp, Artificial sequence
  SiRNA target sequence
gtgcatttcctttattattaa

SEQ ID NO: 142736 - DNA, 21 bp, Artificial sequence
  SiRNA target sequence
tgcatttcctttattattaaa

SEQ ID NO: 142737 - DNA, 21 bp, Artificial sequence
  SiRNA target sequence
gcatttcctttattattaaaa

SEQ ID NO: 142738 - DNA, 21 bp, Artificial sequence
  SiRNA target sequence
catttcctttattattaaaaa

SEQ ID NO: 142739 - DNA, 21 bp, Artificial sequence
  SiRNA target sequence
atttcctttattattaaaaag

SEQ ID NO: 142740 - DNA, 21 bp, Artificial sequence
  SiRNA target sequence
tttcctttattattaaaaagt

SEQ ID NO: 142741 - DNA, 21 bp, Artificial sequence
  SiRNA target sequence
ttcctttattattaaaaagta

SEQ ID NO: 142742 - DNA, 21 bp, Artificial sequence
  SiRNA target sequence
tcctttattattaaaaagtaa

SEQ ID NO: 142743 - DNA, 21 bp, Artificial sequence
  SiRNA target sequence
cctttattattaaaaagtaat

SEQ ID NO: 142744 - DNA, 21 bp, Artificial sequence
  SiRNA target sequence
ctttattattaaaaagtaatg

SEQ ID NO: 142745 - DNA, 21 bp, Artificial sequence
  SiRNA target sequence
tttattattaaaaagtaatga

SEQ ID NO: 142746 - DNA, 21 bp, Artificial sequence
  SiRNA target sequence
ttattattaaaaagtaatgaa

SEQ ID NO: 142747 - DNA, 21 bp, Artificial sequence
  SiRNA target sequence
tattattaaaaagtaatgaat

SEQ ID NO: 142748 - DNA, 21 bp, Artificial sequence
  SiRNA target sequence
attattaaaaagtaatgaatt

SEQ ID NO: 142749 - DNA, 21 bp, Artificial sequence
  SiRNA target sequence
ttattaaaaagtaatgaattt

SEQ ID NO: 142750 - DNA, 21 bp, Artificial sequence
  SiRNA target sequence
tattaaaaagtaatgaattta

SEQ ID NO: 142751 - DNA, 21 bp, Artificial sequence
  SiRNA target sequence
attaaaaagtaatgaatttaa

SEQ ID NO: 142752 - DNA, 21 bp, Artificial sequence
  SiRNA target sequence
ttaaaaagtaatgaatttaat

SEQ ID NO: 142753 - DNA, 21 bp, Artificial sequence
  SiRNA target sequence
taaaaagtaatgaatttaatg

SEQ ID NO: 142754 - DNA, 21 bp, Artificial sequence
  SiRNA target sequence
aaaaagtaatgaatttaatga

SEQ ID NO: 142755 - DNA, 21 bp, Artificial sequence
  SiRNA target sequence
aaaagtaatgaatttaatgat

SEQ ID NO: 142756 - DNA, 21 bp, Artificial sequence
  SiRNA target sequence
aaagtaatgaatttaatgatt

SEQ ID NO: 142757 - DNA, 21 bp, Artificial sequence
  SiRNA target sequence
aagtaatgaatttaatgattt

SEQ ID NO: 142758 - DNA, 21 bp, Artificial sequence
  SiRNA target sequence
agtaatgaatttaatgattta

SEQ ID NO: 142759 - DNA, 21 bp, Artificial sequence
  SiRNA target sequence
gtaatgaatttaatgatttac

SEQ ID NO: 142760 - DNA, 21 bp, Artificial sequence
  SiRNA target sequence
taatgaatttaatgatttacc

SEQ ID NO: 142761 - DNA, 21 bp, Artificial sequence
  SiRNA target sequence
aatgaatttaatgatttacca

SEQ ID NO: 142762 - DNA, 21 bp, Artificial sequence
  SiRNA target sequence
atgaatttaatgatttaccac

SEQ ID NO: 142763 - DNA, 21 bp, Artificial sequence
  SiRNA target sequence
tgaatttaatgatttaccaca

SEQ ID NO: 142764 - DNA, 21 bp, Artificial sequence
  SiRNA target sequence
gaatttaatgatttaccacac

SEQ ID NO: 142765 - DNA, 21 bp, Artificial sequence
  SiRNA target sequence
aatttaatgatttaccacaca

SEQ ID NO: 142766 - DNA, 21 bp, Artificial sequence
  SiRNA target sequence
atttaatgatttaccacacaa

SEQ ID NO: 142767 - DNA, 21 bp, Artificial sequence
  SiRNA target sequence
tttaatgatttaccacacaaa

SEQ ID NO: 142768 - DNA, 21 bp, Artificial sequence
  SiRNA target sequence
ttaatgatttaccacacaaat

SEQ ID NO: 142769 - DNA, 21 bp, Artificial sequence
  SiRNA target sequence
taatgatttaccacacaaatt

SEQ ID NO: 142770 - DNA, 21 bp, Artificial sequence
  SiRNA target sequence
aatgatttaccacacaaattg

SEQ ID NO: 142771 - DNA, 21 bp, Artificial sequence
  SiRNA target sequence
atgatttaccacacaaattgt

SEQ ID NO: 142772 - DNA, 21 bp, Artificial sequence
  SiRNA target sequence
tgatttaccacacaaattgtt

SEQ ID NO: 142773 - DNA, 21 bp, Artificial sequence
  SiRNA target sequence
gatttaccacacaaattgtta

SEQ ID NO: 142774 - DNA, 21 bp, Artificial sequence
  SiRNA target sequence
atttaccacacaaattgttat

SEQ ID NO: 142775 - DNA, 21 bp, Artificial sequence
  SiRNA target sequence
tttaccacacaaattgttatc

SEQ ID NO: 142776 - DNA, 21 bp, Artificial sequence
  SiRNA target sequence
ttaccacacaaattgttatct

SEQ ID NO: 142777 - DNA, 21 bp, Artificial sequence
  SiRNA target sequence
taccacacaaattgttatcta

SEQ ID NO: 142778 - DNA, 21 bp, Artificial sequence
  SiRNA target sequence
accacacaaattgttatctaa

SEQ ID NO: 142779 - DNA, 21 bp, Artificial sequence
  SiRNA target sequence
ccacacaaattgttatctaat

SEQ ID NO: 142780 - DNA, 21 bp, Artificial sequence
  SiRNA target sequence
cacacaaattgttatctaata

SEQ ID NO: 142781 - DNA, 21 bp, Artificial sequence
  SiRNA target sequence
acacaaattgttatctaatat

SEQ ID NO: 142782 - DNA, 21 bp, Artificial sequence
  SiRNA target sequence
cacaaattgttatctaatatt

SEQ ID NO: 142783 - DNA, 21 bp, Artificial sequence
  SiRNA target sequence
acaaattgttatctaatatta

SEQ ID NO: 142784 - DNA, 21 bp, Artificial sequence
  SiRNA target sequence
caaattgttatctaatattat

SEQ ID NO: 142785 - DNA, 21 bp, Artificial sequence
  SiRNA target sequence
aaattgttatctaatattatt

SEQ ID NO: 142786 - DNA, 21 bp, Artificial sequence
  SiRNA target sequence
aattgttatctaatattattt

SEQ ID NO: 142787 - DNA, 21 bp, Artificial sequence
  SiRNA target sequence
attgttatctaatattatttt

SEQ ID NO: 142788 - DNA, 21 bp, Artificial sequence
  SiRNA target sequence
ttgttatctaatattatttta

SEQ ID NO: 142789 - DNA, 21 bp, Artificial sequence
  SiRNA target sequence
tgttatctaatattattttat

SEQ ID NO: 142790 - DNA, 21 bp, Artificial sequence
  SiRNA target sequence
gttatctaatattattttatt

SEQ ID NO: 142791 - DNA, 21 bp, Artificial sequence
  SiRNA target sequence
ttatctaatattattttatta

SEQ ID NO: 142792 - DNA, 21 bp, Artificial sequence
  SiRNA target sequence
tatctaatattattttattaa

SEQ ID NO: 142793 - DNA, 21 bp, Artificial sequence
  SiRNA target sequence
atctaatattattttattaag

SEQ ID NO: 142794 - DNA, 21 bp, Artificial sequence
  SiRNA target sequence
tctaatattattttattaaga

SEQ ID NO: 142795 - DNA, 21 bp, Artificial sequence
  SiRNA target sequence
ctaatattattttattaagag

SEQ ID NO: 142796 - DNA, 21 bp, Artificial sequence
  SiRNA target sequence
taatattattttattaagagt

SEQ ID NO: 142797 - DNA, 21 bp, Artificial sequence
  SiRNA target sequence
aatattattttattaagagtg

SEQ ID NO: 142798 - DNA, 21 bp, Artificial sequence
  SiRNA target sequence
atattattttattaagagtgt

SEQ ID NO: 142799 - DNA, 21 bp, Artificial sequence
  SiRNA target sequence
tattattttattaagagtgtc

SEQ ID NO: 142800 - DNA, 21 bp, Artificial sequence
  SiRNA target sequence
attattttattaagagtgtct

SEQ ID NO: 142801 - DNA, 21 bp, Artificial sequence
  SiRNA target sequence
ttattttattaagagtgtcta

SEQ ID NO: 142802 - DNA, 21 bp, Artificial sequence
  SiRNA target sequence
tattttattaagagtgtctac

SEQ ID NO: 142803 - DNA, 21 bp, Artificial sequence
  SiRNA target sequence
attttattaagagtgtctaca

SEQ ID NO: 142804 - DNA, 21 bp, Artificial sequence
  SiRNA target sequence
ttttattaagagtgtctacat

SEQ ID NO: 142805 - DNA, 21 bp, Artificial sequence
  SiRNA target sequence
tttattaagagtgtctacata

SEQ ID NO: 142806 - DNA, 21 bp, Artificial sequence
  SiRNA target sequence
ttattaagagtgtctacatac

SEQ ID NO: 142807 - DNA, 21 bp, Artificial sequence
  SiRNA target sequence
tattaagagtgtctacatacg

SEQ ID NO: 142808 - DNA, 21 bp, Artificial sequence
  SiRNA target sequence
attaagagtgtctacatacgc

SEQ ID NO: 142809 - DNA, 21 bp, Artificial sequence
  SiRNA target sequence
ttaagagtgtctacatacgct

SEQ ID NO: 142810 - DNA, 21 bp, Artificial sequence
  SiRNA target sequence
taagagtgtctacatacgctt

SEQ ID NO: 142811 - DNA, 21 bp, Artificial sequence
  SiRNA target sequence
aagagtgtctacatacgcttg

SEQ ID NO: 142812 - DNA, 21 bp, Artificial sequence
  SiRNA target sequence
agagtgtctacatacgcttga

SEQ ID NO: 142813 - DNA, 21 bp, Artificial sequence
  SiRNA target sequence
gagtgtctacatacgcttgat

SEQ ID NO: 142814 - DNA, 21 bp, Artificial sequence
  SiRNA target sequence
agtgtctacatacgcttgatg

SEQ ID NO: 142815 - DNA, 21 bp, Artificial sequence
  SiRNA target sequence
gtgtctacatacgcttgatgg

SEQ ID NO: 142816 - DNA, 21 bp, Artificial sequence
  SiRNA target sequence
tgtctacatacgcttgatggt

SEQ ID NO: 142817 - DNA, 21 bp, Artificial sequence
  SiRNA target sequence
gtctacatacgcttgatggtg

SEQ ID NO: 142818 - DNA, 21 bp, Artificial sequence
  SiRNA target sequence
tctacatacgcttgatggtgc

SEQ ID NO: 142819 - DNA, 21 bp, Artificial sequence
  SiRNA target sequence
ctacatacgcttgatggtgct

SEQ ID NO: 142820 - DNA, 21 bp, Artificial sequence
  SiRNA target sequence
tacatacgcttgatggtgctt

SEQ ID NO: 142821 - DNA, 21 bp, Artificial sequence
  SiRNA target sequence
acatacgcttgatggtgctta

SEQ ID NO: 142822 - DNA, 21 bp, Artificial sequence
  SiRNA target sequence
catacgcttgatggtgcttag

SEQ ID NO: 142823 - DNA, 21 bp, Artificial sequence
  SiRNA target sequence
atacgcttgatggtgcttaga

SEQ ID NO: 142824 - DNA, 21 bp, Artificial sequence
  SiRNA target sequence
tacgcttgatggtgcttagag

SEQ ID NO: 142825 - DNA, 21 bp, Artificial sequence
  SiRNA target sequence
acgcttgatggtgcttagagt

SEQ ID NO: 142826 - DNA, 21 bp, Artificial sequence
  SiRNA target sequence
cgcttgatggtgcttagagtg

SEQ ID NO: 142827 - DNA, 21 bp, Artificial sequence
  SiRNA target sequence
gcttgatggtgcttagagtgg

SEQ ID NO: 142828 - DNA, 21 bp, Artificial sequence
  SiRNA target sequence
cttgatggtgcttagagtggt

SEQ ID NO: 142829 - DNA, 21 bp, Artificial sequence
  SiRNA target sequence
ttgatggtgcttagagtggtg

SEQ ID NO: 142830 - DNA, 21 bp, Artificial sequence
  SiRNA target sequence
tgatggtgcttagagtggtgg

SEQ ID NO: 142831 - DNA, 21 bp, Artificial sequence
  SiRNA target sequence
gatggtgcttagagtggtggg

SEQ ID NO: 142832 - DNA, 21 bp, Artificial sequence
  SiRNA target sequence
atggtgcttagagtggtgggt

SEQ ID NO: 142833 - DNA, 21 bp, Artificial sequence
  SiRNA target sequence
tggtgcttagagtggtgggtc

SEQ ID NO: 142834 - DNA, 21 bp, Artificial sequence
  SiRNA target sequence
ggtgcttagagtggtgggtct

SEQ ID NO: 142835 - DNA, 21 bp, Artificial sequence
  SiRNA target sequence
gtgcttagagtggtgggtctc

SEQ ID NO: 142836 - DNA, 21 bp, Artificial sequence
  SiRNA target sequence
tgcttagagtggtgggtctcc

SEQ ID NO: 142837 - DNA, 21 bp, Artificial sequence
  SiRNA target sequence
gcttagagtggtgggtctcca

SEQ ID NO: 142838 - DNA, 21 bp, Artificial sequence
  SiRNA target sequence
cttagagtggtgggtctccat

SEQ ID NO: 142839 - DNA, 21 bp, Artificial sequence
  SiRNA target sequence
ttagagtggtgggtctccatt

SEQ ID NO: 142840 - DNA, 21 bp, Artificial sequence
  SiRNA target sequence
tagagtggtgggtctccatta

SEQ ID NO: 142841 - DNA, 21 bp, Artificial sequence
  SiRNA target sequence
agagtggtgggtctccattat

SEQ ID NO: 142842 - DNA, 21 bp, Artificial sequence
  SiRNA target sequence
gagtggtgggtctccattata

SEQ ID NO: 142843 - DNA, 21 bp, Artificial sequence
  SiRNA target sequence
agtggtgggtctccattatat

SEQ ID NO: 142844 - DNA, 21 bp, Artificial sequence
  SiRNA target sequence
gtggtgggtctccattatatc

SEQ ID NO: 142845 - DNA, 21 bp, Artificial sequence
  SiRNA target sequence
tggtgggtctccattatatct

SEQ ID NO: 142846 - DNA, 21 bp, Artificial sequence
  SiRNA target sequence
ggtgggtctccattatatctt

SEQ ID NO: 142847 - DNA, 21 bp, Artificial sequence
  SiRNA target sequence
gtgggtctccattatatcttc

SEQ ID NO: 142848 - DNA, 21 bp, Artificial sequence
  SiRNA target sequence
tgggtctccattatatcttca

SEQ ID NO: 142849 - DNA, 21 bp, Artificial sequence
  SiRNA target sequence
gggtctccattatatcttcac

SEQ ID NO: 142850 - DNA, 21 bp, Artificial sequence
  SiRNA target sequence
ggtctccattatatcttcact

SEQ ID NO: 142851 - DNA, 21 bp, Artificial sequence
  SiRNA target sequence
gtctccattatatcttcactt

SEQ ID NO: 142852 - DNA, 21 bp, Artificial sequence
  SiRNA target sequence
tctccattatatcttcactta

SEQ ID NO: 142853 - DNA, 21 bp, Artificial sequence
  SiRNA target sequence
ctccattatatcttcacttat

SEQ ID NO: 142854 - DNA, 21 bp, Artificial sequence
  SiRNA target sequence
tccattatatcttcacttata

SEQ ID NO: 142855 - DNA, 21 bp, Artificial sequence
  SiRNA target sequence
ccattatatcttcacttatat

SEQ ID NO: 142856 - DNA, 21 bp, Artificial sequence
  SiRNA target sequence
cattatatcttcacttatata

SEQ ID NO: 142857 - DNA, 21 bp, Artificial sequence
  SiRNA target sequence
attatatcttcacttatataa

SEQ ID NO: 142858 - DNA, 21 bp, Artificial sequence
  SiRNA target sequence
ttatatcttcacttatataag

SEQ ID NO: 142859 - DNA, 21 bp, Artificial sequence
  SiRNA target sequence
tatatcttcacttatataagg

SEQ ID NO: 142860 - DNA, 21 bp, Artificial sequence
  SiRNA target sequence
atatcttcacttatataaggc

SEQ ID NO: 142861 - DNA, 21 bp, Artificial sequence
  SiRNA target sequence
tatcttcacttatataaggct

SEQ ID NO: 142862 - DNA, 21 bp, Artificial sequence
  SiRNA target sequence
atcttcacttatataaggctc

SEQ ID NO: 142863 - DNA, 21 bp, Artificial sequence
  SiRNA target sequence
tcttcacttatataaggctct

SEQ ID NO: 142864 - DNA, 21 bp, Artificial sequence
  SiRNA target sequence
cttcacttatataaggctcta

SEQ ID NO: 142865 - DNA, 21 bp, Artificial sequence
  SiRNA target sequence
ttcacttatataaggctctag

SEQ ID NO: 142866 - DNA, 21 bp, Artificial sequence
  SiRNA target sequence
tcacttatataaggctctaga

SEQ ID NO: 142867 - DNA, 21 bp, Artificial sequence
  SiRNA target sequence
cacttatataaggctctagag

SEQ ID NO: 142868 - DNA, 21 bp, Artificial sequence
  SiRNA target sequence
acttatataaggctctagaga

SEQ ID NO: 142869 - DNA, 21 bp, Artificial sequence
  SiRNA target sequence
cttatataaggctctagagat

SEQ ID NO: 142870 - DNA, 21 bp, Artificial sequence
  SiRNA target sequence
ttatataaggctctagagatt

SEQ ID NO: 142871 - DNA, 21 bp, Artificial sequence
  SiRNA target sequence
tatataaggctctagagattt

SEQ ID NO: 142872 - DNA, 21 bp, Artificial sequence
  SiRNA target sequence
atataaggctctagagattta

SEQ ID NO: 142873 - DNA, 21 bp, Artificial sequence
  SiRNA target sequence
tataaggctctagagatttat

SEQ ID NO: 142874 - DNA, 21 bp, Artificial sequence
  SiRNA target sequence
ataaggctctagagatttata

SEQ ID NO: 142875 - DNA, 21 bp, Artificial sequence
  SiRNA target sequence
taaggctctagagatttataa

SEQ ID NO: 142876 - DNA, 21 bp, Artificial sequence
  SiRNA target sequence
aaggctctagagatttataac

SEQ ID NO: 142877 - DNA, 21 bp, Artificial sequence
  SiRNA target sequence
aggctctagagatttataact

SEQ ID NO: 142878 - DNA, 21 bp, Artificial sequence
  SiRNA target sequence
ggctctagagatttataacta

SEQ ID NO: 142879 - DNA, 21 bp, Artificial sequence
  SiRNA target sequence
gctctagagatttataactat

SEQ ID NO: 142880 - DNA, 21 bp, Artificial sequence
  SiRNA target sequence
ctctagagatttataactata

SEQ ID NO: 142881 - DNA, 21 bp, Artificial sequence
  SiRNA target sequence
tctagagatttataactatat

SEQ ID NO: 142882 - DNA, 21 bp, Artificial sequence
  SiRNA target sequence
ctagagatttataactatatt

SEQ ID NO: 142883 - DNA, 21 bp, Artificial sequence
  SiRNA target sequence
tagagatttataactatattt

SEQ ID NO: 142884 - DNA, 21 bp, Artificial sequence
  SiRNA target sequence
agagatttataactatatttc

SEQ ID NO: 142885 - DNA, 21 bp, Artificial sequence
  SiRNA target sequence
gagatttataactatatttca

SEQ ID NO: 142886 - DNA, 21 bp, Artificial sequence
  SiRNA target sequence
agatttataactatatttcag

SEQ ID NO: 142887 - DNA, 21 bp, Artificial sequence
  SiRNA target sequence
gatttataactatatttcaga

SEQ ID NO: 142888 - DNA, 21 bp, Artificial sequence
  SiRNA target sequence
atttataactatatttcagat

SEQ ID NO: 142889 - DNA, 21 bp, Artificial sequence
  SiRNA target sequence
tttataactatatttcagatt

SEQ ID NO: 142890 - DNA, 21 bp, Artificial sequence
  SiRNA target sequence
ttataactatatttcagattt

SEQ ID NO: 142891 - DNA, 21 bp, Artificial sequence
  SiRNA target sequence
tataactatatttcagatttg

SEQ ID NO: 142892 - DNA, 21 bp, Artificial sequence
  SiRNA target sequence
ataactatatttcagatttgg

SEQ ID NO: 142893 - DNA, 21 bp, Artificial sequence
  SiRNA target sequence
taactatatttcagatttgga

SEQ ID NO: 142894 - DNA, 21 bp, Artificial sequence
  SiRNA target sequence
aactatatttcagatttggaa

SEQ ID NO: 142895 - DNA, 21 bp, Artificial sequence
  SiRNA target sequence
actatatttcagatttggaag

SEQ ID NO: 142896 - DNA, 21 bp, Artificial sequence
  SiRNA target sequence
ctatatttcagatttggaaga

SEQ ID NO: 142897 - DNA, 21 bp, Artificial sequence
  SiRNA target sequence
tatatttcagatttggaagag

SEQ ID NO: 142898 - DNA, 21 bp, Artificial sequence
  SiRNA target sequence
atatttcagatttggaagagt

SEQ ID NO: 142899 - DNA, 21 bp, Artificial sequence
  SiRNA target sequence
tatttcagatttggaagagtg

SEQ ID NO: 142900 - DNA, 21 bp, Artificial sequence
  SiRNA target sequence
atttcagatttggaagagtga

SEQ ID NO: 142901 - DNA, 21 bp, Artificial sequence
  SiRNA target sequence
tttcagatttggaagagtgaa

SEQ ID NO: 142902 - DNA, 21 bp, Artificial sequence
  SiRNA target sequence
ttcagatttggaagagtgaac

SEQ ID NO: 142903 - DNA, 21 bp, Artificial sequence
  SiRNA target sequence
tcagatttggaagagtgaaca

SEQ ID NO: 142904 - DNA, 21 bp, Artificial sequence
  SiRNA target sequence
cagatttggaagagtgaacat

SEQ ID NO: 142905 - DNA, 22 bp, Artificial sequence
  SiRNA target sequence
ttaatttatgcataattgacca

SEQ ID NO: 142906 - DNA, 22 bp, Artificial sequence
  SiRNA target sequence
taatttatgcataattgaccat

SEQ ID NO: 142907 - DNA, 22 bp, Artificial sequence
  SiRNA target sequence
aatttatgcataattgaccatc

SEQ ID NO: 142908 - DNA, 22 bp, Artificial sequence
  SiRNA target sequence
atttatgcataattgaccatca

SEQ ID NO: 142909 - DNA, 22 bp, Artificial sequence
  SiRNA target sequence
tttatgcataattgaccatcat

SEQ ID NO: 142910 - DNA, 22 bp, Artificial sequence
  SiRNA target sequence
ttatgcataattgaccatcatc

SEQ ID NO: 142911 - DNA, 22 bp, Artificial sequence
  SiRNA target sequence
tatgcataattgaccatcatca

SEQ ID NO: 142912 - DNA, 22 bp, Artificial sequence
  SiRNA target sequence
atgcataattgaccatcatcag

SEQ ID NO: 142913 - DNA, 22 bp, Artificial sequence
  SiRNA target sequence
tgcataattgaccatcatcagt

SEQ ID NO: 142914 - DNA, 22 bp, Artificial sequence
  SiRNA target sequence
gcataattgaccatcatcagta

SEQ ID NO: 142915 - DNA, 22 bp, Artificial sequence
  SiRNA target sequence
cataattgaccatcatcagtaa

SEQ ID NO: 142916 - DNA, 22 bp, Artificial sequence
  SiRNA target sequence
ataattgaccatcatcagtaat

SEQ ID NO: 142917 - DNA, 22 bp, Artificial sequence
  SiRNA target sequence
taattgaccatcatcagtaata

SEQ ID NO: 142918 - DNA, 22 bp, Artificial sequence
  SiRNA target sequence
aattgaccatcatcagtaataa

SEQ ID NO: 142919 - DNA, 22 bp, Artificial sequence
  SiRNA target sequence
attgaccatcatcagtaataaa

SEQ ID NO: 142920 - DNA, 22 bp, Artificial sequence
  SiRNA target sequence
ttgaccatcatcagtaataaac

SEQ ID NO: 142921 - DNA, 22 bp, Artificial sequence
  SiRNA target sequence
tgaccatcatcagtaataaaca

SEQ ID NO: 142922 - DNA, 22 bp, Artificial sequence
  SiRNA target sequence
gaccatcatcagtaataaacac

SEQ ID NO: 142923 - DNA, 22 bp, Artificial sequence
  SiRNA target sequence
accatcatcagtaataaacaca

SEQ ID NO: 142924 - DNA, 22 bp, Artificial sequence
  SiRNA target sequence
ccatcatcagtaataaacacat

SEQ ID NO: 142925 - DNA, 22 bp, Artificial sequence
  SiRNA target sequence
catcatcagtaataaacacatt

SEQ ID NO: 142926 - DNA, 22 bp, Artificial sequence
  SiRNA target sequence
atcatcagtaataaacacatta

SEQ ID NO: 142927 - DNA, 22 bp, Artificial sequence
  SiRNA target sequence
tcatcagtaataaacacattac

SEQ ID NO: 142928 - DNA, 22 bp, Artificial sequence
  SiRNA target sequence
catcagtaataaacacattacc

SEQ ID NO: 142929 - DNA, 22 bp, Artificial sequence
  SiRNA target sequence
atcagtaataaacacattacct

SEQ ID NO: 142930 - DNA, 22 bp, Artificial sequence
  SiRNA target sequence
tcagtaataaacacattacctt

SEQ ID NO: 142931 - DNA, 22 bp, Artificial sequence
  SiRNA target sequence
cagtaataaacacattaccttt

SEQ ID NO: 142932 - DNA, 22 bp, Artificial sequence
  SiRNA target sequence
agtaataaacacattacctttc

SEQ ID NO: 142933 - DNA, 22 bp, Artificial sequence
  SiRNA target sequence
gtaataaacacattacctttct

SEQ ID NO: 142934 - DNA, 22 bp, Artificial sequence
  SiRNA target sequence
taataaacacattacctttctt

SEQ ID NO: 142935 - DNA, 22 bp, Artificial sequence
  SiRNA target sequence
aataaacacattacctttcttt

SEQ ID NO: 142936 - DNA, 22 bp, Artificial sequence
  SiRNA target sequence
ataaacacattacctttctttt

SEQ ID NO: 142937 - DNA, 22 bp, Artificial sequence
  SiRNA target sequence
taaacacattacctttcttttc

SEQ ID NO: 142938 - DNA, 22 bp, Artificial sequence
  SiRNA target sequence
aaacacattacctttcttttct

SEQ ID NO: 142939 - DNA, 22 bp, Artificial sequence
  SiRNA target sequence
aacacattacctttcttttcta

SEQ ID NO: 142940 - DNA, 22 bp, Artificial sequence
  SiRNA target sequence
acacattacctttcttttctac

SEQ ID NO: 142941 - DNA, 22 bp, Artificial sequence
  SiRNA target sequence
cacattacctttcttttctacc

SEQ ID NO: 142942 - DNA, 22 bp, Artificial sequence
  SiRNA target sequence
acattacctttcttttctacca

SEQ ID NO: 142943 - DNA, 22 bp, Artificial sequence
  SiRNA target sequence
cattacctttcttttctaccac

SEQ ID NO: 142944 - DNA, 22 bp, Artificial sequence
  SiRNA target sequence
attacctttcttttctaccaca

SEQ ID NO: 142945 - DNA, 22 bp, Artificial sequence
  SiRNA target sequence
ttacctttcttttctaccacac

SEQ ID NO: 142946 - DNA, 22 bp, Artificial sequence
  SiRNA target sequence
tacctttcttttctaccacaca

SEQ ID NO: 142947 - DNA, 22 bp, Artificial sequence
  SiRNA target sequence
acctttcttttctaccacacat

SEQ ID NO: 142948 - DNA, 22 bp, Artificial sequence
  SiRNA target sequence
cctttcttttctaccacacatt

SEQ ID NO: 142949 - DNA, 22 bp, Artificial sequence
  SiRNA target sequence
ctttcttttctaccacacattt

SEQ ID NO: 142950 - DNA, 22 bp, Artificial sequence
  SiRNA target sequence
tttcttttctaccacacatttt

SEQ ID NO: 142951 - DNA, 22 bp, Artificial sequence
  SiRNA target sequence
ttcttttctaccacacattttt

SEQ ID NO: 142952 - DNA, 22 bp, Artificial sequence
  SiRNA target sequence
tcttttctaccacacatttttg

SEQ ID NO: 142953 - DNA, 22 bp, Artificial sequence
  SiRNA target sequence
cttttctaccacacatttttga

SEQ ID NO: 142954 - DNA, 22 bp, Artificial sequence
  SiRNA target sequence
ttttctaccacacatttttgat

SEQ ID NO: 142955 - DNA, 22 bp, Artificial sequence
  SiRNA target sequence
tttctaccacacatttttgata

SEQ ID NO: 142956 - DNA, 22 bp, Artificial sequence
  SiRNA target sequence
ttctaccacacatttttgatat

SEQ ID NO: 142957 - DNA, 22 bp, Artificial sequence
  SiRNA target sequence
tctaccacacatttttgatata

SEQ ID NO: 142958 - DNA, 22 bp, Artificial sequence
  SiRNA target sequence
ctaccacacatttttgatatat

SEQ ID NO: 142959 - DNA, 22 bp, Artificial sequence
  SiRNA target sequence
taccacacatttttgatatatt

SEQ ID NO: 142960 - DNA, 22 bp, Artificial sequence
  SiRNA target sequence
accacacatttttgatatattt

SEQ ID NO: 142961 - DNA, 22 bp, Artificial sequence
  SiRNA target sequence
ccacacatttttgatatatttc

SEQ ID NO: 142962 - DNA, 22 bp, Artificial sequence
  SiRNA target sequence
cacacatttttgatatatttca

SEQ ID NO: 142963 - DNA, 22 bp, Artificial sequence
  SiRNA target sequence
acacatttttgatatatttcat

SEQ ID NO: 142964 - DNA, 22 bp, Artificial sequence
  SiRNA target sequence
cacatttttgatatatttcatt

SEQ ID NO: 142965 - DNA, 22 bp, Artificial sequence
  SiRNA target sequence
acatttttgatatatttcatta

SEQ ID NO: 142966 - DNA, 22 bp, Artificial sequence
  SiRNA target sequence
catttttgatatatttcattaa

SEQ ID NO: 142967 - DNA, 22 bp, Artificial sequence
  SiRNA target sequence
atttttgatatatttcattaac

SEQ ID NO: 142968 - DNA, 22 bp, Artificial sequence
  SiRNA target sequence
tttttgatatatttcattaact

SEQ ID NO: 142969 - DNA, 22 bp, Artificial sequence
  SiRNA target sequence
ttttgatatatttcattaacta

SEQ ID NO: 142970 - DNA, 22 bp, Artificial sequence
  SiRNA target sequence
tttgatatatttcattaactac

SEQ ID NO: 142971 - DNA, 22 bp, Artificial sequence
  SiRNA target sequence
ttgatatatttcattaactaca

SEQ ID NO: 142972 - DNA, 22 bp, Artificial sequence
  SiRNA target sequence
tgatatatttcattaactacat

SEQ ID NO: 142973 - DNA, 22 bp, Artificial sequence
  SiRNA target sequence
gatatatttcattaactacatc

SEQ ID NO: 142974 - DNA, 22 bp, Artificial sequence
  SiRNA target sequence
atatatttcattaactacatcc

SEQ ID NO: 142975 - DNA, 22 bp, Artificial sequence
  SiRNA target sequence
tatatttcattaactacatccc

SEQ ID NO: 142976 - DNA, 22 bp, Artificial sequence
  SiRNA target sequence
atatttcattaactacatccca

SEQ ID NO: 142977 - DNA, 22 bp, Artificial sequence
  SiRNA target sequence
tatttcattaactacatcccaa

SEQ ID NO: 142978 - DNA, 22 bp, Artificial sequence
  SiRNA target sequence
atttcattaactacatcccaat

SEQ ID NO: 142979 - DNA, 22 bp, Artificial sequence
  SiRNA target sequence
tttcattaactacatcccaatc

SEQ ID NO: 142980 - DNA, 22 bp, Artificial sequence
  SiRNA target sequence
ttcattaactacatcccaatca

SEQ ID NO: 142981 - DNA, 22 bp, Artificial sequence
  SiRNA target sequence
tcattaactacatcccaatcaa

SEQ ID NO: 142982 - DNA, 22 bp, Artificial sequence
  SiRNA target sequence
cattaactacatcccaatcaat

SEQ ID NO: 142983 - DNA, 22 bp, Artificial sequence
  SiRNA target sequence
attaactacatcccaatcaatt

SEQ ID NO: 142984 - DNA, 22 bp, Artificial sequence
  SiRNA target sequence
ttaactacatcccaatcaatta

SEQ ID NO: 142985 - DNA, 22 bp, Artificial sequence
  SiRNA target sequence
taactacatcccaatcaattac

SEQ ID NO: 142986 - DNA, 22 bp, Artificial sequence
  SiRNA target sequence
aactacatcccaatcaattaca

SEQ ID NO: 142987 - DNA, 22 bp, Artificial sequence
  SiRNA target sequence
actacatcccaatcaattacat

SEQ ID NO: 142988 - DNA, 22 bp, Artificial sequence
  SiRNA target sequence
ctacatcccaatcaattacatt

SEQ ID NO: 142989 - DNA, 22 bp, Artificial sequence
  SiRNA target sequence
tacatcccaatcaattacattc

SEQ ID NO: 142990 - DNA, 22 bp, Artificial sequence
  SiRNA target sequence
acatcccaatcaattacattcc

SEQ ID NO: 142991 - DNA, 22 bp, Artificial sequence
  SiRNA target sequence
catcccaatcaattacattcca

SEQ ID NO: 142992 - DNA, 22 bp, Artificial sequence
  SiRNA target sequence
atcccaatcaattacattccac

SEQ ID NO: 142993 - DNA, 22 bp, Artificial sequence
  SiRNA target sequence
tcccaatcaattacattccacc

SEQ ID NO: 142994 - DNA, 22 bp, Artificial sequence
  SiRNA target sequence
cccaatcaattacattccacca

SEQ ID NO: 142995 - DNA, 22 bp, Artificial sequence
  SiRNA target sequence
ccaatcaattacattccaccat

SEQ ID NO: 142996 - DNA, 22 bp, Artificial sequence
  SiRNA target sequence
caatcaattacattccaccatt

SEQ ID NO: 142997 - DNA, 22 bp, Artificial sequence
  SiRNA target sequence
aatcaattacattccaccattc

SEQ ID NO: 142998 - DNA, 22 bp, Artificial sequence
  SiRNA target sequence
atcaattacattccaccattca

SEQ ID NO: 142999 - DNA, 22 bp, Artificial sequence
  SiRNA target sequence
tcaattacattccaccattcat

SEQ ID NO: 143000 - DNA, 22 bp, Artificial sequence
  SiRNA target sequence
caattacattccaccattcatt

SEQ ID NO: 143001 - DNA, 22 bp, Artificial sequence
  SiRNA target sequence
aattacattccaccattcatta

SEQ ID NO: 143002 - DNA, 22 bp, Artificial sequence
  SiRNA target sequence
attacattccaccattcattaa

SEQ ID NO: 143003 - DNA, 22 bp, Artificial sequence
  SiRNA target sequence
ttacattccaccattcattaat

SEQ ID NO: 143004 - DNA, 22 bp, Artificial sequence
  SiRNA target sequence
tacattccaccattcattaatg

SEQ ID NO: 143005 - DNA, 22 bp, Artificial sequence
  SiRNA target sequence
acattccaccattcattaatgt

SEQ ID NO: 143006 - DNA, 22 bp, Artificial sequence
  SiRNA target sequence
cattccaccattcattaatgta

SEQ ID NO: 143007 - DNA, 22 bp, Artificial sequence
  SiRNA target sequence
attccaccattcattaatgtat

SEQ ID NO: 143008 - DNA, 22 bp, Artificial sequence
  SiRNA target sequence
ttccaccattcattaatgtatt

SEQ ID NO: 143009 - DNA, 22 bp, Artificial sequence
  SiRNA target sequence
tccaccattcattaatgtattc

SEQ ID NO: 143010 - DNA, 22 bp, Artificial sequence
  SiRNA target sequence
ccaccattcattaatgtattct

SEQ ID NO: 143011 - DNA, 22 bp, Artificial sequence
  SiRNA target sequence
caccattcattaatgtattctt

SEQ ID NO: 143012 - DNA, 22 bp, Artificial sequence
  SiRNA target sequence
accattcattaatgtattcttt

SEQ ID NO: 143013 - DNA, 22 bp, Artificial sequence
  SiRNA target sequence
ccattcattaatgtattctttt

SEQ ID NO: 143014 - DNA, 22 bp, Artificial sequence
  SiRNA target sequence
cattcattaatgtattcttttc

SEQ ID NO: 143015 - DNA, 22 bp, Artificial sequence
  SiRNA target sequence
attcattaatgtattcttttct

SEQ ID NO: 143016 - DNA, 22 bp, Artificial sequence
  SiRNA target sequence
ttcattaatgtattcttttctc

SEQ ID NO: 143017 - DNA, 22 bp, Artificial sequence
  SiRNA target sequence
tcattaatgtattcttttctcc

SEQ ID NO: 143018 - DNA, 22 bp, Artificial sequence
  SiRNA target sequence
cattaatgtattcttttctcct

SEQ ID NO: 143019 - DNA, 22 bp, Artificial sequence
  SiRNA target sequence
attaatgtattcttttctccta

SEQ ID NO: 143020 - DNA, 22 bp, Artificial sequence
  SiRNA target sequence
ttaatgtattcttttctcctat

SEQ ID NO: 143021 - DNA, 22 bp, Artificial sequence
  SiRNA target sequence
taatgtattcttttctcctatt

SEQ ID NO: 143022 - DNA, 22 bp, Artificial sequence
  SiRNA target sequence
aatgtattcttttctcctattt

SEQ ID NO: 143023 - DNA, 22 bp, Artificial sequence
  SiRNA target sequence
atgtattcttttctcctatttt

SEQ ID NO: 143024 - DNA, 22 bp, Artificial sequence
  SiRNA target sequence
tgtattcttttctcctattttt

SEQ ID NO: 143025 - DNA, 22 bp, Artificial sequence
  SiRNA target sequence
gtattcttttctcctattttta

SEQ ID NO: 143026 - DNA, 22 bp, Artificial sequence
  SiRNA target sequence
tattcttttctcctatttttat

SEQ ID NO: 143027 - DNA, 22 bp, Artificial sequence
  SiRNA target sequence
attcttttctcctatttttata

SEQ ID NO: 143028 - DNA, 22 bp, Artificial sequence
  SiRNA target sequence
ttcttttctcctatttttatac

SEQ ID NO: 143029 - DNA, 22 bp, Artificial sequence
  SiRNA target sequence
tcttttctcctatttttatact

SEQ ID NO: 143030 - DNA, 22 bp, Artificial sequence
  SiRNA target sequence
cttttctcctatttttatactg

SEQ ID NO: 143031 - DNA, 22 bp, Artificial sequence
  SiRNA target sequence
ttttctcctatttttatactgt

SEQ ID NO: 143032 - DNA, 22 bp, Artificial sequence
  SiRNA target sequence
tttctcctatttttatactgta

SEQ ID NO: 143033 - DNA, 22 bp, Artificial sequence
  SiRNA target sequence
ttctcctatttttatactgtaa

SEQ ID NO: 143034 - DNA, 22 bp, Artificial sequence
  SiRNA target sequence
tctcctatttttatactgtaaa

SEQ ID NO: 143035 - DNA, 22 bp, Artificial sequence
  SiRNA target sequence
ctcctatttttatactgtaaat

SEQ ID NO: 143036 - DNA, 22 bp, Artificial sequence
  SiRNA target sequence
tcctatttttatactgtaaata

SEQ ID NO: 143037 - DNA, 22 bp, Artificial sequence
  SiRNA target sequence
cctatttttatactgtaaataa

SEQ ID NO: 143038 - DNA, 22 bp, Artificial sequence
  SiRNA target sequence
ctatttttatactgtaaataat

SEQ ID NO: 143039 - DNA, 22 bp, Artificial sequence
  SiRNA target sequence
tatttttatactgtaaataata

SEQ ID NO: 143040 - DNA, 22 bp, Artificial sequence
  SiRNA target sequence
atttttatactgtaaataatac

SEQ ID NO: 143041 - DNA, 22 bp, Artificial sequence
  SiRNA target sequence
tttttatactgtaaataatacg

SEQ ID NO: 143042 - DNA, 22 bp, Artificial sequence
  SiRNA target sequence
ttttatactgtaaataatacgc

SEQ ID NO: 143043 - DNA, 22 bp, Artificial sequence
  SiRNA target sequence
tttatactgtaaataatacgca

SEQ ID NO: 143044 - DNA, 22 bp, Artificial sequence
  SiRNA target sequence
ttatactgtaaataatacgcat

SEQ ID NO: 143045 - DNA, 22 bp, Artificial sequence
  SiRNA target sequence
tatactgtaaataatacgcatg

SEQ ID NO: 143046 - DNA, 22 bp, Artificial sequence
  SiRNA target sequence
atactgtaaataatacgcatgt

SEQ ID NO: 143047 - DNA, 22 bp, Artificial sequence
  SiRNA target sequence
tactgtaaataatacgcatgtt

SEQ ID NO: 143048 - DNA, 22 bp, Artificial sequence
  SiRNA target sequence
actgtaaataatacgcatgttc

SEQ ID NO: 143049 - DNA, 22 bp, Artificial sequence
  SiRNA target sequence
ctgtaaataatacgcatgttcc

SEQ ID NO: 143050 - DNA, 22 bp, Artificial sequence
  SiRNA target sequence
tgtaaataatacgcatgttccc

SEQ ID NO: 143051 - DNA, 22 bp, Artificial sequence
  SiRNA target sequence
gtaaataatacgcatgttccca

SEQ ID NO: 143052 - DNA, 22 bp, Artificial sequence
  SiRNA target sequence
taaataatacgcatgttcccat

SEQ ID NO: 143053 - DNA, 22 bp, Artificial sequence
  SiRNA target sequence
aaataatacgcatgttcccata

SEQ ID NO: 143054 - DNA, 22 bp, Artificial sequence
  SiRNA target sequence
aataatacgcatgttcccatac

SEQ ID NO: 143055 - DNA, 22 bp, Artificial sequence
  SiRNA target sequence
ataatacgcatgttcccataca

SEQ ID NO: 143056 - DNA, 22 bp, Artificial sequence
  SiRNA target sequence
taatacgcatgttcccatacat

SEQ ID NO: 143057 - DNA, 22 bp, Artificial sequence
  SiRNA target sequence
aatacgcatgttcccatacatc

SEQ ID NO: 143058 - DNA, 22 bp, Artificial sequence
  SiRNA target sequence
atacgcatgttcccatacatca

SEQ ID NO: 143059 - DNA, 22 bp, Artificial sequence
  SiRNA target sequence
tacgcatgttcccatacatcaa

SEQ ID NO: 143060 - DNA, 22 bp, Artificial sequence
  SiRNA target sequence
acgcatgttcccatacatcaag

SEQ ID NO: 143061 - DNA, 22 bp, Artificial sequence
  SiRNA target sequence
cgcatgttcccatacatcaaga

SEQ ID NO: 143062 - DNA, 22 bp, Artificial sequence
  SiRNA target sequence
gcatgttcccatacatcaagac

SEQ ID NO: 143063 - DNA, 22 bp, Artificial sequence
  SiRNA target sequence
catgttcccatacatcaagaca

SEQ ID NO: 143064 - DNA, 22 bp, Artificial sequence
  SiRNA target sequence
atgttcccatacatcaagacat

SEQ ID NO: 143065 - DNA, 22 bp, Artificial sequence
  SiRNA target sequence
tgttcccatacatcaagacata

SEQ ID NO: 143066 - DNA, 22 bp, Artificial sequence
  SiRNA target sequence
gttcccatacatcaagacatag

SEQ ID NO: 143067 - DNA, 22 bp, Artificial sequence
  SiRNA target sequence
ttcccatacatcaagacatagt

SEQ ID NO: 143068 - DNA, 22 bp, Artificial sequence
  SiRNA target sequence
tcccatacatcaagacatagta

SEQ ID NO: 143069 - DNA, 22 bp, Artificial sequence
  SiRNA target sequence
cccatacatcaagacatagtaa

SEQ ID NO: 143070 - DNA, 22 bp, Artificial sequence
  SiRNA target sequence
ccatacatcaagacatagtaaa

SEQ ID NO: 143071 - DNA, 22 bp, Artificial sequence
  SiRNA target sequence
catacatcaagacatagtaaag

SEQ ID NO: 143072 - DNA, 22 bp, Artificial sequence
  SiRNA target sequence
atacatcaagacatagtaaagg

SEQ ID NO: 143073 - DNA, 22 bp, Artificial sequence
  SiRNA target sequence
tacatcaagacatagtaaagga

SEQ ID NO: 143074 - DNA, 22 bp, Artificial sequence
  SiRNA target sequence
acatcaagacatagtaaaggaa

SEQ ID NO: 143075 - DNA, 22 bp, Artificial sequence
  SiRNA target sequence
catcaagacatagtaaaggaat

SEQ ID NO: 143076 - DNA, 22 bp, Artificial sequence
  SiRNA target sequence
atcaagacatagtaaaggaata

SEQ ID NO: 143077 - DNA, 22 bp, Artificial sequence
  SiRNA target sequence
tcaagacatagtaaaggaatac

SEQ ID NO: 143078 - DNA, 22 bp, Artificial sequence
  SiRNA target sequence
caagacatagtaaaggaataca

SEQ ID NO: 143079 - DNA, 22 bp, Artificial sequence
  SiRNA target sequence
aagacatagtaaaggaatacat

SEQ ID NO: 143080 - DNA, 22 bp, Artificial sequence
  SiRNA target sequence
agacatagtaaaggaatacatt

SEQ ID NO: 143081 - DNA, 22 bp, Artificial sequence
  SiRNA target sequence
gacatagtaaaggaatacattc

SEQ ID NO: 143082 - DNA, 22 bp, Artificial sequence
  SiRNA target sequence
acatagtaaaggaatacattca

SEQ ID NO: 143083 - DNA, 22 bp, Artificial sequence
  SiRNA target sequence
catagtaaaggaatacattcac

SEQ ID NO: 143084 - DNA, 22 bp, Artificial sequence
  SiRNA target sequence
atagtaaaggaatacattcacc

SEQ ID NO: 143085 - DNA, 22 bp, Artificial sequence
  SiRNA target sequence
tagtaaaggaatacattcacca

SEQ ID NO: 143086 - DNA, 22 bp, Artificial sequence
  SiRNA target sequence
agtaaaggaatacattcaccat

SEQ ID NO: 143087 - DNA, 22 bp, Artificial sequence
  SiRNA target sequence
gtaaaggaatacattcaccatc

SEQ ID NO: 143088 - DNA, 22 bp, Artificial sequence
  SiRNA target sequence
taaaggaatacattcaccatcc

SEQ ID NO: 143089 - DNA, 22 bp, Artificial sequence
  SiRNA target sequence
aaaggaatacattcaccatcct

SEQ ID NO: 143090 - DNA, 22 bp, Artificial sequence
  SiRNA target sequence
aaggaatacattcaccatcctc

SEQ ID NO: 143091 - DNA, 22 bp, Artificial sequence
  SiRNA target sequence
aggaatacattcaccatcctcc

SEQ ID NO: 143092 - DNA, 22 bp, Artificial sequence
  SiRNA target sequence
ggaatacattcaccatcctcca

SEQ ID NO: 143093 - DNA, 22 bp, Artificial sequence
  SiRNA target sequence
gaatacattcaccatcctccat

SEQ ID NO: 143094 - DNA, 22 bp, Artificial sequence
  SiRNA target sequence
aatacattcaccatcctccatc

SEQ ID NO: 143095 - DNA, 22 bp, Artificial sequence
  SiRNA target sequence
atacattcaccatcctccatca

SEQ ID NO: 143096 - DNA, 22 bp, Artificial sequence
  SiRNA target sequence
tacattcaccatcctccatcat

SEQ ID NO: 143097 - DNA, 22 bp, Artificial sequence
  SiRNA target sequence
acattcaccatcctccatcata

SEQ ID NO: 143098 - DNA, 22 bp, Artificial sequence
  SiRNA target sequence
cattcaccatcctccatcatag

SEQ ID NO: 143099 - DNA, 22 bp, Artificial sequence
  SiRNA target sequence
attcaccatcctccatcatagg

SEQ ID NO: 143100 - DNA, 22 bp, Artificial sequence
  SiRNA target sequence
ttcaccatcctccatcatagga

SEQ ID NO: 143101 - DNA, 22 bp, Artificial sequence
  SiRNA target sequence
tcaccatcctccatcataggat

SEQ ID NO: 143102 - DNA, 22 bp, Artificial sequence
  SiRNA target sequence
caccatcctccatcataggatt

SEQ ID NO: 143103 - DNA, 22 bp, Artificial sequence
  SiRNA target sequence
accatcctccatcataggattg

SEQ ID NO: 143104 - DNA, 22 bp, Artificial sequence
  SiRNA target sequence
ccatcctccatcataggattgt

SEQ ID NO: 143105 - DNA, 22 bp, Artificial sequence
  SiRNA target sequence
catcctccatcataggattgtc

SEQ ID NO: 143106 - DNA, 22 bp, Artificial sequence
  SiRNA target sequence
atcctccatcataggattgtct

SEQ ID NO: 143107 - DNA, 22 bp, Artificial sequence
  SiRNA target sequence
tcctccatcataggattgtctt

SEQ ID NO: 143108 - DNA, 22 bp, Artificial sequence
  SiRNA target sequence
cctccatcataggattgtcttg

SEQ ID NO: 143109 - DNA, 22 bp, Artificial sequence
  SiRNA target sequence
ctccatcataggattgtcttga

SEQ ID NO: 143110 - DNA, 22 bp, Artificial sequence
  SiRNA target sequence
tccatcataggattgtcttgat

SEQ ID NO: 143111 - DNA, 22 bp, Artificial sequence
  SiRNA target sequence
ccatcataggattgtcttgatt

SEQ ID NO: 143112 - DNA, 22 bp, Artificial sequence
  SiRNA target sequence
catcataggattgtcttgatta

SEQ ID NO: 143113 - DNA, 22 bp, Artificial sequence
  SiRNA target sequence
atcataggattgtcttgattaa

SEQ ID NO: 143114 - DNA, 22 bp, Artificial sequence
  SiRNA target sequence
tcataggattgtcttgattaac

SEQ ID NO: 143115 - DNA, 22 bp, Artificial sequence
  SiRNA target sequence
cataggattgtcttgattaaca

SEQ ID NO: 143116 - DNA, 22 bp, Artificial sequence
  SiRNA target sequence
ataggattgtcttgattaacac

SEQ ID NO: 143117 - DNA, 22 bp, Artificial sequence
  SiRNA target sequence
taggattgtcttgattaacact

SEQ ID NO: 143118 - DNA, 22 bp, Artificial sequence
  SiRNA target sequence
aggattgtcttgattaacactg

SEQ ID NO: 143119 - DNA, 22 bp, Artificial sequence
  SiRNA target sequence
ggattgtcttgattaacactgg

SEQ ID NO: 143120 - DNA, 22 bp, Artificial sequence
  SiRNA target sequence
gattgtcttgattaacactggt

SEQ ID NO: 143121 - DNA, 22 bp, Artificial sequence
  SiRNA target sequence
attgtcttgattaacactggtc

SEQ ID NO: 143122 - DNA, 22 bp, Artificial sequence
  SiRNA target sequence
ttgtcttgattaacactggtct

SEQ ID NO: 143123 - DNA, 22 bp, Artificial sequence
  SiRNA target sequence
tgtcttgattaacactggtctt

SEQ ID NO: 143124 - DNA, 22 bp, Artificial sequence
  SiRNA target sequence
gtcttgattaacactggtctta

SEQ ID NO: 143125 - DNA, 22 bp, Artificial sequence
  SiRNA target sequence
tcttgattaacactggtcttaa

SEQ ID NO: 143126 - DNA, 22 bp, Artificial sequence
  SiRNA target sequence
cttgattaacactggtcttaat

SEQ ID NO: 143127 - DNA, 22 bp, Artificial sequence
  SiRNA target sequence
ttgattaacactggtcttaata

SEQ ID NO: 143128 - DNA, 22 bp, Artificial sequence
  SiRNA target sequence
tgattaacactggtcttaatac

SEQ ID NO: 143129 - DNA, 22 bp, Artificial sequence
  SiRNA target sequence
gattaacactggtcttaataca

SEQ ID NO: 143130 - DNA, 22 bp, Artificial sequence
  SiRNA target sequence
attaacactggtcttaatacac

SEQ ID NO: 143131 - DNA, 22 bp, Artificial sequence
  SiRNA target sequence
ttaacactggtcttaatacaca

SEQ ID NO: 143132 - DNA, 22 bp, Artificial sequence
  SiRNA target sequence
taacactggtcttaatacacaa

SEQ ID NO: 143133 - DNA, 22 bp, Artificial sequence
  SiRNA target sequence
aacactggtcttaatacacaat

SEQ ID NO: 143134 - DNA, 22 bp, Artificial sequence
  SiRNA target sequence
acactggtcttaatacacaatt

SEQ ID NO: 143135 - DNA, 22 bp, Artificial sequence
  SiRNA target sequence
cactggtcttaatacacaattt

SEQ ID NO: 143136 - DNA, 22 bp, Artificial sequence
  SiRNA target sequence
actggtcttaatacacaattta

SEQ ID NO: 143137 - DNA, 22 bp, Artificial sequence
  SiRNA target sequence
ctggtcttaatacacaatttat

SEQ ID NO: 143138 - DNA, 22 bp, Artificial sequence
  SiRNA target sequence
tggtcttaatacacaatttatc

SEQ ID NO: 143139 - DNA, 22 bp, Artificial sequence
  SiRNA target sequence
ggtcttaatacacaatttatct

SEQ ID NO: 143140 - DNA, 22 bp, Artificial sequence
  SiRNA target sequence
gtcttaatacacaatttatctt

SEQ ID NO: 143141 - DNA, 22 bp, Artificial sequence
  SiRNA target sequence
tcttaatacacaatttatcttt

SEQ ID NO: 143142 - DNA, 22 bp, Artificial sequence
  SiRNA target sequence
cttaatacacaatttatcttta

SEQ ID NO: 143143 - DNA, 22 bp, Artificial sequence
  SiRNA target sequence
ttaatacacaatttatctttat

SEQ ID NO: 143144 - DNA, 22 bp, Artificial sequence
  SiRNA target sequence
taatacacaatttatctttata

SEQ ID NO: 143145 - DNA, 22 bp, Artificial sequence
  SiRNA target sequence
aatacacaatttatctttatat

SEQ ID NO: 143146 - DNA, 22 bp, Artificial sequence
  SiRNA target sequence
atacacaatttatctttatata

SEQ ID NO: 143147 - DNA, 22 bp, Artificial sequence
  SiRNA target sequence
tacacaatttatctttatatat

SEQ ID NO: 143148 - DNA, 22 bp, Artificial sequence
  SiRNA target sequence
acacaatttatctttatatatc

SEQ ID NO: 143149 - DNA, 22 bp, Artificial sequence
  SiRNA target sequence
cacaatttatctttatatatca

SEQ ID NO: 143150 - DNA, 22 bp, Artificial sequence
  SiRNA target sequence
acaatttatctttatatatcaa

SEQ ID NO: 143151 - DNA, 22 bp, Artificial sequence
  SiRNA target sequence
caatttatctttatatatcaac

SEQ ID NO: 143152 - DNA, 22 bp, Artificial sequence
  SiRNA target sequence
aatttatctttatatatcaacc

SEQ ID NO: 143153 - DNA, 22 bp, Artificial sequence
  SiRNA target sequence
atttatctttatatatcaacca

SEQ ID NO: 143154 - DNA, 22 bp, Artificial sequence
  SiRNA target sequence
tttatctttatatatcaaccac

SEQ ID NO: 143155 - DNA, 22 bp, Artificial sequence
  SiRNA target sequence
ttatctttatatatcaaccaca

SEQ ID NO: 143156 - DNA, 22 bp, Artificial sequence
  SiRNA target sequence
tatctttatatatcaaccacac

SEQ ID NO: 143157 - DNA, 22 bp, Artificial sequence
  SiRNA target sequence
atctttatatatcaaccacacc

SEQ ID NO: 143158 - DNA, 22 bp, Artificial sequence
  SiRNA target sequence
tctttatatatcaaccacaccc

SEQ ID NO: 143159 - DNA, 22 bp, Artificial sequence
  SiRNA target sequence
ctttatatatcaaccacaccca

SEQ ID NO: 143160 - DNA, 22 bp, Artificial sequence
  SiRNA target sequence
tttatatatcaaccacacccat

SEQ ID NO: 143161 - DNA, 22 bp, Artificial sequence
  SiRNA target sequence
ttatatatcaaccacacccatc

SEQ ID NO: 143162 - DNA, 22 bp, Artificial sequence
  SiRNA target sequence
tatatatcaaccacacccatcc

SEQ ID NO: 143163 - DNA, 22 bp, Artificial sequence
  SiRNA target sequence
atatatcaaccacacccatcct

SEQ ID NO: 143164 - DNA, 22 bp, Artificial sequence
  SiRNA target sequence
tatatcaaccacacccatcctg

SEQ ID NO: 143165 - DNA, 22 bp, Artificial sequence
  SiRNA target sequence
atatcaaccacacccatcctga

SEQ ID NO: 143166 - DNA, 22 bp, Artificial sequence
  SiRNA target sequence
tatcaaccacacccatcctgat

SEQ ID NO: 143167 - DNA, 22 bp, Artificial sequence
  SiRNA target sequence
atcaaccacacccatcctgatc

SEQ ID NO: 143168 - DNA, 22 bp, Artificial sequence
  SiRNA target sequence
tcaaccacacccatcctgatcc

SEQ ID NO: 143169 - DNA, 22 bp, Artificial sequence
  SiRNA target sequence
caaccacacccatcctgatcca

SEQ ID NO: 143170 - DNA, 22 bp, Artificial sequence
  SiRNA target sequence
aaccacacccatcctgatccaa

SEQ ID NO: 143171 - DNA, 22 bp, Artificial sequence
  SiRNA target sequence
accacacccatcctgatccaaa

SEQ ID NO: 143172 - DNA, 22 bp, Artificial sequence
  SiRNA target sequence
ccacacccatcctgatccaaat

SEQ ID NO: 143173 - DNA, 22 bp, Artificial sequence
  SiRNA target sequence
cacacccatcctgatccaaata

SEQ ID NO: 143174 - DNA, 22 bp, Artificial sequence
  SiRNA target sequence
acacccatcctgatccaaataa

SEQ ID NO: 143175 - DNA, 22 bp, Artificial sequence
  SiRNA target sequence
cacccatcctgatccaaataat

SEQ ID NO: 143176 - DNA, 22 bp, Artificial sequence
  SiRNA target sequence
acccatcctgatccaaataatt

SEQ ID NO: 143177 - DNA, 22 bp, Artificial sequence
  SiRNA target sequence
cccatcctgatccaaataattt

SEQ ID NO: 143178 - DNA, 22 bp, Artificial sequence
  SiRNA target sequence
ccatcctgatccaaataatttt

SEQ ID NO: 143179 - DNA, 22 bp, Artificial sequence
  SiRNA target sequence
catcctgatccaaataatttta

SEQ ID NO: 143180 - DNA, 22 bp, Artificial sequence
  SiRNA target sequence
atcctgatccaaataattttac

SEQ ID NO: 143181 - DNA, 22 bp, Artificial sequence
  SiRNA target sequence
tcctgatccaaataattttaca

SEQ ID NO: 143182 - DNA, 22 bp, Artificial sequence
  SiRNA target sequence
cctgatccaaataattttacag

SEQ ID NO: 143183 - DNA, 22 bp, Artificial sequence
  SiRNA target sequence
ctgatccaaataattttacagc

SEQ ID NO: 143184 - DNA, 22 bp, Artificial sequence
  SiRNA target sequence
tgatccaaataattttacagct

SEQ ID NO: 143185 - DNA, 22 bp, Artificial sequence
  SiRNA target sequence
gatccaaataattttacagctt

SEQ ID NO: 143186 - DNA, 22 bp, Artificial sequence
  SiRNA target sequence
atccaaataattttacagcttc

SEQ ID NO: 143187 - DNA, 22 bp, Artificial sequence
  SiRNA target sequence
tccaaataattttacagcttca

SEQ ID NO: 143188 - DNA, 22 bp, Artificial sequence
  SiRNA target sequence
ccaaataattttacagcttcag

SEQ ID NO: 143189 - DNA, 22 bp, Artificial sequence
  SiRNA target sequence
caaataattttacagcttcagt

SEQ ID NO: 143190 - DNA, 22 bp, Artificial sequence
  SiRNA target sequence
aaataattttacagcttcagta

SEQ ID NO: 143191 - DNA, 22 bp, Artificial sequence
  SiRNA target sequence
aataattttacagcttcagtat

SEQ ID NO: 143192 - DNA, 22 bp, Artificial sequence
  SiRNA target sequence
ataattttacagcttcagtatt

SEQ ID NO: 143193 - DNA, 22 bp, Artificial sequence
  SiRNA target sequence
taattttacagcttcagtatta

SEQ ID NO: 143194 - DNA, 22 bp, Artificial sequence
  SiRNA target sequence
aattttacagcttcagtattaa

SEQ ID NO: 143195 - DNA, 22 bp, Artificial sequence
  SiRNA target sequence
attttacagcttcagtattaaa

SEQ ID NO: 143196 - DNA, 22 bp, Artificial sequence
  SiRNA target sequence
ttttacagcttcagtattaaaa

SEQ ID NO: 143197 - DNA, 22 bp, Artificial sequence
  SiRNA target sequence
tttacagcttcagtattaaaat

SEQ ID NO: 143198 - DNA, 22 bp, Artificial sequence
  SiRNA target sequence
ttacagcttcagtattaaaatt

SEQ ID NO: 143199 - DNA, 22 bp, Artificial sequence
  SiRNA target sequence
tacagcttcagtattaaaattc

SEQ ID NO: 143200 - DNA, 22 bp, Artificial sequence
  SiRNA target sequence
acagcttcagtattaaaattct

SEQ ID NO: 143201 - DNA, 22 bp, Artificial sequence
  SiRNA target sequence
cagcttcagtattaaaattctc

SEQ ID NO: 143202 - DNA, 22 bp, Artificial sequence
  SiRNA target sequence
agcttcagtattaaaattctcc

SEQ ID NO: 143203 - DNA, 22 bp, Artificial sequence
  SiRNA target sequence
gcttcagtattaaaattctcct

SEQ ID NO: 143204 - DNA, 22 bp, Artificial sequence
  SiRNA target sequence
cttcagtattaaaattctcctt

SEQ ID NO: 143205 - DNA, 22 bp, Artificial sequence
  SiRNA target sequence
ttcagtattaaaattctcctta

SEQ ID NO: 143206 - DNA, 22 bp, Artificial sequence
  SiRNA target sequence
tcagtattaaaattctccttaa

SEQ ID NO: 143207 - DNA, 22 bp, Artificial sequence
  SiRNA target sequence
cagtattaaaattctccttaaa

SEQ ID NO: 143208 - DNA, 22 bp, Artificial sequence
  SiRNA target sequence
agtattaaaattctccttaaat

SEQ ID NO: 143209 - DNA, 22 bp, Artificial sequence
  SiRNA target sequence
gtattaaaattctccttaaatt

SEQ ID NO: 143210 - DNA, 22 bp, Artificial sequence
  SiRNA target sequence
tattaaaattctccttaaattt

SEQ ID NO: 143211 - DNA, 22 bp, Artificial sequence
  SiRNA target sequence
attaaaattctccttaaattta

SEQ ID NO: 143212 - DNA, 22 bp, Artificial sequence
  SiRNA target sequence
ttaaaattctccttaaatttat

SEQ ID NO: 143213 - DNA, 22 bp, Artificial sequence
  SiRNA target sequence
taaaattctccttaaatttatt

SEQ ID NO: 143214 - DNA, 22 bp, Artificial sequence
  SiRNA target sequence
aaaattctccttaaatttattt

SEQ ID NO: 143215 - DNA, 22 bp, Artificial sequence
  SiRNA target sequence
aaattctccttaaatttattta

SEQ ID NO: 143216 - DNA, 22 bp, Artificial sequence
  SiRNA target sequence
aattctccttaaatttatttat

SEQ ID NO: 143217 - DNA, 22 bp, Artificial sequence
  SiRNA target sequence
attctccttaaatttatttatt

SEQ ID NO: 143218 - DNA, 22 bp, Artificial sequence
  SiRNA target sequence
ttctccttaaatttatttattg

SEQ ID NO: 143219 - DNA, 22 bp, Artificial sequence
  SiRNA target sequence
tctccttaaatttatttattga

SEQ ID NO: 143220 - DNA, 22 bp, Artificial sequence
  SiRNA target sequence
ctccttaaatttatttattgat

SEQ ID NO: 143221 - DNA, 22 bp, Artificial sequence
  SiRNA target sequence
tccttaaatttatttattgatc

SEQ ID NO: 143222 - DNA, 22 bp, Artificial sequence
  SiRNA target sequence
ccttaaatttatttattgatcc

SEQ ID NO: 143223 - DNA, 22 bp, Artificial sequence
  SiRNA target sequence
cttaaatttatttattgatcca

SEQ ID NO: 143224 - DNA, 22 bp, Artificial sequence
  SiRNA target sequence
ttaaatttatttattgatccaa

SEQ ID NO: 143225 - DNA, 22 bp, Artificial sequence
  SiRNA target sequence
taaatttatttattgatccaaa

SEQ ID NO: 143226 - DNA, 22 bp, Artificial sequence
  SiRNA target sequence
aaatttatttattgatccaaag

SEQ ID NO: 143227 - DNA, 22 bp, Artificial sequence
  SiRNA target sequence
aatttatttattgatccaaagt

SEQ ID NO: 143228 - DNA, 22 bp, Artificial sequence
  SiRNA target sequence
atttatttattgatccaaagtc

SEQ ID NO: 143229 - DNA, 22 bp, Artificial sequence
  SiRNA target sequence
tttatttattgatccaaagtct

SEQ ID NO: 143230 - DNA, 22 bp, Artificial sequence
  SiRNA target sequence
ttatttattgatccaaagtctt

SEQ ID NO: 143231 - DNA, 22 bp, Artificial sequence
  SiRNA target sequence
tatttattgatccaaagtcttt

SEQ ID NO: 143232 - DNA, 22 bp, Artificial sequence
  SiRNA target sequence
atttattgatccaaagtctttt

SEQ ID NO: 143233 - DNA, 22 bp, Artificial sequence
  SiRNA target sequence
tttattgatccaaagtctttta

SEQ ID NO: 143234 - DNA, 22 bp, Artificial sequence
  SiRNA target sequence
ttattgatccaaagtcttttat

SEQ ID NO: 143235 - DNA, 22 bp, Artificial sequence
  SiRNA target sequence
tattgatccaaagtcttttatt

SEQ ID NO: 143236 - DNA, 22 bp, Artificial sequence
  SiRNA target sequence
attgatccaaagtcttttatta

SEQ ID NO: 143237 - DNA, 22 bp, Artificial sequence
  SiRNA target sequence
ttgatccaaagtcttttattat

SEQ ID NO: 143238 - DNA, 22 bp, Artificial sequence
  SiRNA target sequence
tgatccaaagtcttttattata

SEQ ID NO: 143239 - DNA, 22 bp, Artificial sequence
  SiRNA target sequence
gatccaaagtcttttattatag

SEQ ID NO: 143240 - DNA, 22 bp, Artificial sequence
  SiRNA target sequence
atccaaagtcttttattatagc

SEQ ID NO: 143241 - DNA, 22 bp, Artificial sequence
  SiRNA target sequence
tccaaagtcttttattatagca

SEQ ID NO: 143242 - DNA, 22 bp, Artificial sequence
  SiRNA target sequence
ccaaagtcttttattatagcac

SEQ ID NO: 143243 - DNA, 22 bp, Artificial sequence
  SiRNA target sequence
caaagtcttttattatagcact

SEQ ID NO: 143244 - DNA, 22 bp, Artificial sequence
  SiRNA target sequence
aaagtcttttattatagcactt

SEQ ID NO: 143245 - DNA, 22 bp, Artificial sequence
  SiRNA target sequence
aagtcttttattatagcacttt

SEQ ID NO: 143246 - DNA, 22 bp, Artificial sequence
  SiRNA target sequence
agtcttttattatagcactttc

SEQ ID NO: 143247 - DNA, 22 bp, Artificial sequence
  SiRNA target sequence
gtcttttattatagcactttcc

SEQ ID NO: 143248 - DNA, 22 bp, Artificial sequence
  SiRNA target sequence
tcttttattatagcactttcca

SEQ ID NO: 143249 - DNA, 22 bp, Artificial sequence
  SiRNA target sequence
cttttattatagcactttccaa

SEQ ID NO: 143250 - DNA, 22 bp, Artificial sequence
  SiRNA target sequence
ttttattatagcactttccaac

SEQ ID NO: 143251 - DNA, 22 bp, Artificial sequence
  SiRNA target sequence
tttattatagcactttccaact

SEQ ID NO: 143252 - DNA, 22 bp, Artificial sequence
  SiRNA target sequence
ttattatagcactttccaactg

SEQ ID NO: 143253 - DNA, 22 bp, Artificial sequence
  SiRNA target sequence
tattatagcactttccaactgg

SEQ ID NO: 143254 - DNA, 22 bp, Artificial sequence
  SiRNA target sequence
attatagcactttccaactggg

SEQ ID NO: 143255 - DNA, 22 bp, Artificial sequence
  SiRNA target sequence
ttatagcactttccaactggga

SEQ ID NO: 143256 - DNA, 22 bp, Artificial sequence
  SiRNA target sequence
tatagcactttccaactgggaa

SEQ ID NO: 143257 - DNA, 22 bp, Artificial sequence
  SiRNA target sequence
atagcactttccaactgggaag

SEQ ID NO: 143258 - DNA, 22 bp, Artificial sequence
  SiRNA target sequence
tagcactttccaactgggaaga

SEQ ID NO: 143259 - DNA, 22 bp, Artificial sequence
  SiRNA target sequence
agcactttccaactgggaagaa

SEQ ID NO: 143260 - DNA, 22 bp, Artificial sequence
  SiRNA target sequence
gcactttccaactgggaagaaa

SEQ ID NO: 143261 - DNA, 22 bp, Artificial sequence
  SiRNA target sequence
cactttccaactgggaagaaat

SEQ ID NO: 143262 - DNA, 22 bp, Artificial sequence
  SiRNA target sequence
actttccaactgggaagaaatc

SEQ ID NO: 143263 - DNA, 22 bp, Artificial sequence
  SiRNA target sequence
ctttccaactgggaagaaatct

SEQ ID NO: 143264 - DNA, 22 bp, Artificial sequence
  SiRNA target sequence
tttccaactgggaagaaatctt

SEQ ID NO: 143265 - DNA, 22 bp, Artificial sequence
  SiRNA target sequence
ttccaactgggaagaaatcttt

SEQ ID NO: 143266 - DNA, 22 bp, Artificial sequence
  SiRNA target sequence
tccaactgggaagaaatctttt

SEQ ID NO: 143267 - DNA, 22 bp, Artificial sequence
  SiRNA target sequence
ccaactgggaagaaatcttttt

SEQ ID NO: 143268 - DNA, 22 bp, Artificial sequence
  SiRNA target sequence
caactgggaagaaatcttttta

SEQ ID NO: 143269 - DNA, 22 bp, Artificial sequence
  SiRNA target sequence
aactgggaagaaatctttttat

SEQ ID NO: 143270 - DNA, 22 bp, Artificial sequence
  SiRNA target sequence
actgggaagaaatctttttatt

SEQ ID NO: 143271 - DNA, 22 bp, Artificial sequence
  SiRNA target sequence
ctgggaagaaatctttttattt

SEQ ID NO: 143272 - DNA, 22 bp, Artificial sequence
  SiRNA target sequence
tgggaagaaatctttttatttt

SEQ ID NO: 143273 - DNA, 22 bp, Artificial sequence
  SiRNA target sequence
gggaagaaatctttttattttc

SEQ ID NO: 143274 - DNA, 22 bp, Artificial sequence
  SiRNA target sequence
ggaagaaatctttttattttct

SEQ ID NO: 143275 - DNA, 22 bp, Artificial sequence
  SiRNA target sequence
gaagaaatctttttattttctg

SEQ ID NO: 143276 - DNA, 22 bp, Artificial sequence
  SiRNA target sequence
aagaaatctttttattttctgg

SEQ ID NO: 143277 - DNA, 22 bp, Artificial sequence
  SiRNA target sequence
agaaatctttttattttctggt

SEQ ID NO: 143278 - DNA, 22 bp, Artificial sequence
  SiRNA target sequence
gaaatctttttattttctggtg

SEQ ID NO: 143279 - DNA, 22 bp, Artificial sequence
  SiRNA target sequence
aaatctttttattttctggtga

SEQ ID NO: 143280 - DNA, 22 bp, Artificial sequence
  SiRNA target sequence
aatctttttattttctggtgac

SEQ ID NO: 143281 - DNA, 22 bp, Artificial sequence
  SiRNA target sequence
atctttttattttctggtgaca

SEQ ID NO: 143282 - DNA, 22 bp, Artificial sequence
  SiRNA target sequence
tctttttattttctggtgacat

SEQ ID NO: 143283 - DNA, 22 bp, Artificial sequence
  SiRNA target sequence
ctttttattttctggtgacatt

SEQ ID NO: 143284 - DNA, 22 bp, Artificial sequence
  SiRNA target sequence
tttttattttctggtgacatta

SEQ ID NO: 143285 - DNA, 22 bp, Artificial sequence
  SiRNA target sequence
ttttattttctggtgacattac

SEQ ID NO: 143286 - DNA, 22 bp, Artificial sequence
  SiRNA target sequence
tttattttctggtgacattacc

SEQ ID NO: 143287 - DNA, 22 bp, Artificial sequence
  SiRNA target sequence
ttattttctggtgacattacca

SEQ ID NO: 143288 - DNA, 22 bp, Artificial sequence
  SiRNA target sequence
tattttctggtgacattaccaa

SEQ ID NO: 143289 - DNA, 22 bp, Artificial sequence
  SiRNA target sequence
attttctggtgacattaccaac

SEQ ID NO: 143290 - DNA, 22 bp, Artificial sequence
  SiRNA target sequence
ttttctggtgacattaccaacc

SEQ ID NO: 143291 - DNA, 22 bp, Artificial sequence
  SiRNA target sequence
tttctggtgacattaccaacca

SEQ ID NO: 143292 - DNA, 22 bp, Artificial sequence
  SiRNA target sequence
ttctggtgacattaccaaccag

SEQ ID NO: 143293 - DNA, 22 bp, Artificial sequence
  SiRNA target sequence
tctggtgacattaccaaccaga

SEQ ID NO: 143294 - DNA, 22 bp, Artificial sequence
  SiRNA target sequence
ctggtgacattaccaaccagaa

SEQ ID NO: 143295 - DNA, 22 bp, Artificial sequence
  SiRNA target sequence
tggtgacattaccaaccagaaa

SEQ ID NO: 143296 - DNA, 22 bp, Artificial sequence
  SiRNA target sequence
ggtgacattaccaaccagaaaa

SEQ ID NO: 143297 - DNA, 22 bp, Artificial sequence
  SiRNA target sequence
gtgacattaccaaccagaaaag

SEQ ID NO: 143298 - DNA, 22 bp, Artificial sequence
  SiRNA target sequence
tgacattaccaaccagaaaaga

SEQ ID NO: 143299 - DNA, 22 bp, Artificial sequence
  SiRNA target sequence
gacattaccaaccagaaaagac

SEQ ID NO: 143300 - DNA, 22 bp, Artificial sequence
  SiRNA target sequence
acattaccaaccagaaaagact

SEQ ID NO: 143301 - DNA, 22 bp, Artificial sequence
  SiRNA target sequence
cattaccaaccagaaaagacta

SEQ ID NO: 143302 - DNA, 22 bp, Artificial sequence
  SiRNA target sequence
attaccaaccagaaaagactat

SEQ ID NO: 143303 - DNA, 22 bp, Artificial sequence
  SiRNA target sequence
ttaccaaccagaaaagactatg

SEQ ID NO: 143304 - DNA, 22 bp, Artificial sequence
  SiRNA target sequence
taccaaccagaaaagactatgg

SEQ ID NO: 143305 - DNA, 22 bp, Artificial sequence
  SiRNA target sequence
accaaccagaaaagactatggt

SEQ ID NO: 143306 - DNA, 22 bp, Artificial sequence
  SiRNA target sequence
ccaaccagaaaagactatggtt

SEQ ID NO: 143307 - DNA, 22 bp, Artificial sequence
  SiRNA target sequence
caaccagaaaagactatggttg

SEQ ID NO: 143308 - DNA, 22 bp, Artificial sequence
  SiRNA target sequence
aaccagaaaagactatggttgt

SEQ ID NO: 143309 - DNA, 22 bp, Artificial sequence
  SiRNA target sequence
accagaaaagactatggttgta

SEQ ID NO: 143310 - DNA, 22 bp, Artificial sequence
  SiRNA target sequence
ccagaaaagactatggttgtaa

SEQ ID NO: 143311 - DNA, 22 bp, Artificial sequence
  SiRNA target sequence
cagaaaagactatggttgtaat

SEQ ID NO: 143312 - DNA, 22 bp, Artificial sequence
  SiRNA target sequence
agaaaagactatggttgtaatg

SEQ ID NO: 143313 - DNA, 22 bp, Artificial sequence
  SiRNA target sequence
gaaaagactatggttgtaatga

SEQ ID NO: 143314 - DNA, 22 bp, Artificial sequence
  SiRNA target sequence
aaaagactatggttgtaatgac

SEQ ID NO: 143315 - DNA, 22 bp, Artificial sequence
  SiRNA target sequence
aaagactatggttgtaatgacc

SEQ ID NO: 143316 - DNA, 22 bp, Artificial sequence
  SiRNA target sequence
aagactatggttgtaatgacca

SEQ ID NO: 143317 - DNA, 22 bp, Artificial sequence
  SiRNA target sequence
agactatggttgtaatgaccac

SEQ ID NO: 143318 - DNA, 22 bp, Artificial sequence
  SiRNA target sequence
gactatggttgtaatgaccacc

SEQ ID NO: 143319 - DNA, 22 bp, Artificial sequence
  SiRNA target sequence
actatggttgtaatgaccacca

SEQ ID NO: 143320 - DNA, 22 bp, Artificial sequence
  SiRNA target sequence
ctatggttgtaatgaccaccac

SEQ ID NO: 143321 - DNA, 22 bp, Artificial sequence
  SiRNA target sequence
tatggttgtaatgaccaccacc

SEQ ID NO: 143322 - DNA, 22 bp, Artificial sequence
  SiRNA target sequence
atggttgtaatgaccaccacca

SEQ ID NO: 143323 - DNA, 22 bp, Artificial sequence
  SiRNA target sequence
tggttgtaatgaccaccaccat

SEQ ID NO: 143324 - DNA, 22 bp, Artificial sequence
  SiRNA target sequence
ggttgtaatgaccaccaccata

SEQ ID NO: 143325 - DNA, 22 bp, Artificial sequence
  SiRNA target sequence
gttgtaatgaccaccaccataa

SEQ ID NO: 143326 - DNA, 22 bp, Artificial sequence
  SiRNA target sequence
ttgtaatgaccaccaccataat

SEQ ID NO: 143327 - DNA, 22 bp, Artificial sequence
  SiRNA target sequence
tgtaatgaccaccaccataatc

SEQ ID NO: 143328 - DNA, 22 bp, Artificial sequence
  SiRNA target sequence
gtaatgaccaccaccataatct

SEQ ID NO: 143329 - DNA, 22 bp, Artificial sequence
  SiRNA target sequence
taatgaccaccaccataatctc

SEQ ID NO: 143330 - DNA, 22 bp, Artificial sequence
  SiRNA target sequence
aatgaccaccaccataatctct

SEQ ID NO: 143331 - DNA, 22 bp, Artificial sequence
  SiRNA target sequence
atgaccaccaccataatctctt

SEQ ID NO: 143332 - DNA, 22 bp, Artificial sequence
  SiRNA target sequence
tgaccaccaccataatctctta

SEQ ID NO: 143333 - DNA, 22 bp, Artificial sequence
  SiRNA target sequence
gaccaccaccataatctcttaa

SEQ ID NO: 143334 - DNA, 22 bp, Artificial sequence
  SiRNA target sequence
accaccaccataatctcttaat

SEQ ID NO: 143335 - DNA, 22 bp, Artificial sequence
  SiRNA target sequence
ccaccaccataatctcttaatt

SEQ ID NO: 143336 - DNA, 22 bp, Artificial sequence
  SiRNA target sequence
caccaccataatctcttaattg

SEQ ID NO: 143337 - DNA, 22 bp, Artificial sequence
  SiRNA target sequence
accaccataatctcttaattgt

SEQ ID NO: 143338 - DNA, 22 bp, Artificial sequence
  SiRNA target sequence
ccaccataatctcttaattgtt

SEQ ID NO: 143339 - DNA, 22 bp, Artificial sequence
  SiRNA target sequence
caccataatctcttaattgttt

SEQ ID NO: 143340 - DNA, 22 bp, Artificial sequence
  SiRNA target sequence
accataatctcttaattgttta

SEQ ID NO: 143341 - DNA, 22 bp, Artificial sequence
  SiRNA target sequence
ccataatctcttaattgtttat

SEQ ID NO: 143342 - DNA, 22 bp, Artificial sequence
  SiRNA target sequence
cataatctcttaattgtttatc

SEQ ID NO: 143343 - DNA, 22 bp, Artificial sequence
  SiRNA target sequence
ataatctcttaattgtttatca

SEQ ID NO: 143344 - DNA, 22 bp, Artificial sequence
  SiRNA target sequence
taatctcttaattgtttatcaa

SEQ ID NO: 143345 - DNA, 22 bp, Artificial sequence
  SiRNA target sequence
aatctcttaattgtttatcaac

SEQ ID NO: 143346 - DNA, 22 bp, Artificial sequence
  SiRNA target sequence
atctcttaattgtttatcaaca

SEQ ID NO: 143347 - DNA, 22 bp, Artificial sequence
  SiRNA target sequence
tctcttaattgtttatcaacaa

SEQ ID NO: 143348 - DNA, 22 bp, Artificial sequence
  SiRNA target sequence
ctcttaattgtttatcaacaag

SEQ ID NO: 143349 - DNA, 22 bp, Artificial sequence
  SiRNA target sequence
tcttaattgtttatcaacaagt

SEQ ID NO: 143350 - DNA, 22 bp, Artificial sequence
  SiRNA target sequence
cttaattgtttatcaacaagtg

SEQ ID NO: 143351 - DNA, 22 bp, Artificial sequence
  SiRNA target sequence
ttaattgtttatcaacaagtgc

SEQ ID NO: 143352 - DNA, 22 bp, Artificial sequence
  SiRNA target sequence
taattgtttatcaacaagtgca

SEQ ID NO: 143353 - DNA, 22 bp, Artificial sequence
  SiRNA target sequence
aattgtttatcaacaagtgcat

SEQ ID NO: 143354 - DNA, 22 bp, Artificial sequence
  SiRNA target sequence
attgtttatcaacaagtgcatt

SEQ ID NO: 143355 - DNA, 22 bp, Artificial sequence
  SiRNA target sequence
ttgtttatcaacaagtgcattt

SEQ ID NO: 143356 - DNA, 22 bp, Artificial sequence
  SiRNA target sequence
tgtttatcaacaagtgcatttc

SEQ ID NO: 143357 - DNA, 22 bp, Artificial sequence
  SiRNA target sequence
gtttatcaacaagtgcatttcc

SEQ ID NO: 143358 - DNA, 22 bp, Artificial sequence
  SiRNA target sequence
tttatcaacaagtgcatttcct

SEQ ID NO: 143359 - DNA, 22 bp, Artificial sequence
  SiRNA target sequence
ttatcaacaagtgcatttcctt

SEQ ID NO: 143360 - DNA, 22 bp, Artificial sequence
  SiRNA target sequence
tatcaacaagtgcatttccttt

SEQ ID NO: 143361 - DNA, 22 bp, Artificial sequence
  SiRNA target sequence
atcaacaagtgcatttccttta

SEQ ID NO: 143362 - DNA, 22 bp, Artificial sequence
  SiRNA target sequence
tcaacaagtgcatttcctttat

SEQ ID NO: 143363 - DNA, 22 bp, Artificial sequence
  SiRNA target sequence
caacaagtgcatttcctttatt

SEQ ID NO: 143364 - DNA, 22 bp, Artificial sequence
  SiRNA target sequence
aacaagtgcatttcctttatta

SEQ ID NO: 143365 - DNA, 22 bp, Artificial sequence
  SiRNA target sequence
acaagtgcatttcctttattat

SEQ ID NO: 143366 - DNA, 22 bp, Artificial sequence
  SiRNA target sequence
caagtgcatttcctttattatt

SEQ ID NO: 143367 - DNA, 22 bp, Artificial sequence
  SiRNA target sequence
aagtgcatttcctttattatta

SEQ ID NO: 143368 - DNA, 22 bp, Artificial sequence
  SiRNA target sequence
agtgcatttcctttattattaa

SEQ ID NO: 143369 - DNA, 22 bp, Artificial sequence
  SiRNA target sequence
gtgcatttcctttattattaaa

SEQ ID NO: 143370 - DNA, 22 bp, Artificial sequence
  SiRNA target sequence
tgcatttcctttattattaaaa

SEQ ID NO: 143371 - DNA, 22 bp, Artificial sequence
  SiRNA target sequence
gcatttcctttattattaaaaa

SEQ ID NO: 143372 - DNA, 22 bp, Artificial sequence
  SiRNA target sequence
catttcctttattattaaaaag

SEQ ID NO: 143373 - DNA, 22 bp, Artificial sequence
  SiRNA target sequence
atttcctttattattaaaaagt

SEQ ID NO: 143374 - DNA, 22 bp, Artificial sequence
  SiRNA target sequence
tttcctttattattaaaaagta

SEQ ID NO: 143375 - DNA, 22 bp, Artificial sequence
  SiRNA target sequence
ttcctttattattaaaaagtaa

SEQ ID NO: 143376 - DNA, 22 bp, Artificial sequence
  SiRNA target sequence
tcctttattattaaaaagtaat

SEQ ID NO: 143377 - DNA, 22 bp, Artificial sequence
  SiRNA target sequence
cctttattattaaaaagtaatg

SEQ ID NO: 143378 - DNA, 22 bp, Artificial sequence
  SiRNA target sequence
ctttattattaaaaagtaatga

SEQ ID NO: 143379 - DNA, 22 bp, Artificial sequence
  SiRNA target sequence
tttattattaaaaagtaatgaa

SEQ ID NO: 143380 - DNA, 22 bp, Artificial sequence
  SiRNA target sequence
ttattattaaaaagtaatgaat

SEQ ID NO: 143381 - DNA, 22 bp, Artificial sequence
  SiRNA target sequence
tattattaaaaagtaatgaatt

SEQ ID NO: 143382 - DNA, 22 bp, Artificial sequence
  SiRNA target sequence
attattaaaaagtaatgaattt

SEQ ID NO: 143383 - DNA, 22 bp, Artificial sequence
  SiRNA target sequence
ttattaaaaagtaatgaattta

SEQ ID NO: 143384 - DNA, 22 bp, Artificial sequence
  SiRNA target sequence
tattaaaaagtaatgaatttaa

SEQ ID NO: 143385 - DNA, 22 bp, Artificial sequence
  SiRNA target sequence
attaaaaagtaatgaatttaat

SEQ ID NO: 143386 - DNA, 22 bp, Artificial sequence
  SiRNA target sequence
ttaaaaagtaatgaatttaatg

SEQ ID NO: 143387 - DNA, 22 bp, Artificial sequence
  SiRNA target sequence
taaaaagtaatgaatttaatga

SEQ ID NO: 143388 - DNA, 22 bp, Artificial sequence
  SiRNA target sequence
aaaaagtaatgaatttaatgat

SEQ ID NO: 143389 - DNA, 22 bp, Artificial sequence
  SiRNA target sequence
aaaagtaatgaatttaatgatt

SEQ ID NO: 143390 - DNA, 22 bp, Artificial sequence
  SiRNA target sequence
aaagtaatgaatttaatgattt

SEQ ID NO: 143391 - DNA, 22 bp, Artificial sequence
  SiRNA target sequence
aagtaatgaatttaatgattta

SEQ ID NO: 143392 - DNA, 22 bp, Artificial sequence
  SiRNA target sequence
agtaatgaatttaatgatttac

SEQ ID NO: 143393 - DNA, 22 bp, Artificial sequence
  SiRNA target sequence
gtaatgaatttaatgatttacc

SEQ ID NO: 143394 - DNA, 22 bp, Artificial sequence
  SiRNA target sequence
taatgaatttaatgatttacca

SEQ ID NO: 143395 - DNA, 22 bp, Artificial sequence
  SiRNA target sequence
aatgaatttaatgatttaccac

SEQ ID NO: 143396 - DNA, 22 bp, Artificial sequence
  SiRNA target sequence
atgaatttaatgatttaccaca

SEQ ID NO: 143397 - DNA, 22 bp, Artificial sequence
  SiRNA target sequence
tgaatttaatgatttaccacac

SEQ ID NO: 143398 - DNA, 22 bp, Artificial sequence
  SiRNA target sequence
gaatttaatgatttaccacaca

SEQ ID NO: 143399 - DNA, 22 bp, Artificial sequence
  SiRNA target sequence
aatttaatgatttaccacacaa

SEQ ID NO: 143400 - DNA, 22 bp, Artificial sequence
  SiRNA target sequence
atttaatgatttaccacacaaa

SEQ ID NO: 143401 - DNA, 22 bp, Artificial sequence
  SiRNA target sequence
tttaatgatttaccacacaaat

SEQ ID NO: 143402 - DNA, 22 bp, Artificial sequence
  SiRNA target sequence
ttaatgatttaccacacaaatt

SEQ ID NO: 143403 - DNA, 22 bp, Artificial sequence
  SiRNA target sequence
taatgatttaccacacaaattg

SEQ ID NO: 143404 - DNA, 22 bp, Artificial sequence
  SiRNA target sequence
aatgatttaccacacaaattgt

SEQ ID NO: 143405 - DNA, 22 bp, Artificial sequence
  SiRNA target sequence
atgatttaccacacaaattgtt

SEQ ID NO: 143406 - DNA, 22 bp, Artificial sequence
  SiRNA target sequence
tgatttaccacacaaattgtta

SEQ ID NO: 143407 - DNA, 22 bp, Artificial sequence
  SiRNA target sequence
gatttaccacacaaattgttat

SEQ ID NO: 143408 - DNA, 22 bp, Artificial sequence
  SiRNA target sequence
atttaccacacaaattgttatc

SEQ ID NO: 143409 - DNA, 22 bp, Artificial sequence
  SiRNA target sequence
tttaccacacaaattgttatct

SEQ ID NO: 143410 - DNA, 22 bp, Artificial sequence
  SiRNA target sequence
ttaccacacaaattgttatcta

SEQ ID NO: 143411 - DNA, 22 bp, Artificial sequence
  SiRNA target sequence
taccacacaaattgttatctaa

SEQ ID NO: 143412 - DNA, 22 bp, Artificial sequence
  SiRNA target sequence
accacacaaattgttatctaat

SEQ ID NO: 143413 - DNA, 22 bp, Artificial sequence
  SiRNA target sequence
ccacacaaattgttatctaata

SEQ ID NO: 143414 - DNA, 22 bp, Artificial sequence
  SiRNA target sequence
cacacaaattgttatctaatat

SEQ ID NO: 143415 - DNA, 22 bp, Artificial sequence
  SiRNA target sequence
acacaaattgttatctaatatt

SEQ ID NO: 143416 - DNA, 22 bp, Artificial sequence
  SiRNA target sequence
cacaaattgttatctaatatta

SEQ ID NO: 143417 - DNA, 22 bp, Artificial sequence
  SiRNA target sequence
acaaattgttatctaatattat

SEQ ID NO: 143418 - DNA, 22 bp, Artificial sequence
  SiRNA target sequence
caaattgttatctaatattatt

SEQ ID NO: 143419 - DNA, 22 bp, Artificial sequence
  SiRNA target sequence
aaattgttatctaatattattt

SEQ ID NO: 143420 - DNA, 22 bp, Artificial sequence
  SiRNA target sequence
aattgttatctaatattatttt

SEQ ID NO: 143421 - DNA, 22 bp, Artificial sequence
  SiRNA target sequence
attgttatctaatattatttta

SEQ ID NO: 143422 - DNA, 22 bp, Artificial sequence
  SiRNA target sequence
ttgttatctaatattattttat

SEQ ID NO: 143423 - DNA, 22 bp, Artificial sequence
  SiRNA target sequence
tgttatctaatattattttatt

SEQ ID NO: 143424 - DNA, 22 bp, Artificial sequence
  SiRNA target sequence
gttatctaatattattttatta

SEQ ID NO: 143425 - DNA, 22 bp, Artificial sequence
  SiRNA target sequence
ttatctaatattattttattaa

SEQ ID NO: 143426 - DNA, 22 bp, Artificial sequence
  SiRNA target sequence
tatctaatattattttattaag

SEQ ID NO: 143427 - DNA, 22 bp, Artificial sequence
  SiRNA target sequence
atctaatattattttattaaga

SEQ ID NO: 143428 - DNA, 22 bp, Artificial sequence
  SiRNA target sequence
tctaatattattttattaagag

SEQ ID NO: 143429 - DNA, 22 bp, Artificial sequence
  SiRNA target sequence
ctaatattattttattaagagt

SEQ ID NO: 143430 - DNA, 22 bp, Artificial sequence
  SiRNA target sequence
taatattattttattaagagtg

SEQ ID NO: 143431 - DNA, 22 bp, Artificial sequence
  SiRNA target sequence
aatattattttattaagagtgt

SEQ ID NO: 143432 - DNA, 22 bp, Artificial sequence
  SiRNA target sequence
atattattttattaagagtgtc

SEQ ID NO: 143433 - DNA, 22 bp, Artificial sequence
  SiRNA target sequence
tattattttattaagagtgtct

SEQ ID NO: 143434 - DNA, 22 bp, Artificial sequence
  SiRNA target sequence
attattttattaagagtgtcta

SEQ ID NO: 143435 - DNA, 22 bp, Artificial sequence
  SiRNA target sequence
ttattttattaagagtgtctac

SEQ ID NO: 143436 - DNA, 22 bp, Artificial sequence
  SiRNA target sequence
tattttattaagagtgtctaca

SEQ ID NO: 143437 - DNA, 22 bp, Artificial sequence
  SiRNA target sequence
attttattaagagtgtctacat

SEQ ID NO: 143438 - DNA, 22 bp, Artificial sequence
  SiRNA target sequence
ttttattaagagtgtctacata

SEQ ID NO: 143439 - DNA, 22 bp, Artificial sequence
  SiRNA target sequence
tttattaagagtgtctacatac

SEQ ID NO: 143440 - DNA, 22 bp, Artificial sequence
  SiRNA target sequence
ttattaagagtgtctacatacg

SEQ ID NO: 143441 - DNA, 22 bp, Artificial sequence
  SiRNA target sequence
tattaagagtgtctacatacgc

SEQ ID NO: 143442 - DNA, 22 bp, Artificial sequence
  SiRNA target sequence
attaagagtgtctacatacgct

SEQ ID NO: 143443 - DNA, 22 bp, Artificial sequence
  SiRNA target sequence
ttaagagtgtctacatacgctt

SEQ ID NO: 143444 - DNA, 22 bp, Artificial sequence
  SiRNA target sequence
taagagtgtctacatacgcttg

SEQ ID NO: 143445 - DNA, 22 bp, Artificial sequence
  SiRNA target sequence
aagagtgtctacatacgcttga

SEQ ID NO: 143446 - DNA, 22 bp, Artificial sequence
  SiRNA target sequence
agagtgtctacatacgcttgat

SEQ ID NO: 143447 - DNA, 22 bp, Artificial sequence
  SiRNA target sequence
gagtgtctacatacgcttgatg

SEQ ID NO: 143448 - DNA, 22 bp, Artificial sequence
  SiRNA target sequence
agtgtctacatacgcttgatgg

SEQ ID NO: 143449 - DNA, 22 bp, Artificial sequence
  SiRNA target sequence
gtgtctacatacgcttgatggt

SEQ ID NO: 143450 - DNA, 22 bp, Artificial sequence
  SiRNA target sequence
tgtctacatacgcttgatggtg

SEQ ID NO: 143451 - DNA, 22 bp, Artificial sequence
  SiRNA target sequence
gtctacatacgcttgatggtgc

SEQ ID NO: 143452 - DNA, 22 bp, Artificial sequence
  SiRNA target sequence
tctacatacgcttgatggtgct

SEQ ID NO: 143453 - DNA, 22 bp, Artificial sequence
  SiRNA target sequence
ctacatacgcttgatggtgctt

SEQ ID NO: 143454 - DNA, 22 bp, Artificial sequence
  SiRNA target sequence
tacatacgcttgatggtgctta

SEQ ID NO: 143455 - DNA, 22 bp, Artificial sequence
  SiRNA target sequence
acatacgcttgatggtgcttag

SEQ ID NO: 143456 - DNA, 22 bp, Artificial sequence
  SiRNA target sequence
catacgcttgatggtgcttaga

SEQ ID NO: 143457 - DNA, 22 bp, Artificial sequence
  SiRNA target sequence
atacgcttgatggtgcttagag

SEQ ID NO: 143458 - DNA, 22 bp, Artificial sequence
  SiRNA target sequence
tacgcttgatggtgcttagagt

SEQ ID NO: 143459 - DNA, 22 bp, Artificial sequence
  SiRNA target sequence
acgcttgatggtgcttagagtg

SEQ ID NO: 143460 - DNA, 22 bp, Artificial sequence
  SiRNA target sequence
cgcttgatggtgcttagagtgg

SEQ ID NO: 143461 - DNA, 22 bp, Artificial sequence
  SiRNA target sequence
gcttgatggtgcttagagtggt

SEQ ID NO: 143462 - DNA, 22 bp, Artificial sequence
  SiRNA target sequence
cttgatggtgcttagagtggtg

SEQ ID NO: 143463 - DNA, 22 bp, Artificial sequence
  SiRNA target sequence
ttgatggtgcttagagtggtgg

SEQ ID NO: 143464 - DNA, 22 bp, Artificial sequence
  SiRNA target sequence
tgatggtgcttagagtggtggg

SEQ ID NO: 143465 - DNA, 22 bp, Artificial sequence
  SiRNA target sequence
gatggtgcttagagtggtgggt

SEQ ID NO: 143466 - DNA, 22 bp, Artificial sequence
  SiRNA target sequence
atggtgcttagagtggtgggtc

SEQ ID NO: 143467 - DNA, 22 bp, Artificial sequence
  SiRNA target sequence
tggtgcttagagtggtgggtct

SEQ ID NO: 143468 - DNA, 22 bp, Artificial sequence
  SiRNA target sequence
ggtgcttagagtggtgggtctc

SEQ ID NO: 143469 - DNA, 22 bp, Artificial sequence
  SiRNA target sequence
gtgcttagagtggtgggtctcc

SEQ ID NO: 143470 - DNA, 22 bp, Artificial sequence
  SiRNA target sequence
tgcttagagtggtgggtctcca

SEQ ID NO: 143471 - DNA, 22 bp, Artificial sequence
  SiRNA target sequence
gcttagagtggtgggtctccat

SEQ ID NO: 143472 - DNA, 22 bp, Artificial sequence
  SiRNA target sequence
cttagagtggtgggtctccatt

SEQ ID NO: 143473 - DNA, 22 bp, Artificial sequence
  SiRNA target sequence
ttagagtggtgggtctccatta

SEQ ID NO: 143474 - DNA, 22 bp, Artificial sequence
  SiRNA target sequence
tagagtggtgggtctccattat

SEQ ID NO: 143475 - DNA, 22 bp, Artificial sequence
  SiRNA target sequence
agagtggtgggtctccattata

SEQ ID NO: 143476 - DNA, 22 bp, Artificial sequence
  SiRNA target sequence
gagtggtgggtctccattatat

SEQ ID NO: 143477 - DNA, 22 bp, Artificial sequence
  SiRNA target sequence
agtggtgggtctccattatatc

SEQ ID NO: 143478 - DNA, 22 bp, Artificial sequence
  SiRNA target sequence
gtggtgggtctccattatatct

SEQ ID NO: 143479 - DNA, 22 bp, Artificial sequence
  SiRNA target sequence
tggtgggtctccattatatctt

SEQ ID NO: 143480 - DNA, 22 bp, Artificial sequence
  SiRNA target sequence
ggtgggtctccattatatcttc

SEQ ID NO: 143481 - DNA, 22 bp, Artificial sequence
  SiRNA target sequence
gtgggtctccattatatcttca

SEQ ID NO: 143482 - DNA, 22 bp, Artificial sequence
  SiRNA target sequence
tgggtctccattatatcttcac

SEQ ID NO: 143483 - DNA, 22 bp, Artificial sequence
  SiRNA target sequence
gggtctccattatatcttcact

SEQ ID NO: 143484 - DNA, 22 bp, Artificial sequence
  SiRNA target sequence
ggtctccattatatcttcactt

SEQ ID NO: 143485 - DNA, 22 bp, Artificial sequence
  SiRNA target sequence
gtctccattatatcttcactta

SEQ ID NO: 143486 - DNA, 22 bp, Artificial sequence
  SiRNA target sequence
tctccattatatcttcacttat

SEQ ID NO: 143487 - DNA, 22 bp, Artificial sequence
  SiRNA target sequence
ctccattatatcttcacttata

SEQ ID NO: 143488 - DNA, 22 bp, Artificial sequence
  SiRNA target sequence
tccattatatcttcacttatat

SEQ ID NO: 143489 - DNA, 22 bp, Artificial sequence
  SiRNA target sequence
ccattatatcttcacttatata

SEQ ID NO: 143490 - DNA, 22 bp, Artificial sequence
  SiRNA target sequence
cattatatcttcacttatataa

SEQ ID NO: 143491 - DNA, 22 bp, Artificial sequence
  SiRNA target sequence
attatatcttcacttatataag

SEQ ID NO: 143492 - DNA, 22 bp, Artificial sequence
  SiRNA target sequence
ttatatcttcacttatataagg

SEQ ID NO: 143493 - DNA, 22 bp, Artificial sequence
  SiRNA target sequence
tatatcttcacttatataaggc

SEQ ID NO: 143494 - DNA, 22 bp, Artificial sequence
  SiRNA target sequence
atatcttcacttatataaggct

SEQ ID NO: 143495 - DNA, 22 bp, Artificial sequence
  SiRNA target sequence
tatcttcacttatataaggctc

SEQ ID NO: 143496 - DNA, 22 bp, Artificial sequence
  SiRNA target sequence
atcttcacttatataaggctct

SEQ ID NO: 143497 - DNA, 22 bp, Artificial sequence
  SiRNA target sequence
tcttcacttatataaggctcta

SEQ ID NO: 143498 - DNA, 22 bp, Artificial sequence
  SiRNA target sequence
cttcacttatataaggctctag

SEQ ID NO: 143499 - DNA, 22 bp, Artificial sequence
  SiRNA target sequence
ttcacttatataaggctctaga

SEQ ID NO: 143500 - DNA, 22 bp, Artificial sequence
  SiRNA target sequence
tcacttatataaggctctagag

SEQ ID NO: 143501 - DNA, 22 bp, Artificial sequence
  SiRNA target sequence
cacttatataaggctctagaga

SEQ ID NO: 143502 - DNA, 22 bp, Artificial sequence
  SiRNA target sequence
acttatataaggctctagagat

SEQ ID NO: 143503 - DNA, 22 bp, Artificial sequence
  SiRNA target sequence
cttatataaggctctagagatt

SEQ ID NO: 143504 - DNA, 22 bp, Artificial sequence
  SiRNA target sequence
ttatataaggctctagagattt

SEQ ID NO: 143505 - DNA, 22 bp, Artificial sequence
  SiRNA target sequence
tatataaggctctagagattta

SEQ ID NO: 143506 - DNA, 22 bp, Artificial sequence
  SiRNA target sequence
atataaggctctagagatttat

SEQ ID NO: 143507 - DNA, 22 bp, Artificial sequence
  SiRNA target sequence
tataaggctctagagatttata

SEQ ID NO: 143508 - DNA, 22 bp, Artificial sequence
  SiRNA target sequence
ataaggctctagagatttataa

SEQ ID NO: 143509 - DNA, 22 bp, Artificial sequence
  SiRNA target sequence
taaggctctagagatttataac

SEQ ID NO: 143510 - DNA, 22 bp, Artificial sequence
  SiRNA target sequence
aaggctctagagatttataact

SEQ ID NO: 143511 - DNA, 22 bp, Artificial sequence
  SiRNA target sequence
aggctctagagatttataacta

SEQ ID NO: 143512 - DNA, 22 bp, Artificial sequence
  SiRNA target sequence
ggctctagagatttataactat

SEQ ID NO: 143513 - DNA, 22 bp, Artificial sequence
  SiRNA target sequence
gctctagagatttataactata

SEQ ID NO: 143514 - DNA, 22 bp, Artificial sequence
  SiRNA target sequence
ctctagagatttataactatat

SEQ ID NO: 143515 - DNA, 22 bp, Artificial sequence
  SiRNA target sequence
tctagagatttataactatatt

SEQ ID NO: 143516 - DNA, 22 bp, Artificial sequence
  SiRNA target sequence
ctagagatttataactatattt

SEQ ID NO: 143517 - DNA, 22 bp, Artificial sequence
  SiRNA target sequence
tagagatttataactatatttc

SEQ ID NO: 143518 - DNA, 22 bp, Artificial sequence
  SiRNA target sequence
agagatttataactatatttca

SEQ ID NO: 143519 - DNA, 22 bp, Artificial sequence
  SiRNA target sequence
gagatttataactatatttcag

SEQ ID NO: 143520 - DNA, 22 bp, Artificial sequence
  SiRNA target sequence
agatttataactatatttcaga

SEQ ID NO: 143521 - DNA, 22 bp, Artificial sequence
  SiRNA target sequence
gatttataactatatttcagat

SEQ ID NO: 143522 - DNA, 22 bp, Artificial sequence
  SiRNA target sequence
atttataactatatttcagatt

SEQ ID NO: 143523 - DNA, 22 bp, Artificial sequence
  SiRNA target sequence
tttataactatatttcagattt

SEQ ID NO: 143524 - DNA, 22 bp, Artificial sequence
  SiRNA target sequence
ttataactatatttcagatttg

SEQ ID NO: 143525 - DNA, 22 bp, Artificial sequence
  SiRNA target sequence
tataactatatttcagatttgg

SEQ ID NO: 143526 - DNA, 22 bp, Artificial sequence
  SiRNA target sequence
ataactatatttcagatttgga

SEQ ID NO: 143527 - DNA, 22 bp, Artificial sequence
  SiRNA target sequence
taactatatttcagatttggaa

SEQ ID NO: 143528 - DNA, 22 bp, Artificial sequence
  SiRNA target sequence
aactatatttcagatttggaag

SEQ ID NO: 143529 - DNA, 22 bp, Artificial sequence
  SiRNA target sequence
actatatttcagatttggaaga

SEQ ID NO: 143530 - DNA, 22 bp, Artificial sequence
  SiRNA target sequence
ctatatttcagatttggaagag

SEQ ID NO: 143531 - DNA, 22 bp, Artificial sequence
  SiRNA target sequence
tatatttcagatttggaagagt

SEQ ID NO: 143532 - DNA, 22 bp, Artificial sequence
  SiRNA target sequence
atatttcagatttggaagagtg

SEQ ID NO: 143533 - DNA, 22 bp, Artificial sequence
  SiRNA target sequence
tatttcagatttggaagagtga

SEQ ID NO: 143534 - DNA, 22 bp, Artificial sequence
  SiRNA target sequence
atttcagatttggaagagtgaa

SEQ ID NO: 143535 - DNA, 22 bp, Artificial sequence
  SiRNA target sequence
tttcagatttggaagagtgaac

SEQ ID NO: 143536 - DNA, 22 bp, Artificial sequence
  SiRNA target sequence
ttcagatttggaagagtgaaca

SEQ ID NO: 143537 - DNA, 22 bp, Artificial sequence
  SiRNA target sequence
tcagatttggaagagtgaacat

SEQ ID NO: 143538 - DNA, 23 bp, Artificial sequence
  SiRNA target sequence
ttaatttatgcataattgaccat

SEQ ID NO: 143539 - DNA, 23 bp, Artificial sequence
  SiRNA target sequence
taatttatgcataattgaccatc

SEQ ID NO: 143540 - DNA, 23 bp, Artificial sequence
  SiRNA target sequence
aatttatgcataattgaccatca

SEQ ID NO: 143541 - DNA, 23 bp, Artificial sequence
  SiRNA target sequence
atttatgcataattgaccatcat

SEQ ID NO: 143542 - DNA, 23 bp, Artificial sequence
  SiRNA target sequence
tttatgcataattgaccatcatc

SEQ ID NO: 143543 - DNA, 23 bp, Artificial sequence
  SiRNA target sequence
ttatgcataattgaccatcatca

SEQ ID NO: 143544 - DNA, 23 bp, Artificial sequence
  SiRNA target sequence
tatgcataattgaccatcatcag

SEQ ID NO: 143545 - DNA, 23 bp, Artificial sequence
  SiRNA target sequence
atgcataattgaccatcatcagt

SEQ ID NO: 143546 - DNA, 23 bp, Artificial sequence
  SiRNA target sequence
tgcataattgaccatcatcagta

SEQ ID NO: 143547 - DNA, 23 bp, Artificial sequence
  SiRNA target sequence
gcataattgaccatcatcagtaa

SEQ ID NO: 143548 - DNA, 23 bp, Artificial sequence
  SiRNA target sequence
cataattgaccatcatcagtaat

SEQ ID NO: 143549 - DNA, 23 bp, Artificial sequence
  SiRNA target sequence
ataattgaccatcatcagtaata

SEQ ID NO: 143550 - DNA, 23 bp, Artificial sequence
  SiRNA target sequence
taattgaccatcatcagtaataa

SEQ ID NO: 143551 - DNA, 23 bp, Artificial sequence
  SiRNA target sequence
aattgaccatcatcagtaataaa

SEQ ID NO: 143552 - DNA, 23 bp, Artificial sequence
  SiRNA target sequence
attgaccatcatcagtaataaac

SEQ ID NO: 143553 - DNA, 23 bp, Artificial sequence
  SiRNA target sequence
ttgaccatcatcagtaataaaca

SEQ ID NO: 143554 - DNA, 23 bp, Artificial sequence
  SiRNA target sequence
tgaccatcatcagtaataaacac

SEQ ID NO: 143555 - DNA, 23 bp, Artificial sequence
  SiRNA target sequence
gaccatcatcagtaataaacaca

SEQ ID NO: 143556 - DNA, 23 bp, Artificial sequence
  SiRNA target sequence
accatcatcagtaataaacacat

SEQ ID NO: 143557 - DNA, 23 bp, Artificial sequence
  SiRNA target sequence
ccatcatcagtaataaacacatt

SEQ ID NO: 143558 - DNA, 23 bp, Artificial sequence
  SiRNA target sequence
catcatcagtaataaacacatta

SEQ ID NO: 143559 - DNA, 23 bp, Artificial sequence
  SiRNA target sequence
atcatcagtaataaacacattac

SEQ ID NO: 143560 - DNA, 23 bp, Artificial sequence
  SiRNA target sequence
tcatcagtaataaacacattacc

SEQ ID NO: 143561 - DNA, 23 bp, Artificial sequence
  SiRNA target sequence
catcagtaataaacacattacct

SEQ ID NO: 143562 - DNA, 23 bp, Artificial sequence
  SiRNA target sequence
atcagtaataaacacattacctt

SEQ ID NO: 143563 - DNA, 23 bp, Artificial sequence
  SiRNA target sequence
tcagtaataaacacattaccttt

SEQ ID NO: 143564 - DNA, 23 bp, Artificial sequence
  SiRNA target sequence
cagtaataaacacattacctttc

SEQ ID NO: 143565 - DNA, 23 bp, Artificial sequence
  SiRNA target sequence
agtaataaacacattacctttct

SEQ ID NO: 143566 - DNA, 23 bp, Artificial sequence
  SiRNA target sequence
gtaataaacacattacctttctt

SEQ ID NO: 143567 - DNA, 23 bp, Artificial sequence
  SiRNA target sequence
taataaacacattacctttcttt

SEQ ID NO: 143568 - DNA, 23 bp, Artificial sequence
  SiRNA target sequence
aataaacacattacctttctttt

SEQ ID NO: 143569 - DNA, 23 bp, Artificial sequence
  SiRNA target sequence
ataaacacattacctttcttttc

SEQ ID NO: 143570 - DNA, 23 bp, Artificial sequence
  SiRNA target sequence
taaacacattacctttcttttct

SEQ ID NO: 143571 - DNA, 23 bp, Artificial sequence
  SiRNA target sequence
aaacacattacctttcttttcta

SEQ ID NO: 143572 - DNA, 23 bp, Artificial sequence
  SiRNA target sequence
aacacattacctttcttttctac

SEQ ID NO: 143573 - DNA, 23 bp, Artificial sequence
  SiRNA target sequence
acacattacctttcttttctacc

SEQ ID NO: 143574 - DNA, 23 bp, Artificial sequence
  SiRNA target sequence
cacattacctttcttttctacca

SEQ ID NO: 143575 - DNA, 23 bp, Artificial sequence
  SiRNA target sequence
acattacctttcttttctaccac

SEQ ID NO: 143576 - DNA, 23 bp, Artificial sequence
  SiRNA target sequence
cattacctttcttttctaccaca

SEQ ID NO: 143577 - DNA, 23 bp, Artificial sequence
  SiRNA target sequence
attacctttcttttctaccacac

SEQ ID NO: 143578 - DNA, 23 bp, Artificial sequence
  SiRNA target sequence
ttacctttcttttctaccacaca

SEQ ID NO: 143579 - DNA, 23 bp, Artificial sequence
  SiRNA target sequence
tacctttcttttctaccacacat

SEQ ID NO: 143580 - DNA, 23 bp, Artificial sequence
  SiRNA target sequence
acctttcttttctaccacacatt

SEQ ID NO: 143581 - DNA, 23 bp, Artificial sequence
  SiRNA target sequence
cctttcttttctaccacacattt

SEQ ID NO: 143582 - DNA, 23 bp, Artificial sequence
  SiRNA target sequence
ctttcttttctaccacacatttt

SEQ ID NO: 143583 - DNA, 23 bp, Artificial sequence
  SiRNA target sequence
tttcttttctaccacacattttt

SEQ ID NO: 143584 - DNA, 23 bp, Artificial sequence
  SiRNA target sequence
ttcttttctaccacacatttttg

SEQ ID NO: 143585 - DNA, 23 bp, Artificial sequence
  SiRNA target sequence
tcttttctaccacacatttttga

SEQ ID NO: 143586 - DNA, 23 bp, Artificial sequence
  SiRNA target sequence
cttttctaccacacatttttgat

SEQ ID NO: 143587 - DNA, 23 bp, Artificial sequence
  SiRNA target sequence
ttttctaccacacatttttgata

SEQ ID NO: 143588 - DNA, 23 bp, Artificial sequence
  SiRNA target sequence
tttctaccacacatttttgatat

SEQ ID NO: 143589 - DNA, 23 bp, Artificial sequence
  SiRNA target sequence
ttctaccacacatttttgatata

SEQ ID NO: 143590 - DNA, 23 bp, Artificial sequence
  SiRNA target sequence
tctaccacacatttttgatatat

SEQ ID NO: 143591 - DNA, 23 bp, Artificial sequence
  SiRNA target sequence
ctaccacacatttttgatatatt

SEQ ID NO: 143592 - DNA, 23 bp, Artificial sequence
  SiRNA target sequence
taccacacatttttgatatattt

SEQ ID NO: 143593 - DNA, 23 bp, Artificial sequence
  SiRNA target sequence
accacacatttttgatatatttc

SEQ ID NO: 143594 - DNA, 23 bp, Artificial sequence
  SiRNA target sequence
ccacacatttttgatatatttca

SEQ ID NO: 143595 - DNA, 23 bp, Artificial sequence
  SiRNA target sequence
cacacatttttgatatatttcat

SEQ ID NO: 143596 - DNA, 23 bp, Artificial sequence
  SiRNA target sequence
acacatttttgatatatttcatt

SEQ ID NO: 143597 - DNA, 23 bp, Artificial sequence
  SiRNA target sequence
cacatttttgatatatttcatta

SEQ ID NO: 143598 - DNA, 23 bp, Artificial sequence
  SiRNA target sequence
acatttttgatatatttcattaa

SEQ ID NO: 143599 - DNA, 23 bp, Artificial sequence
  SiRNA target sequence
catttttgatatatttcattaac

SEQ ID NO: 143600 - DNA, 23 bp, Artificial sequence
  SiRNA target sequence
atttttgatatatttcattaact

SEQ ID NO: 143601 - DNA, 23 bp, Artificial sequence
  SiRNA target sequence
tttttgatatatttcattaacta

SEQ ID NO: 143602 - DNA, 23 bp, Artificial sequence
  SiRNA target sequence
ttttgatatatttcattaactac

SEQ ID NO: 143603 - DNA, 23 bp, Artificial sequence
  SiRNA target sequence
tttgatatatttcattaactaca

SEQ ID NO: 143604 - DNA, 23 bp, Artificial sequence
  SiRNA target sequence
ttgatatatttcattaactacat

SEQ ID NO: 143605 - DNA, 23 bp, Artificial sequence
  SiRNA target sequence
tgatatatttcattaactacatc

SEQ ID NO: 143606 - DNA, 23 bp, Artificial sequence
  SiRNA target sequence
gatatatttcattaactacatcc

SEQ ID NO: 143607 - DNA, 23 bp, Artificial sequence
  SiRNA target sequence
atatatttcattaactacatccc

SEQ ID NO: 143608 - DNA, 23 bp, Artificial sequence
  SiRNA target sequence
tatatttcattaactacatccca

SEQ ID NO: 143609 - DNA, 23 bp, Artificial sequence
  SiRNA target sequence
atatttcattaactacatcccaa

SEQ ID NO: 143610 - DNA, 23 bp, Artificial sequence
  SiRNA target sequence
tatttcattaactacatcccaat

SEQ ID NO: 143611 - DNA, 23 bp, Artificial sequence
  SiRNA target sequence
atttcattaactacatcccaatc

SEQ ID NO: 143612 - DNA, 23 bp, Artificial sequence
  SiRNA target sequence
tttcattaactacatcccaatca

SEQ ID NO: 143613 - DNA, 23 bp, Artificial sequence
  SiRNA target sequence
ttcattaactacatcccaatcaa

SEQ ID NO: 143614 - DNA, 23 bp, Artificial sequence
  SiRNA target sequence
tcattaactacatcccaatcaat

SEQ ID NO: 143615 - DNA, 23 bp, Artificial sequence
  SiRNA target sequence
cattaactacatcccaatcaatt

SEQ ID NO: 143616 - DNA, 23 bp, Artificial sequence
  SiRNA target sequence
attaactacatcccaatcaatta

SEQ ID NO: 143617 - DNA, 23 bp, Artificial sequence
  SiRNA target sequence
ttaactacatcccaatcaattac

SEQ ID NO: 143618 - DNA, 23 bp, Artificial sequence
  SiRNA target sequence
taactacatcccaatcaattaca

SEQ ID NO: 143619 - DNA, 23 bp, Artificial sequence
  SiRNA target sequence
aactacatcccaatcaattacat

SEQ ID NO: 143620 - DNA, 23 bp, Artificial sequence
  SiRNA target sequence
actacatcccaatcaattacatt

SEQ ID NO: 143621 - DNA, 23 bp, Artificial sequence
  SiRNA target sequence
ctacatcccaatcaattacattc

SEQ ID NO: 143622 - DNA, 23 bp, Artificial sequence
  SiRNA target sequence
tacatcccaatcaattacattcc

SEQ ID NO: 143623 - DNA, 23 bp, Artificial sequence
  SiRNA target sequence
acatcccaatcaattacattcca

SEQ ID NO: 143624 - DNA, 23 bp, Artificial sequence
  SiRNA target sequence
catcccaatcaattacattccac

SEQ ID NO: 143625 - DNA, 23 bp, Artificial sequence
  SiRNA target sequence
atcccaatcaattacattccacc

SEQ ID NO: 143626 - DNA, 23 bp, Artificial sequence
  SiRNA target sequence
tcccaatcaattacattccacca

SEQ ID NO: 143627 - DNA, 23 bp, Artificial sequence
  SiRNA target sequence
cccaatcaattacattccaccat

SEQ ID NO: 143628 - DNA, 23 bp, Artificial sequence
  SiRNA target sequence
ccaatcaattacattccaccatt

SEQ ID NO: 143629 - DNA, 23 bp, Artificial sequence
  SiRNA target sequence
caatcaattacattccaccattc

SEQ ID NO: 143630 - DNA, 23 bp, Artificial sequence
  SiRNA target sequence
aatcaattacattccaccattca

SEQ ID NO: 143631 - DNA, 23 bp, Artificial sequence
  SiRNA target sequence
atcaattacattccaccattcat

SEQ ID NO: 143632 - DNA, 23 bp, Artificial sequence
  SiRNA target sequence
tcaattacattccaccattcatt

SEQ ID NO: 143633 - DNA, 23 bp, Artificial sequence
  SiRNA target sequence
caattacattccaccattcatta

SEQ ID NO: 143634 - DNA, 23 bp, Artificial sequence
  SiRNA target sequence
aattacattccaccattcattaa

SEQ ID NO: 143635 - DNA, 23 bp, Artificial sequence
  SiRNA target sequence
attacattccaccattcattaat

SEQ ID NO: 143636 - DNA, 23 bp, Artificial sequence
  SiRNA target sequence
ttacattccaccattcattaatg

SEQ ID NO: 143637 - DNA, 23 bp, Artificial sequence
  SiRNA target sequence
tacattccaccattcattaatgt

SEQ ID NO: 143638 - DNA, 23 bp, Artificial sequence
  SiRNA target sequence
acattccaccattcattaatgta

SEQ ID NO: 143639 - DNA, 23 bp, Artificial sequence
  SiRNA target sequence
cattccaccattcattaatgtat

SEQ ID NO: 143640 - DNA, 23 bp, Artificial sequence
  SiRNA target sequence
attccaccattcattaatgtatt

SEQ ID NO: 143641 - DNA, 23 bp, Artificial sequence
  SiRNA target sequence
ttccaccattcattaatgtattc

SEQ ID NO: 143642 - DNA, 23 bp, Artificial sequence
  SiRNA target sequence
tccaccattcattaatgtattct

SEQ ID NO: 143643 - DNA, 23 bp, Artificial sequence
  SiRNA target sequence
ccaccattcattaatgtattctt

SEQ ID NO: 143644 - DNA, 23 bp, Artificial sequence
  SiRNA target sequence
caccattcattaatgtattcttt

SEQ ID NO: 143645 - DNA, 23 bp, Artificial sequence
  SiRNA target sequence
accattcattaatgtattctttt

SEQ ID NO: 143646 - DNA, 23 bp, Artificial sequence
  SiRNA target sequence
ccattcattaatgtattcttttc

SEQ ID NO: 143647 - DNA, 23 bp, Artificial sequence
  SiRNA target sequence
cattcattaatgtattcttttct

SEQ ID NO: 143648 - DNA, 23 bp, Artificial sequence
  SiRNA target sequence
attcattaatgtattcttttctc

SEQ ID NO: 143649 - DNA, 23 bp, Artificial sequence
  SiRNA target sequence
ttcattaatgtattcttttctcc

SEQ ID NO: 143650 - DNA, 23 bp, Artificial sequence
  SiRNA target sequence
tcattaatgtattcttttctcct

SEQ ID NO: 143651 - DNA, 23 bp, Artificial sequence
  SiRNA target sequence
cattaatgtattcttttctccta

SEQ ID NO: 143652 - DNA, 23 bp, Artificial sequence
  SiRNA target sequence
attaatgtattcttttctcctat

SEQ ID NO: 143653 - DNA, 23 bp, Artificial sequence
  SiRNA target sequence
ttaatgtattcttttctcctatt

SEQ ID NO: 143654 - DNA, 23 bp, Artificial sequence
  SiRNA target sequence
taatgtattcttttctcctattt

SEQ ID NO: 143655 - DNA, 23 bp, Artificial sequence
  SiRNA target sequence
aatgtattcttttctcctatttt

SEQ ID NO: 143656 - DNA, 23 bp, Artificial sequence
  SiRNA target sequence
atgtattcttttctcctattttt

SEQ ID NO: 143657 - DNA, 23 bp, Artificial sequence
  SiRNA target sequence
tgtattcttttctcctattttta

SEQ ID NO: 143658 - DNA, 23 bp, Artificial sequence
  SiRNA target sequence
gtattcttttctcctatttttat

SEQ ID NO: 143659 - DNA, 23 bp, Artificial sequence
  SiRNA target sequence
tattcttttctcctatttttata

SEQ ID NO: 143660 - DNA, 23 bp, Artificial sequence
  SiRNA target sequence
attcttttctcctatttttatac

SEQ ID NO: 143661 - DNA, 23 bp, Artificial sequence
  SiRNA target sequence
ttcttttctcctatttttatact

SEQ ID NO: 143662 - DNA, 23 bp, Artificial sequence
  SiRNA target sequence
tcttttctcctatttttatactg

SEQ ID NO: 143663 - DNA, 23 bp, Artificial sequence
  SiRNA target sequence
cttttctcctatttttatactgt

SEQ ID NO: 143664 - DNA, 23 bp, Artificial sequence
  SiRNA target sequence
ttttctcctatttttatactgta

SEQ ID NO: 143665 - DNA, 23 bp, Artificial sequence
  SiRNA target sequence
tttctcctatttttatactgtaa

SEQ ID NO: 143666 - DNA, 23 bp, Artificial sequence
  SiRNA target sequence
ttctcctatttttatactgtaaa

SEQ ID NO: 143667 - DNA, 23 bp, Artificial sequence
  SiRNA target sequence
tctcctatttttatactgtaaat

SEQ ID NO: 143668 - DNA, 23 bp, Artificial sequence
  SiRNA target sequence
ctcctatttttatactgtaaata

SEQ ID NO: 143669 - DNA, 23 bp, Artificial sequence
  SiRNA target sequence
tcctatttttatactgtaaataa

SEQ ID NO: 143670 - DNA, 23 bp, Artificial sequence
  SiRNA target sequence
cctatttttatactgtaaataat

SEQ ID NO: 143671 - DNA, 23 bp, Artificial sequence
  SiRNA target sequence
ctatttttatactgtaaataata

SEQ ID NO: 143672 - DNA, 23 bp, Artificial sequence
  SiRNA target sequence
tatttttatactgtaaataatac

SEQ ID NO: 143673 - DNA, 23 bp, Artificial sequence
  SiRNA target sequence
atttttatactgtaaataatacg

SEQ ID NO: 143674 - DNA, 23 bp, Artificial sequence
  SiRNA target sequence
tttttatactgtaaataatacgc

SEQ ID NO: 143675 - DNA, 23 bp, Artificial sequence
  SiRNA target sequence
ttttatactgtaaataatacgca

SEQ ID NO: 143676 - DNA, 23 bp, Artificial sequence
  SiRNA target sequence
tttatactgtaaataatacgcat

SEQ ID NO: 143677 - DNA, 23 bp, Artificial sequence
  SiRNA target sequence
ttatactgtaaataatacgcatg

SEQ ID NO: 143678 - DNA, 23 bp, Artificial sequence
  SiRNA target sequence
tatactgtaaataatacgcatgt

SEQ ID NO: 143679 - DNA, 23 bp, Artificial sequence
  SiRNA target sequence
atactgtaaataatacgcatgtt

SEQ ID NO: 143680 - DNA, 23 bp, Artificial sequence
  SiRNA target sequence
tactgtaaataatacgcatgttc

SEQ ID NO: 143681 - DNA, 23 bp, Artificial sequence
  SiRNA target sequence
actgtaaataatacgcatgttcc

SEQ ID NO: 143682 - DNA, 23 bp, Artificial sequence
  SiRNA target sequence
ctgtaaataatacgcatgttccc

SEQ ID NO: 143683 - DNA, 23 bp, Artificial sequence
  SiRNA target sequence
tgtaaataatacgcatgttccca

SEQ ID NO: 143684 - DNA, 23 bp, Artificial sequence
  SiRNA target sequence
gtaaataatacgcatgttcccat

SEQ ID NO: 143685 - DNA, 23 bp, Artificial sequence
  SiRNA target sequence
taaataatacgcatgttcccata

SEQ ID NO: 143686 - DNA, 23 bp, Artificial sequence
  SiRNA target sequence
aaataatacgcatgttcccatac

SEQ ID NO: 143687 - DNA, 23 bp, Artificial sequence
  SiRNA target sequence
aataatacgcatgttcccataca

SEQ ID NO: 143688 - DNA, 23 bp, Artificial sequence
  SiRNA target sequence
ataatacgcatgttcccatacat

SEQ ID NO: 143689 - DNA, 23 bp, Artificial sequence
  SiRNA target sequence
taatacgcatgttcccatacatc

SEQ ID NO: 143690 - DNA, 23 bp, Artificial sequence
  SiRNA target sequence
aatacgcatgttcccatacatca

SEQ ID NO: 143691 - DNA, 23 bp, Artificial sequence
  SiRNA target sequence
atacgcatgttcccatacatcaa

SEQ ID NO: 143692 - DNA, 23 bp, Artificial sequence
  SiRNA target sequence
tacgcatgttcccatacatcaag

SEQ ID NO: 143693 - DNA, 23 bp, Artificial sequence
  SiRNA target sequence
acgcatgttcccatacatcaaga

SEQ ID NO: 143694 - DNA, 23 bp, Artificial sequence
  SiRNA target sequence
cgcatgttcccatacatcaagac

SEQ ID NO: 143695 - DNA, 23 bp, Artificial sequence
  SiRNA target sequence
gcatgttcccatacatcaagaca

SEQ ID NO: 143696 - DNA, 23 bp, Artificial sequence
  SiRNA target sequence
catgttcccatacatcaagacat

SEQ ID NO: 143697 - DNA, 23 bp, Artificial sequence
  SiRNA target sequence
atgttcccatacatcaagacata

SEQ ID NO: 143698 - DNA, 23 bp, Artificial sequence
  SiRNA target sequence
tgttcccatacatcaagacatag

SEQ ID NO: 143699 - DNA, 23 bp, Artificial sequence
  SiRNA target sequence
gttcccatacatcaagacatagt

SEQ ID NO: 143700 - DNA, 23 bp, Artificial sequence
  SiRNA target sequence
ttcccatacatcaagacatagta

SEQ ID NO: 143701 - DNA, 23 bp, Artificial sequence
  SiRNA target sequence
tcccatacatcaagacatagtaa

SEQ ID NO: 143702 - DNA, 23 bp, Artificial sequence
  SiRNA target sequence
cccatacatcaagacatagtaaa

SEQ ID NO: 143703 - DNA, 23 bp, Artificial sequence
  SiRNA target sequence
ccatacatcaagacatagtaaag

SEQ ID NO: 143704 - DNA, 23 bp, Artificial sequence
  SiRNA target sequence
catacatcaagacatagtaaagg

SEQ ID NO: 143705 - DNA, 23 bp, Artificial sequence
  SiRNA target sequence
atacatcaagacatagtaaagga

SEQ ID NO: 143706 - DNA, 23 bp, Artificial sequence
  SiRNA target sequence
tacatcaagacatagtaaaggaa

SEQ ID NO: 143707 - DNA, 23 bp, Artificial sequence
  SiRNA target sequence
acatcaagacatagtaaaggaat

SEQ ID NO: 143708 - DNA, 23 bp, Artificial sequence
  SiRNA target sequence
catcaagacatagtaaaggaata

SEQ ID NO: 143709 - DNA, 23 bp, Artificial sequence
  SiRNA target sequence
atcaagacatagtaaaggaatac

SEQ ID NO: 143710 - DNA, 23 bp, Artificial sequence
  SiRNA target sequence
tcaagacatagtaaaggaataca

SEQ ID NO: 143711 - DNA, 23 bp, Artificial sequence
  SiRNA target sequence
caagacatagtaaaggaatacat

SEQ ID NO: 143712 - DNA, 23 bp, Artificial sequence
  SiRNA target sequence
aagacatagtaaaggaatacatt

SEQ ID NO: 143713 - DNA, 23 bp, Artificial sequence
  SiRNA target sequence
agacatagtaaaggaatacattc

SEQ ID NO: 143714 - DNA, 23 bp, Artificial sequence
  SiRNA target sequence
gacatagtaaaggaatacattca

SEQ ID NO: 143715 - DNA, 23 bp, Artificial sequence
  SiRNA target sequence
acatagtaaaggaatacattcac

SEQ ID NO: 143716 - DNA, 23 bp, Artificial sequence
  SiRNA target sequence
catagtaaaggaatacattcacc

SEQ ID NO: 143717 - DNA, 23 bp, Artificial sequence
  SiRNA target sequence
atagtaaaggaatacattcacca

SEQ ID NO: 143718 - DNA, 23 bp, Artificial sequence
  SiRNA target sequence
tagtaaaggaatacattcaccat

SEQ ID NO: 143719 - DNA, 23 bp, Artificial sequence
  SiRNA target sequence
agtaaaggaatacattcaccatc

SEQ ID NO: 143720 - DNA, 23 bp, Artificial sequence
  SiRNA target sequence
gtaaaggaatacattcaccatcc

SEQ ID NO: 143721 - DNA, 23 bp, Artificial sequence
  SiRNA target sequence
taaaggaatacattcaccatcct

SEQ ID NO: 143722 - DNA, 23 bp, Artificial sequence
  SiRNA target sequence
aaaggaatacattcaccatcctc

SEQ ID NO: 143723 - DNA, 23 bp, Artificial sequence
  SiRNA target sequence
aaggaatacattcaccatcctcc

SEQ ID NO: 143724 - DNA, 23 bp, Artificial sequence
  SiRNA target sequence
aggaatacattcaccatcctcca

SEQ ID NO: 143725 - DNA, 23 bp, Artificial sequence
  SiRNA target sequence
ggaatacattcaccatcctccat

SEQ ID NO: 143726 - DNA, 23 bp, Artificial sequence
  SiRNA target sequence
gaatacattcaccatcctccatc

SEQ ID NO: 143727 - DNA, 23 bp, Artificial sequence
  SiRNA target sequence
aatacattcaccatcctccatca

SEQ ID NO: 143728 - DNA, 23 bp, Artificial sequence
  SiRNA target sequence
atacattcaccatcctccatcat

SEQ ID NO: 143729 - DNA, 23 bp, Artificial sequence
  SiRNA target sequence
tacattcaccatcctccatcata

SEQ ID NO: 143730 - DNA, 23 bp, Artificial sequence
  SiRNA target sequence
acattcaccatcctccatcatag

SEQ ID NO: 143731 - DNA, 23 bp, Artificial sequence
  SiRNA target sequence
cattcaccatcctccatcatagg

SEQ ID NO: 143732 - DNA, 23 bp, Artificial sequence
  SiRNA target sequence
attcaccatcctccatcatagga

SEQ ID NO: 143733 - DNA, 23 bp, Artificial sequence
  SiRNA target sequence
ttcaccatcctccatcataggat

SEQ ID NO: 143734 - DNA, 23 bp, Artificial sequence
  SiRNA target sequence
tcaccatcctccatcataggatt

SEQ ID NO: 143735 - DNA, 23 bp, Artificial sequence
  SiRNA target sequence
caccatcctccatcataggattg

SEQ ID NO: 143736 - DNA, 23 bp, Artificial sequence
  SiRNA target sequence
accatcctccatcataggattgt

SEQ ID NO: 143737 - DNA, 23 bp, Artificial sequence
  SiRNA target sequence
ccatcctccatcataggattgtc

SEQ ID NO: 143738 - DNA, 23 bp, Artificial sequence
  SiRNA target sequence
catcctccatcataggattgtct

SEQ ID NO: 143739 - DNA, 23 bp, Artificial sequence
  SiRNA target sequence
atcctccatcataggattgtctt

SEQ ID NO: 143740 - DNA, 23 bp, Artificial sequence
  SiRNA target sequence
tcctccatcataggattgtcttg

SEQ ID NO: 143741 - DNA, 23 bp, Artificial sequence
  SiRNA target sequence
cctccatcataggattgtcttga

SEQ ID NO: 143742 - DNA, 23 bp, Artificial sequence
  SiRNA target sequence
ctccatcataggattgtcttgat

SEQ ID NO: 143743 - DNA, 23 bp, Artificial sequence
  SiRNA target sequence
tccatcataggattgtcttgatt

SEQ ID NO: 143744 - DNA, 23 bp, Artificial sequence
  SiRNA target sequence
ccatcataggattgtcttgatta

SEQ ID NO: 143745 - DNA, 23 bp, Artificial sequence
  SiRNA target sequence
catcataggattgtcttgattaa

SEQ ID NO: 143746 - DNA, 23 bp, Artificial sequence
  SiRNA target sequence
atcataggattgtcttgattaac

SEQ ID NO: 143747 - DNA, 23 bp, Artificial sequence
  SiRNA target sequence
tcataggattgtcttgattaaca

SEQ ID NO: 143748 - DNA, 23 bp, Artificial sequence
  SiRNA target sequence
cataggattgtcttgattaacac

SEQ ID NO: 143749 - DNA, 23 bp, Artificial sequence
  SiRNA target sequence
ataggattgtcttgattaacact

SEQ ID NO: 143750 - DNA, 23 bp, Artificial sequence
  SiRNA target sequence
taggattgtcttgattaacactg

SEQ ID NO: 143751 - DNA, 23 bp, Artificial sequence
  SiRNA target sequence
aggattgtcttgattaacactgg

SEQ ID NO: 143752 - DNA, 23 bp, Artificial sequence
  SiRNA target sequence
ggattgtcttgattaacactggt

SEQ ID NO: 143753 - DNA, 23 bp, Artificial sequence
  SiRNA target sequence
gattgtcttgattaacactggtc

SEQ ID NO: 143754 - DNA, 23 bp, Artificial sequence
  SiRNA target sequence
attgtcttgattaacactggtct

SEQ ID NO: 143755 - DNA, 23 bp, Artificial sequence
  SiRNA target sequence
ttgtcttgattaacactggtctt

SEQ ID NO: 143756 - DNA, 23 bp, Artificial sequence
  SiRNA target sequence
tgtcttgattaacactggtctta

SEQ ID NO: 143757 - DNA, 23 bp, Artificial sequence
  SiRNA target sequence
gtcttgattaacactggtcttaa

SEQ ID NO: 143758 - DNA, 23 bp, Artificial sequence
  SiRNA target sequence
tcttgattaacactggtcttaat

SEQ ID NO: 143759 - DNA, 23 bp, Artificial sequence
  SiRNA target sequence
cttgattaacactggtcttaata

SEQ ID NO: 143760 - DNA, 23 bp, Artificial sequence
  SiRNA target sequence
ttgattaacactggtcttaatac

SEQ ID NO: 143761 - DNA, 23 bp, Artificial sequence
  SiRNA target sequence
tgattaacactggtcttaataca

SEQ ID NO: 143762 - DNA, 23 bp, Artificial sequence
  SiRNA target sequence
gattaacactggtcttaatacac

SEQ ID NO: 143763 - DNA, 23 bp, Artificial sequence
  SiRNA target sequence
attaacactggtcttaatacaca

SEQ ID NO: 143764 - DNA, 23 bp, Artificial sequence
  SiRNA target sequence
ttaacactggtcttaatacacaa

SEQ ID NO: 143765 - DNA, 23 bp, Artificial sequence
  SiRNA target sequence
taacactggtcttaatacacaat

SEQ ID NO: 143766 - DNA, 23 bp, Artificial sequence
  SiRNA target sequence
aacactggtcttaatacacaatt

SEQ ID NO: 143767 - DNA, 23 bp, Artificial sequence
  SiRNA target sequence
acactggtcttaatacacaattt

SEQ ID NO: 143768 - DNA, 23 bp, Artificial sequence
  SiRNA target sequence
cactggtcttaatacacaattta

SEQ ID NO: 143769 - DNA, 23 bp, Artificial sequence
  SiRNA target sequence
actggtcttaatacacaatttat

SEQ ID NO: 143770 - DNA, 23 bp, Artificial sequence
  SiRNA target sequence
ctggtcttaatacacaatttatc

SEQ ID NO: 143771 - DNA, 23 bp, Artificial sequence
  SiRNA target sequence
tggtcttaatacacaatttatct

SEQ ID NO: 143772 - DNA, 23 bp, Artificial sequence
  SiRNA target sequence
ggtcttaatacacaatttatctt

SEQ ID NO: 143773 - DNA, 23 bp, Artificial sequence
  SiRNA target sequence
gtcttaatacacaatttatcttt

SEQ ID NO: 143774 - DNA, 23 bp, Artificial sequence
  SiRNA target sequence
tcttaatacacaatttatcttta

SEQ ID NO: 143775 - DNA, 23 bp, Artificial sequence
  SiRNA target sequence
cttaatacacaatttatctttat

SEQ ID NO: 143776 - DNA, 23 bp, Artificial sequence
  SiRNA target sequence
ttaatacacaatttatctttata

SEQ ID NO: 143777 - DNA, 23 bp, Artificial sequence
  SiRNA target sequence
taatacacaatttatctttatat

SEQ ID NO: 143778 - DNA, 23 bp, Artificial sequence
  SiRNA target sequence
aatacacaatttatctttatata

SEQ ID NO: 143779 - DNA, 23 bp, Artificial sequence
  SiRNA target sequence
atacacaatttatctttatatat

SEQ ID NO: 143780 - DNA, 23 bp, Artificial sequence
  SiRNA target sequence
tacacaatttatctttatatatc

SEQ ID NO: 143781 - DNA, 23 bp, Artificial sequence
  SiRNA target sequence
acacaatttatctttatatatca

SEQ ID NO: 143782 - DNA, 23 bp, Artificial sequence
  SiRNA target sequence
cacaatttatctttatatatcaa

SEQ ID NO: 143783 - DNA, 23 bp, Artificial sequence
  SiRNA target sequence
acaatttatctttatatatcaac

SEQ ID NO: 143784 - DNA, 23 bp, Artificial sequence
  SiRNA target sequence
caatttatctttatatatcaacc

SEQ ID NO: 143785 - DNA, 23 bp, Artificial sequence
  SiRNA target sequence
aatttatctttatatatcaacca

SEQ ID NO: 143786 - DNA, 23 bp, Artificial sequence
  SiRNA target sequence
atttatctttatatatcaaccac

SEQ ID NO: 143787 - DNA, 23 bp, Artificial sequence
  SiRNA target sequence
tttatctttatatatcaaccaca

SEQ ID NO: 143788 - DNA, 23 bp, Artificial sequence
  SiRNA target sequence
ttatctttatatatcaaccacac

SEQ ID NO: 143789 - DNA, 23 bp, Artificial sequence
  SiRNA target sequence
tatctttatatatcaaccacacc

SEQ ID NO: 143790 - DNA, 23 bp, Artificial sequence
  SiRNA target sequence
atctttatatatcaaccacaccc

SEQ ID NO: 143791 - DNA, 23 bp, Artificial sequence
  SiRNA target sequence
tctttatatatcaaccacaccca

SEQ ID NO: 143792 - DNA, 23 bp, Artificial sequence
  SiRNA target sequence
ctttatatatcaaccacacccat

SEQ ID NO: 143793 - DNA, 23 bp, Artificial sequence
  SiRNA target sequence
tttatatatcaaccacacccatc

SEQ ID NO: 143794 - DNA, 23 bp, Artificial sequence
  SiRNA target sequence
ttatatatcaaccacacccatcc

SEQ ID NO: 143795 - DNA, 23 bp, Artificial sequence
  SiRNA target sequence
tatatatcaaccacacccatcct

SEQ ID NO: 143796 - DNA, 23 bp, Artificial sequence
  SiRNA target sequence
atatatcaaccacacccatcctg

SEQ ID NO: 143797 - DNA, 23 bp, Artificial sequence
  SiRNA target sequence
tatatcaaccacacccatcctga

SEQ ID NO: 143798 - DNA, 23 bp, Artificial sequence
  SiRNA target sequence
atatcaaccacacccatcctgat

SEQ ID NO: 143799 - DNA, 23 bp, Artificial sequence
  SiRNA target sequence
tatcaaccacacccatcctgatc

SEQ ID NO: 143800 - DNA, 23 bp, Artificial sequence
  SiRNA target sequence
atcaaccacacccatcctgatcc

SEQ ID NO: 143801 - DNA, 23 bp, Artificial sequence
  SiRNA target sequence
tcaaccacacccatcctgatcca

SEQ ID NO: 143802 - DNA, 23 bp, Artificial sequence
  SiRNA target sequence
caaccacacccatcctgatccaa

SEQ ID NO: 143803 - DNA, 23 bp, Artificial sequence
  SiRNA target sequence
aaccacacccatcctgatccaaa

SEQ ID NO: 143804 - DNA, 23 bp, Artificial sequence
  SiRNA target sequence
accacacccatcctgatccaaat

SEQ ID NO: 143805 - DNA, 23 bp, Artificial sequence
  SiRNA target sequence
ccacacccatcctgatccaaata

SEQ ID NO: 143806 - DNA, 23 bp, Artificial sequence
  SiRNA target sequence
cacacccatcctgatccaaataa

SEQ ID NO: 143807 - DNA, 23 bp, Artificial sequence
  SiRNA target sequence
acacccatcctgatccaaataat

SEQ ID NO: 143808 - DNA, 23 bp, Artificial sequence
  SiRNA target sequence
cacccatcctgatccaaataatt

SEQ ID NO: 143809 - DNA, 23 bp, Artificial sequence
  SiRNA target sequence
acccatcctgatccaaataattt

SEQ ID NO: 143810 - DNA, 23 bp, Artificial sequence
  SiRNA target sequence
cccatcctgatccaaataatttt

SEQ ID NO: 143811 - DNA, 23 bp, Artificial sequence
  SiRNA target sequence
ccatcctgatccaaataatttta

SEQ ID NO: 143812 - DNA, 23 bp, Artificial sequence
  SiRNA target sequence
catcctgatccaaataattttac

SEQ ID NO: 143813 - DNA, 23 bp, Artificial sequence
  SiRNA target sequence
atcctgatccaaataattttaca

SEQ ID NO: 143814 - DNA, 23 bp, Artificial sequence
  SiRNA target sequence
tcctgatccaaataattttacag

SEQ ID NO: 143815 - DNA, 23 bp, Artificial sequence
  SiRNA target sequence
cctgatccaaataattttacagc

SEQ ID NO: 143816 - DNA, 23 bp, Artificial sequence
  SiRNA target sequence
ctgatccaaataattttacagct

SEQ ID NO: 143817 - DNA, 23 bp, Artificial sequence
  SiRNA target sequence
tgatccaaataattttacagctt

SEQ ID NO: 143818 - DNA, 23 bp, Artificial sequence
  SiRNA target sequence
gatccaaataattttacagcttc

SEQ ID NO: 143819 - DNA, 23 bp, Artificial sequence
  SiRNA target sequence
atccaaataattttacagcttca

SEQ ID NO: 143820 - DNA, 23 bp, Artificial sequence
  SiRNA target sequence
tccaaataattttacagcttcag

SEQ ID NO: 143821 - DNA, 23 bp, Artificial sequence
  SiRNA target sequence
ccaaataattttacagcttcagt

SEQ ID NO: 143822 - DNA, 23 bp, Artificial sequence
  SiRNA target sequence
caaataattttacagcttcagta

SEQ ID NO: 143823 - DNA, 23 bp, Artificial sequence
  SiRNA target sequence
aaataattttacagcttcagtat

SEQ ID NO: 143824 - DNA, 23 bp, Artificial sequence
  SiRNA target sequence
aataattttacagcttcagtatt

SEQ ID NO: 143825 - DNA, 23 bp, Artificial sequence
  SiRNA target sequence
ataattttacagcttcagtatta

SEQ ID NO: 143826 - DNA, 23 bp, Artificial sequence
  SiRNA target sequence
taattttacagcttcagtattaa

SEQ ID NO: 143827 - DNA, 23 bp, Artificial sequence
  SiRNA target sequence
aattttacagcttcagtattaaa

SEQ ID NO: 143828 - DNA, 23 bp, Artificial sequence
  SiRNA target sequence
attttacagcttcagtattaaaa

SEQ ID NO: 143829 - DNA, 23 bp, Artificial sequence
  SiRNA target sequence
ttttacagcttcagtattaaaat

SEQ ID NO: 143830 - DNA, 23 bp, Artificial sequence
  SiRNA target sequence
tttacagcttcagtattaaaatt

SEQ ID NO: 143831 - DNA, 23 bp, Artificial sequence
  SiRNA target sequence
ttacagcttcagtattaaaattc

SEQ ID NO: 143832 - DNA, 23 bp, Artificial sequence
  SiRNA target sequence
tacagcttcagtattaaaattct

SEQ ID NO: 143833 - DNA, 23 bp, Artificial sequence
  SiRNA target sequence
acagcttcagtattaaaattctc

SEQ ID NO: 143834 - DNA, 23 bp, Artificial sequence
  SiRNA target sequence
cagcttcagtattaaaattctcc

SEQ ID NO: 143835 - DNA, 23 bp, Artificial sequence
  SiRNA target sequence
agcttcagtattaaaattctcct

SEQ ID NO: 143836 - DNA, 23 bp, Artificial sequence
  SiRNA target sequence
gcttcagtattaaaattctcctt

SEQ ID NO: 143837 - DNA, 23 bp, Artificial sequence
  SiRNA target sequence
cttcagtattaaaattctcctta

SEQ ID NO: 143838 - DNA, 23 bp, Artificial sequence
  SiRNA target sequence
ttcagtattaaaattctccttaa

SEQ ID NO: 143839 - DNA, 23 bp, Artificial sequence
  SiRNA target sequence
tcagtattaaaattctccttaaa

SEQ ID NO: 143840 - DNA, 23 bp, Artificial sequence
  SiRNA target sequence
cagtattaaaattctccttaaat

SEQ ID NO: 143841 - DNA, 23 bp, Artificial sequence
  SiRNA target sequence
agtattaaaattctccttaaatt

SEQ ID NO: 143842 - DNA, 23 bp, Artificial sequence
  SiRNA target sequence
gtattaaaattctccttaaattt

SEQ ID NO: 143843 - DNA, 23 bp, Artificial sequence
  SiRNA target sequence
tattaaaattctccttaaattta

SEQ ID NO: 143844 - DNA, 23 bp, Artificial sequence
  SiRNA target sequence
attaaaattctccttaaatttat

SEQ ID NO: 143845 - DNA, 23 bp, Artificial sequence
  SiRNA target sequence
ttaaaattctccttaaatttatt

SEQ ID NO: 143846 - DNA, 23 bp, Artificial sequence
  SiRNA target sequence
taaaattctccttaaatttattt

SEQ ID NO: 143847 - DNA, 23 bp, Artificial sequence
  SiRNA target sequence
aaaattctccttaaatttattta

SEQ ID NO: 143848 - DNA, 23 bp, Artificial sequence
  SiRNA target sequence
aaattctccttaaatttatttat

SEQ ID NO: 143849 - DNA, 23 bp, Artificial sequence
  SiRNA target sequence
aattctccttaaatttatttatt

SEQ ID NO: 143850 - DNA, 23 bp, Artificial sequence
  SiRNA target sequence
attctccttaaatttatttattg

SEQ ID NO: 143851 - DNA, 23 bp, Artificial sequence
  SiRNA target sequence
ttctccttaaatttatttattga

SEQ ID NO: 143852 - DNA, 23 bp, Artificial sequence
  SiRNA target sequence
tctccttaaatttatttattgat

SEQ ID NO: 143853 - DNA, 23 bp, Artificial sequence
  SiRNA target sequence
ctccttaaatttatttattgatc

SEQ ID NO: 143854 - DNA, 23 bp, Artificial sequence
  SiRNA target sequence
tccttaaatttatttattgatcc

SEQ ID NO: 143855 - DNA, 23 bp, Artificial sequence
  SiRNA target sequence
ccttaaatttatttattgatcca

SEQ ID NO: 143856 - DNA, 23 bp, Artificial sequence
  SiRNA target sequence
cttaaatttatttattgatccaa

SEQ ID NO: 143857 - DNA, 23 bp, Artificial sequence
  SiRNA target sequence
ttaaatttatttattgatccaaa

SEQ ID NO: 143858 - DNA, 23 bp, Artificial sequence
  SiRNA target sequence
taaatttatttattgatccaaag

SEQ ID NO: 143859 - DNA, 23 bp, Artificial sequence
  SiRNA target sequence
aaatttatttattgatccaaagt

SEQ ID NO: 143860 - DNA, 23 bp, Artificial sequence
  SiRNA target sequence
aatttatttattgatccaaagtc

SEQ ID NO: 143861 - DNA, 23 bp, Artificial sequence
  SiRNA target sequence
atttatttattgatccaaagtct

SEQ ID NO: 143862 - DNA, 23 bp, Artificial sequence
  SiRNA target sequence
tttatttattgatccaaagtctt

SEQ ID NO: 143863 - DNA, 23 bp, Artificial sequence
  SiRNA target sequence
ttatttattgatccaaagtcttt

SEQ ID NO: 143864 - DNA, 23 bp, Artificial sequence
  SiRNA target sequence
tatttattgatccaaagtctttt

SEQ ID NO: 143865 - DNA, 23 bp, Artificial sequence
  SiRNA target sequence
atttattgatccaaagtctttta

SEQ ID NO: 143866 - DNA, 23 bp, Artificial sequence
  SiRNA target sequence
tttattgatccaaagtcttttat

SEQ ID NO: 143867 - DNA, 23 bp, Artificial sequence
  SiRNA target sequence
ttattgatccaaagtcttttatt

SEQ ID NO: 143868 - DNA, 23 bp, Artificial sequence
  SiRNA target sequence
tattgatccaaagtcttttatta

SEQ ID NO: 143869 - DNA, 23 bp, Artificial sequence
  SiRNA target sequence
attgatccaaagtcttttattat

SEQ ID NO: 143870 - DNA, 23 bp, Artificial sequence
  SiRNA target sequence
ttgatccaaagtcttttattata

SEQ ID NO: 143871 - DNA, 23 bp, Artificial sequence
  SiRNA target sequence
tgatccaaagtcttttattatag

SEQ ID NO: 143872 - DNA, 23 bp, Artificial sequence
  SiRNA target sequence
gatccaaagtcttttattatagc

SEQ ID NO: 143873 - DNA, 23 bp, Artificial sequence
  SiRNA target sequence
atccaaagtcttttattatagca

SEQ ID NO: 143874 - DNA, 23 bp, Artificial sequence
  SiRNA target sequence
tccaaagtcttttattatagcac

SEQ ID NO: 143875 - DNA, 23 bp, Artificial sequence
  SiRNA target sequence
ccaaagtcttttattatagcact

SEQ ID NO: 143876 - DNA, 23 bp, Artificial sequence
  SiRNA target sequence
caaagtcttttattatagcactt

SEQ ID NO: 143877 - DNA, 23 bp, Artificial sequence
  SiRNA target sequence
aaagtcttttattatagcacttt

SEQ ID NO: 143878 - DNA, 23 bp, Artificial sequence
  SiRNA target sequence
aagtcttttattatagcactttc

SEQ ID NO: 143879 - DNA, 23 bp, Artificial sequence
  SiRNA target sequence
agtcttttattatagcactttcc

SEQ ID NO: 143880 - DNA, 23 bp, Artificial sequence
  SiRNA target sequence
gtcttttattatagcactttcca

SEQ ID NO: 143881 - DNA, 23 bp, Artificial sequence
  SiRNA target sequence
tcttttattatagcactttccaa

SEQ ID NO: 143882 - DNA, 23 bp, Artificial sequence
  SiRNA target sequence
cttttattatagcactttccaac

SEQ ID NO: 143883 - DNA, 23 bp, Artificial sequence
  SiRNA target sequence
ttttattatagcactttccaact

SEQ ID NO: 143884 - DNA, 23 bp, Artificial sequence
  SiRNA target sequence
tttattatagcactttccaactg

SEQ ID NO: 143885 - DNA, 23 bp, Artificial sequence
  SiRNA target sequence
ttattatagcactttccaactgg

SEQ ID NO: 143886 - DNA, 23 bp, Artificial sequence
  SiRNA target sequence
tattatagcactttccaactggg

SEQ ID NO: 143887 - DNA, 23 bp, Artificial sequence
  SiRNA target sequence
attatagcactttccaactggga

SEQ ID NO: 143888 - DNA, 23 bp, Artificial sequence
  SiRNA target sequence
ttatagcactttccaactgggaa

SEQ ID NO: 143889 - DNA, 23 bp, Artificial sequence
  SiRNA target sequence
tatagcactttccaactgggaag

SEQ ID NO: 143890 - DNA, 23 bp, Artificial sequence
  SiRNA target sequence
atagcactttccaactgggaaga

SEQ ID NO: 143891 - DNA, 23 bp, Artificial sequence
  SiRNA target sequence
tagcactttccaactgggaagaa

SEQ ID NO: 143892 - DNA, 23 bp, Artificial sequence
  SiRNA target sequence
agcactttccaactgggaagaaa

SEQ ID NO: 143893 - DNA, 23 bp, Artificial sequence
  SiRNA target sequence
gcactttccaactgggaagaaat

SEQ ID NO: 143894 - DNA, 23 bp, Artificial sequence
  SiRNA target sequence
cactttccaactgggaagaaatc

SEQ ID NO: 143895 - DNA, 23 bp, Artificial sequence
  SiRNA target sequence
actttccaactgggaagaaatct

SEQ ID NO: 143896 - DNA, 23 bp, Artificial sequence
  SiRNA target sequence
ctttccaactgggaagaaatctt

SEQ ID NO: 143897 - DNA, 23 bp, Artificial sequence
  SiRNA target sequence
tttccaactgggaagaaatcttt

SEQ ID NO: 143898 - DNA, 23 bp, Artificial sequence
  SiRNA target sequence
ttccaactgggaagaaatctttt

SEQ ID NO: 143899 - DNA, 23 bp, Artificial sequence
  SiRNA target sequence
tccaactgggaagaaatcttttt

SEQ ID NO: 143900 - DNA, 23 bp, Artificial sequence
  SiRNA target sequence
ccaactgggaagaaatcttttta

SEQ ID NO: 143901 - DNA, 23 bp, Artificial sequence
  SiRNA target sequence
caactgggaagaaatctttttat

SEQ ID NO: 143902 - DNA, 23 bp, Artificial sequence
  SiRNA target sequence
aactgggaagaaatctttttatt

SEQ ID NO: 143903 - DNA, 23 bp, Artificial sequence
  SiRNA target sequence
actgggaagaaatctttttattt

SEQ ID NO: 143904 - DNA, 23 bp, Artificial sequence
  SiRNA target sequence
ctgggaagaaatctttttatttt

SEQ ID NO: 143905 - DNA, 23 bp, Artificial sequence
  SiRNA target sequence
tgggaagaaatctttttattttc

SEQ ID NO: 143906 - DNA, 23 bp, Artificial sequence
  SiRNA target sequence
gggaagaaatctttttattttct

SEQ ID NO: 143907 - DNA, 23 bp, Artificial sequence
  SiRNA target sequence
ggaagaaatctttttattttctg

SEQ ID NO: 143908 - DNA, 23 bp, Artificial sequence
  SiRNA target sequence
gaagaaatctttttattttctgg

SEQ ID NO: 143909 - DNA, 23 bp, Artificial sequence
  SiRNA target sequence
aagaaatctttttattttctggt

SEQ ID NO: 143910 - DNA, 23 bp, Artificial sequence
  SiRNA target sequence
agaaatctttttattttctggtg

SEQ ID NO: 143911 - DNA, 23 bp, Artificial sequence
  SiRNA target sequence
gaaatctttttattttctggtga

SEQ ID NO: 143912 - DNA, 23 bp, Artificial sequence
  SiRNA target sequence
aaatctttttattttctggtgac

SEQ ID NO: 143913 - DNA, 23 bp, Artificial sequence
  SiRNA target sequence
aatctttttattttctggtgaca

SEQ ID NO: 143914 - DNA, 23 bp, Artificial sequence
  SiRNA target sequence
atctttttattttctggtgacat

SEQ ID NO: 143915 - DNA, 23 bp, Artificial sequence
  SiRNA target sequence
tctttttattttctggtgacatt

SEQ ID NO: 143916 - DNA, 23 bp, Artificial sequence
  SiRNA target sequence
ctttttattttctggtgacatta

SEQ ID NO: 143917 - DNA, 23 bp, Artificial sequence
  SiRNA target sequence
tttttattttctggtgacattac

SEQ ID NO: 143918 - DNA, 23 bp, Artificial sequence
  SiRNA target sequence
ttttattttctggtgacattacc

SEQ ID NO: 143919 - DNA, 23 bp, Artificial sequence
  SiRNA target sequence
tttattttctggtgacattacca

SEQ ID NO: 143920 - DNA, 23 bp, Artificial sequence
  SiRNA target sequence
ttattttctggtgacattaccaa

SEQ ID NO: 143921 - DNA, 23 bp, Artificial sequence
  SiRNA target sequence
tattttctggtgacattaccaac

SEQ ID NO: 143922 - DNA, 23 bp, Artificial sequence
  SiRNA target sequence
attttctggtgacattaccaacc

SEQ ID NO: 143923 - DNA, 23 bp, Artificial sequence
  SiRNA target sequence
ttttctggtgacattaccaacca

SEQ ID NO: 143924 - DNA, 23 bp, Artificial sequence
  SiRNA target sequence
tttctggtgacattaccaaccag

SEQ ID NO: 143925 - DNA, 23 bp, Artificial sequence
  SiRNA target sequence
ttctggtgacattaccaaccaga

SEQ ID NO: 143926 - DNA, 23 bp, Artificial sequence
  SiRNA target sequence
tctggtgacattaccaaccagaa

SEQ ID NO: 143927 - DNA, 23 bp, Artificial sequence
  SiRNA target sequence
ctggtgacattaccaaccagaaa

SEQ ID NO: 143928 - DNA, 23 bp, Artificial sequence
  SiRNA target sequence
tggtgacattaccaaccagaaaa

SEQ ID NO: 143929 - DNA, 23 bp, Artificial sequence
  SiRNA target sequence
ggtgacattaccaaccagaaaag

SEQ ID NO: 143930 - DNA, 23 bp, Artificial sequence
  SiRNA target sequence
gtgacattaccaaccagaaaaga

SEQ ID NO: 143931 - DNA, 23 bp, Artificial sequence
  SiRNA target sequence
tgacattaccaaccagaaaagac

SEQ ID NO: 143932 - DNA, 23 bp, Artificial sequence
  SiRNA target sequence
gacattaccaaccagaaaagact

SEQ ID NO: 143933 - DNA, 23 bp, Artificial sequence
  SiRNA target sequence
acattaccaaccagaaaagacta

SEQ ID NO: 143934 - DNA, 23 bp, Artificial sequence
  SiRNA target sequence
cattaccaaccagaaaagactat

SEQ ID NO: 143935 - DNA, 23 bp, Artificial sequence
  SiRNA target sequence
attaccaaccagaaaagactatg

SEQ ID NO: 143936 - DNA, 23 bp, Artificial sequence
  SiRNA target sequence
ttaccaaccagaaaagactatgg

SEQ ID NO: 143937 - DNA, 23 bp, Artificial sequence
  SiRNA target sequence
taccaaccagaaaagactatggt

SEQ ID NO: 143938 - DNA, 23 bp, Artificial sequence
  SiRNA target sequence
accaaccagaaaagactatggtt

SEQ ID NO: 143939 - DNA, 23 bp, Artificial sequence
  SiRNA target sequence
ccaaccagaaaagactatggttg

SEQ ID NO: 143940 - DNA, 23 bp, Artificial sequence
  SiRNA target sequence
caaccagaaaagactatggttgt

SEQ ID NO: 143941 - DNA, 23 bp, Artificial sequence
  SiRNA target sequence
aaccagaaaagactatggttgta

SEQ ID NO: 143942 - DNA, 23 bp, Artificial sequence
  SiRNA target sequence
accagaaaagactatggttgtaa

SEQ ID NO: 143943 - DNA, 23 bp, Artificial sequence
  SiRNA target sequence
ccagaaaagactatggttgtaat

SEQ ID NO: 143944 - DNA, 23 bp, Artificial sequence
  SiRNA target sequence
cagaaaagactatggttgtaatg

SEQ ID NO: 143945 - DNA, 23 bp, Artificial sequence
  SiRNA target sequence
agaaaagactatggttgtaatga

SEQ ID NO: 143946 - DNA, 23 bp, Artificial sequence
  SiRNA target sequence
gaaaagactatggttgtaatgac

SEQ ID NO: 143947 - DNA, 23 bp, Artificial sequence
  SiRNA target sequence
aaaagactatggttgtaatgacc

SEQ ID NO: 143948 - DNA, 23 bp, Artificial sequence
  SiRNA target sequence
aaagactatggttgtaatgacca

SEQ ID NO: 143949 - DNA, 23 bp, Artificial sequence
  SiRNA target sequence
aagactatggttgtaatgaccac

SEQ ID NO: 143950 - DNA, 23 bp, Artificial sequence
  SiRNA target sequence
agactatggttgtaatgaccacc

SEQ ID NO: 143951 - DNA, 23 bp, Artificial sequence
  SiRNA target sequence
gactatggttgtaatgaccacca

SEQ ID NO: 143952 - DNA, 23 bp, Artificial sequence
  SiRNA target sequence
actatggttgtaatgaccaccac

SEQ ID NO: 143953 - DNA, 23 bp, Artificial sequence
  SiRNA target sequence
ctatggttgtaatgaccaccacc

SEQ ID NO: 143954 - DNA, 23 bp, Artificial sequence
  SiRNA target sequence
tatggttgtaatgaccaccacca

SEQ ID NO: 143955 - DNA, 23 bp, Artificial sequence
  SiRNA target sequence
atggttgtaatgaccaccaccat

SEQ ID NO: 143956 - DNA, 23 bp, Artificial sequence
  SiRNA target sequence
tggttgtaatgaccaccaccata

SEQ ID NO: 143957 - DNA, 23 bp, Artificial sequence
  SiRNA target sequence
ggttgtaatgaccaccaccataa

SEQ ID NO: 143958 - DNA, 23 bp, Artificial sequence
  SiRNA target sequence
gttgtaatgaccaccaccataat

SEQ ID NO: 143959 - DNA, 23 bp, Artificial sequence
  SiRNA target sequence
ttgtaatgaccaccaccataatc

SEQ ID NO: 143960 - DNA, 23 bp, Artificial sequence
  SiRNA target sequence
tgtaatgaccaccaccataatct

SEQ ID NO: 143961 - DNA, 23 bp, Artificial sequence
  SiRNA target sequence
gtaatgaccaccaccataatctc

SEQ ID NO: 143962 - DNA, 23 bp, Artificial sequence
  SiRNA target sequence
taatgaccaccaccataatctct

SEQ ID NO: 143963 - DNA, 23 bp, Artificial sequence
  SiRNA target sequence
aatgaccaccaccataatctctt

SEQ ID NO: 143964 - DNA, 23 bp, Artificial sequence
  SiRNA target sequence
atgaccaccaccataatctctta

SEQ ID NO: 143965 - DNA, 23 bp, Artificial sequence
  SiRNA target sequence
tgaccaccaccataatctcttaa

SEQ ID NO: 143966 - DNA, 23 bp, Artificial sequence
  SiRNA target sequence
gaccaccaccataatctcttaat

SEQ ID NO: 143967 - DNA, 23 bp, Artificial sequence
  SiRNA target sequence
accaccaccataatctcttaatt

SEQ ID NO: 143968 - DNA, 23 bp, Artificial sequence
  SiRNA target sequence
ccaccaccataatctcttaattg

SEQ ID NO: 143969 - DNA, 23 bp, Artificial sequence
  SiRNA target sequence
caccaccataatctcttaattgt

SEQ ID NO: 143970 - DNA, 23 bp, Artificial sequence
  SiRNA target sequence
accaccataatctcttaattgtt

SEQ ID NO: 143971 - DNA, 23 bp, Artificial sequence
  SiRNA target sequence
ccaccataatctcttaattgttt

SEQ ID NO: 143972 - DNA, 23 bp, Artificial sequence
  SiRNA target sequence
caccataatctcttaattgttta

SEQ ID NO: 143973 - DNA, 23 bp, Artificial sequence
  SiRNA target sequence
accataatctcttaattgtttat

SEQ ID NO: 143974 - DNA, 23 bp, Artificial sequence
  SiRNA target sequence
ccataatctcttaattgtttatc

SEQ ID NO: 143975 - DNA, 23 bp, Artificial sequence
  SiRNA target sequence
cataatctcttaattgtttatca

SEQ ID NO: 143976 - DNA, 23 bp, Artificial sequence
  SiRNA target sequence
ataatctcttaattgtttatcaa

SEQ ID NO: 143977 - DNA, 23 bp, Artificial sequence
  SiRNA target sequence
taatctcttaattgtttatcaac

SEQ ID NO: 143978 - DNA, 23 bp, Artificial sequence
  SiRNA target sequence
aatctcttaattgtttatcaaca

SEQ ID NO: 143979 - DNA, 23 bp, Artificial sequence
  SiRNA target sequence
atctcttaattgtttatcaacaa

SEQ ID NO: 143980 - DNA, 23 bp, Artificial sequence
  SiRNA target sequence
tctcttaattgtttatcaacaag

SEQ ID NO: 143981 - DNA, 23 bp, Artificial sequence
  SiRNA target sequence
ctcttaattgtttatcaacaagt

SEQ ID NO: 143982 - DNA, 23 bp, Artificial sequence
  SiRNA target sequence
tcttaattgtttatcaacaagtg

SEQ ID NO: 143983 - DNA, 23 bp, Artificial sequence
  SiRNA target sequence
cttaattgtttatcaacaagtgc

SEQ ID NO: 143984 - DNA, 23 bp, Artificial sequence
  SiRNA target sequence
ttaattgtttatcaacaagtgca

SEQ ID NO: 143985 - DNA, 23 bp, Artificial sequence
  SiRNA target sequence
taattgtttatcaacaagtgcat

SEQ ID NO: 143986 - DNA, 23 bp, Artificial sequence
  SiRNA target sequence
aattgtttatcaacaagtgcatt

SEQ ID NO: 143987 - DNA, 23 bp, Artificial sequence
  SiRNA target sequence
attgtttatcaacaagtgcattt

SEQ ID NO: 143988 - DNA, 23 bp, Artificial sequence
  SiRNA target sequence
ttgtttatcaacaagtgcatttc

SEQ ID NO: 143989 - DNA, 23 bp, Artificial sequence
  SiRNA target sequence
tgtttatcaacaagtgcatttcc

SEQ ID NO: 143990 - DNA, 23 bp, Artificial sequence
  SiRNA target sequence
gtttatcaacaagtgcatttcct

SEQ ID NO: 143991 - DNA, 23 bp, Artificial sequence
  SiRNA target sequence
tttatcaacaagtgcatttcctt

SEQ ID NO: 143992 - DNA, 23 bp, Artificial sequence
  SiRNA target sequence
ttatcaacaagtgcatttccttt

SEQ ID NO: 143993 - DNA, 23 bp, Artificial sequence
  SiRNA target sequence
tatcaacaagtgcatttccttta

SEQ ID NO: 143994 - DNA, 23 bp, Artificial sequence
  SiRNA target sequence
atcaacaagtgcatttcctttat

SEQ ID NO: 143995 - DNA, 23 bp, Artificial sequence
  SiRNA target sequence
tcaacaagtgcatttcctttatt

SEQ ID NO: 143996 - DNA, 23 bp, Artificial sequence
  SiRNA target sequence
caacaagtgcatttcctttatta

SEQ ID NO: 143997 - DNA, 23 bp, Artificial sequence
  SiRNA target sequence
aacaagtgcatttcctttattat

SEQ ID NO: 143998 - DNA, 23 bp, Artificial sequence
  SiRNA target sequence
acaagtgcatttcctttattatt

SEQ ID NO: 143999 - DNA, 23 bp, Artificial sequence
  SiRNA target sequence
caagtgcatttcctttattatta

SEQ ID NO: 144000 - DNA, 23 bp, Artificial sequence
  SiRNA target sequence
aagtgcatttcctttattattaa

SEQ ID NO: 144001 - DNA, 23 bp, Artificial sequence
  SiRNA target sequence
agtgcatttcctttattattaaa

SEQ ID NO: 144002 - DNA, 23 bp, Artificial sequence
  SiRNA target sequence
gtgcatttcctttattattaaaa

SEQ ID NO: 144003 - DNA, 23 bp, Artificial sequence
  SiRNA target sequence
tgcatttcctttattattaaaaa

SEQ ID NO: 144004 - DNA, 23 bp, Artificial sequence
  SiRNA target sequence
gcatttcctttattattaaaaag

SEQ ID NO: 144005 - DNA, 23 bp, Artificial sequence
  SiRNA target sequence
catttcctttattattaaaaagt

SEQ ID NO: 144006 - DNA, 23 bp, Artificial sequence
  SiRNA target sequence
atttcctttattattaaaaagta

SEQ ID NO: 144007 - DNA, 23 bp, Artificial sequence
  SiRNA target sequence
tttcctttattattaaaaagtaa

SEQ ID NO: 144008 - DNA, 23 bp, Artificial sequence
  SiRNA target sequence
ttcctttattattaaaaagtaat

SEQ ID NO: 144009 - DNA, 23 bp, Artificial sequence
  SiRNA target sequence
tcctttattattaaaaagtaatg

SEQ ID NO: 144010 - DNA, 23 bp, Artificial sequence
  SiRNA target sequence
cctttattattaaaaagtaatga

SEQ ID NO: 144011 - DNA, 23 bp, Artificial sequence
  SiRNA target sequence
ctttattattaaaaagtaatgaa

SEQ ID NO: 144012 - DNA, 23 bp, Artificial sequence
  SiRNA target sequence
tttattattaaaaagtaatgaat

SEQ ID NO: 144013 - DNA, 23 bp, Artificial sequence
  SiRNA target sequence
ttattattaaaaagtaatgaatt

SEQ ID NO: 144014 - DNA, 23 bp, Artificial sequence
  SiRNA target sequence
tattattaaaaagtaatgaattt

SEQ ID NO: 144015 - DNA, 23 bp, Artificial sequence
  SiRNA target sequence
attattaaaaagtaatgaattta

SEQ ID NO: 144016 - DNA, 23 bp, Artificial sequence
  SiRNA target sequence
ttattaaaaagtaatgaatttaa

SEQ ID NO: 144017 - DNA, 23 bp, Artificial sequence
  SiRNA target sequence
tattaaaaagtaatgaatttaat

SEQ ID NO: 144018 - DNA, 23 bp, Artificial sequence
  SiRNA target sequence
attaaaaagtaatgaatttaatg

SEQ ID NO: 144019 - DNA, 23 bp, Artificial sequence
  SiRNA target sequence
ttaaaaagtaatgaatttaatga

SEQ ID NO: 144020 - DNA, 23 bp, Artificial sequence
  SiRNA target sequence
taaaaagtaatgaatttaatgat

SEQ ID NO: 144021 - DNA, 23 bp, Artificial sequence
  SiRNA target sequence
aaaaagtaatgaatttaatgatt

SEQ ID NO: 144022 - DNA, 23 bp, Artificial sequence
  SiRNA target sequence
aaaagtaatgaatttaatgattt

SEQ ID NO: 144023 - DNA, 23 bp, Artificial sequence
  SiRNA target sequence
aaagtaatgaatttaatgattta

SEQ ID NO: 144024 - DNA, 23 bp, Artificial sequence
  SiRNA target sequence
aagtaatgaatttaatgatttac

SEQ ID NO: 144025 - DNA, 23 bp, Artificial sequence
  SiRNA target sequence
agtaatgaatttaatgatttacc

SEQ ID NO: 144026 - DNA, 23 bp, Artificial sequence
  SiRNA target sequence
gtaatgaatttaatgatttacca

SEQ ID NO: 144027 - DNA, 23 bp, Artificial sequence
  SiRNA target sequence
taatgaatttaatgatttaccac

SEQ ID NO: 144028 - DNA, 23 bp, Artificial sequence
  SiRNA target sequence
aatgaatttaatgatttaccaca

SEQ ID NO: 144029 - DNA, 23 bp, Artificial sequence
  SiRNA target sequence
atgaatttaatgatttaccacac

SEQ ID NO: 144030 - DNA, 23 bp, Artificial sequence
  SiRNA target sequence
tgaatttaatgatttaccacaca

SEQ ID NO: 144031 - DNA, 23 bp, Artificial sequence
  SiRNA target sequence
gaatttaatgatttaccacacaa

SEQ ID NO: 144032 - DNA, 23 bp, Artificial sequence
  SiRNA target sequence
aatttaatgatttaccacacaaa

SEQ ID NO: 144033 - DNA, 23 bp, Artificial sequence
  SiRNA target sequence
atttaatgatttaccacacaaat

SEQ ID NO: 144034 - DNA, 23 bp, Artificial sequence
  SiRNA target sequence
tttaatgatttaccacacaaatt

SEQ ID NO: 144035 - DNA, 23 bp, Artificial sequence
  SiRNA target sequence
ttaatgatttaccacacaaattg

SEQ ID NO: 144036 - DNA, 23 bp, Artificial sequence
  SiRNA target sequence
taatgatttaccacacaaattgt

SEQ ID NO: 144037 - DNA, 23 bp, Artificial sequence
  SiRNA target sequence
aatgatttaccacacaaattgtt

SEQ ID NO: 144038 - DNA, 23 bp, Artificial sequence
  SiRNA target sequence
atgatttaccacacaaattgtta

SEQ ID NO: 144039 - DNA, 23 bp, Artificial sequence
  SiRNA target sequence
tgatttaccacacaaattgttat

SEQ ID NO: 144040 - DNA, 23 bp, Artificial sequence
  SiRNA target sequence
gatttaccacacaaattgttatc

SEQ ID NO: 144041 - DNA, 23 bp, Artificial sequence
  SiRNA target sequence
atttaccacacaaattgttatct

SEQ ID NO: 144042 - DNA, 23 bp, Artificial sequence
  SiRNA target sequence
tttaccacacaaattgttatcta

SEQ ID NO: 144043 - DNA, 23 bp, Artificial sequence
  SiRNA target sequence
ttaccacacaaattgttatctaa

SEQ ID NO: 144044 - DNA, 23 bp, Artificial sequence
  SiRNA target sequence
taccacacaaattgttatctaat

SEQ ID NO: 144045 - DNA, 23 bp, Artificial sequence
  SiRNA target sequence
accacacaaattgttatctaata

SEQ ID NO: 144046 - DNA, 23 bp, Artificial sequence
  SiRNA target sequence
ccacacaaattgttatctaatat

SEQ ID NO: 144047 - DNA, 23 bp, Artificial sequence
  SiRNA target sequence
cacacaaattgttatctaatatt

SEQ ID NO: 144048 - DNA, 23 bp, Artificial sequence
  SiRNA target sequence
acacaaattgttatctaatatta

SEQ ID NO: 144049 - DNA, 23 bp, Artificial sequence
  SiRNA target sequence
cacaaattgttatctaatattat

SEQ ID NO: 144050 - DNA, 23 bp, Artificial sequence
  SiRNA target sequence
acaaattgttatctaatattatt

SEQ ID NO: 144051 - DNA, 23 bp, Artificial sequence
  SiRNA target sequence
caaattgttatctaatattattt

SEQ ID NO: 144052 - DNA, 23 bp, Artificial sequence
  SiRNA target sequence
aaattgttatctaatattatttt

SEQ ID NO: 144053 - DNA, 23 bp, Artificial sequence
  SiRNA target sequence
aattgttatctaatattatttta

SEQ ID NO: 144054 - DNA, 23 bp, Artificial sequence
  SiRNA target sequence
attgttatctaatattattttat

SEQ ID NO: 144055 - DNA, 23 bp, Artificial sequence
  SiRNA target sequence
ttgttatctaatattattttatt

SEQ ID NO: 144056 - DNA, 23 bp, Artificial sequence
  SiRNA target sequence
tgttatctaatattattttatta

SEQ ID NO: 144057 - DNA, 23 bp, Artificial sequence
  SiRNA target sequence
gttatctaatattattttattaa

SEQ ID NO: 144058 - DNA, 23 bp, Artificial sequence
  SiRNA target sequence
ttatctaatattattttattaag

SEQ ID NO: 144059 - DNA, 23 bp, Artificial sequence
  SiRNA target sequence
tatctaatattattttattaaga

SEQ ID NO: 144060 - DNA, 23 bp, Artificial sequence
  SiRNA target sequence
atctaatattattttattaagag

SEQ ID NO: 144061 - DNA, 23 bp, Artificial sequence
  SiRNA target sequence
tctaatattattttattaagagt

SEQ ID NO: 144062 - DNA, 23 bp, Artificial sequence
  SiRNA target sequence
ctaatattattttattaagagtg

SEQ ID NO: 144063 - DNA, 23 bp, Artificial sequence
  SiRNA target sequence
taatattattttattaagagtgt

SEQ ID NO: 144064 - DNA, 23 bp, Artificial sequence
  SiRNA target sequence
aatattattttattaagagtgtc

SEQ ID NO: 144065 - DNA, 23 bp, Artificial sequence
  SiRNA target sequence
atattattttattaagagtgtct

SEQ ID NO: 144066 - DNA, 23 bp, Artificial sequence
  SiRNA target sequence
tattattttattaagagtgtcta

SEQ ID NO: 144067 - DNA, 23 bp, Artificial sequence
  SiRNA target sequence
attattttattaagagtgtctac

SEQ ID NO: 144068 - DNA, 23 bp, Artificial sequence
  SiRNA target sequence
ttattttattaagagtgtctaca

SEQ ID NO: 144069 - DNA, 23 bp, Artificial sequence
  SiRNA target sequence
tattttattaagagtgtctacat

SEQ ID NO: 144070 - DNA, 23 bp, Artificial sequence
  SiRNA target sequence
attttattaagagtgtctacata

SEQ ID NO: 144071 - DNA, 23 bp, Artificial sequence
  SiRNA target sequence
ttttattaagagtgtctacatac

SEQ ID NO: 144072 - DNA, 23 bp, Artificial sequence
  SiRNA target sequence
tttattaagagtgtctacatacg

SEQ ID NO: 144073 - DNA, 23 bp, Artificial sequence
  SiRNA target sequence
ttattaagagtgtctacatacgc

SEQ ID NO: 144074 - DNA, 23 bp, Artificial sequence
  SiRNA target sequence
tattaagagtgtctacatacgct

SEQ ID NO: 144075 - DNA, 23 bp, Artificial sequence
  SiRNA target sequence
attaagagtgtctacatacgctt

SEQ ID NO: 144076 - DNA, 23 bp, Artificial sequence
  SiRNA target sequence
ttaagagtgtctacatacgcttg

SEQ ID NO: 144077 - DNA, 23 bp, Artificial sequence
  SiRNA target sequence
taagagtgtctacatacgcttga

SEQ ID NO: 144078 - DNA, 23 bp, Artificial sequence
  SiRNA target sequence
aagagtgtctacatacgcttgat

SEQ ID NO: 144079 - DNA, 23 bp, Artificial sequence
  SiRNA target sequence
agagtgtctacatacgcttgatg

SEQ ID NO: 144080 - DNA, 23 bp, Artificial sequence
  SiRNA target sequence
gagtgtctacatacgcttgatgg

SEQ ID NO: 144081 - DNA, 23 bp, Artificial sequence
  SiRNA target sequence
agtgtctacatacgcttgatggt

SEQ ID NO: 144082 - DNA, 23 bp, Artificial sequence
  SiRNA target sequence
gtgtctacatacgcttgatggtg

SEQ ID NO: 144083 - DNA, 23 bp, Artificial sequence
  SiRNA target sequence
tgtctacatacgcttgatggtgc

SEQ ID NO: 144084 - DNA, 23 bp, Artificial sequence
  SiRNA target sequence
gtctacatacgcttgatggtgct

SEQ ID NO: 144085 - DNA, 23 bp, Artificial sequence
  SiRNA target sequence
tctacatacgcttgatggtgctt

SEQ ID NO: 144086 - DNA, 23 bp, Artificial sequence
  SiRNA target sequence
ctacatacgcttgatggtgctta

SEQ ID NO: 144087 - DNA, 23 bp, Artificial sequence
  SiRNA target sequence
tacatacgcttgatggtgcttag

SEQ ID NO: 144088 - DNA, 23 bp, Artificial sequence
  SiRNA target sequence
acatacgcttgatggtgcttaga

SEQ ID NO: 144089 - DNA, 23 bp, Artificial sequence
  SiRNA target sequence
catacgcttgatggtgcttagag

SEQ ID NO: 144090 - DNA, 23 bp, Artificial sequence
  SiRNA target sequence
atacgcttgatggtgcttagagt

SEQ ID NO: 144091 - DNA, 23 bp, Artificial sequence
  SiRNA target sequence
tacgcttgatggtgcttagagtg

SEQ ID NO: 144092 - DNA, 23 bp, Artificial sequence
  SiRNA target sequence
acgcttgatggtgcttagagtgg

SEQ ID NO: 144093 - DNA, 23 bp, Artificial sequence
  SiRNA target sequence
cgcttgatggtgcttagagtggt

SEQ ID NO: 144094 - DNA, 23 bp, Artificial sequence
  SiRNA target sequence
gcttgatggtgcttagagtggtg

SEQ ID NO: 144095 - DNA, 23 bp, Artificial sequence
  SiRNA target sequence
cttgatggtgcttagagtggtgg

SEQ ID NO: 144096 - DNA, 23 bp, Artificial sequence
  SiRNA target sequence
ttgatggtgcttagagtggtggg

SEQ ID NO: 144097 - DNA, 23 bp, Artificial sequence
  SiRNA target sequence
tgatggtgcttagagtggtgggt

SEQ ID NO: 144098 - DNA, 23 bp, Artificial sequence
  SiRNA target sequence
gatggtgcttagagtggtgggtc

SEQ ID NO: 144099 - DNA, 23 bp, Artificial sequence
  SiRNA target sequence
atggtgcttagagtggtgggtct

SEQ ID NO: 144100 - DNA, 23 bp, Artificial sequence
  SiRNA target sequence
tggtgcttagagtggtgggtctc

SEQ ID NO: 144101 - DNA, 23 bp, Artificial sequence
  SiRNA target sequence
ggtgcttagagtggtgggtctcc

SEQ ID NO: 144102 - DNA, 23 bp, Artificial sequence
  SiRNA target sequence
gtgcttagagtggtgggtctcca

SEQ ID NO: 144103 - DNA, 23 bp, Artificial sequence
  SiRNA target sequence
tgcttagagtggtgggtctccat

SEQ ID NO: 144104 - DNA, 23 bp, Artificial sequence
  SiRNA target sequence
gcttagagtggtgggtctccatt

SEQ ID NO: 144105 - DNA, 23 bp, Artificial sequence
  SiRNA target sequence
cttagagtggtgggtctccatta

SEQ ID NO: 144106 - DNA, 23 bp, Artificial sequence
  SiRNA target sequence
ttagagtggtgggtctccattat

SEQ ID NO: 144107 - DNA, 23 bp, Artificial sequence
  SiRNA target sequence
tagagtggtgggtctccattata

SEQ ID NO: 144108 - DNA, 23 bp, Artificial sequence
  SiRNA target sequence
agagtggtgggtctccattatat

SEQ ID NO: 144109 - DNA, 23 bp, Artificial sequence
  SiRNA target sequence
gagtggtgggtctccattatatc

SEQ ID NO: 144110 - DNA, 23 bp, Artificial sequence
  SiRNA target sequence
agtggtgggtctccattatatct

SEQ ID NO: 144111 - DNA, 23 bp, Artificial sequence
  SiRNA target sequence
gtggtgggtctccattatatctt

SEQ ID NO: 144112 - DNA, 23 bp, Artificial sequence
  SiRNA target sequence
tggtgggtctccattatatcttc

SEQ ID NO: 144113 - DNA, 23 bp, Artificial sequence
  SiRNA target sequence
ggtgggtctccattatatcttca

SEQ ID NO: 144114 - DNA, 23 bp, Artificial sequence
  SiRNA target sequence
gtgggtctccattatatcttcac

SEQ ID NO: 144115 - DNA, 23 bp, Artificial sequence
  SiRNA target sequence
tgggtctccattatatcttcact

SEQ ID NO: 144116 - DNA, 23 bp, Artificial sequence
  SiRNA target sequence
gggtctccattatatcttcactt

SEQ ID NO: 144117 - DNA, 23 bp, Artificial sequence
  SiRNA target sequence
ggtctccattatatcttcactta

SEQ ID NO: 144118 - DNA, 23 bp, Artificial sequence
  SiRNA target sequence
gtctccattatatcttcacttat

SEQ ID NO: 144119 - DNA, 23 bp, Artificial sequence
  SiRNA target sequence
tctccattatatcttcacttata

SEQ ID NO: 144120 - DNA, 23 bp, Artificial sequence
  SiRNA target sequence
ctccattatatcttcacttatat

SEQ ID NO: 144121 - DNA, 23 bp, Artificial sequence
  SiRNA target sequence
tccattatatcttcacttatata

SEQ ID NO: 144122 - DNA, 23 bp, Artificial sequence
  SiRNA target sequence
ccattatatcttcacttatataa

SEQ ID NO: 144123 - DNA, 23 bp, Artificial sequence
  SiRNA target sequence
cattatatcttcacttatataag

SEQ ID NO: 144124 - DNA, 23 bp, Artificial sequence
  SiRNA target sequence
attatatcttcacttatataagg

SEQ ID NO: 144125 - DNA, 23 bp, Artificial sequence
  SiRNA target sequence
ttatatcttcacttatataaggc

SEQ ID NO: 144126 - DNA, 23 bp, Artificial sequence
  SiRNA target sequence
tatatcttcacttatataaggct

SEQ ID NO: 144127 - DNA, 23 bp, Artificial sequence
  SiRNA target sequence
atatcttcacttatataaggctc

SEQ ID NO: 144128 - DNA, 23 bp, Artificial sequence
  SiRNA target sequence
tatcttcacttatataaggctct

SEQ ID NO: 144129 - DNA, 23 bp, Artificial sequence
  SiRNA target sequence
atcttcacttatataaggctcta

SEQ ID NO: 144130 - DNA, 23 bp, Artificial sequence
  SiRNA target sequence
tcttcacttatataaggctctag

SEQ ID NO: 144131 - DNA, 23 bp, Artificial sequence
  SiRNA target sequence
cttcacttatataaggctctaga

SEQ ID NO: 144132 - DNA, 23 bp, Artificial sequence
  SiRNA target sequence
ttcacttatataaggctctagag

SEQ ID NO: 144133 - DNA, 23 bp, Artificial sequence
  SiRNA target sequence
tcacttatataaggctctagaga

SEQ ID NO: 144134 - DNA, 23 bp, Artificial sequence
  SiRNA target sequence
cacttatataaggctctagagat

SEQ ID NO: 144135 - DNA, 23 bp, Artificial sequence
  SiRNA target sequence
acttatataaggctctagagatt

SEQ ID NO: 144136 - DNA, 23 bp, Artificial sequence
  SiRNA target sequence
cttatataaggctctagagattt

SEQ ID NO: 144137 - DNA, 23 bp, Artificial sequence
  SiRNA target sequence
ttatataaggctctagagattta

SEQ ID NO: 144138 - DNA, 23 bp, Artificial sequence
  SiRNA target sequence
tatataaggctctagagatttat

SEQ ID NO: 144139 - DNA, 23 bp, Artificial sequence
  SiRNA target sequence
atataaggctctagagatttata

SEQ ID NO: 144140 - DNA, 23 bp, Artificial sequence
  SiRNA target sequence
tataaggctctagagatttataa

SEQ ID NO: 144141 - DNA, 23 bp, Artificial sequence
  SiRNA target sequence
ataaggctctagagatttataac

SEQ ID NO: 144142 - DNA, 23 bp, Artificial sequence
  SiRNA target sequence
taaggctctagagatttataact

SEQ ID NO: 144143 - DNA, 23 bp, Artificial sequence
  SiRNA target sequence
aaggctctagagatttataacta

SEQ ID NO: 144144 - DNA, 23 bp, Artificial sequence
  SiRNA target sequence
aggctctagagatttataactat

SEQ ID NO: 144145 - DNA, 23 bp, Artificial sequence
  SiRNA target sequence
ggctctagagatttataactata

SEQ ID NO: 144146 - DNA, 23 bp, Artificial sequence
  SiRNA target sequence
gctctagagatttataactatat

SEQ ID NO: 144147 - DNA, 23 bp, Artificial sequence
  SiRNA target sequence
ctctagagatttataactatatt

SEQ ID NO: 144148 - DNA, 23 bp, Artificial sequence
  SiRNA target sequence
tctagagatttataactatattt

SEQ ID NO: 144149 - DNA, 23 bp, Artificial sequence
  SiRNA target sequence
ctagagatttataactatatttc

SEQ ID NO: 144150 - DNA, 23 bp, Artificial sequence
  SiRNA target sequence
tagagatttataactatatttca

SEQ ID NO: 144151 - DNA, 23 bp, Artificial sequence
  SiRNA target sequence
agagatttataactatatttcag

SEQ ID NO: 144152 - DNA, 23 bp, Artificial sequence
  SiRNA target sequence
gagatttataactatatttcaga

SEQ ID NO: 144153 - DNA, 23 bp, Artificial sequence
  SiRNA target sequence
agatttataactatatttcagat

SEQ ID NO: 144154 - DNA, 23 bp, Artificial sequence
  SiRNA target sequence
gatttataactatatttcagatt

SEQ ID NO: 144155 - DNA, 23 bp, Artificial sequence
  SiRNA target sequence
atttataactatatttcagattt

SEQ ID NO: 144156 - DNA, 23 bp, Artificial sequence
  SiRNA target sequence
tttataactatatttcagatttg

SEQ ID NO: 144157 - DNA, 23 bp, Artificial sequence
  SiRNA target sequence
ttataactatatttcagatttgg

SEQ ID NO: 144158 - DNA, 23 bp, Artificial sequence
  SiRNA target sequence
tataactatatttcagatttgga

SEQ ID NO: 144159 - DNA, 23 bp, Artificial sequence
  SiRNA target sequence
ataactatatttcagatttggaa

SEQ ID NO: 144160 - DNA, 23 bp, Artificial sequence
  SiRNA target sequence
taactatatttcagatttggaag

SEQ ID NO: 144161 - DNA, 23 bp, Artificial sequence
  SiRNA target sequence
aactatatttcagatttggaaga

SEQ ID NO: 144162 - DNA, 23 bp, Artificial sequence
  SiRNA target sequence
actatatttcagatttggaagag

SEQ ID NO: 144163 - DNA, 23 bp, Artificial sequence
  SiRNA target sequence
ctatatttcagatttggaagagt

SEQ ID NO: 144164 - DNA, 23 bp, Artificial sequence
  SiRNA target sequence
tatatttcagatttggaagagtg

SEQ ID NO: 144165 - DNA, 23 bp, Artificial sequence
  SiRNA target sequence
atatttcagatttggaagagtga

SEQ ID NO: 144166 - DNA, 23 bp, Artificial sequence
  SiRNA target sequence
tatttcagatttggaagagtgaa

SEQ ID NO: 144167 - DNA, 23 bp, Artificial sequence
  SiRNA target sequence
atttcagatttggaagagtgaac

SEQ ID NO: 144168 - DNA, 23 bp, Artificial sequence
  SiRNA target sequence
tttcagatttggaagagtgaaca

SEQ ID NO: 144169 - DNA, 23 bp, Artificial sequence
  SiRNA target sequence
ttcagatttggaagagtgaacat

SEQ ID NO: 144170 - DNA, 24 bp, Artificial sequence
  SiRNA target sequence
ttaatttatgcataattgaccatc

SEQ ID NO: 144171 - DNA, 24 bp, Artificial sequence
  SiRNA target sequence
taatttatgcataattgaccatca

SEQ ID NO: 144172 - DNA, 24 bp, Artificial sequence
  SiRNA target sequence
aatttatgcataattgaccatcat

SEQ ID NO: 144173 - DNA, 24 bp, Artificial sequence
  SiRNA target sequence
atttatgcataattgaccatcatc

SEQ ID NO: 144174 - DNA, 24 bp, Artificial sequence
  SiRNA target sequence
tttatgcataattgaccatcatca

SEQ ID NO: 144175 - DNA, 24 bp, Artificial sequence
  SiRNA target sequence
ttatgcataattgaccatcatcag

SEQ ID NO: 144176 - DNA, 24 bp, Artificial sequence
  SiRNA target sequence
tatgcataattgaccatcatcagt

SEQ ID NO: 144177 - DNA, 24 bp, Artificial sequence
  SiRNA target sequence
atgcataattgaccatcatcagta

SEQ ID NO: 144178 - DNA, 24 bp, Artificial sequence
  SiRNA target sequence
tgcataattgaccatcatcagtaa

SEQ ID NO: 144179 - DNA, 24 bp, Artificial sequence
  SiRNA target sequence
gcataattgaccatcatcagtaat

SEQ ID NO: 144180 - DNA, 24 bp, Artificial sequence
  SiRNA target sequence
cataattgaccatcatcagtaata

SEQ ID NO: 144181 - DNA, 24 bp, Artificial sequence
  SiRNA target sequence
ataattgaccatcatcagtaataa

SEQ ID NO: 144182 - DNA, 24 bp, Artificial sequence
  SiRNA target sequence
taattgaccatcatcagtaataaa

SEQ ID NO: 144183 - DNA, 24 bp, Artificial sequence
  SiRNA target sequence
aattgaccatcatcagtaataaac

SEQ ID NO: 144184 - DNA, 24 bp, Artificial sequence
  SiRNA target sequence
attgaccatcatcagtaataaaca

SEQ ID NO: 144185 - DNA, 24 bp, Artificial sequence
  SiRNA target sequence
ttgaccatcatcagtaataaacac

SEQ ID NO: 144186 - DNA, 24 bp, Artificial sequence
  SiRNA target sequence
tgaccatcatcagtaataaacaca

SEQ ID NO: 144187 - DNA, 24 bp, Artificial sequence
  SiRNA target sequence
gaccatcatcagtaataaacacat

SEQ ID NO: 144188 - DNA, 24 bp, Artificial sequence
  SiRNA target sequence
accatcatcagtaataaacacatt

SEQ ID NO: 144189 - DNA, 24 bp, Artificial sequence
  SiRNA target sequence
ccatcatcagtaataaacacatta

SEQ ID NO: 144190 - DNA, 24 bp, Artificial sequence
  SiRNA target sequence
catcatcagtaataaacacattac

SEQ ID NO: 144191 - DNA, 24 bp, Artificial sequence
  SiRNA target sequence
atcatcagtaataaacacattacc

SEQ ID NO: 144192 - DNA, 24 bp, Artificial sequence
  SiRNA target sequence
tcatcagtaataaacacattacct

SEQ ID NO: 144193 - DNA, 24 bp, Artificial sequence
  SiRNA target sequence
catcagtaataaacacattacctt

SEQ ID NO: 144194 - DNA, 24 bp, Artificial sequence
  SiRNA target sequence
atcagtaataaacacattaccttt

SEQ ID NO: 144195 - DNA, 24 bp, Artificial sequence
  SiRNA target sequence
tcagtaataaacacattacctttc

SEQ ID NO: 144196 - DNA, 24 bp, Artificial sequence
  SiRNA target sequence
cagtaataaacacattacctttct

SEQ ID NO: 144197 - DNA, 24 bp, Artificial sequence
  SiRNA target sequence
agtaataaacacattacctttctt

SEQ ID NO: 144198 - DNA, 24 bp, Artificial sequence
  SiRNA target sequence
gtaataaacacattacctttcttt

SEQ ID NO: 144199 - DNA, 24 bp, Artificial sequence
  SiRNA target sequence
taataaacacattacctttctttt

SEQ ID NO: 144200 - DNA, 24 bp, Artificial sequence
  SiRNA target sequence
aataaacacattacctttcttttc

SEQ ID NO: 144201 - DNA, 24 bp, Artificial sequence
  SiRNA target sequence
ataaacacattacctttcttttct

SEQ ID NO: 144202 - DNA, 24 bp, Artificial sequence
  SiRNA target sequence
taaacacattacctttcttttcta

SEQ ID NO: 144203 - DNA, 24 bp, Artificial sequence
  SiRNA target sequence
aaacacattacctttcttttctac

SEQ ID NO: 144204 - DNA, 24 bp, Artificial sequence
  SiRNA target sequence
aacacattacctttcttttctacc

SEQ ID NO: 144205 - DNA, 24 bp, Artificial sequence
  SiRNA target sequence
acacattacctttcttttctacca

SEQ ID NO: 144206 - DNA, 24 bp, Artificial sequence
  SiRNA target sequence
cacattacctttcttttctaccac

SEQ ID NO: 144207 - DNA, 24 bp, Artificial sequence
  SiRNA target sequence
acattacctttcttttctaccaca

SEQ ID NO: 144208 - DNA, 24 bp, Artificial sequence
  SiRNA target sequence
cattacctttcttttctaccacac

SEQ ID NO: 144209 - DNA, 24 bp, Artificial sequence
  SiRNA target sequence
attacctttcttttctaccacaca

SEQ ID NO: 144210 - DNA, 24 bp, Artificial sequence
  SiRNA target sequence
ttacctttcttttctaccacacat

SEQ ID NO: 144211 - DNA, 24 bp, Artificial sequence
  SiRNA target sequence
tacctttcttttctaccacacatt

SEQ ID NO: 144212 - DNA, 24 bp, Artificial sequence
  SiRNA target sequence
acctttcttttctaccacacattt

SEQ ID NO: 144213 - DNA, 24 bp, Artificial sequence
  SiRNA target sequence
cctttcttttctaccacacatttt

SEQ ID NO: 144214 - DNA, 24 bp, Artificial sequence
  SiRNA target sequence
ctttcttttctaccacacattttt

SEQ ID NO: 144215 - DNA, 24 bp, Artificial sequence
  SiRNA target sequence
tttcttttctaccacacatttttg

SEQ ID NO: 144216 - DNA, 24 bp, Artificial sequence
  SiRNA target sequence
ttcttttctaccacacatttttga

SEQ ID NO: 144217 - DNA, 24 bp, Artificial sequence
  SiRNA target sequence
tcttttctaccacacatttttgat

SEQ ID NO: 144218 - DNA, 24 bp, Artificial sequence
  SiRNA target sequence
cttttctaccacacatttttgata

SEQ ID NO: 144219 - DNA, 24 bp, Artificial sequence
  SiRNA target sequence
ttttctaccacacatttttgatat

SEQ ID NO: 144220 - DNA, 24 bp, Artificial sequence
  SiRNA target sequence
tttctaccacacatttttgatata

SEQ ID NO: 144221 - DNA, 24 bp, Artificial sequence
  SiRNA target sequence
ttctaccacacatttttgatatat

SEQ ID NO: 144222 - DNA, 24 bp, Artificial sequence
  SiRNA target sequence
tctaccacacatttttgatatatt

SEQ ID NO: 144223 - DNA, 24 bp, Artificial sequence
  SiRNA target sequence
ctaccacacatttttgatatattt

SEQ ID NO: 144224 - DNA, 24 bp, Artificial sequence
  SiRNA target sequence
taccacacatttttgatatatttc

SEQ ID NO: 144225 - DNA, 24 bp, Artificial sequence
  SiRNA target sequence
accacacatttttgatatatttca

SEQ ID NO: 144226 - DNA, 24 bp, Artificial sequence
  SiRNA target sequence
ccacacatttttgatatatttcat

SEQ ID NO: 144227 - DNA, 24 bp, Artificial sequence
  SiRNA target sequence
cacacatttttgatatatttcatt

SEQ ID NO: 144228 - DNA, 24 bp, Artificial sequence
  SiRNA target sequence
acacatttttgatatatttcatta

SEQ ID NO: 144229 - DNA, 24 bp, Artificial sequence
  SiRNA target sequence
cacatttttgatatatttcattaa

SEQ ID NO: 144230 - DNA, 24 bp, Artificial sequence
  SiRNA target sequence
acatttttgatatatttcattaac

SEQ ID NO: 144231 - DNA, 24 bp, Artificial sequence
  SiRNA target sequence
catttttgatatatttcattaact

SEQ ID NO: 144232 - DNA, 24 bp, Artificial sequence
  SiRNA target sequence
atttttgatatatttcattaacta

SEQ ID NO: 144233 - DNA, 24 bp, Artificial sequence
  SiRNA target sequence
tttttgatatatttcattaactac

SEQ ID NO: 144234 - DNA, 24 bp, Artificial sequence
  SiRNA target sequence
ttttgatatatttcattaactaca

SEQ ID NO: 144235 - DNA, 24 bp, Artificial sequence
  SiRNA target sequence
tttgatatatttcattaactacat

SEQ ID NO: 144236 - DNA, 24 bp, Artificial sequence
  SiRNA target sequence
ttgatatatttcattaactacatc

SEQ ID NO: 144237 - DNA, 24 bp, Artificial sequence
  SiRNA target sequence
tgatatatttcattaactacatcc

SEQ ID NO: 144238 - DNA, 24 bp, Artificial sequence
  SiRNA target sequence
gatatatttcattaactacatccc

SEQ ID NO: 144239 - DNA, 24 bp, Artificial sequence
  SiRNA target sequence
atatatttcattaactacatccca

SEQ ID NO: 144240 - DNA, 24 bp, Artificial sequence
  SiRNA target sequence
tatatttcattaactacatcccaa

SEQ ID NO: 144241 - DNA, 24 bp, Artificial sequence
  SiRNA target sequence
atatttcattaactacatcccaat

SEQ ID NO: 144242 - DNA, 24 bp, Artificial sequence
  SiRNA target sequence
tatttcattaactacatcccaatc

SEQ ID NO: 144243 - DNA, 24 bp, Artificial sequence
  SiRNA target sequence
atttcattaactacatcccaatca

SEQ ID NO: 144244 - DNA, 24 bp, Artificial sequence
  SiRNA target sequence
tttcattaactacatcccaatcaa

SEQ ID NO: 144245 - DNA, 24 bp, Artificial sequence
  SiRNA target sequence
ttcattaactacatcccaatcaat

SEQ ID NO: 144246 - DNA, 24 bp, Artificial sequence
  SiRNA target sequence
tcattaactacatcccaatcaatt

SEQ ID NO: 144247 - DNA, 24 bp, Artificial sequence
  SiRNA target sequence
cattaactacatcccaatcaatta

SEQ ID NO: 144248 - DNA, 24 bp, Artificial sequence
  SiRNA target sequence
attaactacatcccaatcaattac

SEQ ID NO: 144249 - DNA, 24 bp, Artificial sequence
  SiRNA target sequence
ttaactacatcccaatcaattaca

SEQ ID NO: 144250 - DNA, 24 bp, Artificial sequence
  SiRNA target sequence
taactacatcccaatcaattacat

SEQ ID NO: 144251 - DNA, 24 bp, Artificial sequence
  SiRNA target sequence
aactacatcccaatcaattacatt

SEQ ID NO: 144252 - DNA, 24 bp, Artificial sequence
  SiRNA target sequence
actacatcccaatcaattacattc

SEQ ID NO: 144253 - DNA, 24 bp, Artificial sequence
  SiRNA target sequence
ctacatcccaatcaattacattcc

SEQ ID NO: 144254 - DNA, 24 bp, Artificial sequence
  SiRNA target sequence
tacatcccaatcaattacattcca

SEQ ID NO: 144255 - DNA, 24 bp, Artificial sequence
  SiRNA target sequence
acatcccaatcaattacattccac

SEQ ID NO: 144256 - DNA, 24 bp, Artificial sequence
  SiRNA target sequence
catcccaatcaattacattccacc

SEQ ID NO: 144257 - DNA, 24 bp, Artificial sequence
  SiRNA target sequence
atcccaatcaattacattccacca

SEQ ID NO: 144258 - DNA, 24 bp, Artificial sequence
  SiRNA target sequence
tcccaatcaattacattccaccat

SEQ ID NO: 144259 - DNA, 24 bp, Artificial sequence
  SiRNA target sequence
cccaatcaattacattccaccatt

SEQ ID NO: 144260 - DNA, 24 bp, Artificial sequence
  SiRNA target sequence
ccaatcaattacattccaccattc

SEQ ID NO: 144261 - DNA, 24 bp, Artificial sequence
  SiRNA target sequence
caatcaattacattccaccattca

SEQ ID NO: 144262 - DNA, 24 bp, Artificial sequence
  SiRNA target sequence
aatcaattacattccaccattcat

SEQ ID NO: 144263 - DNA, 24 bp, Artificial sequence
  SiRNA target sequence
atcaattacattccaccattcatt

SEQ ID NO: 144264 - DNA, 24 bp, Artificial sequence
  SiRNA target sequence
tcaattacattccaccattcatta

SEQ ID NO: 144265 - DNA, 24 bp, Artificial sequence
  SiRNA target sequence
caattacattccaccattcattaa

SEQ ID NO: 144266 - DNA, 24 bp, Artificial sequence
  SiRNA target sequence
aattacattccaccattcattaat

SEQ ID NO: 144267 - DNA, 24 bp, Artificial sequence
  SiRNA target sequence
attacattccaccattcattaatg

SEQ ID NO: 144268 - DNA, 24 bp, Artificial sequence
  SiRNA target sequence
ttacattccaccattcattaatgt

SEQ ID NO: 144269 - DNA, 24 bp, Artificial sequence
  SiRNA target sequence
tacattccaccattcattaatgta

SEQ ID NO: 144270 - DNA, 24 bp, Artificial sequence
  SiRNA target sequence
acattccaccattcattaatgtat

SEQ ID NO: 144271 - DNA, 24 bp, Artificial sequence
  SiRNA target sequence
cattccaccattcattaatgtatt

SEQ ID NO: 144272 - DNA, 24 bp, Artificial sequence
  SiRNA target sequence
attccaccattcattaatgtattc

SEQ ID NO: 144273 - DNA, 24 bp, Artificial sequence
  SiRNA target sequence
ttccaccattcattaatgtattct

SEQ ID NO: 144274 - DNA, 24 bp, Artificial sequence
  SiRNA target sequence
tccaccattcattaatgtattctt

SEQ ID NO: 144275 - DNA, 24 bp, Artificial sequence
  SiRNA target sequence
ccaccattcattaatgtattcttt

SEQ ID NO: 144276 - DNA, 24 bp, Artificial sequence
  SiRNA target sequence
caccattcattaatgtattctttt

SEQ ID NO: 144277 - DNA, 24 bp, Artificial sequence
  SiRNA target sequence
accattcattaatgtattcttttc

SEQ ID NO: 144278 - DNA, 24 bp, Artificial sequence
  SiRNA target sequence
ccattcattaatgtattcttttct

SEQ ID NO: 144279 - DNA, 24 bp, Artificial sequence
  SiRNA target sequence
cattcattaatgtattcttttctc

SEQ ID NO: 144280 - DNA, 24 bp, Artificial sequence
  SiRNA target sequence
attcattaatgtattcttttctcc

SEQ ID NO: 144281 - DNA, 24 bp, Artificial sequence
  SiRNA target sequence
ttcattaatgtattcttttctcct

SEQ ID NO: 144282 - DNA, 24 bp, Artificial sequence
  SiRNA target sequence
tcattaatgtattcttttctccta

SEQ ID NO: 144283 - DNA, 24 bp, Artificial sequence
  SiRNA target sequence
cattaatgtattcttttctcctat

SEQ ID NO: 144284 - DNA, 24 bp, Artificial sequence
  SiRNA target sequence
attaatgtattcttttctcctatt

SEQ ID NO: 144285 - DNA, 24 bp, Artificial sequence
  SiRNA target sequence
ttaatgtattcttttctcctattt

SEQ ID NO: 144286 - DNA, 24 bp, Artificial sequence
  SiRNA target sequence
taatgtattcttttctcctatttt

SEQ ID NO: 144287 - DNA, 24 bp, Artificial sequence
  SiRNA target sequence
aatgtattcttttctcctattttt

SEQ ID NO: 144288 - DNA, 24 bp, Artificial sequence
  SiRNA target sequence
atgtattcttttctcctattttta

SEQ ID NO: 144289 - DNA, 24 bp, Artificial sequence
  SiRNA target sequence
tgtattcttttctcctatttttat

SEQ ID NO: 144290 - DNA, 24 bp, Artificial sequence
  SiRNA target sequence
gtattcttttctcctatttttata

SEQ ID NO: 144291 - DNA, 24 bp, Artificial sequence
  SiRNA target sequence
tattcttttctcctatttttatac

SEQ ID NO: 144292 - DNA, 24 bp, Artificial sequence
  SiRNA target sequence
attcttttctcctatttttatact

SEQ ID NO: 144293 - DNA, 24 bp, Artificial sequence
  SiRNA target sequence
ttcttttctcctatttttatactg

SEQ ID NO: 144294 - DNA, 24 bp, Artificial sequence
  SiRNA target sequence
tcttttctcctatttttatactgt

SEQ ID NO: 144295 - DNA, 24 bp, Artificial sequence
  SiRNA target sequence
cttttctcctatttttatactgta

SEQ ID NO: 144296 - DNA, 24 bp, Artificial sequence
  SiRNA target sequence
ttttctcctatttttatactgtaa

SEQ ID NO: 144297 - DNA, 24 bp, Artificial sequence
  SiRNA target sequence
tttctcctatttttatactgtaaa

SEQ ID NO: 144298 - DNA, 24 bp, Artificial sequence
  SiRNA target sequence
ttctcctatttttatactgtaaat

SEQ ID NO: 144299 - DNA, 24 bp, Artificial sequence
  SiRNA target sequence
tctcctatttttatactgtaaata

SEQ ID NO: 144300 - DNA, 24 bp, Artificial sequence
  SiRNA target sequence
ctcctatttttatactgtaaataa

SEQ ID NO: 144301 - DNA, 24 bp, Artificial sequence
  SiRNA target sequence
tcctatttttatactgtaaataat

SEQ ID NO: 144302 - DNA, 24 bp, Artificial sequence
  SiRNA target sequence
cctatttttatactgtaaataata

SEQ ID NO: 144303 - DNA, 24 bp, Artificial sequence
  SiRNA target sequence
ctatttttatactgtaaataatac

SEQ ID NO: 144304 - DNA, 24 bp, Artificial sequence
  SiRNA target sequence
tatttttatactgtaaataatacg

SEQ ID NO: 144305 - DNA, 24 bp, Artificial sequence
  SiRNA target sequence
atttttatactgtaaataatacgc

SEQ ID NO: 144306 - DNA, 24 bp, Artificial sequence
  SiRNA target sequence
tttttatactgtaaataatacgca

SEQ ID NO: 144307 - DNA, 24 bp, Artificial sequence
  SiRNA target sequence
ttttatactgtaaataatacgcat

SEQ ID NO: 144308 - DNA, 24 bp, Artificial sequence
  SiRNA target sequence
tttatactgtaaataatacgcatg

SEQ ID NO: 144309 - DNA, 24 bp, Artificial sequence
  SiRNA target sequence
ttatactgtaaataatacgcatgt

SEQ ID NO: 144310 - DNA, 24 bp, Artificial sequence
  SiRNA target sequence
tatactgtaaataatacgcatgtt

SEQ ID NO: 144311 - DNA, 24 bp, Artificial sequence
  SiRNA target sequence
atactgtaaataatacgcatgttc

SEQ ID NO: 144312 - DNA, 24 bp, Artificial sequence
  SiRNA target sequence
tactgtaaataatacgcatgttcc

SEQ ID NO: 144313 - DNA, 24 bp, Artificial sequence
  SiRNA target sequence
actgtaaataatacgcatgttccc

SEQ ID NO: 144314 - DNA, 24 bp, Artificial sequence
  SiRNA target sequence
ctgtaaataatacgcatgttccca

SEQ ID NO: 144315 - DNA, 24 bp, Artificial sequence
  SiRNA target sequence
tgtaaataatacgcatgttcccat

SEQ ID NO: 144316 - DNA, 24 bp, Artificial sequence
  SiRNA target sequence
gtaaataatacgcatgttcccata

SEQ ID NO: 144317 - DNA, 24 bp, Artificial sequence
  SiRNA target sequence
taaataatacgcatgttcccatac

SEQ ID NO: 144318 - DNA, 24 bp, Artificial sequence
  SiRNA target sequence
aaataatacgcatgttcccataca

SEQ ID NO: 144319 - DNA, 24 bp, Artificial sequence
  SiRNA target sequence
aataatacgcatgttcccatacat

SEQ ID NO: 144320 - DNA, 24 bp, Artificial sequence
  SiRNA target sequence
ataatacgcatgttcccatacatc

SEQ ID NO: 144321 - DNA, 24 bp, Artificial sequence
  SiRNA target sequence
taatacgcatgttcccatacatca

SEQ ID NO: 144322 - DNA, 24 bp, Artificial sequence
  SiRNA target sequence
aatacgcatgttcccatacatcaa

SEQ ID NO: 144323 - DNA, 24 bp, Artificial sequence
  SiRNA target sequence
atacgcatgttcccatacatcaag

SEQ ID NO: 144324 - DNA, 24 bp, Artificial sequence
  SiRNA target sequence
tacgcatgttcccatacatcaaga

SEQ ID NO: 144325 - DNA, 24 bp, Artificial sequence
  SiRNA target sequence
acgcatgttcccatacatcaagac

SEQ ID NO: 144326 - DNA, 24 bp, Artificial sequence
  SiRNA target sequence
cgcatgttcccatacatcaagaca

SEQ ID NO: 144327 - DNA, 24 bp, Artificial sequence
  SiRNA target sequence
gcatgttcccatacatcaagacat

SEQ ID NO: 144328 - DNA, 24 bp, Artificial sequence
  SiRNA target sequence
catgttcccatacatcaagacata

SEQ ID NO: 144329 - DNA, 24 bp, Artificial sequence
  SiRNA target sequence
atgttcccatacatcaagacatag

SEQ ID NO: 144330 - DNA, 24 bp, Artificial sequence
  SiRNA target sequence
tgttcccatacatcaagacatagt

SEQ ID NO: 144331 - DNA, 24 bp, Artificial sequence
  SiRNA target sequence
gttcccatacatcaagacatagta

SEQ ID NO: 144332 - DNA, 24 bp, Artificial sequence
  SiRNA target sequence
ttcccatacatcaagacatagtaa

SEQ ID NO: 144333 - DNA, 24 bp, Artificial sequence
  SiRNA target sequence
tcccatacatcaagacatagtaaa

SEQ ID NO: 144334 - DNA, 24 bp, Artificial sequence
  SiRNA target sequence
cccatacatcaagacatagtaaag

SEQ ID NO: 144335 - DNA, 24 bp, Artificial sequence
  SiRNA target sequence
ccatacatcaagacatagtaaagg

SEQ ID NO: 144336 - DNA, 24 bp, Artificial sequence
  SiRNA target sequence
catacatcaagacatagtaaagga

SEQ ID NO: 144337 - DNA, 24 bp, Artificial sequence
  SiRNA target sequence
atacatcaagacatagtaaaggaa

SEQ ID NO: 144338 - DNA, 24 bp, Artificial sequence
  SiRNA target sequence
tacatcaagacatagtaaaggaat

SEQ ID NO: 144339 - DNA, 24 bp, Artificial sequence
  SiRNA target sequence
acatcaagacatagtaaaggaata

SEQ ID NO: 144340 - DNA, 24 bp, Artificial sequence
  SiRNA target sequence
catcaagacatagtaaaggaatac

SEQ ID NO: 144341 - DNA, 24 bp, Artificial sequence
  SiRNA target sequence
atcaagacatagtaaaggaataca

SEQ ID NO: 144342 - DNA, 24 bp, Artificial sequence
  SiRNA target sequence
tcaagacatagtaaaggaatacat

SEQ ID NO: 144343 - DNA, 24 bp, Artificial sequence
  SiRNA target sequence
caagacatagtaaaggaatacatt

SEQ ID NO: 144344 - DNA, 24 bp, Artificial sequence
  SiRNA target sequence
aagacatagtaaaggaatacattc

SEQ ID NO: 144345 - DNA, 24 bp, Artificial sequence
  SiRNA target sequence
agacatagtaaaggaatacattca

SEQ ID NO: 144346 - DNA, 24 bp, Artificial sequence
  SiRNA target sequence
gacatagtaaaggaatacattcac

SEQ ID NO: 144347 - DNA, 24 bp, Artificial sequence
  SiRNA target sequence
acatagtaaaggaatacattcacc

SEQ ID NO: 144348 - DNA, 24 bp, Artificial sequence
  SiRNA target sequence
catagtaaaggaatacattcacca

SEQ ID NO: 144349 - DNA, 24 bp, Artificial sequence
  SiRNA target sequence
atagtaaaggaatacattcaccat

SEQ ID NO: 144350 - DNA, 24 bp, Artificial sequence
  SiRNA target sequence
tagtaaaggaatacattcaccatc

SEQ ID NO: 144351 - DNA, 24 bp, Artificial sequence
  SiRNA target sequence
agtaaaggaatacattcaccatcc

SEQ ID NO: 144352 - DNA, 24 bp, Artificial sequence
  SiRNA target sequence
gtaaaggaatacattcaccatcct

SEQ ID NO: 144353 - DNA, 24 bp, Artificial sequence
  SiRNA target sequence
taaaggaatacattcaccatcctc

SEQ ID NO: 144354 - DNA, 24 bp, Artificial sequence
  SiRNA target sequence
aaaggaatacattcaccatcctcc

SEQ ID NO: 144355 - DNA, 24 bp, Artificial sequence
  SiRNA target sequence
aaggaatacattcaccatcctcca

SEQ ID NO: 144356 - DNA, 24 bp, Artificial sequence
  SiRNA target sequence
aggaatacattcaccatcctccat

SEQ ID NO: 144357 - DNA, 24 bp, Artificial sequence
  SiRNA target sequence
ggaatacattcaccatcctccatc

SEQ ID NO: 144358 - DNA, 24 bp, Artificial sequence
  SiRNA target sequence
gaatacattcaccatcctccatca

SEQ ID NO: 144359 - DNA, 24 bp, Artificial sequence
  SiRNA target sequence
aatacattcaccatcctccatcat

SEQ ID NO: 144360 - DNA, 24 bp, Artificial sequence
  SiRNA target sequence
atacattcaccatcctccatcata

SEQ ID NO: 144361 - DNA, 24 bp, Artificial sequence
  SiRNA target sequence
tacattcaccatcctccatcatag

SEQ ID NO: 144362 - DNA, 24 bp, Artificial sequence
  SiRNA target sequence
acattcaccatcctccatcatagg

SEQ ID NO: 144363 - DNA, 24 bp, Artificial sequence
  SiRNA target sequence
cattcaccatcctccatcatagga

SEQ ID NO: 144364 - DNA, 24 bp, Artificial sequence
  SiRNA target sequence
attcaccatcctccatcataggat

SEQ ID NO: 144365 - DNA, 24 bp, Artificial sequence
  SiRNA target sequence
ttcaccatcctccatcataggatt

SEQ ID NO: 144366 - DNA, 24 bp, Artificial sequence
  SiRNA target sequence
tcaccatcctccatcataggattg

SEQ ID NO: 144367 - DNA, 24 bp, Artificial sequence
  SiRNA target sequence
caccatcctccatcataggattgt

SEQ ID NO: 144368 - DNA, 24 bp, Artificial sequence
  SiRNA target sequence
accatcctccatcataggattgtc

SEQ ID NO: 144369 - DNA, 24 bp, Artificial sequence
  SiRNA target sequence
ccatcctccatcataggattgtct

SEQ ID NO: 144370 - DNA, 24 bp, Artificial sequence
  SiRNA target sequence
catcctccatcataggattgtctt

SEQ ID NO: 144371 - DNA, 24 bp, Artificial sequence
  SiRNA target sequence
atcctccatcataggattgtcttg

SEQ ID NO: 144372 - DNA, 24 bp, Artificial sequence
  SiRNA target sequence
tcctccatcataggattgtcttga

SEQ ID NO: 144373 - DNA, 24 bp, Artificial sequence
  SiRNA target sequence
cctccatcataggattgtcttgat

SEQ ID NO: 144374 - DNA, 24 bp, Artificial sequence
  SiRNA target sequence
ctccatcataggattgtcttgatt

SEQ ID NO: 144375 - DNA, 24 bp, Artificial sequence
  SiRNA target sequence
tccatcataggattgtcttgatta

SEQ ID NO: 144376 - DNA, 24 bp, Artificial sequence
  SiRNA target sequence
ccatcataggattgtcttgattaa

SEQ ID NO: 144377 - DNA, 24 bp, Artificial sequence
  SiRNA target sequence
catcataggattgtcttgattaac

SEQ ID NO: 144378 - DNA, 24 bp, Artificial sequence
  SiRNA target sequence
atcataggattgtcttgattaaca

SEQ ID NO: 144379 - DNA, 24 bp, Artificial sequence
  SiRNA target sequence
tcataggattgtcttgattaacac

SEQ ID NO: 144380 - DNA, 24 bp, Artificial sequence
  SiRNA target sequence
cataggattgtcttgattaacact

SEQ ID NO: 144381 - DNA, 24 bp, Artificial sequence
  SiRNA target sequence
ataggattgtcttgattaacactg

SEQ ID NO: 144382 - DNA, 24 bp, Artificial sequence
  SiRNA target sequence
taggattgtcttgattaacactgg

SEQ ID NO: 144383 - DNA, 24 bp, Artificial sequence
  SiRNA target sequence
aggattgtcttgattaacactggt

SEQ ID NO: 144384 - DNA, 24 bp, Artificial sequence
  SiRNA target sequence
ggattgtcttgattaacactggtc

SEQ ID NO: 144385 - DNA, 24 bp, Artificial sequence
  SiRNA target sequence
gattgtcttgattaacactggtct

SEQ ID NO: 144386 - DNA, 24 bp, Artificial sequence
  SiRNA target sequence
attgtcttgattaacactggtctt

SEQ ID NO: 144387 - DNA, 24 bp, Artificial sequence
  SiRNA target sequence
ttgtcttgattaacactggtctta

SEQ ID NO: 144388 - DNA, 24 bp, Artificial sequence
  SiRNA target sequence
tgtcttgattaacactggtcttaa

SEQ ID NO: 144389 - DNA, 24 bp, Artificial sequence
  SiRNA target sequence
gtcttgattaacactggtcttaat

SEQ ID NO: 144390 - DNA, 24 bp, Artificial sequence
  SiRNA target sequence
tcttgattaacactggtcttaata

SEQ ID NO: 144391 - DNA, 24 bp, Artificial sequence
  SiRNA target sequence
cttgattaacactggtcttaatac

SEQ ID NO: 144392 - DNA, 24 bp, Artificial sequence
  SiRNA target sequence
ttgattaacactggtcttaataca

SEQ ID NO: 144393 - DNA, 24 bp, Artificial sequence
  SiRNA target sequence
tgattaacactggtcttaatacac

SEQ ID NO: 144394 - DNA, 24 bp, Artificial sequence
  SiRNA target sequence
gattaacactggtcttaatacaca

SEQ ID NO: 144395 - DNA, 24 bp, Artificial sequence
  SiRNA target sequence
attaacactggtcttaatacacaa

SEQ ID NO: 144396 - DNA, 24 bp, Artificial sequence
  SiRNA target sequence
ttaacactggtcttaatacacaat

SEQ ID NO: 144397 - DNA, 24 bp, Artificial sequence
  SiRNA target sequence
taacactggtcttaatacacaatt

SEQ ID NO: 144398 - DNA, 24 bp, Artificial sequence
  SiRNA target sequence
aacactggtcttaatacacaattt

SEQ ID NO: 144399 - DNA, 24 bp, Artificial sequence
  SiRNA target sequence
acactggtcttaatacacaattta

SEQ ID NO: 144400 - DNA, 24 bp, Artificial sequence
  SiRNA target sequence
cactggtcttaatacacaatttat

SEQ ID NO: 144401 - DNA, 24 bp, Artificial sequence
  SiRNA target sequence
actggtcttaatacacaatttatc

SEQ ID NO: 144402 - DNA, 24 bp, Artificial sequence
  SiRNA target sequence
ctggtcttaatacacaatttatct

SEQ ID NO: 144403 - DNA, 24 bp, Artificial sequence
  SiRNA target sequence
tggtcttaatacacaatttatctt

SEQ ID NO: 144404 - DNA, 24 bp, Artificial sequence
  SiRNA target sequence
ggtcttaatacacaatttatcttt

SEQ ID NO: 144405 - DNA, 24 bp, Artificial sequence
  SiRNA target sequence
gtcttaatacacaatttatcttta

SEQ ID NO: 144406 - DNA, 24 bp, Artificial sequence
  SiRNA target sequence
tcttaatacacaatttatctttat

SEQ ID NO: 144407 - DNA, 24 bp, Artificial sequence
  SiRNA target sequence
cttaatacacaatttatctttata

SEQ ID NO: 144408 - DNA, 24 bp, Artificial sequence
  SiRNA target sequence
ttaatacacaatttatctttatat

SEQ ID NO: 144409 - DNA, 24 bp, Artificial sequence
  SiRNA target sequence
taatacacaatttatctttatata

SEQ ID NO: 144410 - DNA, 24 bp, Artificial sequence
  SiRNA target sequence
aatacacaatttatctttatatat

SEQ ID NO: 144411 - DNA, 24 bp, Artificial sequence
  SiRNA target sequence
atacacaatttatctttatatatc

SEQ ID NO: 144412 - DNA, 24 bp, Artificial sequence
  SiRNA target sequence
tacacaatttatctttatatatca

SEQ ID NO: 144413 - DNA, 24 bp, Artificial sequence
  SiRNA target sequence
acacaatttatctttatatatcaa

SEQ ID NO: 144414 - DNA, 24 bp, Artificial sequence
  SiRNA target sequence
cacaatttatctttatatatcaac

SEQ ID NO: 144415 - DNA, 24 bp, Artificial sequence
  SiRNA target sequence
acaatttatctttatatatcaacc

SEQ ID NO: 144416 - DNA, 24 bp, Artificial sequence
  SiRNA target sequence
caatttatctttatatatcaacca

SEQ ID NO: 144417 - DNA, 24 bp, Artificial sequence
  SiRNA target sequence
aatttatctttatatatcaaccac

SEQ ID NO: 144418 - DNA, 24 bp, Artificial sequence
  SiRNA target sequence
atttatctttatatatcaaccaca

SEQ ID NO: 144419 - DNA, 24 bp, Artificial sequence
  SiRNA target sequence
tttatctttatatatcaaccacac

SEQ ID NO: 144420 - DNA, 24 bp, Artificial sequence
  SiRNA target sequence
ttatctttatatatcaaccacacc

SEQ ID NO: 144421 - DNA, 24 bp, Artificial sequence
  SiRNA target sequence
tatctttatatatcaaccacaccc

SEQ ID NO: 144422 - DNA, 24 bp, Artificial sequence
  SiRNA target sequence
atctttatatatcaaccacaccca

SEQ ID NO: 144423 - DNA, 24 bp, Artificial sequence
  SiRNA target sequence
tctttatatatcaaccacacccat

SEQ ID NO: 144424 - DNA, 24 bp, Artificial sequence
  SiRNA target sequence
ctttatatatcaaccacacccatc

SEQ ID NO: 144425 - DNA, 24 bp, Artificial sequence
  SiRNA target sequence
tttatatatcaaccacacccatcc

SEQ ID NO: 144426 - DNA, 24 bp, Artificial sequence
  SiRNA target sequence
ttatatatcaaccacacccatcct

SEQ ID NO: 144427 - DNA, 24 bp, Artificial sequence
  SiRNA target sequence
tatatatcaaccacacccatcctg

SEQ ID NO: 144428 - DNA, 24 bp, Artificial sequence
  SiRNA target sequence
atatatcaaccacacccatcctga

SEQ ID NO: 144429 - DNA, 24 bp, Artificial sequence
  SiRNA target sequence
tatatcaaccacacccatcctgat

SEQ ID NO: 144430 - DNA, 24 bp, Artificial sequence
  SiRNA target sequence
atatcaaccacacccatcctgatc

SEQ ID NO: 144431 - DNA, 24 bp, Artificial sequence
  SiRNA target sequence
tatcaaccacacccatcctgatcc

SEQ ID NO: 144432 - DNA, 24 bp, Artificial sequence
  SiRNA target sequence
atcaaccacacccatcctgatcca

SEQ ID NO: 144433 - DNA, 24 bp, Artificial sequence
  SiRNA target sequence
tcaaccacacccatcctgatccaa

SEQ ID NO: 144434 - DNA, 24 bp, Artificial sequence
  SiRNA target sequence
caaccacacccatcctgatccaaa

SEQ ID NO: 144435 - DNA, 24 bp, Artificial sequence
  SiRNA target sequence
aaccacacccatcctgatccaaat

SEQ ID NO: 144436 - DNA, 24 bp, Artificial sequence
  SiRNA target sequence
accacacccatcctgatccaaata

SEQ ID NO: 144437 - DNA, 24 bp, Artificial sequence
  SiRNA target sequence
ccacacccatcctgatccaaataa

SEQ ID NO: 144438 - DNA, 24 bp, Artificial sequence
  SiRNA target sequence
cacacccatcctgatccaaataat

SEQ ID NO: 144439 - DNA, 24 bp, Artificial sequence
  SiRNA target sequence
acacccatcctgatccaaataatt

SEQ ID NO: 144440 - DNA, 24 bp, Artificial sequence
  SiRNA target sequence
cacccatcctgatccaaataattt

SEQ ID NO: 144441 - DNA, 24 bp, Artificial sequence
  SiRNA target sequence
acccatcctgatccaaataatttt

SEQ ID NO: 144442 - DNA, 24 bp, Artificial sequence
  SiRNA target sequence
cccatcctgatccaaataatttta

SEQ ID NO: 144443 - DNA, 24 bp, Artificial sequence
  SiRNA target sequence
ccatcctgatccaaataattttac

SEQ ID NO: 144444 - DNA, 24 bp, Artificial sequence
  SiRNA target sequence
catcctgatccaaataattttaca

SEQ ID NO: 144445 - DNA, 24 bp, Artificial sequence
  SiRNA target sequence
atcctgatccaaataattttacag

SEQ ID NO: 144446 - DNA, 24 bp, Artificial sequence
  SiRNA target sequence
tcctgatccaaataattttacagc

SEQ ID NO: 144447 - DNA, 24 bp, Artificial sequence
  SiRNA target sequence
cctgatccaaataattttacagct

SEQ ID NO: 144448 - DNA, 24 bp, Artificial sequence
  SiRNA target sequence
ctgatccaaataattttacagctt

SEQ ID NO: 144449 - DNA, 24 bp, Artificial sequence
  SiRNA target sequence
tgatccaaataattttacagcttc

SEQ ID NO: 144450 - DNA, 24 bp, Artificial sequence
  SiRNA target sequence
gatccaaataattttacagcttca

SEQ ID NO: 144451 - DNA, 24 bp, Artificial sequence
  SiRNA target sequence
atccaaataattttacagcttcag

SEQ ID NO: 144452 - DNA, 24 bp, Artificial sequence
  SiRNA target sequence
tccaaataattttacagcttcagt

SEQ ID NO: 144453 - DNA, 24 bp, Artificial sequence
  SiRNA target sequence
ccaaataattttacagcttcagta

SEQ ID NO: 144454 - DNA, 24 bp, Artificial sequence
  SiRNA target sequence
caaataattttacagcttcagtat

SEQ ID NO: 144455 - DNA, 24 bp, Artificial sequence
  SiRNA target sequence
aaataattttacagcttcagtatt

SEQ ID NO: 144456 - DNA, 24 bp, Artificial sequence
  SiRNA target sequence
aataattttacagcttcagtatta

SEQ ID NO: 144457 - DNA, 24 bp, Artificial sequence
  SiRNA target sequence
ataattttacagcttcagtattaa

SEQ ID NO: 144458 - DNA, 24 bp, Artificial sequence
  SiRNA target sequence
taattttacagcttcagtattaaa

SEQ ID NO: 144459 - DNA, 24 bp, Artificial sequence
  SiRNA target sequence
aattttacagcttcagtattaaaa

SEQ ID NO: 144460 - DNA, 24 bp, Artificial sequence
  SiRNA target sequence
attttacagcttcagtattaaaat

SEQ ID NO: 144461 - DNA, 24 bp, Artificial sequence
  SiRNA target sequence
ttttacagcttcagtattaaaatt

SEQ ID NO: 144462 - DNA, 24 bp, Artificial sequence
  SiRNA target sequence
tttacagcttcagtattaaaattc

SEQ ID NO: 144463 - DNA, 24 bp, Artificial sequence
  SiRNA target sequence
ttacagcttcagtattaaaattct

SEQ ID NO: 144464 - DNA, 24 bp, Artificial sequence
  SiRNA target sequence
tacagcttcagtattaaaattctc

SEQ ID NO: 144465 - DNA, 24 bp, Artificial sequence
  SiRNA target sequence
acagcttcagtattaaaattctcc

SEQ ID NO: 144466 - DNA, 24 bp, Artificial sequence
  SiRNA target sequence
cagcttcagtattaaaattctcct

SEQ ID NO: 144467 - DNA, 24 bp, Artificial sequence
  SiRNA target sequence
agcttcagtattaaaattctcctt

SEQ ID NO: 144468 - DNA, 24 bp, Artificial sequence
  SiRNA target sequence
gcttcagtattaaaattctcctta

SEQ ID NO: 144469 - DNA, 24 bp, Artificial sequence
  SiRNA target sequence
cttcagtattaaaattctccttaa

SEQ ID NO: 144470 - DNA, 24 bp, Artificial sequence
  SiRNA target sequence
ttcagtattaaaattctccttaaa

SEQ ID NO: 144471 - DNA, 24 bp, Artificial sequence
  SiRNA target sequence
tcagtattaaaattctccttaaat

SEQ ID NO: 144472 - DNA, 24 bp, Artificial sequence
  SiRNA target sequence
cagtattaaaattctccttaaatt

SEQ ID NO: 144473 - DNA, 24 bp, Artificial sequence
  SiRNA target sequence
agtattaaaattctccttaaattt

SEQ ID NO: 144474 - DNA, 24 bp, Artificial sequence
  SiRNA target sequence
gtattaaaattctccttaaattta

SEQ ID NO: 144475 - DNA, 24 bp, Artificial sequence
  SiRNA target sequence
tattaaaattctccttaaatttat

SEQ ID NO: 144476 - DNA, 24 bp, Artificial sequence
  SiRNA target sequence
attaaaattctccttaaatttatt

SEQ ID NO: 144477 - DNA, 24 bp, Artificial sequence
  SiRNA target sequence
ttaaaattctccttaaatttattt

SEQ ID NO: 144478 - DNA, 24 bp, Artificial sequence
  SiRNA target sequence
taaaattctccttaaatttattta

SEQ ID NO: 144479 - DNA, 24 bp, Artificial sequence
  SiRNA target sequence
aaaattctccttaaatttatttat

SEQ ID NO: 144480 - DNA, 24 bp, Artificial sequence
  SiRNA target sequence
aaattctccttaaatttatttatt

SEQ ID NO: 144481 - DNA, 24 bp, Artificial sequence
  SiRNA target sequence
aattctccttaaatttatttattg

SEQ ID NO: 144482 - DNA, 24 bp, Artificial sequence
  SiRNA target sequence
attctccttaaatttatttattga

SEQ ID NO: 144483 - DNA, 24 bp, Artificial sequence
  SiRNA target sequence
ttctccttaaatttatttattgat

SEQ ID NO: 144484 - DNA, 24 bp, Artificial sequence
  SiRNA target sequence
tctccttaaatttatttattgatc

SEQ ID NO: 144485 - DNA, 24 bp, Artificial sequence
  SiRNA target sequence
ctccttaaatttatttattgatcc

SEQ ID NO: 144486 - DNA, 24 bp, Artificial sequence
  SiRNA target sequence
tccttaaatttatttattgatcca

SEQ ID NO: 144487 - DNA, 24 bp, Artificial sequence
  SiRNA target sequence
ccttaaatttatttattgatccaa

SEQ ID NO: 144488 - DNA, 24 bp, Artificial sequence
  SiRNA target sequence
cttaaatttatttattgatccaaa

SEQ ID NO: 144489 - DNA, 24 bp, Artificial sequence
  SiRNA target sequence
ttaaatttatttattgatccaaag

SEQ ID NO: 144490 - DNA, 24 bp, Artificial sequence
  SiRNA target sequence
taaatttatttattgatccaaagt

SEQ ID NO: 144491 - DNA, 24 bp, Artificial sequence
  SiRNA target sequence
aaatttatttattgatccaaagtc

SEQ ID NO: 144492 - DNA, 24 bp, Artificial sequence
  SiRNA target sequence
aatttatttattgatccaaagtct

SEQ ID NO: 144493 - DNA, 24 bp, Artificial sequence
  SiRNA target sequence
atttatttattgatccaaagtctt

SEQ ID NO: 144494 - DNA, 24 bp, Artificial sequence
  SiRNA target sequence
tttatttattgatccaaagtcttt

SEQ ID NO: 144495 - DNA, 24 bp, Artificial sequence
  SiRNA target sequence
ttatttattgatccaaagtctttt

SEQ ID NO: 144496 - DNA, 24 bp, Artificial sequence
  SiRNA target sequence
tatttattgatccaaagtctttta

SEQ ID NO: 144497 - DNA, 24 bp, Artificial sequence
  SiRNA target sequence
atttattgatccaaagtcttttat

SEQ ID NO: 144498 - DNA, 24 bp, Artificial sequence
  SiRNA target sequence
tttattgatccaaagtcttttatt

SEQ ID NO: 144499 - DNA, 24 bp, Artificial sequence
  SiRNA target sequence
ttattgatccaaagtcttttatta

SEQ ID NO: 144500 - DNA, 24 bp, Artificial sequence
  SiRNA target sequence
tattgatccaaagtcttttattat

SEQ ID NO: 144501 - DNA, 24 bp, Artificial sequence
  SiRNA target sequence
attgatccaaagtcttttattata

SEQ ID NO: 144502 - DNA, 24 bp, Artificial sequence
  SiRNA target sequence
ttgatccaaagtcttttattatag

SEQ ID NO: 144503 - DNA, 24 bp, Artificial sequence
  SiRNA target sequence
tgatccaaagtcttttattatagc

SEQ ID NO: 144504 - DNA, 24 bp, Artificial sequence
  SiRNA target sequence
gatccaaagtcttttattatagca

SEQ ID NO: 144505 - DNA, 24 bp, Artificial sequence
  SiRNA target sequence
atccaaagtcttttattatagcac

SEQ ID NO: 144506 - DNA, 24 bp, Artificial sequence
  SiRNA target sequence
tccaaagtcttttattatagcact

SEQ ID NO: 144507 - DNA, 24 bp, Artificial sequence
  SiRNA target sequence
ccaaagtcttttattatagcactt

SEQ ID NO: 144508 - DNA, 24 bp, Artificial sequence
  SiRNA target sequence
caaagtcttttattatagcacttt

SEQ ID NO: 144509 - DNA, 24 bp, Artificial sequence
  SiRNA target sequence
aaagtcttttattatagcactttc

SEQ ID NO: 144510 - DNA, 24 bp, Artificial sequence
  SiRNA target sequence
aagtcttttattatagcactttcc

SEQ ID NO: 144511 - DNA, 24 bp, Artificial sequence
  SiRNA target sequence
agtcttttattatagcactttcca

SEQ ID NO: 144512 - DNA, 24 bp, Artificial sequence
  SiRNA target sequence
gtcttttattatagcactttccaa

SEQ ID NO: 144513 - DNA, 24 bp, Artificial sequence
  SiRNA target sequence
tcttttattatagcactttccaac

SEQ ID NO: 144514 - DNA, 24 bp, Artificial sequence
  SiRNA target sequence
cttttattatagcactttccaact

SEQ ID NO: 144515 - DNA, 24 bp, Artificial sequence
  SiRNA target sequence
ttttattatagcactttccaactg

SEQ ID NO: 144516 - DNA, 24 bp, Artificial sequence
  SiRNA target sequence
tttattatagcactttccaactgg

SEQ ID NO: 144517 - DNA, 24 bp, Artificial sequence
  SiRNA target sequence
ttattatagcactttccaactggg

SEQ ID NO: 144518 - DNA, 24 bp, Artificial sequence
  SiRNA target sequence
tattatagcactttccaactggga

SEQ ID NO: 144519 - DNA, 24 bp, Artificial sequence
  SiRNA target sequence
attatagcactttccaactgggaa

SEQ ID NO: 144520 - DNA, 24 bp, Artificial sequence
  SiRNA target sequence
ttatagcactttccaactgggaag

SEQ ID NO: 144521 - DNA, 24 bp, Artificial sequence
  SiRNA target sequence
tatagcactttccaactgggaaga

SEQ ID NO: 144522 - DNA, 24 bp, Artificial sequence
  SiRNA target sequence
atagcactttccaactgggaagaa

SEQ ID NO: 144523 - DNA, 24 bp, Artificial sequence
  SiRNA target sequence
tagcactttccaactgggaagaaa

SEQ ID NO: 144524 - DNA, 24 bp, Artificial sequence
  SiRNA target sequence
agcactttccaactgggaagaaat

SEQ ID NO: 144525 - DNA, 24 bp, Artificial sequence
  SiRNA target sequence
gcactttccaactgggaagaaatc

SEQ ID NO: 144526 - DNA, 24 bp, Artificial sequence
  SiRNA target sequence
cactttccaactgggaagaaatct

SEQ ID NO: 144527 - DNA, 24 bp, Artificial sequence
  SiRNA target sequence
actttccaactgggaagaaatctt

SEQ ID NO: 144528 - DNA, 24 bp, Artificial sequence
  SiRNA target sequence
ctttccaactgggaagaaatcttt

SEQ ID NO: 144529 - DNA, 24 bp, Artificial sequence
  SiRNA target sequence
tttccaactgggaagaaatctttt

SEQ ID NO: 144530 - DNA, 24 bp, Artificial sequence
  SiRNA target sequence
ttccaactgggaagaaatcttttt

SEQ ID NO: 144531 - DNA, 24 bp, Artificial sequence
  SiRNA target sequence
tccaactgggaagaaatcttttta

SEQ ID NO: 144532 - DNA, 24 bp, Artificial sequence
  SiRNA target sequence
ccaactgggaagaaatctttttat

SEQ ID NO: 144533 - DNA, 24 bp, Artificial sequence
  SiRNA target sequence
caactgggaagaaatctttttatt

SEQ ID NO: 144534 - DNA, 24 bp, Artificial sequence
  SiRNA target sequence
aactgggaagaaatctttttattt

SEQ ID NO: 144535 - DNA, 24 bp, Artificial sequence
  SiRNA target sequence
actgggaagaaatctttttatttt

SEQ ID NO: 144536 - DNA, 24 bp, Artificial sequence
  SiRNA target sequence
ctgggaagaaatctttttattttc

SEQ ID NO: 144537 - DNA, 24 bp, Artificial sequence
  SiRNA target sequence
tgggaagaaatctttttattttct

SEQ ID NO: 144538 - DNA, 24 bp, Artificial sequence
  SiRNA target sequence
gggaagaaatctttttattttctg

SEQ ID NO: 144539 - DNA, 24 bp, Artificial sequence
  SiRNA target sequence
ggaagaaatctttttattttctgg

SEQ ID NO: 144540 - DNA, 24 bp, Artificial sequence
  SiRNA target sequence
gaagaaatctttttattttctggt

SEQ ID NO: 144541 - DNA, 24 bp, Artificial sequence
  SiRNA target sequence
aagaaatctttttattttctggtg

SEQ ID NO: 144542 - DNA, 24 bp, Artificial sequence
  SiRNA target sequence
agaaatctttttattttctggtga

SEQ ID NO: 144543 - DNA, 24 bp, Artificial sequence
  SiRNA target sequence
gaaatctttttattttctggtgac

SEQ ID NO: 144544 - DNA, 24 bp, Artificial sequence
  SiRNA target sequence
aaatctttttattttctggtgaca

SEQ ID NO: 144545 - DNA, 24 bp, Artificial sequence
  SiRNA target sequence
aatctttttattttctggtgacat

SEQ ID NO: 144546 - DNA, 24 bp, Artificial sequence
  SiRNA target sequence
atctttttattttctggtgacatt

SEQ ID NO: 144547 - DNA, 24 bp, Artificial sequence
  SiRNA target sequence
tctttttattttctggtgacatta

SEQ ID NO: 144548 - DNA, 24 bp, Artificial sequence
  SiRNA target sequence
ctttttattttctggtgacattac

SEQ ID NO: 144549 - DNA, 24 bp, Artificial sequence
  SiRNA target sequence
tttttattttctggtgacattacc

SEQ ID NO: 144550 - DNA, 24 bp, Artificial sequence
  SiRNA target sequence
ttttattttctggtgacattacca

SEQ ID NO: 144551 - DNA, 24 bp, Artificial sequence
  SiRNA target sequence
tttattttctggtgacattaccaa

SEQ ID NO: 144552 - DNA, 24 bp, Artificial sequence
  SiRNA target sequence
ttattttctggtgacattaccaac

SEQ ID NO: 144553 - DNA, 24 bp, Artificial sequence
  SiRNA target sequence
tattttctggtgacattaccaacc

SEQ ID NO: 144554 - DNA, 24 bp, Artificial sequence
  SiRNA target sequence
attttctggtgacattaccaacca

SEQ ID NO: 144555 - DNA, 24 bp, Artificial sequence
  SiRNA target sequence
ttttctggtgacattaccaaccag

SEQ ID NO: 144556 - DNA, 24 bp, Artificial sequence
  SiRNA target sequence
tttctggtgacattaccaaccaga

SEQ ID NO: 144557 - DNA, 24 bp, Artificial sequence
  SiRNA target sequence
ttctggtgacattaccaaccagaa

SEQ ID NO: 144558 - DNA, 24 bp, Artificial sequence
  SiRNA target sequence
tctggtgacattaccaaccagaaa

SEQ ID NO: 144559 - DNA, 24 bp, Artificial sequence
  SiRNA target sequence
ctggtgacattaccaaccagaaaa

SEQ ID NO: 144560 - DNA, 24 bp, Artificial sequence
  SiRNA target sequence
tggtgacattaccaaccagaaaag

SEQ ID NO: 144561 - DNA, 24 bp, Artificial sequence
  SiRNA target sequence
ggtgacattaccaaccagaaaaga

SEQ ID NO: 144562 - DNA, 24 bp, Artificial sequence
  SiRNA target sequence
gtgacattaccaaccagaaaagac

SEQ ID NO: 144563 - DNA, 24 bp, Artificial sequence
  SiRNA target sequence
tgacattaccaaccagaaaagact

SEQ ID NO: 144564 - DNA, 24 bp, Artificial sequence
  SiRNA target sequence
gacattaccaaccagaaaagacta

SEQ ID NO: 144565 - DNA, 24 bp, Artificial sequence
  SiRNA target sequence
acattaccaaccagaaaagactat

SEQ ID NO: 144566 - DNA, 24 bp, Artificial sequence
  SiRNA target sequence
cattaccaaccagaaaagactatg

SEQ ID NO: 144567 - DNA, 24 bp, Artificial sequence
  SiRNA target sequence
attaccaaccagaaaagactatgg

SEQ ID NO: 144568 - DNA, 24 bp, Artificial sequence
  SiRNA target sequence
ttaccaaccagaaaagactatggt

SEQ ID NO: 144569 - DNA, 24 bp, Artificial sequence
  SiRNA target sequence
taccaaccagaaaagactatggtt

SEQ ID NO: 144570 - DNA, 24 bp, Artificial sequence
  SiRNA target sequence
accaaccagaaaagactatggttg

SEQ ID NO: 144571 - DNA, 24 bp, Artificial sequence
  SiRNA target sequence
ccaaccagaaaagactatggttgt

SEQ ID NO: 144572 - DNA, 24 bp, Artificial sequence
  SiRNA target sequence
caaccagaaaagactatggttgta

SEQ ID NO: 144573 - DNA, 24 bp, Artificial sequence
  SiRNA target sequence
aaccagaaaagactatggttgtaa

SEQ ID NO: 144574 - DNA, 24 bp, Artificial sequence
  SiRNA target sequence
accagaaaagactatggttgtaat

SEQ ID NO: 144575 - DNA, 24 bp, Artificial sequence
  SiRNA target sequence
ccagaaaagactatggttgtaatg

SEQ ID NO: 144576 - DNA, 24 bp, Artificial sequence
  SiRNA target sequence
cagaaaagactatggttgtaatga

SEQ ID NO: 144577 - DNA, 24 bp, Artificial sequence
  SiRNA target sequence
agaaaagactatggttgtaatgac

SEQ ID NO: 144578 - DNA, 24 bp, Artificial sequence
  SiRNA target sequence
gaaaagactatggttgtaatgacc

SEQ ID NO: 144579 - DNA, 24 bp, Artificial sequence
  SiRNA target sequence
aaaagactatggttgtaatgacca

SEQ ID NO: 144580 - DNA, 24 bp, Artificial sequence
  SiRNA target sequence
aaagactatggttgtaatgaccac

SEQ ID NO: 144581 - DNA, 24 bp, Artificial sequence
  SiRNA target sequence
aagactatggttgtaatgaccacc

SEQ ID NO: 144582 - DNA, 24 bp, Artificial sequence
  SiRNA target sequence
agactatggttgtaatgaccacca

SEQ ID NO: 144583 - DNA, 24 bp, Artificial sequence
  SiRNA target sequence
gactatggttgtaatgaccaccac

SEQ ID NO: 144584 - DNA, 24 bp, Artificial sequence
  SiRNA target sequence
actatggttgtaatgaccaccacc

SEQ ID NO: 144585 - DNA, 24 bp, Artificial sequence
  SiRNA target sequence
ctatggttgtaatgaccaccacca

SEQ ID NO: 144586 - DNA, 24 bp, Artificial sequence
  SiRNA target sequence
tatggttgtaatgaccaccaccat

SEQ ID NO: 144587 - DNA, 24 bp, Artificial sequence
  SiRNA target sequence
atggttgtaatgaccaccaccata

SEQ ID NO: 144588 - DNA, 24 bp, Artificial sequence
  SiRNA target sequence
tggttgtaatgaccaccaccataa

SEQ ID NO: 144589 - DNA, 24 bp, Artificial sequence
  SiRNA target sequence
ggttgtaatgaccaccaccataat

SEQ ID NO: 144590 - DNA, 24 bp, Artificial sequence
  SiRNA target sequence
gttgtaatgaccaccaccataatc

SEQ ID NO: 144591 - DNA, 24 bp, Artificial sequence
  SiRNA target sequence
ttgtaatgaccaccaccataatct

SEQ ID NO: 144592 - DNA, 24 bp, Artificial sequence
  SiRNA target sequence
tgtaatgaccaccaccataatctc

SEQ ID NO: 144593 - DNA, 24 bp, Artificial sequence
  SiRNA target sequence
gtaatgaccaccaccataatctct

SEQ ID NO: 144594 - DNA, 24 bp, Artificial sequence
  SiRNA target sequence
taatgaccaccaccataatctctt

SEQ ID NO: 144595 - DNA, 24 bp, Artificial sequence
  SiRNA target sequence
aatgaccaccaccataatctctta

SEQ ID NO: 144596 - DNA, 24 bp, Artificial sequence
  SiRNA target sequence
atgaccaccaccataatctcttaa

SEQ ID NO: 144597 - DNA, 24 bp, Artificial sequence
  SiRNA target sequence
tgaccaccaccataatctcttaat

SEQ ID NO: 144598 - DNA, 24 bp, Artificial sequence
  SiRNA target sequence
gaccaccaccataatctcttaatt

SEQ ID NO: 144599 - DNA, 24 bp, Artificial sequence
  SiRNA target sequence
accaccaccataatctcttaattg

SEQ ID NO: 144600 - DNA, 24 bp, Artificial sequence
  SiRNA target sequence
ccaccaccataatctcttaattgt

SEQ ID NO: 144601 - DNA, 24 bp, Artificial sequence
  SiRNA target sequence
caccaccataatctcttaattgtt

SEQ ID NO: 144602 - DNA, 24 bp, Artificial sequence
  SiRNA target sequence
accaccataatctcttaattgttt

SEQ ID NO: 144603 - DNA, 24 bp, Artificial sequence
  SiRNA target sequence
ccaccataatctcttaattgttta

SEQ ID NO: 144604 - DNA, 24 bp, Artificial sequence
  SiRNA target sequence
caccataatctcttaattgtttat

SEQ ID NO: 144605 - DNA, 24 bp, Artificial sequence
  SiRNA target sequence
accataatctcttaattgtttatc

SEQ ID NO: 144606 - DNA, 24 bp, Artificial sequence
  SiRNA target sequence
ccataatctcttaattgtttatca

SEQ ID NO: 144607 - DNA, 24 bp, Artificial sequence
  SiRNA target sequence
cataatctcttaattgtttatcaa

SEQ ID NO: 144608 - DNA, 24 bp, Artificial sequence
  SiRNA target sequence
ataatctcttaattgtttatcaac

SEQ ID NO: 144609 - DNA, 24 bp, Artificial sequence
  SiRNA target sequence
taatctcttaattgtttatcaaca

SEQ ID NO: 144610 - DNA, 24 bp, Artificial sequence
  SiRNA target sequence
aatctcttaattgtttatcaacaa

SEQ ID NO: 144611 - DNA, 24 bp, Artificial sequence
  SiRNA target sequence
atctcttaattgtttatcaacaag

SEQ ID NO: 144612 - DNA, 24 bp, Artificial sequence
  SiRNA target sequence
tctcttaattgtttatcaacaagt

SEQ ID NO: 144613 - DNA, 24 bp, Artificial sequence
  SiRNA target sequence
ctcttaattgtttatcaacaagtg

SEQ ID NO: 144614 - DNA, 24 bp, Artificial sequence
  SiRNA target sequence
tcttaattgtttatcaacaagtgc

SEQ ID NO: 144615 - DNA, 24 bp, Artificial sequence
  SiRNA target sequence
cttaattgtttatcaacaagtgca

SEQ ID NO: 144616 - DNA, 24 bp, Artificial sequence
  SiRNA target sequence
ttaattgtttatcaacaagtgcat

SEQ ID NO: 144617 - DNA, 24 bp, Artificial sequence
  SiRNA target sequence
taattgtttatcaacaagtgcatt

SEQ ID NO: 144618 - DNA, 24 bp, Artificial sequence
  SiRNA target sequence
aattgtttatcaacaagtgcattt

SEQ ID NO: 144619 - DNA, 24 bp, Artificial sequence
  SiRNA target sequence
attgtttatcaacaagtgcatttc

SEQ ID NO: 144620 - DNA, 24 bp, Artificial sequence
  SiRNA target sequence
ttgtttatcaacaagtgcatttcc

SEQ ID NO: 144621 - DNA, 24 bp, Artificial sequence
  SiRNA target sequence
tgtttatcaacaagtgcatttcct

SEQ ID NO: 144622 - DNA, 24 bp, Artificial sequence
  SiRNA target sequence
gtttatcaacaagtgcatttcctt

SEQ ID NO: 144623 - DNA, 24 bp, Artificial sequence
  SiRNA target sequence
tttatcaacaagtgcatttccttt

SEQ ID NO: 144624 - DNA, 24 bp, Artificial sequence
  SiRNA target sequence
ttatcaacaagtgcatttccttta

SEQ ID NO: 144625 - DNA, 24 bp, Artificial sequence
  SiRNA target sequence
tatcaacaagtgcatttcctttat

SEQ ID NO: 144626 - DNA, 24 bp, Artificial sequence
  SiRNA target sequence
atcaacaagtgcatttcctttatt

SEQ ID NO: 144627 - DNA, 24 bp, Artificial sequence
  SiRNA target sequence
tcaacaagtgcatttcctttatta

SEQ ID NO: 144628 - DNA, 24 bp, Artificial sequence
  SiRNA target sequence
caacaagtgcatttcctttattat

SEQ ID NO: 144629 - DNA, 24 bp, Artificial sequence
  SiRNA target sequence
aacaagtgcatttcctttattatt

SEQ ID NO: 144630 - DNA, 24 bp, Artificial sequence
  SiRNA target sequence
acaagtgcatttcctttattatta

SEQ ID NO: 144631 - DNA, 24 bp, Artificial sequence
  SiRNA target sequence
caagtgcatttcctttattattaa

SEQ ID NO: 144632 - DNA, 24 bp, Artificial sequence
  SiRNA target sequence
aagtgcatttcctttattattaaa

SEQ ID NO: 144633 - DNA, 24 bp, Artificial sequence
  SiRNA target sequence
agtgcatttcctttattattaaaa

SEQ ID NO: 144634 - DNA, 24 bp, Artificial sequence
  SiRNA target sequence
gtgcatttcctttattattaaaaa

SEQ ID NO: 144635 - DNA, 24 bp, Artificial sequence
  SiRNA target sequence
tgcatttcctttattattaaaaag

SEQ ID NO: 144636 - DNA, 24 bp, Artificial sequence
  SiRNA target sequence
gcatttcctttattattaaaaagt

SEQ ID NO: 144637 - DNA, 24 bp, Artificial sequence
  SiRNA target sequence
catttcctttattattaaaaagta

SEQ ID NO: 144638 - DNA, 24 bp, Artificial sequence
  SiRNA target sequence
atttcctttattattaaaaagtaa

SEQ ID NO: 144639 - DNA, 24 bp, Artificial sequence
  SiRNA target sequence
tttcctttattattaaaaagtaat

SEQ ID NO: 144640 - DNA, 24 bp, Artificial sequence
  SiRNA target sequence
ttcctttattattaaaaagtaatg

SEQ ID NO: 144641 - DNA, 24 bp, Artificial sequence
  SiRNA target sequence
tcctttattattaaaaagtaatga

SEQ ID NO: 144642 - DNA, 24 bp, Artificial sequence
  SiRNA target sequence
cctttattattaaaaagtaatgaa

SEQ ID NO: 144643 - DNA, 24 bp, Artificial sequence
  SiRNA target sequence
ctttattattaaaaagtaatgaat

SEQ ID NO: 144644 - DNA, 24 bp, Artificial sequence
  SiRNA target sequence
tttattattaaaaagtaatgaatt

SEQ ID NO: 144645 - DNA, 24 bp, Artificial sequence
  SiRNA target sequence
ttattattaaaaagtaatgaattt

SEQ ID NO: 144646 - DNA, 24 bp, Artificial sequence
  SiRNA target sequence
tattattaaaaagtaatgaattta

SEQ ID NO: 144647 - DNA, 24 bp, Artificial sequence
  SiRNA target sequence
attattaaaaagtaatgaatttaa

SEQ ID NO: 144648 - DNA, 24 bp, Artificial sequence
  SiRNA target sequence
ttattaaaaagtaatgaatttaat

SEQ ID NO: 144649 - DNA, 24 bp, Artificial sequence
  SiRNA target sequence
tattaaaaagtaatgaatttaatg

SEQ ID NO: 144650 - DNA, 24 bp, Artificial sequence
  SiRNA target sequence
attaaaaagtaatgaatttaatga

SEQ ID NO: 144651 - DNA, 24 bp, Artificial sequence
  SiRNA target sequence
ttaaaaagtaatgaatttaatgat

SEQ ID NO: 144652 - DNA, 24 bp, Artificial sequence
  SiRNA target sequence
taaaaagtaatgaatttaatgatt

SEQ ID NO: 144653 - DNA, 24 bp, Artificial sequence
  SiRNA target sequence
aaaaagtaatgaatttaatgattt

SEQ ID NO: 144654 - DNA, 24 bp, Artificial sequence
  SiRNA target sequence
aaaagtaatgaatttaatgattta

SEQ ID NO: 144655 - DNA, 24 bp, Artificial sequence
  SiRNA target sequence
aaagtaatgaatttaatgatttac

SEQ ID NO: 144656 - DNA, 24 bp, Artificial sequence
  SiRNA target sequence
aagtaatgaatttaatgatttacc

SEQ ID NO: 144657 - DNA, 24 bp, Artificial sequence
  SiRNA target sequence
agtaatgaatttaatgatttacca

SEQ ID NO: 144658 - DNA, 24 bp, Artificial sequence
  SiRNA target sequence
gtaatgaatttaatgatttaccac

SEQ ID NO: 144659 - DNA, 24 bp, Artificial sequence
  SiRNA target sequence
taatgaatttaatgatttaccaca

SEQ ID NO: 144660 - DNA, 24 bp, Artificial sequence
  SiRNA target sequence
aatgaatttaatgatttaccacac

SEQ ID NO: 144661 - DNA, 24 bp, Artificial sequence
  SiRNA target sequence
atgaatttaatgatttaccacaca

SEQ ID NO: 144662 - DNA, 24 bp, Artificial sequence
  SiRNA target sequence
tgaatttaatgatttaccacacaa

SEQ ID NO: 144663 - DNA, 24 bp, Artificial sequence
  SiRNA target sequence
gaatttaatgatttaccacacaaa

SEQ ID NO: 144664 - DNA, 24 bp, Artificial sequence
  SiRNA target sequence
aatttaatgatttaccacacaaat

SEQ ID NO: 144665 - DNA, 24 bp, Artificial sequence
  SiRNA target sequence
atttaatgatttaccacacaaatt

SEQ ID NO: 144666 - DNA, 24 bp, Artificial sequence
  SiRNA target sequence
tttaatgatttaccacacaaattg

SEQ ID NO: 144667 - DNA, 24 bp, Artificial sequence
  SiRNA target sequence
ttaatgatttaccacacaaattgt

SEQ ID NO: 144668 - DNA, 24 bp, Artificial sequence
  SiRNA target sequence
taatgatttaccacacaaattgtt

SEQ ID NO: 144669 - DNA, 24 bp, Artificial sequence
  SiRNA target sequence
aatgatttaccacacaaattgtta

SEQ ID NO: 144670 - DNA, 24 bp, Artificial sequence
  SiRNA target sequence
atgatttaccacacaaattgttat

SEQ ID NO: 144671 - DNA, 24 bp, Artificial sequence
  SiRNA target sequence
tgatttaccacacaaattgttatc

SEQ ID NO: 144672 - DNA, 24 bp, Artificial sequence
  SiRNA target sequence
gatttaccacacaaattgttatct

SEQ ID NO: 144673 - DNA, 24 bp, Artificial sequence
  SiRNA target sequence
atttaccacacaaattgttatcta

SEQ ID NO: 144674 - DNA, 24 bp, Artificial sequence
  SiRNA target sequence
tttaccacacaaattgttatctaa

SEQ ID NO: 144675 - DNA, 24 bp, Artificial sequence
  SiRNA target sequence
ttaccacacaaattgttatctaat

SEQ ID NO: 144676 - DNA, 24 bp, Artificial sequence
  SiRNA target sequence
taccacacaaattgttatctaata

SEQ ID NO: 144677 - DNA, 24 bp, Artificial sequence
  SiRNA target sequence
accacacaaattgttatctaatat

SEQ ID NO: 144678 - DNA, 24 bp, Artificial sequence
  SiRNA target sequence
ccacacaaattgttatctaatatt

SEQ ID NO: 144679 - DNA, 24 bp, Artificial sequence
  SiRNA target sequence
cacacaaattgttatctaatatta

SEQ ID NO: 144680 - DNA, 24 bp, Artificial sequence
  SiRNA target sequence
acacaaattgttatctaatattat

SEQ ID NO: 144681 - DNA, 24 bp, Artificial sequence
  SiRNA target sequence
cacaaattgttatctaatattatt

SEQ ID NO: 144682 - DNA, 24 bp, Artificial sequence
  SiRNA target sequence
acaaattgttatctaatattattt

SEQ ID NO: 144683 - DNA, 24 bp, Artificial sequence
  SiRNA target sequence
caaattgttatctaatattatttt

SEQ ID NO: 144684 - DNA, 24 bp, Artificial sequence
  SiRNA target sequence
aaattgttatctaatattatttta

SEQ ID NO: 144685 - DNA, 24 bp, Artificial sequence
  SiRNA target sequence
aattgttatctaatattattttat

SEQ ID NO: 144686 - DNA, 24 bp, Artificial sequence
  SiRNA target sequence
attgttatctaatattattttatt

SEQ ID NO: 144687 - DNA, 24 bp, Artificial sequence
  SiRNA target sequence
ttgttatctaatattattttatta

SEQ ID NO: 144688 - DNA, 24 bp, Artificial sequence
  SiRNA target sequence
tgttatctaatattattttattaa

SEQ ID NO: 144689 - DNA, 24 bp, Artificial sequence
  SiRNA target sequence
gttatctaatattattttattaag

SEQ ID NO: 144690 - DNA, 24 bp, Artificial sequence
  SiRNA target sequence
ttatctaatattattttattaaga

SEQ ID NO: 144691 - DNA, 24 bp, Artificial sequence
  SiRNA target sequence
tatctaatattattttattaagag

SEQ ID NO: 144692 - DNA, 24 bp, Artificial sequence
  SiRNA target sequence
atctaatattattttattaagagt

SEQ ID NO: 144693 - DNA, 24 bp, Artificial sequence
  SiRNA target sequence
tctaatattattttattaagagtg

SEQ ID NO: 144694 - DNA, 24 bp, Artificial sequence
  SiRNA target sequence
ctaatattattttattaagagtgt

SEQ ID NO: 144695 - DNA, 24 bp, Artificial sequence
  SiRNA target sequence
taatattattttattaagagtgtc

SEQ ID NO: 144696 - DNA, 24 bp, Artificial sequence
  SiRNA target sequence
aatattattttattaagagtgtct

SEQ ID NO: 144697 - DNA, 24 bp, Artificial sequence
  SiRNA target sequence
atattattttattaagagtgtcta

SEQ ID NO: 144698 - DNA, 24 bp, Artificial sequence
  SiRNA target sequence
tattattttattaagagtgtctac

SEQ ID NO: 144699 - DNA, 24 bp, Artificial sequence
  SiRNA target sequence
attattttattaagagtgtctaca

SEQ ID NO: 144700 - DNA, 24 bp, Artificial sequence
  SiRNA target sequence
ttattttattaagagtgtctacat

SEQ ID NO: 144701 - DNA, 24 bp, Artificial sequence
  SiRNA target sequence
tattttattaagagtgtctacata

SEQ ID NO: 144702 - DNA, 24 bp, Artificial sequence
  SiRNA target sequence
attttattaagagtgtctacatac

SEQ ID NO: 144703 - DNA, 24 bp, Artificial sequence
  SiRNA target sequence
ttttattaagagtgtctacatacg

SEQ ID NO: 144704 - DNA, 24 bp, Artificial sequence
  SiRNA target sequence
tttattaagagtgtctacatacgc

SEQ ID NO: 144705 - DNA, 24 bp, Artificial sequence
  SiRNA target sequence
ttattaagagtgtctacatacgct

SEQ ID NO: 144706 - DNA, 24 bp, Artificial sequence
  SiRNA target sequence
tattaagagtgtctacatacgctt

SEQ ID NO: 144707 - DNA, 24 bp, Artificial sequence
  SiRNA target sequence
attaagagtgtctacatacgcttg

SEQ ID NO: 144708 - DNA, 24 bp, Artificial sequence
  SiRNA target sequence
ttaagagtgtctacatacgcttga

SEQ ID NO: 144709 - DNA, 24 bp, Artificial sequence
  SiRNA target sequence
taagagtgtctacatacgcttgat

SEQ ID NO: 144710 - DNA, 24 bp, Artificial sequence
  SiRNA target sequence
aagagtgtctacatacgcttgatg

SEQ ID NO: 144711 - DNA, 24 bp, Artificial sequence
  SiRNA target sequence
agagtgtctacatacgcttgatgg

SEQ ID NO: 144712 - DNA, 24 bp, Artificial sequence
  SiRNA target sequence
gagtgtctacatacgcttgatggt

SEQ ID NO: 144713 - DNA, 24 bp, Artificial sequence
  SiRNA target sequence
agtgtctacatacgcttgatggtg

SEQ ID NO: 144714 - DNA, 24 bp, Artificial sequence
  SiRNA target sequence
gtgtctacatacgcttgatggtgc

SEQ ID NO: 144715 - DNA, 24 bp, Artificial sequence
  SiRNA target sequence
tgtctacatacgcttgatggtgct

SEQ ID NO: 144716 - DNA, 24 bp, Artificial sequence
  SiRNA target sequence
gtctacatacgcttgatggtgctt

SEQ ID NO: 144717 - DNA, 24 bp, Artificial sequence
  SiRNA target sequence
tctacatacgcttgatggtgctta

SEQ ID NO: 144718 - DNA, 24 bp, Artificial sequence
  SiRNA target sequence
ctacatacgcttgatggtgcttag

SEQ ID NO: 144719 - DNA, 24 bp, Artificial sequence
  SiRNA target sequence
tacatacgcttgatggtgcttaga

SEQ ID NO: 144720 - DNA, 24 bp, Artificial sequence
  SiRNA target sequence
acatacgcttgatggtgcttagag

SEQ ID NO: 144721 - DNA, 24 bp, Artificial sequence
  SiRNA target sequence
catacgcttgatggtgcttagagt

SEQ ID NO: 144722 - DNA, 24 bp, Artificial sequence
  SiRNA target sequence
atacgcttgatggtgcttagagtg

SEQ ID NO: 144723 - DNA, 24 bp, Artificial sequence
  SiRNA target sequence
tacgcttgatggtgcttagagtgg

SEQ ID NO: 144724 - DNA, 24 bp, Artificial sequence
  SiRNA target sequence
acgcttgatggtgcttagagtggt

SEQ ID NO: 144725 - DNA, 24 bp, Artificial sequence
  SiRNA target sequence
cgcttgatggtgcttagagtggtg

SEQ ID NO: 144726 - DNA, 24 bp, Artificial sequence
  SiRNA target sequence
gcttgatggtgcttagagtggtgg

SEQ ID NO: 144727 - DNA, 24 bp, Artificial sequence
  SiRNA target sequence
cttgatggtgcttagagtggtggg

SEQ ID NO: 144728 - DNA, 24 bp, Artificial sequence
  SiRNA target sequence
ttgatggtgcttagagtggtgggt

SEQ ID NO: 144729 - DNA, 24 bp, Artificial sequence
  SiRNA target sequence
tgatggtgcttagagtggtgggtc

SEQ ID NO: 144730 - DNA, 24 bp, Artificial sequence
  SiRNA target sequence
gatggtgcttagagtggtgggtct

SEQ ID NO: 144731 - DNA, 24 bp, Artificial sequence
  SiRNA target sequence
atggtgcttagagtggtgggtctc

SEQ ID NO: 144732 - DNA, 24 bp, Artificial sequence
  SiRNA target sequence
tggtgcttagagtggtgggtctcc

SEQ ID NO: 144733 - DNA, 24 bp, Artificial sequence
  SiRNA target sequence
ggtgcttagagtggtgggtctcca

SEQ ID NO: 144734 - DNA, 24 bp, Artificial sequence
  SiRNA target sequence
gtgcttagagtggtgggtctccat

SEQ ID NO: 144735 - DNA, 24 bp, Artificial sequence
  SiRNA target sequence
tgcttagagtggtgggtctccatt

SEQ ID NO: 144736 - DNA, 24 bp, Artificial sequence
  SiRNA target sequence
gcttagagtggtgggtctccatta

SEQ ID NO: 144737 - DNA, 24 bp, Artificial sequence
  SiRNA target sequence
cttagagtggtgggtctccattat

SEQ ID NO: 144738 - DNA, 24 bp, Artificial sequence
  SiRNA target sequence
ttagagtggtgggtctccattata

SEQ ID NO: 144739 - DNA, 24 bp, Artificial sequence
  SiRNA target sequence
tagagtggtgggtctccattatat

SEQ ID NO: 144740 - DNA, 24 bp, Artificial sequence
  SiRNA target sequence
agagtggtgggtctccattatatc

SEQ ID NO: 144741 - DNA, 24 bp, Artificial sequence
  SiRNA target sequence
gagtggtgggtctccattatatct

SEQ ID NO: 144742 - DNA, 24 bp, Artificial sequence
  SiRNA target sequence
agtggtgggtctccattatatctt

SEQ ID NO: 144743 - DNA, 24 bp, Artificial sequence
  SiRNA target sequence
gtggtgggtctccattatatcttc

SEQ ID NO: 144744 - DNA, 24 bp, Artificial sequence
  SiRNA target sequence
tggtgggtctccattatatcttca

SEQ ID NO: 144745 - DNA, 24 bp, Artificial sequence
  SiRNA target sequence
ggtgggtctccattatatcttcac

SEQ ID NO: 144746 - DNA, 24 bp, Artificial sequence
  SiRNA target sequence
gtgggtctccattatatcttcact

SEQ ID NO: 144747 - DNA, 24 bp, Artificial sequence
  SiRNA target sequence
tgggtctccattatatcttcactt

SEQ ID NO: 144748 - DNA, 24 bp, Artificial sequence
  SiRNA target sequence
gggtctccattatatcttcactta

SEQ ID NO: 144749 - DNA, 24 bp, Artificial sequence
  SiRNA target sequence
ggtctccattatatcttcacttat

SEQ ID NO: 144750 - DNA, 24 bp, Artificial sequence
  SiRNA target sequence
gtctccattatatcttcacttata

SEQ ID NO: 144751 - DNA, 24 bp, Artificial sequence
  SiRNA target sequence
tctccattatatcttcacttatat

SEQ ID NO: 144752 - DNA, 24 bp, Artificial sequence
  SiRNA target sequence
ctccattatatcttcacttatata

SEQ ID NO: 144753 - DNA, 24 bp, Artificial sequence
  SiRNA target sequence
tccattatatcttcacttatataa

SEQ ID NO: 144754 - DNA, 24 bp, Artificial sequence
  SiRNA target sequence
ccattatatcttcacttatataag

SEQ ID NO: 144755 - DNA, 24 bp, Artificial sequence
  SiRNA target sequence
cattatatcttcacttatataagg

SEQ ID NO: 144756 - DNA, 24 bp, Artificial sequence
  SiRNA target sequence
attatatcttcacttatataaggc

SEQ ID NO: 144757 - DNA, 24 bp, Artificial sequence
  SiRNA target sequence
ttatatcttcacttatataaggct

SEQ ID NO: 144758 - DNA, 24 bp, Artificial sequence
  SiRNA target sequence
tatatcttcacttatataaggctc

SEQ ID NO: 144759 - DNA, 24 bp, Artificial sequence
  SiRNA target sequence
atatcttcacttatataaggctct

SEQ ID NO: 144760 - DNA, 24 bp, Artificial sequence
  SiRNA target sequence
tatcttcacttatataaggctcta

SEQ ID NO: 144761 - DNA, 24 bp, Artificial sequence
  SiRNA target sequence
atcttcacttatataaggctctag

SEQ ID NO: 144762 - DNA, 24 bp, Artificial sequence
  SiRNA target sequence
tcttcacttatataaggctctaga

SEQ ID NO: 144763 - DNA, 24 bp, Artificial sequence
  SiRNA target sequence
cttcacttatataaggctctagag

SEQ ID NO: 144764 - DNA, 24 bp, Artificial sequence
  SiRNA target sequence
ttcacttatataaggctctagaga

SEQ ID NO: 144765 - DNA, 24 bp, Artificial sequence
  SiRNA target sequence
tcacttatataaggctctagagat

SEQ ID NO: 144766 - DNA, 24 bp, Artificial sequence
  SiRNA target sequence
cacttatataaggctctagagatt

SEQ ID NO: 144767 - DNA, 24 bp, Artificial sequence
  SiRNA target sequence
acttatataaggctctagagattt

SEQ ID NO: 144768 - DNA, 24 bp, Artificial sequence
  SiRNA target sequence
cttatataaggctctagagattta

SEQ ID NO: 144769 - DNA, 24 bp, Artificial sequence
  SiRNA target sequence
ttatataaggctctagagatttat

SEQ ID NO: 144770 - DNA, 24 bp, Artificial sequence
  SiRNA target sequence
tatataaggctctagagatttata

SEQ ID NO: 144771 - DNA, 24 bp, Artificial sequence
  SiRNA target sequence
atataaggctctagagatttataa

SEQ ID NO: 144772 - DNA, 24 bp, Artificial sequence
  SiRNA target sequence
tataaggctctagagatttataac

SEQ ID NO: 144773 - DNA, 24 bp, Artificial sequence
  SiRNA target sequence
ataaggctctagagatttataact

SEQ ID NO: 144774 - DNA, 24 bp, Artificial sequence
  SiRNA target sequence
taaggctctagagatttataacta

SEQ ID NO: 144775 - DNA, 24 bp, Artificial sequence
  SiRNA target sequence
aaggctctagagatttataactat

SEQ ID NO: 144776 - DNA, 24 bp, Artificial sequence
  SiRNA target sequence
aggctctagagatttataactata

SEQ ID NO: 144777 - DNA, 24 bp, Artificial sequence
  SiRNA target sequence
ggctctagagatttataactatat

SEQ ID NO: 144778 - DNA, 24 bp, Artificial sequence
  SiRNA target sequence
gctctagagatttataactatatt

SEQ ID NO: 144779 - DNA, 24 bp, Artificial sequence
  SiRNA target sequence
ctctagagatttataactatattt

SEQ ID NO: 144780 - DNA, 24 bp, Artificial sequence
  SiRNA target sequence
tctagagatttataactatatttc

SEQ ID NO: 144781 - DNA, 24 bp, Artificial sequence
  SiRNA target sequence
ctagagatttataactatatttca

SEQ ID NO: 144782 - DNA, 24 bp, Artificial sequence
  SiRNA target sequence
tagagatttataactatatttcag

SEQ ID NO: 144783 - DNA, 24 bp, Artificial sequence
  SiRNA target sequence
agagatttataactatatttcaga

SEQ ID NO: 144784 - DNA, 24 bp, Artificial sequence
  SiRNA target sequence
gagatttataactatatttcagat

SEQ ID NO: 144785 - DNA, 24 bp, Artificial sequence
  SiRNA target sequence
agatttataactatatttcagatt

SEQ ID NO: 144786 - DNA, 24 bp, Artificial sequence
  SiRNA target sequence
gatttataactatatttcagattt

SEQ ID NO: 144787 - DNA, 24 bp, Artificial sequence
  SiRNA target sequence
atttataactatatttcagatttg

SEQ ID NO: 144788 - DNA, 24 bp, Artificial sequence
  SiRNA target sequence
tttataactatatttcagatttgg

SEQ ID NO: 144789 - DNA, 24 bp, Artificial sequence
  SiRNA target sequence
ttataactatatttcagatttgga

SEQ ID NO: 144790 - DNA, 24 bp, Artificial sequence
  SiRNA target sequence
tataactatatttcagatttggaa

SEQ ID NO: 144791 - DNA, 24 bp, Artificial sequence
  SiRNA target sequence
ataactatatttcagatttggaag

SEQ ID NO: 144792 - DNA, 24 bp, Artificial sequence
  SiRNA target sequence
taactatatttcagatttggaaga

SEQ ID NO: 144793 - DNA, 24 bp, Artificial sequence
  SiRNA target sequence
aactatatttcagatttggaagag

SEQ ID NO: 144794 - DNA, 24 bp, Artificial sequence
  SiRNA target sequence
actatatttcagatttggaagagt

SEQ ID NO: 144795 - DNA, 24 bp, Artificial sequence
  SiRNA target sequence
ctatatttcagatttggaagagtg

SEQ ID NO: 144796 - DNA, 24 bp, Artificial sequence
  SiRNA target sequence
tatatttcagatttggaagagtga

SEQ ID NO: 144797 - DNA, 24 bp, Artificial sequence
  SiRNA target sequence
atatttcagatttggaagagtgaa

SEQ ID NO: 144798 - DNA, 24 bp, Artificial sequence
  SiRNA target sequence
tatttcagatttggaagagtgaac

SEQ ID NO: 144799 - DNA, 24 bp, Artificial sequence
  SiRNA target sequence
atttcagatttggaagagtgaaca

SEQ ID NO: 144800 - DNA, 24 bp, Artificial sequence
  SiRNA target sequence
tttcagatttggaagagtgaacat

SEQ ID NO: 144801 - DNA, 25 bp, Artificial sequence
  SiRNA target sequence
ttaatttatgcataattgaccatca

SEQ ID NO: 144802 - DNA, 25 bp, Artificial sequence
  SiRNA target sequence
taatttatgcataattgaccatcat

SEQ ID NO: 144803 - DNA, 25 bp, Artificial sequence
  SiRNA target sequence
aatttatgcataattgaccatcatc

SEQ ID NO: 144804 - DNA, 25 bp, Artificial sequence
  SiRNA target sequence
atttatgcataattgaccatcatca

SEQ ID NO: 144805 - DNA, 25 bp, Artificial sequence
  SiRNA target sequence
tttatgcataattgaccatcatcag

SEQ ID NO: 144806 - DNA, 25 bp, Artificial sequence
  SiRNA target sequence
ttatgcataattgaccatcatcagt

SEQ ID NO: 144807 - DNA, 25 bp, Artificial sequence
  SiRNA target sequence
tatgcataattgaccatcatcagta

SEQ ID NO: 144808 - DNA, 25 bp, Artificial sequence
  SiRNA target sequence
atgcataattgaccatcatcagtaa

SEQ ID NO: 144809 - DNA, 25 bp, Artificial sequence
  SiRNA target sequence
tgcataattgaccatcatcagtaat

SEQ ID NO: 144810 - DNA, 25 bp, Artificial sequence
  SiRNA target sequence
gcataattgaccatcatcagtaata

SEQ ID NO: 144811 - DNA, 25 bp, Artificial sequence
  SiRNA target sequence
cataattgaccatcatcagtaataa

SEQ ID NO: 144812 - DNA, 25 bp, Artificial sequence
  SiRNA target sequence
ataattgaccatcatcagtaataaa

SEQ ID NO: 144813 - DNA, 25 bp, Artificial sequence
  SiRNA target sequence
taattgaccatcatcagtaataaac

SEQ ID NO: 144814 - DNA, 25 bp, Artificial sequence
  SiRNA target sequence
aattgaccatcatcagtaataaaca

SEQ ID NO: 144815 - DNA, 25 bp, Artificial sequence
  SiRNA target sequence
attgaccatcatcagtaataaacac

SEQ ID NO: 144816 - DNA, 25 bp, Artificial sequence
  SiRNA target sequence
ttgaccatcatcagtaataaacaca

SEQ ID NO: 144817 - DNA, 25 bp, Artificial sequence
  SiRNA target sequence
tgaccatcatcagtaataaacacat

SEQ ID NO: 144818 - DNA, 25 bp, Artificial sequence
  SiRNA target sequence
gaccatcatcagtaataaacacatt

SEQ ID NO: 144819 - DNA, 25 bp, Artificial sequence
  SiRNA target sequence
accatcatcagtaataaacacatta

SEQ ID NO: 144820 - DNA, 25 bp, Artificial sequence
  SiRNA target sequence
ccatcatcagtaataaacacattac

SEQ ID NO: 144821 - DNA, 25 bp, Artificial sequence
  SiRNA target sequence
catcatcagtaataaacacattacc

SEQ ID NO: 144822 - DNA, 25 bp, Artificial sequence
  SiRNA target sequence
atcatcagtaataaacacattacct

SEQ ID NO: 144823 - DNA, 25 bp, Artificial sequence
  SiRNA target sequence
tcatcagtaataaacacattacctt

SEQ ID NO: 144824 - DNA, 25 bp, Artificial sequence
  SiRNA target sequence
catcagtaataaacacattaccttt

SEQ ID NO: 144825 - DNA, 25 bp, Artificial sequence
  SiRNA target sequence
atcagtaataaacacattacctttc

SEQ ID NO: 144826 - DNA, 25 bp, Artificial sequence
  SiRNA target sequence
tcagtaataaacacattacctttct

SEQ ID NO: 144827 - DNA, 25 bp, Artificial sequence
  SiRNA target sequence
cagtaataaacacattacctttctt

SEQ ID NO: 144828 - DNA, 25 bp, Artificial sequence
  SiRNA target sequence
agtaataaacacattacctttcttt

SEQ ID NO: 144829 - DNA, 25 bp, Artificial sequence
  SiRNA target sequence
gtaataaacacattacctttctttt

SEQ ID NO: 144830 - DNA, 25 bp, Artificial sequence
  SiRNA target sequence
taataaacacattacctttcttttc

SEQ ID NO: 144831 - DNA, 25 bp, Artificial sequence
  SiRNA target sequence
aataaacacattacctttcttttct

SEQ ID NO: 144832 - DNA, 25 bp, Artificial sequence
  SiRNA target sequence
ataaacacattacctttcttttcta

SEQ ID NO: 144833 - DNA, 25 bp, Artificial sequence
  SiRNA target sequence
taaacacattacctttcttttctac

SEQ ID NO: 144834 - DNA, 25 bp, Artificial sequence
  SiRNA target sequence
aaacacattacctttcttttctacc

SEQ ID NO: 144835 - DNA, 25 bp, Artificial sequence
  SiRNA target sequence
aacacattacctttcttttctacca

SEQ ID NO: 144836 - DNA, 25 bp, Artificial sequence
  SiRNA target sequence
acacattacctttcttttctaccac

SEQ ID NO: 144837 - DNA, 25 bp, Artificial sequence
  SiRNA target sequence
cacattacctttcttttctaccaca

SEQ ID NO: 144838 - DNA, 25 bp, Artificial sequence
  SiRNA target sequence
acattacctttcttttctaccacac

SEQ ID NO: 144839 - DNA, 25 bp, Artificial sequence
  SiRNA target sequence
cattacctttcttttctaccacaca

SEQ ID NO: 144840 - DNA, 25 bp, Artificial sequence
  SiRNA target sequence
attacctttcttttctaccacacat

SEQ ID NO: 144841 - DNA, 25 bp, Artificial sequence
  SiRNA target sequence
ttacctttcttttctaccacacatt

SEQ ID NO: 144842 - DNA, 25 bp, Artificial sequence
  SiRNA target sequence
tacctttcttttctaccacacattt

SEQ ID NO: 144843 - DNA, 25 bp, Artificial sequence
  SiRNA target sequence
acctttcttttctaccacacatttt

SEQ ID NO: 144844 - DNA, 25 bp, Artificial sequence
  SiRNA target sequence
cctttcttttctaccacacattttt

SEQ ID NO: 144845 - DNA, 25 bp, Artificial sequence
  SiRNA target sequence
ctttcttttctaccacacatttttg

SEQ ID NO: 144846 - DNA, 25 bp, Artificial sequence
  SiRNA target sequence
tttcttttctaccacacatttttga

SEQ ID NO: 144847 - DNA, 25 bp, Artificial sequence
  SiRNA target sequence
ttcttttctaccacacatttttgat

SEQ ID NO: 144848 - DNA, 25 bp, Artificial sequence
  SiRNA target sequence
tcttttctaccacacatttttgata

SEQ ID NO: 144849 - DNA, 25 bp, Artificial sequence
  SiRNA target sequence
cttttctaccacacatttttgatat

SEQ ID NO: 144850 - DNA, 25 bp, Artificial sequence
  SiRNA target sequence
ttttctaccacacatttttgatata

SEQ ID NO: 144851 - DNA, 25 bp, Artificial sequence
  SiRNA target sequence
tttctaccacacatttttgatatat

SEQ ID NO: 144852 - DNA, 25 bp, Artificial sequence
  SiRNA target sequence
ttctaccacacatttttgatatatt

SEQ ID NO: 144853 - DNA, 25 bp, Artificial sequence
  SiRNA target sequence
tctaccacacatttttgatatattt

SEQ ID NO: 144854 - DNA, 25 bp, Artificial sequence
  SiRNA target sequence
ctaccacacatttttgatatatttc

SEQ ID NO: 144855 - DNA, 25 bp, Artificial sequence
  SiRNA target sequence
taccacacatttttgatatatttca

SEQ ID NO: 144856 - DNA, 25 bp, Artificial sequence
  SiRNA target sequence
accacacatttttgatatatttcat

SEQ ID NO: 144857 - DNA, 25 bp, Artificial sequence
  SiRNA target sequence
ccacacatttttgatatatttcatt

SEQ ID NO: 144858 - DNA, 25 bp, Artificial sequence
  SiRNA target sequence
cacacatttttgatatatttcatta

SEQ ID NO: 144859 - DNA, 25 bp, Artificial sequence
  SiRNA target sequence
acacatttttgatatatttcattaa

SEQ ID NO: 144860 - DNA, 25 bp, Artificial sequence
  SiRNA target sequence
cacatttttgatatatttcattaac

SEQ ID NO: 144861 - DNA, 25 bp, Artificial sequence
  SiRNA target sequence
acatttttgatatatttcattaact

SEQ ID NO: 144862 - DNA, 25 bp, Artificial sequence
  SiRNA target sequence
catttttgatatatttcattaacta

SEQ ID NO: 144863 - DNA, 25 bp, Artificial sequence
  SiRNA target sequence
atttttgatatatttcattaactac

SEQ ID NO: 144864 - DNA, 25 bp, Artificial sequence
  SiRNA target sequence
tttttgatatatttcattaactaca

SEQ ID NO: 144865 - DNA, 25 bp, Artificial sequence
  SiRNA target sequence
ttttgatatatttcattaactacat

SEQ ID NO: 144866 - DNA, 25 bp, Artificial sequence
  SiRNA target sequence
tttgatatatttcattaactacatc

SEQ ID NO: 144867 - DNA, 25 bp, Artificial sequence
  SiRNA target sequence
ttgatatatttcattaactacatcc

SEQ ID NO: 144868 - DNA, 25 bp, Artificial sequence
  SiRNA target sequence
tgatatatttcattaactacatccc

SEQ ID NO: 144869 - DNA, 25 bp, Artificial sequence
  SiRNA target sequence
gatatatttcattaactacatccca

SEQ ID NO: 144870 - DNA, 25 bp, Artificial sequence
  SiRNA target sequence
atatatttcattaactacatcccaa

SEQ ID NO: 144871 - DNA, 25 bp, Artificial sequence
  SiRNA target sequence
tatatttcattaactacatcccaat

SEQ ID NO: 144872 - DNA, 25 bp, Artificial sequence
  SiRNA target sequence
atatttcattaactacatcccaatc

SEQ ID NO: 144873 - DNA, 25 bp, Artificial sequence
  SiRNA target sequence
tatttcattaactacatcccaatca

SEQ ID NO: 144874 - DNA, 25 bp, Artificial sequence
  SiRNA target sequence
atttcattaactacatcccaatcaa

SEQ ID NO: 144875 - DNA, 25 bp, Artificial sequence
  SiRNA target sequence
tttcattaactacatcccaatcaat

SEQ ID NO: 144876 - DNA, 25 bp, Artificial sequence
  SiRNA target sequence
ttcattaactacatcccaatcaatt

SEQ ID NO: 144877 - DNA, 25 bp, Artificial sequence
  SiRNA target sequence
tcattaactacatcccaatcaatta

SEQ ID NO: 144878 - DNA, 25 bp, Artificial sequence
  SiRNA target sequence
cattaactacatcccaatcaattac

SEQ ID NO: 144879 - DNA, 25 bp, Artificial sequence
  SiRNA target sequence
attaactacatcccaatcaattaca

SEQ ID NO: 144880 - DNA, 25 bp, Artificial sequence
  SiRNA target sequence
ttaactacatcccaatcaattacat

SEQ ID NO: 144881 - DNA, 25 bp, Artificial sequence
  SiRNA target sequence
taactacatcccaatcaattacatt

SEQ ID NO: 144882 - DNA, 25 bp, Artificial sequence
  SiRNA target sequence
aactacatcccaatcaattacattc

SEQ ID NO: 144883 - DNA, 25 bp, Artificial sequence
  SiRNA target sequence
actacatcccaatcaattacattcc

SEQ ID NO: 144884 - DNA, 25 bp, Artificial sequence
  SiRNA target sequence
ctacatcccaatcaattacattcca

SEQ ID NO: 144885 - DNA, 25 bp, Artificial sequence
  SiRNA target sequence
tacatcccaatcaattacattccac

SEQ ID NO: 144886 - DNA, 25 bp, Artificial sequence
  SiRNA target sequence
acatcccaatcaattacattccacc

SEQ ID NO: 144887 - DNA, 25 bp, Artificial sequence
  SiRNA target sequence
catcccaatcaattacattccacca

SEQ ID NO: 144888 - DNA, 25 bp, Artificial sequence
  SiRNA target sequence
atcccaatcaattacattccaccat

SEQ ID NO: 144889 - DNA, 25 bp, Artificial sequence
  SiRNA target sequence
tcccaatcaattacattccaccatt

SEQ ID NO: 144890 - DNA, 25 bp, Artificial sequence
  SiRNA target sequence
cccaatcaattacattccaccattc

SEQ ID NO: 144891 - DNA, 25 bp, Artificial sequence
  SiRNA target sequence
ccaatcaattacattccaccattca

SEQ ID NO: 144892 - DNA, 25 bp, Artificial sequence
  SiRNA target sequence
caatcaattacattccaccattcat

SEQ ID NO: 144893 - DNA, 25 bp, Artificial sequence
  SiRNA target sequence
aatcaattacattccaccattcatt

SEQ ID NO: 144894 - DNA, 25 bp, Artificial sequence
  SiRNA target sequence
atcaattacattccaccattcatta

SEQ ID NO: 144895 - DNA, 25 bp, Artificial sequence
  SiRNA target sequence
tcaattacattccaccattcattaa

SEQ ID NO: 144896 - DNA, 25 bp, Artificial sequence
  SiRNA target sequence
caattacattccaccattcattaat

SEQ ID NO: 144897 - DNA, 25 bp, Artificial sequence
  SiRNA target sequence
aattacattccaccattcattaatg

SEQ ID NO: 144898 - DNA, 25 bp, Artificial sequence
  SiRNA target sequence
attacattccaccattcattaatgt

SEQ ID NO: 144899 - DNA, 25 bp, Artificial sequence
  SiRNA target sequence
ttacattccaccattcattaatgta

SEQ ID NO: 144900 - DNA, 25 bp, Artificial sequence
  SiRNA target sequence
tacattccaccattcattaatgtat

SEQ ID NO: 144901 - DNA, 25 bp, Artificial sequence
  SiRNA target sequence
acattccaccattcattaatgtatt

SEQ ID NO: 144902 - DNA, 25 bp, Artificial sequence
  SiRNA target sequence
cattccaccattcattaatgtattc

SEQ ID NO: 144903 - DNA, 25 bp, Artificial sequence
  SiRNA target sequence
attccaccattcattaatgtattct

SEQ ID NO: 144904 - DNA, 25 bp, Artificial sequence
  SiRNA target sequence
ttccaccattcattaatgtattctt

SEQ ID NO: 144905 - DNA, 25 bp, Artificial sequence
  SiRNA target sequence
tccaccattcattaatgtattcttt

SEQ ID NO: 144906 - DNA, 25 bp, Artificial sequence
  SiRNA target sequence
ccaccattcattaatgtattctttt

SEQ ID NO: 144907 - DNA, 25 bp, Artificial sequence
  SiRNA target sequence
caccattcattaatgtattcttttc

SEQ ID NO: 144908 - DNA, 25 bp, Artificial sequence
  SiRNA target sequence
accattcattaatgtattcttttct

SEQ ID NO: 144909 - DNA, 25 bp, Artificial sequence
  SiRNA target sequence
ccattcattaatgtattcttttctc

SEQ ID NO: 144910 - DNA, 25 bp, Artificial sequence
  SiRNA target sequence
cattcattaatgtattcttttctcc

SEQ ID NO: 144911 - DNA, 25 bp, Artificial sequence
  SiRNA target sequence
attcattaatgtattcttttctcct

SEQ ID NO: 144912 - DNA, 25 bp, Artificial sequence
  SiRNA target sequence
ttcattaatgtattcttttctccta

SEQ ID NO: 144913 - DNA, 25 bp, Artificial sequence
  SiRNA target sequence
tcattaatgtattcttttctcctat

SEQ ID NO: 144914 - DNA, 25 bp, Artificial sequence
  SiRNA target sequence
cattaatgtattcttttctcctatt

SEQ ID NO: 144915 - DNA, 25 bp, Artificial sequence
  SiRNA target sequence
attaatgtattcttttctcctattt

SEQ ID NO: 144916 - DNA, 25 bp, Artificial sequence
  SiRNA target sequence
ttaatgtattcttttctcctatttt

SEQ ID NO: 144917 - DNA, 25 bp, Artificial sequence
  SiRNA target sequence
taatgtattcttttctcctattttt

SEQ ID NO: 144918 - DNA, 25 bp, Artificial sequence
  SiRNA target sequence
aatgtattcttttctcctattttta

SEQ ID NO: 144919 - DNA, 25 bp, Artificial sequence
  SiRNA target sequence
atgtattcttttctcctatttttat

SEQ ID NO: 144920 - DNA, 25 bp, Artificial sequence
  SiRNA target sequence
tgtattcttttctcctatttttata

SEQ ID NO: 144921 - DNA, 25 bp, Artificial sequence
  SiRNA target sequence
gtattcttttctcctatttttatac

SEQ ID NO: 144922 - DNA, 25 bp, Artificial sequence
  SiRNA target sequence
tattcttttctcctatttttatact

SEQ ID NO: 144923 - DNA, 25 bp, Artificial sequence
  SiRNA target sequence
attcttttctcctatttttatactg

SEQ ID NO: 144924 - DNA, 25 bp, Artificial sequence
  SiRNA target sequence
ttcttttctcctatttttatactgt

SEQ ID NO: 144925 - DNA, 25 bp, Artificial sequence
  SiRNA target sequence
tcttttctcctatttttatactgta

SEQ ID NO: 144926 - DNA, 25 bp, Artificial sequence
  SiRNA target sequence
cttttctcctatttttatactgtaa

SEQ ID NO: 144927 - DNA, 25 bp, Artificial sequence
  SiRNA target sequence
ttttctcctatttttatactgtaaa

SEQ ID NO: 144928 - DNA, 25 bp, Artificial sequence
  SiRNA target sequence
tttctcctatttttatactgtaaat

SEQ ID NO: 144929 - DNA, 25 bp, Artificial sequence
  SiRNA target sequence
ttctcctatttttatactgtaaata

SEQ ID NO: 144930 - DNA, 25 bp, Artificial sequence
  SiRNA target sequence
tctcctatttttatactgtaaataa

SEQ ID NO: 144931 - DNA, 25 bp, Artificial sequence
  SiRNA target sequence
ctcctatttttatactgtaaataat

SEQ ID NO: 144932 - DNA, 25 bp, Artificial sequence
  SiRNA target sequence
tcctatttttatactgtaaataata

SEQ ID NO: 144933 - DNA, 25 bp, Artificial sequence
  SiRNA target sequence
cctatttttatactgtaaataatac

SEQ ID NO: 144934 - DNA, 25 bp, Artificial sequence
  SiRNA target sequence
ctatttttatactgtaaataatacg

SEQ ID NO: 144935 - DNA, 25 bp, Artificial sequence
  SiRNA target sequence
tatttttatactgtaaataatacgc

SEQ ID NO: 144936 - DNA, 25 bp, Artificial sequence
  SiRNA target sequence
atttttatactgtaaataatacgca

SEQ ID NO: 144937 - DNA, 25 bp, Artificial sequence
  SiRNA target sequence
tttttatactgtaaataatacgcat

SEQ ID NO: 144938 - DNA, 25 bp, Artificial sequence
  SiRNA target sequence
ttttatactgtaaataatacgcatg

SEQ ID NO: 144939 - DNA, 25 bp, Artificial sequence
  SiRNA target sequence
tttatactgtaaataatacgcatgt

SEQ ID NO: 144940 - DNA, 25 bp, Artificial sequence
  SiRNA target sequence
ttatactgtaaataatacgcatgtt

SEQ ID NO: 144941 - DNA, 25 bp, Artificial sequence
  SiRNA target sequence
tatactgtaaataatacgcatgttc

SEQ ID NO: 144942 - DNA, 25 bp, Artificial sequence
  SiRNA target sequence
atactgtaaataatacgcatgttcc

SEQ ID NO: 144943 - DNA, 25 bp, Artificial sequence
  SiRNA target sequence
tactgtaaataatacgcatgttccc

SEQ ID NO: 144944 - DNA, 25 bp, Artificial sequence
  SiRNA target sequence
actgtaaataatacgcatgttccca

SEQ ID NO: 144945 - DNA, 25 bp, Artificial sequence
  SiRNA target sequence
ctgtaaataatacgcatgttcccat

SEQ ID NO: 144946 - DNA, 25 bp, Artificial sequence
  SiRNA target sequence
tgtaaataatacgcatgttcccata

SEQ ID NO: 144947 - DNA, 25 bp, Artificial sequence
  SiRNA target sequence
gtaaataatacgcatgttcccatac

SEQ ID NO: 144948 - DNA, 25 bp, Artificial sequence
  SiRNA target sequence
taaataatacgcatgttcccataca

SEQ ID NO: 144949 - DNA, 25 bp, Artificial sequence
  SiRNA target sequence
aaataatacgcatgttcccatacat

SEQ ID NO: 144950 - DNA, 25 bp, Artificial sequence
  SiRNA target sequence
aataatacgcatgttcccatacatc

SEQ ID NO: 144951 - DNA, 25 bp, Artificial sequence
  SiRNA target sequence
ataatacgcatgttcccatacatca

SEQ ID NO: 144952 - DNA, 25 bp, Artificial sequence
  SiRNA target sequence
taatacgcatgttcccatacatcaa

SEQ ID NO: 144953 - DNA, 25 bp, Artificial sequence
  SiRNA target sequence
aatacgcatgttcccatacatcaag

SEQ ID NO: 144954 - DNA, 25 bp, Artificial sequence
  SiRNA target sequence
atacgcatgttcccatacatcaaga

SEQ ID NO: 144955 - DNA, 25 bp, Artificial sequence
  SiRNA target sequence
tacgcatgttcccatacatcaagac

SEQ ID NO: 144956 - DNA, 25 bp, Artificial sequence
  SiRNA target sequence
acgcatgttcccatacatcaagaca

SEQ ID NO: 144957 - DNA, 25 bp, Artificial sequence
  SiRNA target sequence
cgcatgttcccatacatcaagacat

SEQ ID NO: 144958 - DNA, 25 bp, Artificial sequence
  SiRNA target sequence
gcatgttcccatacatcaagacata

SEQ ID NO: 144959 - DNA, 25 bp, Artificial sequence
  SiRNA target sequence
catgttcccatacatcaagacatag

SEQ ID NO: 144960 - DNA, 25 bp, Artificial sequence
  SiRNA target sequence
atgttcccatacatcaagacatagt

SEQ ID NO: 144961 - DNA, 25 bp, Artificial sequence
  SiRNA target sequence
tgttcccatacatcaagacatagta

SEQ ID NO: 144962 - DNA, 25 bp, Artificial sequence
  SiRNA target sequence
gttcccatacatcaagacatagtaa

SEQ ID NO: 144963 - DNA, 25 bp, Artificial sequence
  SiRNA target sequence
ttcccatacatcaagacatagtaaa

SEQ ID NO: 144964 - DNA, 25 bp, Artificial sequence
  SiRNA target sequence
tcccatacatcaagacatagtaaag

SEQ ID NO: 144965 - DNA, 25 bp, Artificial sequence
  SiRNA target sequence
cccatacatcaagacatagtaaagg

SEQ ID NO: 144966 - DNA, 25 bp, Artificial sequence
  SiRNA target sequence
ccatacatcaagacatagtaaagga

SEQ ID NO: 144967 - DNA, 25 bp, Artificial sequence
  SiRNA target sequence
catacatcaagacatagtaaaggaa

SEQ ID NO: 144968 - DNA, 25 bp, Artificial sequence
  SiRNA target sequence
atacatcaagacatagtaaaggaat

SEQ ID NO: 144969 - DNA, 25 bp, Artificial sequence
  SiRNA target sequence
tacatcaagacatagtaaaggaata

SEQ ID NO: 144970 - DNA, 25 bp, Artificial sequence
  SiRNA target sequence
acatcaagacatagtaaaggaatac

SEQ ID NO: 144971 - DNA, 25 bp, Artificial sequence
  SiRNA target sequence
catcaagacatagtaaaggaataca

SEQ ID NO: 144972 - DNA, 25 bp, Artificial sequence
  SiRNA target sequence
atcaagacatagtaaaggaatacat

SEQ ID NO: 144973 - DNA, 25 bp, Artificial sequence
  SiRNA target sequence
tcaagacatagtaaaggaatacatt

SEQ ID NO: 144974 - DNA, 25 bp, Artificial sequence
  SiRNA target sequence
caagacatagtaaaggaatacattc

SEQ ID NO: 144975 - DNA, 25 bp, Artificial sequence
  SiRNA target sequence
aagacatagtaaaggaatacattca

SEQ ID NO: 144976 - DNA, 25 bp, Artificial sequence
  SiRNA target sequence
agacatagtaaaggaatacattcac

SEQ ID NO: 144977 - DNA, 25 bp, Artificial sequence
  SiRNA target sequence
gacatagtaaaggaatacattcacc

SEQ ID NO: 144978 - DNA, 25 bp, Artificial sequence
  SiRNA target sequence
acatagtaaaggaatacattcacca

SEQ ID NO: 144979 - DNA, 25 bp, Artificial sequence
  SiRNA target sequence
catagtaaaggaatacattcaccat

SEQ ID NO: 144980 - DNA, 25 bp, Artificial sequence
  SiRNA target sequence
atagtaaaggaatacattcaccatc

SEQ ID NO: 144981 - DNA, 25 bp, Artificial sequence
  SiRNA target sequence
tagtaaaggaatacattcaccatcc

SEQ ID NO: 144982 - DNA, 25 bp, Artificial sequence
  SiRNA target sequence
agtaaaggaatacattcaccatcct

SEQ ID NO: 144983 - DNA, 25 bp, Artificial sequence
  SiRNA target sequence
gtaaaggaatacattcaccatcctc

SEQ ID NO: 144984 - DNA, 25 bp, Artificial sequence
  SiRNA target sequence
taaaggaatacattcaccatcctcc

SEQ ID NO: 144985 - DNA, 25 bp, Artificial sequence
  SiRNA target sequence
aaaggaatacattcaccatcctcca

SEQ ID NO: 144986 - DNA, 25 bp, Artificial sequence
  SiRNA target sequence
aaggaatacattcaccatcctccat

SEQ ID NO: 144987 - DNA, 25 bp, Artificial sequence
  SiRNA target sequence
aggaatacattcaccatcctccatc

SEQ ID NO: 144988 - DNA, 25 bp, Artificial sequence
  SiRNA target sequence
ggaatacattcaccatcctccatca

SEQ ID NO: 144989 - DNA, 25 bp, Artificial sequence
  SiRNA target sequence
gaatacattcaccatcctccatcat

SEQ ID NO: 144990 - DNA, 25 bp, Artificial sequence
  SiRNA target sequence
aatacattcaccatcctccatcata

SEQ ID NO: 144991 - DNA, 25 bp, Artificial sequence
  SiRNA target sequence
atacattcaccatcctccatcatag

SEQ ID NO: 144992 - DNA, 25 bp, Artificial sequence
  SiRNA target sequence
tacattcaccatcctccatcatagg

SEQ ID NO: 144993 - DNA, 25 bp, Artificial sequence
  SiRNA target sequence
acattcaccatcctccatcatagga

SEQ ID NO: 144994 - DNA, 25 bp, Artificial sequence
  SiRNA target sequence
cattcaccatcctccatcataggat

SEQ ID NO: 144995 - DNA, 25 bp, Artificial sequence
  SiRNA target sequence
attcaccatcctccatcataggatt

SEQ ID NO: 144996 - DNA, 25 bp, Artificial sequence
  SiRNA target sequence
ttcaccatcctccatcataggattg

SEQ ID NO: 144997 - DNA, 25 bp, Artificial sequence
  SiRNA target sequence
tcaccatcctccatcataggattgt

SEQ ID NO: 144998 - DNA, 25 bp, Artificial sequence
  SiRNA target sequence
caccatcctccatcataggattgtc

SEQ ID NO: 144999 - DNA, 25 bp, Artificial sequence
  SiRNA target sequence
accatcctccatcataggattgtct

SEQ ID NO: 145000 - DNA, 25 bp, Artificial sequence
  SiRNA target sequence
ccatcctccatcataggattgtctt

SEQ ID NO: 145001 - DNA, 25 bp, Artificial sequence
  SiRNA target sequence
catcctccatcataggattgtcttg

SEQ ID NO: 145002 - DNA, 25 bp, Artificial sequence
  SiRNA target sequence
atcctccatcataggattgtcttga

SEQ ID NO: 145003 - DNA, 25 bp, Artificial sequence
  SiRNA target sequence
tcctccatcataggattgtcttgat

SEQ ID NO: 145004 - DNA, 25 bp, Artificial sequence
  SiRNA target sequence
cctccatcataggattgtcttgatt

SEQ ID NO: 145005 - DNA, 25 bp, Artificial sequence
  SiRNA target sequence
ctccatcataggattgtcttgatta

SEQ ID NO: 145006 - DNA, 25 bp, Artificial sequence
  SiRNA target sequence
tccatcataggattgtcttgattaa

SEQ ID NO: 145007 - DNA, 25 bp, Artificial sequence
  SiRNA target sequence
ccatcataggattgtcttgattaac

SEQ ID NO: 145008 - DNA, 25 bp, Artificial sequence
  SiRNA target sequence
catcataggattgtcttgattaaca

SEQ ID NO: 145009 - DNA, 25 bp, Artificial sequence
  SiRNA target sequence
atcataggattgtcttgattaacac

SEQ ID NO: 145010 - DNA, 25 bp, Artificial sequence
  SiRNA target sequence
tcataggattgtcttgattaacact

SEQ ID NO: 145011 - DNA, 25 bp, Artificial sequence
  SiRNA target sequence
cataggattgtcttgattaacactg

SEQ ID NO: 145012 - DNA, 25 bp, Artificial sequence
  SiRNA target sequence
ataggattgtcttgattaacactgg

SEQ ID NO: 145013 - DNA, 25 bp, Artificial sequence
  SiRNA target sequence
taggattgtcttgattaacactggt

SEQ ID NO: 145014 - DNA, 25 bp, Artificial sequence
  SiRNA target sequence
aggattgtcttgattaacactggtc

SEQ ID NO: 145015 - DNA, 25 bp, Artificial sequence
  SiRNA target sequence
ggattgtcttgattaacactggtct

SEQ ID NO: 145016 - DNA, 25 bp, Artificial sequence
  SiRNA target sequence
gattgtcttgattaacactggtctt

SEQ ID NO: 145017 - DNA, 25 bp, Artificial sequence
  SiRNA target sequence
attgtcttgattaacactggtctta

SEQ ID NO: 145018 - DNA, 25 bp, Artificial sequence
  SiRNA target sequence
ttgtcttgattaacactggtcttaa

SEQ ID NO: 145019 - DNA, 25 bp, Artificial sequence
  SiRNA target sequence
tgtcttgattaacactggtcttaat

SEQ ID NO: 145020 - DNA, 25 bp, Artificial sequence
  SiRNA target sequence
gtcttgattaacactggtcttaata

SEQ ID NO: 145021 - DNA, 25 bp, Artificial sequence
  SiRNA target sequence
tcttgattaacactggtcttaatac

SEQ ID NO: 145022 - DNA, 25 bp, Artificial sequence
  SiRNA target sequence
cttgattaacactggtcttaataca

SEQ ID NO: 145023 - DNA, 25 bp, Artificial sequence
  SiRNA target sequence
ttgattaacactggtcttaatacac

SEQ ID NO: 145024 - DNA, 25 bp, Artificial sequence
  SiRNA target sequence
tgattaacactggtcttaatacaca

SEQ ID NO: 145025 - DNA, 25 bp, Artificial sequence
  SiRNA target sequence
gattaacactggtcttaatacacaa

SEQ ID NO: 145026 - DNA, 25 bp, Artificial sequence
  SiRNA target sequence
attaacactggtcttaatacacaat

SEQ ID NO: 145027 - DNA, 25 bp, Artificial sequence
  SiRNA target sequence
ttaacactggtcttaatacacaatt

SEQ ID NO: 145028 - DNA, 25 bp, Artificial sequence
  SiRNA target sequence
taacactggtcttaatacacaattt

SEQ ID NO: 145029 - DNA, 25 bp, Artificial sequence
  SiRNA target sequence
aacactggtcttaatacacaattta

SEQ ID NO: 145030 - DNA, 25 bp, Artificial sequence
  SiRNA target sequence
acactggtcttaatacacaatttat

SEQ ID NO: 145031 - DNA, 25 bp, Artificial sequence
  SiRNA target sequence
cactggtcttaatacacaatttatc

SEQ ID NO: 145032 - DNA, 25 bp, Artificial sequence
  SiRNA target sequence
actggtcttaatacacaatttatct

SEQ ID NO: 145033 - DNA, 25 bp, Artificial sequence
  SiRNA target sequence
ctggtcttaatacacaatttatctt

SEQ ID NO: 145034 - DNA, 25 bp, Artificial sequence
  SiRNA target sequence
tggtcttaatacacaatttatcttt

SEQ ID NO: 145035 - DNA, 25 bp, Artificial sequence
  SiRNA target sequence
ggtcttaatacacaatttatcttta

SEQ ID NO: 145036 - DNA, 25 bp, Artificial sequence
  SiRNA target sequence
gtcttaatacacaatttatctttat

SEQ ID NO: 145037 - DNA, 25 bp, Artificial sequence
  SiRNA target sequence
tcttaatacacaatttatctttata

SEQ ID NO: 145038 - DNA, 25 bp, Artificial sequence
  SiRNA target sequence
cttaatacacaatttatctttatat

SEQ ID NO: 145039 - DNA, 25 bp, Artificial sequence
  SiRNA target sequence
ttaatacacaatttatctttatata

SEQ ID NO: 145040 - DNA, 25 bp, Artificial sequence
  SiRNA target sequence
taatacacaatttatctttatatat

SEQ ID NO: 145041 - DNA, 25 bp, Artificial sequence
  SiRNA target sequence
aatacacaatttatctttatatatc

SEQ ID NO: 145042 - DNA, 25 bp, Artificial sequence
  SiRNA target sequence
atacacaatttatctttatatatca

SEQ ID NO: 145043 - DNA, 25 bp, Artificial sequence
  SiRNA target sequence
tacacaatttatctttatatatcaa

SEQ ID NO: 145044 - DNA, 25 bp, Artificial sequence
  SiRNA target sequence
acacaatttatctttatatatcaac

SEQ ID NO: 145045 - DNA, 25 bp, Artificial sequence
  SiRNA target sequence
cacaatttatctttatatatcaacc

SEQ ID NO: 145046 - DNA, 25 bp, Artificial sequence
  SiRNA target sequence
acaatttatctttatatatcaacca

SEQ ID NO: 145047 - DNA, 25 bp, Artificial sequence
  SiRNA target sequence
caatttatctttatatatcaaccac

SEQ ID NO: 145048 - DNA, 25 bp, Artificial sequence
  SiRNA target sequence
aatttatctttatatatcaaccaca

SEQ ID NO: 145049 - DNA, 25 bp, Artificial sequence
  SiRNA target sequence
atttatctttatatatcaaccacac

SEQ ID NO: 145050 - DNA, 25 bp, Artificial sequence
  SiRNA target sequence
tttatctttatatatcaaccacacc

SEQ ID NO: 145051 - DNA, 25 bp, Artificial sequence
  SiRNA target sequence
ttatctttatatatcaaccacaccc

SEQ ID NO: 145052 - DNA, 25 bp, Artificial sequence
  SiRNA target sequence
tatctttatatatcaaccacaccca

SEQ ID NO: 145053 - DNA, 25 bp, Artificial sequence
  SiRNA target sequence
atctttatatatcaaccacacccat

SEQ ID NO: 145054 - DNA, 25 bp, Artificial sequence
  SiRNA target sequence
tctttatatatcaaccacacccatc

SEQ ID NO: 145055 - DNA, 25 bp, Artificial sequence
  SiRNA target sequence
ctttatatatcaaccacacccatcc

SEQ ID NO: 145056 - DNA, 25 bp, Artificial sequence
  SiRNA target sequence
tttatatatcaaccacacccatcct

SEQ ID NO: 145057 - DNA, 25 bp, Artificial sequence
  SiRNA target sequence
ttatatatcaaccacacccatcctg

SEQ ID NO: 145058 - DNA, 25 bp, Artificial sequence
  SiRNA target sequence
tatatatcaaccacacccatcctga

SEQ ID NO: 145059 - DNA, 25 bp, Artificial sequence
  SiRNA target sequence
atatatcaaccacacccatcctgat

SEQ ID NO: 145060 - DNA, 25 bp, Artificial sequence
  SiRNA target sequence
tatatcaaccacacccatcctgatc

SEQ ID NO: 145061 - DNA, 25 bp, Artificial sequence
  SiRNA target sequence
atatcaaccacacccatcctgatcc

SEQ ID NO: 145062 - DNA, 25 bp, Artificial sequence
  SiRNA target sequence
tatcaaccacacccatcctgatcca

SEQ ID NO: 145063 - DNA, 25 bp, Artificial sequence
  SiRNA target sequence
atcaaccacacccatcctgatccaa

SEQ ID NO: 145064 - DNA, 25 bp, Artificial sequence
  SiRNA target sequence
tcaaccacacccatcctgatccaaa

SEQ ID NO: 145065 - DNA, 25 bp, Artificial sequence
  SiRNA target sequence
caaccacacccatcctgatccaaat

SEQ ID NO: 145066 - DNA, 25 bp, Artificial sequence
  SiRNA target sequence
aaccacacccatcctgatccaaata

SEQ ID NO: 145067 - DNA, 25 bp, Artificial sequence
  SiRNA target sequence
accacacccatcctgatccaaataa

SEQ ID NO: 145068 - DNA, 25 bp, Artificial sequence
  SiRNA target sequence
ccacacccatcctgatccaaataat

SEQ ID NO: 145069 - DNA, 25 bp, Artificial sequence
  SiRNA target sequence
cacacccatcctgatccaaataatt

SEQ ID NO: 145070 - DNA, 25 bp, Artificial sequence
  SiRNA target sequence
acacccatcctgatccaaataattt

SEQ ID NO: 145071 - DNA, 25 bp, Artificial sequence
  SiRNA target sequence
cacccatcctgatccaaataatttt

SEQ ID NO: 145072 - DNA, 25 bp, Artificial sequence
  SiRNA target sequence
acccatcctgatccaaataatttta

SEQ ID NO: 145073 - DNA, 25 bp, Artificial sequence
  SiRNA target sequence
cccatcctgatccaaataattttac

SEQ ID NO: 145074 - DNA, 25 bp, Artificial sequence
  SiRNA target sequence
ccatcctgatccaaataattttaca

SEQ ID NO: 145075 - DNA, 25 bp, Artificial sequence
  SiRNA target sequence
catcctgatccaaataattttacag

SEQ ID NO: 145076 - DNA, 25 bp, Artificial sequence
  SiRNA target sequence
atcctgatccaaataattttacagc

SEQ ID NO: 145077 - DNA, 25 bp, Artificial sequence
  SiRNA target sequence
tcctgatccaaataattttacagct

SEQ ID NO: 145078 - DNA, 25 bp, Artificial sequence
  SiRNA target sequence
cctgatccaaataattttacagctt

SEQ ID NO: 145079 - DNA, 25 bp, Artificial sequence
  SiRNA target sequence
ctgatccaaataattttacagcttc

SEQ ID NO: 145080 - DNA, 25 bp, Artificial sequence
  SiRNA target sequence
tgatccaaataattttacagcttca

SEQ ID NO: 145081 - DNA, 25 bp, Artificial sequence
  SiRNA target sequence
gatccaaataattttacagcttcag

SEQ ID NO: 145082 - DNA, 25 bp, Artificial sequence
  SiRNA target sequence
atccaaataattttacagcttcagt

SEQ ID NO: 145083 - DNA, 25 bp, Artificial sequence
  SiRNA target sequence
tccaaataattttacagcttcagta

SEQ ID NO: 145084 - DNA, 25 bp, Artificial sequence
  SiRNA target sequence
ccaaataattttacagcttcagtat

SEQ ID NO: 145085 - DNA, 25 bp, Artificial sequence
  SiRNA target sequence
caaataattttacagcttcagtatt

SEQ ID NO: 145086 - DNA, 25 bp, Artificial sequence
  SiRNA target sequence
aaataattttacagcttcagtatta

SEQ ID NO: 145087 - DNA, 25 bp, Artificial sequence
  SiRNA target sequence
aataattttacagcttcagtattaa

SEQ ID NO: 145088 - DNA, 25 bp, Artificial sequence
  SiRNA target sequence
ataattttacagcttcagtattaaa

SEQ ID NO: 145089 - DNA, 25 bp, Artificial sequence
  SiRNA target sequence
taattttacagcttcagtattaaaa

SEQ ID NO: 145090 - DNA, 25 bp, Artificial sequence
  SiRNA target sequence
aattttacagcttcagtattaaaat

SEQ ID NO: 145091 - DNA, 25 bp, Artificial sequence
  SiRNA target sequence
attttacagcttcagtattaaaatt

SEQ ID NO: 145092 - DNA, 25 bp, Artificial sequence
  SiRNA target sequence
ttttacagcttcagtattaaaattc

SEQ ID NO: 145093 - DNA, 25 bp, Artificial sequence
  SiRNA target sequence
tttacagcttcagtattaaaattct

SEQ ID NO: 145094 - DNA, 25 bp, Artificial sequence
  SiRNA target sequence
ttacagcttcagtattaaaattctc

SEQ ID NO: 145095 - DNA, 25 bp, Artificial sequence
  SiRNA target sequence
tacagcttcagtattaaaattctcc

SEQ ID NO: 145096 - DNA, 25 bp, Artificial sequence
  SiRNA target sequence
acagcttcagtattaaaattctcct

SEQ ID NO: 145097 - DNA, 25 bp, Artificial sequence
  SiRNA target sequence
cagcttcagtattaaaattctcctt

SEQ ID NO: 145098 - DNA, 25 bp, Artificial sequence
  SiRNA target sequence
agcttcagtattaaaattctcctta

SEQ ID NO: 145099 - DNA, 25 bp, Artificial sequence
  SiRNA target sequence
gcttcagtattaaaattctccttaa

SEQ ID NO: 145100 - DNA, 25 bp, Artificial sequence
  SiRNA target sequence
cttcagtattaaaattctccttaaa

SEQ ID NO: 145101 - DNA, 25 bp, Artificial sequence
  SiRNA target sequence
ttcagtattaaaattctccttaaat

SEQ ID NO: 145102 - DNA, 25 bp, Artificial sequence
  SiRNA target sequence
tcagtattaaaattctccttaaatt

SEQ ID NO: 145103 - DNA, 25 bp, Artificial sequence
  SiRNA target sequence
cagtattaaaattctccttaaattt

SEQ ID NO: 145104 - DNA, 25 bp, Artificial sequence
  SiRNA target sequence
agtattaaaattctccttaaattta

SEQ ID NO: 145105 - DNA, 25 bp, Artificial sequence
  SiRNA target sequence
gtattaaaattctccttaaatttat

SEQ ID NO: 145106 - DNA, 25 bp, Artificial sequence
  SiRNA target sequence
tattaaaattctccttaaatttatt

SEQ ID NO: 145107 - DNA, 25 bp, Artificial sequence
  SiRNA target sequence
attaaaattctccttaaatttattt

SEQ ID NO: 145108 - DNA, 25 bp, Artificial sequence
  SiRNA target sequence
ttaaaattctccttaaatttattta

SEQ ID NO: 145109 - DNA, 25 bp, Artificial sequence
  SiRNA target sequence
taaaattctccttaaatttatttat

SEQ ID NO: 145110 - DNA, 25 bp, Artificial sequence
  SiRNA target sequence
aaaattctccttaaatttatttatt

SEQ ID NO: 145111 - DNA, 25 bp, Artificial sequence
  SiRNA target sequence
aaattctccttaaatttatttattg

SEQ ID NO: 145112 - DNA, 25 bp, Artificial sequence
  SiRNA target sequence
aattctccttaaatttatttattga

SEQ ID NO: 145113 - DNA, 25 bp, Artificial sequence
  SiRNA target sequence
attctccttaaatttatttattgat

SEQ ID NO: 145114 - DNA, 25 bp, Artificial sequence
  SiRNA target sequence
ttctccttaaatttatttattgatc

SEQ ID NO: 145115 - DNA, 25 bp, Artificial sequence
  SiRNA target sequence
tctccttaaatttatttattgatcc

SEQ ID NO: 145116 - DNA, 25 bp, Artificial sequence
  SiRNA target sequence
ctccttaaatttatttattgatcca

SEQ ID NO: 145117 - DNA, 25 bp, Artificial sequence
  SiRNA target sequence
tccttaaatttatttattgatccaa

SEQ ID NO: 145118 - DNA, 25 bp, Artificial sequence
  SiRNA target sequence
ccttaaatttatttattgatccaaa

SEQ ID NO: 145119 - DNA, 25 bp, Artificial sequence
  SiRNA target sequence
cttaaatttatttattgatccaaag

SEQ ID NO: 145120 - DNA, 25 bp, Artificial sequence
  SiRNA target sequence
ttaaatttatttattgatccaaagt

SEQ ID NO: 145121 - DNA, 25 bp, Artificial sequence
  SiRNA target sequence
taaatttatttattgatccaaagtc

SEQ ID NO: 145122 - DNA, 25 bp, Artificial sequence
  SiRNA target sequence
aaatttatttattgatccaaagtct

SEQ ID NO: 145123 - DNA, 25 bp, Artificial sequence
  SiRNA target sequence
aatttatttattgatccaaagtctt

SEQ ID NO: 145124 - DNA, 25 bp, Artificial sequence
  SiRNA target sequence
atttatttattgatccaaagtcttt

SEQ ID NO: 145125 - DNA, 25 bp, Artificial sequence
  SiRNA target sequence
tttatttattgatccaaagtctttt

SEQ ID NO: 145126 - DNA, 25 bp, Artificial sequence
  SiRNA target sequence
ttatttattgatccaaagtctttta

SEQ ID NO: 145127 - DNA, 25 bp, Artificial sequence
  SiRNA target sequence
tatttattgatccaaagtcttttat

SEQ ID NO: 145128 - DNA, 25 bp, Artificial sequence
  SiRNA target sequence
atttattgatccaaagtcttttatt

SEQ ID NO: 145129 - DNA, 25 bp, Artificial sequence
  SiRNA target sequence
tttattgatccaaagtcttttatta

SEQ ID NO: 145130 - DNA, 25 bp, Artificial sequence
  SiRNA target sequence
ttattgatccaaagtcttttattat

SEQ ID NO: 145131 - DNA, 25 bp, Artificial sequence
  SiRNA target sequence
tattgatccaaagtcttttattata

SEQ ID NO: 145132 - DNA, 25 bp, Artificial sequence
  SiRNA target sequence
attgatccaaagtcttttattatag

SEQ ID NO: 145133 - DNA, 25 bp, Artificial sequence
  SiRNA target sequence
ttgatccaaagtcttttattatagc

SEQ ID NO: 145134 - DNA, 25 bp, Artificial sequence
  SiRNA target sequence
tgatccaaagtcttttattatagca

SEQ ID NO: 145135 - DNA, 25 bp, Artificial sequence
  SiRNA target sequence
gatccaaagtcttttattatagcac

SEQ ID NO: 145136 - DNA, 25 bp, Artificial sequence
  SiRNA target sequence
atccaaagtcttttattatagcact

SEQ ID NO: 145137 - DNA, 25 bp, Artificial sequence
  SiRNA target sequence
tccaaagtcttttattatagcactt

SEQ ID NO: 145138 - DNA, 25 bp, Artificial sequence
  SiRNA target sequence
ccaaagtcttttattatagcacttt

SEQ ID NO: 145139 - DNA, 25 bp, Artificial sequence
  SiRNA target sequence
caaagtcttttattatagcactttc

SEQ ID NO: 145140 - DNA, 25 bp, Artificial sequence
  SiRNA target sequence
aaagtcttttattatagcactttcc

SEQ ID NO: 145141 - DNA, 25 bp, Artificial sequence
  SiRNA target sequence
aagtcttttattatagcactttcca

SEQ ID NO: 145142 - DNA, 25 bp, Artificial sequence
  SiRNA target sequence
agtcttttattatagcactttccaa

SEQ ID NO: 145143 - DNA, 25 bp, Artificial sequence
  SiRNA target sequence
gtcttttattatagcactttccaac

SEQ ID NO: 145144 - DNA, 25 bp, Artificial sequence
  SiRNA target sequence
tcttttattatagcactttccaact

SEQ ID NO: 145145 - DNA, 25 bp, Artificial sequence
  SiRNA target sequence
cttttattatagcactttccaactg

SEQ ID NO: 145146 - DNA, 25 bp, Artificial sequence
  SiRNA target sequence
ttttattatagcactttccaactgg

SEQ ID NO: 145147 - DNA, 25 bp, Artificial sequence
  SiRNA target sequence
tttattatagcactttccaactggg

SEQ ID NO: 145148 - DNA, 25 bp, Artificial sequence
  SiRNA target sequence
ttattatagcactttccaactggga

SEQ ID NO: 145149 - DNA, 25 bp, Artificial sequence
  SiRNA target sequence
tattatagcactttccaactgggaa

SEQ ID NO: 145150 - DNA, 25 bp, Artificial sequence
  SiRNA target sequence
attatagcactttccaactgggaag

SEQ ID NO: 145151 - DNA, 25 bp, Artificial sequence
  SiRNA target sequence
ttatagcactttccaactgggaaga

SEQ ID NO: 145152 - DNA, 25 bp, Artificial sequence
  SiRNA target sequence
tatagcactttccaactgggaagaa

SEQ ID NO: 145153 - DNA, 25 bp, Artificial sequence
  SiRNA target sequence
atagcactttccaactgggaagaaa

SEQ ID NO: 145154 - DNA, 25 bp, Artificial sequence
  SiRNA target sequence
tagcactttccaactgggaagaaat

SEQ ID NO: 145155 - DNA, 25 bp, Artificial sequence
  SiRNA target sequence
agcactttccaactgggaagaaatc

SEQ ID NO: 145156 - DNA, 25 bp, Artificial sequence
  SiRNA target sequence
gcactttccaactgggaagaaatct

SEQ ID NO: 145157 - DNA, 25 bp, Artificial sequence
  SiRNA target sequence
cactttccaactgggaagaaatctt

SEQ ID NO: 145158 - DNA, 25 bp, Artificial sequence
  SiRNA target sequence
actttccaactgggaagaaatcttt

SEQ ID NO: 145159 - DNA, 25 bp, Artificial sequence
  SiRNA target sequence
ctttccaactgggaagaaatctttt

SEQ ID NO: 145160 - DNA, 25 bp, Artificial sequence
  SiRNA target sequence
tttccaactgggaagaaatcttttt

SEQ ID NO: 145161 - DNA, 25 bp, Artificial sequence
  SiRNA target sequence
ttccaactgggaagaaatcttttta

SEQ ID NO: 145162 - DNA, 25 bp, Artificial sequence
  SiRNA target sequence
tccaactgggaagaaatctttttat

SEQ ID NO: 145163 - DNA, 25 bp, Artificial sequence
  SiRNA target sequence
ccaactgggaagaaatctttttatt

SEQ ID NO: 145164 - DNA, 25 bp, Artificial sequence
  SiRNA target sequence
caactgggaagaaatctttttattt

SEQ ID NO: 145165 - DNA, 25 bp, Artificial sequence
  SiRNA target sequence
aactgggaagaaatctttttatttt

SEQ ID NO: 145166 - DNA, 25 bp, Artificial sequence
  SiRNA target sequence
actgggaagaaatctttttattttc

SEQ ID NO: 145167 - DNA, 25 bp, Artificial sequence
  SiRNA target sequence
ctgggaagaaatctttttattttct

SEQ ID NO: 145168 - DNA, 25 bp, Artificial sequence
  SiRNA target sequence
tgggaagaaatctttttattttctg

SEQ ID NO: 145169 - DNA, 25 bp, Artificial sequence
  SiRNA target sequence
gggaagaaatctttttattttctgg

SEQ ID NO: 145170 - DNA, 25 bp, Artificial sequence
  SiRNA target sequence
ggaagaaatctttttattttctggt

SEQ ID NO: 145171 - DNA, 25 bp, Artificial sequence
  SiRNA target sequence
gaagaaatctttttattttctggtg

SEQ ID NO: 145172 - DNA, 25 bp, Artificial sequence
  SiRNA target sequence
aagaaatctttttattttctggtga

SEQ ID NO: 145173 - DNA, 25 bp, Artificial sequence
  SiRNA target sequence
agaaatctttttattttctggtgac

SEQ ID NO: 145174 - DNA, 25 bp, Artificial sequence
  SiRNA target sequence
gaaatctttttattttctggtgaca

SEQ ID NO: 145175 - DNA, 25 bp, Artificial sequence
  SiRNA target sequence
aaatctttttattttctggtgacat

SEQ ID NO: 145176 - DNA, 25 bp, Artificial sequence
  SiRNA target sequence
aatctttttattttctggtgacatt

SEQ ID NO: 145177 - DNA, 25 bp, Artificial sequence
  SiRNA target sequence
atctttttattttctggtgacatta

SEQ ID NO: 145178 - DNA, 25 bp, Artificial sequence
  SiRNA target sequence
tctttttattttctggtgacattac

SEQ ID NO: 145179 - DNA, 25 bp, Artificial sequence
  SiRNA target sequence
ctttttattttctggtgacattacc

SEQ ID NO: 145180 - DNA, 25 bp, Artificial sequence
  SiRNA target sequence
tttttattttctggtgacattacca

SEQ ID NO: 145181 - DNA, 25 bp, Artificial sequence
  SiRNA target sequence
ttttattttctggtgacattaccaa

SEQ ID NO: 145182 - DNA, 25 bp, Artificial sequence
  SiRNA target sequence
tttattttctggtgacattaccaac

SEQ ID NO: 145183 - DNA, 25 bp, Artificial sequence
  SiRNA target sequence
ttattttctggtgacattaccaacc

SEQ ID NO: 145184 - DNA, 25 bp, Artificial sequence
  SiRNA target sequence
tattttctggtgacattaccaacca

SEQ ID NO: 145185 - DNA, 25 bp, Artificial sequence
  SiRNA target sequence
attttctggtgacattaccaaccag

SEQ ID NO: 145186 - DNA, 25 bp, Artificial sequence
  SiRNA target sequence
ttttctggtgacattaccaaccaga

SEQ ID NO: 145187 - DNA, 25 bp, Artificial sequence
  SiRNA target sequence
tttctggtgacattaccaaccagaa

SEQ ID NO: 145188 - DNA, 25 bp, Artificial sequence
  SiRNA target sequence
ttctggtgacattaccaaccagaaa

SEQ ID NO: 145189 - DNA, 25 bp, Artificial sequence
  SiRNA target sequence
tctggtgacattaccaaccagaaaa

SEQ ID NO: 145190 - DNA, 25 bp, Artificial sequence
  SiRNA target sequence
ctggtgacattaccaaccagaaaag

SEQ ID NO: 145191 - DNA, 25 bp, Artificial sequence
  SiRNA target sequence
tggtgacattaccaaccagaaaaga

SEQ ID NO: 145192 - DNA, 25 bp, Artificial sequence
  SiRNA target sequence
ggtgacattaccaaccagaaaagac

SEQ ID NO: 145193 - DNA, 25 bp, Artificial sequence
  SiRNA target sequence
gtgacattaccaaccagaaaagact

SEQ ID NO: 145194 - DNA, 25 bp, Artificial sequence
  SiRNA target sequence
tgacattaccaaccagaaaagacta

SEQ ID NO: 145195 - DNA, 25 bp, Artificial sequence
  SiRNA target sequence
gacattaccaaccagaaaagactat

SEQ ID NO: 145196 - DNA, 25 bp, Artificial sequence
  SiRNA target sequence
acattaccaaccagaaaagactatg

SEQ ID NO: 145197 - DNA, 25 bp, Artificial sequence
  SiRNA target sequence
cattaccaaccagaaaagactatgg

SEQ ID NO: 145198 - DNA, 25 bp, Artificial sequence
  SiRNA target sequence
attaccaaccagaaaagactatggt

SEQ ID NO: 145199 - DNA, 25 bp, Artificial sequence
  SiRNA target sequence
ttaccaaccagaaaagactatggtt

SEQ ID NO: 145200 - DNA, 25 bp, Artificial sequence
  SiRNA target sequence
taccaaccagaaaagactatggttg

SEQ ID NO: 145201 - DNA, 25 bp, Artificial sequence
  SiRNA target sequence
accaaccagaaaagactatggttgt

SEQ ID NO: 145202 - DNA, 25 bp, Artificial sequence
  SiRNA target sequence
ccaaccagaaaagactatggttgta

SEQ ID NO: 145203 - DNA, 25 bp, Artificial sequence
  SiRNA target sequence
caaccagaaaagactatggttgtaa

SEQ ID NO: 145204 - DNA, 25 bp, Artificial sequence
  SiRNA target sequence
aaccagaaaagactatggttgtaat

SEQ ID NO: 145205 - DNA, 25 bp, Artificial sequence
  SiRNA target sequence
accagaaaagactatggttgtaatg

SEQ ID NO: 145206 - DNA, 25 bp, Artificial sequence
  SiRNA target sequence
ccagaaaagactatggttgtaatga

SEQ ID NO: 145207 - DNA, 25 bp, Artificial sequence
  SiRNA target sequence
cagaaaagactatggttgtaatgac

SEQ ID NO: 145208 - DNA, 25 bp, Artificial sequence
  SiRNA target sequence
agaaaagactatggttgtaatgacc

SEQ ID NO: 145209 - DNA, 25 bp, Artificial sequence
  SiRNA target sequence
gaaaagactatggttgtaatgacca

SEQ ID NO: 145210 - DNA, 25 bp, Artificial sequence
  SiRNA target sequence
aaaagactatggttgtaatgaccac

SEQ ID NO: 145211 - DNA, 25 bp, Artificial sequence
  SiRNA target sequence
aaagactatggttgtaatgaccacc

SEQ ID NO: 145212 - DNA, 25 bp, Artificial sequence
  SiRNA target sequence
aagactatggttgtaatgaccacca

SEQ ID NO: 145213 - DNA, 25 bp, Artificial sequence
  SiRNA target sequence
agactatggttgtaatgaccaccac

SEQ ID NO: 145214 - DNA, 25 bp, Artificial sequence
  SiRNA target sequence
gactatggttgtaatgaccaccacc

SEQ ID NO: 145215 - DNA, 25 bp, Artificial sequence
  SiRNA target sequence
actatggttgtaatgaccaccacca

SEQ ID NO: 145216 - DNA, 25 bp, Artificial sequence
  SiRNA target sequence
ctatggttgtaatgaccaccaccat

SEQ ID NO: 145217 - DNA, 25 bp, Artificial sequence
  SiRNA target sequence
tatggttgtaatgaccaccaccata

SEQ ID NO: 145218 - DNA, 25 bp, Artificial sequence
  SiRNA target sequence
atggttgtaatgaccaccaccataa

SEQ ID NO: 145219 - DNA, 25 bp, Artificial sequence
  SiRNA target sequence
tggttgtaatgaccaccaccataat

SEQ ID NO: 145220 - DNA, 25 bp, Artificial sequence
  SiRNA target sequence
ggttgtaatgaccaccaccataatc

SEQ ID NO: 145221 - DNA, 25 bp, Artificial sequence
  SiRNA target sequence
gttgtaatgaccaccaccataatct

SEQ ID NO: 145222 - DNA, 25 bp, Artificial sequence
  SiRNA target sequence
ttgtaatgaccaccaccataatctc

SEQ ID NO: 145223 - DNA, 25 bp, Artificial sequence
  SiRNA target sequence
tgtaatgaccaccaccataatctct

SEQ ID NO: 145224 - DNA, 25 bp, Artificial sequence
  SiRNA target sequence
gtaatgaccaccaccataatctctt

SEQ ID NO: 145225 - DNA, 25 bp, Artificial sequence
  SiRNA target sequence
taatgaccaccaccataatctctta

SEQ ID NO: 145226 - DNA, 25 bp, Artificial sequence
  SiRNA target sequence
aatgaccaccaccataatctcttaa

SEQ ID NO: 145227 - DNA, 25 bp, Artificial sequence
  SiRNA target sequence
atgaccaccaccataatctcttaat

SEQ ID NO: 145228 - DNA, 25 bp, Artificial sequence
  SiRNA target sequence
tgaccaccaccataatctcttaatt

SEQ ID NO: 145229 - DNA, 25 bp, Artificial sequence
  SiRNA target sequence
gaccaccaccataatctcttaattg

SEQ ID NO: 145230 - DNA, 25 bp, Artificial sequence
  SiRNA target sequence
accaccaccataatctcttaattgt

SEQ ID NO: 145231 - DNA, 25 bp, Artificial sequence
  SiRNA target sequence
ccaccaccataatctcttaattgtt

SEQ ID NO: 145232 - DNA, 25 bp, Artificial sequence
  SiRNA target sequence
caccaccataatctcttaattgttt

SEQ ID NO: 145233 - DNA, 25 bp, Artificial sequence
  SiRNA target sequence
accaccataatctcttaattgttta

SEQ ID NO: 145234 - DNA, 25 bp, Artificial sequence
  SiRNA target sequence
ccaccataatctcttaattgtttat

SEQ ID NO: 145235 - DNA, 25 bp, Artificial sequence
  SiRNA target sequence
caccataatctcttaattgtttatc

SEQ ID NO: 145236 - DNA, 25 bp, Artificial sequence
  SiRNA target sequence
accataatctcttaattgtttatca

SEQ ID NO: 145237 - DNA, 25 bp, Artificial sequence
  SiRNA target sequence
ccataatctcttaattgtttatcaa

SEQ ID NO: 145238 - DNA, 25 bp, Artificial sequence
  SiRNA target sequence
cataatctcttaattgtttatcaac

SEQ ID NO: 145239 - DNA, 25 bp, Artificial sequence
  SiRNA target sequence
ataatctcttaattgtttatcaaca

SEQ ID NO: 145240 - DNA, 25 bp, Artificial sequence
  SiRNA target sequence
taatctcttaattgtttatcaacaa

SEQ ID NO: 145241 - DNA, 25 bp, Artificial sequence
  SiRNA target sequence
aatctcttaattgtttatcaacaag

SEQ ID NO: 145242 - DNA, 25 bp, Artificial sequence
  SiRNA target sequence
atctcttaattgtttatcaacaagt

SEQ ID NO: 145243 - DNA, 25 bp, Artificial sequence
  SiRNA target sequence
tctcttaattgtttatcaacaagtg

SEQ ID NO: 145244 - DNA, 25 bp, Artificial sequence
  SiRNA target sequence
ctcttaattgtttatcaacaagtgc

SEQ ID NO: 145245 - DNA, 25 bp, Artificial sequence
  SiRNA target sequence
tcttaattgtttatcaacaagtgca

SEQ ID NO: 145246 - DNA, 25 bp, Artificial sequence
  SiRNA target sequence
cttaattgtttatcaacaagtgcat

SEQ ID NO: 145247 - DNA, 25 bp, Artificial sequence
  SiRNA target sequence
ttaattgtttatcaacaagtgcatt

SEQ ID NO: 145248 - DNA, 25 bp, Artificial sequence
  SiRNA target sequence
taattgtttatcaacaagtgcattt

SEQ ID NO: 145249 - DNA, 25 bp, Artificial sequence
  SiRNA target sequence
aattgtttatcaacaagtgcatttc

SEQ ID NO: 145250 - DNA, 25 bp, Artificial sequence
  SiRNA target sequence
attgtttatcaacaagtgcatttcc

SEQ ID NO: 145251 - DNA, 25 bp, Artificial sequence
  SiRNA target sequence
ttgtttatcaacaagtgcatttcct

SEQ ID NO: 145252 - DNA, 25 bp, Artificial sequence
  SiRNA target sequence
tgtttatcaacaagtgcatttcctt

SEQ ID NO: 145253 - DNA, 25 bp, Artificial sequence
  SiRNA target sequence
gtttatcaacaagtgcatttccttt

SEQ ID NO: 145254 - DNA, 25 bp, Artificial sequence
  SiRNA target sequence
tttatcaacaagtgcatttccttta

SEQ ID NO: 145255 - DNA, 25 bp, Artificial sequence
  SiRNA target sequence
ttatcaacaagtgcatttcctttat

SEQ ID NO: 145256 - DNA, 25 bp, Artificial sequence
  SiRNA target sequence
tatcaacaagtgcatttcctttatt

SEQ ID NO: 145257 - DNA, 25 bp, Artificial sequence
  SiRNA target sequence
atcaacaagtgcatttcctttatta

SEQ ID NO: 145258 - DNA, 25 bp, Artificial sequence
  SiRNA target sequence
tcaacaagtgcatttcctttattat

SEQ ID NO: 145259 - DNA, 25 bp, Artificial sequence
  SiRNA target sequence
caacaagtgcatttcctttattatt

SEQ ID NO: 145260 - DNA, 25 bp, Artificial sequence
  SiRNA target sequence
aacaagtgcatttcctttattatta

SEQ ID NO: 145261 - DNA, 25 bp, Artificial sequence
  SiRNA target sequence
acaagtgcatttcctttattattaa

SEQ ID NO: 145262 - DNA, 25 bp, Artificial sequence
  SiRNA target sequence
caagtgcatttcctttattattaaa

SEQ ID NO: 145263 - DNA, 25 bp, Artificial sequence
  SiRNA target sequence
aagtgcatttcctttattattaaaa

SEQ ID NO: 145264 - DNA, 25 bp, Artificial sequence
  SiRNA target sequence
agtgcatttcctttattattaaaaa

SEQ ID NO: 145265 - DNA, 25 bp, Artificial sequence
  SiRNA target sequence
gtgcatttcctttattattaaaaag

SEQ ID NO: 145266 - DNA, 25 bp, Artificial sequence
  SiRNA target sequence
tgcatttcctttattattaaaaagt

SEQ ID NO: 145267 - DNA, 25 bp, Artificial sequence
  SiRNA target sequence
gcatttcctttattattaaaaagta

SEQ ID NO: 145268 - DNA, 25 bp, Artificial sequence
  SiRNA target sequence
catttcctttattattaaaaagtaa

SEQ ID NO: 145269 - DNA, 25 bp, Artificial sequence
  SiRNA target sequence
atttcctttattattaaaaagtaat

SEQ ID NO: 145270 - DNA, 25 bp, Artificial sequence
  SiRNA target sequence
tttcctttattattaaaaagtaatg

SEQ ID NO: 145271 - DNA, 25 bp, Artificial sequence
  SiRNA target sequence
ttcctttattattaaaaagtaatga

SEQ ID NO: 145272 - DNA, 25 bp, Artificial sequence
  SiRNA target sequence
tcctttattattaaaaagtaatgaa

SEQ ID NO: 145273 - DNA, 25 bp, Artificial sequence
  SiRNA target sequence
cctttattattaaaaagtaatgaat

SEQ ID NO: 145274 - DNA, 25 bp, Artificial sequence
  SiRNA target sequence
ctttattattaaaaagtaatgaatt

SEQ ID NO: 145275 - DNA, 25 bp, Artificial sequence
  SiRNA target sequence
tttattattaaaaagtaatgaattt

SEQ ID NO: 145276 - DNA, 25 bp, Artificial sequence
  SiRNA target sequence
ttattattaaaaagtaatgaattta

SEQ ID NO: 145277 - DNA, 25 bp, Artificial sequence
  SiRNA target sequence
tattattaaaaagtaatgaatttaa

SEQ ID NO: 145278 - DNA, 25 bp, Artificial sequence
  SiRNA target sequence
attattaaaaagtaatgaatttaat

SEQ ID NO: 145279 - DNA, 25 bp, Artificial sequence
  SiRNA target sequence
ttattaaaaagtaatgaatttaatg

SEQ ID NO: 145280 - DNA, 25 bp, Artificial sequence
  SiRNA target sequence
tattaaaaagtaatgaatttaatga

SEQ ID NO: 145281 - DNA, 25 bp, Artificial sequence
  SiRNA target sequence
attaaaaagtaatgaatttaatgat

SEQ ID NO: 145282 - DNA, 25 bp, Artificial sequence
  SiRNA target sequence
ttaaaaagtaatgaatttaatgatt

SEQ ID NO: 145283 - DNA, 25 bp, Artificial sequence
  SiRNA target sequence
taaaaagtaatgaatttaatgattt

SEQ ID NO: 145284 - DNA, 25 bp, Artificial sequence
  SiRNA target sequence
aaaaagtaatgaatttaatgattta

SEQ ID NO: 145285 - DNA, 25 bp, Artificial sequence
  SiRNA target sequence
aaaagtaatgaatttaatgatttac

SEQ ID NO: 145286 - DNA, 25 bp, Artificial sequence
  SiRNA target sequence
aaagtaatgaatttaatgatttacc

SEQ ID NO: 145287 - DNA, 25 bp, Artificial sequence
  SiRNA target sequence
aagtaatgaatttaatgatttacca

SEQ ID NO: 145288 - DNA, 25 bp, Artificial sequence
  SiRNA target sequence
agtaatgaatttaatgatttaccac

SEQ ID NO: 145289 - DNA, 25 bp, Artificial sequence
  SiRNA target sequence
gtaatgaatttaatgatttaccaca

SEQ ID NO: 145290 - DNA, 25 bp, Artificial sequence
  SiRNA target sequence
taatgaatttaatgatttaccacac

SEQ ID NO: 145291 - DNA, 25 bp, Artificial sequence
  SiRNA target sequence
aatgaatttaatgatttaccacaca

SEQ ID NO: 145292 - DNA, 25 bp, Artificial sequence
  SiRNA target sequence
atgaatttaatgatttaccacacaa

SEQ ID NO: 145293 - DNA, 25 bp, Artificial sequence
  SiRNA target sequence
tgaatttaatgatttaccacacaaa

SEQ ID NO: 145294 - DNA, 25 bp, Artificial sequence
  SiRNA target sequence
gaatttaatgatttaccacacaaat

SEQ ID NO: 145295 - DNA, 25 bp, Artificial sequence
  SiRNA target sequence
aatttaatgatttaccacacaaatt

SEQ ID NO: 145296 - DNA, 25 bp, Artificial sequence
  SiRNA target sequence
atttaatgatttaccacacaaattg

SEQ ID NO: 145297 - DNA, 25 bp, Artificial sequence
  SiRNA target sequence
tttaatgatttaccacacaaattgt

SEQ ID NO: 145298 - DNA, 25 bp, Artificial sequence
  SiRNA target sequence
ttaatgatttaccacacaaattgtt

SEQ ID NO: 145299 - DNA, 25 bp, Artificial sequence
  SiRNA target sequence
taatgatttaccacacaaattgtta

SEQ ID NO: 145300 - DNA, 25 bp, Artificial sequence
  SiRNA target sequence
aatgatttaccacacaaattgttat

SEQ ID NO: 145301 - DNA, 25 bp, Artificial sequence
  SiRNA target sequence
atgatttaccacacaaattgttatc

SEQ ID NO: 145302 - DNA, 25 bp, Artificial sequence
  SiRNA target sequence
tgatttaccacacaaattgttatct

SEQ ID NO: 145303 - DNA, 25 bp, Artificial sequence
  SiRNA target sequence
gatttaccacacaaattgttatcta

SEQ ID NO: 145304 - DNA, 25 bp, Artificial sequence
  SiRNA target sequence
atttaccacacaaattgttatctaa

SEQ ID NO: 145305 - DNA, 25 bp, Artificial sequence
  SiRNA target sequence
tttaccacacaaattgttatctaat

SEQ ID NO: 145306 - DNA, 25 bp, Artificial sequence
  SiRNA target sequence
ttaccacacaaattgttatctaata

SEQ ID NO: 145307 - DNA, 25 bp, Artificial sequence
  SiRNA target sequence
taccacacaaattgttatctaatat

SEQ ID NO: 145308 - DNA, 25 bp, Artificial sequence
  SiRNA target sequence
accacacaaattgttatctaatatt

SEQ ID NO: 145309 - DNA, 25 bp, Artificial sequence
  SiRNA target sequence
ccacacaaattgttatctaatatta

SEQ ID NO: 145310 - DNA, 25 bp, Artificial sequence
  SiRNA target sequence
cacacaaattgttatctaatattat

SEQ ID NO: 145311 - DNA, 25 bp, Artificial sequence
  SiRNA target sequence
acacaaattgttatctaatattatt

SEQ ID NO: 145312 - DNA, 25 bp, Artificial sequence
  SiRNA target sequence
cacaaattgttatctaatattattt

SEQ ID NO: 145313 - DNA, 25 bp, Artificial sequence
  SiRNA target sequence
acaaattgttatctaatattatttt

SEQ ID NO: 145314 - DNA, 25 bp, Artificial sequence
  SiRNA target sequence
caaattgttatctaatattatttta

SEQ ID NO: 145315 - DNA, 25 bp, Artificial sequence
  SiRNA target sequence
aaattgttatctaatattattttat

SEQ ID NO: 145316 - DNA, 25 bp, Artificial sequence
  SiRNA target sequence
aattgttatctaatattattttatt

SEQ ID NO: 145317 - DNA, 25 bp, Artificial sequence
  SiRNA target sequence
attgttatctaatattattttatta

SEQ ID NO: 145318 - DNA, 25 bp, Artificial sequence
  SiRNA target sequence
ttgttatctaatattattttattaa

SEQ ID NO: 145319 - DNA, 25 bp, Artificial sequence
  SiRNA target sequence
tgttatctaatattattttattaag

SEQ ID NO: 145320 - DNA, 25 bp, Artificial sequence
  SiRNA target sequence
gttatctaatattattttattaaga

SEQ ID NO: 145321 - DNA, 25 bp, Artificial sequence
  SiRNA target sequence
ttatctaatattattttattaagag

SEQ ID NO: 145322 - DNA, 25 bp, Artificial sequence
  SiRNA target sequence
tatctaatattattttattaagagt

SEQ ID NO: 145323 - DNA, 25 bp, Artificial sequence
  SiRNA target sequence
atctaatattattttattaagagtg

SEQ ID NO: 145324 - DNA, 25 bp, Artificial sequence
  SiRNA target sequence
tctaatattattttattaagagtgt

SEQ ID NO: 145325 - DNA, 25 bp, Artificial sequence
  SiRNA target sequence
ctaatattattttattaagagtgtc

SEQ ID NO: 145326 - DNA, 25 bp, Artificial sequence
  SiRNA target sequence
taatattattttattaagagtgtct

SEQ ID NO: 145327 - DNA, 25 bp, Artificial sequence
  SiRNA target sequence
aatattattttattaagagtgtcta

SEQ ID NO: 145328 - DNA, 25 bp, Artificial sequence
  SiRNA target sequence
atattattttattaagagtgtctac

SEQ ID NO: 145329 - DNA, 25 bp, Artificial sequence
  SiRNA target sequence
tattattttattaagagtgtctaca

SEQ ID NO: 145330 - DNA, 25 bp, Artificial sequence
  SiRNA target sequence
attattttattaagagtgtctacat

SEQ ID NO: 145331 - DNA, 25 bp, Artificial sequence
  SiRNA target sequence
ttattttattaagagtgtctacata

SEQ ID NO: 145332 - DNA, 25 bp, Artificial sequence
  SiRNA target sequence
tattttattaagagtgtctacatac

SEQ ID NO: 145333 - DNA, 25 bp, Artificial sequence
  SiRNA target sequence
attttattaagagtgtctacatacg

SEQ ID NO: 145334 - DNA, 25 bp, Artificial sequence
  SiRNA target sequence
ttttattaagagtgtctacatacgc

SEQ ID NO: 145335 - DNA, 25 bp, Artificial sequence
  SiRNA target sequence
tttattaagagtgtctacatacgct

SEQ ID NO: 145336 - DNA, 25 bp, Artificial sequence
  SiRNA target sequence
ttattaagagtgtctacatacgctt

SEQ ID NO: 145337 - DNA, 25 bp, Artificial sequence
  SiRNA target sequence
tattaagagtgtctacatacgcttg

SEQ ID NO: 145338 - DNA, 25 bp, Artificial sequence
  SiRNA target sequence
attaagagtgtctacatacgcttga

SEQ ID NO: 145339 - DNA, 25 bp, Artificial sequence
  SiRNA target sequence
ttaagagtgtctacatacgcttgat

SEQ ID NO: 145340 - DNA, 25 bp, Artificial sequence
  SiRNA target sequence
taagagtgtctacatacgcttgatg

SEQ ID NO: 145341 - DNA, 25 bp, Artificial sequence
  SiRNA target sequence
aagagtgtctacatacgcttgatgg

SEQ ID NO: 145342 - DNA, 25 bp, Artificial sequence
  SiRNA target sequence
agagtgtctacatacgcttgatggt

SEQ ID NO: 145343 - DNA, 25 bp, Artificial sequence
  SiRNA target sequence
gagtgtctacatacgcttgatggtg

SEQ ID NO: 145344 - DNA, 25 bp, Artificial sequence
  SiRNA target sequence
agtgtctacatacgcttgatggtgc

SEQ ID NO: 145345 - DNA, 25 bp, Artificial sequence
  SiRNA target sequence
gtgtctacatacgcttgatggtgct

SEQ ID NO: 145346 - DNA, 25 bp, Artificial sequence
  SiRNA target sequence
tgtctacatacgcttgatggtgctt

SEQ ID NO: 145347 - DNA, 25 bp, Artificial sequence
  SiRNA target sequence
gtctacatacgcttgatggtgctta

SEQ ID NO: 145348 - DNA, 25 bp, Artificial sequence
  SiRNA target sequence
tctacatacgcttgatggtgcttag

SEQ ID NO: 145349 - DNA, 25 bp, Artificial sequence
  SiRNA target sequence
ctacatacgcttgatggtgcttaga

SEQ ID NO: 145350 - DNA, 25 bp, Artificial sequence
  SiRNA target sequence
tacatacgcttgatggtgcttagag

SEQ ID NO: 145351 - DNA, 25 bp, Artificial sequence
  SiRNA target sequence
acatacgcttgatggtgcttagagt

SEQ ID NO: 145352 - DNA, 25 bp, Artificial sequence
  SiRNA target sequence
catacgcttgatggtgcttagagtg

SEQ ID NO: 145353 - DNA, 25 bp, Artificial sequence
  SiRNA target sequence
atacgcttgatggtgcttagagtgg

SEQ ID NO: 145354 - DNA, 25 bp, Artificial sequence
  SiRNA target sequence
tacgcttgatggtgcttagagtggt

SEQ ID NO: 145355 - DNA, 25 bp, Artificial sequence
  SiRNA target sequence
acgcttgatggtgcttagagtggtg

SEQ ID NO: 145356 - DNA, 25 bp, Artificial sequence
  SiRNA target sequence
cgcttgatggtgcttagagtggtgg

SEQ ID NO: 145357 - DNA, 25 bp, Artificial sequence
  SiRNA target sequence
gcttgatggtgcttagagtggtggg

SEQ ID NO: 145358 - DNA, 25 bp, Artificial sequence
  SiRNA target sequence
cttgatggtgcttagagtggtgggt

SEQ ID NO: 145359 - DNA, 25 bp, Artificial sequence
  SiRNA target sequence
ttgatggtgcttagagtggtgggtc

SEQ ID NO: 145360 - DNA, 25 bp, Artificial sequence
  SiRNA target sequence
tgatggtgcttagagtggtgggtct

SEQ ID NO: 145361 - DNA, 25 bp, Artificial sequence
  SiRNA target sequence
gatggtgcttagagtggtgggtctc

SEQ ID NO: 145362 - DNA, 25 bp, Artificial sequence
  SiRNA target sequence
atggtgcttagagtggtgggtctcc

SEQ ID NO: 145363 - DNA, 25 bp, Artificial sequence
  SiRNA target sequence
tggtgcttagagtggtgggtctcca

SEQ ID NO: 145364 - DNA, 25 bp, Artificial sequence
  SiRNA target sequence
ggtgcttagagtggtgggtctccat

SEQ ID NO: 145365 - DNA, 25 bp, Artificial sequence
  SiRNA target sequence
gtgcttagagtggtgggtctccatt

SEQ ID NO: 145366 - DNA, 25 bp, Artificial sequence
  SiRNA target sequence
tgcttagagtggtgggtctccatta

SEQ ID NO: 145367 - DNA, 25 bp, Artificial sequence
  SiRNA target sequence
gcttagagtggtgggtctccattat

SEQ ID NO: 145368 - DNA, 25 bp, Artificial sequence
  SiRNA target sequence
cttagagtggtgggtctccattata

SEQ ID NO: 145369 - DNA, 25 bp, Artificial sequence
  SiRNA target sequence
ttagagtggtgggtctccattatat

SEQ ID NO: 145370 - DNA, 25 bp, Artificial sequence
  SiRNA target sequence
tagagtggtgggtctccattatatc

SEQ ID NO: 145371 - DNA, 25 bp, Artificial sequence
  SiRNA target sequence
agagtggtgggtctccattatatct

SEQ ID NO: 145372 - DNA, 25 bp, Artificial sequence
  SiRNA target sequence
gagtggtgggtctccattatatctt

SEQ ID NO: 145373 - DNA, 25 bp, Artificial sequence
  SiRNA target sequence
agtggtgggtctccattatatcttc

SEQ ID NO: 145374 - DNA, 25 bp, Artificial sequence
  SiRNA target sequence
gtggtgggtctccattatatcttca

SEQ ID NO: 145375 - DNA, 25 bp, Artificial sequence
  SiRNA target sequence
tggtgggtctccattatatcttcac

SEQ ID NO: 145376 - DNA, 25 bp, Artificial sequence
  SiRNA target sequence
ggtgggtctccattatatcttcact

SEQ ID NO: 145377 - DNA, 25 bp, Artificial sequence
  SiRNA target sequence
gtgggtctccattatatcttcactt

SEQ ID NO: 145378 - DNA, 25 bp, Artificial sequence
  SiRNA target sequence
tgggtctccattatatcttcactta

SEQ ID NO: 145379 - DNA, 25 bp, Artificial sequence
  SiRNA target sequence
gggtctccattatatcttcacttat

SEQ ID NO: 145380 - DNA, 25 bp, Artificial sequence
  SiRNA target sequence
ggtctccattatatcttcacttata

SEQ ID NO: 145381 - DNA, 25 bp, Artificial sequence
  SiRNA target sequence
gtctccattatatcttcacttatat

SEQ ID NO: 145382 - DNA, 25 bp, Artificial sequence
  SiRNA target sequence
tctccattatatcttcacttatata

SEQ ID NO: 145383 - DNA, 25 bp, Artificial sequence
  SiRNA target sequence
ctccattatatcttcacttatataa

SEQ ID NO: 145384 - DNA, 25 bp, Artificial sequence
  SiRNA target sequence
tccattatatcttcacttatataag

SEQ ID NO: 145385 - DNA, 25 bp, Artificial sequence
  SiRNA target sequence
ccattatatcttcacttatataagg

SEQ ID NO: 145386 - DNA, 25 bp, Artificial sequence
  SiRNA target sequence
cattatatcttcacttatataaggc

SEQ ID NO: 145387 - DNA, 25 bp, Artificial sequence
  SiRNA target sequence
attatatcttcacttatataaggct

SEQ ID NO: 145388 - DNA, 25 bp, Artificial sequence
  SiRNA target sequence
ttatatcttcacttatataaggctc

SEQ ID NO: 145389 - DNA, 25 bp, Artificial sequence
  SiRNA target sequence
tatatcttcacttatataaggctct

SEQ ID NO: 145390 - DNA, 25 bp, Artificial sequence
  SiRNA target sequence
atatcttcacttatataaggctcta

SEQ ID NO: 145391 - DNA, 25 bp, Artificial sequence
  SiRNA target sequence
tatcttcacttatataaggctctag

SEQ ID NO: 145392 - DNA, 25 bp, Artificial sequence
  SiRNA target sequence
atcttcacttatataaggctctaga

SEQ ID NO: 145393 - DNA, 25 bp, Artificial sequence
  SiRNA target sequence
tcttcacttatataaggctctagag

SEQ ID NO: 145394 - DNA, 25 bp, Artificial sequence
  SiRNA target sequence
cttcacttatataaggctctagaga

SEQ ID NO: 145395 - DNA, 25 bp, Artificial sequence
  SiRNA target sequence
ttcacttatataaggctctagagat

SEQ ID NO: 145396 - DNA, 25 bp, Artificial sequence
  SiRNA target sequence
tcacttatataaggctctagagatt

SEQ ID NO: 145397 - DNA, 25 bp, Artificial sequence
  SiRNA target sequence
cacttatataaggctctagagattt

SEQ ID NO: 145398 - DNA, 25 bp, Artificial sequence
  SiRNA target sequence
acttatataaggctctagagattta

SEQ ID NO: 145399 - DNA, 25 bp, Artificial sequence
  SiRNA target sequence
cttatataaggctctagagatttat

SEQ ID NO: 145400 - DNA, 25 bp, Artificial sequence
  SiRNA target sequence
ttatataaggctctagagatttata

SEQ ID NO: 145401 - DNA, 25 bp, Artificial sequence
  SiRNA target sequence
tatataaggctctagagatttataa

SEQ ID NO: 145402 - DNA, 25 bp, Artificial sequence
  SiRNA target sequence
atataaggctctagagatttataac

SEQ ID NO: 145403 - DNA, 25 bp, Artificial sequence
  SiRNA target sequence
tataaggctctagagatttataact

SEQ ID NO: 145404 - DNA, 25 bp, Artificial sequence
  SiRNA target sequence
ataaggctctagagatttataacta

SEQ ID NO: 145405 - DNA, 25 bp, Artificial sequence
  SiRNA target sequence
taaggctctagagatttataactat

SEQ ID NO: 145406 - DNA, 25 bp, Artificial sequence
  SiRNA target sequence
aaggctctagagatttataactata

SEQ ID NO: 145407 - DNA, 25 bp, Artificial sequence
  SiRNA target sequence
aggctctagagatttataactatat

SEQ ID NO: 145408 - DNA, 25 bp, Artificial sequence
  SiRNA target sequence
ggctctagagatttataactatatt

SEQ ID NO: 145409 - DNA, 25 bp, Artificial sequence
  SiRNA target sequence
gctctagagatttataactatattt

SEQ ID NO: 145410 - DNA, 25 bp, Artificial sequence
  SiRNA target sequence
ctctagagatttataactatatttc

SEQ ID NO: 145411 - DNA, 25 bp, Artificial sequence
  SiRNA target sequence
tctagagatttataactatatttca

SEQ ID NO: 145412 - DNA, 25 bp, Artificial sequence
  SiRNA target sequence
ctagagatttataactatatttcag

SEQ ID NO: 145413 - DNA, 25 bp, Artificial sequence
  SiRNA target sequence
tagagatttataactatatttcaga

SEQ ID NO: 145414 - DNA, 25 bp, Artificial sequence
  SiRNA target sequence
agagatttataactatatttcagat

SEQ ID NO: 145415 - DNA, 25 bp, Artificial sequence
  SiRNA target sequence
gagatttataactatatttcagatt

SEQ ID NO: 145416 - DNA, 25 bp, Artificial sequence
  SiRNA target sequence
agatttataactatatttcagattt

SEQ ID NO: 145417 - DNA, 25 bp, Artificial sequence
  SiRNA target sequence
gatttataactatatttcagatttg

SEQ ID NO: 145418 - DNA, 25 bp, Artificial sequence
  SiRNA target sequence
atttataactatatttcagatttgg

SEQ ID NO: 145419 - DNA, 25 bp, Artificial sequence
  SiRNA target sequence
tttataactatatttcagatttgga

SEQ ID NO: 145420 - DNA, 25 bp, Artificial sequence
  SiRNA target sequence
ttataactatatttcagatttggaa

SEQ ID NO: 145421 - DNA, 25 bp, Artificial sequence
  SiRNA target sequence
tataactatatttcagatttggaag

SEQ ID NO: 145422 - DNA, 25 bp, Artificial sequence
  SiRNA target sequence
ataactatatttcagatttggaaga

SEQ ID NO: 145423 - DNA, 25 bp, Artificial sequence
  SiRNA target sequence
taactatatttcagatttggaagag

SEQ ID NO: 145424 - DNA, 25 bp, Artificial sequence
  SiRNA target sequence
aactatatttcagatttggaagagt

SEQ ID NO: 145425 - DNA, 25 bp, Artificial sequence
  SiRNA target sequence
actatatttcagatttggaagagtg

SEQ ID NO: 145426 - DNA, 25 bp, Artificial sequence
  SiRNA target sequence
ctatatttcagatttggaagagtga

SEQ ID NO: 145427 - DNA, 25 bp, Artificial sequence
  SiRNA target sequence
tatatttcagatttggaagagtgaa

SEQ ID NO: 145428 - DNA, 25 bp, Artificial sequence
  SiRNA target sequence
atatttcagatttggaagagtgaac

SEQ ID NO: 145429 - DNA, 25 bp, Artificial sequence
  SiRNA target sequence
tatttcagatttggaagagtgaaca

SEQ ID NO: 145430 - DNA, 25 bp, Artificial sequence
  SiRNA target sequence
atttcagatttggaagagtgaacat

SEQ ID NO: 145431 - DNA, 26 bp, Artificial sequence
  SiRNA target sequence
ttaatttatgcataattgaccatcat

SEQ ID NO: 145432 - DNA, 26 bp, Artificial sequence
  SiRNA target sequence
taatttatgcataattgaccatcatc

SEQ ID NO: 145433 - DNA, 26 bp, Artificial sequence
  SiRNA target sequence
aatttatgcataattgaccatcatca

SEQ ID NO: 145434 - DNA, 26 bp, Artificial sequence
  SiRNA target sequence
atttatgcataattgaccatcatcag

SEQ ID NO: 145435 - DNA, 26 bp, Artificial sequence
  SiRNA target sequence
tttatgcataattgaccatcatcagt

SEQ ID NO: 145436 - DNA, 26 bp, Artificial sequence
  SiRNA target sequence
ttatgcataattgaccatcatcagta

SEQ ID NO: 145437 - DNA, 26 bp, Artificial sequence
  SiRNA target sequence
tatgcataattgaccatcatcagtaa

SEQ ID NO: 145438 - DNA, 26 bp, Artificial sequence
  SiRNA target sequence
atgcataattgaccatcatcagtaat

SEQ ID NO: 145439 - DNA, 26 bp, Artificial sequence
  SiRNA target sequence
tgcataattgaccatcatcagtaata

SEQ ID NO: 145440 - DNA, 26 bp, Artificial sequence
  SiRNA target sequence
gcataattgaccatcatcagtaataa

SEQ ID NO: 145441 - DNA, 26 bp, Artificial sequence
  SiRNA target sequence
cataattgaccatcatcagtaataaa

SEQ ID NO: 145442 - DNA, 26 bp, Artificial sequence
  SiRNA target sequence
ataattgaccatcatcagtaataaac

SEQ ID NO: 145443 - DNA, 26 bp, Artificial sequence
  SiRNA target sequence
taattgaccatcatcagtaataaaca

SEQ ID NO: 145444 - DNA, 26 bp, Artificial sequence
  SiRNA target sequence
aattgaccatcatcagtaataaacac

SEQ ID NO: 145445 - DNA, 26 bp, Artificial sequence
  SiRNA target sequence
attgaccatcatcagtaataaacaca

SEQ ID NO: 145446 - DNA, 26 bp, Artificial sequence
  SiRNA target sequence
ttgaccatcatcagtaataaacacat

SEQ ID NO: 145447 - DNA, 26 bp, Artificial sequence
  SiRNA target sequence
tgaccatcatcagtaataaacacatt

SEQ ID NO: 145448 - DNA, 26 bp, Artificial sequence
  SiRNA target sequence
gaccatcatcagtaataaacacatta

SEQ ID NO: 145449 - DNA, 26 bp, Artificial sequence
  SiRNA target sequence
accatcatcagtaataaacacattac

SEQ ID NO: 145450 - DNA, 26 bp, Artificial sequence
  SiRNA target sequence
ccatcatcagtaataaacacattacc

SEQ ID NO: 145451 - DNA, 26 bp, Artificial sequence
  SiRNA target sequence
catcatcagtaataaacacattacct

SEQ ID NO: 145452 - DNA, 26 bp, Artificial sequence
  SiRNA target sequence
atcatcagtaataaacacattacctt

SEQ ID NO: 145453 - DNA, 26 bp, Artificial sequence
  SiRNA target sequence
tcatcagtaataaacacattaccttt

SEQ ID NO: 145454 - DNA, 26 bp, Artificial sequence
  SiRNA target sequence
catcagtaataaacacattacctttc

SEQ ID NO: 145455 - DNA, 26 bp, Artificial sequence
  SiRNA target sequence
atcagtaataaacacattacctttct

SEQ ID NO: 145456 - DNA, 26 bp, Artificial sequence
  SiRNA target sequence
tcagtaataaacacattacctttctt

SEQ ID NO: 145457 - DNA, 26 bp, Artificial sequence
  SiRNA target sequence
cagtaataaacacattacctttcttt

SEQ ID NO: 145458 - DNA, 26 bp, Artificial sequence
  SiRNA target sequence
agtaataaacacattacctttctttt

SEQ ID NO: 145459 - DNA, 26 bp, Artificial sequence
  SiRNA target sequence
gtaataaacacattacctttcttttc

SEQ ID NO: 145460 - DNA, 26 bp, Artificial sequence
  SiRNA target sequence
taataaacacattacctttcttttct

SEQ ID NO: 145461 - DNA, 26 bp, Artificial sequence
  SiRNA target sequence
aataaacacattacctttcttttcta

SEQ ID NO: 145462 - DNA, 26 bp, Artificial sequence
  SiRNA target sequence
ataaacacattacctttcttttctac

SEQ ID NO: 145463 - DNA, 26 bp, Artificial sequence
  SiRNA target sequence
taaacacattacctttcttttctacc

SEQ ID NO: 145464 - DNA, 26 bp, Artificial sequence
  SiRNA target sequence
aaacacattacctttcttttctacca

SEQ ID NO: 145465 - DNA, 26 bp, Artificial sequence
  SiRNA target sequence
aacacattacctttcttttctaccac

SEQ ID NO: 145466 - DNA, 26 bp, Artificial sequence
  SiRNA target sequence
acacattacctttcttttctaccaca

SEQ ID NO: 145467 - DNA, 26 bp, Artificial sequence
  SiRNA target sequence
cacattacctttcttttctaccacac

SEQ ID NO: 145468 - DNA, 26 bp, Artificial sequence
  SiRNA target sequence
acattacctttcttttctaccacaca

SEQ ID NO: 145469 - DNA, 26 bp, Artificial sequence
  SiRNA target sequence
cattacctttcttttctaccacacat

SEQ ID NO: 145470 - DNA, 26 bp, Artificial sequence
  SiRNA target sequence
attacctttcttttctaccacacatt

SEQ ID NO: 145471 - DNA, 26 bp, Artificial sequence
  SiRNA target sequence
ttacctttcttttctaccacacattt

SEQ ID NO: 145472 - DNA, 26 bp, Artificial sequence
  SiRNA target sequence
tacctttcttttctaccacacatttt

SEQ ID NO: 145473 - DNA, 26 bp, Artificial sequence
  SiRNA target sequence
acctttcttttctaccacacattttt

SEQ ID NO: 145474 - DNA, 26 bp, Artificial sequence
  SiRNA target sequence
cctttcttttctaccacacatttttg

SEQ ID NO: 145475 - DNA, 26 bp, Artificial sequence
  SiRNA target sequence
ctttcttttctaccacacatttttga

SEQ ID NO: 145476 - DNA, 26 bp, Artificial sequence
  SiRNA target sequence
tttcttttctaccacacatttttgat

SEQ ID NO: 145477 - DNA, 26 bp, Artificial sequence
  SiRNA target sequence
ttcttttctaccacacatttttgata

SEQ ID NO: 145478 - DNA, 26 bp, Artificial sequence
  SiRNA target sequence
tcttttctaccacacatttttgatat

SEQ ID NO: 145479 - DNA, 26 bp, Artificial sequence
  SiRNA target sequence
cttttctaccacacatttttgatata

SEQ ID NO: 145480 - DNA, 26 bp, Artificial sequence
  SiRNA target sequence
ttttctaccacacatttttgatatat

SEQ ID NO: 145481 - DNA, 26 bp, Artificial sequence
  SiRNA target sequence
tttctaccacacatttttgatatatt

SEQ ID NO: 145482 - DNA, 26 bp, Artificial sequence
  SiRNA target sequence
ttctaccacacatttttgatatattt

SEQ ID NO: 145483 - DNA, 26 bp, Artificial sequence
  SiRNA target sequence
tctaccacacatttttgatatatttc

SEQ ID NO: 145484 - DNA, 26 bp, Artificial sequence
  SiRNA target sequence
ctaccacacatttttgatatatttca

SEQ ID NO: 145485 - DNA, 26 bp, Artificial sequence
  SiRNA target sequence
taccacacatttttgatatatttcat

SEQ ID NO: 145486 - DNA, 26 bp, Artificial sequence
  SiRNA target sequence
accacacatttttgatatatttcatt

SEQ ID NO: 145487 - DNA, 26 bp, Artificial sequence
  SiRNA target sequence
ccacacatttttgatatatttcatta

SEQ ID NO: 145488 - DNA, 26 bp, Artificial sequence
  SiRNA target sequence
cacacatttttgatatatttcattaa

SEQ ID NO: 145489 - DNA, 26 bp, Artificial sequence
  SiRNA target sequence
acacatttttgatatatttcattaac

SEQ ID NO: 145490 - DNA, 26 bp, Artificial sequence
  SiRNA target sequence
cacatttttgatatatttcattaact

SEQ ID NO: 145491 - DNA, 26 bp, Artificial sequence
  SiRNA target sequence
acatttttgatatatttcattaacta

SEQ ID NO: 145492 - DNA, 26 bp, Artificial sequence
  SiRNA target sequence
catttttgatatatttcattaactac

SEQ ID NO: 145493 - DNA, 26 bp, Artificial sequence
  SiRNA target sequence
atttttgatatatttcattaactaca

SEQ ID NO: 145494 - DNA, 26 bp, Artificial sequence
  SiRNA target sequence
tttttgatatatttcattaactacat

SEQ ID NO: 145495 - DNA, 26 bp, Artificial sequence
  SiRNA target sequence
ttttgatatatttcattaactacatc

SEQ ID NO: 145496 - DNA, 26 bp, Artificial sequence
  SiRNA target sequence
tttgatatatttcattaactacatcc

SEQ ID NO: 145497 - DNA, 26 bp, Artificial sequence
  SiRNA target sequence
ttgatatatttcattaactacatccc

SEQ ID NO: 145498 - DNA, 26 bp, Artificial sequence
  SiRNA target sequence
tgatatatttcattaactacatccca

SEQ ID NO: 145499 - DNA, 26 bp, Artificial sequence
  SiRNA target sequence
gatatatttcattaactacatcccaa

SEQ ID NO: 145500 - DNA, 26 bp, Artificial sequence
  SiRNA target sequence
atatatttcattaactacatcccaat

SEQ ID NO: 145501 - DNA, 26 bp, Artificial sequence
  SiRNA target sequence
tatatttcattaactacatcccaatc

SEQ ID NO: 145502 - DNA, 26 bp, Artificial sequence
  SiRNA target sequence
atatttcattaactacatcccaatca

SEQ ID NO: 145503 - DNA, 26 bp, Artificial sequence
  SiRNA target sequence
tatttcattaactacatcccaatcaa

SEQ ID NO: 145504 - DNA, 26 bp, Artificial sequence
  SiRNA target sequence
atttcattaactacatcccaatcaat

SEQ ID NO: 145505 - DNA, 26 bp, Artificial sequence
  SiRNA target sequence
tttcattaactacatcccaatcaatt

SEQ ID NO: 145506 - DNA, 26 bp, Artificial sequence
  SiRNA target sequence
ttcattaactacatcccaatcaatta

SEQ ID NO: 145507 - DNA, 26 bp, Artificial sequence
  SiRNA target sequence
tcattaactacatcccaatcaattac

SEQ ID NO: 145508 - DNA, 26 bp, Artificial sequence
  SiRNA target sequence
cattaactacatcccaatcaattaca

SEQ ID NO: 145509 - DNA, 26 bp, Artificial sequence
  SiRNA target sequence
attaactacatcccaatcaattacat

SEQ ID NO: 145510 - DNA, 26 bp, Artificial sequence
  SiRNA target sequence
ttaactacatcccaatcaattacatt

SEQ ID NO: 145511 - DNA, 26 bp, Artificial sequence
  SiRNA target sequence
taactacatcccaatcaattacattc

SEQ ID NO: 145512 - DNA, 26 bp, Artificial sequence
  SiRNA target sequence
aactacatcccaatcaattacattcc

SEQ ID NO: 145513 - DNA, 26 bp, Artificial sequence
  SiRNA target sequence
actacatcccaatcaattacattcca

SEQ ID NO: 145514 - DNA, 26 bp, Artificial sequence
  SiRNA target sequence
ctacatcccaatcaattacattccac

SEQ ID NO: 145515 - DNA, 26 bp, Artificial sequence
  SiRNA target sequence
tacatcccaatcaattacattccacc

SEQ ID NO: 145516 - DNA, 26 bp, Artificial sequence
  SiRNA target sequence
acatcccaatcaattacattccacca

SEQ ID NO: 145517 - DNA, 26 bp, Artificial sequence
  SiRNA target sequence
catcccaatcaattacattccaccat

SEQ ID NO: 145518 - DNA, 26 bp, Artificial sequence
  SiRNA target sequence
atcccaatcaattacattccaccatt

SEQ ID NO: 145519 - DNA, 26 bp, Artificial sequence
  SiRNA target sequence
tcccaatcaattacattccaccattc

SEQ ID NO: 145520 - DNA, 26 bp, Artificial sequence
  SiRNA target sequence
cccaatcaattacattccaccattca

SEQ ID NO: 145521 - DNA, 26 bp, Artificial sequence
  SiRNA target sequence
ccaatcaattacattccaccattcat

SEQ ID NO: 145522 - DNA, 26 bp, Artificial sequence
  SiRNA target sequence
caatcaattacattccaccattcatt

SEQ ID NO: 145523 - DNA, 26 bp, Artificial sequence
  SiRNA target sequence
aatcaattacattccaccattcatta

SEQ ID NO: 145524 - DNA, 26 bp, Artificial sequence
  SiRNA target sequence
atcaattacattccaccattcattaa

SEQ ID NO: 145525 - DNA, 26 bp, Artificial sequence
  SiRNA target sequence
tcaattacattccaccattcattaat

SEQ ID NO: 145526 - DNA, 26 bp, Artificial sequence
  SiRNA target sequence
caattacattccaccattcattaatg

SEQ ID NO: 145527 - DNA, 26 bp, Artificial sequence
  SiRNA target sequence
aattacattccaccattcattaatgt

SEQ ID NO: 145528 - DNA, 26 bp, Artificial sequence
  SiRNA target sequence
attacattccaccattcattaatgta

SEQ ID NO: 145529 - DNA, 26 bp, Artificial sequence
  SiRNA target sequence
ttacattccaccattcattaatgtat

SEQ ID NO: 145530 - DNA, 26 bp, Artificial sequence
  SiRNA target sequence
tacattccaccattcattaatgtatt

SEQ ID NO: 145531 - DNA, 26 bp, Artificial sequence
  SiRNA target sequence
acattccaccattcattaatgtattc

SEQ ID NO: 145532 - DNA, 26 bp, Artificial sequence
  SiRNA target sequence
cattccaccattcattaatgtattct

SEQ ID NO: 145533 - DNA, 26 bp, Artificial sequence
  SiRNA target sequence
attccaccattcattaatgtattctt

SEQ ID NO: 145534 - DNA, 26 bp, Artificial sequence
  SiRNA target sequence
ttccaccattcattaatgtattcttt

SEQ ID NO: 145535 - DNA, 26 bp, Artificial sequence
  SiRNA target sequence
tccaccattcattaatgtattctttt

SEQ ID NO: 145536 - DNA, 26 bp, Artificial sequence
  SiRNA target sequence
ccaccattcattaatgtattcttttc

SEQ ID NO: 145537 - DNA, 26 bp, Artificial sequence
  SiRNA target sequence
caccattcattaatgtattcttttct

SEQ ID NO: 145538 - DNA, 26 bp, Artificial sequence
  SiRNA target sequence
accattcattaatgtattcttttctc

SEQ ID NO: 145539 - DNA, 26 bp, Artificial sequence
  SiRNA target sequence
ccattcattaatgtattcttttctcc

SEQ ID NO: 145540 - DNA, 26 bp, Artificial sequence
  SiRNA target sequence
cattcattaatgtattcttttctcct

SEQ ID NO: 145541 - DNA, 26 bp, Artificial sequence
  SiRNA target sequence
attcattaatgtattcttttctccta

SEQ ID NO: 145542 - DNA, 26 bp, Artificial sequence
  SiRNA target sequence
ttcattaatgtattcttttctcctat

SEQ ID NO: 145543 - DNA, 26 bp, Artificial sequence
  SiRNA target sequence
tcattaatgtattcttttctcctatt

SEQ ID NO: 145544 - DNA, 26 bp, Artificial sequence
  SiRNA target sequence
cattaatgtattcttttctcctattt

SEQ ID NO: 145545 - DNA, 26 bp, Artificial sequence
  SiRNA target sequence
attaatgtattcttttctcctatttt

SEQ ID NO: 145546 - DNA, 26 bp, Artificial sequence
  SiRNA target sequence
ttaatgtattcttttctcctattttt

SEQ ID NO: 145547 - DNA, 26 bp, Artificial sequence
  SiRNA target sequence
taatgtattcttttctcctattttta

SEQ ID NO: 145548 - DNA, 26 bp, Artificial sequence
  SiRNA target sequence
aatgtattcttttctcctatttttat

SEQ ID NO: 145549 - DNA, 26 bp, Artificial sequence
  SiRNA target sequence
atgtattcttttctcctatttttata

SEQ ID NO: 145550 - DNA, 26 bp, Artificial sequence
  SiRNA target sequence
tgtattcttttctcctatttttatac

SEQ ID NO: 145551 - DNA, 26 bp, Artificial sequence
  SiRNA target sequence
gtattcttttctcctatttttatact

SEQ ID NO: 145552 - DNA, 26 bp, Artificial sequence
  SiRNA target sequence
tattcttttctcctatttttatactg

SEQ ID NO: 145553 - DNA, 26 bp, Artificial sequence
  SiRNA target sequence
attcttttctcctatttttatactgt

SEQ ID NO: 145554 - DNA, 26 bp, Artificial sequence
  SiRNA target sequence
ttcttttctcctatttttatactgta

SEQ ID NO: 145555 - DNA, 26 bp, Artificial sequence
  SiRNA target sequence
tcttttctcctatttttatactgtaa

SEQ ID NO: 145556 - DNA, 26 bp, Artificial sequence
  SiRNA target sequence
cttttctcctatttttatactgtaaa

SEQ ID NO: 145557 - DNA, 26 bp, Artificial sequence
  SiRNA target sequence
ttttctcctatttttatactgtaaat

SEQ ID NO: 145558 - DNA, 26 bp, Artificial sequence
  SiRNA target sequence
tttctcctatttttatactgtaaata

SEQ ID NO: 145559 - DNA, 26 bp, Artificial sequence
  SiRNA target sequence
ttctcctatttttatactgtaaataa

SEQ ID NO: 145560 - DNA, 26 bp, Artificial sequence
  SiRNA target sequence
tctcctatttttatactgtaaataat

SEQ ID NO: 145561 - DNA, 26 bp, Artificial sequence
  SiRNA target sequence
ctcctatttttatactgtaaataata

SEQ ID NO: 145562 - DNA, 26 bp, Artificial sequence
  SiRNA target sequence
tcctatttttatactgtaaataatac

SEQ ID NO: 145563 - DNA, 26 bp, Artificial sequence
  SiRNA target sequence
cctatttttatactgtaaataatacg

SEQ ID NO: 145564 - DNA, 26 bp, Artificial sequence
  SiRNA target sequence
ctatttttatactgtaaataatacgc

SEQ ID NO: 145565 - DNA, 26 bp, Artificial sequence
  SiRNA target sequence
tatttttatactgtaaataatacgca

SEQ ID NO: 145566 - DNA, 26 bp, Artificial sequence
  SiRNA target sequence
atttttatactgtaaataatacgcat

SEQ ID NO: 145567 - DNA, 26 bp, Artificial sequence
  SiRNA target sequence
tttttatactgtaaataatacgcatg

SEQ ID NO: 145568 - DNA, 26 bp, Artificial sequence
  SiRNA target sequence
ttttatactgtaaataatacgcatgt

SEQ ID NO: 145569 - DNA, 26 bp, Artificial sequence
  SiRNA target sequence
tttatactgtaaataatacgcatgtt

SEQ ID NO: 145570 - DNA, 26 bp, Artificial sequence
  SiRNA target sequence
ttatactgtaaataatacgcatgttc

SEQ ID NO: 145571 - DNA, 26 bp, Artificial sequence
  SiRNA target sequence
tatactgtaaataatacgcatgttcc

SEQ ID NO: 145572 - DNA, 26 bp, Artificial sequence
  SiRNA target sequence
atactgtaaataatacgcatgttccc

SEQ ID NO: 145573 - DNA, 26 bp, Artificial sequence
  SiRNA target sequence
tactgtaaataatacgcatgttccca

SEQ ID NO: 145574 - DNA, 26 bp, Artificial sequence
  SiRNA target sequence
actgtaaataatacgcatgttcccat

SEQ ID NO: 145575 - DNA, 26 bp, Artificial sequence
  SiRNA target sequence
ctgtaaataatacgcatgttcccata

SEQ ID NO: 145576 - DNA, 26 bp, Artificial sequence
  SiRNA target sequence
tgtaaataatacgcatgttcccatac

SEQ ID NO: 145577 - DNA, 26 bp, Artificial sequence
  SiRNA target sequence
gtaaataatacgcatgttcccataca

SEQ ID NO: 145578 - DNA, 26 bp, Artificial sequence
  SiRNA target sequence
taaataatacgcatgttcccatacat

SEQ ID NO: 145579 - DNA, 26 bp, Artificial sequence
  SiRNA target sequence
aaataatacgcatgttcccatacatc

SEQ ID NO: 145580 - DNA, 26 bp, Artificial sequence
  SiRNA target sequence
aataatacgcatgttcccatacatca

SEQ ID NO: 145581 - DNA, 26 bp, Artificial sequence
  SiRNA target sequence
ataatacgcatgttcccatacatcaa

SEQ ID NO: 145582 - DNA, 26 bp, Artificial sequence
  SiRNA target sequence
taatacgcatgttcccatacatcaag

SEQ ID NO: 145583 - DNA, 26 bp, Artificial sequence
  SiRNA target sequence
aatacgcatgttcccatacatcaaga

SEQ ID NO: 145584 - DNA, 26 bp, Artificial sequence
  SiRNA target sequence
atacgcatgttcccatacatcaagac

SEQ ID NO: 145585 - DNA, 26 bp, Artificial sequence
  SiRNA target sequence
tacgcatgttcccatacatcaagaca

SEQ ID NO: 145586 - DNA, 26 bp, Artificial sequence
  SiRNA target sequence
acgcatgttcccatacatcaagacat

SEQ ID NO: 145587 - DNA, 26 bp, Artificial sequence
  SiRNA target sequence
cgcatgttcccatacatcaagacata

SEQ ID NO: 145588 - DNA, 26 bp, Artificial sequence
  SiRNA target sequence
gcatgttcccatacatcaagacatag

SEQ ID NO: 145589 - DNA, 26 bp, Artificial sequence
  SiRNA target sequence
catgttcccatacatcaagacatagt

SEQ ID NO: 145590 - DNA, 26 bp, Artificial sequence
  SiRNA target sequence
atgttcccatacatcaagacatagta

SEQ ID NO: 145591 - DNA, 26 bp, Artificial sequence
  SiRNA target sequence
tgttcccatacatcaagacatagtaa

SEQ ID NO: 145592 - DNA, 26 bp, Artificial sequence
  SiRNA target sequence
gttcccatacatcaagacatagtaaa

SEQ ID NO: 145593 - DNA, 26 bp, Artificial sequence
  SiRNA target sequence
ttcccatacatcaagacatagtaaag

SEQ ID NO: 145594 - DNA, 26 bp, Artificial sequence
  SiRNA target sequence
tcccatacatcaagacatagtaaagg

SEQ ID NO: 145595 - DNA, 26 bp, Artificial sequence
  SiRNA target sequence
cccatacatcaagacatagtaaagga

SEQ ID NO: 145596 - DNA, 26 bp, Artificial sequence
  SiRNA target sequence
ccatacatcaagacatagtaaaggaa

SEQ ID NO: 145597 - DNA, 26 bp, Artificial sequence
  SiRNA target sequence
catacatcaagacatagtaaaggaat

SEQ ID NO: 145598 - DNA, 26 bp, Artificial sequence
  SiRNA target sequence
atacatcaagacatagtaaaggaata

SEQ ID NO: 145599 - DNA, 26 bp, Artificial sequence
  SiRNA target sequence
tacatcaagacatagtaaaggaatac

SEQ ID NO: 145600 - DNA, 26 bp, Artificial sequence
  SiRNA target sequence
acatcaagacatagtaaaggaataca

SEQ ID NO: 145601 - DNA, 26 bp, Artificial sequence
  SiRNA target sequence
catcaagacatagtaaaggaatacat

SEQ ID NO: 145602 - DNA, 26 bp, Artificial sequence
  SiRNA target sequence
atcaagacatagtaaaggaatacatt

SEQ ID NO: 145603 - DNA, 26 bp, Artificial sequence
  SiRNA target sequence
tcaagacatagtaaaggaatacattc

SEQ ID NO: 145604 - DNA, 26 bp, Artificial sequence
  SiRNA target sequence
caagacatagtaaaggaatacattca

SEQ ID NO: 145605 - DNA, 26 bp, Artificial sequence
  SiRNA target sequence
aagacatagtaaaggaatacattcac

SEQ ID NO: 145606 - DNA, 26 bp, Artificial sequence
  SiRNA target sequence
agacatagtaaaggaatacattcacc

SEQ ID NO: 145607 - DNA, 26 bp, Artificial sequence
  SiRNA target sequence
gacatagtaaaggaatacattcacca

SEQ ID NO: 145608 - DNA, 26 bp, Artificial sequence
  SiRNA target sequence
acatagtaaaggaatacattcaccat

SEQ ID NO: 145609 - DNA, 26 bp, Artificial sequence
  SiRNA target sequence
catagtaaaggaatacattcaccatc

SEQ ID NO: 145610 - DNA, 26 bp, Artificial sequence
  SiRNA target sequence
atagtaaaggaatacattcaccatcc

SEQ ID NO: 145611 - DNA, 26 bp, Artificial sequence
  SiRNA target sequence
tagtaaaggaatacattcaccatcct

SEQ ID NO: 145612 - DNA, 26 bp, Artificial sequence
  SiRNA target sequence
agtaaaggaatacattcaccatcctc

SEQ ID NO: 145613 - DNA, 26 bp, Artificial sequence
  SiRNA target sequence
gtaaaggaatacattcaccatcctcc

SEQ ID NO: 145614 - DNA, 26 bp, Artificial sequence
  SiRNA target sequence
taaaggaatacattcaccatcctcca

SEQ ID NO: 145615 - DNA, 26 bp, Artificial sequence
  SiRNA target sequence
aaaggaatacattcaccatcctccat

SEQ ID NO: 145616 - DNA, 26 bp, Artificial sequence
  SiRNA target sequence
aaggaatacattcaccatcctccatc

SEQ ID NO: 145617 - DNA, 26 bp, Artificial sequence
  SiRNA target sequence
aggaatacattcaccatcctccatca

SEQ ID NO: 145618 - DNA, 26 bp, Artificial sequence
  SiRNA target sequence
ggaatacattcaccatcctccatcat

SEQ ID NO: 145619 - DNA, 26 bp, Artificial sequence
  SiRNA target sequence
gaatacattcaccatcctccatcata

SEQ ID NO: 145620 - DNA, 26 bp, Artificial sequence
  SiRNA target sequence
aatacattcaccatcctccatcatag

SEQ ID NO: 145621 - DNA, 26 bp, Artificial sequence
  SiRNA target sequence
atacattcaccatcctccatcatagg

SEQ ID NO: 145622 - DNA, 26 bp, Artificial sequence
  SiRNA target sequence
tacattcaccatcctccatcatagga

SEQ ID NO: 145623 - DNA, 26 bp, Artificial sequence
  SiRNA target sequence
acattcaccatcctccatcataggat

SEQ ID NO: 145624 - DNA, 26 bp, Artificial sequence
  SiRNA target sequence
cattcaccatcctccatcataggatt

SEQ ID NO: 145625 - DNA, 26 bp, Artificial sequence
  SiRNA target sequence
attcaccatcctccatcataggattg

SEQ ID NO: 145626 - DNA, 26 bp, Artificial sequence
  SiRNA target sequence
ttcaccatcctccatcataggattgt

SEQ ID NO: 145627 - DNA, 26 bp, Artificial sequence
  SiRNA target sequence
tcaccatcctccatcataggattgtc

SEQ ID NO: 145628 - DNA, 26 bp, Artificial sequence
  SiRNA target sequence
caccatcctccatcataggattgtct

SEQ ID NO: 145629 - DNA, 26 bp, Artificial sequence
  SiRNA target sequence
accatcctccatcataggattgtctt

SEQ ID NO: 145630 - DNA, 26 bp, Artificial sequence
  SiRNA target sequence
ccatcctccatcataggattgtcttg

SEQ ID NO: 145631 - DNA, 26 bp, Artificial sequence
  SiRNA target sequence
catcctccatcataggattgtcttga

SEQ ID NO: 145632 - DNA, 26 bp, Artificial sequence
  SiRNA target sequence
atcctccatcataggattgtcttgat

SEQ ID NO: 145633 - DNA, 26 bp, Artificial sequence
  SiRNA target sequence
tcctccatcataggattgtcttgatt

SEQ ID NO: 145634 - DNA, 26 bp, Artificial sequence
  SiRNA target sequence
cctccatcataggattgtcttgatta

SEQ ID NO: 145635 - DNA, 26 bp, Artificial sequence
  SiRNA target sequence
ctccatcataggattgtcttgattaa

SEQ ID NO: 145636 - DNA, 26 bp, Artificial sequence
  SiRNA target sequence
tccatcataggattgtcttgattaac

SEQ ID NO: 145637 - DNA, 26 bp, Artificial sequence
  SiRNA target sequence
ccatcataggattgtcttgattaaca

SEQ ID NO: 145638 - DNA, 26 bp, Artificial sequence
  SiRNA target sequence
catcataggattgtcttgattaacac

SEQ ID NO: 145639 - DNA, 26 bp, Artificial sequence
  SiRNA target sequence
atcataggattgtcttgattaacact

SEQ ID NO: 145640 - DNA, 26 bp, Artificial sequence
  SiRNA target sequence
tcataggattgtcttgattaacactg

SEQ ID NO: 145641 - DNA, 26 bp, Artificial sequence
  SiRNA target sequence
cataggattgtcttgattaacactgg

SEQ ID NO: 145642 - DNA, 26 bp, Artificial sequence
  SiRNA target sequence
ataggattgtcttgattaacactggt

SEQ ID NO: 145643 - DNA, 26 bp, Artificial sequence
  SiRNA target sequence
taggattgtcttgattaacactggtc

SEQ ID NO: 145644 - DNA, 26 bp, Artificial sequence
  SiRNA target sequence
aggattgtcttgattaacactggtct

SEQ ID NO: 145645 - DNA, 26 bp, Artificial sequence
  SiRNA target sequence
ggattgtcttgattaacactggtctt

SEQ ID NO: 145646 - DNA, 26 bp, Artificial sequence
  SiRNA target sequence
gattgtcttgattaacactggtctta

SEQ ID NO: 145647 - DNA, 26 bp, Artificial sequence
  SiRNA target sequence
attgtcttgattaacactggtcttaa

SEQ ID NO: 145648 - DNA, 26 bp, Artificial sequence
  SiRNA target sequence
ttgtcttgattaacactggtcttaat

SEQ ID NO: 145649 - DNA, 26 bp, Artificial sequence
  SiRNA target sequence
tgtcttgattaacactggtcttaata

SEQ ID NO: 145650 - DNA, 26 bp, Artificial sequence
  SiRNA target sequence
gtcttgattaacactggtcttaatac

SEQ ID NO: 145651 - DNA, 26 bp, Artificial sequence
  SiRNA target sequence
tcttgattaacactggtcttaataca

SEQ ID NO: 145652 - DNA, 26 bp, Artificial sequence
  SiRNA target sequence
cttgattaacactggtcttaatacac

SEQ ID NO: 145653 - DNA, 26 bp, Artificial sequence
  SiRNA target sequence
ttgattaacactggtcttaatacaca

SEQ ID NO: 145654 - DNA, 26 bp, Artificial sequence
  SiRNA target sequence
tgattaacactggtcttaatacacaa

SEQ ID NO: 145655 - DNA, 26 bp, Artificial sequence
  SiRNA target sequence
gattaacactggtcttaatacacaat

SEQ ID NO: 145656 - DNA, 26 bp, Artificial sequence
  SiRNA target sequence
attaacactggtcttaatacacaatt

SEQ ID NO: 145657 - DNA, 26 bp, Artificial sequence
  SiRNA target sequence
ttaacactggtcttaatacacaattt

SEQ ID NO: 145658 - DNA, 26 bp, Artificial sequence
  SiRNA target sequence
taacactggtcttaatacacaattta

SEQ ID NO: 145659 - DNA, 26 bp, Artificial sequence
  SiRNA target sequence
aacactggtcttaatacacaatttat

SEQ ID NO: 145660 - DNA, 26 bp, Artificial sequence
  SiRNA target sequence
acactggtcttaatacacaatttatc

SEQ ID NO: 145661 - DNA, 26 bp, Artificial sequence
  SiRNA target sequence
cactggtcttaatacacaatttatct

SEQ ID NO: 145662 - DNA, 26 bp, Artificial sequence
  SiRNA target sequence
actggtcttaatacacaatttatctt

SEQ ID NO: 145663 - DNA, 26 bp, Artificial sequence
  SiRNA target sequence
ctggtcttaatacacaatttatcttt

SEQ ID NO: 145664 - DNA, 26 bp, Artificial sequence
  SiRNA target sequence
tggtcttaatacacaatttatcttta

SEQ ID NO: 145665 - DNA, 26 bp, Artificial sequence
  SiRNA target sequence
ggtcttaatacacaatttatctttat

SEQ ID NO: 145666 - DNA, 26 bp, Artificial sequence
  SiRNA target sequence
gtcttaatacacaatttatctttata

SEQ ID NO: 145667 - DNA, 26 bp, Artificial sequence
  SiRNA target sequence
tcttaatacacaatttatctttatat

SEQ ID NO: 145668 - DNA, 26 bp, Artificial sequence
  SiRNA target sequence
cttaatacacaatttatctttatata

SEQ ID NO: 145669 - DNA, 26 bp, Artificial sequence
  SiRNA target sequence
ttaatacacaatttatctttatatat

SEQ ID NO: 145670 - DNA, 26 bp, Artificial sequence
  SiRNA target sequence
taatacacaatttatctttatatatc

SEQ ID NO: 145671 - DNA, 26 bp, Artificial sequence
  SiRNA target sequence
aatacacaatttatctttatatatca

SEQ ID NO: 145672 - DNA, 26 bp, Artificial sequence
  SiRNA target sequence
atacacaatttatctttatatatcaa

SEQ ID NO: 145673 - DNA, 26 bp, Artificial sequence
  SiRNA target sequence
tacacaatttatctttatatatcaac

SEQ ID NO: 145674 - DNA, 26 bp, Artificial sequence
  SiRNA target sequence
acacaatttatctttatatatcaacc

SEQ ID NO: 145675 - DNA, 26 bp, Artificial sequence
  SiRNA target sequence
cacaatttatctttatatatcaacca

SEQ ID NO: 145676 - DNA, 26 bp, Artificial sequence
  SiRNA target sequence
acaatttatctttatatatcaaccac

SEQ ID NO: 145677 - DNA, 26 bp, Artificial sequence
  SiRNA target sequence
caatttatctttatatatcaaccaca

SEQ ID NO: 145678 - DNA, 26 bp, Artificial sequence
  SiRNA target sequence
aatttatctttatatatcaaccacac

SEQ ID NO: 145679 - DNA, 26 bp, Artificial sequence
  SiRNA target sequence
atttatctttatatatcaaccacacc

SEQ ID NO: 145680 - DNA, 26 bp, Artificial sequence
  SiRNA target sequence
tttatctttatatatcaaccacaccc

SEQ ID NO: 145681 - DNA, 26 bp, Artificial sequence
  SiRNA target sequence
ttatctttatatatcaaccacaccca

SEQ ID NO: 145682 - DNA, 26 bp, Artificial sequence
  SiRNA target sequence
tatctttatatatcaaccacacccat

SEQ ID NO: 145683 - DNA, 26 bp, Artificial sequence
  SiRNA target sequence
atctttatatatcaaccacacccatc

SEQ ID NO: 145684 - DNA, 26 bp, Artificial sequence
  SiRNA target sequence
tctttatatatcaaccacacccatcc

SEQ ID NO: 145685 - DNA, 26 bp, Artificial sequence
  SiRNA target sequence
ctttatatatcaaccacacccatcct

SEQ ID NO: 145686 - DNA, 26 bp, Artificial sequence
  SiRNA target sequence
tttatatatcaaccacacccatcctg

SEQ ID NO: 145687 - DNA, 26 bp, Artificial sequence
  SiRNA target sequence
ttatatatcaaccacacccatcctga

SEQ ID NO: 145688 - DNA, 26 bp, Artificial sequence
  SiRNA target sequence
tatatatcaaccacacccatcctgat

SEQ ID NO: 145689 - DNA, 26 bp, Artificial sequence
  SiRNA target sequence
atatatcaaccacacccatcctgatc

SEQ ID NO: 145690 - DNA, 26 bp, Artificial sequence
  SiRNA target sequence
tatatcaaccacacccatcctgatcc

SEQ ID NO: 145691 - DNA, 26 bp, Artificial sequence
  SiRNA target sequence
atatcaaccacacccatcctgatcca

SEQ ID NO: 145692 - DNA, 26 bp, Artificial sequence
  SiRNA target sequence
tatcaaccacacccatcctgatccaa

SEQ ID NO: 145693 - DNA, 26 bp, Artificial sequence
  SiRNA target sequence
atcaaccacacccatcctgatccaaa

SEQ ID NO: 145694 - DNA, 26 bp, Artificial sequence
  SiRNA target sequence
tcaaccacacccatcctgatccaaat

SEQ ID NO: 145695 - DNA, 26 bp, Artificial sequence
  SiRNA target sequence
caaccacacccatcctgatccaaata

SEQ ID NO: 145696 - DNA, 26 bp, Artificial sequence
  SiRNA target sequence
aaccacacccatcctgatccaaataa

SEQ ID NO: 145697 - DNA, 26 bp, Artificial sequence
  SiRNA target sequence
accacacccatcctgatccaaataat

SEQ ID NO: 145698 - DNA, 26 bp, Artificial sequence
  SiRNA target sequence
ccacacccatcctgatccaaataatt

SEQ ID NO: 145699 - DNA, 26 bp, Artificial sequence
  SiRNA target sequence
cacacccatcctgatccaaataattt

SEQ ID NO: 145700 - DNA, 26 bp, Artificial sequence
  SiRNA target sequence
acacccatcctgatccaaataatttt

SEQ ID NO: 145701 - DNA, 26 bp, Artificial sequence
  SiRNA target sequence
cacccatcctgatccaaataatttta

SEQ ID NO: 145702 - DNA, 26 bp, Artificial sequence
  SiRNA target sequence
acccatcctgatccaaataattttac

SEQ ID NO: 145703 - DNA, 26 bp, Artificial sequence
  SiRNA target sequence
cccatcctgatccaaataattttaca

SEQ ID NO: 145704 - DNA, 26 bp, Artificial sequence
  SiRNA target sequence
ccatcctgatccaaataattttacag

SEQ ID NO: 145705 - DNA, 26 bp, Artificial sequence
  SiRNA target sequence
catcctgatccaaataattttacagc

SEQ ID NO: 145706 - DNA, 26 bp, Artificial sequence
  SiRNA target sequence
atcctgatccaaataattttacagct

SEQ ID NO: 145707 - DNA, 26 bp, Artificial sequence
  SiRNA target sequence
tcctgatccaaataattttacagctt

SEQ ID NO: 145708 - DNA, 26 bp, Artificial sequence
  SiRNA target sequence
cctgatccaaataattttacagcttc

SEQ ID NO: 145709 - DNA, 26 bp, Artificial sequence
  SiRNA target sequence
ctgatccaaataattttacagcttca

SEQ ID NO: 145710 - DNA, 26 bp, Artificial sequence
  SiRNA target sequence
tgatccaaataattttacagcttcag

SEQ ID NO: 145711 - DNA, 26 bp, Artificial sequence
  SiRNA target sequence
gatccaaataattttacagcttcagt

SEQ ID NO: 145712 - DNA, 26 bp, Artificial sequence
  SiRNA target sequence
atccaaataattttacagcttcagta

SEQ ID NO: 145713 - DNA, 26 bp, Artificial sequence
  SiRNA target sequence
tccaaataattttacagcttcagtat

SEQ ID NO: 145714 - DNA, 26 bp, Artificial sequence
  SiRNA target sequence
ccaaataattttacagcttcagtatt

SEQ ID NO: 145715 - DNA, 26 bp, Artificial sequence
  SiRNA target sequence
caaataattttacagcttcagtatta

SEQ ID NO: 145716 - DNA, 26 bp, Artificial sequence
  SiRNA target sequence
aaataattttacagcttcagtattaa

SEQ ID NO: 145717 - DNA, 26 bp, Artificial sequence
  SiRNA target sequence
aataattttacagcttcagtattaaa

SEQ ID NO: 145718 - DNA, 26 bp, Artificial sequence
  SiRNA target sequence
ataattttacagcttcagtattaaaa

SEQ ID NO: 145719 - DNA, 26 bp, Artificial sequence
  SiRNA target sequence
taattttacagcttcagtattaaaat

SEQ ID NO: 145720 - DNA, 26 bp, Artificial sequence
  SiRNA target sequence
aattttacagcttcagtattaaaatt

SEQ ID NO: 145721 - DNA, 26 bp, Artificial sequence
  SiRNA target sequence
attttacagcttcagtattaaaattc

SEQ ID NO: 145722 - DNA, 26 bp, Artificial sequence
  SiRNA target sequence
ttttacagcttcagtattaaaattct

SEQ ID NO: 145723 - DNA, 26 bp, Artificial sequence
  SiRNA target sequence
tttacagcttcagtattaaaattctc

SEQ ID NO: 145724 - DNA, 26 bp, Artificial sequence
  SiRNA target sequence
ttacagcttcagtattaaaattctcc

SEQ ID NO: 145725 - DNA, 26 bp, Artificial sequence
  SiRNA target sequence
tacagcttcagtattaaaattctcct

SEQ ID NO: 145726 - DNA, 26 bp, Artificial sequence
  SiRNA target sequence
acagcttcagtattaaaattctcctt

SEQ ID NO: 145727 - DNA, 26 bp, Artificial sequence
  SiRNA target sequence
cagcttcagtattaaaattctcctta

SEQ ID NO: 145728 - DNA, 26 bp, Artificial sequence
  SiRNA target sequence
agcttcagtattaaaattctccttaa

SEQ ID NO: 145729 - DNA, 26 bp, Artificial sequence
  SiRNA target sequence
gcttcagtattaaaattctccttaaa

SEQ ID NO: 145730 - DNA, 26 bp, Artificial sequence
  SiRNA target sequence
cttcagtattaaaattctccttaaat

SEQ ID NO: 145731 - DNA, 26 bp, Artificial sequence
  SiRNA target sequence
ttcagtattaaaattctccttaaatt

SEQ ID NO: 145732 - DNA, 26 bp, Artificial sequence
  SiRNA target sequence
tcagtattaaaattctccttaaattt

SEQ ID NO: 145733 - DNA, 26 bp, Artificial sequence
  SiRNA target sequence
cagtattaaaattctccttaaattta

SEQ ID NO: 145734 - DNA, 26 bp, Artificial sequence
  SiRNA target sequence
agtattaaaattctccttaaatttat

SEQ ID NO: 145735 - DNA, 26 bp, Artificial sequence
  SiRNA target sequence
gtattaaaattctccttaaatttatt

SEQ ID NO: 145736 - DNA, 26 bp, Artificial sequence
  SiRNA target sequence
tattaaaattctccttaaatttattt

SEQ ID NO: 145737 - DNA, 26 bp, Artificial sequence
  SiRNA target sequence
attaaaattctccttaaatttattta

SEQ ID NO: 145738 - DNA, 26 bp, Artificial sequence
  SiRNA target sequence
ttaaaattctccttaaatttatttat

SEQ ID NO: 145739 - DNA, 26 bp, Artificial sequence
  SiRNA target sequence
taaaattctccttaaatttatttatt

SEQ ID NO: 145740 - DNA, 26 bp, Artificial sequence
  SiRNA target sequence
aaaattctccttaaatttatttattg

SEQ ID NO: 145741 - DNA, 26 bp, Artificial sequence
  SiRNA target sequence
aaattctccttaaatttatttattga

SEQ ID NO: 145742 - DNA, 26 bp, Artificial sequence
  SiRNA target sequence
aattctccttaaatttatttattgat

SEQ ID NO: 145743 - DNA, 26 bp, Artificial sequence
  SiRNA target sequence
attctccttaaatttatttattgatc

SEQ ID NO: 145744 - DNA, 26 bp, Artificial sequence
  SiRNA target sequence
ttctccttaaatttatttattgatcc

SEQ ID NO: 145745 - DNA, 26 bp, Artificial sequence
  SiRNA target sequence
tctccttaaatttatttattgatcca

SEQ ID NO: 145746 - DNA, 26 bp, Artificial sequence
  SiRNA target sequence
ctccttaaatttatttattgatccaa

SEQ ID NO: 145747 - DNA, 26 bp, Artificial sequence
  SiRNA target sequence
tccttaaatttatttattgatccaaa

SEQ ID NO: 145748 - DNA, 26 bp, Artificial sequence
  SiRNA target sequence
ccttaaatttatttattgatccaaag

SEQ ID NO: 145749 - DNA, 26 bp, Artificial sequence
  SiRNA target sequence
cttaaatttatttattgatccaaagt

SEQ ID NO: 145750 - DNA, 26 bp, Artificial sequence
  SiRNA target sequence
ttaaatttatttattgatccaaagtc

SEQ ID NO: 145751 - DNA, 26 bp, Artificial sequence
  SiRNA target sequence
taaatttatttattgatccaaagtct

SEQ ID NO: 145752 - DNA, 26 bp, Artificial sequence
  SiRNA target sequence
aaatttatttattgatccaaagtctt

SEQ ID NO: 145753 - DNA, 26 bp, Artificial sequence
  SiRNA target sequence
aatttatttattgatccaaagtcttt

SEQ ID NO: 145754 - DNA, 26 bp, Artificial sequence
  SiRNA target sequence
atttatttattgatccaaagtctttt

SEQ ID NO: 145755 - DNA, 26 bp, Artificial sequence
  SiRNA target sequence
tttatttattgatccaaagtctttta

SEQ ID NO: 145756 - DNA, 26 bp, Artificial sequence
  SiRNA target sequence
ttatttattgatccaaagtcttttat

SEQ ID NO: 145757 - DNA, 26 bp, Artificial sequence
  SiRNA target sequence
tatttattgatccaaagtcttttatt

SEQ ID NO: 145758 - DNA, 26 bp, Artificial sequence
  SiRNA target sequence
atttattgatccaaagtcttttatta

SEQ ID NO: 145759 - DNA, 26 bp, Artificial sequence
  SiRNA target sequence
tttattgatccaaagtcttttattat

SEQ ID NO: 145760 - DNA, 26 bp, Artificial sequence
  SiRNA target sequence
ttattgatccaaagtcttttattata

SEQ ID NO: 145761 - DNA, 26 bp, Artificial sequence
  SiRNA target sequence
tattgatccaaagtcttttattatag

SEQ ID NO: 145762 - DNA, 26 bp, Artificial sequence
  SiRNA target sequence
attgatccaaagtcttttattatagc

SEQ ID NO: 145763 - DNA, 26 bp, Artificial sequence
  SiRNA target sequence
ttgatccaaagtcttttattatagca

SEQ ID NO: 145764 - DNA, 26 bp, Artificial sequence
  SiRNA target sequence
tgatccaaagtcttttattatagcac

SEQ ID NO: 145765 - DNA, 26 bp, Artificial sequence
  SiRNA target sequence
gatccaaagtcttttattatagcact

SEQ ID NO: 145766 - DNA, 26 bp, Artificial sequence
  SiRNA target sequence
atccaaagtcttttattatagcactt

SEQ ID NO: 145767 - DNA, 26 bp, Artificial sequence
  SiRNA target sequence
tccaaagtcttttattatagcacttt

SEQ ID NO: 145768 - DNA, 26 bp, Artificial sequence
  SiRNA target sequence
ccaaagtcttttattatagcactttc

SEQ ID NO: 145769 - DNA, 26 bp, Artificial sequence
  SiRNA target sequence
caaagtcttttattatagcactttcc

SEQ ID NO: 145770 - DNA, 26 bp, Artificial sequence
  SiRNA target sequence
aaagtcttttattatagcactttcca

SEQ ID NO: 145771 - DNA, 26 bp, Artificial sequence
  SiRNA target sequence
aagtcttttattatagcactttccaa

SEQ ID NO: 145772 - DNA, 26 bp, Artificial sequence
  SiRNA target sequence
agtcttttattatagcactttccaac

SEQ ID NO: 145773 - DNA, 26 bp, Artificial sequence
  SiRNA target sequence
gtcttttattatagcactttccaact

SEQ ID NO: 145774 - DNA, 26 bp, Artificial sequence
  SiRNA target sequence
tcttttattatagcactttccaactg

SEQ ID NO: 145775 - DNA, 26 bp, Artificial sequence
  SiRNA target sequence
cttttattatagcactttccaactgg

SEQ ID NO: 145776 - DNA, 26 bp, Artificial sequence
  SiRNA target sequence
ttttattatagcactttccaactggg

SEQ ID NO: 145777 - DNA, 26 bp, Artificial sequence
  SiRNA target sequence
tttattatagcactttccaactggga

SEQ ID NO: 145778 - DNA, 26 bp, Artificial sequence
  SiRNA target sequence
ttattatagcactttccaactgggaa

SEQ ID NO: 145779 - DNA, 26 bp, Artificial sequence
  SiRNA target sequence
tattatagcactttccaactgggaag

SEQ ID NO: 145780 - DNA, 26 bp, Artificial sequence
  SiRNA target sequence
attatagcactttccaactgggaaga

SEQ ID NO: 145781 - DNA, 26 bp, Artificial sequence
  SiRNA target sequence
ttatagcactttccaactgggaagaa

SEQ ID NO: 145782 - DNA, 26 bp, Artificial sequence
  SiRNA target sequence
tatagcactttccaactgggaagaaa

SEQ ID NO: 145783 - DNA, 26 bp, Artificial sequence
  SiRNA target sequence
atagcactttccaactgggaagaaat

SEQ ID NO: 145784 - DNA, 26 bp, Artificial sequence
  SiRNA target sequence
tagcactttccaactgggaagaaatc

SEQ ID NO: 145785 - DNA, 26 bp, Artificial sequence
  SiRNA target sequence
agcactttccaactgggaagaaatct

SEQ ID NO: 145786 - DNA, 26 bp, Artificial sequence
  SiRNA target sequence
gcactttccaactgggaagaaatctt

SEQ ID NO: 145787 - DNA, 26 bp, Artificial sequence
  SiRNA target sequence
cactttccaactgggaagaaatcttt

SEQ ID NO: 145788 - DNA, 26 bp, Artificial sequence
  SiRNA target sequence
actttccaactgggaagaaatctttt

SEQ ID NO: 145789 - DNA, 26 bp, Artificial sequence
  SiRNA target sequence
ctttccaactgggaagaaatcttttt

SEQ ID NO: 145790 - DNA, 26 bp, Artificial sequence
  SiRNA target sequence
tttccaactgggaagaaatcttttta

SEQ ID NO: 145791 - DNA, 26 bp, Artificial sequence
  SiRNA target sequence
ttccaactgggaagaaatctttttat

SEQ ID NO: 145792 - DNA, 26 bp, Artificial sequence
  SiRNA target sequence
tccaactgggaagaaatctttttatt

SEQ ID NO: 145793 - DNA, 26 bp, Artificial sequence
  SiRNA target sequence
ccaactgggaagaaatctttttattt

SEQ ID NO: 145794 - DNA, 26 bp, Artificial sequence
  SiRNA target sequence
caactgggaagaaatctttttatttt

SEQ ID NO: 145795 - DNA, 26 bp, Artificial sequence
  SiRNA target sequence
aactgggaagaaatctttttattttc

SEQ ID NO: 145796 - DNA, 26 bp, Artificial sequence
  SiRNA target sequence
actgggaagaaatctttttattttct

SEQ ID NO: 145797 - DNA, 26 bp, Artificial sequence
  SiRNA target sequence
ctgggaagaaatctttttattttctg

SEQ ID NO: 145798 - DNA, 26 bp, Artificial sequence
  SiRNA target sequence
tgggaagaaatctttttattttctgg

SEQ ID NO: 145799 - DNA, 26 bp, Artificial sequence
  SiRNA target sequence
gggaagaaatctttttattttctggt

SEQ ID NO: 145800 - DNA, 26 bp, Artificial sequence
  SiRNA target sequence
ggaagaaatctttttattttctggtg

SEQ ID NO: 145801 - DNA, 26 bp, Artificial sequence
  SiRNA target sequence
gaagaaatctttttattttctggtga

SEQ ID NO: 145802 - DNA, 26 bp, Artificial sequence
  SiRNA target sequence
aagaaatctttttattttctggtgac

SEQ ID NO: 145803 - DNA, 26 bp, Artificial sequence
  SiRNA target sequence
agaaatctttttattttctggtgaca

SEQ ID NO: 145804 - DNA, 26 bp, Artificial sequence
  SiRNA target sequence
gaaatctttttattttctggtgacat

SEQ ID NO: 145805 - DNA, 26 bp, Artificial sequence
  SiRNA target sequence
aaatctttttattttctggtgacatt

SEQ ID NO: 145806 - DNA, 26 bp, Artificial sequence
  SiRNA target sequence
aatctttttattttctggtgacatta

SEQ ID NO: 145807 - DNA, 26 bp, Artificial sequence
  SiRNA target sequence
atctttttattttctggtgacattac

SEQ ID NO: 145808 - DNA, 26 bp, Artificial sequence
  SiRNA target sequence
tctttttattttctggtgacattacc

SEQ ID NO: 145809 - DNA, 26 bp, Artificial sequence
  SiRNA target sequence
ctttttattttctggtgacattacca

SEQ ID NO: 145810 - DNA, 26 bp, Artificial sequence
  SiRNA target sequence
tttttattttctggtgacattaccaa

SEQ ID NO: 145811 - DNA, 26 bp, Artificial sequence
  SiRNA target sequence
ttttattttctggtgacattaccaac

SEQ ID NO: 145812 - DNA, 26 bp, Artificial sequence
  SiRNA target sequence
tttattttctggtgacattaccaacc

SEQ ID NO: 145813 - DNA, 26 bp, Artificial sequence
  SiRNA target sequence
ttattttctggtgacattaccaacca

SEQ ID NO: 145814 - DNA, 26 bp, Artificial sequence
  SiRNA target sequence
tattttctggtgacattaccaaccag

SEQ ID NO: 145815 - DNA, 26 bp, Artificial sequence
  SiRNA target sequence
attttctggtgacattaccaaccaga

SEQ ID NO: 145816 - DNA, 26 bp, Artificial sequence
  SiRNA target sequence
ttttctggtgacattaccaaccagaa

SEQ ID NO: 145817 - DNA, 26 bp, Artificial sequence
  SiRNA target sequence
tttctggtgacattaccaaccagaaa

SEQ ID NO: 145818 - DNA, 26 bp, Artificial sequence
  SiRNA target sequence
ttctggtgacattaccaaccagaaaa

SEQ ID NO: 145819 - DNA, 26 bp, Artificial sequence
  SiRNA target sequence
tctggtgacattaccaaccagaaaag

SEQ ID NO: 145820 - DNA, 26 bp, Artificial sequence
  SiRNA target sequence
ctggtgacattaccaaccagaaaaga

SEQ ID NO: 145821 - DNA, 26 bp, Artificial sequence
  SiRNA target sequence
tggtgacattaccaaccagaaaagac

SEQ ID NO: 145822 - DNA, 26 bp, Artificial sequence
  SiRNA target sequence
ggtgacattaccaaccagaaaagact

SEQ ID NO: 145823 - DNA, 26 bp, Artificial sequence
  SiRNA target sequence
gtgacattaccaaccagaaaagacta

SEQ ID NO: 145824 - DNA, 26 bp, Artificial sequence
  SiRNA target sequence
tgacattaccaaccagaaaagactat

SEQ ID NO: 145825 - DNA, 26 bp, Artificial sequence
  SiRNA target sequence
gacattaccaaccagaaaagactatg

SEQ ID NO: 145826 - DNA, 26 bp, Artificial sequence
  SiRNA target sequence
acattaccaaccagaaaagactatgg

SEQ ID NO: 145827 - DNA, 26 bp, Artificial sequence
  SiRNA target sequence
cattaccaaccagaaaagactatggt

SEQ ID NO: 145828 - DNA, 26 bp, Artificial sequence
  SiRNA target sequence
attaccaaccagaaaagactatggtt

SEQ ID NO: 145829 - DNA, 26 bp, Artificial sequence
  SiRNA target sequence
ttaccaaccagaaaagactatggttg

SEQ ID NO: 145830 - DNA, 26 bp, Artificial sequence
  SiRNA target sequence
taccaaccagaaaagactatggttgt

SEQ ID NO: 145831 - DNA, 26 bp, Artificial sequence
  SiRNA target sequence
accaaccagaaaagactatggttgta

SEQ ID NO: 145832 - DNA, 26 bp, Artificial sequence
  SiRNA target sequence
ccaaccagaaaagactatggttgtaa

SEQ ID NO: 145833 - DNA, 26 bp, Artificial sequence
  SiRNA target sequence
caaccagaaaagactatggttgtaat

SEQ ID NO: 145834 - DNA, 26 bp, Artificial sequence
  SiRNA target sequence
aaccagaaaagactatggttgtaatg

SEQ ID NO: 145835 - DNA, 26 bp, Artificial sequence
  SiRNA target sequence
accagaaaagactatggttgtaatga

SEQ ID NO: 145836 - DNA, 26 bp, Artificial sequence
  SiRNA target sequence
ccagaaaagactatggttgtaatgac

SEQ ID NO: 145837 - DNA, 26 bp, Artificial sequence
  SiRNA target sequence
cagaaaagactatggttgtaatgacc

SEQ ID NO: 145838 - DNA, 26 bp, Artificial sequence
  SiRNA target sequence
agaaaagactatggttgtaatgacca

SEQ ID NO: 145839 - DNA, 26 bp, Artificial sequence
  SiRNA target sequence
gaaaagactatggttgtaatgaccac

SEQ ID NO: 145840 - DNA, 26 bp, Artificial sequence
  SiRNA target sequence
aaaagactatggttgtaatgaccacc

SEQ ID NO: 145841 - DNA, 26 bp, Artificial sequence
  SiRNA target sequence
aaagactatggttgtaatgaccacca

SEQ ID NO: 145842 - DNA, 26 bp, Artificial sequence
  SiRNA target sequence
aagactatggttgtaatgaccaccac

SEQ ID NO: 145843 - DNA, 26 bp, Artificial sequence
  SiRNA target sequence
agactatggttgtaatgaccaccacc

SEQ ID NO: 145844 - DNA, 26 bp, Artificial sequence
  SiRNA target sequence
gactatggttgtaatgaccaccacca

SEQ ID NO: 145845 - DNA, 26 bp, Artificial sequence
  SiRNA target sequence
actatggttgtaatgaccaccaccat

SEQ ID NO: 145846 - DNA, 26 bp, Artificial sequence
  SiRNA target sequence
ctatggttgtaatgaccaccaccata

SEQ ID NO: 145847 - DNA, 26 bp, Artificial sequence
  SiRNA target sequence
tatggttgtaatgaccaccaccataa

SEQ ID NO: 145848 - DNA, 26 bp, Artificial sequence
  SiRNA target sequence
atggttgtaatgaccaccaccataat

SEQ ID NO: 145849 - DNA, 26 bp, Artificial sequence
  SiRNA target sequence
tggttgtaatgaccaccaccataatc

SEQ ID NO: 145850 - DNA, 26 bp, Artificial sequence
  SiRNA target sequence
ggttgtaatgaccaccaccataatct

SEQ ID NO: 145851 - DNA, 26 bp, Artificial sequence
  SiRNA target sequence
gttgtaatgaccaccaccataatctc

SEQ ID NO: 145852 - DNA, 26 bp, Artificial sequence
  SiRNA target sequence
ttgtaatgaccaccaccataatctct

SEQ ID NO: 145853 - DNA, 26 bp, Artificial sequence
  SiRNA target sequence
tgtaatgaccaccaccataatctctt

SEQ ID NO: 145854 - DNA, 26 bp, Artificial sequence
  SiRNA target sequence
gtaatgaccaccaccataatctctta

SEQ ID NO: 145855 - DNA, 26 bp, Artificial sequence
  SiRNA target sequence
taatgaccaccaccataatctcttaa

SEQ ID NO: 145856 - DNA, 26 bp, Artificial sequence
  SiRNA target sequence
aatgaccaccaccataatctcttaat

SEQ ID NO: 145857 - DNA, 26 bp, Artificial sequence
  SiRNA target sequence
atgaccaccaccataatctcttaatt

SEQ ID NO: 145858 - DNA, 26 bp, Artificial sequence
  SiRNA target sequence
tgaccaccaccataatctcttaattg

SEQ ID NO: 145859 - DNA, 26 bp, Artificial sequence
  SiRNA target sequence
gaccaccaccataatctcttaattgt

SEQ ID NO: 145860 - DNA, 26 bp, Artificial sequence
  SiRNA target sequence
accaccaccataatctcttaattgtt

SEQ ID NO: 145861 - DNA, 26 bp, Artificial sequence
  SiRNA target sequence
ccaccaccataatctcttaattgttt

SEQ ID NO: 145862 - DNA, 26 bp, Artificial sequence
  SiRNA target sequence
caccaccataatctcttaattgttta

SEQ ID NO: 145863 - DNA, 26 bp, Artificial sequence
  SiRNA target sequence
accaccataatctcttaattgtttat

SEQ ID NO: 145864 - DNA, 26 bp, Artificial sequence
  SiRNA target sequence
ccaccataatctcttaattgtttatc

SEQ ID NO: 145865 - DNA, 26 bp, Artificial sequence
  SiRNA target sequence
caccataatctcttaattgtttatca

SEQ ID NO: 145866 - DNA, 26 bp, Artificial sequence
  SiRNA target sequence
accataatctcttaattgtttatcaa

SEQ ID NO: 145867 - DNA, 26 bp, Artificial sequence
  SiRNA target sequence
ccataatctcttaattgtttatcaac

SEQ ID NO: 145868 - DNA, 26 bp, Artificial sequence
  SiRNA target sequence
cataatctcttaattgtttatcaaca

SEQ ID NO: 145869 - DNA, 26 bp, Artificial sequence
  SiRNA target sequence
ataatctcttaattgtttatcaacaa

SEQ ID NO: 145870 - DNA, 26 bp, Artificial sequence
  SiRNA target sequence
taatctcttaattgtttatcaacaag

SEQ ID NO: 145871 - DNA, 26 bp, Artificial sequence
  SiRNA target sequence
aatctcttaattgtttatcaacaagt

SEQ ID NO: 145872 - DNA, 26 bp, Artificial sequence
  SiRNA target sequence
atctcttaattgtttatcaacaagtg

SEQ ID NO: 145873 - DNA, 26 bp, Artificial sequence
  SiRNA target sequence
tctcttaattgtttatcaacaagtgc

SEQ ID NO: 145874 - DNA, 26 bp, Artificial sequence
  SiRNA target sequence
ctcttaattgtttatcaacaagtgca

SEQ ID NO: 145875 - DNA, 26 bp, Artificial sequence
  SiRNA target sequence
tcttaattgtttatcaacaagtgcat

SEQ ID NO: 145876 - DNA, 26 bp, Artificial sequence
  SiRNA target sequence
cttaattgtttatcaacaagtgcatt

SEQ ID NO: 145877 - DNA, 26 bp, Artificial sequence
  SiRNA target sequence
ttaattgtttatcaacaagtgcattt

SEQ ID NO: 145878 - DNA, 26 bp, Artificial sequence
  SiRNA target sequence
taattgtttatcaacaagtgcatttc

SEQ ID NO: 145879 - DNA, 26 bp, Artificial sequence
  SiRNA target sequence
aattgtttatcaacaagtgcatttcc

SEQ ID NO: 145880 - DNA, 26 bp, Artificial sequence
  SiRNA target sequence
attgtttatcaacaagtgcatttcct

SEQ ID NO: 145881 - DNA, 26 bp, Artificial sequence
  SiRNA target sequence
ttgtttatcaacaagtgcatttcctt

SEQ ID NO: 145882 - DNA, 26 bp, Artificial sequence
  SiRNA target sequence
tgtttatcaacaagtgcatttccttt

SEQ ID NO: 145883 - DNA, 26 bp, Artificial sequence
  SiRNA target sequence
gtttatcaacaagtgcatttccttta

SEQ ID NO: 145884 - DNA, 26 bp, Artificial sequence
  SiRNA target sequence
tttatcaacaagtgcatttcctttat

SEQ ID NO: 145885 - DNA, 26 bp, Artificial sequence
  SiRNA target sequence
ttatcaacaagtgcatttcctttatt

SEQ ID NO: 145886 - DNA, 26 bp, Artificial sequence
  SiRNA target sequence
tatcaacaagtgcatttcctttatta

SEQ ID NO: 145887 - DNA, 26 bp, Artificial sequence
  SiRNA target sequence
atcaacaagtgcatttcctttattat

SEQ ID NO: 145888 - DNA, 26 bp, Artificial sequence
  SiRNA target sequence
tcaacaagtgcatttcctttattatt

SEQ ID NO: 145889 - DNA, 26 bp, Artificial sequence
  SiRNA target sequence
caacaagtgcatttcctttattatta

SEQ ID NO: 145890 - DNA, 26 bp, Artificial sequence
  SiRNA target sequence
aacaagtgcatttcctttattattaa

SEQ ID NO: 145891 - DNA, 26 bp, Artificial sequence
  SiRNA target sequence
acaagtgcatttcctttattattaaa

SEQ ID NO: 145892 - DNA, 26 bp, Artificial sequence
  SiRNA target sequence
caagtgcatttcctttattattaaaa

SEQ ID NO: 145893 - DNA, 26 bp, Artificial sequence
  SiRNA target sequence
aagtgcatttcctttattattaaaaa

SEQ ID NO: 145894 - DNA, 26 bp, Artificial sequence
  SiRNA target sequence
agtgcatttcctttattattaaaaag

SEQ ID NO: 145895 - DNA, 26 bp, Artificial sequence
  SiRNA target sequence
gtgcatttcctttattattaaaaagt

SEQ ID NO: 145896 - DNA, 26 bp, Artificial sequence
  SiRNA target sequence
tgcatttcctttattattaaaaagta

SEQ ID NO: 145897 - DNA, 26 bp, Artificial sequence
  SiRNA target sequence
gcatttcctttattattaaaaagtaa

SEQ ID NO: 145898 - DNA, 26 bp, Artificial sequence
  SiRNA target sequence
catttcctttattattaaaaagtaat

SEQ ID NO: 145899 - DNA, 26 bp, Artificial sequence
  SiRNA target sequence
atttcctttattattaaaaagtaatg

SEQ ID NO: 145900 - DNA, 26 bp, Artificial sequence
  SiRNA target sequence
tttcctttattattaaaaagtaatga

SEQ ID NO: 145901 - DNA, 26 bp, Artificial sequence
  SiRNA target sequence
ttcctttattattaaaaagtaatgaa

SEQ ID NO: 145902 - DNA, 26 bp, Artificial sequence
  SiRNA target sequence
tcctttattattaaaaagtaatgaat

SEQ ID NO: 145903 - DNA, 26 bp, Artificial sequence
  SiRNA target sequence
cctttattattaaaaagtaatgaatt

SEQ ID NO: 145904 - DNA, 26 bp, Artificial sequence
  SiRNA target sequence
ctttattattaaaaagtaatgaattt

SEQ ID NO: 145905 - DNA, 26 bp, Artificial sequence
  SiRNA target sequence
tttattattaaaaagtaatgaattta

SEQ ID NO: 145906 - DNA, 26 bp, Artificial sequence
  SiRNA target sequence
ttattattaaaaagtaatgaatttaa

SEQ ID NO: 145907 - DNA, 26 bp, Artificial sequence
  SiRNA target sequence
tattattaaaaagtaatgaatttaat

SEQ ID NO: 145908 - DNA, 26 bp, Artificial sequence
  SiRNA target sequence
attattaaaaagtaatgaatttaatg

SEQ ID NO: 145909 - DNA, 26 bp, Artificial sequence
  SiRNA target sequence
ttattaaaaagtaatgaatttaatga

SEQ ID NO: 145910 - DNA, 26 bp, Artificial sequence
  SiRNA target sequence
tattaaaaagtaatgaatttaatgat

SEQ ID NO: 145911 - DNA, 26 bp, Artificial sequence
  SiRNA target sequence
attaaaaagtaatgaatttaatgatt

SEQ ID NO: 145912 - DNA, 26 bp, Artificial sequence
  SiRNA target sequence
ttaaaaagtaatgaatttaatgattt

SEQ ID NO: 145913 - DNA, 26 bp, Artificial sequence
  SiRNA target sequence
taaaaagtaatgaatttaatgattta

SEQ ID NO: 145914 - DNA, 26 bp, Artificial sequence
  SiRNA target sequence
aaaaagtaatgaatttaatgatttac

SEQ ID NO: 145915 - DNA, 26 bp, Artificial sequence
  SiRNA target sequence
aaaagtaatgaatttaatgatttacc

SEQ ID NO: 145916 - DNA, 26 bp, Artificial sequence
  SiRNA target sequence
aaagtaatgaatttaatgatttacca

SEQ ID NO: 145917 - DNA, 26 bp, Artificial sequence
  SiRNA target sequence
aagtaatgaatttaatgatttaccac

SEQ ID NO: 145918 - DNA, 26 bp, Artificial sequence
  SiRNA target sequence
agtaatgaatttaatgatttaccaca

SEQ ID NO: 145919 - DNA, 26 bp, Artificial sequence
  SiRNA target sequence
gtaatgaatttaatgatttaccacac

SEQ ID NO: 145920 - DNA, 26 bp, Artificial sequence
  SiRNA target sequence
taatgaatttaatgatttaccacaca

SEQ ID NO: 145921 - DNA, 26 bp, Artificial sequence
  SiRNA target sequence
aatgaatttaatgatttaccacacaa

SEQ ID NO: 145922 - DNA, 26 bp, Artificial sequence
  SiRNA target sequence
atgaatttaatgatttaccacacaaa

SEQ ID NO: 145923 - DNA, 26 bp, Artificial sequence
  SiRNA target sequence
tgaatttaatgatttaccacacaaat

SEQ ID NO: 145924 - DNA, 26 bp, Artificial sequence
  SiRNA target sequence
gaatttaatgatttaccacacaaatt

SEQ ID NO: 145925 - DNA, 26 bp, Artificial sequence
  SiRNA target sequence
aatttaatgatttaccacacaaattg

SEQ ID NO: 145926 - DNA, 26 bp, Artificial sequence
  SiRNA target sequence
atttaatgatttaccacacaaattgt

SEQ ID NO: 145927 - DNA, 26 bp, Artificial sequence
  SiRNA target sequence
tttaatgatttaccacacaaattgtt

SEQ ID NO: 145928 - DNA, 26 bp, Artificial sequence
  SiRNA target sequence
ttaatgatttaccacacaaattgtta

SEQ ID NO: 145929 - DNA, 26 bp, Artificial sequence
  SiRNA target sequence
taatgatttaccacacaaattgttat

SEQ ID NO: 145930 - DNA, 26 bp, Artificial sequence
  SiRNA target sequence
aatgatttaccacacaaattgttatc

SEQ ID NO: 145931 - DNA, 26 bp, Artificial sequence
  SiRNA target sequence
atgatttaccacacaaattgttatct

SEQ ID NO: 145932 - DNA, 26 bp, Artificial sequence
  SiRNA target sequence
tgatttaccacacaaattgttatcta

SEQ ID NO: 145933 - DNA, 26 bp, Artificial sequence
  SiRNA target sequence
gatttaccacacaaattgttatctaa

SEQ ID NO: 145934 - DNA, 26 bp, Artificial sequence
  SiRNA target sequence
atttaccacacaaattgttatctaat

SEQ ID NO: 145935 - DNA, 26 bp, Artificial sequence
  SiRNA target sequence
tttaccacacaaattgttatctaata

SEQ ID NO: 145936 - DNA, 26 bp, Artificial sequence
  SiRNA target sequence
ttaccacacaaattgttatctaatat

SEQ ID NO: 145937 - DNA, 26 bp, Artificial sequence
  SiRNA target sequence
taccacacaaattgttatctaatatt

SEQ ID NO: 145938 - DNA, 26 bp, Artificial sequence
  SiRNA target sequence
accacacaaattgttatctaatatta

SEQ ID NO: 145939 - DNA, 26 bp, Artificial sequence
  SiRNA target sequence
ccacacaaattgttatctaatattat

SEQ ID NO: 145940 - DNA, 26 bp, Artificial sequence
  SiRNA target sequence
cacacaaattgttatctaatattatt

SEQ ID NO: 145941 - DNA, 26 bp, Artificial sequence
  SiRNA target sequence
acacaaattgttatctaatattattt

SEQ ID NO: 145942 - DNA, 26 bp, Artificial sequence
  SiRNA target sequence
cacaaattgttatctaatattatttt

SEQ ID NO: 145943 - DNA, 26 bp, Artificial sequence
  SiRNA target sequence
acaaattgttatctaatattatttta

SEQ ID NO: 145944 - DNA, 26 bp, Artificial sequence
  SiRNA target sequence
caaattgttatctaatattattttat

SEQ ID NO: 145945 - DNA, 26 bp, Artificial sequence
  SiRNA target sequence
aaattgttatctaatattattttatt

SEQ ID NO: 145946 - DNA, 26 bp, Artificial sequence
  SiRNA target sequence
aattgttatctaatattattttatta

SEQ ID NO: 145947 - DNA, 26 bp, Artificial sequence
  SiRNA target sequence
attgttatctaatattattttattaa

SEQ ID NO: 145948 - DNA, 26 bp, Artificial sequence
  SiRNA target sequence
ttgttatctaatattattttattaag

SEQ ID NO: 145949 - DNA, 26 bp, Artificial sequence
  SiRNA target sequence
tgttatctaatattattttattaaga

SEQ ID NO: 145950 - DNA, 26 bp, Artificial sequence
  SiRNA target sequence
gttatctaatattattttattaagag

SEQ ID NO: 145951 - DNA, 26 bp, Artificial sequence
  SiRNA target sequence
ttatctaatattattttattaagagt

SEQ ID NO: 145952 - DNA, 26 bp, Artificial sequence
  SiRNA target sequence
tatctaatattattttattaagagtg

SEQ ID NO: 145953 - DNA, 26 bp, Artificial sequence
  SiRNA target sequence
atctaatattattttattaagagtgt

SEQ ID NO: 145954 - DNA, 26 bp, Artificial sequence
  SiRNA target sequence
tctaatattattttattaagagtgtc

SEQ ID NO: 145955 - DNA, 26 bp, Artificial sequence
  SiRNA target sequence
ctaatattattttattaagagtgtct

SEQ ID NO: 145956 - DNA, 26 bp, Artificial sequence
  SiRNA target sequence
taatattattttattaagagtgtcta

SEQ ID NO: 145957 - DNA, 26 bp, Artificial sequence
  SiRNA target sequence
aatattattttattaagagtgtctac

SEQ ID NO: 145958 - DNA, 26 bp, Artificial sequence
  SiRNA target sequence
atattattttattaagagtgtctaca

SEQ ID NO: 145959 - DNA, 26 bp, Artificial sequence
  SiRNA target sequence
tattattttattaagagtgtctacat

SEQ ID NO: 145960 - DNA, 26 bp, Artificial sequence
  SiRNA target sequence
attattttattaagagtgtctacata

SEQ ID NO: 145961 - DNA, 26 bp, Artificial sequence
  SiRNA target sequence
ttattttattaagagtgtctacatac

SEQ ID NO: 145962 - DNA, 26 bp, Artificial sequence
  SiRNA target sequence
tattttattaagagtgtctacatacg

SEQ ID NO: 145963 - DNA, 26 bp, Artificial sequence
  SiRNA target sequence
attttattaagagtgtctacatacgc

SEQ ID NO: 145964 - DNA, 26 bp, Artificial sequence
  SiRNA target sequence
ttttattaagagtgtctacatacgct

SEQ ID NO: 145965 - DNA, 26 bp, Artificial sequence
  SiRNA target sequence
tttattaagagtgtctacatacgctt

SEQ ID NO: 145966 - DNA, 26 bp, Artificial sequence
  SiRNA target sequence
ttattaagagtgtctacatacgcttg

SEQ ID NO: 145967 - DNA, 26 bp, Artificial sequence
  SiRNA target sequence
tattaagagtgtctacatacgcttga

SEQ ID NO: 145968 - DNA, 26 bp, Artificial sequence
  SiRNA target sequence
attaagagtgtctacatacgcttgat

SEQ ID NO: 145969 - DNA, 26 bp, Artificial sequence
  SiRNA target sequence
ttaagagtgtctacatacgcttgatg

SEQ ID NO: 145970 - DNA, 26 bp, Artificial sequence
  SiRNA target sequence
taagagtgtctacatacgcttgatgg

SEQ ID NO: 145971 - DNA, 26 bp, Artificial sequence
  SiRNA target sequence
aagagtgtctacatacgcttgatggt

SEQ ID NO: 145972 - DNA, 26 bp, Artificial sequence
  SiRNA target sequence
agagtgtctacatacgcttgatggtg

SEQ ID NO: 145973 - DNA, 26 bp, Artificial sequence
  SiRNA target sequence
gagtgtctacatacgcttgatggtgc

SEQ ID NO: 145974 - DNA, 26 bp, Artificial sequence
  SiRNA target sequence
agtgtctacatacgcttgatggtgct

SEQ ID NO: 145975 - DNA, 26 bp, Artificial sequence
  SiRNA target sequence
gtgtctacatacgcttgatggtgctt

SEQ ID NO: 145976 - DNA, 26 bp, Artificial sequence
  SiRNA target sequence
tgtctacatacgcttgatggtgctta

SEQ ID NO: 145977 - DNA, 26 bp, Artificial sequence
  SiRNA target sequence
gtctacatacgcttgatggtgcttag

SEQ ID NO: 145978 - DNA, 26 bp, Artificial sequence
  SiRNA target sequence
tctacatacgcttgatggtgcttaga

SEQ ID NO: 145979 - DNA, 26 bp, Artificial sequence
  SiRNA target sequence
ctacatacgcttgatggtgcttagag

SEQ ID NO: 145980 - DNA, 26 bp, Artificial sequence
  SiRNA target sequence
tacatacgcttgatggtgcttagagt

SEQ ID NO: 145981 - DNA, 26 bp, Artificial sequence
  SiRNA target sequence
acatacgcttgatggtgcttagagtg

SEQ ID NO: 145982 - DNA, 26 bp, Artificial sequence
  SiRNA target sequence
catacgcttgatggtgcttagagtgg

SEQ ID NO: 145983 - DNA, 26 bp, Artificial sequence
  SiRNA target sequence
atacgcttgatggtgcttagagtggt

SEQ ID NO: 145984 - DNA, 26 bp, Artificial sequence
  SiRNA target sequence
tacgcttgatggtgcttagagtggtg

SEQ ID NO: 145985 - DNA, 26 bp, Artificial sequence
  SiRNA target sequence
acgcttgatggtgcttagagtggtgg

SEQ ID NO: 145986 - DNA, 26 bp, Artificial sequence
  SiRNA target sequence
cgcttgatggtgcttagagtggtggg

SEQ ID NO: 145987 - DNA, 26 bp, Artificial sequence
  SiRNA target sequence
gcttgatggtgcttagagtggtgggt

SEQ ID NO: 145988 - DNA, 26 bp, Artificial sequence
  SiRNA target sequence
cttgatggtgcttagagtggtgggtc

SEQ ID NO: 145989 - DNA, 26 bp, Artificial sequence
  SiRNA target sequence
ttgatggtgcttagagtggtgggtct

SEQ ID NO: 145990 - DNA, 26 bp, Artificial sequence
  SiRNA target sequence
tgatggtgcttagagtggtgggtctc

SEQ ID NO: 145991 - DNA, 26 bp, Artificial sequence
  SiRNA target sequence
gatggtgcttagagtggtgggtctcc

SEQ ID NO: 145992 - DNA, 26 bp, Artificial sequence
  SiRNA target sequence
atggtgcttagagtggtgggtctcca

SEQ ID NO: 145993 - DNA, 26 bp, Artificial sequence
  SiRNA target sequence
tggtgcttagagtggtgggtctccat

SEQ ID NO: 145994 - DNA, 26 bp, Artificial sequence
  SiRNA target sequence
ggtgcttagagtggtgggtctccatt

SEQ ID NO: 145995 - DNA, 26 bp, Artificial sequence
  SiRNA target sequence
gtgcttagagtggtgggtctccatta

SEQ ID NO: 145996 - DNA, 26 bp, Artificial sequence
  SiRNA target sequence
tgcttagagtggtgggtctccattat

SEQ ID NO: 145997 - DNA, 26 bp, Artificial sequence
  SiRNA target sequence
gcttagagtggtgggtctccattata

SEQ ID NO: 145998 - DNA, 26 bp, Artificial sequence
  SiRNA target sequence
cttagagtggtgggtctccattatat

SEQ ID NO: 145999 - DNA, 26 bp, Artificial sequence
  SiRNA target sequence
ttagagtggtgggtctccattatatc

SEQ ID NO: 146000 - DNA, 26 bp, Artificial sequence
  SiRNA target sequence
tagagtggtgggtctccattatatct

SEQ ID NO: 146001 - DNA, 26 bp, Artificial sequence
  SiRNA target sequence
agagtggtgggtctccattatatctt

SEQ ID NO: 146002 - DNA, 26 bp, Artificial sequence
  SiRNA target sequence
gagtggtgggtctccattatatcttc

SEQ ID NO: 146003 - DNA, 26 bp, Artificial sequence
  SiRNA target sequence
agtggtgggtctccattatatcttca

SEQ ID NO: 146004 - DNA, 26 bp, Artificial sequence
  SiRNA target sequence
gtggtgggtctccattatatcttcac

SEQ ID NO: 146005 - DNA, 26 bp, Artificial sequence
  SiRNA target sequence
tggtgggtctccattatatcttcact

SEQ ID NO: 146006 - DNA, 26 bp, Artificial sequence
  SiRNA target sequence
ggtgggtctccattatatcttcactt

SEQ ID NO: 146007 - DNA, 26 bp, Artificial sequence
  SiRNA target sequence
gtgggtctccattatatcttcactta

SEQ ID NO: 146008 - DNA, 26 bp, Artificial sequence
  SiRNA target sequence
tgggtctccattatatcttcacttat

SEQ ID NO: 146009 - DNA, 26 bp, Artificial sequence
  SiRNA target sequence
gggtctccattatatcttcacttata

SEQ ID NO: 146010 - DNA, 26 bp, Artificial sequence
  SiRNA target sequence
ggtctccattatatcttcacttatat

SEQ ID NO: 146011 - DNA, 26 bp, Artificial sequence
  SiRNA target sequence
gtctccattatatcttcacttatata

SEQ ID NO: 146012 - DNA, 26 bp, Artificial sequence
  SiRNA target sequence
tctccattatatcttcacttatataa

SEQ ID NO: 146013 - DNA, 26 bp, Artificial sequence
  SiRNA target sequence
ctccattatatcttcacttatataag

SEQ ID NO: 146014 - DNA, 26 bp, Artificial sequence
  SiRNA target sequence
tccattatatcttcacttatataagg

SEQ ID NO: 146015 - DNA, 26 bp, Artificial sequence
  SiRNA target sequence
ccattatatcttcacttatataaggc

SEQ ID NO: 146016 - DNA, 26 bp, Artificial sequence
  SiRNA target sequence
cattatatcttcacttatataaggct

SEQ ID NO: 146017 - DNA, 26 bp, Artificial sequence
  SiRNA target sequence
attatatcttcacttatataaggctc

SEQ ID NO: 146018 - DNA, 26 bp, Artificial sequence
  SiRNA target sequence
ttatatcttcacttatataaggctct

SEQ ID NO: 146019 - DNA, 26 bp, Artificial sequence
  SiRNA target sequence
tatatcttcacttatataaggctcta

SEQ ID NO: 146020 - DNA, 26 bp, Artificial sequence
  SiRNA target sequence
atatcttcacttatataaggctctag

SEQ ID NO: 146021 - DNA, 26 bp, Artificial sequence
  SiRNA target sequence
tatcttcacttatataaggctctaga

SEQ ID NO: 146022 - DNA, 26 bp, Artificial sequence
  SiRNA target sequence
atcttcacttatataaggctctagag

SEQ ID NO: 146023 - DNA, 26 bp, Artificial sequence
  SiRNA target sequence
tcttcacttatataaggctctagaga

SEQ ID NO: 146024 - DNA, 26 bp, Artificial sequence
  SiRNA target sequence
cttcacttatataaggctctagagat

SEQ ID NO: 146025 - DNA, 26 bp, Artificial sequence
  SiRNA target sequence
ttcacttatataaggctctagagatt

SEQ ID NO: 146026 - DNA, 26 bp, Artificial sequence
  SiRNA target sequence
tcacttatataaggctctagagattt

SEQ ID NO: 146027 - DNA, 26 bp, Artificial sequence
  SiRNA target sequence
cacttatataaggctctagagattta

SEQ ID NO: 146028 - DNA, 26 bp, Artificial sequence
  SiRNA target sequence
acttatataaggctctagagatttat

SEQ ID NO: 146029 - DNA, 26 bp, Artificial sequence
  SiRNA target sequence
cttatataaggctctagagatttata

SEQ ID NO: 146030 - DNA, 26 bp, Artificial sequence
  SiRNA target sequence
ttatataaggctctagagatttataa

SEQ ID NO: 146031 - DNA, 26 bp, Artificial sequence
  SiRNA target sequence
tatataaggctctagagatttataac

SEQ ID NO: 146032 - DNA, 26 bp, Artificial sequence
  SiRNA target sequence
atataaggctctagagatttataact

SEQ ID NO: 146033 - DNA, 26 bp, Artificial sequence
  SiRNA target sequence
tataaggctctagagatttataacta

SEQ ID NO: 146034 - DNA, 26 bp, Artificial sequence
  SiRNA target sequence
ataaggctctagagatttataactat

SEQ ID NO: 146035 - DNA, 26 bp, Artificial sequence
  SiRNA target sequence
taaggctctagagatttataactata

SEQ ID NO: 146036 - DNA, 26 bp, Artificial sequence
  SiRNA target sequence
aaggctctagagatttataactatat

SEQ ID NO: 146037 - DNA, 26 bp, Artificial sequence
  SiRNA target sequence
aggctctagagatttataactatatt

SEQ ID NO: 146038 - DNA, 26 bp, Artificial sequence
  SiRNA target sequence
ggctctagagatttataactatattt

SEQ ID NO: 146039 - DNA, 26 bp, Artificial sequence
  SiRNA target sequence
gctctagagatttataactatatttc

SEQ ID NO: 146040 - DNA, 26 bp, Artificial sequence
  SiRNA target sequence
ctctagagatttataactatatttca

SEQ ID NO: 146041 - DNA, 26 bp, Artificial sequence
  SiRNA target sequence
tctagagatttataactatatttcag

SEQ ID NO: 146042 - DNA, 26 bp, Artificial sequence
  SiRNA target sequence
ctagagatttataactatatttcaga

SEQ ID NO: 146043 - DNA, 26 bp, Artificial sequence
  SiRNA target sequence
tagagatttataactatatttcagat

SEQ ID NO: 146044 - DNA, 26 bp, Artificial sequence
  SiRNA target sequence
agagatttataactatatttcagatt

SEQ ID NO: 146045 - DNA, 26 bp, Artificial sequence
  SiRNA target sequence
gagatttataactatatttcagattt

SEQ ID NO: 146046 - DNA, 26 bp, Artificial sequence
  SiRNA target sequence
agatttataactatatttcagatttg

SEQ ID NO: 146047 - DNA, 26 bp, Artificial sequence
  SiRNA target sequence
gatttataactatatttcagatttgg

SEQ ID NO: 146048 - DNA, 26 bp, Artificial sequence
  SiRNA target sequence
atttataactatatttcagatttgga

SEQ ID NO: 146049 - DNA, 26 bp, Artificial sequence
  SiRNA target sequence
tttataactatatttcagatttggaa

SEQ ID NO: 146050 - DNA, 26 bp, Artificial sequence
  SiRNA target sequence
ttataactatatttcagatttggaag

SEQ ID NO: 146051 - DNA, 26 bp, Artificial sequence
  SiRNA target sequence
tataactatatttcagatttggaaga

SEQ ID NO: 146052 - DNA, 26 bp, Artificial sequence
  SiRNA target sequence
ataactatatttcagatttggaagag

SEQ ID NO: 146053 - DNA, 26 bp, Artificial sequence
  SiRNA target sequence
taactatatttcagatttggaagagt

SEQ ID NO: 146054 - DNA, 26 bp, Artificial sequence
  SiRNA target sequence
aactatatttcagatttggaagagtg

SEQ ID NO: 146055 - DNA, 26 bp, Artificial sequence
  SiRNA target sequence
actatatttcagatttggaagagtga

SEQ ID NO: 146056 - DNA, 26 bp, Artificial sequence
  SiRNA target sequence
ctatatttcagatttggaagagtgaa

SEQ ID NO: 146057 - DNA, 26 bp, Artificial sequence
  SiRNA target sequence
tatatttcagatttggaagagtgaac

SEQ ID NO: 146058 - DNA, 26 bp, Artificial sequence
  SiRNA target sequence
atatttcagatttggaagagtgaaca

SEQ ID NO: 146059 - DNA, 26 bp, Artificial sequence
  SiRNA target sequence
tatttcagatttggaagagtgaacat

SEQ ID NO: 146060 - DNA, 27 bp, Artificial sequence
  SiRNA target sequence
ttaatttatgcataattgaccatcatc

SEQ ID NO: 146061 - DNA, 27 bp, Artificial sequence
  SiRNA target sequence
taatttatgcataattgaccatcatca

SEQ ID NO: 146062 - DNA, 27 bp, Artificial sequence
  SiRNA target sequence
aatttatgcataattgaccatcatcag

SEQ ID NO: 146063 - DNA, 27 bp, Artificial sequence
  SiRNA target sequence
atttatgcataattgaccatcatcagt

SEQ ID NO: 146064 - DNA, 27 bp, Artificial sequence
  SiRNA target sequence
tttatgcataattgaccatcatcagta

SEQ ID NO: 146065 - DNA, 27 bp, Artificial sequence
  SiRNA target sequence
ttatgcataattgaccatcatcagtaa

SEQ ID NO: 146066 - DNA, 27 bp, Artificial sequence
  SiRNA target sequence
tatgcataattgaccatcatcagtaat

SEQ ID NO: 146067 - DNA, 27 bp, Artificial sequence
  SiRNA target sequence
atgcataattgaccatcatcagtaata

SEQ ID NO: 146068 - DNA, 27 bp, Artificial sequence
  SiRNA target sequence
tgcataattgaccatcatcagtaataa

SEQ ID NO: 146069 - DNA, 27 bp, Artificial sequence
  SiRNA target sequence
gcataattgaccatcatcagtaataaa

SEQ ID NO: 146070 - DNA, 27 bp, Artificial sequence
  SiRNA target sequence
cataattgaccatcatcagtaataaac

SEQ ID NO: 146071 - DNA, 27 bp, Artificial sequence
  SiRNA target sequence
ataattgaccatcatcagtaataaaca

SEQ ID NO: 146072 - DNA, 27 bp, Artificial sequence
  SiRNA target sequence
taattgaccatcatcagtaataaacac

SEQ ID NO: 146073 - DNA, 27 bp, Artificial sequence
  SiRNA target sequence
aattgaccatcatcagtaataaacaca

SEQ ID NO: 146074 - DNA, 27 bp, Artificial sequence
  SiRNA target sequence
attgaccatcatcagtaataaacacat

SEQ ID NO: 146075 - DNA, 27 bp, Artificial sequence
  SiRNA target sequence
ttgaccatcatcagtaataaacacatt

SEQ ID NO: 146076 - DNA, 27 bp, Artificial sequence
  SiRNA target sequence
tgaccatcatcagtaataaacacatta

SEQ ID NO: 146077 - DNA, 27 bp, Artificial sequence
  SiRNA target sequence
gaccatcatcagtaataaacacattac

SEQ ID NO: 146078 - DNA, 27 bp, Artificial sequence
  SiRNA target sequence
accatcatcagtaataaacacattacc

SEQ ID NO: 146079 - DNA, 27 bp, Artificial sequence
  SiRNA target sequence
ccatcatcagtaataaacacattacct

SEQ ID NO: 146080 - DNA, 27 bp, Artificial sequence
  SiRNA target sequence
catcatcagtaataaacacattacctt

SEQ ID NO: 146081 - DNA, 27 bp, Artificial sequence
  SiRNA target sequence
atcatcagtaataaacacattaccttt

SEQ ID NO: 146082 - DNA, 27 bp, Artificial sequence
  SiRNA target sequence
tcatcagtaataaacacattacctttc

SEQ ID NO: 146083 - DNA, 27 bp, Artificial sequence
  SiRNA target sequence
catcagtaataaacacattacctttct

SEQ ID NO: 146084 - DNA, 27 bp, Artificial sequence
  SiRNA target sequence
atcagtaataaacacattacctttctt

SEQ ID NO: 146085 - DNA, 27 bp, Artificial sequence
  SiRNA target sequence
tcagtaataaacacattacctttcttt

SEQ ID NO: 146086 - DNA, 27 bp, Artificial sequence
  SiRNA target sequence
cagtaataaacacattacctttctttt

SEQ ID NO: 146087 - DNA, 27 bp, Artificial sequence
  SiRNA target sequence
agtaataaacacattacctttcttttc

SEQ ID NO: 146088 - DNA, 27 bp, Artificial sequence
  SiRNA target sequence
gtaataaacacattacctttcttttct

SEQ ID NO: 146089 - DNA, 27 bp, Artificial sequence
  SiRNA target sequence
taataaacacattacctttcttttcta

SEQ ID NO: 146090 - DNA, 27 bp, Artificial sequence
  SiRNA target sequence
aataaacacattacctttcttttctac

SEQ ID NO: 146091 - DNA, 27 bp, Artificial sequence
  SiRNA target sequence
ataaacacattacctttcttttctacc

SEQ ID NO: 146092 - DNA, 27 bp, Artificial sequence
  SiRNA target sequence
taaacacattacctttcttttctacca

SEQ ID NO: 146093 - DNA, 27 bp, Artificial sequence
  SiRNA target sequence
aaacacattacctttcttttctaccac

SEQ ID NO: 146094 - DNA, 27 bp, Artificial sequence
  SiRNA target sequence
aacacattacctttcttttctaccaca

SEQ ID NO: 146095 - DNA, 27 bp, Artificial sequence
  SiRNA target sequence
acacattacctttcttttctaccacac

SEQ ID NO: 146096 - DNA, 27 bp, Artificial sequence
  SiRNA target sequence
cacattacctttcttttctaccacaca

SEQ ID NO: 146097 - DNA, 27 bp, Artificial sequence
  SiRNA target sequence
acattacctttcttttctaccacacat

SEQ ID NO: 146098 - DNA, 27 bp, Artificial sequence
  SiRNA target sequence
cattacctttcttttctaccacacatt

SEQ ID NO: 146099 - DNA, 27 bp, Artificial sequence
  SiRNA target sequence
attacctttcttttctaccacacattt

SEQ ID NO: 146100 - DNA, 27 bp, Artificial sequence
  SiRNA target sequence
ttacctttcttttctaccacacatttt

SEQ ID NO: 146101 - DNA, 27 bp, Artificial sequence
  SiRNA target sequence
tacctttcttttctaccacacattttt

SEQ ID NO: 146102 - DNA, 27 bp, Artificial sequence
  SiRNA target sequence
acctttcttttctaccacacatttttg

SEQ ID NO: 146103 - DNA, 27 bp, Artificial sequence
  SiRNA target sequence
cctttcttttctaccacacatttttga

SEQ ID NO: 146104 - DNA, 27 bp, Artificial sequence
  SiRNA target sequence
ctttcttttctaccacacatttttgat

SEQ ID NO: 146105 - DNA, 27 bp, Artificial sequence
  SiRNA target sequence
tttcttttctaccacacatttttgata

SEQ ID NO: 146106 - DNA, 27 bp, Artificial sequence
  SiRNA target sequence
ttcttttctaccacacatttttgatat

SEQ ID NO: 146107 - DNA, 27 bp, Artificial sequence
  SiRNA target sequence
tcttttctaccacacatttttgatata

SEQ ID NO: 146108 - DNA, 27 bp, Artificial sequence
  SiRNA target sequence
cttttctaccacacatttttgatatat

SEQ ID NO: 146109 - DNA, 27 bp, Artificial sequence
  SiRNA target sequence
ttttctaccacacatttttgatatatt

SEQ ID NO: 146110 - DNA, 27 bp, Artificial sequence
  SiRNA target sequence
tttctaccacacatttttgatatattt

SEQ ID NO: 146111 - DNA, 27 bp, Artificial sequence
  SiRNA target sequence
ttctaccacacatttttgatatatttc

SEQ ID NO: 146112 - DNA, 27 bp, Artificial sequence
  SiRNA target sequence
tctaccacacatttttgatatatttca

SEQ ID NO: 146113 - DNA, 27 bp, Artificial sequence
  SiRNA target sequence
ctaccacacatttttgatatatttcat

SEQ ID NO: 146114 - DNA, 27 bp, Artificial sequence
  SiRNA target sequence
taccacacatttttgatatatttcatt

SEQ ID NO: 146115 - DNA, 27 bp, Artificial sequence
  SiRNA target sequence
accacacatttttgatatatttcatta

SEQ ID NO: 146116 - DNA, 27 bp, Artificial sequence
  SiRNA target sequence
ccacacatttttgatatatttcattaa

SEQ ID NO: 146117 - DNA, 27 bp, Artificial sequence
  SiRNA target sequence
cacacatttttgatatatttcattaac

SEQ ID NO: 146118 - DNA, 27 bp, Artificial sequence
  SiRNA target sequence
acacatttttgatatatttcattaact

SEQ ID NO: 146119 - DNA, 27 bp, Artificial sequence
  SiRNA target sequence
cacatttttgatatatttcattaacta

SEQ ID NO: 146120 - DNA, 27 bp, Artificial sequence
  SiRNA target sequence
acatttttgatatatttcattaactac

SEQ ID NO: 146121 - DNA, 27 bp, Artificial sequence
  SiRNA target sequence
catttttgatatatttcattaactaca

SEQ ID NO: 146122 - DNA, 27 bp, Artificial sequence
  SiRNA target sequence
atttttgatatatttcattaactacat

SEQ ID NO: 146123 - DNA, 27 bp, Artificial sequence
  SiRNA target sequence
tttttgatatatttcattaactacatc

SEQ ID NO: 146124 - DNA, 27 bp, Artificial sequence
  SiRNA target sequence
ttttgatatatttcattaactacatcc

SEQ ID NO: 146125 - DNA, 27 bp, Artificial sequence
  SiRNA target sequence
tttgatatatttcattaactacatccc

SEQ ID NO: 146126 - DNA, 27 bp, Artificial sequence
  SiRNA target sequence
ttgatatatttcattaactacatccca

SEQ ID NO: 146127 - DNA, 27 bp, Artificial sequence
  SiRNA target sequence
tgatatatttcattaactacatcccaa

SEQ ID NO: 146128 - DNA, 27 bp, Artificial sequence
  SiRNA target sequence
gatatatttcattaactacatcccaat

SEQ ID NO: 146129 - DNA, 27 bp, Artificial sequence
  SiRNA target sequence
atatatttcattaactacatcccaatc

SEQ ID NO: 146130 - DNA, 27 bp, Artificial sequence
  SiRNA target sequence
tatatttcattaactacatcccaatca

SEQ ID NO: 146131 - DNA, 27 bp, Artificial sequence
  SiRNA target sequence
atatttcattaactacatcccaatcaa

SEQ ID NO: 146132 - DNA, 27 bp, Artificial sequence
  SiRNA target sequence
tatttcattaactacatcccaatcaat

SEQ ID NO: 146133 - DNA, 27 bp, Artificial sequence
  SiRNA target sequence
atttcattaactacatcccaatcaatt

SEQ ID NO: 146134 - DNA, 27 bp, Artificial sequence
  SiRNA target sequence
tttcattaactacatcccaatcaatta

SEQ ID NO: 146135 - DNA, 27 bp, Artificial sequence
  SiRNA target sequence
ttcattaactacatcccaatcaattac

SEQ ID NO: 146136 - DNA, 27 bp, Artificial sequence
  SiRNA target sequence
tcattaactacatcccaatcaattaca

SEQ ID NO: 146137 - DNA, 27 bp, Artificial sequence
  SiRNA target sequence
cattaactacatcccaatcaattacat

SEQ ID NO: 146138 - DNA, 27 bp, Artificial sequence
  SiRNA target sequence
attaactacatcccaatcaattacatt

SEQ ID NO: 146139 - DNA, 27 bp, Artificial sequence
  SiRNA target sequence
ttaactacatcccaatcaattacattc

SEQ ID NO: 146140 - DNA, 27 bp, Artificial sequence
  SiRNA target sequence
taactacatcccaatcaattacattcc

SEQ ID NO: 146141 - DNA, 27 bp, Artificial sequence
  SiRNA target sequence
aactacatcccaatcaattacattcca

SEQ ID NO: 146142 - DNA, 27 bp, Artificial sequence
  SiRNA target sequence
actacatcccaatcaattacattccac

SEQ ID NO: 146143 - DNA, 27 bp, Artificial sequence
  SiRNA target sequence
ctacatcccaatcaattacattccacc

SEQ ID NO: 146144 - DNA, 27 bp, Artificial sequence
  SiRNA target sequence
tacatcccaatcaattacattccacca

SEQ ID NO: 146145 - DNA, 27 bp, Artificial sequence
  SiRNA target sequence
acatcccaatcaattacattccaccat

SEQ ID NO: 146146 - DNA, 27 bp, Artificial sequence
  SiRNA target sequence
catcccaatcaattacattccaccatt

SEQ ID NO: 146147 - DNA, 27 bp, Artificial sequence
  SiRNA target sequence
atcccaatcaattacattccaccattc

SEQ ID NO: 146148 - DNA, 27 bp, Artificial sequence
  SiRNA target sequence
tcccaatcaattacattccaccattca

SEQ ID NO: 146149 - DNA, 27 bp, Artificial sequence
  SiRNA target sequence
cccaatcaattacattccaccattcat

SEQ ID NO: 146150 - DNA, 27 bp, Artificial sequence
  SiRNA target sequence
ccaatcaattacattccaccattcatt

SEQ ID NO: 146151 - DNA, 27 bp, Artificial sequence
  SiRNA target sequence
caatcaattacattccaccattcatta

SEQ ID NO: 146152 - DNA, 27 bp, Artificial sequence
  SiRNA target sequence
aatcaattacattccaccattcattaa

SEQ ID NO: 146153 - DNA, 27 bp, Artificial sequence
  SiRNA target sequence
atcaattacattccaccattcattaat

SEQ ID NO: 146154 - DNA, 27 bp, Artificial sequence
  SiRNA target sequence
tcaattacattccaccattcattaatg

SEQ ID NO: 146155 - DNA, 27 bp, Artificial sequence
  SiRNA target sequence
caattacattccaccattcattaatgt

SEQ ID NO: 146156 - DNA, 27 bp, Artificial sequence
  SiRNA target sequence
aattacattccaccattcattaatgta

SEQ ID NO: 146157 - DNA, 27 bp, Artificial sequence
  SiRNA target sequence
attacattccaccattcattaatgtat

SEQ ID NO: 146158 - DNA, 27 bp, Artificial sequence
  SiRNA target sequence
ttacattccaccattcattaatgtatt

SEQ ID NO: 146159 - DNA, 27 bp, Artificial sequence
  SiRNA target sequence
tacattccaccattcattaatgtattc

SEQ ID NO: 146160 - DNA, 27 bp, Artificial sequence
  SiRNA target sequence
acattccaccattcattaatgtattct

SEQ ID NO: 146161 - DNA, 27 bp, Artificial sequence
  SiRNA target sequence
cattccaccattcattaatgtattctt

SEQ ID NO: 146162 - DNA, 27 bp, Artificial sequence
  SiRNA target sequence
attccaccattcattaatgtattcttt

SEQ ID NO: 146163 - DNA, 27 bp, Artificial sequence
  SiRNA target sequence
ttccaccattcattaatgtattctttt

SEQ ID NO: 146164 - DNA, 27 bp, Artificial sequence
  SiRNA target sequence
tccaccattcattaatgtattcttttc

SEQ ID NO: 146165 - DNA, 27 bp, Artificial sequence
  SiRNA target sequence
ccaccattcattaatgtattcttttct

SEQ ID NO: 146166 - DNA, 27 bp, Artificial sequence
  SiRNA target sequence
caccattcattaatgtattcttttctc

SEQ ID NO: 146167 - DNA, 27 bp, Artificial sequence
  SiRNA target sequence
accattcattaatgtattcttttctcc

SEQ ID NO: 146168 - DNA, 27 bp, Artificial sequence
  SiRNA target sequence
ccattcattaatgtattcttttctcct

SEQ ID NO: 146169 - DNA, 27 bp, Artificial sequence
  SiRNA target sequence
cattcattaatgtattcttttctccta

SEQ ID NO: 146170 - DNA, 27 bp, Artificial sequence
  SiRNA target sequence
attcattaatgtattcttttctcctat

SEQ ID NO: 146171 - DNA, 27 bp, Artificial sequence
  SiRNA target sequence
ttcattaatgtattcttttctcctatt

SEQ ID NO: 146172 - DNA, 27 bp, Artificial sequence
  SiRNA target sequence
tcattaatgtattcttttctcctattt

SEQ ID NO: 146173 - DNA, 27 bp, Artificial sequence
  SiRNA target sequence
cattaatgtattcttttctcctatttt

SEQ ID NO: 146174 - DNA, 27 bp, Artificial sequence
  SiRNA target sequence
attaatgtattcttttctcctattttt

SEQ ID NO: 146175 - DNA, 27 bp, Artificial sequence
  SiRNA target sequence
ttaatgtattcttttctcctattttta

SEQ ID NO: 146176 - DNA, 27 bp, Artificial sequence
  SiRNA target sequence
taatgtattcttttctcctatttttat

SEQ ID NO: 146177 - DNA, 27 bp, Artificial sequence
  SiRNA target sequence
aatgtattcttttctcctatttttata

SEQ ID NO: 146178 - DNA, 27 bp, Artificial sequence
  SiRNA target sequence
atgtattcttttctcctatttttatac

SEQ ID NO: 146179 - DNA, 27 bp, Artificial sequence
  SiRNA target sequence
tgtattcttttctcctatttttatact

SEQ ID NO: 146180 - DNA, 27 bp, Artificial sequence
  SiRNA target sequence
gtattcttttctcctatttttatactg

SEQ ID NO: 146181 - DNA, 27 bp, Artificial sequence
  SiRNA target sequence
tattcttttctcctatttttatactgt

SEQ ID NO: 146182 - DNA, 27 bp, Artificial sequence
  SiRNA target sequence
attcttttctcctatttttatactgta

SEQ ID NO: 146183 - DNA, 27 bp, Artificial sequence
  SiRNA target sequence
ttcttttctcctatttttatactgtaa

SEQ ID NO: 146184 - DNA, 27 bp, Artificial sequence
  SiRNA target sequence
tcttttctcctatttttatactgtaaa

SEQ ID NO: 146185 - DNA, 27 bp, Artificial sequence
  SiRNA target sequence
cttttctcctatttttatactgtaaat

SEQ ID NO: 146186 - DNA, 27 bp, Artificial sequence
  SiRNA target sequence
ttttctcctatttttatactgtaaata

SEQ ID NO: 146187 - DNA, 27 bp, Artificial sequence
  SiRNA target sequence
tttctcctatttttatactgtaaataa

SEQ ID NO: 146188 - DNA, 27 bp, Artificial sequence
  SiRNA target sequence
ttctcctatttttatactgtaaataat

SEQ ID NO: 146189 - DNA, 27 bp, Artificial sequence
  SiRNA target sequence
tctcctatttttatactgtaaataata

SEQ ID NO: 146190 - DNA, 27 bp, Artificial sequence
  SiRNA target sequence
ctcctatttttatactgtaaataatac

SEQ ID NO: 146191 - DNA, 27 bp, Artificial sequence
  SiRNA target sequence
tcctatttttatactgtaaataatacg

SEQ ID NO: 146192 - DNA, 27 bp, Artificial sequence
  SiRNA target sequence
cctatttttatactgtaaataatacgc

SEQ ID NO: 146193 - DNA, 27 bp, Artificial sequence
  SiRNA target sequence
ctatttttatactgtaaataatacgca

SEQ ID NO: 146194 - DNA, 27 bp, Artificial sequence
  SiRNA target sequence
tatttttatactgtaaataatacgcat

SEQ ID NO: 146195 - DNA, 27 bp, Artificial sequence
  SiRNA target sequence
atttttatactgtaaataatacgcatg

SEQ ID NO: 146196 - DNA, 27 bp, Artificial sequence
  SiRNA target sequence
tttttatactgtaaataatacgcatgt

SEQ ID NO: 146197 - DNA, 27 bp, Artificial sequence
  SiRNA target sequence
ttttatactgtaaataatacgcatgtt

SEQ ID NO: 146198 - DNA, 27 bp, Artificial sequence
  SiRNA target sequence
tttatactgtaaataatacgcatgttc

SEQ ID NO: 146199 - DNA, 27 bp, Artificial sequence
  SiRNA target sequence
ttatactgtaaataatacgcatgttcc

SEQ ID NO: 146200 - DNA, 27 bp, Artificial sequence
  SiRNA target sequence
tatactgtaaataatacgcatgttccc

SEQ ID NO: 146201 - DNA, 27 bp, Artificial sequence
  SiRNA target sequence
atactgtaaataatacgcatgttccca

SEQ ID NO: 146202 - DNA, 27 bp, Artificial sequence
  SiRNA target sequence
tactgtaaataatacgcatgttcccat

SEQ ID NO: 146203 - DNA, 27 bp, Artificial sequence
  SiRNA target sequence
actgtaaataatacgcatgttcccata

SEQ ID NO: 146204 - DNA, 27 bp, Artificial sequence
  SiRNA target sequence
ctgtaaataatacgcatgttcccatac

SEQ ID NO: 146205 - DNA, 27 bp, Artificial sequence
  SiRNA target sequence
tgtaaataatacgcatgttcccataca

SEQ ID NO: 146206 - DNA, 27 bp, Artificial sequence
  SiRNA target sequence
gtaaataatacgcatgttcccatacat

SEQ ID NO: 146207 - DNA, 27 bp, Artificial sequence
  SiRNA target sequence
taaataatacgcatgttcccatacatc

SEQ ID NO: 146208 - DNA, 27 bp, Artificial sequence
  SiRNA target sequence
aaataatacgcatgttcccatacatca

SEQ ID NO: 146209 - DNA, 27 bp, Artificial sequence
  SiRNA target sequence
aataatacgcatgttcccatacatcaa

SEQ ID NO: 146210 - DNA, 27 bp, Artificial sequence
  SiRNA target sequence
ataatacgcatgttcccatacatcaag

SEQ ID NO: 146211 - DNA, 27 bp, Artificial sequence
  SiRNA target sequence
taatacgcatgttcccatacatcaaga

SEQ ID NO: 146212 - DNA, 27 bp, Artificial sequence
  SiRNA target sequence
aatacgcatgttcccatacatcaagac

SEQ ID NO: 146213 - DNA, 27 bp, Artificial sequence
  SiRNA target sequence
atacgcatgttcccatacatcaagaca

SEQ ID NO: 146214 - DNA, 27 bp, Artificial sequence
  SiRNA target sequence
tacgcatgttcccatacatcaagacat

SEQ ID NO: 146215 - DNA, 27 bp, Artificial sequence
  SiRNA target sequence
acgcatgttcccatacatcaagacata

SEQ ID NO: 146216 - DNA, 27 bp, Artificial sequence
  SiRNA target sequence
cgcatgttcccatacatcaagacatag

SEQ ID NO: 146217 - DNA, 27 bp, Artificial sequence
  SiRNA target sequence
gcatgttcccatacatcaagacatagt

SEQ ID NO: 146218 - DNA, 27 bp, Artificial sequence
  SiRNA target sequence
catgttcccatacatcaagacatagta

SEQ ID NO: 146219 - DNA, 27 bp, Artificial sequence
  SiRNA target sequence
atgttcccatacatcaagacatagtaa

SEQ ID NO: 146220 - DNA, 27 bp, Artificial sequence
  SiRNA target sequence
tgttcccatacatcaagacatagtaaa

SEQ ID NO: 146221 - DNA, 27 bp, Artificial sequence
  SiRNA target sequence
gttcccatacatcaagacatagtaaag

SEQ ID NO: 146222 - DNA, 27 bp, Artificial sequence
  SiRNA target sequence
ttcccatacatcaagacatagtaaagg

SEQ ID NO: 146223 - DNA, 27 bp, Artificial sequence
  SiRNA target sequence
tcccatacatcaagacatagtaaagga

SEQ ID NO: 146224 - DNA, 27 bp, Artificial sequence
  SiRNA target sequence
cccatacatcaagacatagtaaaggaa

SEQ ID NO: 146225 - DNA, 27 bp, Artificial sequence
  SiRNA target sequence
ccatacatcaagacatagtaaaggaat

SEQ ID NO: 146226 - DNA, 27 bp, Artificial sequence
  SiRNA target sequence
catacatcaagacatagtaaaggaata

SEQ ID NO: 146227 - DNA, 27 bp, Artificial sequence
  SiRNA target sequence
atacatcaagacatagtaaaggaatac

SEQ ID NO: 146228 - DNA, 27 bp, Artificial sequence
  SiRNA target sequence
tacatcaagacatagtaaaggaataca

SEQ ID NO: 146229 - DNA, 27 bp, Artificial sequence
  SiRNA target sequence
acatcaagacatagtaaaggaatacat

SEQ ID NO: 146230 - DNA, 27 bp, Artificial sequence
  SiRNA target sequence
catcaagacatagtaaaggaatacatt

SEQ ID NO: 146231 - DNA, 27 bp, Artificial sequence
  SiRNA target sequence
atcaagacatagtaaaggaatacattc

SEQ ID NO: 146232 - DNA, 27 bp, Artificial sequence
  SiRNA target sequence
tcaagacatagtaaaggaatacattca

SEQ ID NO: 146233 - DNA, 27 bp, Artificial sequence
  SiRNA target sequence
caagacatagtaaaggaatacattcac

SEQ ID NO: 146234 - DNA, 27 bp, Artificial sequence
  SiRNA target sequence
aagacatagtaaaggaatacattcacc

SEQ ID NO: 146235 - DNA, 27 bp, Artificial sequence
  SiRNA target sequence
agacatagtaaaggaatacattcacca

SEQ ID NO: 146236 - DNA, 27 bp, Artificial sequence
  SiRNA target sequence
gacatagtaaaggaatacattcaccat

SEQ ID NO: 146237 - DNA, 27 bp, Artificial sequence
  SiRNA target sequence
acatagtaaaggaatacattcaccatc

SEQ ID NO: 146238 - DNA, 27 bp, Artificial sequence
  SiRNA target sequence
catagtaaaggaatacattcaccatcc

SEQ ID NO: 146239 - DNA, 27 bp, Artificial sequence
  SiRNA target sequence
atagtaaaggaatacattcaccatcct

SEQ ID NO: 146240 - DNA, 27 bp, Artificial sequence
  SiRNA target sequence
tagtaaaggaatacattcaccatcctc

SEQ ID NO: 146241 - DNA, 27 bp, Artificial sequence
  SiRNA target sequence
agtaaaggaatacattcaccatcctcc

SEQ ID NO: 146242 - DNA, 27 bp, Artificial sequence
  SiRNA target sequence
gtaaaggaatacattcaccatcctcca

SEQ ID NO: 146243 - DNA, 27 bp, Artificial sequence
  SiRNA target sequence
taaaggaatacattcaccatcctccat

SEQ ID NO: 146244 - DNA, 27 bp, Artificial sequence
  SiRNA target sequence
aaaggaatacattcaccatcctccatc

SEQ ID NO: 146245 - DNA, 27 bp, Artificial sequence
  SiRNA target sequence
aaggaatacattcaccatcctccatca

SEQ ID NO: 146246 - DNA, 27 bp, Artificial sequence
  SiRNA target sequence
aggaatacattcaccatcctccatcat

SEQ ID NO: 146247 - DNA, 27 bp, Artificial sequence
  SiRNA target sequence
ggaatacattcaccatcctccatcata

SEQ ID NO: 146248 - DNA, 27 bp, Artificial sequence
  SiRNA target sequence
gaatacattcaccatcctccatcatag

SEQ ID NO: 146249 - DNA, 27 bp, Artificial sequence
  SiRNA target sequence
aatacattcaccatcctccatcatagg

SEQ ID NO: 146250 - DNA, 27 bp, Artificial sequence
  SiRNA target sequence
atacattcaccatcctccatcatagga

SEQ ID NO: 146251 - DNA, 27 bp, Artificial sequence
  SiRNA target sequence
tacattcaccatcctccatcataggat

SEQ ID NO: 146252 - DNA, 27 bp, Artificial sequence
  SiRNA target sequence
acattcaccatcctccatcataggatt

SEQ ID NO: 146253 - DNA, 27 bp, Artificial sequence
  SiRNA target sequence
cattcaccatcctccatcataggattg

SEQ ID NO: 146254 - DNA, 27 bp, Artificial sequence
  SiRNA target sequence
attcaccatcctccatcataggattgt

SEQ ID NO: 146255 - DNA, 27 bp, Artificial sequence
  SiRNA target sequence
ttcaccatcctccatcataggattgtc

SEQ ID NO: 146256 - DNA, 27 bp, Artificial sequence
  SiRNA target sequence
tcaccatcctccatcataggattgtct

SEQ ID NO: 146257 - DNA, 27 bp, Artificial sequence
  SiRNA target sequence
caccatcctccatcataggattgtctt

SEQ ID NO: 146258 - DNA, 27 bp, Artificial sequence
  SiRNA target sequence
accatcctccatcataggattgtcttg

SEQ ID NO: 146259 - DNA, 27 bp, Artificial sequence
  SiRNA target sequence
ccatcctccatcataggattgtcttga

SEQ ID NO: 146260 - DNA, 27 bp, Artificial sequence
  SiRNA target sequence
catcctccatcataggattgtcttgat

SEQ ID NO: 146261 - DNA, 27 bp, Artificial sequence
  SiRNA target sequence
atcctccatcataggattgtcttgatt

SEQ ID NO: 146262 - DNA, 27 bp, Artificial sequence
  SiRNA target sequence
tcctccatcataggattgtcttgatta

SEQ ID NO: 146263 - DNA, 27 bp, Artificial sequence
  SiRNA target sequence
cctccatcataggattgtcttgattaa

SEQ ID NO: 146264 - DNA, 27 bp, Artificial sequence
  SiRNA target sequence
ctccatcataggattgtcttgattaac

SEQ ID NO: 146265 - DNA, 27 bp, Artificial sequence
  SiRNA target sequence
tccatcataggattgtcttgattaaca

SEQ ID NO: 146266 - DNA, 27 bp, Artificial sequence
  SiRNA target sequence
ccatcataggattgtcttgattaacac

SEQ ID NO: 146267 - DNA, 27 bp, Artificial sequence
  SiRNA target sequence
catcataggattgtcttgattaacact

SEQ ID NO: 146268 - DNA, 27 bp, Artificial sequence
  SiRNA target sequence
atcataggattgtcttgattaacactg

SEQ ID NO: 146269 - DNA, 27 bp, Artificial sequence
  SiRNA target sequence
tcataggattgtcttgattaacactgg

SEQ ID NO: 146270 - DNA, 27 bp, Artificial sequence
  SiRNA target sequence
cataggattgtcttgattaacactggt

SEQ ID NO: 146271 - DNA, 27 bp, Artificial sequence
  SiRNA target sequence
ataggattgtcttgattaacactggtc

SEQ ID NO: 146272 - DNA, 27 bp, Artificial sequence
  SiRNA target sequence
taggattgtcttgattaacactggtct

SEQ ID NO: 146273 - DNA, 27 bp, Artificial sequence
  SiRNA target sequence
aggattgtcttgattaacactggtctt

SEQ ID NO: 146274 - DNA, 27 bp, Artificial sequence
  SiRNA target sequence
ggattgtcttgattaacactggtctta

SEQ ID NO: 146275 - DNA, 27 bp, Artificial sequence
  SiRNA target sequence
gattgtcttgattaacactggtcttaa

SEQ ID NO: 146276 - DNA, 27 bp, Artificial sequence
  SiRNA target sequence
attgtcttgattaacactggtcttaat

SEQ ID NO: 146277 - DNA, 27 bp, Artificial sequence
  SiRNA target sequence
ttgtcttgattaacactggtcttaata

SEQ ID NO: 146278 - DNA, 27 bp, Artificial sequence
  SiRNA target sequence
tgtcttgattaacactggtcttaatac

SEQ ID NO: 146279 - DNA, 27 bp, Artificial sequence
  SiRNA target sequence
gtcttgattaacactggtcttaataca

SEQ ID NO: 146280 - DNA, 27 bp, Artificial sequence
  SiRNA target sequence
tcttgattaacactggtcttaatacac

SEQ ID NO: 146281 - DNA, 27 bp, Artificial sequence
  SiRNA target sequence
cttgattaacactggtcttaatacaca

SEQ ID NO: 146282 - DNA, 27 bp, Artificial sequence
  SiRNA target sequence
ttgattaacactggtcttaatacacaa

SEQ ID NO: 146283 - DNA, 27 bp, Artificial sequence
  SiRNA target sequence
tgattaacactggtcttaatacacaat

SEQ ID NO: 146284 - DNA, 27 bp, Artificial sequence
  SiRNA target sequence
gattaacactggtcttaatacacaatt

SEQ ID NO: 146285 - DNA, 27 bp, Artificial sequence
  SiRNA target sequence
attaacactggtcttaatacacaattt

SEQ ID NO: 146286 - DNA, 27 bp, Artificial sequence
  SiRNA target sequence
ttaacactggtcttaatacacaattta

SEQ ID NO: 146287 - DNA, 27 bp, Artificial sequence
  SiRNA target sequence
taacactggtcttaatacacaatttat

SEQ ID NO: 146288 - DNA, 27 bp, Artificial sequence
  SiRNA target sequence
aacactggtcttaatacacaatttatc

SEQ ID NO: 146289 - DNA, 27 bp, Artificial sequence
  SiRNA target sequence
acactggtcttaatacacaatttatct

SEQ ID NO: 146290 - DNA, 27 bp, Artificial sequence
  SiRNA target sequence
cactggtcttaatacacaatttatctt

SEQ ID NO: 146291 - DNA, 27 bp, Artificial sequence
  SiRNA target sequence
actggtcttaatacacaatttatcttt

SEQ ID NO: 146292 - DNA, 27 bp, Artificial sequence
  SiRNA target sequence
ctggtcttaatacacaatttatcttta

SEQ ID NO: 146293 - DNA, 27 bp, Artificial sequence
  SiRNA target sequence
tggtcttaatacacaatttatctttat

SEQ ID NO: 146294 - DNA, 27 bp, Artificial sequence
  SiRNA target sequence
ggtcttaatacacaatttatctttata

SEQ ID NO: 146295 - DNA, 27 bp, Artificial sequence
  SiRNA target sequence
gtcttaatacacaatttatctttatat

SEQ ID NO: 146296 - DNA, 27 bp, Artificial sequence
  SiRNA target sequence
tcttaatacacaatttatctttatata

SEQ ID NO: 146297 - DNA, 27 bp, Artificial sequence
  SiRNA target sequence
cttaatacacaatttatctttatatat

SEQ ID NO: 146298 - DNA, 27 bp, Artificial sequence
  SiRNA target sequence
ttaatacacaatttatctttatatatc

SEQ ID NO: 146299 - DNA, 27 bp, Artificial sequence
  SiRNA target sequence
taatacacaatttatctttatatatca

SEQ ID NO: 146300 - DNA, 27 bp, Artificial sequence
  SiRNA target sequence
aatacacaatttatctttatatatcaa

SEQ ID NO: 146301 - DNA, 27 bp, Artificial sequence
  SiRNA target sequence
atacacaatttatctttatatatcaac

SEQ ID NO: 146302 - DNA, 27 bp, Artificial sequence
  SiRNA target sequence
tacacaatttatctttatatatcaacc

SEQ ID NO: 146303 - DNA, 27 bp, Artificial sequence
  SiRNA target sequence
acacaatttatctttatatatcaacca

SEQ ID NO: 146304 - DNA, 27 bp, Artificial sequence
  SiRNA target sequence
cacaatttatctttatatatcaaccac

SEQ ID NO: 146305 - DNA, 27 bp, Artificial sequence
  SiRNA target sequence
acaatttatctttatatatcaaccaca

SEQ ID NO: 146306 - DNA, 27 bp, Artificial sequence
  SiRNA target sequence
caatttatctttatatatcaaccacac

SEQ ID NO: 146307 - DNA, 27 bp, Artificial sequence
  SiRNA target sequence
aatttatctttatatatcaaccacacc

SEQ ID NO: 146308 - DNA, 27 bp, Artificial sequence
  SiRNA target sequence
atttatctttatatatcaaccacaccc

SEQ ID NO: 146309 - DNA, 27 bp, Artificial sequence
  SiRNA target sequence
tttatctttatatatcaaccacaccca

SEQ ID NO: 146310 - DNA, 27 bp, Artificial sequence
  SiRNA target sequence
ttatctttatatatcaaccacacccat

SEQ ID NO: 146311 - DNA, 27 bp, Artificial sequence
  SiRNA target sequence
tatctttatatatcaaccacacccatc

SEQ ID NO: 146312 - DNA, 27 bp, Artificial sequence
  SiRNA target sequence
atctttatatatcaaccacacccatcc

SEQ ID NO: 146313 - DNA, 27 bp, Artificial sequence
  SiRNA target sequence
tctttatatatcaaccacacccatcct

SEQ ID NO: 146314 - DNA, 27 bp, Artificial sequence
  SiRNA target sequence
ctttatatatcaaccacacccatcctg

SEQ ID NO: 146315 - DNA, 27 bp, Artificial sequence
  SiRNA target sequence
tttatatatcaaccacacccatcctga

SEQ ID NO: 146316 - DNA, 27 bp, Artificial sequence
  SiRNA target sequence
ttatatatcaaccacacccatcctgat

SEQ ID NO: 146317 - DNA, 27 bp, Artificial sequence
  SiRNA target sequence
tatatatcaaccacacccatcctgatc

SEQ ID NO: 146318 - DNA, 27 bp, Artificial sequence
  SiRNA target sequence
atatatcaaccacacccatcctgatcc

SEQ ID NO: 146319 - DNA, 27 bp, Artificial sequence
  SiRNA target sequence
tatatcaaccacacccatcctgatcca

SEQ ID NO: 146320 - DNA, 27 bp, Artificial sequence
  SiRNA target sequence
atatcaaccacacccatcctgatccaa

SEQ ID NO: 146321 - DNA, 27 bp, Artificial sequence
  SiRNA target sequence
tatcaaccacacccatcctgatccaaa

SEQ ID NO: 146322 - DNA, 27 bp, Artificial sequence
  SiRNA target sequence
atcaaccacacccatcctgatccaaat

SEQ ID NO: 146323 - DNA, 27 bp, Artificial sequence
  SiRNA target sequence
tcaaccacacccatcctgatccaaata

SEQ ID NO: 146324 - DNA, 27 bp, Artificial sequence
  SiRNA target sequence
caaccacacccatcctgatccaaataa

SEQ ID NO: 146325 - DNA, 27 bp, Artificial sequence
  SiRNA target sequence
aaccacacccatcctgatccaaataat

SEQ ID NO: 146326 - DNA, 27 bp, Artificial sequence
  SiRNA target sequence
accacacccatcctgatccaaataatt

SEQ ID NO: 146327 - DNA, 27 bp, Artificial sequence
  SiRNA target sequence
ccacacccatcctgatccaaataattt

SEQ ID NO: 146328 - DNA, 27 bp, Artificial sequence
  SiRNA target sequence
cacacccatcctgatccaaataatttt

SEQ ID NO: 146329 - DNA, 27 bp, Artificial sequence
  SiRNA target sequence
acacccatcctgatccaaataatttta

SEQ ID NO: 146330 - DNA, 27 bp, Artificial sequence
  SiRNA target sequence
cacccatcctgatccaaataattttac

SEQ ID NO: 146331 - DNA, 27 bp, Artificial sequence
  SiRNA target sequence
acccatcctgatccaaataattttaca

SEQ ID NO: 146332 - DNA, 27 bp, Artificial sequence
  SiRNA target sequence
cccatcctgatccaaataattttacag

SEQ ID NO: 146333 - DNA, 27 bp, Artificial sequence
  SiRNA target sequence
ccatcctgatccaaataattttacagc

SEQ ID NO: 146334 - DNA, 27 bp, Artificial sequence
  SiRNA target sequence
catcctgatccaaataattttacagct

SEQ ID NO: 146335 - DNA, 27 bp, Artificial sequence
  SiRNA target sequence
atcctgatccaaataattttacagctt

SEQ ID NO: 146336 - DNA, 27 bp, Artificial sequence
  SiRNA target sequence
tcctgatccaaataattttacagcttc

SEQ ID NO: 146337 - DNA, 27 bp, Artificial sequence
  SiRNA target sequence
cctgatccaaataattttacagcttca

SEQ ID NO: 146338 - DNA, 27 bp, Artificial sequence
  SiRNA target sequence
ctgatccaaataattttacagcttcag

SEQ ID NO: 146339 - DNA, 27 bp, Artificial sequence
  SiRNA target sequence
tgatccaaataattttacagcttcagt

SEQ ID NO: 146340 - DNA, 27 bp, Artificial sequence
  SiRNA target sequence
gatccaaataattttacagcttcagta

SEQ ID NO: 146341 - DNA, 27 bp, Artificial sequence
  SiRNA target sequence
atccaaataattttacagcttcagtat

SEQ ID NO: 146342 - DNA, 27 bp, Artificial sequence
  SiRNA target sequence
tccaaataattttacagcttcagtatt

SEQ ID NO: 146343 - DNA, 27 bp, Artificial sequence
  SiRNA target sequence
ccaaataattttacagcttcagtatta

SEQ ID NO: 146344 - DNA, 27 bp, Artificial sequence
  SiRNA target sequence
caaataattttacagcttcagtattaa

SEQ ID NO: 146345 - DNA, 27 bp, Artificial sequence
  SiRNA target sequence
aaataattttacagcttcagtattaaa

SEQ ID NO: 146346 - DNA, 27 bp, Artificial sequence
  SiRNA target sequence
aataattttacagcttcagtattaaaa

SEQ ID NO: 146347 - DNA, 27 bp, Artificial sequence
  SiRNA target sequence
ataattttacagcttcagtattaaaat

SEQ ID NO: 146348 - DNA, 27 bp, Artificial sequence
  SiRNA target sequence
taattttacagcttcagtattaaaatt

SEQ ID NO: 146349 - DNA, 27 bp, Artificial sequence
  SiRNA target sequence
aattttacagcttcagtattaaaattc

SEQ ID NO: 146350 - DNA, 27 bp, Artificial sequence
  SiRNA target sequence
attttacagcttcagtattaaaattct

SEQ ID NO: 146351 - DNA, 27 bp, Artificial sequence
  SiRNA target sequence
ttttacagcttcagtattaaaattctc

SEQ ID NO: 146352 - DNA, 27 bp, Artificial sequence
  SiRNA target sequence
tttacagcttcagtattaaaattctcc

SEQ ID NO: 146353 - DNA, 27 bp, Artificial sequence
  SiRNA target sequence
ttacagcttcagtattaaaattctcct

SEQ ID NO: 146354 - DNA, 27 bp, Artificial sequence
  SiRNA target sequence
tacagcttcagtattaaaattctcctt

SEQ ID NO: 146355 - DNA, 27 bp, Artificial sequence
  SiRNA target sequence
acagcttcagtattaaaattctcctta

SEQ ID NO: 146356 - DNA, 27 bp, Artificial sequence
  SiRNA target sequence
cagcttcagtattaaaattctccttaa

SEQ ID NO: 146357 - DNA, 27 bp, Artificial sequence
  SiRNA target sequence
agcttcagtattaaaattctccttaaa

SEQ ID NO: 146358 - DNA, 27 bp, Artificial sequence
  SiRNA target sequence
gcttcagtattaaaattctccttaaat

SEQ ID NO: 146359 - DNA, 27 bp, Artificial sequence
  SiRNA target sequence
cttcagtattaaaattctccttaaatt

SEQ ID NO: 146360 - DNA, 27 bp, Artificial sequence
  SiRNA target sequence
ttcagtattaaaattctccttaaattt

SEQ ID NO: 146361 - DNA, 27 bp, Artificial sequence
  SiRNA target sequence
tcagtattaaaattctccttaaattta

SEQ ID NO: 146362 - DNA, 27 bp, Artificial sequence
  SiRNA target sequence
cagtattaaaattctccttaaatttat

SEQ ID NO: 146363 - DNA, 27 bp, Artificial sequence
  SiRNA target sequence
agtattaaaattctccttaaatttatt

SEQ ID NO: 146364 - DNA, 27 bp, Artificial sequence
  SiRNA target sequence
gtattaaaattctccttaaatttattt

SEQ ID NO: 146365 - DNA, 27 bp, Artificial sequence
  SiRNA target sequence
tattaaaattctccttaaatttattta

SEQ ID NO: 146366 - DNA, 27 bp, Artificial sequence
  SiRNA target sequence
attaaaattctccttaaatttatttat

SEQ ID NO: 146367 - DNA, 27 bp, Artificial sequence
  SiRNA target sequence
ttaaaattctccttaaatttatttatt

SEQ ID NO: 146368 - DNA, 27 bp, Artificial sequence
  SiRNA target sequence
taaaattctccttaaatttatttattg

SEQ ID NO: 146369 - DNA, 27 bp, Artificial sequence
  SiRNA target sequence
aaaattctccttaaatttatttattga

SEQ ID NO: 146370 - DNA, 27 bp, Artificial sequence
  SiRNA target sequence
aaattctccttaaatttatttattgat

SEQ ID NO: 146371 - DNA, 27 bp, Artificial sequence
  SiRNA target sequence
aattctccttaaatttatttattgatc

SEQ ID NO: 146372 - DNA, 27 bp, Artificial sequence
  SiRNA target sequence
attctccttaaatttatttattgatcc

SEQ ID NO: 146373 - DNA, 27 bp, Artificial sequence
  SiRNA target sequence
ttctccttaaatttatttattgatcca

SEQ ID NO: 146374 - DNA, 27 bp, Artificial sequence
  SiRNA target sequence
tctccttaaatttatttattgatccaa

SEQ ID NO: 146375 - DNA, 27 bp, Artificial sequence
  SiRNA target sequence
ctccttaaatttatttattgatccaaa

SEQ ID NO: 146376 - DNA, 27 bp, Artificial sequence
  SiRNA target sequence
tccttaaatttatttattgatccaaag

SEQ ID NO: 146377 - DNA, 27 bp, Artificial sequence
  SiRNA target sequence
ccttaaatttatttattgatccaaagt

SEQ ID NO: 146378 - DNA, 27 bp, Artificial sequence
  SiRNA target sequence
cttaaatttatttattgatccaaagtc

SEQ ID NO: 146379 - DNA, 27 bp, Artificial sequence
  SiRNA target sequence
ttaaatttatttattgatccaaagtct

SEQ ID NO: 146380 - DNA, 27 bp, Artificial sequence
  SiRNA target sequence
taaatttatttattgatccaaagtctt

SEQ ID NO: 146381 - DNA, 27 bp, Artificial sequence
  SiRNA target sequence
aaatttatttattgatccaaagtcttt

SEQ ID NO: 146382 - DNA, 27 bp, Artificial sequence
  SiRNA target sequence
aatttatttattgatccaaagtctttt

SEQ ID NO: 146383 - DNA, 27 bp, Artificial sequence
  SiRNA target sequence
atttatttattgatccaaagtctttta

SEQ ID NO: 146384 - DNA, 27 bp, Artificial sequence
  SiRNA target sequence
tttatttattgatccaaagtcttttat

SEQ ID NO: 146385 - DNA, 27 bp, Artificial sequence
  SiRNA target sequence
ttatttattgatccaaagtcttttatt

SEQ ID NO: 146386 - DNA, 27 bp, Artificial sequence
  SiRNA target sequence
tatttattgatccaaagtcttttatta

SEQ ID NO: 146387 - DNA, 27 bp, Artificial sequence
  SiRNA target sequence
atttattgatccaaagtcttttattat

SEQ ID NO: 146388 - DNA, 27 bp, Artificial sequence
  SiRNA target sequence
tttattgatccaaagtcttttattata

SEQ ID NO: 146389 - DNA, 27 bp, Artificial sequence
  SiRNA target sequence
ttattgatccaaagtcttttattatag

SEQ ID NO: 146390 - DNA, 27 bp, Artificial sequence
  SiRNA target sequence
tattgatccaaagtcttttattatagc

SEQ ID NO: 146391 - DNA, 27 bp, Artificial sequence
  SiRNA target sequence
attgatccaaagtcttttattatagca

SEQ ID NO: 146392 - DNA, 27 bp, Artificial sequence
  SiRNA target sequence
ttgatccaaagtcttttattatagcac

SEQ ID NO: 146393 - DNA, 27 bp, Artificial sequence
  SiRNA target sequence
tgatccaaagtcttttattatagcact

SEQ ID NO: 146394 - DNA, 27 bp, Artificial sequence
  SiRNA target sequence
gatccaaagtcttttattatagcactt

SEQ ID NO: 146395 - DNA, 27 bp, Artificial sequence
  SiRNA target sequence
atccaaagtcttttattatagcacttt

SEQ ID NO: 146396 - DNA, 27 bp, Artificial sequence
  SiRNA target sequence
tccaaagtcttttattatagcactttc

SEQ ID NO: 146397 - DNA, 27 bp, Artificial sequence
  SiRNA target sequence
ccaaagtcttttattatagcactttcc

SEQ ID NO: 146398 - DNA, 27 bp, Artificial sequence
  SiRNA target sequence
caaagtcttttattatagcactttcca

SEQ ID NO: 146399 - DNA, 27 bp, Artificial sequence
  SiRNA target sequence
aaagtcttttattatagcactttccaa

SEQ ID NO: 146400 - DNA, 27 bp, Artificial sequence
  SiRNA target sequence
aagtcttttattatagcactttccaac

SEQ ID NO: 146401 - DNA, 27 bp, Artificial sequence
  SiRNA target sequence
agtcttttattatagcactttccaact

SEQ ID NO: 146402 - DNA, 27 bp, Artificial sequence
  SiRNA target sequence
gtcttttattatagcactttccaactg

SEQ ID NO: 146403 - DNA, 27 bp, Artificial sequence
  SiRNA target sequence
tcttttattatagcactttccaactgg

SEQ ID NO: 146404 - DNA, 27 bp, Artificial sequence
  SiRNA target sequence
cttttattatagcactttccaactggg

SEQ ID NO: 146405 - DNA, 27 bp, Artificial sequence
  SiRNA target sequence
ttttattatagcactttccaactggga

SEQ ID NO: 146406 - DNA, 27 bp, Artificial sequence
  SiRNA target sequence
tttattatagcactttccaactgggaa

SEQ ID NO: 146407 - DNA, 27 bp, Artificial sequence
  SiRNA target sequence
ttattatagcactttccaactgggaag

SEQ ID NO: 146408 - DNA, 27 bp, Artificial sequence
  SiRNA target sequence
tattatagcactttccaactgggaaga

SEQ ID NO: 146409 - DNA, 27 bp, Artificial sequence
  SiRNA target sequence
attatagcactttccaactgggaagaa

SEQ ID NO: 146410 - DNA, 27 bp, Artificial sequence
  SiRNA target sequence
ttatagcactttccaactgggaagaaa

SEQ ID NO: 146411 - DNA, 27 bp, Artificial sequence
  SiRNA target sequence
tatagcactttccaactgggaagaaat

SEQ ID NO: 146412 - DNA, 27 bp, Artificial sequence
  SiRNA target sequence
atagcactttccaactgggaagaaatc

SEQ ID NO: 146413 - DNA, 27 bp, Artificial sequence
  SiRNA target sequence
tagcactttccaactgggaagaaatct

SEQ ID NO: 146414 - DNA, 27 bp, Artificial sequence
  SiRNA target sequence
agcactttccaactgggaagaaatctt

SEQ ID NO: 146415 - DNA, 27 bp, Artificial sequence
  SiRNA target sequence
gcactttccaactgggaagaaatcttt

SEQ ID NO: 146416 - DNA, 27 bp, Artificial sequence
  SiRNA target sequence
cactttccaactgggaagaaatctttt

SEQ ID NO: 146417 - DNA, 27 bp, Artificial sequence
  SiRNA target sequence
actttccaactgggaagaaatcttttt

SEQ ID NO: 146418 - DNA, 27 bp, Artificial sequence
  SiRNA target sequence
ctttccaactgggaagaaatcttttta

SEQ ID NO: 146419 - DNA, 27 bp, Artificial sequence
  SiRNA target sequence
tttccaactgggaagaaatctttttat

SEQ ID NO: 146420 - DNA, 27 bp, Artificial sequence
  SiRNA target sequence
ttccaactgggaagaaatctttttatt

SEQ ID NO: 146421 - DNA, 27 bp, Artificial sequence
  SiRNA target sequence
tccaactgggaagaaatctttttattt

SEQ ID NO: 146422 - DNA, 27 bp, Artificial sequence
  SiRNA target sequence
ccaactgggaagaaatctttttatttt

SEQ ID NO: 146423 - DNA, 27 bp, Artificial sequence
  SiRNA target sequence
caactgggaagaaatctttttattttc

SEQ ID NO: 146424 - DNA, 27 bp, Artificial sequence
  SiRNA target sequence
aactgggaagaaatctttttattttct

SEQ ID NO: 146425 - DNA, 27 bp, Artificial sequence
  SiRNA target sequence
actgggaagaaatctttttattttctg

SEQ ID NO: 146426 - DNA, 27 bp, Artificial sequence
  SiRNA target sequence
ctgggaagaaatctttttattttctgg

SEQ ID NO: 146427 - DNA, 27 bp, Artificial sequence
  SiRNA target sequence
tgggaagaaatctttttattttctggt

SEQ ID NO: 146428 - DNA, 27 bp, Artificial sequence
  SiRNA target sequence
gggaagaaatctttttattttctggtg

SEQ ID NO: 146429 - DNA, 27 bp, Artificial sequence
  SiRNA target sequence
ggaagaaatctttttattttctggtga

SEQ ID NO: 146430 - DNA, 27 bp, Artificial sequence
  SiRNA target sequence
gaagaaatctttttattttctggtgac

SEQ ID NO: 146431 - DNA, 27 bp, Artificial sequence
  SiRNA target sequence
aagaaatctttttattttctggtgaca

SEQ ID NO: 146432 - DNA, 27 bp, Artificial sequence
  SiRNA target sequence
agaaatctttttattttctggtgacat

SEQ ID NO: 146433 - DNA, 27 bp, Artificial sequence
  SiRNA target sequence
gaaatctttttattttctggtgacatt

SEQ ID NO: 146434 - DNA, 27 bp, Artificial sequence
  SiRNA target sequence
aaatctttttattttctggtgacatta

SEQ ID NO: 146435 - DNA, 27 bp, Artificial sequence
  SiRNA target sequence
aatctttttattttctggtgacattac

SEQ ID NO: 146436 - DNA, 27 bp, Artificial sequence
  SiRNA target sequence
atctttttattttctggtgacattacc

SEQ ID NO: 146437 - DNA, 27 bp, Artificial sequence
  SiRNA target sequence
tctttttattttctggtgacattacca

SEQ ID NO: 146438 - DNA, 27 bp, Artificial sequence
  SiRNA target sequence
ctttttattttctggtgacattaccaa

SEQ ID NO: 146439 - DNA, 27 bp, Artificial sequence
  SiRNA target sequence
tttttattttctggtgacattaccaac

SEQ ID NO: 146440 - DNA, 27 bp, Artificial sequence
  SiRNA target sequence
ttttattttctggtgacattaccaacc

SEQ ID NO: 146441 - DNA, 27 bp, Artificial sequence
  SiRNA target sequence
tttattttctggtgacattaccaacca

SEQ ID NO: 146442 - DNA, 27 bp, Artificial sequence
  SiRNA target sequence
ttattttctggtgacattaccaaccag

SEQ ID NO: 146443 - DNA, 27 bp, Artificial sequence
  SiRNA target sequence
tattttctggtgacattaccaaccaga

SEQ ID NO: 146444 - DNA, 27 bp, Artificial sequence
  SiRNA target sequence
attttctggtgacattaccaaccagaa

SEQ ID NO: 146445 - DNA, 27 bp, Artificial sequence
  SiRNA target sequence
ttttctggtgacattaccaaccagaaa

SEQ ID NO: 146446 - DNA, 27 bp, Artificial sequence
  SiRNA target sequence
tttctggtgacattaccaaccagaaaa

SEQ ID NO: 146447 - DNA, 27 bp, Artificial sequence
  SiRNA target sequence
ttctggtgacattaccaaccagaaaag

SEQ ID NO: 146448 - DNA, 27 bp, Artificial sequence
  SiRNA target sequence
tctggtgacattaccaaccagaaaaga

SEQ ID NO: 146449 - DNA, 27 bp, Artificial sequence
  SiRNA target sequence
ctggtgacattaccaaccagaaaagac

SEQ ID NO: 146450 - DNA, 27 bp, Artificial sequence
  SiRNA target sequence
tggtgacattaccaaccagaaaagact

SEQ ID NO: 146451 - DNA, 27 bp, Artificial sequence
  SiRNA target sequence
ggtgacattaccaaccagaaaagacta

SEQ ID NO: 146452 - DNA, 27 bp, Artificial sequence
  SiRNA target sequence
gtgacattaccaaccagaaaagactat

SEQ ID NO: 146453 - DNA, 27 bp, Artificial sequence
  SiRNA target sequence
tgacattaccaaccagaaaagactatg

SEQ ID NO: 146454 - DNA, 27 bp, Artificial sequence
  SiRNA target sequence
gacattaccaaccagaaaagactatgg

SEQ ID NO: 146455 - DNA, 27 bp, Artificial sequence
  SiRNA target sequence
acattaccaaccagaaaagactatggt

SEQ ID NO: 146456 - DNA, 27 bp, Artificial sequence
  SiRNA target sequence
cattaccaaccagaaaagactatggtt

SEQ ID NO: 146457 - DNA, 27 bp, Artificial sequence
  SiRNA target sequence
attaccaaccagaaaagactatggttg

SEQ ID NO: 146458 - DNA, 27 bp, Artificial sequence
  SiRNA target sequence
ttaccaaccagaaaagactatggttgt

SEQ ID NO: 146459 - DNA, 27 bp, Artificial sequence
  SiRNA target sequence
taccaaccagaaaagactatggttgta

SEQ ID NO: 146460 - DNA, 27 bp, Artificial sequence
  SiRNA target sequence
accaaccagaaaagactatggttgtaa

SEQ ID NO: 146461 - DNA, 27 bp, Artificial sequence
  SiRNA target sequence
ccaaccagaaaagactatggttgtaat

SEQ ID NO: 146462 - DNA, 27 bp, Artificial sequence
  SiRNA target sequence
caaccagaaaagactatggttgtaatg

SEQ ID NO: 146463 - DNA, 27 bp, Artificial sequence
  SiRNA target sequence
aaccagaaaagactatggttgtaatga

SEQ ID NO: 146464 - DNA, 27 bp, Artificial sequence
  SiRNA target sequence
accagaaaagactatggttgtaatgac

SEQ ID NO: 146465 - DNA, 27 bp, Artificial sequence
  SiRNA target sequence
ccagaaaagactatggttgtaatgacc

SEQ ID NO: 146466 - DNA, 27 bp, Artificial sequence
  SiRNA target sequence
cagaaaagactatggttgtaatgacca

SEQ ID NO: 146467 - DNA, 27 bp, Artificial sequence
  SiRNA target sequence
agaaaagactatggttgtaatgaccac

SEQ ID NO: 146468 - DNA, 27 bp, Artificial sequence
  SiRNA target sequence
gaaaagactatggttgtaatgaccacc

SEQ ID NO: 146469 - DNA, 27 bp, Artificial sequence
  SiRNA target sequence
aaaagactatggttgtaatgaccacca

SEQ ID NO: 146470 - DNA, 27 bp, Artificial sequence
  SiRNA target sequence
aaagactatggttgtaatgaccaccac

SEQ ID NO: 146471 - DNA, 27 bp, Artificial sequence
  SiRNA target sequence
aagactatggttgtaatgaccaccacc

SEQ ID NO: 146472 - DNA, 27 bp, Artificial sequence
  SiRNA target sequence
agactatggttgtaatgaccaccacca

SEQ ID NO: 146473 - DNA, 27 bp, Artificial sequence
  SiRNA target sequence
gactatggttgtaatgaccaccaccat

SEQ ID NO: 146474 - DNA, 27 bp, Artificial sequence
  SiRNA target sequence
actatggttgtaatgaccaccaccata

SEQ ID NO: 146475 - DNA, 27 bp, Artificial sequence
  SiRNA target sequence
ctatggttgtaatgaccaccaccataa

SEQ ID NO: 146476 - DNA, 27 bp, Artificial sequence
  SiRNA target sequence
tatggttgtaatgaccaccaccataat

SEQ ID NO: 146477 - DNA, 27 bp, Artificial sequence
  SiRNA target sequence
atggttgtaatgaccaccaccataatc

SEQ ID NO: 146478 - DNA, 27 bp, Artificial sequence
  SiRNA target sequence
tggttgtaatgaccaccaccataatct

SEQ ID NO: 146479 - DNA, 27 bp, Artificial sequence
  SiRNA target sequence
ggttgtaatgaccaccaccataatctc

SEQ ID NO: 146480 - DNA, 27 bp, Artificial sequence
  SiRNA target sequence
gttgtaatgaccaccaccataatctct

SEQ ID NO: 146481 - DNA, 27 bp, Artificial sequence
  SiRNA target sequence
ttgtaatgaccaccaccataatctctt

SEQ ID NO: 146482 - DNA, 27 bp, Artificial sequence
  SiRNA target sequence
tgtaatgaccaccaccataatctctta

SEQ ID NO: 146483 - DNA, 27 bp, Artificial sequence
  SiRNA target sequence
gtaatgaccaccaccataatctcttaa

SEQ ID NO: 146484 - DNA, 27 bp, Artificial sequence
  SiRNA target sequence
taatgaccaccaccataatctcttaat

SEQ ID NO: 146485 - DNA, 27 bp, Artificial sequence
  SiRNA target sequence
aatgaccaccaccataatctcttaatt

SEQ ID NO: 146486 - DNA, 27 bp, Artificial sequence
  SiRNA target sequence
atgaccaccaccataatctcttaattg

SEQ ID NO: 146487 - DNA, 27 bp, Artificial sequence
  SiRNA target sequence
tgaccaccaccataatctcttaattgt

SEQ ID NO: 146488 - DNA, 27 bp, Artificial sequence
  SiRNA target sequence
gaccaccaccataatctcttaattgtt

SEQ ID NO: 146489 - DNA, 27 bp, Artificial sequence
  SiRNA target sequence
accaccaccataatctcttaattgttt

SEQ ID NO: 146490 - DNA, 27 bp, Artificial sequence
  SiRNA target sequence
ccaccaccataatctcttaattgttta

SEQ ID NO: 146491 - DNA, 27 bp, Artificial sequence
  SiRNA target sequence
caccaccataatctcttaattgtttat

SEQ ID NO: 146492 - DNA, 27 bp, Artificial sequence
  SiRNA target sequence
accaccataatctcttaattgtttatc

SEQ ID NO: 146493 - DNA, 27 bp, Artificial sequence
  SiRNA target sequence
ccaccataatctcttaattgtttatca

SEQ ID NO: 146494 - DNA, 27 bp, Artificial sequence
  SiRNA target sequence
caccataatctcttaattgtttatcaa

SEQ ID NO: 146495 - DNA, 27 bp, Artificial sequence
  SiRNA target sequence
accataatctcttaattgtttatcaac

SEQ ID NO: 146496 - DNA, 27 bp, Artificial sequence
  SiRNA target sequence
ccataatctcttaattgtttatcaaca

SEQ ID NO: 146497 - DNA, 27 bp, Artificial sequence
  SiRNA target sequence
cataatctcttaattgtttatcaacaa

SEQ ID NO: 146498 - DNA, 27 bp, Artificial sequence
  SiRNA target sequence
ataatctcttaattgtttatcaacaag

SEQ ID NO: 146499 - DNA, 27 bp, Artificial sequence
  SiRNA target sequence
taatctcttaattgtttatcaacaagt

SEQ ID NO: 146500 - DNA, 27 bp, Artificial sequence
  SiRNA target sequence
aatctcttaattgtttatcaacaagtg

SEQ ID NO: 146501 - DNA, 27 bp, Artificial sequence
  SiRNA target sequence
atctcttaattgtttatcaacaagtgc

SEQ ID NO: 146502 - DNA, 27 bp, Artificial sequence
  SiRNA target sequence
tctcttaattgtttatcaacaagtgca

SEQ ID NO: 146503 - DNA, 27 bp, Artificial sequence
  SiRNA target sequence
ctcttaattgtttatcaacaagtgcat

SEQ ID NO: 146504 - DNA, 27 bp, Artificial sequence
  SiRNA target sequence
tcttaattgtttatcaacaagtgcatt

SEQ ID NO: 146505 - DNA, 27 bp, Artificial sequence
  SiRNA target sequence
cttaattgtttatcaacaagtgcattt

SEQ ID NO: 146506 - DNA, 27 bp, Artificial sequence
  SiRNA target sequence
ttaattgtttatcaacaagtgcatttc

SEQ ID NO: 146507 - DNA, 27 bp, Artificial sequence
  SiRNA target sequence
taattgtttatcaacaagtgcatttcc

SEQ ID NO: 146508 - DNA, 27 bp, Artificial sequence
  SiRNA target sequence
aattgtttatcaacaagtgcatttcct

SEQ ID NO: 146509 - DNA, 27 bp, Artificial sequence
  SiRNA target sequence
attgtttatcaacaagtgcatttcctt

SEQ ID NO: 146510 - DNA, 27 bp, Artificial sequence
  SiRNA target sequence
ttgtttatcaacaagtgcatttccttt

SEQ ID NO: 146511 - DNA, 27 bp, Artificial sequence
  SiRNA target sequence
tgtttatcaacaagtgcatttccttta

SEQ ID NO: 146512 - DNA, 27 bp, Artificial sequence
  SiRNA target sequence
gtttatcaacaagtgcatttcctttat

SEQ ID NO: 146513 - DNA, 27 bp, Artificial sequence
  SiRNA target sequence
tttatcaacaagtgcatttcctttatt

SEQ ID NO: 146514 - DNA, 27 bp, Artificial sequence
  SiRNA target sequence
ttatcaacaagtgcatttcctttatta

SEQ ID NO: 146515 - DNA, 27 bp, Artificial sequence
  SiRNA target sequence
tatcaacaagtgcatttcctttattat

SEQ ID NO: 146516 - DNA, 27 bp, Artificial sequence
  SiRNA target sequence
atcaacaagtgcatttcctttattatt

SEQ ID NO: 146517 - DNA, 27 bp, Artificial sequence
  SiRNA target sequence
tcaacaagtgcatttcctttattatta

SEQ ID NO: 146518 - DNA, 27 bp, Artificial sequence
  SiRNA target sequence
caacaagtgcatttcctttattattaa

SEQ ID NO: 146519 - DNA, 27 bp, Artificial sequence
  SiRNA target sequence
aacaagtgcatttcctttattattaaa

SEQ ID NO: 146520 - DNA, 27 bp, Artificial sequence
  SiRNA target sequence
acaagtgcatttcctttattattaaaa

SEQ ID NO: 146521 - DNA, 27 bp, Artificial sequence
  SiRNA target sequence
caagtgcatttcctttattattaaaaa

SEQ ID NO: 146522 - DNA, 27 bp, Artificial sequence
  SiRNA target sequence
aagtgcatttcctttattattaaaaag

SEQ ID NO: 146523 - DNA, 27 bp, Artificial sequence
  SiRNA target sequence
agtgcatttcctttattattaaaaagt

SEQ ID NO: 146524 - DNA, 27 bp, Artificial sequence
  SiRNA target sequence
gtgcatttcctttattattaaaaagta

SEQ ID NO: 146525 - DNA, 27 bp, Artificial sequence
  SiRNA target sequence
tgcatttcctttattattaaaaagtaa

SEQ ID NO: 146526 - DNA, 27 bp, Artificial sequence
  SiRNA target sequence
gcatttcctttattattaaaaagtaat

SEQ ID NO: 146527 - DNA, 27 bp, Artificial sequence
  SiRNA target sequence
catttcctttattattaaaaagtaatg

SEQ ID NO: 146528 - DNA, 27 bp, Artificial sequence
  SiRNA target sequence
atttcctttattattaaaaagtaatga

SEQ ID NO: 146529 - DNA, 27 bp, Artificial sequence
  SiRNA target sequence
tttcctttattattaaaaagtaatgaa

SEQ ID NO: 146530 - DNA, 27 bp, Artificial sequence
  SiRNA target sequence
ttcctttattattaaaaagtaatgaat

SEQ ID NO: 146531 - DNA, 27 bp, Artificial sequence
  SiRNA target sequence
tcctttattattaaaaagtaatgaatt

SEQ ID NO: 146532 - DNA, 27 bp, Artificial sequence
  SiRNA target sequence
cctttattattaaaaagtaatgaattt

SEQ ID NO: 146533 - DNA, 27 bp, Artificial sequence
  SiRNA target sequence
ctttattattaaaaagtaatgaattta

SEQ ID NO: 146534 - DNA, 27 bp, Artificial sequence
  SiRNA target sequence
tttattattaaaaagtaatgaatttaa

SEQ ID NO: 146535 - DNA, 27 bp, Artificial sequence
  SiRNA target sequence
ttattattaaaaagtaatgaatttaat

SEQ ID NO: 146536 - DNA, 27 bp, Artificial sequence
  SiRNA target sequence
tattattaaaaagtaatgaatttaatg

SEQ ID NO: 146537 - DNA, 27 bp, Artificial sequence
  SiRNA target sequence
attattaaaaagtaatgaatttaatga

SEQ ID NO: 146538 - DNA, 27 bp, Artificial sequence
  SiRNA target sequence
ttattaaaaagtaatgaatttaatgat

SEQ ID NO: 146539 - DNA, 27 bp, Artificial sequence
  SiRNA target sequence
tattaaaaagtaatgaatttaatgatt

SEQ ID NO: 146540 - DNA, 27 bp, Artificial sequence
  SiRNA target sequence
attaaaaagtaatgaatttaatgattt

SEQ ID NO: 146541 - DNA, 27 bp, Artificial sequence
  SiRNA target sequence
ttaaaaagtaatgaatttaatgattta

SEQ ID NO: 146542 - DNA, 27 bp, Artificial sequence
  SiRNA target sequence
taaaaagtaatgaatttaatgatttac

SEQ ID NO: 146543 - DNA, 27 bp, Artificial sequence
  SiRNA target sequence
aaaaagtaatgaatttaatgatttacc

SEQ ID NO: 146544 - DNA, 27 bp, Artificial sequence
  SiRNA target sequence
aaaagtaatgaatttaatgatttacca

SEQ ID NO: 146545 - DNA, 27 bp, Artificial sequence
  SiRNA target sequence
aaagtaatgaatttaatgatttaccac

SEQ ID NO: 146546 - DNA, 27 bp, Artificial sequence
  SiRNA target sequence
aagtaatgaatttaatgatttaccaca

SEQ ID NO: 146547 - DNA, 27 bp, Artificial sequence
  SiRNA target sequence
agtaatgaatttaatgatttaccacac

SEQ ID NO: 146548 - DNA, 27 bp, Artificial sequence
  SiRNA target sequence
gtaatgaatttaatgatttaccacaca

SEQ ID NO: 146549 - DNA, 27 bp, Artificial sequence
  SiRNA target sequence
taatgaatttaatgatttaccacacaa

SEQ ID NO: 146550 - DNA, 27 bp, Artificial sequence
  SiRNA target sequence
aatgaatttaatgatttaccacacaaa

SEQ ID NO: 146551 - DNA, 27 bp, Artificial sequence
  SiRNA target sequence
atgaatttaatgatttaccacacaaat

SEQ ID NO: 146552 - DNA, 27 bp, Artificial sequence
  SiRNA target sequence
tgaatttaatgatttaccacacaaatt

SEQ ID NO: 146553 - DNA, 27 bp, Artificial sequence
  SiRNA target sequence
gaatttaatgatttaccacacaaattg

SEQ ID NO: 146554 - DNA, 27 bp, Artificial sequence
  SiRNA target sequence
aatttaatgatttaccacacaaattgt

SEQ ID NO: 146555 - DNA, 27 bp, Artificial sequence
  SiRNA target sequence
atttaatgatttaccacacaaattgtt

SEQ ID NO: 146556 - DNA, 27 bp, Artificial sequence
  SiRNA target sequence
tttaatgatttaccacacaaattgtta

SEQ ID NO: 146557 - DNA, 27 bp, Artificial sequence
  SiRNA target sequence
ttaatgatttaccacacaaattgttat

SEQ ID NO: 146558 - DNA, 27 bp, Artificial sequence
  SiRNA target sequence
taatgatttaccacacaaattgttatc

SEQ ID NO: 146559 - DNA, 27 bp, Artificial sequence
  SiRNA target sequence
aatgatttaccacacaaattgttatct

SEQ ID NO: 146560 - DNA, 27 bp, Artificial sequence
  SiRNA target sequence
atgatttaccacacaaattgttatcta

SEQ ID NO: 146561 - DNA, 27 bp, Artificial sequence
  SiRNA target sequence
tgatttaccacacaaattgttatctaa

SEQ ID NO: 146562 - DNA, 27 bp, Artificial sequence
  SiRNA target sequence
gatttaccacacaaattgttatctaat

SEQ ID NO: 146563 - DNA, 27 bp, Artificial sequence
  SiRNA target sequence
atttaccacacaaattgttatctaata

SEQ ID NO: 146564 - DNA, 27 bp, Artificial sequence
  SiRNA target sequence
tttaccacacaaattgttatctaatat

SEQ ID NO: 146565 - DNA, 27 bp, Artificial sequence
  SiRNA target sequence
ttaccacacaaattgttatctaatatt

SEQ ID NO: 146566 - DNA, 27 bp, Artificial sequence
  SiRNA target sequence
taccacacaaattgttatctaatatta

SEQ ID NO: 146567 - DNA, 27 bp, Artificial sequence
  SiRNA target sequence
accacacaaattgttatctaatattat

SEQ ID NO: 146568 - DNA, 27 bp, Artificial sequence
  SiRNA target sequence
ccacacaaattgttatctaatattatt

SEQ ID NO: 146569 - DNA, 27 bp, Artificial sequence
  SiRNA target sequence
cacacaaattgttatctaatattattt

SEQ ID NO: 146570 - DNA, 27 bp, Artificial sequence
  SiRNA target sequence
acacaaattgttatctaatattatttt

SEQ ID NO: 146571 - DNA, 27 bp, Artificial sequence
  SiRNA target sequence
cacaaattgttatctaatattatttta

SEQ ID NO: 146572 - DNA, 27 bp, Artificial sequence
  SiRNA target sequence
acaaattgttatctaatattattttat

SEQ ID NO: 146573 - DNA, 27 bp, Artificial sequence
  SiRNA target sequence
caaattgttatctaatattattttatt

SEQ ID NO: 146574 - DNA, 27 bp, Artificial sequence
  SiRNA target sequence
aaattgttatctaatattattttatta

SEQ ID NO: 146575 - DNA, 27 bp, Artificial sequence
  SiRNA target sequence
aattgttatctaatattattttattaa

SEQ ID NO: 146576 - DNA, 27 bp, Artificial sequence
  SiRNA target sequence
attgttatctaatattattttattaag

SEQ ID NO: 146577 - DNA, 27 bp, Artificial sequence
  SiRNA target sequence
ttgttatctaatattattttattaaga

SEQ ID NO: 146578 - DNA, 27 bp, Artificial sequence
  SiRNA target sequence
tgttatctaatattattttattaagag

SEQ ID NO: 146579 - DNA, 27 bp, Artificial sequence
  SiRNA target sequence
gttatctaatattattttattaagagt

SEQ ID NO: 146580 - DNA, 27 bp, Artificial sequence
  SiRNA target sequence
ttatctaatattattttattaagagtg

SEQ ID NO: 146581 - DNA, 27 bp, Artificial sequence
  SiRNA target sequence
tatctaatattattttattaagagtgt

SEQ ID NO: 146582 - DNA, 27 bp, Artificial sequence
  SiRNA target sequence
atctaatattattttattaagagtgtc

SEQ ID NO: 146583 - DNA, 27 bp, Artificial sequence
  SiRNA target sequence
tctaatattattttattaagagtgtct

SEQ ID NO: 146584 - DNA, 27 bp, Artificial sequence
  SiRNA target sequence
ctaatattattttattaagagtgtcta

SEQ ID NO: 146585 - DNA, 27 bp, Artificial sequence
  SiRNA target sequence
taatattattttattaagagtgtctac

SEQ ID NO: 146586 - DNA, 27 bp, Artificial sequence
  SiRNA target sequence
aatattattttattaagagtgtctaca

SEQ ID NO: 146587 - DNA, 27 bp, Artificial sequence
  SiRNA target sequence
atattattttattaagagtgtctacat

SEQ ID NO: 146588 - DNA, 27 bp, Artificial sequence
  SiRNA target sequence
tattattttattaagagtgtctacata

SEQ ID NO: 146589 - DNA, 27 bp, Artificial sequence
  SiRNA target sequence
attattttattaagagtgtctacatac

SEQ ID NO: 146590 - DNA, 27 bp, Artificial sequence
  SiRNA target sequence
ttattttattaagagtgtctacatacg

SEQ ID NO: 146591 - DNA, 27 bp, Artificial sequence
  SiRNA target sequence
tattttattaagagtgtctacatacgc

SEQ ID NO: 146592 - DNA, 27 bp, Artificial sequence
  SiRNA target sequence
attttattaagagtgtctacatacgct

SEQ ID NO: 146593 - DNA, 27 bp, Artificial sequence
  SiRNA target sequence
ttttattaagagtgtctacatacgctt

SEQ ID NO: 146594 - DNA, 27 bp, Artificial sequence
  SiRNA target sequence
tttattaagagtgtctacatacgcttg

SEQ ID NO: 146595 - DNA, 27 bp, Artificial sequence
  SiRNA target sequence
ttattaagagtgtctacatacgcttga

SEQ ID NO: 146596 - DNA, 27 bp, Artificial sequence
  SiRNA target sequence
tattaagagtgtctacatacgcttgat

SEQ ID NO: 146597 - DNA, 27 bp, Artificial sequence
  SiRNA target sequence
attaagagtgtctacatacgcttgatg

SEQ ID NO: 146598 - DNA, 27 bp, Artificial sequence
  SiRNA target sequence
ttaagagtgtctacatacgcttgatgg

SEQ ID NO: 146599 - DNA, 27 bp, Artificial sequence
  SiRNA target sequence
taagagtgtctacatacgcttgatggt

SEQ ID NO: 146600 - DNA, 27 bp, Artificial sequence
  SiRNA target sequence
aagagtgtctacatacgcttgatggtg

SEQ ID NO: 146601 - DNA, 27 bp, Artificial sequence
  SiRNA target sequence
agagtgtctacatacgcttgatggtgc

SEQ ID NO: 146602 - DNA, 27 bp, Artificial sequence
  SiRNA target sequence
gagtgtctacatacgcttgatggtgct

SEQ ID NO: 146603 - DNA, 27 bp, Artificial sequence
  SiRNA target sequence
agtgtctacatacgcttgatggtgctt

SEQ ID NO: 146604 - DNA, 27 bp, Artificial sequence
  SiRNA target sequence
gtgtctacatacgcttgatggtgctta

SEQ ID NO: 146605 - DNA, 27 bp, Artificial sequence
  SiRNA target sequence
tgtctacatacgcttgatggtgcttag

SEQ ID NO: 146606 - DNA, 27 bp, Artificial sequence
  SiRNA target sequence
gtctacatacgcttgatggtgcttaga

SEQ ID NO: 146607 - DNA, 27 bp, Artificial sequence
  SiRNA target sequence
tctacatacgcttgatggtgcttagag

SEQ ID NO: 146608 - DNA, 27 bp, Artificial sequence
  SiRNA target sequence
ctacatacgcttgatggtgcttagagt

SEQ ID NO: 146609 - DNA, 27 bp, Artificial sequence
  SiRNA target sequence
tacatacgcttgatggtgcttagagtg

SEQ ID NO: 146610 - DNA, 27 bp, Artificial sequence
  SiRNA target sequence
acatacgcttgatggtgcttagagtgg

SEQ ID NO: 146611 - DNA, 27 bp, Artificial sequence
  SiRNA target sequence
catacgcttgatggtgcttagagtggt

SEQ ID NO: 146612 - DNA, 27 bp, Artificial sequence
  SiRNA target sequence
atacgcttgatggtgcttagagtggtg

SEQ ID NO: 146613 - DNA, 27 bp, Artificial sequence
  SiRNA target sequence
tacgcttgatggtgcttagagtggtgg

SEQ ID NO: 146614 - DNA, 27 bp, Artificial sequence
  SiRNA target sequence
acgcttgatggtgcttagagtggtggg

SEQ ID NO: 146615 - DNA, 27 bp, Artificial sequence
  SiRNA target sequence
cgcttgatggtgcttagagtggtgggt

SEQ ID NO: 146616 - DNA, 27 bp, Artificial sequence
  SiRNA target sequence
gcttgatggtgcttagagtggtgggtc

SEQ ID NO: 146617 - DNA, 27 bp, Artificial sequence
  SiRNA target sequence
cttgatggtgcttagagtggtgggtct

SEQ ID NO: 146618 - DNA, 27 bp, Artificial sequence
  SiRNA target sequence
ttgatggtgcttagagtggtgggtctc

SEQ ID NO: 146619 - DNA, 27 bp, Artificial sequence
  SiRNA target sequence
tgatggtgcttagagtggtgggtctcc

SEQ ID NO: 146620 - DNA, 27 bp, Artificial sequence
  SiRNA target sequence
gatggtgcttagagtggtgggtctcca

SEQ ID NO: 146621 - DNA, 27 bp, Artificial sequence
  SiRNA target sequence
atggtgcttagagtggtgggtctccat

SEQ ID NO: 146622 - DNA, 27 bp, Artificial sequence
  SiRNA target sequence
tggtgcttagagtggtgggtctccatt

SEQ ID NO: 146623 - DNA, 27 bp, Artificial sequence
  SiRNA target sequence
ggtgcttagagtggtgggtctccatta

SEQ ID NO: 146624 - DNA, 27 bp, Artificial sequence
  SiRNA target sequence
gtgcttagagtggtgggtctccattat

SEQ ID NO: 146625 - DNA, 27 bp, Artificial sequence
  SiRNA target sequence
tgcttagagtggtgggtctccattata

SEQ ID NO: 146626 - DNA, 27 bp, Artificial sequence
  SiRNA target sequence
gcttagagtggtgggtctccattatat

SEQ ID NO: 146627 - DNA, 27 bp, Artificial sequence
  SiRNA target sequence
cttagagtggtgggtctccattatatc

SEQ ID NO: 146628 - DNA, 27 bp, Artificial sequence
  SiRNA target sequence
ttagagtggtgggtctccattatatct

SEQ ID NO: 146629 - DNA, 27 bp, Artificial sequence
  SiRNA target sequence
tagagtggtgggtctccattatatctt

SEQ ID NO: 146630 - DNA, 27 bp, Artificial sequence
  SiRNA target sequence
agagtggtgggtctccattatatcttc

SEQ ID NO: 146631 - DNA, 27 bp, Artificial sequence
  SiRNA target sequence
gagtggtgggtctccattatatcttca

SEQ ID NO: 146632 - DNA, 27 bp, Artificial sequence
  SiRNA target sequence
agtggtgggtctccattatatcttcac

SEQ ID NO: 146633 - DNA, 27 bp, Artificial sequence
  SiRNA target sequence
gtggtgggtctccattatatcttcact

SEQ ID NO: 146634 - DNA, 27 bp, Artificial sequence
  SiRNA target sequence
tggtgggtctccattatatcttcactt

SEQ ID NO: 146635 - DNA, 27 bp, Artificial sequence
  SiRNA target sequence
ggtgggtctccattatatcttcactta

SEQ ID NO: 146636 - DNA, 27 bp, Artificial sequence
  SiRNA target sequence
gtgggtctccattatatcttcacttat

SEQ ID NO: 146637 - DNA, 27 bp, Artificial sequence
  SiRNA target sequence
tgggtctccattatatcttcacttata

SEQ ID NO: 146638 - DNA, 27 bp, Artificial sequence
  SiRNA target sequence
gggtctccattatatcttcacttatat

SEQ ID NO: 146639 - DNA, 27 bp, Artificial sequence
  SiRNA target sequence
ggtctccattatatcttcacttatata

SEQ ID NO: 146640 - DNA, 27 bp, Artificial sequence
  SiRNA target sequence
gtctccattatatcttcacttatataa

SEQ ID NO: 146641 - DNA, 27 bp, Artificial sequence
  SiRNA target sequence
tctccattatatcttcacttatataag

SEQ ID NO: 146642 - DNA, 27 bp, Artificial sequence
  SiRNA target sequence
ctccattatatcttcacttatataagg

SEQ ID NO: 146643 - DNA, 27 bp, Artificial sequence
  SiRNA target sequence
tccattatatcttcacttatataaggc

SEQ ID NO: 146644 - DNA, 27 bp, Artificial sequence
  SiRNA target sequence
ccattatatcttcacttatataaggct

SEQ ID NO: 146645 - DNA, 27 bp, Artificial sequence
  SiRNA target sequence
cattatatcttcacttatataaggctc

SEQ ID NO: 146646 - DNA, 27 bp, Artificial sequence
  SiRNA target sequence
attatatcttcacttatataaggctct

SEQ ID NO: 146647 - DNA, 27 bp, Artificial sequence
  SiRNA target sequence
ttatatcttcacttatataaggctcta

SEQ ID NO: 146648 - DNA, 27 bp, Artificial sequence
  SiRNA target sequence
tatatcttcacttatataaggctctag

SEQ ID NO: 146649 - DNA, 27 bp, Artificial sequence
  SiRNA target sequence
atatcttcacttatataaggctctaga

SEQ ID NO: 146650 - DNA, 27 bp, Artificial sequence
  SiRNA target sequence
tatcttcacttatataaggctctagag

SEQ ID NO: 146651 - DNA, 27 bp, Artificial sequence
  SiRNA target sequence
atcttcacttatataaggctctagaga

SEQ ID NO: 146652 - DNA, 27 bp, Artificial sequence
  SiRNA target sequence
tcttcacttatataaggctctagagat

SEQ ID NO: 146653 - DNA, 27 bp, Artificial sequence
  SiRNA target sequence
cttcacttatataaggctctagagatt

SEQ ID NO: 146654 - DNA, 27 bp, Artificial sequence
  SiRNA target sequence
ttcacttatataaggctctagagattt

SEQ ID NO: 146655 - DNA, 27 bp, Artificial sequence
  SiRNA target sequence
tcacttatataaggctctagagattta

SEQ ID NO: 146656 - DNA, 27 bp, Artificial sequence
  SiRNA target sequence
cacttatataaggctctagagatttat

SEQ ID NO: 146657 - DNA, 27 bp, Artificial sequence
  SiRNA target sequence
acttatataaggctctagagatttata

SEQ ID NO: 146658 - DNA, 27 bp, Artificial sequence
  SiRNA target sequence
cttatataaggctctagagatttataa

SEQ ID NO: 146659 - DNA, 27 bp, Artificial sequence
  SiRNA target sequence
ttatataaggctctagagatttataac

SEQ ID NO: 146660 - DNA, 27 bp, Artificial sequence
  SiRNA target sequence
tatataaggctctagagatttataact

SEQ ID NO: 146661 - DNA, 27 bp, Artificial sequence
  SiRNA target sequence
atataaggctctagagatttataacta

SEQ ID NO: 146662 - DNA, 27 bp, Artificial sequence
  SiRNA target sequence
tataaggctctagagatttataactat

SEQ ID NO: 146663 - DNA, 27 bp, Artificial sequence
  SiRNA target sequence
ataaggctctagagatttataactata

SEQ ID NO: 146664 - DNA, 27 bp, Artificial sequence
  SiRNA target sequence
taaggctctagagatttataactatat

SEQ ID NO: 146665 - DNA, 27 bp, Artificial sequence
  SiRNA target sequence
aaggctctagagatttataactatatt

SEQ ID NO: 146666 - DNA, 27 bp, Artificial sequence
  SiRNA target sequence
aggctctagagatttataactatattt

SEQ ID NO: 146667 - DNA, 27 bp, Artificial sequence
  SiRNA target sequence
ggctctagagatttataactatatttc

SEQ ID NO: 146668 - DNA, 27 bp, Artificial sequence
  SiRNA target sequence
gctctagagatttataactatatttca

SEQ ID NO: 146669 - DNA, 27 bp, Artificial sequence
  SiRNA target sequence
ctctagagatttataactatatttcag

SEQ ID NO: 146670 - DNA, 27 bp, Artificial sequence
  SiRNA target sequence
tctagagatttataactatatttcaga

SEQ ID NO: 146671 - DNA, 27 bp, Artificial sequence
  SiRNA target sequence
ctagagatttataactatatttcagat

SEQ ID NO: 146672 - DNA, 27 bp, Artificial sequence
  SiRNA target sequence
tagagatttataactatatttcagatt

SEQ ID NO: 146673 - DNA, 27 bp, Artificial sequence
  SiRNA target sequence
agagatttataactatatttcagattt

SEQ ID NO: 146674 - DNA, 27 bp, Artificial sequence
  SiRNA target sequence
gagatttataactatatttcagatttg

SEQ ID NO: 146675 - DNA, 27 bp, Artificial sequence
  SiRNA target sequence
agatttataactatatttcagatttgg

SEQ ID NO: 146676 - DNA, 27 bp, Artificial sequence
  SiRNA target sequence
gatttataactatatttcagatttgga

SEQ ID NO: 146677 - DNA, 27 bp, Artificial sequence
  SiRNA target sequence
atttataactatatttcagatttggaa

SEQ ID NO: 146678 - DNA, 27 bp, Artificial sequence
  SiRNA target sequence
tttataactatatttcagatttggaag

SEQ ID NO: 146679 - DNA, 27 bp, Artificial sequence
  SiRNA target sequence
ttataactatatttcagatttggaaga

SEQ ID NO: 146680 - DNA, 27 bp, Artificial sequence
  SiRNA target sequence
tataactatatttcagatttggaagag

SEQ ID NO: 146681 - DNA, 27 bp, Artificial sequence
  SiRNA target sequence
ataactatatttcagatttggaagagt

SEQ ID NO: 146682 - DNA, 27 bp, Artificial sequence
  SiRNA target sequence
taactatatttcagatttggaagagtg

SEQ ID NO: 146683 - DNA, 27 bp, Artificial sequence
  SiRNA target sequence
aactatatttcagatttggaagagtga

SEQ ID NO: 146684 - DNA, 27 bp, Artificial sequence
  SiRNA target sequence
actatatttcagatttggaagagtgaa

SEQ ID NO: 146685 - DNA, 27 bp, Artificial sequence
  SiRNA target sequence
ctatatttcagatttggaagagtgaac

SEQ ID NO: 146686 - DNA, 27 bp, Artificial sequence
  SiRNA target sequence
tatatttcagatttggaagagtgaaca

SEQ ID NO: 146687 - DNA, 27 bp, Artificial sequence
  SiRNA target sequence
atatttcagatttggaagagtgaacat

SEQ ID NO: 146688 - DNA, 19 bp, Artificial sequence
  SiRNA target sequence
atggcacaagacccccaag

SEQ ID NO: 146689 - DNA, 19 bp, Artificial sequence
  SiRNA target sequence
tggcacaagacccccaagg

SEQ ID NO: 146690 - DNA, 19 bp, Artificial sequence
  SiRNA target sequence
ggcacaagacccccaagga

SEQ ID NO: 146691 - DNA, 19 bp, Artificial sequence
  SiRNA target sequence
gcacaagacccccaaggac

SEQ ID NO: 146692 - DNA, 19 bp, Artificial sequence
  SiRNA target sequence
cacaagacccccaaggact

SEQ ID NO: 146693 - DNA, 19 bp, Artificial sequence
  SiRNA target sequence
acaagacccccaaggactt

SEQ ID NO: 146694 - DNA, 19 bp, Artificial sequence
  SiRNA target sequence
caagacccccaaggacttt

SEQ ID NO: 146695 - DNA, 19 bp, Artificial sequence
  SiRNA target sequence
aagacccccaaggacttta

SEQ ID NO: 146696 - DNA, 19 bp, Artificial sequence
  SiRNA target sequence
agacccccaaggactttat

SEQ ID NO: 146697 - DNA, 19 bp, Artificial sequence
  SiRNA target sequence
gacccccaaggactttatg

SEQ ID NO: 146698 - DNA, 19 bp, Artificial sequence
  SiRNA target sequence
acccccaaggactttatga

SEQ ID NO: 146699 - DNA, 19 bp, Artificial sequence
  SiRNA target sequence
cccccaaggactttatgaa

SEQ ID NO: 146700 - DNA, 19 bp, Artificial sequence
  SiRNA target sequence
ccccaaggactttatgaag

SEQ ID NO: 146701 - DNA, 19 bp, Artificial sequence
  SiRNA target sequence
cccaaggactttatgaagt

SEQ ID NO: 146702 - DNA, 19 bp, Artificial sequence
  SiRNA target sequence
ccaaggactttatgaagta

SEQ ID NO: 146703 - DNA, 19 bp, Artificial sequence
  SiRNA target sequence
caaggactttatgaagtat

SEQ ID NO: 146704 - DNA, 19 bp, Artificial sequence
  SiRNA target sequence
aaggactttatgaagtatt

SEQ ID NO: 146705 - DNA, 19 bp, Artificial sequence
  SiRNA target sequence
aggactttatgaagtatta

SEQ ID NO: 146706 - DNA, 19 bp, Artificial sequence
  SiRNA target sequence
ggactttatgaagtattag

SEQ ID NO: 146707 - DNA, 19 bp, Artificial sequence
  SiRNA target sequence
gactttatgaagtattagg

SEQ ID NO: 146708 - DNA, 19 bp, Artificial sequence
  SiRNA target sequence
actttatgaagtattagga

SEQ ID NO: 146709 - DNA, 19 bp, Artificial sequence
  SiRNA target sequence
ctttatgaagtattaggac

SEQ ID NO: 146710 - DNA, 19 bp, Artificial sequence
  SiRNA target sequence
tttatgaagtattaggact

SEQ ID NO: 146711 - DNA, 19 bp, Artificial sequence
  SiRNA target sequence
ttatgaagtattaggactt

SEQ ID NO: 146712 - DNA, 19 bp, Artificial sequence
  SiRNA target sequence
tatgaagtattaggactta

SEQ ID NO: 146713 - DNA, 19 bp, Artificial sequence
  SiRNA target sequence
atgaagtattaggacttaa

SEQ ID NO: 146714 - DNA, 19 bp, Artificial sequence
  SiRNA target sequence
tgaagtattaggacttaaa

SEQ ID NO: 146715 - DNA, 19 bp, Artificial sequence
  SiRNA target sequence
gaagtattaggacttaaag

SEQ ID NO: 146716 - DNA, 19 bp, Artificial sequence
  SiRNA target sequence
aagtattaggacttaaagc

SEQ ID NO: 146717 - DNA, 19 bp, Artificial sequence
  SiRNA target sequence
agtattaggacttaaagct

SEQ ID NO: 146718 - DNA, 19 bp, Artificial sequence
  SiRNA target sequence
gtattaggacttaaagctg

SEQ ID NO: 146719 - DNA, 19 bp, Artificial sequence
  SiRNA target sequence
tattaggacttaaagctgg

SEQ ID NO: 146720 - DNA, 19 bp, Artificial sequence
  SiRNA target sequence
attaggacttaaagctggt

SEQ ID NO: 146721 - DNA, 19 bp, Artificial sequence
  SiRNA target sequence
ttaggacttaaagctggtg

SEQ ID NO: 146722 - DNA, 19 bp, Artificial sequence
  SiRNA target sequence
taggacttaaagctggtgc

SEQ ID NO: 146723 - DNA, 19 bp, Artificial sequence
  SiRNA target sequence
aggacttaaagctggtgca

SEQ ID NO: 146724 - DNA, 19 bp, Artificial sequence
  SiRNA target sequence
ggacttaaagctggtgcaa

SEQ ID NO: 146725 - DNA, 19 bp, Artificial sequence
  SiRNA target sequence
gacttaaagctggtgcaag

SEQ ID NO: 146726 - DNA, 19 bp, Artificial sequence
  SiRNA target sequence
acttaaagctggtgcaagc

SEQ ID NO: 146727 - DNA, 19 bp, Artificial sequence
  SiRNA target sequence
cttaaagctggtgcaagca

SEQ ID NO: 146728 - DNA, 19 bp, Artificial sequence
  SiRNA target sequence
ttaaagctggtgcaagcat

SEQ ID NO: 146729 - DNA, 19 bp, Artificial sequence
  SiRNA target sequence
taaagctggtgcaagcatt

SEQ ID NO: 146730 - DNA, 19 bp, Artificial sequence
  SiRNA target sequence
aaagctggtgcaagcattg

SEQ ID NO: 146731 - DNA, 19 bp, Artificial sequence
  SiRNA target sequence
aagctggtgcaagcattga

SEQ ID NO: 146732 - DNA, 19 bp, Artificial sequence
  SiRNA target sequence
agctggtgcaagcattgat

SEQ ID NO: 146733 - DNA, 19 bp, Artificial sequence
  SiRNA target sequence
gctggtgcaagcattgatg

SEQ ID NO: 146734 - DNA, 19 bp, Artificial sequence
  SiRNA target sequence
ctggtgcaagcattgatga

SEQ ID NO: 146735 - DNA, 19 bp, Artificial sequence
  SiRNA target sequence
tggtgcaagcattgatgaa

SEQ ID NO: 146736 - DNA, 19 bp, Artificial sequence
  SiRNA target sequence
ggtgcaagcattgatgaag

SEQ ID NO: 146737 - DNA, 19 bp, Artificial sequence
  SiRNA target sequence
gtgcaagcattgatgaagt

SEQ ID NO: 146738 - DNA, 19 bp, Artificial sequence
  SiRNA target sequence
tgcaagcattgatgaagtt

SEQ ID NO: 146739 - DNA, 19 bp, Artificial sequence
  SiRNA target sequence
gcaagcattgatgaagtta

SEQ ID NO: 146740 - DNA, 19 bp, Artificial sequence
  SiRNA target sequence
caagcattgatgaagttaa

SEQ ID NO: 146741 - DNA, 19 bp, Artificial sequence
  SiRNA target sequence
aagcattgatgaagttaaa

SEQ ID NO: 146742 - DNA, 19 bp, Artificial sequence
  SiRNA target sequence
agcattgatgaagttaaaa

SEQ ID NO: 146743 - DNA, 19 bp, Artificial sequence
  SiRNA target sequence
gcattgatgaagttaaaaa

SEQ ID NO: 146744 - DNA, 19 bp, Artificial sequence
  SiRNA target sequence
cattgatgaagttaaaaaa

SEQ ID NO: 146745 - DNA, 19 bp, Artificial sequence
  SiRNA target sequence
attgatgaagttaaaaaag

SEQ ID NO: 146746 - DNA, 19 bp, Artificial sequence
  SiRNA target sequence
ttgatgaagttaaaaaagc

SEQ ID NO: 146747 - DNA, 19 bp, Artificial sequence
  SiRNA target sequence
tgatgaagttaaaaaagca

SEQ ID NO: 146748 - DNA, 19 bp, Artificial sequence
  SiRNA target sequence
gatgaagttaaaaaagcat

SEQ ID NO: 146749 - DNA, 19 bp, Artificial sequence
  SiRNA target sequence
atgaagttaaaaaagcatt

SEQ ID NO: 146750 - DNA, 19 bp, Artificial sequence
  SiRNA target sequence
tgaagttaaaaaagcattt

SEQ ID NO: 146751 - DNA, 19 bp, Artificial sequence
  SiRNA target sequence
gaagttaaaaaagcattta

SEQ ID NO: 146752 - DNA, 19 bp, Artificial sequence
  SiRNA target sequence
aagttaaaaaagcatttac

SEQ ID NO: 146753 - DNA, 19 bp, Artificial sequence
  SiRNA target sequence
agttaaaaaagcatttaca

SEQ ID NO: 146754 - DNA, 19 bp, Artificial sequence
  SiRNA target sequence
gttaaaaaagcatttacaa

SEQ ID NO: 146755 - DNA, 19 bp, Artificial sequence
  SiRNA target sequence
ttaaaaaagcatttacaaa

SEQ ID NO: 146756 - DNA, 19 bp, Artificial sequence
  SiRNA target sequence
taaaaaagcatttacaaaa

SEQ ID NO: 146757 - DNA, 19 bp, Artificial sequence
  SiRNA target sequence
aaaaaagcatttacaaaaa

SEQ ID NO: 146758 - DNA, 19 bp, Artificial sequence
  SiRNA target sequence
aaaaagcatttacaaaaaa

SEQ ID NO: 146759 - DNA, 19 bp, Artificial sequence
  SiRNA target sequence
aaaagcatttacaaaaaaa

SEQ ID NO: 146760 - DNA, 19 bp, Artificial sequence
  SiRNA target sequence
aaagcatttacaaaaaaac

SEQ ID NO: 146761 - DNA, 19 bp, Artificial sequence
  SiRNA target sequence
aagcatttacaaaaaaaca

SEQ ID NO: 146762 - DNA, 19 bp, Artificial sequence
  SiRNA target sequence
agcatttacaaaaaaacaa

SEQ ID NO: 146763 - DNA, 19 bp, Artificial sequence
  SiRNA target sequence
gcatttacaaaaaaacaaa

SEQ ID NO: 146764 - DNA, 19 bp, Artificial sequence
  SiRNA target sequence
catttacaaaaaaacaaag

SEQ ID NO: 146765 - DNA, 19 bp, Artificial sequence
  SiRNA target sequence
atttacaaaaaaacaaagg

SEQ ID NO: 146766 - DNA, 19 bp, Artificial sequence
  SiRNA target sequence
tttacaaaaaaacaaaggg

SEQ ID NO: 146767 - DNA, 19 bp, Artificial sequence
  SiRNA target sequence
ttacaaaaaaacaaaggga

SEQ ID NO: 146768 - DNA, 19 bp, Artificial sequence
  SiRNA target sequence
tacaaaaaaacaaagggaa

SEQ ID NO: 146769 - DNA, 19 bp, Artificial sequence
  SiRNA target sequence
acaaaaaaacaaagggaat

SEQ ID NO: 146770 - DNA, 19 bp, Artificial sequence
  SiRNA target sequence
caaaaaaacaaagggaatg

SEQ ID NO: 146771 - DNA, 19 bp, Artificial sequence
  SiRNA target sequence
aaaaaaacaaagggaatgt

SEQ ID NO: 146772 - DNA, 19 bp, Artificial sequence
  SiRNA target sequence
aaaaaacaaagggaatgtc

SEQ ID NO: 146773 - DNA, 19 bp, Artificial sequence
  SiRNA target sequence
aaaaacaaagggaatgtca

SEQ ID NO: 146774 - DNA, 19 bp, Artificial sequence
  SiRNA target sequence
aaaacaaagggaatgtcat

SEQ ID NO: 146775 - DNA, 19 bp, Artificial sequence
  SiRNA target sequence
aaacaaagggaatgtcatc

SEQ ID NO: 146776 - DNA, 19 bp, Artificial sequence
  SiRNA target sequence
aacaaagggaatgtcatcc

SEQ ID NO: 146777 - DNA, 19 bp, Artificial sequence
  SiRNA target sequence
acaaagggaatgtcatccc

SEQ ID NO: 146778 - DNA, 19 bp, Artificial sequence
  SiRNA target sequence
caaagggaatgtcatcccg

SEQ ID NO: 146779 - DNA, 19 bp, Artificial sequence
  SiRNA target sequence
aaagggaatgtcatcccga

SEQ ID NO: 146780 - DNA, 19 bp, Artificial sequence
  SiRNA target sequence
aagggaatgtcatcccgat

SEQ ID NO: 146781 - DNA, 19 bp, Artificial sequence
  SiRNA target sequence
agggaatgtcatcccgatg

SEQ ID NO: 146782 - DNA, 19 bp, Artificial sequence
  SiRNA target sequence
gggaatgtcatcccgatgg

SEQ ID NO: 146783 - DNA, 19 bp, Artificial sequence
  SiRNA target sequence
ggaatgtcatcccgatggt

SEQ ID NO: 146784 - DNA, 19 bp, Artificial sequence
  SiRNA target sequence
gaatgtcatcccgatggtg

SEQ ID NO: 146785 - DNA, 19 bp, Artificial sequence
  SiRNA target sequence
aatgtcatcccgatggtgc

SEQ ID NO: 146786 - DNA, 19 bp, Artificial sequence
  SiRNA target sequence
atgtcatcccgatggtgca

SEQ ID NO: 146787 - DNA, 19 bp, Artificial sequence
  SiRNA target sequence
tgtcatcccgatggtgcat

SEQ ID NO: 146788 - DNA, 19 bp, Artificial sequence
  SiRNA target sequence
gtcatcccgatggtgcatt

SEQ ID NO: 146789 - DNA, 19 bp, Artificial sequence
  SiRNA target sequence
tcatcccgatggtgcattt

SEQ ID NO: 146790 - DNA, 19 bp, Artificial sequence
  SiRNA target sequence
catcccgatggtgcatttt

SEQ ID NO: 146791 - DNA, 19 bp, Artificial sequence
  SiRNA target sequence
atcccgatggtgcattttt

SEQ ID NO: 146792 - DNA, 19 bp, Artificial sequence
  SiRNA target sequence
tcccgatggtgcatttttt

SEQ ID NO: 146793 - DNA, 19 bp, Artificial sequence
  SiRNA target sequence
cccgatggtgcatttttta

SEQ ID NO: 146794 - DNA, 19 bp, Artificial sequence
  SiRNA target sequence
ccgatggtgcattttttaa

SEQ ID NO: 146795 - DNA, 19 bp, Artificial sequence
  SiRNA target sequence
cgatggtgcattttttaaa

SEQ ID NO: 146796 - DNA, 19 bp, Artificial sequence
  SiRNA target sequence
gatggtgcattttttaaag

SEQ ID NO: 146797 - DNA, 19 bp, Artificial sequence
  SiRNA target sequence
atggtgcattttttaaagc

SEQ ID NO: 146798 - DNA, 19 bp, Artificial sequence
  SiRNA target sequence
tggtgcattttttaaagct

SEQ ID NO: 146799 - DNA, 19 bp, Artificial sequence
  SiRNA target sequence
ggtgcattttttaaagctg

SEQ ID NO: 146800 - DNA, 19 bp, Artificial sequence
  SiRNA target sequence
gtgcattttttaaagctgc

SEQ ID NO: 146801 - DNA, 19 bp, Artificial sequence
  SiRNA target sequence
tgcattttttaaagctgct

SEQ ID NO: 146802 - DNA, 19 bp, Artificial sequence
  SiRNA target sequence
gcattttttaaagctgctc

SEQ ID NO: 146803 - DNA, 19 bp, Artificial sequence
  SiRNA target sequence
cattttttaaagctgctct

SEQ ID NO: 146804 - DNA, 19 bp, Artificial sequence
  SiRNA target sequence
attttttaaagctgctctt

SEQ ID NO: 146805 - DNA, 19 bp, Artificial sequence
  SiRNA target sequence
ttttttaaagctgctctta

SEQ ID NO: 146806 - DNA, 19 bp, Artificial sequence
  SiRNA target sequence
tttttaaagctgctcttag

SEQ ID NO: 146807 - DNA, 19 bp, Artificial sequence
  SiRNA target sequence
ttttaaagctgctcttaga

SEQ ID NO: 146808 - DNA, 19 bp, Artificial sequence
  SiRNA target sequence
tttaaagctgctcttagaa

SEQ ID NO: 146809 - DNA, 19 bp, Artificial sequence
  SiRNA target sequence
ttaaagctgctcttagaaa

SEQ ID NO: 146810 - DNA, 19 bp, Artificial sequence
  SiRNA target sequence
taaagctgctcttagaaaa

SEQ ID NO: 146811 - DNA, 19 bp, Artificial sequence
  SiRNA target sequence
aaagctgctcttagaaaat

SEQ ID NO: 146812 - DNA, 19 bp, Artificial sequence
  SiRNA target sequence
aagctgctcttagaaaatg

SEQ ID NO: 146813 - DNA, 19 bp, Artificial sequence
  SiRNA target sequence
agctgctcttagaaaatgt

SEQ ID NO: 146814 - DNA, 19 bp, Artificial sequence
  SiRNA target sequence
gctgctcttagaaaatgta

SEQ ID NO: 146815 - DNA, 19 bp, Artificial sequence
  SiRNA target sequence
ctgctcttagaaaatgtaa

SEQ ID NO: 146816 - DNA, 19 bp, Artificial sequence
  SiRNA target sequence
tgctcttagaaaatgtaaa

SEQ ID NO: 146817 - DNA, 19 bp, Artificial sequence
  SiRNA target sequence
gctcttagaaaatgtaaaa

SEQ ID NO: 146818 - DNA, 19 bp, Artificial sequence
  SiRNA target sequence
ctcttagaaaatgtaaaac

SEQ ID NO: 146819 - DNA, 19 bp, Artificial sequence
  SiRNA target sequence
tcttagaaaatgtaaaaca

SEQ ID NO: 146820 - DNA, 19 bp, Artificial sequence
  SiRNA target sequence
cttagaaaatgtaaaacag

SEQ ID NO: 146821 - DNA, 19 bp, Artificial sequence
  SiRNA target sequence
ttagaaaatgtaaaacaga

SEQ ID NO: 146822 - DNA, 19 bp, Artificial sequence
  SiRNA target sequence
tagaaaatgtaaaacagat

SEQ ID NO: 146823 - DNA, 19 bp, Artificial sequence
  SiRNA target sequence
agaaaatgtaaaacagatg

SEQ ID NO: 146824 - DNA, 19 bp, Artificial sequence
  SiRNA target sequence
gaaaatgtaaaacagatga

SEQ ID NO: 146825 - DNA, 19 bp, Artificial sequence
  SiRNA target sequence
aaaatgtaaaacagatgaa

SEQ ID NO: 146826 - DNA, 19 bp, Artificial sequence
  SiRNA target sequence
aaatgtaaaacagatgaag

SEQ ID NO: 146827 - DNA, 19 bp, Artificial sequence
  SiRNA target sequence
aatgtaaaacagatgaaga

SEQ ID NO: 146828 - DNA, 19 bp, Artificial sequence
  SiRNA target sequence
atgtaaaacagatgaagaa

SEQ ID NO: 146829 - DNA, 19 bp, Artificial sequence
  SiRNA target sequence
tgtaaaacagatgaagaaa

SEQ ID NO: 146830 - DNA, 19 bp, Artificial sequence
  SiRNA target sequence
gtaaaacagatgaagaaag

SEQ ID NO: 146831 - DNA, 19 bp, Artificial sequence
  SiRNA target sequence
taaaacagatgaagaaaga

SEQ ID NO: 146832 - DNA, 19 bp, Artificial sequence
  SiRNA target sequence
aaaacagatgaagaaagag

SEQ ID NO: 146833 - DNA, 19 bp, Artificial sequence
  SiRNA target sequence
aaacagatgaagaaagagc

SEQ ID NO: 146834 - DNA, 19 bp, Artificial sequence
  SiRNA target sequence
aacagatgaagaaagagca

SEQ ID NO: 146835 - DNA, 19 bp, Artificial sequence
  SiRNA target sequence
acagatgaagaaagagcaa

SEQ ID NO: 146836 - DNA, 19 bp, Artificial sequence
  SiRNA target sequence
cagatgaagaaagagcaaa

SEQ ID NO: 146837 - DNA, 19 bp, Artificial sequence
  SiRNA target sequence
agatgaagaaagagcaaaa

SEQ ID NO: 146838 - DNA, 19 bp, Artificial sequence
  SiRNA target sequence
gatgaagaaagagcaaaag

SEQ ID NO: 146839 - DNA, 19 bp, Artificial sequence
  SiRNA target sequence
atgaagaaagagcaaaagt

SEQ ID NO: 146840 - DNA, 19 bp, Artificial sequence
  SiRNA target sequence
tgaagaaagagcaaaagtt

SEQ ID NO: 146841 - DNA, 19 bp, Artificial sequence
  SiRNA target sequence
gaagaaagagcaaaagttg

SEQ ID NO: 146842 - DNA, 19 bp, Artificial sequence
  SiRNA target sequence
aagaaagagcaaaagttga

SEQ ID NO: 146843 - DNA, 19 bp, Artificial sequence
  SiRNA target sequence
agaaagagcaaaagttgaa

SEQ ID NO: 146844 - DNA, 19 bp, Artificial sequence
  SiRNA target sequence
gaaagagcaaaagttgaaa

SEQ ID NO: 146845 - DNA, 19 bp, Artificial sequence
  SiRNA target sequence
aaagagcaaaagttgaaaa

SEQ ID NO: 146846 - DNA, 19 bp, Artificial sequence
  SiRNA target sequence
aagagcaaaagttgaaaaa

SEQ ID NO: 146847 - DNA, 19 bp, Artificial sequence
  SiRNA target sequence
agagcaaaagttgaaaaag

SEQ ID NO: 146848 - DNA, 19 bp, Artificial sequence
  SiRNA target sequence
gagcaaaagttgaaaaaga

SEQ ID NO: 146849 - DNA, 19 bp, Artificial sequence
  SiRNA target sequence
agcaaaagttgaaaaagaa

SEQ ID NO: 146850 - DNA, 19 bp, Artificial sequence
  SiRNA target sequence
gcaaaagttgaaaaagaat

SEQ ID NO: 146851 - DNA, 19 bp, Artificial sequence
  SiRNA target sequence
caaaagttgaaaaagaatt

SEQ ID NO: 146852 - DNA, 19 bp, Artificial sequence
  SiRNA target sequence
aaaagttgaaaaagaattt

SEQ ID NO: 146853 - DNA, 19 bp, Artificial sequence
  SiRNA target sequence
aaagttgaaaaagaattta

SEQ ID NO: 146854 - DNA, 19 bp, Artificial sequence
  SiRNA target sequence
aagttgaaaaagaatttaa

SEQ ID NO: 146855 - DNA, 19 bp, Artificial sequence
  SiRNA target sequence
agttgaaaaagaatttaaa

SEQ ID NO: 146856 - DNA, 19 bp, Artificial sequence
  SiRNA target sequence
gttgaaaaagaatttaaag

SEQ ID NO: 146857 - DNA, 19 bp, Artificial sequence
  SiRNA target sequence
ttgaaaaagaatttaaaga

SEQ ID NO: 146858 - DNA, 19 bp, Artificial sequence
  SiRNA target sequence
tgaaaaagaatttaaagaa

SEQ ID NO: 146859 - DNA, 19 bp, Artificial sequence
  SiRNA target sequence
gaaaaagaatttaaagaaa

SEQ ID NO: 146860 - DNA, 19 bp, Artificial sequence
  SiRNA target sequence
aaaaagaatttaaagaaaa

SEQ ID NO: 146861 - DNA, 19 bp, Artificial sequence
  SiRNA target sequence
aaaagaatttaaagaaaaa

SEQ ID NO: 146862 - DNA, 19 bp, Artificial sequence
  SiRNA target sequence
aaagaatttaaagaaaaat

SEQ ID NO: 146863 - DNA, 19 bp, Artificial sequence
  SiRNA target sequence
aagaatttaaagaaaaatc

SEQ ID NO: 146864 - DNA, 19 bp, Artificial sequence
  SiRNA target sequence
agaatttaaagaaaaatca

SEQ ID NO: 146865 - DNA, 19 bp, Artificial sequence
  SiRNA target sequence
gaatttaaagaaaaatcac

SEQ ID NO: 146866 - DNA, 19 bp, Artificial sequence
  SiRNA target sequence
aatttaaagaaaaatcaca

SEQ ID NO: 146867 - DNA, 19 bp, Artificial sequence
  SiRNA target sequence
atttaaagaaaaatcacaa

SEQ ID NO: 146868 - DNA, 19 bp, Artificial sequence
  SiRNA target sequence
tttaaagaaaaatcacaaa

SEQ ID NO: 146869 - DNA, 19 bp, Artificial sequence
  SiRNA target sequence
ttaaagaaaaatcacaaaa

SEQ ID NO: 146870 - DNA, 19 bp, Artificial sequence
  SiRNA target sequence
taaagaaaaatcacaaaaa

SEQ ID NO: 146871 - DNA, 19 bp, Artificial sequence
  SiRNA target sequence
aaagaaaaatcacaaaaat

SEQ ID NO: 146872 - DNA, 19 bp, Artificial sequence
  SiRNA target sequence
aagaaaaatcacaaaaatg

SEQ ID NO: 146873 - DNA, 19 bp, Artificial sequence
  SiRNA target sequence
agaaaaatcacaaaaatgt

SEQ ID NO: 146874 - DNA, 19 bp, Artificial sequence
  SiRNA target sequence
gaaaaatcacaaaaatgta

SEQ ID NO: 146875 - DNA, 19 bp, Artificial sequence
  SiRNA target sequence
aaaaatcacaaaaatgtaa

SEQ ID NO: 146876 - DNA, 19 bp, Artificial sequence
  SiRNA target sequence
aaaatcacaaaaatgtaat

SEQ ID NO: 146877 - DNA, 19 bp, Artificial sequence
  SiRNA target sequence
aaatcacaaaaatgtaatc

SEQ ID NO: 146878 - DNA, 19 bp, Artificial sequence
  SiRNA target sequence
aatcacaaaaatgtaatca

SEQ ID NO: 146879 - DNA, 19 bp, Artificial sequence
  SiRNA target sequence
atcacaaaaatgtaatcaa

SEQ ID NO: 146880 - DNA, 19 bp, Artificial sequence
  SiRNA target sequence
tcacaaaaatgtaatcaag

SEQ ID NO: 146881 - DNA, 19 bp, Artificial sequence
  SiRNA target sequence
cacaaaaatgtaatcaagc

SEQ ID NO: 146882 - DNA, 19 bp, Artificial sequence
  SiRNA target sequence
acaaaaatgtaatcaagct

SEQ ID NO: 146883 - DNA, 19 bp, Artificial sequence
  SiRNA target sequence
caaaaatgtaatcaagcta

SEQ ID NO: 146884 - DNA, 19 bp, Artificial sequence
  SiRNA target sequence
aaaaatgtaatcaagctaa

SEQ ID NO: 146885 - DNA, 19 bp, Artificial sequence
  SiRNA target sequence
aaaatgtaatcaagctaaa

SEQ ID NO: 146886 - DNA, 19 bp, Artificial sequence
  SiRNA target sequence
aaatgtaatcaagctaaag

SEQ ID NO: 146887 - DNA, 19 bp, Artificial sequence
  SiRNA target sequence
aatgtaatcaagctaaagc

SEQ ID NO: 146888 - DNA, 19 bp, Artificial sequence
  SiRNA target sequence
atgtaatcaagctaaagca

SEQ ID NO: 146889 - DNA, 19 bp, Artificial sequence
  SiRNA target sequence
tgtaatcaagctaaagcag

SEQ ID NO: 146890 - DNA, 19 bp, Artificial sequence
  SiRNA target sequence
gtaatcaagctaaagcagt

SEQ ID NO: 146891 - DNA, 19 bp, Artificial sequence
  SiRNA target sequence
taatcaagctaaagcagtt

SEQ ID NO: 146892 - DNA, 19 bp, Artificial sequence
  SiRNA target sequence
aatcaagctaaagcagttt

SEQ ID NO: 146893 - DNA, 19 bp, Artificial sequence
  SiRNA target sequence
atcaagctaaagcagtttt

SEQ ID NO: 146894 - DNA, 19 bp, Artificial sequence
  SiRNA target sequence
tcaagctaaagcagtttta

SEQ ID NO: 146895 - DNA, 19 bp, Artificial sequence
  SiRNA target sequence
caagctaaagcagttttat

SEQ ID NO: 146896 - DNA, 19 bp, Artificial sequence
  SiRNA target sequence
aagctaaagcagttttatt

SEQ ID NO: 146897 - DNA, 19 bp, Artificial sequence
  SiRNA target sequence
agctaaagcagttttattt

SEQ ID NO: 146898 - DNA, 19 bp, Artificial sequence
  SiRNA target sequence
gctaaagcagttttatttg

SEQ ID NO: 146899 - DNA, 19 bp, Artificial sequence
  SiRNA target sequence
ctaaagcagttttatttga

SEQ ID NO: 146900 - DNA, 19 bp, Artificial sequence
  SiRNA target sequence
taaagcagttttatttgat

SEQ ID NO: 146901 - DNA, 19 bp, Artificial sequence
  SiRNA target sequence
aaagcagttttatttgatg

SEQ ID NO: 146902 - DNA, 19 bp, Artificial sequence
  SiRNA target sequence
aagcagttttatttgatga

SEQ ID NO: 146903 - DNA, 19 bp, Artificial sequence
  SiRNA target sequence
agcagttttatttgatgag

SEQ ID NO: 146904 - DNA, 19 bp, Artificial sequence
  SiRNA target sequence
gcagttttatttgatgaga

SEQ ID NO: 146905 - DNA, 19 bp, Artificial sequence
  SiRNA target sequence
cagttttatttgatgagaa

SEQ ID NO: 146906 - DNA, 19 bp, Artificial sequence
  SiRNA target sequence
agttttatttgatgagaaa

SEQ ID NO: 146907 - DNA, 19 bp, Artificial sequence
  SiRNA target sequence
gttttatttgatgagaaaa

SEQ ID NO: 146908 - DNA, 19 bp, Artificial sequence
  SiRNA target sequence
ttttatttgatgagaaaaa

SEQ ID NO: 146909 - DNA, 19 bp, Artificial sequence
  SiRNA target sequence
tttatttgatgagaaaaaa

SEQ ID NO: 146910 - DNA, 19 bp, Artificial sequence
  SiRNA target sequence
ttatttgatgagaaaaaaa

SEQ ID NO: 146911 - DNA, 19 bp, Artificial sequence
  SiRNA target sequence
tatttgatgagaaaaaaaa

SEQ ID NO: 146912 - DNA, 19 bp, Artificial sequence
  SiRNA target sequence
atttgatgagaaaaaaaag

SEQ ID NO: 146913 - DNA, 19 bp, Artificial sequence
  SiRNA target sequence
tttgatgagaaaaaaaagc

SEQ ID NO: 146914 - DNA, 19 bp, Artificial sequence
  SiRNA target sequence
ttgatgagaaaaaaaagca

SEQ ID NO: 146915 - DNA, 19 bp, Artificial sequence
  SiRNA target sequence
tgatgagaaaaaaaagcaa

SEQ ID NO: 146916 - DNA, 19 bp, Artificial sequence
  SiRNA target sequence
gatgagaaaaaaaagcaag

SEQ ID NO: 146917 - DNA, 19 bp, Artificial sequence
  SiRNA target sequence
atgagaaaaaaaagcaaga

SEQ ID NO: 146918 - DNA, 19 bp, Artificial sequence
  SiRNA target sequence
tgagaaaaaaaagcaagag

SEQ ID NO: 146919 - DNA, 19 bp, Artificial sequence
  SiRNA target sequence
gagaaaaaaaagcaagagt

SEQ ID NO: 146920 - DNA, 19 bp, Artificial sequence
  SiRNA target sequence
agaaaaaaaagcaagagta

SEQ ID NO: 146921 - DNA, 19 bp, Artificial sequence
  SiRNA target sequence
gaaaaaaaagcaagagtat

SEQ ID NO: 146922 - DNA, 19 bp, Artificial sequence
  SiRNA target sequence
aaaaaaaagcaagagtatg

SEQ ID NO: 146923 - DNA, 19 bp, Artificial sequence
  SiRNA target sequence
aaaaaaagcaagagtatga

SEQ ID NO: 146924 - DNA, 19 bp, Artificial sequence
  SiRNA target sequence
aaaaaagcaagagtatgat

SEQ ID NO: 146925 - DNA, 19 bp, Artificial sequence
  SiRNA target sequence
aaaaagcaagagtatgata

SEQ ID NO: 146926 - DNA, 19 bp, Artificial sequence
  SiRNA target sequence
aaaagcaagagtatgatat

SEQ ID NO: 146927 - DNA, 19 bp, Artificial sequence
  SiRNA target sequence
aaagcaagagtatgatatg

SEQ ID NO: 146928 - DNA, 19 bp, Artificial sequence
  SiRNA target sequence
aagcaagagtatgatatgg

SEQ ID NO: 146929 - DNA, 19 bp, Artificial sequence
  SiRNA target sequence
agcaagagtatgatatggg

SEQ ID NO: 146930 - DNA, 19 bp, Artificial sequence
  SiRNA target sequence
gcaagagtatgatatggga

SEQ ID NO: 146931 - DNA, 19 bp, Artificial sequence
  SiRNA target sequence
caagagtatgatatgggaa

SEQ ID NO: 146932 - DNA, 19 bp, Artificial sequence
  SiRNA target sequence
aagagtatgatatgggaat

SEQ ID NO: 146933 - DNA, 19 bp, Artificial sequence
  SiRNA target sequence
agagtatgatatgggaatg

SEQ ID NO: 146934 - DNA, 19 bp, Artificial sequence
  SiRNA target sequence
gagtatgatatgggaatga

SEQ ID NO: 146935 - DNA, 19 bp, Artificial sequence
  SiRNA target sequence
agtatgatatgggaatgac

SEQ ID NO: 146936 - DNA, 19 bp, Artificial sequence
  SiRNA target sequence
gtatgatatgggaatgact

SEQ ID NO: 146937 - DNA, 19 bp, Artificial sequence
  SiRNA target sequence
tatgatatgggaatgactg

SEQ ID NO: 146938 - DNA, 19 bp, Artificial sequence
  SiRNA target sequence
atgatatgggaatgactgg

SEQ ID NO: 146939 - DNA, 19 bp, Artificial sequence
  SiRNA target sequence
tgatatgggaatgactggc

SEQ ID NO: 146940 - DNA, 19 bp, Artificial sequence
  SiRNA target sequence
gatatgggaatgactggcg

SEQ ID NO: 146941 - DNA, 19 bp, Artificial sequence
  SiRNA target sequence
atatgggaatgactggcga

SEQ ID NO: 146942 - DNA, 19 bp, Artificial sequence
  SiRNA target sequence
tatgggaatgactggcgat

SEQ ID NO: 146943 - DNA, 19 bp, Artificial sequence
  SiRNA target sequence
atgggaatgactggcgatt

SEQ ID NO: 146944 - DNA, 19 bp, Artificial sequence
  SiRNA target sequence
tgggaatgactggcgattt

SEQ ID NO: 146945 - DNA, 19 bp, Artificial sequence
  SiRNA target sequence
gggaatgactggcgatttt

SEQ ID NO: 146946 - DNA, 19 bp, Artificial sequence
  SiRNA target sequence
ggaatgactggcgattttg

SEQ ID NO: 146947 - DNA, 19 bp, Artificial sequence
  SiRNA target sequence
gaatgactggcgattttgg

SEQ ID NO: 146948 - DNA, 19 bp, Artificial sequence
  SiRNA target sequence
aatgactggcgattttgga

SEQ ID NO: 146949 - DNA, 19 bp, Artificial sequence
  SiRNA target sequence
atgactggcgattttggat

SEQ ID NO: 146950 - DNA, 19 bp, Artificial sequence
  SiRNA target sequence
tgactggcgattttggatt

SEQ ID NO: 146951 - DNA, 19 bp, Artificial sequence
  SiRNA target sequence
gactggcgattttggattt

SEQ ID NO: 146952 - DNA, 19 bp, Artificial sequence
  SiRNA target sequence
actggcgattttggatttt

SEQ ID NO: 146953 - DNA, 19 bp, Artificial sequence
  SiRNA target sequence
ctggcgattttggattttc

SEQ ID NO: 146954 - DNA, 19 bp, Artificial sequence
  SiRNA target sequence
tggcgattttggattttct

SEQ ID NO: 146955 - DNA, 19 bp, Artificial sequence
  SiRNA target sequence
ggcgattttggattttctg

SEQ ID NO: 146956 - DNA, 19 bp, Artificial sequence
  SiRNA target sequence
gcgattttggattttctgc

SEQ ID NO: 146957 - DNA, 19 bp, Artificial sequence
  SiRNA target sequence
cgattttggattttctgca

SEQ ID NO: 146958 - DNA, 19 bp, Artificial sequence
  SiRNA target sequence
gattttggattttctgcag

SEQ ID NO: 146959 - DNA, 19 bp, Artificial sequence
  SiRNA target sequence
attttggattttctgcagg

SEQ ID NO: 146960 - DNA, 19 bp, Artificial sequence
  SiRNA target sequence
ttttggattttctgcaggt

SEQ ID NO: 146961 - DNA, 19 bp, Artificial sequence
  SiRNA target sequence
tttggattttctgcaggtg

SEQ ID NO: 146962 - DNA, 19 bp, Artificial sequence
  SiRNA target sequence
ttggattttctgcaggtgg

SEQ ID NO: 146963 - DNA, 19 bp, Artificial sequence
  SiRNA target sequence
tggattttctgcaggtggt

SEQ ID NO: 146964 - DNA, 19 bp, Artificial sequence
  SiRNA target sequence
ggattttctgcaggtggtg

SEQ ID NO: 146965 - DNA, 19 bp, Artificial sequence
  SiRNA target sequence
gattttctgcaggtggtgg

SEQ ID NO: 146966 - DNA, 19 bp, Artificial sequence
  SiRNA target sequence
attttctgcaggtggtgga

SEQ ID NO: 146967 - DNA, 19 bp, Artificial sequence
  SiRNA target sequence
ttttctgcaggtggtggag

SEQ ID NO: 146968 - DNA, 19 bp, Artificial sequence
  SiRNA target sequence
tttctgcaggtggtggaga

SEQ ID NO: 146969 - DNA, 19 bp, Artificial sequence
  SiRNA target sequence
ttctgcaggtggtggagac

SEQ ID NO: 146970 - DNA, 19 bp, Artificial sequence
  SiRNA target sequence
tctgcaggtggtggagact

SEQ ID NO: 146971 - DNA, 19 bp, Artificial sequence
  SiRNA target sequence
ctgcaggtggtggagactt

SEQ ID NO: 146972 - DNA, 19 bp, Artificial sequence
  SiRNA target sequence
tgcaggtggtggagacttt

SEQ ID NO: 146973 - DNA, 19 bp, Artificial sequence
  SiRNA target sequence
gcaggtggtggagactttt

SEQ ID NO: 146974 - DNA, 19 bp, Artificial sequence
  SiRNA target sequence
caggtggtggagacttttt

SEQ ID NO: 146975 - DNA, 19 bp, Artificial sequence
  SiRNA target sequence
aggtggtggagactttttc

SEQ ID NO: 146976 - DNA, 19 bp, Artificial sequence
  SiRNA target sequence
ggtggtggagactttttcg

SEQ ID NO: 146977 - DNA, 19 bp, Artificial sequence
  SiRNA target sequence
gtggtggagactttttcga

SEQ ID NO: 146978 - DNA, 19 bp, Artificial sequence
  SiRNA target sequence
tggtggagactttttcgat

SEQ ID NO: 146979 - DNA, 19 bp, Artificial sequence
  SiRNA target sequence
ggtggagactttttcgata

SEQ ID NO: 146980 - DNA, 19 bp, Artificial sequence
  SiRNA target sequence
gtggagactttttcgatat

SEQ ID NO: 146981 - DNA, 19 bp, Artificial sequence
  SiRNA target sequence
tggagactttttcgatatt

SEQ ID NO: 146982 - DNA, 19 bp, Artificial sequence
  SiRNA target sequence
ggagactttttcgatattt

SEQ ID NO: 146983 - DNA, 19 bp, Artificial sequence
  SiRNA target sequence
gagactttttcgatatttt

SEQ ID NO: 146984 - DNA, 19 bp, Artificial sequence
  SiRNA target sequence
agactttttcgatattttt

SEQ ID NO: 146985 - DNA, 19 bp, Artificial sequence
  SiRNA target sequence
gactttttcgatatttttt

SEQ ID NO: 146986 - DNA, 19 bp, Artificial sequence
  SiRNA target sequence
actttttcgatattttttc

SEQ ID NO: 146987 - DNA, 19 bp, Artificial sequence
  SiRNA target sequence
ctttttcgatattttttca

SEQ ID NO: 146988 - DNA, 19 bp, Artificial sequence
  SiRNA target sequence
tttttcgatattttttcaa

SEQ ID NO: 146989 - DNA, 19 bp, Artificial sequence
  SiRNA target sequence
ttttcgatattttttcaag

SEQ ID NO: 146990 - DNA, 19 bp, Artificial sequence
  SiRNA target sequence
tttcgatattttttcaagt

SEQ ID NO: 146991 - DNA, 19 bp, Artificial sequence
  SiRNA target sequence
ttcgatattttttcaagtt

SEQ ID NO: 146992 - DNA, 19 bp, Artificial sequence
  SiRNA target sequence
tcgatattttttcaagttt

SEQ ID NO: 146993 - DNA, 19 bp, Artificial sequence
  SiRNA target sequence
cgatattttttcaagtttt

SEQ ID NO: 146994 - DNA, 19 bp, Artificial sequence
  SiRNA target sequence
gatattttttcaagtttta

SEQ ID NO: 146995 - DNA, 19 bp, Artificial sequence
  SiRNA target sequence
atattttttcaagttttac

SEQ ID NO: 146996 - DNA, 19 bp, Artificial sequence
  SiRNA target sequence
tattttttcaagttttact

SEQ ID NO: 146997 - DNA, 19 bp, Artificial sequence
  SiRNA target sequence
attttttcaagttttactg

SEQ ID NO: 146998 - DNA, 19 bp, Artificial sequence
  SiRNA target sequence
ttttttcaagttttactgg

SEQ ID NO: 146999 - DNA, 19 bp, Artificial sequence
  SiRNA target sequence
tttttcaagttttactggt

SEQ ID NO: 147000 - DNA, 19 bp, Artificial sequence
  SiRNA target sequence
ttttcaagttttactggtg

SEQ ID NO: 147001 - DNA, 19 bp, Artificial sequence
  SiRNA target sequence
tttcaagttttactggtgg

SEQ ID NO: 147002 - DNA, 19 bp, Artificial sequence
  SiRNA target sequence
ttcaagttttactggtgga

SEQ ID NO: 147003 - DNA, 19 bp, Artificial sequence
  SiRNA target sequence
tcaagttttactggtggag

SEQ ID NO: 147004 - DNA, 19 bp, Artificial sequence
  SiRNA target sequence
caagttttactggtggagg

SEQ ID NO: 147005 - DNA, 19 bp, Artificial sequence
  SiRNA target sequence
aagttttactggtggagga

SEQ ID NO: 147006 - DNA, 19 bp, Artificial sequence
  SiRNA target sequence
agttttactggtggaggaa

SEQ ID NO: 147007 - DNA, 19 bp, Artificial sequence
  SiRNA target sequence
gttttactggtggaggaag

SEQ ID NO: 147008 - DNA, 19 bp, Artificial sequence
  SiRNA target sequence
ttttactggtggaggaaga

SEQ ID NO: 147009 - DNA, 19 bp, Artificial sequence
  SiRNA target sequence
tttactggtggaggaagaa

SEQ ID NO: 147010 - DNA, 19 bp, Artificial sequence
  SiRNA target sequence
ttactggtggaggaagaag

SEQ ID NO: 147011 - DNA, 19 bp, Artificial sequence
  SiRNA target sequence
tactggtggaggaagaaga

SEQ ID NO: 147012 - DNA, 19 bp, Artificial sequence
  SiRNA target sequence
actggtggaggaagaagaa

SEQ ID NO: 147013 - DNA, 19 bp, Artificial sequence
  SiRNA target sequence
ctggtggaggaagaagaaa

SEQ ID NO: 147014 - DNA, 19 bp, Artificial sequence
  SiRNA target sequence
tggtggaggaagaagaaat

SEQ ID NO: 147015 - DNA, 19 bp, Artificial sequence
  SiRNA target sequence
ggtggaggaagaagaaatc

SEQ ID NO: 147016 - DNA, 19 bp, Artificial sequence
  SiRNA target sequence
gtggaggaagaagaaatcg

SEQ ID NO: 147017 - DNA, 19 bp, Artificial sequence
  SiRNA target sequence
tggaggaagaagaaatcga

SEQ ID NO: 147018 - DNA, 19 bp, Artificial sequence
  SiRNA target sequence
ggaggaagaagaaatcgag

SEQ ID NO: 147019 - DNA, 19 bp, Artificial sequence
  SiRNA target sequence
gaggaagaagaaatcgagt

SEQ ID NO: 147020 - DNA, 19 bp, Artificial sequence
  SiRNA target sequence
aggaagaagaaatcgagta

SEQ ID NO: 147021 - DNA, 19 bp, Artificial sequence
  SiRNA target sequence
ggaagaagaaatcgagtac

SEQ ID NO: 147022 - DNA, 19 bp, Artificial sequence
  SiRNA target sequence
gaagaagaaatcgagtaca

SEQ ID NO: 147023 - DNA, 19 bp, Artificial sequence
  SiRNA target sequence
aagaagaaatcgagtacaa

SEQ ID NO: 147024 - DNA, 19 bp, Artificial sequence
  SiRNA target sequence
agaagaaatcgagtacaaa

SEQ ID NO: 147025 - DNA, 19 bp, Artificial sequence
  SiRNA target sequence
gaagaaatcgagtacaaaa

SEQ ID NO: 147026 - DNA, 19 bp, Artificial sequence
  SiRNA target sequence
aagaaatcgagtacaaaaa

SEQ ID NO: 147027 - DNA, 19 bp, Artificial sequence
  SiRNA target sequence
agaaatcgagtacaaaaag

SEQ ID NO: 147028 - DNA, 19 bp, Artificial sequence
  SiRNA target sequence
gaaatcgagtacaaaaagt

SEQ ID NO: 147029 - DNA, 19 bp, Artificial sequence
  SiRNA target sequence
aaatcgagtacaaaaagtt

SEQ ID NO: 147030 - DNA, 19 bp, Artificial sequence
  SiRNA target sequence
aatcgagtacaaaaagttc

SEQ ID NO: 147031 - DNA, 19 bp, Artificial sequence
  SiRNA target sequence
atcgagtacaaaaagttca

SEQ ID NO: 147032 - DNA, 19 bp, Artificial sequence
  SiRNA target sequence
tcgagtacaaaaagttcaa

SEQ ID NO: 147033 - DNA, 19 bp, Artificial sequence
  SiRNA target sequence
cgagtacaaaaagttcaag

SEQ ID NO: 147034 - DNA, 19 bp, Artificial sequence
  SiRNA target sequence
gagtacaaaaagttcaaga

SEQ ID NO: 147035 - DNA, 19 bp, Artificial sequence
  SiRNA target sequence
agtacaaaaagttcaagat

SEQ ID NO: 147036 - DNA, 19 bp, Artificial sequence
  SiRNA target sequence
gtacaaaaagttcaagata

SEQ ID NO: 147037 - DNA, 19 bp, Artificial sequence
  SiRNA target sequence
tacaaaaagttcaagatac

SEQ ID NO: 147038 - DNA, 19 bp, Artificial sequence
  SiRNA target sequence
acaaaaagttcaagataca

SEQ ID NO: 147039 - DNA, 19 bp, Artificial sequence
  SiRNA target sequence
caaaaagttcaagatacag

SEQ ID NO: 147040 - DNA, 19 bp, Artificial sequence
  SiRNA target sequence
aaaaagttcaagatacaga

SEQ ID NO: 147041 - DNA, 19 bp, Artificial sequence
  SiRNA target sequence
aaaagttcaagatacagaa

SEQ ID NO: 147042 - DNA, 19 bp, Artificial sequence
  SiRNA target sequence
aaagttcaagatacagaat

SEQ ID NO: 147043 - DNA, 19 bp, Artificial sequence
  SiRNA target sequence
aagttcaagatacagaata

SEQ ID NO: 147044 - DNA, 19 bp, Artificial sequence
  SiRNA target sequence
agttcaagatacagaatac

SEQ ID NO: 147045 - DNA, 19 bp, Artificial sequence
  SiRNA target sequence
gttcaagatacagaatacg

SEQ ID NO: 147046 - DNA, 19 bp, Artificial sequence
  SiRNA target sequence
ttcaagatacagaatacga

SEQ ID NO: 147047 - DNA, 19 bp, Artificial sequence
  SiRNA target sequence
tcaagatacagaatacgag

SEQ ID NO: 147048 - DNA, 19 bp, Artificial sequence
  SiRNA target sequence
caagatacagaatacgagt

SEQ ID NO: 147049 - DNA, 19 bp, Artificial sequence
  SiRNA target sequence
aagatacagaatacgagtt

SEQ ID NO: 147050 - DNA, 19 bp, Artificial sequence
  SiRNA target sequence
agatacagaatacgagttt

SEQ ID NO: 147051 - DNA, 19 bp, Artificial sequence
  SiRNA target sequence
gatacagaatacgagttta

SEQ ID NO: 147052 - DNA, 19 bp, Artificial sequence
  SiRNA target sequence
atacagaatacgagtttaa

SEQ ID NO: 147053 - DNA, 19 bp, Artificial sequence
  SiRNA target sequence
tacagaatacgagtttaat

SEQ ID NO: 147054 - DNA, 19 bp, Artificial sequence
  SiRNA target sequence
acagaatacgagtttaata

SEQ ID NO: 147055 - DNA, 19 bp, Artificial sequence
  SiRNA target sequence
cagaatacgagtttaatat

SEQ ID NO: 147056 - DNA, 19 bp, Artificial sequence
  SiRNA target sequence
agaatacgagtttaatatt

SEQ ID NO: 147057 - DNA, 19 bp, Artificial sequence
  SiRNA target sequence
gaatacgagtttaatattt

SEQ ID NO: 147058 - DNA, 19 bp, Artificial sequence
  SiRNA target sequence
aatacgagtttaatatttc

SEQ ID NO: 147059 - DNA, 19 bp, Artificial sequence
  SiRNA target sequence
atacgagtttaatatttcg

SEQ ID NO: 147060 - DNA, 19 bp, Artificial sequence
  SiRNA target sequence
tacgagtttaatatttcgt

SEQ ID NO: 147061 - DNA, 19 bp, Artificial sequence
  SiRNA target sequence
acgagtttaatatttcgtt

SEQ ID NO: 147062 - DNA, 19 bp, Artificial sequence
  SiRNA target sequence
cgagtttaatatttcgttg

SEQ ID NO: 147063 - DNA, 19 bp, Artificial sequence
  SiRNA target sequence
gagtttaatatttcgttga

SEQ ID NO: 147064 - DNA, 19 bp, Artificial sequence
  SiRNA target sequence
agtttaatatttcgttgaa

SEQ ID NO: 147065 - DNA, 19 bp, Artificial sequence
  SiRNA target sequence
gtttaatatttcgttgaag

SEQ ID NO: 147066 - DNA, 19 bp, Artificial sequence
  SiRNA target sequence
tttaatatttcgttgaagg

SEQ ID NO: 147067 - DNA, 19 bp, Artificial sequence
  SiRNA target sequence
ttaatatttcgttgaagga

SEQ ID NO: 147068 - DNA, 19 bp, Artificial sequence
  SiRNA target sequence
taatatttcgttgaaggaa

SEQ ID NO: 147069 - DNA, 19 bp, Artificial sequence
  SiRNA target sequence
aatatttcgttgaaggaag

SEQ ID NO: 147070 - DNA, 19 bp, Artificial sequence
  SiRNA target sequence
atatttcgttgaaggaagc

SEQ ID NO: 147071 - DNA, 19 bp, Artificial sequence
  SiRNA target sequence
tatttcgttgaaggaagct

SEQ ID NO: 147072 - DNA, 19 bp, Artificial sequence
  SiRNA target sequence
atttcgttgaaggaagctt

SEQ ID NO: 147073 - DNA, 19 bp, Artificial sequence
  SiRNA target sequence
tttcgttgaaggaagctta

SEQ ID NO: 147074 - DNA, 19 bp, Artificial sequence
  SiRNA target sequence
ttcgttgaaggaagcttat

SEQ ID NO: 147075 - DNA, 19 bp, Artificial sequence
  SiRNA target sequence
tcgttgaaggaagcttata

SEQ ID NO: 147076 - DNA, 19 bp, Artificial sequence
  SiRNA target sequence
cgttgaaggaagcttatat

SEQ ID NO: 147077 - DNA, 19 bp, Artificial sequence
  SiRNA target sequence
gttgaaggaagcttatatg

SEQ ID NO: 147078 - DNA, 19 bp, Artificial sequence
  SiRNA target sequence
ttgaaggaagcttatatgg

SEQ ID NO: 147079 - DNA, 19 bp, Artificial sequence
  SiRNA target sequence
tgaaggaagcttatatggg

SEQ ID NO: 147080 - DNA, 19 bp, Artificial sequence
  SiRNA target sequence
gaaggaagcttatatggga

SEQ ID NO: 147081 - DNA, 19 bp, Artificial sequence
  SiRNA target sequence
aaggaagcttatatgggaa

SEQ ID NO: 147082 - DNA, 19 bp, Artificial sequence
  SiRNA target sequence
aggaagcttatatgggaaa

SEQ ID NO: 147083 - DNA, 19 bp, Artificial sequence
  SiRNA target sequence
ggaagcttatatgggaaag

SEQ ID NO: 147084 - DNA, 19 bp, Artificial sequence
  SiRNA target sequence
gaagcttatatgggaaagc

SEQ ID NO: 147085 - DNA, 19 bp, Artificial sequence
  SiRNA target sequence
aagcttatatgggaaagcg

SEQ ID NO: 147086 - DNA, 19 bp, Artificial sequence
  SiRNA target sequence
agcttatatgggaaagcga

SEQ ID NO: 147087 - DNA, 19 bp, Artificial sequence
  SiRNA target sequence
gcttatatgggaaagcgag

SEQ ID NO: 147088 - DNA, 19 bp, Artificial sequence
  SiRNA target sequence
cttatatgggaaagcgagc

SEQ ID NO: 147089 - DNA, 19 bp, Artificial sequence
  SiRNA target sequence
ttatatgggaaagcgagct

SEQ ID NO: 147090 - DNA, 19 bp, Artificial sequence
  SiRNA target sequence
tatatgggaaagcgagcta

SEQ ID NO: 147091 - DNA, 19 bp, Artificial sequence
  SiRNA target sequence
atatgggaaagcgagctag

SEQ ID NO: 147092 - DNA, 19 bp, Artificial sequence
  SiRNA target sequence
tatgggaaagcgagctagt

SEQ ID NO: 147093 - DNA, 19 bp, Artificial sequence
  SiRNA target sequence
atgggaaagcgagctagtt

SEQ ID NO: 147094 - DNA, 19 bp, Artificial sequence
  SiRNA target sequence
tgggaaagcgagctagttt

SEQ ID NO: 147095 - DNA, 19 bp, Artificial sequence
  SiRNA target sequence
gggaaagcgagctagtttt

SEQ ID NO: 147096 - DNA, 19 bp, Artificial sequence
  SiRNA target sequence
ggaaagcgagctagtttta

SEQ ID NO: 147097 - DNA, 19 bp, Artificial sequence
  SiRNA target sequence
gaaagcgagctagttttaa

SEQ ID NO: 147098 - DNA, 19 bp, Artificial sequence
  SiRNA target sequence
aaagcgagctagttttaat

SEQ ID NO: 147099 - DNA, 19 bp, Artificial sequence
  SiRNA target sequence
aagcgagctagttttaatg

SEQ ID NO: 147100 - DNA, 19 bp, Artificial sequence
  SiRNA target sequence
agcgagctagttttaatgt

SEQ ID NO: 147101 - DNA, 19 bp, Artificial sequence
  SiRNA target sequence
gcgagctagttttaatgta

SEQ ID NO: 147102 - DNA, 19 bp, Artificial sequence
  SiRNA target sequence
cgagctagttttaatgtaa

SEQ ID NO: 147103 - DNA, 19 bp, Artificial sequence
  SiRNA target sequence
gagctagttttaatgtaaa

SEQ ID NO: 147104 - DNA, 19 bp, Artificial sequence
  SiRNA target sequence
agctagttttaatgtaaaa

SEQ ID NO: 147105 - DNA, 19 bp, Artificial sequence
  SiRNA target sequence
gctagttttaatgtaaaag

SEQ ID NO: 147106 - DNA, 19 bp, Artificial sequence
  SiRNA target sequence
ctagttttaatgtaaaagt

SEQ ID NO: 147107 - DNA, 19 bp, Artificial sequence
  SiRNA target sequence
tagttttaatgtaaaagtg

SEQ ID NO: 147108 - DNA, 19 bp, Artificial sequence
  SiRNA target sequence
agttttaatgtaaaagtgc

SEQ ID NO: 147109 - DNA, 19 bp, Artificial sequence
  SiRNA target sequence
gttttaatgtaaaagtgca

SEQ ID NO: 147110 - DNA, 19 bp, Artificial sequence
  SiRNA target sequence
ttttaatgtaaaagtgcaa

SEQ ID NO: 147111 - DNA, 19 bp, Artificial sequence
  SiRNA target sequence
tttaatgtaaaagtgcaaa

SEQ ID NO: 147112 - DNA, 19 bp, Artificial sequence
  SiRNA target sequence
ttaatgtaaaagtgcaaag

SEQ ID NO: 147113 - DNA, 19 bp, Artificial sequence
  SiRNA target sequence
taatgtaaaagtgcaaaga

SEQ ID NO: 147114 - DNA, 19 bp, Artificial sequence
  SiRNA target sequence
aatgtaaaagtgcaaagag

SEQ ID NO: 147115 - DNA, 19 bp, Artificial sequence
  SiRNA target sequence
atgtaaaagtgcaaagaga

SEQ ID NO: 147116 - DNA, 19 bp, Artificial sequence
  SiRNA target sequence
tgtaaaagtgcaaagagaa

SEQ ID NO: 147117 - DNA, 19 bp, Artificial sequence
  SiRNA target sequence
gtaaaagtgcaaagagaat

SEQ ID NO: 147118 - DNA, 19 bp, Artificial sequence
  SiRNA target sequence
taaaagtgcaaagagaatg

SEQ ID NO: 147119 - DNA, 19 bp, Artificial sequence
  SiRNA target sequence
aaaagtgcaaagagaatgt

SEQ ID NO: 147120 - DNA, 19 bp, Artificial sequence
  SiRNA target sequence
aaagtgcaaagagaatgtt

SEQ ID NO: 147121 - DNA, 19 bp, Artificial sequence
  SiRNA target sequence
aagtgcaaagagaatgttc

SEQ ID NO: 147122 - DNA, 19 bp, Artificial sequence
  SiRNA target sequence
agtgcaaagagaatgttct

SEQ ID NO: 147123 - DNA, 19 bp, Artificial sequence
  SiRNA target sequence
gtgcaaagagaatgttctg

SEQ ID NO: 147124 - DNA, 19 bp, Artificial sequence
  SiRNA target sequence
tgcaaagagaatgttctgc

SEQ ID NO: 147125 - DNA, 19 bp, Artificial sequence
  SiRNA target sequence
gcaaagagaatgttctgcg

SEQ ID NO: 147126 - DNA, 19 bp, Artificial sequence
  SiRNA target sequence
caaagagaatgttctgcgt

SEQ ID NO: 147127 - DNA, 19 bp, Artificial sequence
  SiRNA target sequence
aaagagaatgttctgcgtg

SEQ ID NO: 147128 - DNA, 19 bp, Artificial sequence
  SiRNA target sequence
aagagaatgttctgcgtgt

SEQ ID NO: 147129 - DNA, 19 bp, Artificial sequence
  SiRNA target sequence
agagaatgttctgcgtgta

SEQ ID NO: 147130 - DNA, 19 bp, Artificial sequence
  SiRNA target sequence
gagaatgttctgcgtgtaa

SEQ ID NO: 147131 - DNA, 19 bp, Artificial sequence
  SiRNA target sequence
agaatgttctgcgtgtaac

SEQ ID NO: 147132 - DNA, 19 bp, Artificial sequence
  SiRNA target sequence
gaatgttctgcgtgtaacg

SEQ ID NO: 147133 - DNA, 19 bp, Artificial sequence
  SiRNA target sequence
aatgttctgcgtgtaacgg

SEQ ID NO: 147134 - DNA, 19 bp, Artificial sequence
  SiRNA target sequence
atgttctgcgtgtaacggt

SEQ ID NO: 147135 - DNA, 19 bp, Artificial sequence
  SiRNA target sequence
tgttctgcgtgtaacggta

SEQ ID NO: 147136 - DNA, 19 bp, Artificial sequence
  SiRNA target sequence
gttctgcgtgtaacggtaa

SEQ ID NO: 147137 - DNA, 19 bp, Artificial sequence
  SiRNA target sequence
ttctgcgtgtaacggtaaa

SEQ ID NO: 147138 - DNA, 19 bp, Artificial sequence
  SiRNA target sequence
tctgcgtgtaacggtaaag

SEQ ID NO: 147139 - DNA, 19 bp, Artificial sequence
  SiRNA target sequence
ctgcgtgtaacggtaaagg

SEQ ID NO: 147140 - DNA, 19 bp, Artificial sequence
  SiRNA target sequence
tgcgtgtaacggtaaagga

SEQ ID NO: 147141 - DNA, 19 bp, Artificial sequence
  SiRNA target sequence
gcgtgtaacggtaaaggag

SEQ ID NO: 147142 - DNA, 19 bp, Artificial sequence
  SiRNA target sequence
cgtgtaacggtaaaggagg

SEQ ID NO: 147143 - DNA, 19 bp, Artificial sequence
  SiRNA target sequence
gtgtaacggtaaaggagga

SEQ ID NO: 147144 - DNA, 19 bp, Artificial sequence
  SiRNA target sequence
tgtaacggtaaaggaggag

SEQ ID NO: 147145 - DNA, 19 bp, Artificial sequence
  SiRNA target sequence
gtaacggtaaaggaggaga

SEQ ID NO: 147146 - DNA, 19 bp, Artificial sequence
  SiRNA target sequence
taacggtaaaggaggagac

SEQ ID NO: 147147 - DNA, 19 bp, Artificial sequence
  SiRNA target sequence
aacggtaaaggaggagaca

SEQ ID NO: 147148 - DNA, 19 bp, Artificial sequence
  SiRNA target sequence
acggtaaaggaggagacag

SEQ ID NO: 147149 - DNA, 19 bp, Artificial sequence
  SiRNA target sequence
cggtaaaggaggagacagt

SEQ ID NO: 147150 - DNA, 19 bp, Artificial sequence
  SiRNA target sequence
ggtaaaggaggagacagtg

SEQ ID NO: 147151 - DNA, 19 bp, Artificial sequence
  SiRNA target sequence
gtaaaggaggagacagtgt

SEQ ID NO: 147152 - DNA, 19 bp, Artificial sequence
  SiRNA target sequence
taaaggaggagacagtgtt

SEQ ID NO: 147153 - DNA, 19 bp, Artificial sequence
  SiRNA target sequence
aaaggaggagacagtgttg

SEQ ID NO: 147154 - DNA, 19 bp, Artificial sequence
  SiRNA target sequence
aaggaggagacagtgttga

SEQ ID NO: 147155 - DNA, 19 bp, Artificial sequence
  SiRNA target sequence
aggaggagacagtgttgaa

SEQ ID NO: 147156 - DNA, 19 bp, Artificial sequence
  SiRNA target sequence
ggaggagacagtgttgaaa

SEQ ID NO: 147157 - DNA, 19 bp, Artificial sequence
  SiRNA target sequence
gaggagacagtgttgaaac

SEQ ID NO: 147158 - DNA, 19 bp, Artificial sequence
  SiRNA target sequence
aggagacagtgttgaaaca

SEQ ID NO: 147159 - DNA, 19 bp, Artificial sequence
  SiRNA target sequence
ggagacagtgttgaaacat

SEQ ID NO: 147160 - DNA, 19 bp, Artificial sequence
  SiRNA target sequence
gagacagtgttgaaacatg

SEQ ID NO: 147161 - DNA, 19 bp, Artificial sequence
  SiRNA target sequence
agacagtgttgaaacatgt

SEQ ID NO: 147162 - DNA, 19 bp, Artificial sequence
  SiRNA target sequence
gacagtgttgaaacatgtg

SEQ ID NO: 147163 - DNA, 19 bp, Artificial sequence
  SiRNA target sequence
acagtgttgaaacatgtga

SEQ ID NO: 147164 - DNA, 19 bp, Artificial sequence
  SiRNA target sequence
cagtgttgaaacatgtgaa

SEQ ID NO: 147165 - DNA, 19 bp, Artificial sequence
  SiRNA target sequence
agtgttgaaacatgtgaac

SEQ ID NO: 147166 - DNA, 19 bp, Artificial sequence
  SiRNA target sequence
gtgttgaaacatgtgaacc

SEQ ID NO: 147167 - DNA, 19 bp, Artificial sequence
  SiRNA target sequence
tgttgaaacatgtgaacca

SEQ ID NO: 147168 - DNA, 19 bp, Artificial sequence
  SiRNA target sequence
gttgaaacatgtgaaccat

SEQ ID NO: 147169 - DNA, 19 bp, Artificial sequence
  SiRNA target sequence
ttgaaacatgtgaaccatg

SEQ ID NO: 147170 - DNA, 19 bp, Artificial sequence
  SiRNA target sequence
tgaaacatgtgaaccatgt

SEQ ID NO: 147171 - DNA, 19 bp, Artificial sequence
  SiRNA target sequence
gaaacatgtgaaccatgta

SEQ ID NO: 147172 - DNA, 19 bp, Artificial sequence
  SiRNA target sequence
aaacatgtgaaccatgtaa

SEQ ID NO: 147173 - DNA, 19 bp, Artificial sequence
  SiRNA target sequence
aacatgtgaaccatgtaaa

SEQ ID NO: 147174 - DNA, 19 bp, Artificial sequence
  SiRNA target sequence
acatgtgaaccatgtaaag

SEQ ID NO: 147175 - DNA, 19 bp, Artificial sequence
  SiRNA target sequence
catgtgaaccatgtaaagg

SEQ ID NO: 147176 - DNA, 19 bp, Artificial sequence
  SiRNA target sequence
atgtgaaccatgtaaaggt

SEQ ID NO: 147177 - DNA, 19 bp, Artificial sequence
  SiRNA target sequence
tgtgaaccatgtaaaggta

SEQ ID NO: 147178 - DNA, 19 bp, Artificial sequence
  SiRNA target sequence
gtgaaccatgtaaaggtaa

SEQ ID NO: 147179 - DNA, 19 bp, Artificial sequence
  SiRNA target sequence
tgaaccatgtaaaggtaaa

SEQ ID NO: 147180 - DNA, 19 bp, Artificial sequence
  SiRNA target sequence
gaaccatgtaaaggtaaag

SEQ ID NO: 147181 - DNA, 19 bp, Artificial sequence
  SiRNA target sequence
aaccatgtaaaggtaaagg

SEQ ID NO: 147182 - DNA, 19 bp, Artificial sequence
  SiRNA target sequence
accatgtaaaggtaaaggt

SEQ ID NO: 147183 - DNA, 19 bp, Artificial sequence
  SiRNA target sequence
ccatgtaaaggtaaaggta

SEQ ID NO: 147184 - DNA, 19 bp, Artificial sequence
  SiRNA target sequence
catgtaaaggtaaaggtaa

SEQ ID NO: 147185 - DNA, 19 bp, Artificial sequence
  SiRNA target sequence
atgtaaaggtaaaggtaag

SEQ ID NO: 147186 - DNA, 19 bp, Artificial sequence
  SiRNA target sequence
tgtaaaggtaaaggtaagg

SEQ ID NO: 147187 - DNA, 19 bp, Artificial sequence
  SiRNA target sequence
gtaaaggtaaaggtaaggt

SEQ ID NO: 147188 - DNA, 19 bp, Artificial sequence
  SiRNA target sequence
taaaggtaaaggtaaggta

SEQ ID NO: 147189 - DNA, 19 bp, Artificial sequence
  SiRNA target sequence
aaaggtaaaggtaaggtag

SEQ ID NO: 147190 - DNA, 19 bp, Artificial sequence
  SiRNA target sequence
aaggtaaaggtaaggtaga

SEQ ID NO: 147191 - DNA, 19 bp, Artificial sequence
  SiRNA target sequence
aggtaaaggtaaggtagaa

SEQ ID NO: 147192 - DNA, 19 bp, Artificial sequence
  SiRNA target sequence
ggtaaaggtaaggtagaac

SEQ ID NO: 147193 - DNA, 19 bp, Artificial sequence
  SiRNA target sequence
gtaaaggtaaggtagaaca

SEQ ID NO: 147194 - DNA, 19 bp, Artificial sequence
  SiRNA target sequence
taaaggtaaggtagaacat

SEQ ID NO: 147195 - DNA, 19 bp, Artificial sequence
  SiRNA target sequence
aaaggtaaggtagaacatc

SEQ ID NO: 147196 - DNA, 19 bp, Artificial sequence
  SiRNA target sequence
aaggtaaggtagaacatca

SEQ ID NO: 147197 - DNA, 19 bp, Artificial sequence
  SiRNA target sequence
aggtaaggtagaacatcat

SEQ ID NO: 147198 - DNA, 19 bp, Artificial sequence
  SiRNA target sequence
ggtaaggtagaacatcata

SEQ ID NO: 147199 - DNA, 19 bp, Artificial sequence
  SiRNA target sequence
gtaaggtagaacatcatag

SEQ ID NO: 147200 - DNA, 19 bp, Artificial sequence
  SiRNA target sequence
taaggtagaacatcatagg

SEQ ID NO: 147201 - DNA, 19 bp, Artificial sequence
  SiRNA target sequence
aaggtagaacatcatagga

SEQ ID NO: 147202 - DNA, 19 bp, Artificial sequence
  SiRNA target sequence
aggtagaacatcataggag

SEQ ID NO: 147203 - DNA, 19 bp, Artificial sequence
  SiRNA target sequence
ggtagaacatcataggaga

SEQ ID NO: 147204 - DNA, 19 bp, Artificial sequence
  SiRNA target sequence
gtagaacatcataggagac

SEQ ID NO: 147205 - DNA, 19 bp, Artificial sequence
  SiRNA target sequence
tagaacatcataggagact

SEQ ID NO: 147206 - DNA, 19 bp, Artificial sequence
  SiRNA target sequence
agaacatcataggagacta

SEQ ID NO: 147207 - DNA, 19 bp, Artificial sequence
  SiRNA target sequence
gaacatcataggagactag

SEQ ID NO: 147208 - DNA, 19 bp, Artificial sequence
  SiRNA target sequence
aacatcataggagactagg

SEQ ID NO: 147209 - DNA, 19 bp, Artificial sequence
  SiRNA target sequence
acatcataggagactaggt

SEQ ID NO: 147210 - DNA, 19 bp, Artificial sequence
  SiRNA target sequence
catcataggagactaggtc

SEQ ID NO: 147211 - DNA, 19 bp, Artificial sequence
  SiRNA target sequence
atcataggagactaggtcc

SEQ ID NO: 147212 - DNA, 19 bp, Artificial sequence
  SiRNA target sequence
tcataggagactaggtcct

SEQ ID NO: 147213 - DNA, 19 bp, Artificial sequence
  SiRNA target sequence
cataggagactaggtcctt

SEQ ID NO: 147214 - DNA, 19 bp, Artificial sequence
  SiRNA target sequence
ataggagactaggtccttt

SEQ ID NO: 147215 - DNA, 19 bp, Artificial sequence
  SiRNA target sequence
taggagactaggtccttta

SEQ ID NO: 147216 - DNA, 19 bp, Artificial sequence
  SiRNA target sequence
aggagactaggtcctttaa

SEQ ID NO: 147217 - DNA, 19 bp, Artificial sequence
  SiRNA target sequence
ggagactaggtcctttaat

SEQ ID NO: 147218 - DNA, 19 bp, Artificial sequence
  SiRNA target sequence
gagactaggtcctttaatt

SEQ ID NO: 147219 - DNA, 19 bp, Artificial sequence
  SiRNA target sequence
agactaggtcctttaattt

SEQ ID NO: 147220 - DNA, 19 bp, Artificial sequence
  SiRNA target sequence
gactaggtcctttaatttc

SEQ ID NO: 147221 - DNA, 19 bp, Artificial sequence
  SiRNA target sequence
actaggtcctttaatttct

SEQ ID NO: 147222 - DNA, 19 bp, Artificial sequence
  SiRNA target sequence
ctaggtcctttaatttctg

SEQ ID NO: 147223 - DNA, 19 bp, Artificial sequence
  SiRNA target sequence
taggtcctttaatttctgt

SEQ ID NO: 147224 - DNA, 19 bp, Artificial sequence
  SiRNA target sequence
aggtcctttaatttctgta

SEQ ID NO: 147225 - DNA, 19 bp, Artificial sequence
  SiRNA target sequence
ggtcctttaatttctgtac

SEQ ID NO: 147226 - DNA, 19 bp, Artificial sequence
  SiRNA target sequence
gtcctttaatttctgtaca

SEQ ID NO: 147227 - DNA, 19 bp, Artificial sequence
  SiRNA target sequence
tcctttaatttctgtacaa

SEQ ID NO: 147228 - DNA, 19 bp, Artificial sequence
  SiRNA target sequence
cctttaatttctgtacaag

SEQ ID NO: 147229 - DNA, 19 bp, Artificial sequence
  SiRNA target sequence
ctttaatttctgtacaaga

SEQ ID NO: 147230 - DNA, 19 bp, Artificial sequence
  SiRNA target sequence
tttaatttctgtacaagaa

SEQ ID NO: 147231 - DNA, 19 bp, Artificial sequence
  SiRNA target sequence
ttaatttctgtacaagaag

SEQ ID NO: 147232 - DNA, 19 bp, Artificial sequence
  SiRNA target sequence
taatttctgtacaagaagc

SEQ ID NO: 147233 - DNA, 19 bp, Artificial sequence
  SiRNA target sequence
aatttctgtacaagaagca

SEQ ID NO: 147234 - DNA, 19 bp, Artificial sequence
  SiRNA target sequence
atttctgtacaagaagcac

SEQ ID NO: 147235 - DNA, 19 bp, Artificial sequence
  SiRNA target sequence
tttctgtacaagaagcacc

SEQ ID NO: 147236 - DNA, 19 bp, Artificial sequence
  SiRNA target sequence
ttctgtacaagaagcacct

SEQ ID NO: 147237 - DNA, 19 bp, Artificial sequence
  SiRNA target sequence
tctgtacaagaagcacctt

SEQ ID NO: 147238 - DNA, 19 bp, Artificial sequence
  SiRNA target sequence
ctgtacaagaagcaccttg

SEQ ID NO: 147239 - DNA, 19 bp, Artificial sequence
  SiRNA target sequence
tgtacaagaagcaccttgt

SEQ ID NO: 147240 - DNA, 19 bp, Artificial sequence
  SiRNA target sequence
gtacaagaagcaccttgta

SEQ ID NO: 147241 - DNA, 19 bp, Artificial sequence
  SiRNA target sequence
tacaagaagcaccttgtaa

SEQ ID NO: 147242 - DNA, 19 bp, Artificial sequence
  SiRNA target sequence
acaagaagcaccttgtaat

SEQ ID NO: 147243 - DNA, 19 bp, Artificial sequence
  SiRNA target sequence
caagaagcaccttgtaata

SEQ ID NO: 147244 - DNA, 19 bp, Artificial sequence
  SiRNA target sequence
aagaagcaccttgtaataa

SEQ ID NO: 147245 - DNA, 19 bp, Artificial sequence
  SiRNA target sequence
agaagcaccttgtaataat

SEQ ID NO: 147246 - DNA, 19 bp, Artificial sequence
  SiRNA target sequence
gaagcaccttgtaataatt

SEQ ID NO: 147247 - DNA, 19 bp, Artificial sequence
  SiRNA target sequence
aagcaccttgtaataattg

SEQ ID NO: 147248 - DNA, 19 bp, Artificial sequence
  SiRNA target sequence
agcaccttgtaataattgt

SEQ ID NO: 147249 - DNA, 19 bp, Artificial sequence
  SiRNA target sequence
gcaccttgtaataattgta

SEQ ID NO: 147250 - DNA, 19 bp, Artificial sequence
  SiRNA target sequence
caccttgtaataattgtaa

SEQ ID NO: 147251 - DNA, 19 bp, Artificial sequence
  SiRNA target sequence
accttgtaataattgtaat

SEQ ID NO: 147252 - DNA, 19 bp, Artificial sequence
  SiRNA target sequence
ccttgtaataattgtaatt

SEQ ID NO: 147253 - DNA, 19 bp, Artificial sequence
  SiRNA target sequence
cttgtaataattgtaattc

SEQ ID NO: 147254 - DNA, 19 bp, Artificial sequence
  SiRNA target sequence
ttgtaataattgtaattct

SEQ ID NO: 147255 - DNA, 19 bp, Artificial sequence
  SiRNA target sequence
tgtaataattgtaattcta

SEQ ID NO: 147256 - DNA, 19 bp, Artificial sequence
  SiRNA target sequence
gtaataattgtaattctac

SEQ ID NO: 147257 - DNA, 19 bp, Artificial sequence
  SiRNA target sequence
taataattgtaattctact

SEQ ID NO: 147258 - DNA, 19 bp, Artificial sequence
  SiRNA target sequence
aataattgtaattctactg

SEQ ID NO: 147259 - DNA, 19 bp, Artificial sequence
  SiRNA target sequence
ataattgtaattctactgg

SEQ ID NO: 147260 - DNA, 19 bp, Artificial sequence
  SiRNA target sequence
taattgtaattctactgga

SEQ ID NO: 147261 - DNA, 19 bp, Artificial sequence
  SiRNA target sequence
aattgtaattctactggat

SEQ ID NO: 147262 - DNA, 19 bp, Artificial sequence
  SiRNA target sequence
attgtaattctactggatt

SEQ ID NO: 147263 - DNA, 19 bp, Artificial sequence
  SiRNA target sequence
ttgtaattctactggattt

SEQ ID NO: 147264 - DNA, 19 bp, Artificial sequence
  SiRNA target sequence
tgtaattctactggatttg

SEQ ID NO: 147265 - DNA, 19 bp, Artificial sequence
  SiRNA target sequence
gtaattctactggatttgt

SEQ ID NO: 147266 - DNA, 19 bp, Artificial sequence
  SiRNA target sequence
taattctactggatttgtt

SEQ ID NO: 147267 - DNA, 19 bp, Artificial sequence
  SiRNA target sequence
aattctactggatttgttg

SEQ ID NO: 147268 - DNA, 19 bp, Artificial sequence
  SiRNA target sequence
attctactggatttgttgt

SEQ ID NO: 147269 - DNA, 19 bp, Artificial sequence
  SiRNA target sequence
ttctactggatttgttgtt

SEQ ID NO: 147270 - DNA, 19 bp, Artificial sequence
  SiRNA target sequence
tctactggatttgttgtta

SEQ ID NO: 147271 - DNA, 19 bp, Artificial sequence
  SiRNA target sequence
ctactggatttgttgttaa

SEQ ID NO: 147272 - DNA, 19 bp, Artificial sequence
  SiRNA target sequence
tactggatttgttgttaaa

SEQ ID NO: 147273 - DNA, 19 bp, Artificial sequence
  SiRNA target sequence
actggatttgttgttaaag

SEQ ID NO: 147274 - DNA, 19 bp, Artificial sequence
  SiRNA target sequence
ctggatttgttgttaaagg

SEQ ID NO: 147275 - DNA, 19 bp, Artificial sequence
  SiRNA target sequence
tggatttgttgttaaagga

SEQ ID NO: 147276 - DNA, 19 bp, Artificial sequence
  SiRNA target sequence
ggatttgttgttaaaggaa

SEQ ID NO: 147277 - DNA, 19 bp, Artificial sequence
  SiRNA target sequence
gatttgttgttaaaggaaa

SEQ ID NO: 147278 - DNA, 19 bp, Artificial sequence
  SiRNA target sequence
atttgttgttaaaggaaag

SEQ ID NO: 147279 - DNA, 19 bp, Artificial sequence
  SiRNA target sequence
tttgttgttaaaggaaagc

SEQ ID NO: 147280 - DNA, 19 bp, Artificial sequence
  SiRNA target sequence
ttgttgttaaaggaaagct

SEQ ID NO: 147281 - DNA, 19 bp, Artificial sequence
  SiRNA target sequence
tgttgttaaaggaaagctt

SEQ ID NO: 147282 - DNA, 19 bp, Artificial sequence
  SiRNA target sequence
gttgttaaaggaaagcttt

SEQ ID NO: 147283 - DNA, 19 bp, Artificial sequence
  SiRNA target sequence
ttgttaaaggaaagctttg

SEQ ID NO: 147284 - DNA, 19 bp, Artificial sequence
  SiRNA target sequence
tgttaaaggaaagctttgt

SEQ ID NO: 147285 - DNA, 19 bp, Artificial sequence
  SiRNA target sequence
gttaaaggaaagctttgtc

SEQ ID NO: 147286 - DNA, 19 bp, Artificial sequence
  SiRNA target sequence
ttaaaggaaagctttgtca

SEQ ID NO: 147287 - DNA, 19 bp, Artificial sequence
  SiRNA target sequence
taaaggaaagctttgtcaa

SEQ ID NO: 147288 - DNA, 19 bp, Artificial sequence
  SiRNA target sequence
aaaggaaagctttgtcaaa

SEQ ID NO: 147289 - DNA, 19 bp, Artificial sequence
  SiRNA target sequence
aaggaaagctttgtcaaag

SEQ ID NO: 147290 - DNA, 19 bp, Artificial sequence
  SiRNA target sequence
aggaaagctttgtcaaagt

SEQ ID NO: 147291 - DNA, 19 bp, Artificial sequence
  SiRNA target sequence
ggaaagctttgtcaaagtt

SEQ ID NO: 147292 - DNA, 19 bp, Artificial sequence
  SiRNA target sequence
gaaagctttgtcaaagttg

SEQ ID NO: 147293 - DNA, 19 bp, Artificial sequence
  SiRNA target sequence
aaagctttgtcaaagttgt

SEQ ID NO: 147294 - DNA, 19 bp, Artificial sequence
  SiRNA target sequence
aagctttgtcaaagttgta

SEQ ID NO: 147295 - DNA, 19 bp, Artificial sequence
  SiRNA target sequence
agctttgtcaaagttgtaa

SEQ ID NO: 147296 - DNA, 19 bp, Artificial sequence
  SiRNA target sequence
gctttgtcaaagttgtaaa

SEQ ID NO: 147297 - DNA, 19 bp, Artificial sequence
  SiRNA target sequence
ctttgtcaaagttgtaaag

SEQ ID NO: 147298 - DNA, 19 bp, Artificial sequence
  SiRNA target sequence
tttgtcaaagttgtaaagg

SEQ ID NO: 147299 - DNA, 19 bp, Artificial sequence
  SiRNA target sequence
ttgtcaaagttgtaaaggt

SEQ ID NO: 147300 - DNA, 19 bp, Artificial sequence
  SiRNA target sequence
tgtcaaagttgtaaaggta

SEQ ID NO: 147301 - DNA, 19 bp, Artificial sequence
  SiRNA target sequence
gtcaaagttgtaaaggtaa

SEQ ID NO: 147302 - DNA, 19 bp, Artificial sequence
  SiRNA target sequence
tcaaagttgtaaaggtaaa

SEQ ID NO: 147303 - DNA, 19 bp, Artificial sequence
  SiRNA target sequence
caaagttgtaaaggtaaac

SEQ ID NO: 147304 - DNA, 19 bp, Artificial sequence
  SiRNA target sequence
aaagttgtaaaggtaaaca

SEQ ID NO: 147305 - DNA, 19 bp, Artificial sequence
  SiRNA target sequence
aagttgtaaaggtaaacaa

SEQ ID NO: 147306 - DNA, 19 bp, Artificial sequence
  SiRNA target sequence
agttgtaaaggtaaacaat

SEQ ID NO: 147307 - DNA, 19 bp, Artificial sequence
  SiRNA target sequence
gttgtaaaggtaaacaata

SEQ ID NO: 147308 - DNA, 19 bp, Artificial sequence
  SiRNA target sequence
ttgtaaaggtaaacaatac

SEQ ID NO: 147309 - DNA, 19 bp, Artificial sequence
  SiRNA target sequence
tgtaaaggtaaacaatacg

SEQ ID NO: 147310 - DNA, 19 bp, Artificial sequence
  SiRNA target sequence
gtaaaggtaaacaatacgt

SEQ ID NO: 147311 - DNA, 19 bp, Artificial sequence
  SiRNA target sequence
taaaggtaaacaatacgtt

SEQ ID NO: 147312 - DNA, 19 bp, Artificial sequence
  SiRNA target sequence
aaaggtaaacaatacgttg

SEQ ID NO: 147313 - DNA, 19 bp, Artificial sequence
  SiRNA target sequence
aaggtaaacaatacgttga

SEQ ID NO: 147314 - DNA, 19 bp, Artificial sequence
  SiRNA target sequence
aggtaaacaatacgttgag

SEQ ID NO: 147315 - DNA, 19 bp, Artificial sequence
  SiRNA target sequence
ggtaaacaatacgttgaga

SEQ ID NO: 147316 - DNA, 19 bp, Artificial sequence
  SiRNA target sequence
gtaaacaatacgttgagac

SEQ ID NO: 147317 - DNA, 19 bp, Artificial sequence
  SiRNA target sequence
taaacaatacgttgagact

SEQ ID NO: 147318 - DNA, 19 bp, Artificial sequence
  SiRNA target sequence
aaacaatacgttgagacta

SEQ ID NO: 147319 - DNA, 19 bp, Artificial sequence
  SiRNA target sequence
aacaatacgttgagactaa

SEQ ID NO: 147320 - DNA, 19 bp, Artificial sequence
  SiRNA target sequence
acaatacgttgagactaaa

SEQ ID NO: 147321 - DNA, 19 bp, Artificial sequence
  SiRNA target sequence
caatacgttgagactaaag

SEQ ID NO: 147322 - DNA, 19 bp, Artificial sequence
  SiRNA target sequence
aatacgttgagactaaaga

SEQ ID NO: 147323 - DNA, 19 bp, Artificial sequence
  SiRNA target sequence
atacgttgagactaaagaa

SEQ ID NO: 147324 - DNA, 19 bp, Artificial sequence
  SiRNA target sequence
tacgttgagactaaagaac

SEQ ID NO: 147325 - DNA, 19 bp, Artificial sequence
  SiRNA target sequence
acgttgagactaaagaaca

SEQ ID NO: 147326 - DNA, 19 bp, Artificial sequence
  SiRNA target sequence
cgttgagactaaagaacat

SEQ ID NO: 147327 - DNA, 19 bp, Artificial sequence
  SiRNA target sequence
gttgagactaaagaacata

SEQ ID NO: 147328 - DNA, 19 bp, Artificial sequence
  SiRNA target sequence
ttgagactaaagaacatat

SEQ ID NO: 147329 - DNA, 19 bp, Artificial sequence
  SiRNA target sequence
tgagactaaagaacatatt

SEQ ID NO: 147330 - DNA, 19 bp, Artificial sequence
  SiRNA target sequence
gagactaaagaacatattg

SEQ ID NO: 147331 - DNA, 19 bp, Artificial sequence
  SiRNA target sequence
agactaaagaacatattga

SEQ ID NO: 147332 - DNA, 19 bp, Artificial sequence
  SiRNA target sequence
gactaaagaacatattgaa

SEQ ID NO: 147333 - DNA, 19 bp, Artificial sequence
  SiRNA target sequence
actaaagaacatattgaag

SEQ ID NO: 147334 - DNA, 19 bp, Artificial sequence
  SiRNA target sequence
ctaaagaacatattgaagt

SEQ ID NO: 147335 - DNA, 19 bp, Artificial sequence
  SiRNA target sequence
taaagaacatattgaagtg

SEQ ID NO: 147336 - DNA, 19 bp, Artificial sequence
  SiRNA target sequence
aaagaacatattgaagtgg

SEQ ID NO: 147337 - DNA, 19 bp, Artificial sequence
  SiRNA target sequence
aagaacatattgaagtgga

SEQ ID NO: 147338 - DNA, 19 bp, Artificial sequence
  SiRNA target sequence
agaacatattgaagtggaa

SEQ ID NO: 147339 - DNA, 19 bp, Artificial sequence
  SiRNA target sequence
gaacatattgaagtggaag

SEQ ID NO: 147340 - DNA, 19 bp, Artificial sequence
  SiRNA target sequence
aacatattgaagtggaagt

SEQ ID NO: 147341 - DNA, 19 bp, Artificial sequence
  SiRNA target sequence
acatattgaagtggaagta

SEQ ID NO: 147342 - DNA, 19 bp, Artificial sequence
  SiRNA target sequence
catattgaagtggaagtag

SEQ ID NO: 147343 - DNA, 19 bp, Artificial sequence
  SiRNA target sequence
atattgaagtggaagtaga

SEQ ID NO: 147344 - DNA, 19 bp, Artificial sequence
  SiRNA target sequence
tattgaagtggaagtagag

SEQ ID NO: 147345 - DNA, 19 bp, Artificial sequence
  SiRNA target sequence
attgaagtggaagtagagc

SEQ ID NO: 147346 - DNA, 19 bp, Artificial sequence
  SiRNA target sequence
ttgaagtggaagtagagcc

SEQ ID NO: 147347 - DNA, 19 bp, Artificial sequence
  SiRNA target sequence
tgaagtggaagtagagcca

SEQ ID NO: 147348 - DNA, 19 bp, Artificial sequence
  SiRNA target sequence
gaagtggaagtagagccag

SEQ ID NO: 147349 - DNA, 19 bp, Artificial sequence
  SiRNA target sequence
aagtggaagtagagccagg

SEQ ID NO: 147350 - DNA, 19 bp, Artificial sequence
  SiRNA target sequence
agtggaagtagagccagga

SEQ ID NO: 147351 - DNA, 19 bp, Artificial sequence
  SiRNA target sequence
gtggaagtagagccaggag

SEQ ID NO: 147352 - DNA, 19 bp, Artificial sequence
  SiRNA target sequence
tggaagtagagccaggagt

SEQ ID NO: 147353 - DNA, 19 bp, Artificial sequence
  SiRNA target sequence
ggaagtagagccaggagta

SEQ ID NO: 147354 - DNA, 19 bp, Artificial sequence
  SiRNA target sequence
gaagtagagccaggagtac

SEQ ID NO: 147355 - DNA, 19 bp, Artificial sequence
  SiRNA target sequence
aagtagagccaggagtaca

SEQ ID NO: 147356 - DNA, 19 bp, Artificial sequence
  SiRNA target sequence
agtagagccaggagtacag

SEQ ID NO: 147357 - DNA, 19 bp, Artificial sequence
  SiRNA target sequence
gtagagccaggagtacaga

SEQ ID NO: 147358 - DNA, 19 bp, Artificial sequence
  SiRNA target sequence
tagagccaggagtacagaa

SEQ ID NO: 147359 - DNA, 19 bp, Artificial sequence
  SiRNA target sequence
agagccaggagtacagaac

SEQ ID NO: 147360 - DNA, 19 bp, Artificial sequence
  SiRNA target sequence
gagccaggagtacagaacg

SEQ ID NO: 147361 - DNA, 19 bp, Artificial sequence
  SiRNA target sequence
agccaggagtacagaacgg

SEQ ID NO: 147362 - DNA, 19 bp, Artificial sequence
  SiRNA target sequence
gccaggagtacagaacggt

SEQ ID NO: 147363 - DNA, 19 bp, Artificial sequence
  SiRNA target sequence
ccaggagtacagaacggta

SEQ ID NO: 147364 - DNA, 19 bp, Artificial sequence
  SiRNA target sequence
caggagtacagaacggtag

SEQ ID NO: 147365 - DNA, 19 bp, Artificial sequence
  SiRNA target sequence
aggagtacagaacggtaga

SEQ ID NO: 147366 - DNA, 19 bp, Artificial sequence
  SiRNA target sequence
ggagtacagaacggtagaa

SEQ ID NO: 147367 - DNA, 19 bp, Artificial sequence
  SiRNA target sequence
gagtacagaacggtagaaa

SEQ ID NO: 147368 - DNA, 19 bp, Artificial sequence
  SiRNA target sequence
agtacagaacggtagaaaa

SEQ ID NO: 147369 - DNA, 19 bp, Artificial sequence
  SiRNA target sequence
gtacagaacggtagaaaat

SEQ ID NO: 147370 - DNA, 19 bp, Artificial sequence
  SiRNA target sequence
tacagaacggtagaaaata

SEQ ID NO: 147371 - DNA, 19 bp, Artificial sequence
  SiRNA target sequence
acagaacggtagaaaatat

SEQ ID NO: 147372 - DNA, 19 bp, Artificial sequence
  SiRNA target sequence
cagaacggtagaaaatata

SEQ ID NO: 147373 - DNA, 19 bp, Artificial sequence
  SiRNA target sequence
agaacggtagaaaatatac

SEQ ID NO: 147374 - DNA, 19 bp, Artificial sequence
  SiRNA target sequence
gaacggtagaaaatataca

SEQ ID NO: 147375 - DNA, 19 bp, Artificial sequence
  SiRNA target sequence
aacggtagaaaatatacat

SEQ ID NO: 147376 - DNA, 19 bp, Artificial sequence
  SiRNA target sequence
acggtagaaaatatacatt

SEQ ID NO: 147377 - DNA, 19 bp, Artificial sequence
  SiRNA target sequence
cggtagaaaatatacattt

SEQ ID NO: 147378 - DNA, 19 bp, Artificial sequence
  SiRNA target sequence
ggtagaaaatatacatttt

SEQ ID NO: 147379 - DNA, 19 bp, Artificial sequence
  SiRNA target sequence
gtagaaaatatacattttc

SEQ ID NO: 147380 - DNA, 19 bp, Artificial sequence
  SiRNA target sequence
tagaaaatatacattttct

SEQ ID NO: 147381 - DNA, 19 bp, Artificial sequence
  SiRNA target sequence
agaaaatatacattttctg

SEQ ID NO: 147382 - DNA, 19 bp, Artificial sequence
  SiRNA target sequence
gaaaatatacattttctgg

SEQ ID NO: 147383 - DNA, 19 bp, Artificial sequence
  SiRNA target sequence
aaaatatacattttctggc

SEQ ID NO: 147384 - DNA, 19 bp, Artificial sequence
  SiRNA target sequence
aaatatacattttctggca

SEQ ID NO: 147385 - DNA, 19 bp, Artificial sequence
  SiRNA target sequence
aatatacattttctggcaa

SEQ ID NO: 147386 - DNA, 19 bp, Artificial sequence
  SiRNA target sequence
atatacattttctggcaaa

SEQ ID NO: 147387 - DNA, 19 bp, Artificial sequence
  SiRNA target sequence
tatacattttctggcaaag

SEQ ID NO: 147388 - DNA, 19 bp, Artificial sequence
  SiRNA target sequence
atacattttctggcaaagg

SEQ ID NO: 147389 - DNA, 19 bp, Artificial sequence
  SiRNA target sequence
tacattttctggcaaagga

SEQ ID NO: 147390 - DNA, 19 bp, Artificial sequence
  SiRNA target sequence
acattttctggcaaaggaa

SEQ ID NO: 147391 - DNA, 19 bp, Artificial sequence
  SiRNA target sequence
cattttctggcaaaggaaa

SEQ ID NO: 147392 - DNA, 19 bp, Artificial sequence
  SiRNA target sequence
attttctggcaaaggaaat

SEQ ID NO: 147393 - DNA, 19 bp, Artificial sequence
  SiRNA target sequence
ttttctggcaaaggaaatc

SEQ ID NO: 147394 - DNA, 19 bp, Artificial sequence
  SiRNA target sequence
tttctggcaaaggaaatca

SEQ ID NO: 147395 - DNA, 19 bp, Artificial sequence
  SiRNA target sequence
ttctggcaaaggaaatcat

SEQ ID NO: 147396 - DNA, 19 bp, Artificial sequence
  SiRNA target sequence
tctggcaaaggaaatcata

SEQ ID NO: 147397 - DNA, 19 bp, Artificial sequence
  SiRNA target sequence
ctggcaaaggaaatcataa

SEQ ID NO: 147398 - DNA, 19 bp, Artificial sequence
  SiRNA target sequence
tggcaaaggaaatcataaa

SEQ ID NO: 147399 - DNA, 19 bp, Artificial sequence
  SiRNA target sequence
ggcaaaggaaatcataaaa

SEQ ID NO: 147400 - DNA, 19 bp, Artificial sequence
  SiRNA target sequence
gcaaaggaaatcataaaaa

SEQ ID NO: 147401 - DNA, 19 bp, Artificial sequence
  SiRNA target sequence
caaaggaaatcataaaaaa

SEQ ID NO: 147402 - DNA, 19 bp, Artificial sequence
  SiRNA target sequence
aaaggaaatcataaaaaaa

SEQ ID NO: 147403 - DNA, 19 bp, Artificial sequence
  SiRNA target sequence
aaggaaatcataaaaaaaa

SEQ ID NO: 147404 - DNA, 19 bp, Artificial sequence
  SiRNA target sequence
aggaaatcataaaaaaaat

SEQ ID NO: 147405 - DNA, 19 bp, Artificial sequence
  SiRNA target sequence
ggaaatcataaaaaaaatt

SEQ ID NO: 147406 - DNA, 19 bp, Artificial sequence
  SiRNA target sequence
gaaatcataaaaaaaattg

SEQ ID NO: 147407 - DNA, 19 bp, Artificial sequence
  SiRNA target sequence
aaatcataaaaaaaattgt

SEQ ID NO: 147408 - DNA, 19 bp, Artificial sequence
  SiRNA target sequence
aatcataaaaaaaattgtg

SEQ ID NO: 147409 - DNA, 19 bp, Artificial sequence
  SiRNA target sequence
atcataaaaaaaattgtgt

SEQ ID NO: 147410 - DNA, 19 bp, Artificial sequence
  SiRNA target sequence
tcataaaaaaaattgtgta

SEQ ID NO: 147411 - DNA, 19 bp, Artificial sequence
  SiRNA target sequence
cataaaaaaaattgtgtac

SEQ ID NO: 147412 - DNA, 19 bp, Artificial sequence
  SiRNA target sequence
ataaaaaaaattgtgtacc

SEQ ID NO: 147413 - DNA, 19 bp, Artificial sequence
  SiRNA target sequence
taaaaaaaattgtgtaccg

SEQ ID NO: 147414 - DNA, 19 bp, Artificial sequence
  SiRNA target sequence
aaaaaaaattgtgtaccgg

SEQ ID NO: 147415 - DNA, 19 bp, Artificial sequence
  SiRNA target sequence
aaaaaaattgtgtaccggg

SEQ ID NO: 147416 - DNA, 19 bp, Artificial sequence
  SiRNA target sequence
aaaaaattgtgtaccgggt

SEQ ID NO: 147417 - DNA, 19 bp, Artificial sequence
  SiRNA target sequence
aaaaattgtgtaccgggtg

SEQ ID NO: 147418 - DNA, 19 bp, Artificial sequence
  SiRNA target sequence
aaaattgtgtaccgggtga

SEQ ID NO: 147419 - DNA, 19 bp, Artificial sequence
  SiRNA target sequence
aaattgtgtaccgggtgat

SEQ ID NO: 147420 - DNA, 19 bp, Artificial sequence
  SiRNA target sequence
aattgtgtaccgggtgatg

SEQ ID NO: 147421 - DNA, 19 bp, Artificial sequence
  SiRNA target sequence
attgtgtaccgggtgatgt

SEQ ID NO: 147422 - DNA, 19 bp, Artificial sequence
  SiRNA target sequence
ttgtgtaccgggtgatgtg

SEQ ID NO: 147423 - DNA, 19 bp, Artificial sequence
  SiRNA target sequence
tgtgtaccgggtgatgtga

SEQ ID NO: 147424 - DNA, 19 bp, Artificial sequence
  SiRNA target sequence
gtgtaccgggtgatgtgat

SEQ ID NO: 147425 - DNA, 19 bp, Artificial sequence
  SiRNA target sequence
tgtaccgggtgatgtgatt

SEQ ID NO: 147426 - DNA, 19 bp, Artificial sequence
  SiRNA target sequence
gtaccgggtgatgtgattc

SEQ ID NO: 147427 - DNA, 19 bp, Artificial sequence
  SiRNA target sequence
taccgggtgatgtgattct

SEQ ID NO: 147428 - DNA, 19 bp, Artificial sequence
  SiRNA target sequence
accgggtgatgtgattctt

SEQ ID NO: 147429 - DNA, 19 bp, Artificial sequence
  SiRNA target sequence
ccgggtgatgtgattctta

SEQ ID NO: 147430 - DNA, 19 bp, Artificial sequence
  SiRNA target sequence
cgggtgatgtgattcttat

SEQ ID NO: 147431 - DNA, 19 bp, Artificial sequence
  SiRNA target sequence
gggtgatgtgattcttatt

SEQ ID NO: 147432 - DNA, 19 bp, Artificial sequence
  SiRNA target sequence
ggtgatgtgattcttattg

SEQ ID NO: 147433 - DNA, 19 bp, Artificial sequence
  SiRNA target sequence
gtgatgtgattcttattgt

SEQ ID NO: 147434 - DNA, 19 bp, Artificial sequence
  SiRNA target sequence
tgatgtgattcttattgta

SEQ ID NO: 147435 - DNA, 19 bp, Artificial sequence
  SiRNA target sequence
gatgtgattcttattgtaa

SEQ ID NO: 147436 - DNA, 19 bp, Artificial sequence
  SiRNA target sequence
atgtgattcttattgtaaa

SEQ ID NO: 147437 - DNA, 19 bp, Artificial sequence
  SiRNA target sequence
tgtgattcttattgtaaac

SEQ ID NO: 147438 - DNA, 19 bp, Artificial sequence
  SiRNA target sequence
gtgattcttattgtaaaca

SEQ ID NO: 147439 - DNA, 19 bp, Artificial sequence
  SiRNA target sequence
tgattcttattgtaaacat

SEQ ID NO: 147440 - DNA, 19 bp, Artificial sequence
  SiRNA target sequence
gattcttattgtaaacatt

SEQ ID NO: 147441 - DNA, 19 bp, Artificial sequence
  SiRNA target sequence
attcttattgtaaacatta

SEQ ID NO: 147442 - DNA, 19 bp, Artificial sequence
  SiRNA target sequence
ttcttattgtaaacattac

SEQ ID NO: 147443 - DNA, 19 bp, Artificial sequence
  SiRNA target sequence
tcttattgtaaacattaca

SEQ ID NO: 147444 - DNA, 19 bp, Artificial sequence
  SiRNA target sequence
cttattgtaaacattacaa

SEQ ID NO: 147445 - DNA, 19 bp, Artificial sequence
  SiRNA target sequence
ttattgtaaacattacaaa

SEQ ID NO: 147446 - DNA, 19 bp, Artificial sequence
  SiRNA target sequence
tattgtaaacattacaaat

SEQ ID NO: 147447 - DNA, 19 bp, Artificial sequence
  SiRNA target sequence
attgtaaacattacaaatg

SEQ ID NO: 147448 - DNA, 19 bp, Artificial sequence
  SiRNA target sequence
ttgtaaacattacaaatga

SEQ ID NO: 147449 - DNA, 19 bp, Artificial sequence
  SiRNA target sequence
tgtaaacattacaaatgat

SEQ ID NO: 147450 - DNA, 19 bp, Artificial sequence
  SiRNA target sequence
gtaaacattacaaatgatc

SEQ ID NO: 147451 - DNA, 19 bp, Artificial sequence
  SiRNA target sequence
taaacattacaaatgatcc

SEQ ID NO: 147452 - DNA, 19 bp, Artificial sequence
  SiRNA target sequence
aaacattacaaatgatcca

SEQ ID NO: 147453 - DNA, 19 bp, Artificial sequence
  SiRNA target sequence
aacattacaaatgatccaa

SEQ ID NO: 147454 - DNA, 19 bp, Artificial sequence
  SiRNA target sequence
acattacaaatgatccaag

SEQ ID NO: 147455 - DNA, 19 bp, Artificial sequence
  SiRNA target sequence
cattacaaatgatccaaga

SEQ ID NO: 147456 - DNA, 19 bp, Artificial sequence
  SiRNA target sequence
attacaaatgatccaagat

SEQ ID NO: 147457 - DNA, 19 bp, Artificial sequence
  SiRNA target sequence
ttacaaatgatccaagatt

SEQ ID NO: 147458 - DNA, 19 bp, Artificial sequence
  SiRNA target sequence
tacaaatgatccaagattt

SEQ ID NO: 147459 - DNA, 19 bp, Artificial sequence
  SiRNA target sequence
acaaatgatccaagattta

SEQ ID NO: 147460 - DNA, 19 bp, Artificial sequence
  SiRNA target sequence
caaatgatccaagatttag

SEQ ID NO: 147461 - DNA, 19 bp, Artificial sequence
  SiRNA target sequence
aaatgatccaagatttaga

SEQ ID NO: 147462 - DNA, 19 bp, Artificial sequence
  SiRNA target sequence
aatgatccaagatttagaa

SEQ ID NO: 147463 - DNA, 19 bp, Artificial sequence
  SiRNA target sequence
atgatccaagatttagaaa

SEQ ID NO: 147464 - DNA, 19 bp, Artificial sequence
  SiRNA target sequence
tgatccaagatttagaaaa

SEQ ID NO: 147465 - DNA, 19 bp, Artificial sequence
  SiRNA target sequence
gatccaagatttagaaaaa

SEQ ID NO: 147466 - DNA, 19 bp, Artificial sequence
  SiRNA target sequence
atccaagatttagaaaaag

SEQ ID NO: 147467 - DNA, 19 bp, Artificial sequence
  SiRNA target sequence
tccaagatttagaaaaagt

SEQ ID NO: 147468 - DNA, 19 bp, Artificial sequence
  SiRNA target sequence
ccaagatttagaaaaagtg

SEQ ID NO: 147469 - DNA, 19 bp, Artificial sequence
  SiRNA target sequence
caagatttagaaaaagtgg

SEQ ID NO: 147470 - DNA, 19 bp, Artificial sequence
  SiRNA target sequence
aagatttagaaaaagtgga

SEQ ID NO: 147471 - DNA, 19 bp, Artificial sequence
  SiRNA target sequence
agatttagaaaaagtggat

SEQ ID NO: 147472 - DNA, 19 bp, Artificial sequence
  SiRNA target sequence
gatttagaaaaagtggata

SEQ ID NO: 147473 - DNA, 19 bp, Artificial sequence
  SiRNA target sequence
atttagaaaaagtggatat

SEQ ID NO: 147474 - DNA, 19 bp, Artificial sequence
  SiRNA target sequence
tttagaaaaagtggatata

SEQ ID NO: 147475 - DNA, 19 bp, Artificial sequence
  SiRNA target sequence
ttagaaaaagtggatataa

SEQ ID NO: 147476 - DNA, 19 bp, Artificial sequence
  SiRNA target sequence
tagaaaaagtggatataat

SEQ ID NO: 147477 - DNA, 19 bp, Artificial sequence
  SiRNA target sequence
agaaaaagtggatataatt

SEQ ID NO: 147478 - DNA, 19 bp, Artificial sequence
  SiRNA target sequence
gaaaaagtggatataattt

SEQ ID NO: 147479 - DNA, 19 bp, Artificial sequence
  SiRNA target sequence
aaaaagtggatataattta

SEQ ID NO: 147480 - DNA, 19 bp, Artificial sequence
  SiRNA target sequence
aaaagtggatataatttaa

SEQ ID NO: 147481 - DNA, 19 bp, Artificial sequence
  SiRNA target sequence
aaagtggatataatttaat

SEQ ID NO: 147482 - DNA, 19 bp, Artificial sequence
  SiRNA target sequence
aagtggatataatttaatt

SEQ ID NO: 147483 - DNA, 19 bp, Artificial sequence
  SiRNA target sequence
agtggatataatttaatta

SEQ ID NO: 147484 - DNA, 19 bp, Artificial sequence
  SiRNA target sequence
gtggatataatttaattag

SEQ ID NO: 147485 - DNA, 19 bp, Artificial sequence
  SiRNA target sequence
tggatataatttaattagt

SEQ ID NO: 147486 - DNA, 19 bp, Artificial sequence
  SiRNA target sequence
ggatataatttaattagta

SEQ ID NO: 147487 - DNA, 19 bp, Artificial sequence
  SiRNA target sequence
gatataatttaattagtaa

SEQ ID NO: 147488 - DNA, 19 bp, Artificial sequence
  SiRNA target sequence
atataatttaattagtaag

SEQ ID NO: 147489 - DNA, 19 bp, Artificial sequence
  SiRNA target sequence
tataatttaattagtaagg

SEQ ID NO: 147490 - DNA, 19 bp, Artificial sequence
  SiRNA target sequence
ataatttaattagtaaggt

SEQ ID NO: 147491 - DNA, 19 bp, Artificial sequence
  SiRNA target sequence
taatttaattagtaaggtt

SEQ ID NO: 147492 - DNA, 19 bp, Artificial sequence
  SiRNA target sequence
aatttaattagtaaggttg

SEQ ID NO: 147493 - DNA, 19 bp, Artificial sequence
  SiRNA target sequence
atttaattagtaaggttga

SEQ ID NO: 147494 - DNA, 19 bp, Artificial sequence
  SiRNA target sequence
tttaattagtaaggttgat

SEQ ID NO: 147495 - DNA, 19 bp, Artificial sequence
  SiRNA target sequence
ttaattagtaaggttgata

SEQ ID NO: 147496 - DNA, 19 bp, Artificial sequence
  SiRNA target sequence
taattagtaaggttgatat

SEQ ID NO: 147497 - DNA, 19 bp, Artificial sequence
  SiRNA target sequence
aattagtaaggttgatatt

SEQ ID NO: 147498 - DNA, 19 bp, Artificial sequence
  SiRNA target sequence
attagtaaggttgatattc

SEQ ID NO: 147499 - DNA, 19 bp, Artificial sequence
  SiRNA target sequence
ttagtaaggttgatattcc

SEQ ID NO: 147500 - DNA, 19 bp, Artificial sequence
  SiRNA target sequence
tagtaaggttgatattcca

SEQ ID NO: 147501 - DNA, 19 bp, Artificial sequence
  SiRNA target sequence
agtaaggttgatattccat

SEQ ID NO: 147502 - DNA, 19 bp, Artificial sequence
  SiRNA target sequence
gtaaggttgatattccatt

SEQ ID NO: 147503 - DNA, 19 bp, Artificial sequence
  SiRNA target sequence
taaggttgatattccattg

SEQ ID NO: 147504 - DNA, 19 bp, Artificial sequence
  SiRNA target sequence
aaggttgatattccattgt

SEQ ID NO: 147505 - DNA, 19 bp, Artificial sequence
  SiRNA target sequence
aggttgatattccattgta

SEQ ID NO: 147506 - DNA, 19 bp, Artificial sequence
  SiRNA target sequence
ggttgatattccattgtat

SEQ ID NO: 147507 - DNA, 19 bp, Artificial sequence
  SiRNA target sequence
gttgatattccattgtatg

SEQ ID NO: 147508 - DNA, 19 bp, Artificial sequence
  SiRNA target sequence
ttgatattccattgtatgt

SEQ ID NO: 147509 - DNA, 19 bp, Artificial sequence
  SiRNA target sequence
tgatattccattgtatgtt

SEQ ID NO: 147510 - DNA, 19 bp, Artificial sequence
  SiRNA target sequence
gatattccattgtatgttg

SEQ ID NO: 147511 - DNA, 19 bp, Artificial sequence
  SiRNA target sequence
atattccattgtatgttgc

SEQ ID NO: 147512 - DNA, 19 bp, Artificial sequence
  SiRNA target sequence
tattccattgtatgttgct

SEQ ID NO: 147513 - DNA, 19 bp, Artificial sequence
  SiRNA target sequence
attccattgtatgttgctt

SEQ ID NO: 147514 - DNA, 19 bp, Artificial sequence
  SiRNA target sequence
ttccattgtatgttgcttt

SEQ ID NO: 147515 - DNA, 19 bp, Artificial sequence
  SiRNA target sequence
tccattgtatgttgctttg

SEQ ID NO: 147516 - DNA, 19 bp, Artificial sequence
  SiRNA target sequence
ccattgtatgttgctttgg

SEQ ID NO: 147517 - DNA, 19 bp, Artificial sequence
  SiRNA target sequence
cattgtatgttgctttggc

SEQ ID NO: 147518 - DNA, 19 bp, Artificial sequence
  SiRNA target sequence
attgtatgttgctttggca

SEQ ID NO: 147519 - DNA, 19 bp, Artificial sequence
  SiRNA target sequence
ttgtatgttgctttggcag

SEQ ID NO: 147520 - DNA, 19 bp, Artificial sequence
  SiRNA target sequence
tgtatgttgctttggcagg

SEQ ID NO: 147521 - DNA, 19 bp, Artificial sequence
  SiRNA target sequence
gtatgttgctttggcaggc

SEQ ID NO: 147522 - DNA, 19 bp, Artificial sequence
  SiRNA target sequence
tatgttgctttggcaggcg

SEQ ID NO: 147523 - DNA, 19 bp, Artificial sequence
  SiRNA target sequence
atgttgctttggcaggcgg

SEQ ID NO: 147524 - DNA, 19 bp, Artificial sequence
  SiRNA target sequence
tgttgctttggcaggcgga

SEQ ID NO: 147525 - DNA, 19 bp, Artificial sequence
  SiRNA target sequence
gttgctttggcaggcggac

SEQ ID NO: 147526 - DNA, 19 bp, Artificial sequence
  SiRNA target sequence
ttgctttggcaggcggaca

SEQ ID NO: 147527 - DNA, 19 bp, Artificial sequence
  SiRNA target sequence
tgctttggcaggcggacag

SEQ ID NO: 147528 - DNA, 19 bp, Artificial sequence
  SiRNA target sequence
gctttggcaggcggacaga

SEQ ID NO: 147529 - DNA, 19 bp, Artificial sequence
  SiRNA target sequence
ctttggcaggcggacagat

SEQ ID NO: 147530 - DNA, 19 bp, Artificial sequence
  SiRNA target sequence
tttggcaggcggacagatt

SEQ ID NO: 147531 - DNA, 19 bp, Artificial sequence
  SiRNA target sequence
ttggcaggcggacagatta

SEQ ID NO: 147532 - DNA, 19 bp, Artificial sequence
  SiRNA target sequence
tggcaggcggacagattat

SEQ ID NO: 147533 - DNA, 19 bp, Artificial sequence
  SiRNA target sequence
ggcaggcggacagattata

SEQ ID NO: 147534 - DNA, 19 bp, Artificial sequence
  SiRNA target sequence
gcaggcggacagattatat

SEQ ID NO: 147535 - DNA, 19 bp, Artificial sequence
  SiRNA target sequence
caggcggacagattatatt

SEQ ID NO: 147536 - DNA, 19 bp, Artificial sequence
  SiRNA target sequence
aggcggacagattatattt

SEQ ID NO: 147537 - DNA, 19 bp, Artificial sequence
  SiRNA target sequence
ggcggacagattatatttg

SEQ ID NO: 147538 - DNA, 19 bp, Artificial sequence
  SiRNA target sequence
gcggacagattatatttga

SEQ ID NO: 147539 - DNA, 19 bp, Artificial sequence
  SiRNA target sequence
cggacagattatatttgaa

SEQ ID NO: 147540 - DNA, 19 bp, Artificial sequence
  SiRNA target sequence
ggacagattatatttgaac

SEQ ID NO: 147541 - DNA, 19 bp, Artificial sequence
  SiRNA target sequence
gacagattatatttgaaca

SEQ ID NO: 147542 - DNA, 19 bp, Artificial sequence
  SiRNA target sequence
acagattatatttgaacat

SEQ ID NO: 147543 - DNA, 19 bp, Artificial sequence
  SiRNA target sequence
cagattatatttgaacata

SEQ ID NO: 147544 - DNA, 19 bp, Artificial sequence
  SiRNA target sequence
agattatatttgaacatat

SEQ ID NO: 147545 - DNA, 19 bp, Artificial sequence
  SiRNA target sequence
gattatatttgaacatatc

SEQ ID NO: 147546 - DNA, 19 bp, Artificial sequence
  SiRNA target sequence
attatatttgaacatatca

SEQ ID NO: 147547 - DNA, 19 bp, Artificial sequence
  SiRNA target sequence
ttatatttgaacatatcac

SEQ ID NO: 147548 - DNA, 19 bp, Artificial sequence
  SiRNA target sequence
tatatttgaacatatcact

SEQ ID NO: 147549 - DNA, 19 bp, Artificial sequence
  SiRNA target sequence
atatttgaacatatcactg

SEQ ID NO: 147550 - DNA, 19 bp, Artificial sequence
  SiRNA target sequence
tatttgaacatatcactgg

SEQ ID NO: 147551 - DNA, 19 bp, Artificial sequence
  SiRNA target sequence
atttgaacatatcactggt

SEQ ID NO: 147552 - DNA, 19 bp, Artificial sequence
  SiRNA target sequence
tttgaacatatcactggta

SEQ ID NO: 147553 - DNA, 19 bp, Artificial sequence
  SiRNA target sequence
ttgaacatatcactggtaa

SEQ ID NO: 147554 - DNA, 19 bp, Artificial sequence
  SiRNA target sequence
tgaacatatcactggtaag

SEQ ID NO: 147555 - DNA, 19 bp, Artificial sequence
  SiRNA target sequence
gaacatatcactggtaaga

SEQ ID NO: 147556 - DNA, 19 bp, Artificial sequence
  SiRNA target sequence
aacatatcactggtaagaa

SEQ ID NO: 147557 - DNA, 19 bp, Artificial sequence
  SiRNA target sequence
acatatcactggtaagaaa

SEQ ID NO: 147558 - DNA, 19 bp, Artificial sequence
  SiRNA target sequence
catatcactggtaagaaat

SEQ ID NO: 147559 - DNA, 19 bp, Artificial sequence
  SiRNA target sequence
atatcactggtaagaaatt

SEQ ID NO: 147560 - DNA, 19 bp, Artificial sequence
  SiRNA target sequence
tatcactggtaagaaattt

SEQ ID NO: 147561 - DNA, 19 bp, Artificial sequence
  SiRNA target sequence
atcactggtaagaaatttg

SEQ ID NO: 147562 - DNA, 19 bp, Artificial sequence
  SiRNA target sequence
tcactggtaagaaatttga

SEQ ID NO: 147563 - DNA, 19 bp, Artificial sequence
  SiRNA target sequence
cactggtaagaaatttgaa

SEQ ID NO: 147564 - DNA, 19 bp, Artificial sequence
  SiRNA target sequence
actggtaagaaatttgaaa

SEQ ID NO: 147565 - DNA, 19 bp, Artificial sequence
  SiRNA target sequence
ctggtaagaaatttgaaat

SEQ ID NO: 147566 - DNA, 19 bp, Artificial sequence
  SiRNA target sequence
tggtaagaaatttgaaatt

SEQ ID NO: 147567 - DNA, 19 bp, Artificial sequence
  SiRNA target sequence
ggtaagaaatttgaaatta

SEQ ID NO: 147568 - DNA, 19 bp, Artificial sequence
  SiRNA target sequence
gtaagaaatttgaaattac

SEQ ID NO: 147569 - DNA, 19 bp, Artificial sequence
  SiRNA target sequence
taagaaatttgaaattact

SEQ ID NO: 147570 - DNA, 19 bp, Artificial sequence
  SiRNA target sequence
aagaaatttgaaattactt

SEQ ID NO: 147571 - DNA, 19 bp, Artificial sequence
  SiRNA target sequence
agaaatttgaaattacttt

SEQ ID NO: 147572 - DNA, 19 bp, Artificial sequence
  SiRNA target sequence
gaaatttgaaattacttta

SEQ ID NO: 147573 - DNA, 19 bp, Artificial sequence
  SiRNA target sequence
aaatttgaaattactttat

SEQ ID NO: 147574 - DNA, 19 bp, Artificial sequence
  SiRNA target sequence
aatttgaaattactttata

SEQ ID NO: 147575 - DNA, 19 bp, Artificial sequence
  SiRNA target sequence
atttgaaattactttatat

SEQ ID NO: 147576 - DNA, 19 bp, Artificial sequence
  SiRNA target sequence
tttgaaattactttatatc

SEQ ID NO: 147577 - DNA, 19 bp, Artificial sequence
  SiRNA target sequence
ttgaaattactttatatcc

SEQ ID NO: 147578 - DNA, 19 bp, Artificial sequence
  SiRNA target sequence
tgaaattactttatatcca

SEQ ID NO: 147579 - DNA, 19 bp, Artificial sequence
  SiRNA target sequence
gaaattactttatatccat

SEQ ID NO: 147580 - DNA, 19 bp, Artificial sequence
  SiRNA target sequence
aaattactttatatccatt

SEQ ID NO: 147581 - DNA, 19 bp, Artificial sequence
  SiRNA target sequence
aattactttatatccattt

SEQ ID NO: 147582 - DNA, 19 bp, Artificial sequence
  SiRNA target sequence
attactttatatccattta

SEQ ID NO: 147583 - DNA, 19 bp, Artificial sequence
  SiRNA target sequence
ttactttatatccatttaa

SEQ ID NO: 147584 - DNA, 19 bp, Artificial sequence
  SiRNA target sequence
tactttatatccatttaaa

SEQ ID NO: 147585 - DNA, 19 bp, Artificial sequence
  SiRNA target sequence
actttatatccatttaaag

SEQ ID NO: 147586 - DNA, 19 bp, Artificial sequence
  SiRNA target sequence
ctttatatccatttaaaga

SEQ ID NO: 147587 - DNA, 19 bp, Artificial sequence
  SiRNA target sequence
tttatatccatttaaagat

SEQ ID NO: 147588 - DNA, 19 bp, Artificial sequence
  SiRNA target sequence
ttatatccatttaaagatt

SEQ ID NO: 147589 - DNA, 19 bp, Artificial sequence
  SiRNA target sequence
tatatccatttaaagattt

SEQ ID NO: 147590 - DNA, 19 bp, Artificial sequence
  SiRNA target sequence
atatccatttaaagattta

SEQ ID NO: 147591 - DNA, 19 bp, Artificial sequence
  SiRNA target sequence
tatccatttaaagatttaa

SEQ ID NO: 147592 - DNA, 19 bp, Artificial sequence
  SiRNA target sequence
atccatttaaagatttaaa

SEQ ID NO: 147593 - DNA, 19 bp, Artificial sequence
  SiRNA target sequence
tccatttaaagatttaaag

SEQ ID NO: 147594 - DNA, 19 bp, Artificial sequence
  SiRNA target sequence
ccatttaaagatttaaaga

SEQ ID NO: 147595 - DNA, 19 bp, Artificial sequence
  SiRNA target sequence
catttaaagatttaaagaa

SEQ ID NO: 147596 - DNA, 19 bp, Artificial sequence
  SiRNA target sequence
atttaaagatttaaagaaa

SEQ ID NO: 147597 - DNA, 19 bp, Artificial sequence
  SiRNA target sequence
tttaaagatttaaagaaat

SEQ ID NO: 147598 - DNA, 19 bp, Artificial sequence
  SiRNA target sequence
ttaaagatttaaagaaatg

SEQ ID NO: 147599 - DNA, 19 bp, Artificial sequence
  SiRNA target sequence
taaagatttaaagaaatgt

SEQ ID NO: 147600 - DNA, 19 bp, Artificial sequence
  SiRNA target sequence
aaagatttaaagaaatgta

SEQ ID NO: 147601 - DNA, 19 bp, Artificial sequence
  SiRNA target sequence
aagatttaaagaaatgtat

SEQ ID NO: 147602 - DNA, 19 bp, Artificial sequence
  SiRNA target sequence
agatttaaagaaatgtatt

SEQ ID NO: 147603 - DNA, 19 bp, Artificial sequence
  SiRNA target sequence
gatttaaagaaatgtatta

SEQ ID NO: 147604 - DNA, 19 bp, Artificial sequence
  SiRNA target sequence
atttaaagaaatgtattat

SEQ ID NO: 147605 - DNA, 19 bp, Artificial sequence
  SiRNA target sequence
tttaaagaaatgtattatt

SEQ ID NO: 147606 - DNA, 19 bp, Artificial sequence
  SiRNA target sequence
ttaaagaaatgtattattt

SEQ ID NO: 147607 - DNA, 19 bp, Artificial sequence
  SiRNA target sequence
taaagaaatgtattatttt

SEQ ID NO: 147608 - DNA, 19 bp, Artificial sequence
  SiRNA target sequence
aaagaaatgtattatttta

SEQ ID NO: 147609 - DNA, 19 bp, Artificial sequence
  SiRNA target sequence
aagaaatgtattattttaa

SEQ ID NO: 147610 - DNA, 19 bp, Artificial sequence
  SiRNA target sequence
agaaatgtattattttaaa

SEQ ID NO: 147611 - DNA, 19 bp, Artificial sequence
  SiRNA target sequence
gaaatgtattattttaaaa

SEQ ID NO: 147612 - DNA, 19 bp, Artificial sequence
  SiRNA target sequence
aaatgtattattttaaaag

SEQ ID NO: 147613 - DNA, 19 bp, Artificial sequence
  SiRNA target sequence
aatgtattattttaaaagg

SEQ ID NO: 147614 - DNA, 19 bp, Artificial sequence
  SiRNA target sequence
atgtattattttaaaaggc

SEQ ID NO: 147615 - DNA, 19 bp, Artificial sequence
  SiRNA target sequence
tgtattattttaaaaggcg

SEQ ID NO: 147616 - DNA, 19 bp, Artificial sequence
  SiRNA target sequence
gtattattttaaaaggcga

SEQ ID NO: 147617 - DNA, 19 bp, Artificial sequence
  SiRNA target sequence
tattattttaaaaggcgaa

SEQ ID NO: 147618 - DNA, 19 bp, Artificial sequence
  SiRNA target sequence
attattttaaaaggcgaag

SEQ ID NO: 147619 - DNA, 19 bp, Artificial sequence
  SiRNA target sequence
ttattttaaaaggcgaagg

SEQ ID NO: 147620 - DNA, 19 bp, Artificial sequence
  SiRNA target sequence
tattttaaaaggcgaaggt

SEQ ID NO: 147621 - DNA, 19 bp, Artificial sequence
  SiRNA target sequence
attttaaaaggcgaaggtt

SEQ ID NO: 147622 - DNA, 19 bp, Artificial sequence
  SiRNA target sequence
ttttaaaaggcgaaggttt

SEQ ID NO: 147623 - DNA, 19 bp, Artificial sequence
  SiRNA target sequence
tttaaaaggcgaaggtttt

SEQ ID NO: 147624 - DNA, 19 bp, Artificial sequence
  SiRNA target sequence
ttaaaaggcgaaggtttta

SEQ ID NO: 147625 - DNA, 19 bp, Artificial sequence
  SiRNA target sequence
taaaaggcgaaggttttaa

SEQ ID NO: 147626 - DNA, 19 bp, Artificial sequence
  SiRNA target sequence
aaaaggcgaaggttttaaa

SEQ ID NO: 147627 - DNA, 19 bp, Artificial sequence
  SiRNA target sequence
aaaggcgaaggttttaaaa

SEQ ID NO: 147628 - DNA, 19 bp, Artificial sequence
  SiRNA target sequence
aaggcgaaggttttaaaat

SEQ ID NO: 147629 - DNA, 19 bp, Artificial sequence
  SiRNA target sequence
aggcgaaggttttaaaata

SEQ ID NO: 147630 - DNA, 19 bp, Artificial sequence
  SiRNA target sequence
ggcgaaggttttaaaataa

SEQ ID NO: 147631 - DNA, 19 bp, Artificial sequence
  SiRNA target sequence
gcgaaggttttaaaataaa

SEQ ID NO: 147632 - DNA, 19 bp, Artificial sequence
  SiRNA target sequence
cgaaggttttaaaataaaa

SEQ ID NO: 147633 - DNA, 19 bp, Artificial sequence
  SiRNA target sequence
gaaggttttaaaataaaaa

SEQ ID NO: 147634 - DNA, 19 bp, Artificial sequence
  SiRNA target sequence
aaggttttaaaataaaaaa

SEQ ID NO: 147635 - DNA, 19 bp, Artificial sequence
  SiRNA target sequence
aggttttaaaataaaaaat

SEQ ID NO: 147636 - DNA, 19 bp, Artificial sequence
  SiRNA target sequence
ggttttaaaataaaaaata

SEQ ID NO: 147637 - DNA, 19 bp, Artificial sequence
  SiRNA target sequence
gttttaaaataaaaaatag

SEQ ID NO: 147638 - DNA, 19 bp, Artificial sequence
  SiRNA target sequence
ttttaaaataaaaaatagt

SEQ ID NO: 147639 - DNA, 19 bp, Artificial sequence
  SiRNA target sequence
tttaaaataaaaaatagtt

SEQ ID NO: 147640 - DNA, 19 bp, Artificial sequence
  SiRNA target sequence
ttaaaataaaaaatagtta

SEQ ID NO: 147641 - DNA, 19 bp, Artificial sequence
  SiRNA target sequence
taaaataaaaaatagttat

SEQ ID NO: 147642 - DNA, 19 bp, Artificial sequence
  SiRNA target sequence
aaaataaaaaatagttatt

SEQ ID NO: 147643 - DNA, 19 bp, Artificial sequence
  SiRNA target sequence
aaataaaaaatagttattc

SEQ ID NO: 147644 - DNA, 19 bp, Artificial sequence
  SiRNA target sequence
aataaaaaatagttattcg

SEQ ID NO: 147645 - DNA, 19 bp, Artificial sequence
  SiRNA target sequence
ataaaaaatagttattcgg

SEQ ID NO: 147646 - DNA, 19 bp, Artificial sequence
  SiRNA target sequence
taaaaaatagttattcggg

SEQ ID NO: 147647 - DNA, 19 bp, Artificial sequence
  SiRNA target sequence
aaaaaatagttattcgggt

SEQ ID NO: 147648 - DNA, 19 bp, Artificial sequence
  SiRNA target sequence
aaaaatagttattcgggtg

SEQ ID NO: 147649 - DNA, 19 bp, Artificial sequence
  SiRNA target sequence
aaaatagttattcgggtgg

SEQ ID NO: 147650 - DNA, 19 bp, Artificial sequence
  SiRNA target sequence
aaatagttattcgggtggt

SEQ ID NO: 147651 - DNA, 19 bp, Artificial sequence
  SiRNA target sequence
aatagttattcgggtggtg

SEQ ID NO: 147652 - DNA, 19 bp, Artificial sequence
  SiRNA target sequence
atagttattcgggtggtga

SEQ ID NO: 147653 - DNA, 19 bp, Artificial sequence
  SiRNA target sequence
tagttattcgggtggtgat

SEQ ID NO: 147654 - DNA, 19 bp, Artificial sequence
  SiRNA target sequence
agttattcgggtggtgatc

SEQ ID NO: 147655 - DNA, 19 bp, Artificial sequence
  SiRNA target sequence
gttattcgggtggtgatct

SEQ ID NO: 147656 - DNA, 19 bp, Artificial sequence
  SiRNA target sequence
ttattcgggtggtgatctt

SEQ ID NO: 147657 - DNA, 19 bp, Artificial sequence
  SiRNA target sequence
tattcgggtggtgatctta

SEQ ID NO: 147658 - DNA, 19 bp, Artificial sequence
  SiRNA target sequence
attcgggtggtgatcttat

SEQ ID NO: 147659 - DNA, 19 bp, Artificial sequence
  SiRNA target sequence
ttcgggtggtgatcttatt

SEQ ID NO: 147660 - DNA, 19 bp, Artificial sequence
  SiRNA target sequence
tcgggtggtgatcttattc

SEQ ID NO: 147661 - DNA, 19 bp, Artificial sequence
  SiRNA target sequence
cgggtggtgatcttattct

SEQ ID NO: 147662 - DNA, 19 bp, Artificial sequence
  SiRNA target sequence
gggtggtgatcttattctc

SEQ ID NO: 147663 - DNA, 19 bp, Artificial sequence
  SiRNA target sequence
ggtggtgatcttattctcg

SEQ ID NO: 147664 - DNA, 19 bp, Artificial sequence
  SiRNA target sequence
gtggtgatcttattctcga

SEQ ID NO: 147665 - DNA, 19 bp, Artificial sequence
  SiRNA target sequence
tggtgatcttattctcgaa

SEQ ID NO: 147666 - DNA, 19 bp, Artificial sequence
  SiRNA target sequence
ggtgatcttattctcgaac

SEQ ID NO: 147667 - DNA, 19 bp, Artificial sequence
  SiRNA target sequence
gtgatcttattctcgaacc

SEQ ID NO: 147668 - DNA, 19 bp, Artificial sequence
  SiRNA target sequence
tgatcttattctcgaacct

SEQ ID NO: 147669 - DNA, 19 bp, Artificial sequence
  SiRNA target sequence
gatcttattctcgaaccta

SEQ ID NO: 147670 - DNA, 19 bp, Artificial sequence
  SiRNA target sequence
atcttattctcgaacctaa

SEQ ID NO: 147671 - DNA, 19 bp, Artificial sequence
  SiRNA target sequence
tcttattctcgaacctaat

SEQ ID NO: 147672 - DNA, 19 bp, Artificial sequence
  SiRNA target sequence
cttattctcgaacctaata

SEQ ID NO: 147673 - DNA, 19 bp, Artificial sequence
  SiRNA target sequence
ttattctcgaacctaatat

SEQ ID NO: 147674 - DNA, 19 bp, Artificial sequence
  SiRNA target sequence
tattctcgaacctaatata

SEQ ID NO: 147675 - DNA, 19 bp, Artificial sequence
  SiRNA target sequence
attctcgaacctaatataa

SEQ ID NO: 147676 - DNA, 19 bp, Artificial sequence
  SiRNA target sequence
ttctcgaacctaatataat

SEQ ID NO: 147677 - DNA, 19 bp, Artificial sequence
  SiRNA target sequence
tctcgaacctaatataatt

SEQ ID NO: 147678 - DNA, 19 bp, Artificial sequence
  SiRNA target sequence
ctcgaacctaatataatta

SEQ ID NO: 147679 - DNA, 19 bp, Artificial sequence
  SiRNA target sequence
tcgaacctaatataattat

SEQ ID NO: 147680 - DNA, 19 bp, Artificial sequence
  SiRNA target sequence
cgaacctaatataattata

SEQ ID NO: 147681 - DNA, 19 bp, Artificial sequence
  SiRNA target sequence
gaacctaatataattatag

SEQ ID NO: 147682 - DNA, 19 bp, Artificial sequence
  SiRNA target sequence
aacctaatataattataga

SEQ ID NO: 147683 - DNA, 19 bp, Artificial sequence
  SiRNA target sequence
acctaatataattatagat

SEQ ID NO: 147684 - DNA, 19 bp, Artificial sequence
  SiRNA target sequence
cctaatataattatagata

SEQ ID NO: 147685 - DNA, 19 bp, Artificial sequence
  SiRNA target sequence
ctaatataattatagataa

SEQ ID NO: 147686 - DNA, 19 bp, Artificial sequence
  SiRNA target sequence
taatataattatagataag

SEQ ID NO: 147687 - DNA, 19 bp, Artificial sequence
  SiRNA target sequence
aatataattatagataaga

SEQ ID NO: 147688 - DNA, 19 bp, Artificial sequence
  SiRNA target sequence
atataattatagataagaa

SEQ ID NO: 147689 - DNA, 19 bp, Artificial sequence
  SiRNA target sequence
tataattatagataagaat

SEQ ID NO: 147690 - DNA, 19 bp, Artificial sequence
  SiRNA target sequence
ataattatagataagaata

SEQ ID NO: 147691 - DNA, 19 bp, Artificial sequence
  SiRNA target sequence
taattatagataagaatat

SEQ ID NO: 147692 - DNA, 19 bp, Artificial sequence
  SiRNA target sequence
aattatagataagaatatt

SEQ ID NO: 147693 - DNA, 19 bp, Artificial sequence
  SiRNA target sequence
attatagataagaatattg

SEQ ID NO: 147694 - DNA, 19 bp, Artificial sequence
  SiRNA target sequence
ttatagataagaatattga

SEQ ID NO: 147695 - DNA, 19 bp, Artificial sequence
  SiRNA target sequence
tatagataagaatattgat

SEQ ID NO: 147696 - DNA, 19 bp, Artificial sequence
  SiRNA target sequence
atagataagaatattgata

SEQ ID NO: 147697 - DNA, 19 bp, Artificial sequence
  SiRNA target sequence
tagataagaatattgataa

SEQ ID NO: 147698 - DNA, 19 bp, Artificial sequence
  SiRNA target sequence
agataagaatattgataaa

SEQ ID NO: 147699 - DNA, 19 bp, Artificial sequence
  SiRNA target sequence
gataagaatattgataaag

SEQ ID NO: 147700 - DNA, 19 bp, Artificial sequence
  SiRNA target sequence
ataagaatattgataaaga

SEQ ID NO: 147701 - DNA, 19 bp, Artificial sequence
  SiRNA target sequence
taagaatattgataaagat

SEQ ID NO: 147702 - DNA, 19 bp, Artificial sequence
  SiRNA target sequence
aagaatattgataaagatt

SEQ ID NO: 147703 - DNA, 19 bp, Artificial sequence
  SiRNA target sequence
agaatattgataaagattt

SEQ ID NO: 147704 - DNA, 19 bp, Artificial sequence
  SiRNA target sequence
gaatattgataaagattta

SEQ ID NO: 147705 - DNA, 19 bp, Artificial sequence
  SiRNA target sequence
aatattgataaagatttat

SEQ ID NO: 147706 - DNA, 19 bp, Artificial sequence
  SiRNA target sequence
atattgataaagatttatt

SEQ ID NO: 147707 - DNA, 19 bp, Artificial sequence
  SiRNA target sequence
tattgataaagatttatta

SEQ ID NO: 147708 - DNA, 19 bp, Artificial sequence
  SiRNA target sequence
attgataaagatttattag

SEQ ID NO: 147709 - DNA, 19 bp, Artificial sequence
  SiRNA target sequence
ttgataaagatttattagc

SEQ ID NO: 147710 - DNA, 19 bp, Artificial sequence
  SiRNA target sequence
tgataaagatttattagca

SEQ ID NO: 147711 - DNA, 19 bp, Artificial sequence
  SiRNA target sequence
gataaagatttattagcac

SEQ ID NO: 147712 - DNA, 19 bp, Artificial sequence
  SiRNA target sequence
ataaagatttattagcacg

SEQ ID NO: 147713 - DNA, 19 bp, Artificial sequence
  SiRNA target sequence
taaagatttattagcacgc

SEQ ID NO: 147714 - DNA, 19 bp, Artificial sequence
  SiRNA target sequence
aaagatttattagcacgcg

SEQ ID NO: 147715 - DNA, 19 bp, Artificial sequence
  SiRNA target sequence
aagatttattagcacgcgc

SEQ ID NO: 147716 - DNA, 19 bp, Artificial sequence
  SiRNA target sequence
agatttattagcacgcgcc

SEQ ID NO: 147717 - DNA, 19 bp, Artificial sequence
  SiRNA target sequence
gatttattagcacgcgcct

SEQ ID NO: 147718 - DNA, 19 bp, Artificial sequence
  SiRNA target sequence
atttattagcacgcgcctt

SEQ ID NO: 147719 - DNA, 19 bp, Artificial sequence
  SiRNA target sequence
tttattagcacgcgccttg

SEQ ID NO: 147720 - DNA, 19 bp, Artificial sequence
  SiRNA target sequence
ttattagcacgcgccttga

SEQ ID NO: 147721 - DNA, 19 bp, Artificial sequence
  SiRNA target sequence
tattagcacgcgccttgaa

SEQ ID NO: 147722 - DNA, 19 bp, Artificial sequence
  SiRNA target sequence
attagcacgcgccttgaat

SEQ ID NO: 147723 - DNA, 19 bp, Artificial sequence
  SiRNA target sequence
ttagcacgcgccttgaatt

SEQ ID NO: 147724 - DNA, 19 bp, Artificial sequence
  SiRNA target sequence
tagcacgcgccttgaatta

SEQ ID NO: 147725 - DNA, 19 bp, Artificial sequence
  SiRNA target sequence
agcacgcgccttgaattat

SEQ ID NO: 147726 - DNA, 19 bp, Artificial sequence
  SiRNA target sequence
gcacgcgccttgaattatg

SEQ ID NO: 147727 - DNA, 19 bp, Artificial sequence
  SiRNA target sequence
cacgcgccttgaattatgt

SEQ ID NO: 147728 - DNA, 19 bp, Artificial sequence
  SiRNA target sequence
acgcgccttgaattatgtt

SEQ ID NO: 147729 - DNA, 19 bp, Artificial sequence
  SiRNA target sequence
cgcgccttgaattatgttc

SEQ ID NO: 147730 - DNA, 19 bp, Artificial sequence
  SiRNA target sequence
gcgccttgaattatgttcc

SEQ ID NO: 147731 - DNA, 19 bp, Artificial sequence
  SiRNA target sequence
cgccttgaattatgttcct

SEQ ID NO: 147732 - DNA, 19 bp, Artificial sequence
  SiRNA target sequence
gccttgaattatgttcctg

SEQ ID NO: 147733 - DNA, 19 bp, Artificial sequence
  SiRNA target sequence
ccttgaattatgttcctgt

SEQ ID NO: 147734 - DNA, 19 bp, Artificial sequence
  SiRNA target sequence
cttgaattatgttcctgta

SEQ ID NO: 147735 - DNA, 19 bp, Artificial sequence
  SiRNA target sequence
ttgaattatgttcctgtaa

SEQ ID NO: 147736 - DNA, 19 bp, Artificial sequence
  SiRNA target sequence
tgaattatgttcctgtaag

SEQ ID NO: 147737 - DNA, 19 bp, Artificial sequence
  SiRNA target sequence
gaattatgttcctgtaaga

SEQ ID NO: 147738 - DNA, 19 bp, Artificial sequence
  SiRNA target sequence
aattatgttcctgtaagaa

SEQ ID NO: 147739 - DNA, 19 bp, Artificial sequence
  SiRNA target sequence
attatgttcctgtaagaaa

SEQ ID NO: 147740 - DNA, 19 bp, Artificial sequence
  SiRNA target sequence
ttatgttcctgtaagaaaa

SEQ ID NO: 147741 - DNA, 19 bp, Artificial sequence
  SiRNA target sequence
tatgttcctgtaagaaaag

SEQ ID NO: 147742 - DNA, 19 bp, Artificial sequence
  SiRNA target sequence
atgttcctgtaagaaaaga

SEQ ID NO: 147743 - DNA, 19 bp, Artificial sequence
  SiRNA target sequence
tgttcctgtaagaaaagat

SEQ ID NO: 147744 - DNA, 19 bp, Artificial sequence
  SiRNA target sequence
gttcctgtaagaaaagatt

SEQ ID NO: 147745 - DNA, 19 bp, Artificial sequence
  SiRNA target sequence
ttcctgtaagaaaagattt

SEQ ID NO: 147746 - DNA, 19 bp, Artificial sequence
  SiRNA target sequence
tcctgtaagaaaagatttt

SEQ ID NO: 147747 - DNA, 19 bp, Artificial sequence
  SiRNA target sequence
cctgtaagaaaagatttta

SEQ ID NO: 147748 - DNA, 19 bp, Artificial sequence
  SiRNA target sequence
ctgtaagaaaagattttac

SEQ ID NO: 147749 - DNA, 19 bp, Artificial sequence
  SiRNA target sequence
tgtaagaaaagattttaca

SEQ ID NO: 147750 - DNA, 19 bp, Artificial sequence
  SiRNA target sequence
gtaagaaaagattttacag

SEQ ID NO: 147751 - DNA, 19 bp, Artificial sequence
  SiRNA target sequence
taagaaaagattttacagg

SEQ ID NO: 147752 - DNA, 19 bp, Artificial sequence
  SiRNA target sequence
aagaaaagattttacagga

SEQ ID NO: 147753 - DNA, 19 bp, Artificial sequence
  SiRNA target sequence
agaaaagattttacaggaa

SEQ ID NO: 147754 - DNA, 19 bp, Artificial sequence
  SiRNA target sequence
gaaaagattttacaggaac

SEQ ID NO: 147755 - DNA, 19 bp, Artificial sequence
  SiRNA target sequence
aaaagattttacaggaact

SEQ ID NO: 147756 - DNA, 19 bp, Artificial sequence
  SiRNA target sequence
aaagattttacaggaactg

SEQ ID NO: 147757 - DNA, 19 bp, Artificial sequence
  SiRNA target sequence
aagattttacaggaactgc

SEQ ID NO: 147758 - DNA, 19 bp, Artificial sequence
  SiRNA target sequence
agattttacaggaactgct

SEQ ID NO: 147759 - DNA, 19 bp, Artificial sequence
  SiRNA target sequence
gattttacaggaactgctg

SEQ ID NO: 147760 - DNA, 19 bp, Artificial sequence
  SiRNA target sequence
attttacaggaactgctgt

SEQ ID NO: 147761 - DNA, 19 bp, Artificial sequence
  SiRNA target sequence
ttttacaggaactgctgtt

SEQ ID NO: 147762 - DNA, 19 bp, Artificial sequence
  SiRNA target sequence
tttacaggaactgctgttc

SEQ ID NO: 147763 - DNA, 19 bp, Artificial sequence
  SiRNA target sequence
ttacaggaactgctgttcc

SEQ ID NO: 147764 - DNA, 19 bp, Artificial sequence
  SiRNA target sequence
tacaggaactgctgttcca

SEQ ID NO: 147765 - DNA, 19 bp, Artificial sequence
  SiRNA target sequence
acaggaactgctgttccaa

SEQ ID NO: 147766 - DNA, 19 bp, Artificial sequence
  SiRNA target sequence
caggaactgctgttccaaa

SEQ ID NO: 147767 - DNA, 19 bp, Artificial sequence
  SiRNA target sequence
aggaactgctgttccaaaa

SEQ ID NO: 147768 - DNA, 19 bp, Artificial sequence
  SiRNA target sequence
ggaactgctgttccaaaat

SEQ ID NO: 147769 - DNA, 19 bp, Artificial sequence
  SiRNA target sequence
gaactgctgttccaaaata

SEQ ID NO: 147770 - DNA, 19 bp, Artificial sequence
  SiRNA target sequence
aactgctgttccaaaatat

SEQ ID NO: 147771 - DNA, 19 bp, Artificial sequence
  SiRNA target sequence
actgctgttccaaaatatg

SEQ ID NO: 147772 - DNA, 19 bp, Artificial sequence
  SiRNA target sequence
ctgctgttccaaaatatgc

SEQ ID NO: 147773 - DNA, 19 bp, Artificial sequence
  SiRNA target sequence
tgctgttccaaaatatgca

SEQ ID NO: 147774 - DNA, 19 bp, Artificial sequence
  SiRNA target sequence
gctgttccaaaatatgcag

SEQ ID NO: 147775 - DNA, 19 bp, Artificial sequence
  SiRNA target sequence
ctgttccaaaatatgcaga

SEQ ID NO: 147776 - DNA, 19 bp, Artificial sequence
  SiRNA target sequence
tgttccaaaatatgcagaa

SEQ ID NO: 147777 - DNA, 19 bp, Artificial sequence
  SiRNA target sequence
gttccaaaatatgcagaat

SEQ ID NO: 147778 - DNA, 19 bp, Artificial sequence
  SiRNA target sequence
ttccaaaatatgcagaatt

SEQ ID NO: 147779 - DNA, 19 bp, Artificial sequence
  SiRNA target sequence
tccaaaatatgcagaattt

SEQ ID NO: 147780 - DNA, 19 bp, Artificial sequence
  SiRNA target sequence
ccaaaatatgcagaatttg

SEQ ID NO: 147781 - DNA, 19 bp, Artificial sequence
  SiRNA target sequence
caaaatatgcagaatttgg

SEQ ID NO: 147782 - DNA, 19 bp, Artificial sequence
  SiRNA target sequence
aaaatatgcagaatttggt

SEQ ID NO: 147783 - DNA, 19 bp, Artificial sequence
  SiRNA target sequence
aaatatgcagaatttggtg

SEQ ID NO: 147784 - DNA, 19 bp, Artificial sequence
  SiRNA target sequence
aatatgcagaatttggtgt

SEQ ID NO: 147785 - DNA, 19 bp, Artificial sequence
  SiRNA target sequence
atatgcagaatttggtgtt

SEQ ID NO: 147786 - DNA, 19 bp, Artificial sequence
  SiRNA target sequence
tatgcagaatttggtgtta

SEQ ID NO: 147787 - DNA, 19 bp, Artificial sequence
  SiRNA target sequence
atgcagaatttggtgttat

SEQ ID NO: 147788 - DNA, 19 bp, Artificial sequence
  SiRNA target sequence
tgcagaatttggtgttatg

SEQ ID NO: 147789 - DNA, 19 bp, Artificial sequence
  SiRNA target sequence
gcagaatttggtgttatgc

SEQ ID NO: 147790 - DNA, 19 bp, Artificial sequence
  SiRNA target sequence
cagaatttggtgttatgcc

SEQ ID NO: 147791 - DNA, 19 bp, Artificial sequence
  SiRNA target sequence
agaatttggtgttatgcct

SEQ ID NO: 147792 - DNA, 19 bp, Artificial sequence
  SiRNA target sequence
gaatttggtgttatgccta

SEQ ID NO: 147793 - DNA, 19 bp, Artificial sequence
  SiRNA target sequence
aatttggtgttatgcctaa

SEQ ID NO: 147794 - DNA, 19 bp, Artificial sequence
  SiRNA target sequence
atttggtgttatgcctaaa

SEQ ID NO: 147795 - DNA, 19 bp, Artificial sequence
  SiRNA target sequence
tttggtgttatgcctaaag

SEQ ID NO: 147796 - DNA, 19 bp, Artificial sequence
  SiRNA target sequence
ttggtgttatgcctaaaga

SEQ ID NO: 147797 - DNA, 19 bp, Artificial sequence
  SiRNA target sequence
tggtgttatgcctaaagaa

SEQ ID NO: 147798 - DNA, 19 bp, Artificial sequence
  SiRNA target sequence
ggtgttatgcctaaagaac

SEQ ID NO: 147799 - DNA, 19 bp, Artificial sequence
  SiRNA target sequence
gtgttatgcctaaagaaca

SEQ ID NO: 147800 - DNA, 19 bp, Artificial sequence
  SiRNA target sequence
tgttatgcctaaagaacag

SEQ ID NO: 147801 - DNA, 19 bp, Artificial sequence
  SiRNA target sequence
gttatgcctaaagaacagg

SEQ ID NO: 147802 - DNA, 19 bp, Artificial sequence
  SiRNA target sequence
ttatgcctaaagaacagga

SEQ ID NO: 147803 - DNA, 19 bp, Artificial sequence
  SiRNA target sequence
tatgcctaaagaacaggaa

SEQ ID NO: 147804 - DNA, 19 bp, Artificial sequence
  SiRNA target sequence
atgcctaaagaacaggaag

SEQ ID NO: 147805 - DNA, 19 bp, Artificial sequence
  SiRNA target sequence
tgcctaaagaacaggaaga

SEQ ID NO: 147806 - DNA, 19 bp, Artificial sequence
  SiRNA target sequence
gcctaaagaacaggaagaa

SEQ ID NO: 147807 - DNA, 19 bp, Artificial sequence
  SiRNA target sequence
cctaaagaacaggaagaac

SEQ ID NO: 147808 - DNA, 19 bp, Artificial sequence
  SiRNA target sequence
ctaaagaacaggaagaaca

SEQ ID NO: 147809 - DNA, 19 bp, Artificial sequence
  SiRNA target sequence
taaagaacaggaagaacaa

SEQ ID NO: 147810 - DNA, 19 bp, Artificial sequence
  SiRNA target sequence
aaagaacaggaagaacaaa

SEQ ID NO: 147811 - DNA, 19 bp, Artificial sequence
  SiRNA target sequence
aagaacaggaagaacaaaa

SEQ ID NO: 147812 - DNA, 19 bp, Artificial sequence
  SiRNA target sequence
agaacaggaagaacaaaac

SEQ ID NO: 147813 - DNA, 19 bp, Artificial sequence
  SiRNA target sequence
gaacaggaagaacaaaacg

SEQ ID NO: 147814 - DNA, 19 bp, Artificial sequence
  SiRNA target sequence
aacaggaagaacaaaacga

SEQ ID NO: 147815 - DNA, 19 bp, Artificial sequence
  SiRNA target sequence
acaggaagaacaaaacgaa

SEQ ID NO: 147816 - DNA, 19 bp, Artificial sequence
  SiRNA target sequence
caggaagaacaaaacgaaa

SEQ ID NO: 147817 - DNA, 19 bp, Artificial sequence
  SiRNA target sequence
aggaagaacaaaacgaaag

SEQ ID NO: 147818 - DNA, 19 bp, Artificial sequence
  SiRNA target sequence
ggaagaacaaaacgaaaga

SEQ ID NO: 147819 - DNA, 19 bp, Artificial sequence
  SiRNA target sequence
gaagaacaaaacgaaagag

SEQ ID NO: 147820 - DNA, 19 bp, Artificial sequence
  SiRNA target sequence
aagaacaaaacgaaagaga

SEQ ID NO: 147821 - DNA, 19 bp, Artificial sequence
  SiRNA target sequence
agaacaaaacgaaagagaa

SEQ ID NO: 147822 - DNA, 19 bp, Artificial sequence
  SiRNA target sequence
gaacaaaacgaaagagaaa

SEQ ID NO: 147823 - DNA, 19 bp, Artificial sequence
  SiRNA target sequence
aacaaaacgaaagagaaag

SEQ ID NO: 147824 - DNA, 19 bp, Artificial sequence
  SiRNA target sequence
acaaaacgaaagagaaaga

SEQ ID NO: 147825 - DNA, 19 bp, Artificial sequence
  SiRNA target sequence
caaaacgaaagagaaagat

SEQ ID NO: 147826 - DNA, 19 bp, Artificial sequence
  SiRNA target sequence
aaaacgaaagagaaagatt

SEQ ID NO: 147827 - DNA, 19 bp, Artificial sequence
  SiRNA target sequence
aaacgaaagagaaagattc

SEQ ID NO: 147828 - DNA, 19 bp, Artificial sequence
  SiRNA target sequence
aacgaaagagaaagattcg

SEQ ID NO: 147829 - DNA, 19 bp, Artificial sequence
  SiRNA target sequence
acgaaagagaaagattcga

SEQ ID NO: 147830 - DNA, 19 bp, Artificial sequence
  SiRNA target sequence
cgaaagagaaagattcgaa

SEQ ID NO: 147831 - DNA, 19 bp, Artificial sequence
  SiRNA target sequence
gaaagagaaagattcgaag

SEQ ID NO: 147832 - DNA, 19 bp, Artificial sequence
  SiRNA target sequence
aaagagaaagattcgaagg

SEQ ID NO: 147833 - DNA, 19 bp, Artificial sequence
  SiRNA target sequence
aagagaaagattcgaaggt

SEQ ID NO: 147834 - DNA, 19 bp, Artificial sequence
  SiRNA target sequence
agagaaagattcgaaggtg

SEQ ID NO: 147835 - DNA, 19 bp, Artificial sequence
  SiRNA target sequence
gagaaagattcgaaggtgc

SEQ ID NO: 147836 - DNA, 19 bp, Artificial sequence
  SiRNA target sequence
agaaagattcgaaggtgca

SEQ ID NO: 147837 - DNA, 19 bp, Artificial sequence
  SiRNA target sequence
gaaagattcgaaggtgcag

SEQ ID NO: 147838 - DNA, 19 bp, Artificial sequence
  SiRNA target sequence
aaagattcgaaggtgcaga

SEQ ID NO: 147839 - DNA, 19 bp, Artificial sequence
  SiRNA target sequence
aagattcgaaggtgcagaa

SEQ ID NO: 147840 - DNA, 19 bp, Artificial sequence
  SiRNA target sequence
agattcgaaggtgcagaag

SEQ ID NO: 147841 - DNA, 19 bp, Artificial sequence
  SiRNA target sequence
gattcgaaggtgcagaaga

SEQ ID NO: 147842 - DNA, 19 bp, Artificial sequence
  SiRNA target sequence
attcgaaggtgcagaagag

SEQ ID NO: 147843 - DNA, 19 bp, Artificial sequence
  SiRNA target sequence
ttcgaaggtgcagaagagt

SEQ ID NO: 147844 - DNA, 19 bp, Artificial sequence
  SiRNA target sequence
tcgaaggtgcagaagagtt

SEQ ID NO: 147845 - DNA, 19 bp, Artificial sequence
  SiRNA target sequence
cgaaggtgcagaagagttt

SEQ ID NO: 147846 - DNA, 19 bp, Artificial sequence
  SiRNA target sequence
gaaggtgcagaagagtttt

SEQ ID NO: 147847 - DNA, 19 bp, Artificial sequence
  SiRNA target sequence
aaggtgcagaagagttttt

SEQ ID NO: 147848 - DNA, 19 bp, Artificial sequence
  SiRNA target sequence
aggtgcagaagagtttttt

SEQ ID NO: 147849 - DNA, 19 bp, Artificial sequence
  SiRNA target sequence
ggtgcagaagagttttttg

SEQ ID NO: 147850 - DNA, 19 bp, Artificial sequence
  SiRNA target sequence
gtgcagaagagttttttgg

SEQ ID NO: 147851 - DNA, 19 bp, Artificial sequence
  SiRNA target sequence
tgcagaagagttttttgga

SEQ ID NO: 147852 - DNA, 19 bp, Artificial sequence
  SiRNA target sequence
gcagaagagttttttggag

SEQ ID NO: 147853 - DNA, 19 bp, Artificial sequence
  SiRNA target sequence
cagaagagttttttggagg

SEQ ID NO: 147854 - DNA, 19 bp, Artificial sequence
  SiRNA target sequence
agaagagttttttggagga

SEQ ID NO: 147855 - DNA, 19 bp, Artificial sequence
  SiRNA target sequence
gaagagttttttggaggaa

SEQ ID NO: 147856 - DNA, 19 bp, Artificial sequence
  SiRNA target sequence
aagagttttttggaggaaa

SEQ ID NO: 147857 - DNA, 19 bp, Artificial sequence
  SiRNA target sequence
agagttttttggaggaaat

SEQ ID NO: 147858 - DNA, 19 bp, Artificial sequence
  SiRNA target sequence
gagttttttggaggaaatg

SEQ ID NO: 147859 - DNA, 19 bp, Artificial sequence
  SiRNA target sequence
agttttttggaggaaatgg

SEQ ID NO: 147860 - DNA, 19 bp, Artificial sequence
  SiRNA target sequence
gttttttggaggaaatggt

SEQ ID NO: 147861 - DNA, 19 bp, Artificial sequence
  SiRNA target sequence
ttttttggaggaaatggta

SEQ ID NO: 147862 - DNA, 19 bp, Artificial sequence
  SiRNA target sequence
tttttggaggaaatggtag

SEQ ID NO: 147863 - DNA, 19 bp, Artificial sequence
  SiRNA target sequence
ttttggaggaaatggtaga

SEQ ID NO: 147864 - DNA, 19 bp, Artificial sequence
  SiRNA target sequence
tttggaggaaatggtagag

SEQ ID NO: 147865 - DNA, 19 bp, Artificial sequence
  SiRNA target sequence
ttggaggaaatggtagaga

SEQ ID NO: 147866 - DNA, 19 bp, Artificial sequence
  SiRNA target sequence
tggaggaaatggtagagat

SEQ ID NO: 147867 - DNA, 19 bp, Artificial sequence
  SiRNA target sequence
ggaggaaatggtagagatt

SEQ ID NO: 147868 - DNA, 19 bp, Artificial sequence
  SiRNA target sequence
gaggaaatggtagagattt

SEQ ID NO: 147869 - DNA, 19 bp, Artificial sequence
  SiRNA target sequence
aggaaatggtagagatttt

SEQ ID NO: 147870 - DNA, 19 bp, Artificial sequence
  SiRNA target sequence
ggaaatggtagagattttt

SEQ ID NO: 147871 - DNA, 19 bp, Artificial sequence
  SiRNA target sequence
gaaatggtagagatttttt

SEQ ID NO: 147872 - DNA, 19 bp, Artificial sequence
  SiRNA target sequence
aaatggtagagattttttt

SEQ ID NO: 147873 - DNA, 19 bp, Artificial sequence
  SiRNA target sequence
aatggtagagattttttta

SEQ ID NO: 147874 - DNA, 19 bp, Artificial sequence
  SiRNA target sequence
atggtagagatttttttag

SEQ ID NO: 147875 - DNA, 19 bp, Artificial sequence
  SiRNA target sequence
tggtagagatttttttagc

SEQ ID NO: 147876 - DNA, 19 bp, Artificial sequence
  SiRNA target sequence
ggtagagatttttttagca

SEQ ID NO: 147877 - DNA, 19 bp, Artificial sequence
  SiRNA target sequence
gtagagatttttttagcaa

SEQ ID NO: 147878 - DNA, 19 bp, Artificial sequence
  SiRNA target sequence
tagagatttttttagcaag

SEQ ID NO: 147879 - DNA, 19 bp, Artificial sequence
  SiRNA target sequence
agagatttttttagcaagt

SEQ ID NO: 147880 - DNA, 19 bp, Artificial sequence
  SiRNA target sequence
gagatttttttagcaagtt

SEQ ID NO: 147881 - DNA, 19 bp, Artificial sequence
  SiRNA target sequence
agatttttttagcaagttt

SEQ ID NO: 147882 - DNA, 19 bp, Artificial sequence
  SiRNA target sequence
gatttttttagcaagtttg

SEQ ID NO: 147883 - DNA, 19 bp, Artificial sequence
  SiRNA target sequence
atttttttagcaagtttgg

SEQ ID NO: 147884 - DNA, 19 bp, Artificial sequence
  SiRNA target sequence
tttttttagcaagtttgga

SEQ ID NO: 147885 - DNA, 19 bp, Artificial sequence
  SiRNA target sequence
ttttttagcaagtttggat

SEQ ID NO: 147886 - DNA, 19 bp, Artificial sequence
  SiRNA target sequence
tttttagcaagtttggatt

SEQ ID NO: 147887 - DNA, 19 bp, Artificial sequence
  SiRNA target sequence
ttttagcaagtttggattt

SEQ ID NO: 147888 - DNA, 19 bp, Artificial sequence
  SiRNA target sequence
tttagcaagtttggatttt

SEQ ID NO: 147889 - DNA, 19 bp, Artificial sequence
  SiRNA target sequence
ttagcaagtttggattttt

SEQ ID NO: 147890 - DNA, 19 bp, Artificial sequence
  SiRNA target sequence
tagcaagtttggatttttc

SEQ ID NO: 147891 - DNA, 19 bp, Artificial sequence
  SiRNA target sequence
agcaagtttggatttttct

SEQ ID NO: 147892 - DNA, 19 bp, Artificial sequence
  SiRNA target sequence
gcaagtttggatttttcta

SEQ ID NO: 147893 - DNA, 19 bp, Artificial sequence
  SiRNA target sequence
caagtttggatttttctaa

SEQ ID NO: 147894 - DNA, 20 bp, Artificial sequence
  SiRNA target sequence
atggcacaagacccccaagg

SEQ ID NO: 147895 - DNA, 20 bp, Artificial sequence
  SiRNA target sequence
tggcacaagacccccaagga

SEQ ID NO: 147896 - DNA, 20 bp, Artificial sequence
  SiRNA target sequence
ggcacaagacccccaaggac

SEQ ID NO: 147897 - DNA, 20 bp, Artificial sequence
  SiRNA target sequence
gcacaagacccccaaggact

SEQ ID NO: 147898 - DNA, 20 bp, Artificial sequence
  SiRNA target sequence
cacaagacccccaaggactt

SEQ ID NO: 147899 - DNA, 20 bp, Artificial sequence
  SiRNA target sequence
acaagacccccaaggacttt

SEQ ID NO: 147900 - DNA, 20 bp, Artificial sequence
  SiRNA target sequence
caagacccccaaggacttta

SEQ ID NO: 147901 - DNA, 20 bp, Artificial sequence
  SiRNA target sequence
aagacccccaaggactttat

SEQ ID NO: 147902 - DNA, 20 bp, Artificial sequence
  SiRNA target sequence
agacccccaaggactttatg

SEQ ID NO: 147903 - DNA, 20 bp, Artificial sequence
  SiRNA target sequence
gacccccaaggactttatga

SEQ ID NO: 147904 - DNA, 20 bp, Artificial sequence
  SiRNA target sequence
acccccaaggactttatgaa

SEQ ID NO: 147905 - DNA, 20 bp, Artificial sequence
  SiRNA target sequence
cccccaaggactttatgaag

SEQ ID NO: 147906 - DNA, 20 bp, Artificial sequence
  SiRNA target sequence
ccccaaggactttatgaagt

SEQ ID NO: 147907 - DNA, 20 bp, Artificial sequence
  SiRNA target sequence
cccaaggactttatgaagta

SEQ ID NO: 147908 - DNA, 20 bp, Artificial sequence
  SiRNA target sequence
ccaaggactttatgaagtat

SEQ ID NO: 147909 - DNA, 20 bp, Artificial sequence
  SiRNA target sequence
caaggactttatgaagtatt

SEQ ID NO: 147910 - DNA, 20 bp, Artificial sequence
  SiRNA target sequence
aaggactttatgaagtatta

SEQ ID NO: 147911 - DNA, 20 bp, Artificial sequence
  SiRNA target sequence
aggactttatgaagtattag

SEQ ID NO: 147912 - DNA, 20 bp, Artificial sequence
  SiRNA target sequence
ggactttatgaagtattagg

SEQ ID NO: 147913 - DNA, 20 bp, Artificial sequence
  SiRNA target sequence
gactttatgaagtattagga

SEQ ID NO: 147914 - DNA, 20 bp, Artificial sequence
  SiRNA target sequence
actttatgaagtattaggac

SEQ ID NO: 147915 - DNA, 20 bp, Artificial sequence
  SiRNA target sequence
ctttatgaagtattaggact

SEQ ID NO: 147916 - DNA, 20 bp, Artificial sequence
  SiRNA target sequence
tttatgaagtattaggactt

SEQ ID NO: 147917 - DNA, 20 bp, Artificial sequence
  SiRNA target sequence
ttatgaagtattaggactta

SEQ ID NO: 147918 - DNA, 20 bp, Artificial sequence
  SiRNA target sequence
tatgaagtattaggacttaa

SEQ ID NO: 147919 - DNA, 20 bp, Artificial sequence
  SiRNA target sequence
atgaagtattaggacttaaa

SEQ ID NO: 147920 - DNA, 20 bp, Artificial sequence
  SiRNA target sequence
tgaagtattaggacttaaag

SEQ ID NO: 147921 - DNA, 20 bp, Artificial sequence
  SiRNA target sequence
gaagtattaggacttaaagc

SEQ ID NO: 147922 - DNA, 20 bp, Artificial sequence
  SiRNA target sequence
aagtattaggacttaaagct

SEQ ID NO: 147923 - DNA, 20 bp, Artificial sequence
  SiRNA target sequence
agtattaggacttaaagctg

SEQ ID NO: 147924 - DNA, 20 bp, Artificial sequence
  SiRNA target sequence
gtattaggacttaaagctgg

SEQ ID NO: 147925 - DNA, 20 bp, Artificial sequence
  SiRNA target sequence
tattaggacttaaagctggt

SEQ ID NO: 147926 - DNA, 20 bp, Artificial sequence
  SiRNA target sequence
attaggacttaaagctggtg

SEQ ID NO: 147927 - DNA, 20 bp, Artificial sequence
  SiRNA target sequence
ttaggacttaaagctggtgc

SEQ ID NO: 147928 - DNA, 20 bp, Artificial sequence
  SiRNA target sequence
taggacttaaagctggtgca

SEQ ID NO: 147929 - DNA, 20 bp, Artificial sequence
  SiRNA target sequence
aggacttaaagctggtgcaa

SEQ ID NO: 147930 - DNA, 20 bp, Artificial sequence
  SiRNA target sequence
ggacttaaagctggtgcaag

SEQ ID NO: 147931 - DNA, 20 bp, Artificial sequence
  SiRNA target sequence
gacttaaagctggtgcaagc

SEQ ID NO: 147932 - DNA, 20 bp, Artificial sequence
  SiRNA target sequence
acttaaagctggtgcaagca

SEQ ID NO: 147933 - DNA, 20 bp, Artificial sequence
  SiRNA target sequence
cttaaagctggtgcaagcat

SEQ ID NO: 147934 - DNA, 20 bp, Artificial sequence
  SiRNA target sequence
ttaaagctggtgcaagcatt

SEQ ID NO: 147935 - DNA, 20 bp, Artificial sequence
  SiRNA target sequence
taaagctggtgcaagcattg

SEQ ID NO: 147936 - DNA, 20 bp, Artificial sequence
  SiRNA target sequence
aaagctggtgcaagcattga

SEQ ID NO: 147937 - DNA, 20 bp, Artificial sequence
  SiRNA target sequence
aagctggtgcaagcattgat

SEQ ID NO: 147938 - DNA, 20 bp, Artificial sequence
  SiRNA target sequence
agctggtgcaagcattgatg

SEQ ID NO: 147939 - DNA, 20 bp, Artificial sequence
  SiRNA target sequence
gctggtgcaagcattgatga

SEQ ID NO: 147940 - DNA, 20 bp, Artificial sequence
  SiRNA target sequence
ctggtgcaagcattgatgaa

SEQ ID NO: 147941 - DNA, 20 bp, Artificial sequence
  SiRNA target sequence
tggtgcaagcattgatgaag

SEQ ID NO: 147942 - DNA, 20 bp, Artificial sequence
  SiRNA target sequence
ggtgcaagcattgatgaagt

SEQ ID NO: 147943 - DNA, 20 bp, Artificial sequence
  SiRNA target sequence
gtgcaagcattgatgaagtt

SEQ ID NO: 147944 - DNA, 20 bp, Artificial sequence
  SiRNA target sequence
tgcaagcattgatgaagtta

SEQ ID NO: 147945 - DNA, 20 bp, Artificial sequence
  SiRNA target sequence
gcaagcattgatgaagttaa

SEQ ID NO: 147946 - DNA, 20 bp, Artificial sequence
  SiRNA target sequence
caagcattgatgaagttaaa

SEQ ID NO: 147947 - DNA, 20 bp, Artificial sequence
  SiRNA target sequence
aagcattgatgaagttaaaa

SEQ ID NO: 147948 - DNA, 20 bp, Artificial sequence
  SiRNA target sequence
agcattgatgaagttaaaaa

SEQ ID NO: 147949 - DNA, 20 bp, Artificial sequence
  SiRNA target sequence
gcattgatgaagttaaaaaa

SEQ ID NO: 147950 - DNA, 20 bp, Artificial sequence
  SiRNA target sequence
cattgatgaagttaaaaaag

SEQ ID NO: 147951 - DNA, 20 bp, Artificial sequence
  SiRNA target sequence
attgatgaagttaaaaaagc

SEQ ID NO: 147952 - DNA, 20 bp, Artificial sequence
  SiRNA target sequence
ttgatgaagttaaaaaagca

SEQ ID NO: 147953 - DNA, 20 bp, Artificial sequence
  SiRNA target sequence
tgatgaagttaaaaaagcat

SEQ ID NO: 147954 - DNA, 20 bp, Artificial sequence
  SiRNA target sequence
gatgaagttaaaaaagcatt

SEQ ID NO: 147955 - DNA, 20 bp, Artificial sequence
  SiRNA target sequence
atgaagttaaaaaagcattt

SEQ ID NO: 147956 - DNA, 20 bp, Artificial sequence
  SiRNA target sequence
tgaagttaaaaaagcattta

SEQ ID NO: 147957 - DNA, 20 bp, Artificial sequence
  SiRNA target sequence
gaagttaaaaaagcatttac

SEQ ID NO: 147958 - DNA, 20 bp, Artificial sequence
  SiRNA target sequence
aagttaaaaaagcatttaca

SEQ ID NO: 147959 - DNA, 20 bp, Artificial sequence
  SiRNA target sequence
agttaaaaaagcatttacaa

SEQ ID NO: 147960 - DNA, 20 bp, Artificial sequence
  SiRNA target sequence
gttaaaaaagcatttacaaa

SEQ ID NO: 147961 - DNA, 20 bp, Artificial sequence
  SiRNA target sequence
ttaaaaaagcatttacaaaa

SEQ ID NO: 147962 - DNA, 20 bp, Artificial sequence
  SiRNA target sequence
taaaaaagcatttacaaaaa

SEQ ID NO: 147963 - DNA, 20 bp, Artificial sequence
  SiRNA target sequence
aaaaaagcatttacaaaaaa

SEQ ID NO: 147964 - DNA, 20 bp, Artificial sequence
  SiRNA target sequence
aaaaagcatttacaaaaaaa

SEQ ID NO: 147965 - DNA, 20 bp, Artificial sequence
  SiRNA target sequence
aaaagcatttacaaaaaaac

SEQ ID NO: 147966 - DNA, 20 bp, Artificial sequence
  SiRNA target sequence
aaagcatttacaaaaaaaca

SEQ ID NO: 147967 - DNA, 20 bp, Artificial sequence
  SiRNA target sequence
aagcatttacaaaaaaacaa

SEQ ID NO: 147968 - DNA, 20 bp, Artificial sequence
  SiRNA target sequence
agcatttacaaaaaaacaaa

SEQ ID NO: 147969 - DNA, 20 bp, Artificial sequence
  SiRNA target sequence
gcatttacaaaaaaacaaag

SEQ ID NO: 147970 - DNA, 20 bp, Artificial sequence
  SiRNA target sequence
catttacaaaaaaacaaagg

SEQ ID NO: 147971 - DNA, 20 bp, Artificial sequence
  SiRNA target sequence
atttacaaaaaaacaaaggg

SEQ ID NO: 147972 - DNA, 20 bp, Artificial sequence
  SiRNA target sequence
tttacaaaaaaacaaaggga

SEQ ID NO: 147973 - DNA, 20 bp, Artificial sequence
  SiRNA target sequence
ttacaaaaaaacaaagggaa

SEQ ID NO: 147974 - DNA, 20 bp, Artificial sequence
  SiRNA target sequence
tacaaaaaaacaaagggaat

SEQ ID NO: 147975 - DNA, 20 bp, Artificial sequence
  SiRNA target sequence
acaaaaaaacaaagggaatg

SEQ ID NO: 147976 - DNA, 20 bp, Artificial sequence
  SiRNA target sequence
caaaaaaacaaagggaatgt

SEQ ID NO: 147977 - DNA, 20 bp, Artificial sequence
  SiRNA target sequence
aaaaaaacaaagggaatgtc

SEQ ID NO: 147978 - DNA, 20 bp, Artificial sequence
  SiRNA target sequence
aaaaaacaaagggaatgtca

SEQ ID NO: 147979 - DNA, 20 bp, Artificial sequence
  SiRNA target sequence
aaaaacaaagggaatgtcat

SEQ ID NO: 147980 - DNA, 20 bp, Artificial sequence
  SiRNA target sequence
aaaacaaagggaatgtcatc

SEQ ID NO: 147981 - DNA, 20 bp, Artificial sequence
  SiRNA target sequence
aaacaaagggaatgtcatcc

SEQ ID NO: 147982 - DNA, 20 bp, Artificial sequence
  SiRNA target sequence
aacaaagggaatgtcatccc

SEQ ID NO: 147983 - DNA, 20 bp, Artificial sequence
  SiRNA target sequence
acaaagggaatgtcatcccg

SEQ ID NO: 147984 - DNA, 20 bp, Artificial sequence
  SiRNA target sequence
caaagggaatgtcatcccga

SEQ ID NO: 147985 - DNA, 20 bp, Artificial sequence
  SiRNA target sequence
aaagggaatgtcatcccgat

SEQ ID NO: 147986 - DNA, 20 bp, Artificial sequence
  SiRNA target sequence
aagggaatgtcatcccgatg

SEQ ID NO: 147987 - DNA, 20 bp, Artificial sequence
  SiRNA target sequence
agggaatgtcatcccgatgg

SEQ ID NO: 147988 - DNA, 20 bp, Artificial sequence
  SiRNA target sequence
gggaatgtcatcccgatggt

SEQ ID NO: 147989 - DNA, 20 bp, Artificial sequence
  SiRNA target sequence
ggaatgtcatcccgatggtg

SEQ ID NO: 147990 - DNA, 20 bp, Artificial sequence
  SiRNA target sequence
gaatgtcatcccgatggtgc

SEQ ID NO: 147991 - DNA, 20 bp, Artificial sequence
  SiRNA target sequence
aatgtcatcccgatggtgca

SEQ ID NO: 147992 - DNA, 20 bp, Artificial sequence
  SiRNA target sequence
atgtcatcccgatggtgcat

SEQ ID NO: 147993 - DNA, 20 bp, Artificial sequence
  SiRNA target sequence
tgtcatcccgatggtgcatt

SEQ ID NO: 147994 - DNA, 20 bp, Artificial sequence
  SiRNA target sequence
gtcatcccgatggtgcattt

SEQ ID NO: 147995 - DNA, 20 bp, Artificial sequence
  SiRNA target sequence
tcatcccgatggtgcatttt

SEQ ID NO: 147996 - DNA, 20 bp, Artificial sequence
  SiRNA target sequence
catcccgatggtgcattttt

SEQ ID NO: 147997 - DNA, 20 bp, Artificial sequence
  SiRNA target sequence
atcccgatggtgcatttttt

SEQ ID NO: 147998 - DNA, 20 bp, Artificial sequence
  SiRNA target sequence
tcccgatggtgcatttttta

SEQ ID NO: 147999 - DNA, 20 bp, Artificial sequence
  SiRNA target sequence
cccgatggtgcattttttaa

SEQ ID NO: 148000 - DNA, 20 bp, Artificial sequence
  SiRNA target sequence
ccgatggtgcattttttaaa

SEQ ID NO: 148001 - DNA, 20 bp, Artificial sequence
  SiRNA target sequence
cgatggtgcattttttaaag

SEQ ID NO: 148002 - DNA, 20 bp, Artificial sequence
  SiRNA target sequence
gatggtgcattttttaaagc

SEQ ID NO: 148003 - DNA, 20 bp, Artificial sequence
  SiRNA target sequence
atggtgcattttttaaagct

SEQ ID NO: 148004 - DNA, 20 bp, Artificial sequence
  SiRNA target sequence
tggtgcattttttaaagctg

SEQ ID NO: 148005 - DNA, 20 bp, Artificial sequence
  SiRNA target sequence
ggtgcattttttaaagctgc

SEQ ID NO: 148006 - DNA, 20 bp, Artificial sequence
  SiRNA target sequence
gtgcattttttaaagctgct

SEQ ID NO: 148007 - DNA, 20 bp, Artificial sequence
  SiRNA target sequence
tgcattttttaaagctgctc

SEQ ID NO: 148008 - DNA, 20 bp, Artificial sequence
  SiRNA target sequence
gcattttttaaagctgctct

SEQ ID NO: 148009 - DNA, 20 bp, Artificial sequence
  SiRNA target sequence
cattttttaaagctgctctt

SEQ ID NO: 148010 - DNA, 20 bp, Artificial sequence
  SiRNA target sequence
attttttaaagctgctctta

SEQ ID NO: 148011 - DNA, 20 bp, Artificial sequence
  SiRNA target sequence
ttttttaaagctgctcttag

SEQ ID NO: 148012 - DNA, 20 bp, Artificial sequence
  SiRNA target sequence
tttttaaagctgctcttaga

SEQ ID NO: 148013 - DNA, 20 bp, Artificial sequence
  SiRNA target sequence
ttttaaagctgctcttagaa

SEQ ID NO: 148014 - DNA, 20 bp, Artificial sequence
  SiRNA target sequence
tttaaagctgctcttagaaa

SEQ ID NO: 148015 - DNA, 20 bp, Artificial sequence
  SiRNA target sequence
ttaaagctgctcttagaaaa

SEQ ID NO: 148016 - DNA, 20 bp, Artificial sequence
  SiRNA target sequence
taaagctgctcttagaaaat

SEQ ID NO: 148017 - DNA, 20 bp, Artificial sequence
  SiRNA target sequence
aaagctgctcttagaaaatg

SEQ ID NO: 148018 - DNA, 20 bp, Artificial sequence
  SiRNA target sequence
aagctgctcttagaaaatgt

SEQ ID NO: 148019 - DNA, 20 bp, Artificial sequence
  SiRNA target sequence
agctgctcttagaaaatgta

SEQ ID NO: 148020 - DNA, 20 bp, Artificial sequence
  SiRNA target sequence
gctgctcttagaaaatgtaa

SEQ ID NO: 148021 - DNA, 20 bp, Artificial sequence
  SiRNA target sequence
ctgctcttagaaaatgtaaa

SEQ ID NO: 148022 - DNA, 20 bp, Artificial sequence
  SiRNA target sequence
tgctcttagaaaatgtaaaa

SEQ ID NO: 148023 - DNA, 20 bp, Artificial sequence
  SiRNA target sequence
gctcttagaaaatgtaaaac

SEQ ID NO: 148024 - DNA, 20 bp, Artificial sequence
  SiRNA target sequence
ctcttagaaaatgtaaaaca

SEQ ID NO: 148025 - DNA, 20 bp, Artificial sequence
  SiRNA target sequence
tcttagaaaatgtaaaacag

SEQ ID NO: 148026 - DNA, 20 bp, Artificial sequence
  SiRNA target sequence
cttagaaaatgtaaaacaga

SEQ ID NO: 148027 - DNA, 20 bp, Artificial sequence
  SiRNA target sequence
ttagaaaatgtaaaacagat

SEQ ID NO: 148028 - DNA, 20 bp, Artificial sequence
  SiRNA target sequence
tagaaaatgtaaaacagatg

SEQ ID NO: 148029 - DNA, 20 bp, Artificial sequence
  SiRNA target sequence
agaaaatgtaaaacagatga

SEQ ID NO: 148030 - DNA, 20 bp, Artificial sequence
  SiRNA target sequence
gaaaatgtaaaacagatgaa

SEQ ID NO: 148031 - DNA, 20 bp, Artificial sequence
  SiRNA target sequence
aaaatgtaaaacagatgaag

SEQ ID NO: 148032 - DNA, 20 bp, Artificial sequence
  SiRNA target sequence
aaatgtaaaacagatgaaga

SEQ ID NO: 148033 - DNA, 20 bp, Artificial sequence
  SiRNA target sequence
aatgtaaaacagatgaagaa

SEQ ID NO: 148034 - DNA, 20 bp, Artificial sequence
  SiRNA target sequence
atgtaaaacagatgaagaaa

SEQ ID NO: 148035 - DNA, 20 bp, Artificial sequence
  SiRNA target sequence
tgtaaaacagatgaagaaag

SEQ ID NO: 148036 - DNA, 20 bp, Artificial sequence
  SiRNA target sequence
gtaaaacagatgaagaaaga

SEQ ID NO: 148037 - DNA, 20 bp, Artificial sequence
  SiRNA target sequence
taaaacagatgaagaaagag

SEQ ID NO: 148038 - DNA, 20 bp, Artificial sequence
  SiRNA target sequence
aaaacagatgaagaaagagc

SEQ ID NO: 148039 - DNA, 20 bp, Artificial sequence
  SiRNA target sequence
aaacagatgaagaaagagca

SEQ ID NO: 148040 - DNA, 20 bp, Artificial sequence
  SiRNA target sequence
aacagatgaagaaagagcaa

SEQ ID NO: 148041 - DNA, 20 bp, Artificial sequence
  SiRNA target sequence
acagatgaagaaagagcaaa

SEQ ID NO: 148042 - DNA, 20 bp, Artificial sequence
  SiRNA target sequence
cagatgaagaaagagcaaaa

SEQ ID NO: 148043 - DNA, 20 bp, Artificial sequence
  SiRNA target sequence
agatgaagaaagagcaaaag

SEQ ID NO: 148044 - DNA, 20 bp, Artificial sequence
  SiRNA target sequence
gatgaagaaagagcaaaagt

SEQ ID NO: 148045 - DNA, 20 bp, Artificial sequence
  SiRNA target sequence
atgaagaaagagcaaaagtt

SEQ ID NO: 148046 - DNA, 20 bp, Artificial sequence
  SiRNA target sequence
tgaagaaagagcaaaagttg

SEQ ID NO: 148047 - DNA, 20 bp, Artificial sequence
  SiRNA target sequence
gaagaaagagcaaaagttga

SEQ ID NO: 148048 - DNA, 20 bp, Artificial sequence
  SiRNA target sequence
aagaaagagcaaaagttgaa

SEQ ID NO: 148049 - DNA, 20 bp, Artificial sequence
  SiRNA target sequence
agaaagagcaaaagttgaaa

SEQ ID NO: 148050 - DNA, 20 bp, Artificial sequence
  SiRNA target sequence
gaaagagcaaaagttgaaaa

SEQ ID NO: 148051 - DNA, 20 bp, Artificial sequence
  SiRNA target sequence
aaagagcaaaagttgaaaaa

SEQ ID NO: 148052 - DNA, 20 bp, Artificial sequence
  SiRNA target sequence
aagagcaaaagttgaaaaag

SEQ ID NO: 148053 - DNA, 20 bp, Artificial sequence
  SiRNA target sequence
agagcaaaagttgaaaaaga

SEQ ID NO: 148054 - DNA, 20 bp, Artificial sequence
  SiRNA target sequence
gagcaaaagttgaaaaagaa

SEQ ID NO: 148055 - DNA, 20 bp, Artificial sequence
  SiRNA target sequence
agcaaaagttgaaaaagaat

SEQ ID NO: 148056 - DNA, 20 bp, Artificial sequence
  SiRNA target sequence
gcaaaagttgaaaaagaatt

SEQ ID NO: 148057 - DNA, 20 bp, Artificial sequence
  SiRNA target sequence
caaaagttgaaaaagaattt

SEQ ID NO: 148058 - DNA, 20 bp, Artificial sequence
  SiRNA target sequence
aaaagttgaaaaagaattta

SEQ ID NO: 148059 - DNA, 20 bp, Artificial sequence
  SiRNA target sequence
aaagttgaaaaagaatttaa

SEQ ID NO: 148060 - DNA, 20 bp, Artificial sequence
  SiRNA target sequence
aagttgaaaaagaatttaaa

SEQ ID NO: 148061 - DNA, 20 bp, Artificial sequence
  SiRNA target sequence
agttgaaaaagaatttaaag

SEQ ID NO: 148062 - DNA, 20 bp, Artificial sequence
  SiRNA target sequence
gttgaaaaagaatttaaaga

SEQ ID NO: 148063 - DNA, 20 bp, Artificial sequence
  SiRNA target sequence
ttgaaaaagaatttaaagaa

SEQ ID NO: 148064 - DNA, 20 bp, Artificial sequence
  SiRNA target sequence
tgaaaaagaatttaaagaaa

SEQ ID NO: 148065 - DNA, 20 bp, Artificial sequence
  SiRNA target sequence
gaaaaagaatttaaagaaaa

SEQ ID NO: 148066 - DNA, 20 bp, Artificial sequence
  SiRNA target sequence
aaaaagaatttaaagaaaaa

SEQ ID NO: 148067 - DNA, 20 bp, Artificial sequence
  SiRNA target sequence
aaaagaatttaaagaaaaat

SEQ ID NO: 148068 - DNA, 20 bp, Artificial sequence
  SiRNA target sequence
aaagaatttaaagaaaaatc

SEQ ID NO: 148069 - DNA, 20 bp, Artificial sequence
  SiRNA target sequence
aagaatttaaagaaaaatca

SEQ ID NO: 148070 - DNA, 20 bp, Artificial sequence
  SiRNA target sequence
agaatttaaagaaaaatcac

SEQ ID NO: 148071 - DNA, 20 bp, Artificial sequence
  SiRNA target sequence
gaatttaaagaaaaatcaca

SEQ ID NO: 148072 - DNA, 20 bp, Artificial sequence
  SiRNA target sequence
aatttaaagaaaaatcacaa

SEQ ID NO: 148073 - DNA, 20 bp, Artificial sequence
  SiRNA target sequence
atttaaagaaaaatcacaaa

SEQ ID NO: 148074 - DNA, 20 bp, Artificial sequence
  SiRNA target sequence
tttaaagaaaaatcacaaaa

SEQ ID NO: 148075 - DNA, 20 bp, Artificial sequence
  SiRNA target sequence
ttaaagaaaaatcacaaaaa

SEQ ID NO: 148076 - DNA, 20 bp, Artificial sequence
  SiRNA target sequence
taaagaaaaatcacaaaaat

SEQ ID NO: 148077 - DNA, 20 bp, Artificial sequence
  SiRNA target sequence
aaagaaaaatcacaaaaatg

SEQ ID NO: 148078 - DNA, 20 bp, Artificial sequence
  SiRNA target sequence
aagaaaaatcacaaaaatgt

SEQ ID NO: 148079 - DNA, 20 bp, Artificial sequence
  SiRNA target sequence
agaaaaatcacaaaaatgta

SEQ ID NO: 148080 - DNA, 20 bp, Artificial sequence
  SiRNA target sequence
gaaaaatcacaaaaatgtaa

SEQ ID NO: 148081 - DNA, 20 bp, Artificial sequence
  SiRNA target sequence
aaaaatcacaaaaatgtaat

SEQ ID NO: 148082 - DNA, 20 bp, Artificial sequence
  SiRNA target sequence
aaaatcacaaaaatgtaatc

SEQ ID NO: 148083 - DNA, 20 bp, Artificial sequence
  SiRNA target sequence
aaatcacaaaaatgtaatca

SEQ ID NO: 148084 - DNA, 20 bp, Artificial sequence
  SiRNA target sequence
aatcacaaaaatgtaatcaa

SEQ ID NO: 148085 - DNA, 20 bp, Artificial sequence
  SiRNA target sequence
atcacaaaaatgtaatcaag

SEQ ID NO: 148086 - DNA, 20 bp, Artificial sequence
  SiRNA target sequence
tcacaaaaatgtaatcaagc

SEQ ID NO: 148087 - DNA, 20 bp, Artificial sequence
  SiRNA target sequence
cacaaaaatgtaatcaagct

SEQ ID NO: 148088 - DNA, 20 bp, Artificial sequence
  SiRNA target sequence
acaaaaatgtaatcaagcta

SEQ ID NO: 148089 - DNA, 20 bp, Artificial sequence
  SiRNA target sequence
caaaaatgtaatcaagctaa

SEQ ID NO: 148090 - DNA, 20 bp, Artificial sequence
  SiRNA target sequence
aaaaatgtaatcaagctaaa

SEQ ID NO: 148091 - DNA, 20 bp, Artificial sequence
  SiRNA target sequence
aaaatgtaatcaagctaaag

SEQ ID NO: 148092 - DNA, 20 bp, Artificial sequence
  SiRNA target sequence
aaatgtaatcaagctaaagc

SEQ ID NO: 148093 - DNA, 20 bp, Artificial sequence
  SiRNA target sequence
aatgtaatcaagctaaagca

SEQ ID NO: 148094 - DNA, 20 bp, Artificial sequence
  SiRNA target sequence
atgtaatcaagctaaagcag

SEQ ID NO: 148095 - DNA, 20 bp, Artificial sequence
  SiRNA target sequence
tgtaatcaagctaaagcagt

SEQ ID NO: 148096 - DNA, 20 bp, Artificial sequence
  SiRNA target sequence
gtaatcaagctaaagcagtt

SEQ ID NO: 148097 - DNA, 20 bp, Artificial sequence
  SiRNA target sequence
taatcaagctaaagcagttt

SEQ ID NO: 148098 - DNA, 20 bp, Artificial sequence
  SiRNA target sequence
aatcaagctaaagcagtttt

SEQ ID NO: 148099 - DNA, 20 bp, Artificial sequence
  SiRNA target sequence
atcaagctaaagcagtttta

SEQ ID NO: 148100 - DNA, 20 bp, Artificial sequence
  SiRNA target sequence
tcaagctaaagcagttttat

SEQ ID NO: 148101 - DNA, 20 bp, Artificial sequence
  SiRNA target sequence
caagctaaagcagttttatt

SEQ ID NO: 148102 - DNA, 20 bp, Artificial sequence
  SiRNA target sequence
aagctaaagcagttttattt

SEQ ID NO: 148103 - DNA, 20 bp, Artificial sequence
  SiRNA target sequence
agctaaagcagttttatttg

SEQ ID NO: 148104 - DNA, 20 bp, Artificial sequence
  SiRNA target sequence
gctaaagcagttttatttga

SEQ ID NO: 148105 - DNA, 20 bp, Artificial sequence
  SiRNA target sequence
ctaaagcagttttatttgat

SEQ ID NO: 148106 - DNA, 20 bp, Artificial sequence
  SiRNA target sequence
taaagcagttttatttgatg

SEQ ID NO: 148107 - DNA, 20 bp, Artificial sequence
  SiRNA target sequence
aaagcagttttatttgatga

SEQ ID NO: 148108 - DNA, 20 bp, Artificial sequence
  SiRNA target sequence
aagcagttttatttgatgag

SEQ ID NO: 148109 - DNA, 20 bp, Artificial sequence
  SiRNA target sequence
agcagttttatttgatgaga

SEQ ID NO: 148110 - DNA, 20 bp, Artificial sequence
  SiRNA target sequence
gcagttttatttgatgagaa

SEQ ID NO: 148111 - DNA, 20 bp, Artificial sequence
  SiRNA target sequence
cagttttatttgatgagaaa

SEQ ID NO: 148112 - DNA, 20 bp, Artificial sequence
  SiRNA target sequence
agttttatttgatgagaaaa

SEQ ID NO: 148113 - DNA, 20 bp, Artificial sequence
  SiRNA target sequence
gttttatttgatgagaaaaa

SEQ ID NO: 148114 - DNA, 20 bp, Artificial sequence
  SiRNA target sequence
ttttatttgatgagaaaaaa

SEQ ID NO: 148115 - DNA, 20 bp, Artificial sequence
  SiRNA target sequence
tttatttgatgagaaaaaaa

SEQ ID NO: 148116 - DNA, 20 bp, Artificial sequence
  SiRNA target sequence
ttatttgatgagaaaaaaaa

SEQ ID NO: 148117 - DNA, 20 bp, Artificial sequence
  SiRNA target sequence
tatttgatgagaaaaaaaag

SEQ ID NO: 148118 - DNA, 20 bp, Artificial sequence
  SiRNA target sequence
atttgatgagaaaaaaaagc

SEQ ID NO: 148119 - DNA, 20 bp, Artificial sequence
  SiRNA target sequence
tttgatgagaaaaaaaagca

SEQ ID NO: 148120 - DNA, 20 bp, Artificial sequence
  SiRNA target sequence
ttgatgagaaaaaaaagcaa

SEQ ID NO: 148121 - DNA, 20 bp, Artificial sequence
  SiRNA target sequence
tgatgagaaaaaaaagcaag

SEQ ID NO: 148122 - DNA, 20 bp, Artificial sequence
  SiRNA target sequence
gatgagaaaaaaaagcaaga

SEQ ID NO: 148123 - DNA, 20 bp, Artificial sequence
  SiRNA target sequence
atgagaaaaaaaagcaagag

SEQ ID NO: 148124 - DNA, 20 bp, Artificial sequence
  SiRNA target sequence
tgagaaaaaaaagcaagagt

SEQ ID NO: 148125 - DNA, 20 bp, Artificial sequence
  SiRNA target sequence
gagaaaaaaaagcaagagta

SEQ ID NO: 148126 - DNA, 20 bp, Artificial sequence
  SiRNA target sequence
agaaaaaaaagcaagagtat

SEQ ID NO: 148127 - DNA, 20 bp, Artificial sequence
  SiRNA target sequence
gaaaaaaaagcaagagtatg

SEQ ID NO: 148128 - DNA, 20 bp, Artificial sequence
  SiRNA target sequence
aaaaaaaagcaagagtatga

SEQ ID NO: 148129 - DNA, 20 bp, Artificial sequence
  SiRNA target sequence
aaaaaaagcaagagtatgat

SEQ ID NO: 148130 - DNA, 20 bp, Artificial sequence
  SiRNA target sequence
aaaaaagcaagagtatgata

SEQ ID NO: 148131 - DNA, 20 bp, Artificial sequence
  SiRNA target sequence
aaaaagcaagagtatgatat

SEQ ID NO: 148132 - DNA, 20 bp, Artificial sequence
  SiRNA target sequence
aaaagcaagagtatgatatg

SEQ ID NO: 148133 - DNA, 20 bp, Artificial sequence
  SiRNA target sequence
aaagcaagagtatgatatgg

SEQ ID NO: 148134 - DNA, 20 bp, Artificial sequence
  SiRNA target sequence
aagcaagagtatgatatggg

SEQ ID NO: 148135 - DNA, 20 bp, Artificial sequence
  SiRNA target sequence
agcaagagtatgatatggga

SEQ ID NO: 148136 - DNA, 20 bp, Artificial sequence
  SiRNA target sequence
gcaagagtatgatatgggaa

SEQ ID NO: 148137 - DNA, 20 bp, Artificial sequence
  SiRNA target sequence
caagagtatgatatgggaat

SEQ ID NO: 148138 - DNA, 20 bp, Artificial sequence
  SiRNA target sequence
aagagtatgatatgggaatg

SEQ ID NO: 148139 - DNA, 20 bp, Artificial sequence
  SiRNA target sequence
agagtatgatatgggaatga

SEQ ID NO: 148140 - DNA, 20 bp, Artificial sequence
  SiRNA target sequence
gagtatgatatgggaatgac

SEQ ID NO: 148141 - DNA, 20 bp, Artificial sequence
  SiRNA target sequence
agtatgatatgggaatgact

SEQ ID NO: 148142 - DNA, 20 bp, Artificial sequence
  SiRNA target sequence
gtatgatatgggaatgactg

SEQ ID NO: 148143 - DNA, 20 bp, Artificial sequence
  SiRNA target sequence
tatgatatgggaatgactgg

SEQ ID NO: 148144 - DNA, 20 bp, Artificial sequence
  SiRNA target sequence
atgatatgggaatgactggc

SEQ ID NO: 148145 - DNA, 20 bp, Artificial sequence
  SiRNA target sequence
tgatatgggaatgactggcg

SEQ ID NO: 148146 - DNA, 20 bp, Artificial sequence
  SiRNA target sequence
gatatgggaatgactggcga

SEQ ID NO: 148147 - DNA, 20 bp, Artificial sequence
  SiRNA target sequence
atatgggaatgactggcgat

SEQ ID NO: 148148 - DNA, 20 bp, Artificial sequence
  SiRNA target sequence
tatgggaatgactggcgatt

SEQ ID NO: 148149 - DNA, 20 bp, Artificial sequence
  SiRNA target sequence
atgggaatgactggcgattt

SEQ ID NO: 148150 - DNA, 20 bp, Artificial sequence
  SiRNA target sequence
tgggaatgactggcgatttt

SEQ ID NO: 148151 - DNA, 20 bp, Artificial sequence
  SiRNA target sequence
gggaatgactggcgattttg

SEQ ID NO: 148152 - DNA, 20 bp, Artificial sequence
  SiRNA target sequence
ggaatgactggcgattttgg

SEQ ID NO: 148153 - DNA, 20 bp, Artificial sequence
  SiRNA target sequence
gaatgactggcgattttgga

SEQ ID NO: 148154 - DNA, 20 bp, Artificial sequence
  SiRNA target sequence
aatgactggcgattttggat

SEQ ID NO: 148155 - DNA, 20 bp, Artificial sequence
  SiRNA target sequence
atgactggcgattttggatt

SEQ ID NO: 148156 - DNA, 20 bp, Artificial sequence
  SiRNA target sequence
tgactggcgattttggattt

SEQ ID NO: 148157 - DNA, 20 bp, Artificial sequence
  SiRNA target sequence
gactggcgattttggatttt

SEQ ID NO: 148158 - DNA, 20 bp, Artificial sequence
  SiRNA target sequence
actggcgattttggattttc

SEQ ID NO: 148159 - DNA, 20 bp, Artificial sequence
  SiRNA target sequence
ctggcgattttggattttct

SEQ ID NO: 148160 - DNA, 20 bp, Artificial sequence
  SiRNA target sequence
tggcgattttggattttctg

SEQ ID NO: 148161 - DNA, 20 bp, Artificial sequence
  SiRNA target sequence
ggcgattttggattttctgc

SEQ ID NO: 148162 - DNA, 20 bp, Artificial sequence
  SiRNA target sequence
gcgattttggattttctgca

SEQ ID NO: 148163 - DNA, 20 bp, Artificial sequence
  SiRNA target sequence
cgattttggattttctgcag

SEQ ID NO: 148164 - DNA, 20 bp, Artificial sequence
  SiRNA target sequence
gattttggattttctgcagg

SEQ ID NO: 148165 - DNA, 20 bp, Artificial sequence
  SiRNA target sequence
attttggattttctgcaggt

SEQ ID NO: 148166 - DNA, 20 bp, Artificial sequence
  SiRNA target sequence
ttttggattttctgcaggtg

SEQ ID NO: 148167 - DNA, 20 bp, Artificial sequence
  SiRNA target sequence
tttggattttctgcaggtgg

SEQ ID NO: 148168 - DNA, 20 bp, Artificial sequence
  SiRNA target sequence
ttggattttctgcaggtggt

SEQ ID NO: 148169 - DNA, 20 bp, Artificial sequence
  SiRNA target sequence
tggattttctgcaggtggtg

SEQ ID NO: 148170 - DNA, 20 bp, Artificial sequence
  SiRNA target sequence
ggattttctgcaggtggtgg

SEQ ID NO: 148171 - DNA, 20 bp, Artificial sequence
  SiRNA target sequence
gattttctgcaggtggtgga

SEQ ID NO: 148172 - DNA, 20 bp, Artificial sequence
  SiRNA target sequence
attttctgcaggtggtggag

SEQ ID NO: 148173 - DNA, 20 bp, Artificial sequence
  SiRNA target sequence
ttttctgcaggtggtggaga

SEQ ID NO: 148174 - DNA, 20 bp, Artificial sequence
  SiRNA target sequence
tttctgcaggtggtggagac

SEQ ID NO: 148175 - DNA, 20 bp, Artificial sequence
  SiRNA target sequence
ttctgcaggtggtggagact

SEQ ID NO: 148176 - DNA, 20 bp, Artificial sequence
  SiRNA target sequence
tctgcaggtggtggagactt

SEQ ID NO: 148177 - DNA, 20 bp, Artificial sequence
  SiRNA target sequence
ctgcaggtggtggagacttt

SEQ ID NO: 148178 - DNA, 20 bp, Artificial sequence
  SiRNA target sequence
tgcaggtggtggagactttt

SEQ ID NO: 148179 - DNA, 20 bp, Artificial sequence
  SiRNA target sequence
gcaggtggtggagacttttt

SEQ ID NO: 148180 - DNA, 20 bp, Artificial sequence
  SiRNA target sequence
caggtggtggagactttttc

SEQ ID NO: 148181 - DNA, 20 bp, Artificial sequence
  SiRNA target sequence
aggtggtggagactttttcg

SEQ ID NO: 148182 - DNA, 20 bp, Artificial sequence
  SiRNA target sequence
ggtggtggagactttttcga

SEQ ID NO: 148183 - DNA, 20 bp, Artificial sequence
  SiRNA target sequence
gtggtggagactttttcgat

SEQ ID NO: 148184 - DNA, 20 bp, Artificial sequence
  SiRNA target sequence
tggtggagactttttcgata

SEQ ID NO: 148185 - DNA, 20 bp, Artificial sequence
  SiRNA target sequence
ggtggagactttttcgatat

SEQ ID NO: 148186 - DNA, 20 bp, Artificial sequence
  SiRNA target sequence
gtggagactttttcgatatt

SEQ ID NO: 148187 - DNA, 20 bp, Artificial sequence
  SiRNA target sequence
tggagactttttcgatattt

SEQ ID NO: 148188 - DNA, 20 bp, Artificial sequence
  SiRNA target sequence
ggagactttttcgatatttt

SEQ ID NO: 148189 - DNA, 20 bp, Artificial sequence
  SiRNA target sequence
gagactttttcgatattttt

SEQ ID NO: 148190 - DNA, 20 bp, Artificial sequence
  SiRNA target sequence
agactttttcgatatttttt

SEQ ID NO: 148191 - DNA, 20 bp, Artificial sequence
  SiRNA target sequence
gactttttcgatattttttc

SEQ ID NO: 148192 - DNA, 20 bp, Artificial sequence
  SiRNA target sequence
actttttcgatattttttca

SEQ ID NO: 148193 - DNA, 20 bp, Artificial sequence
  SiRNA target sequence
ctttttcgatattttttcaa

SEQ ID NO: 148194 - DNA, 20 bp, Artificial sequence
  SiRNA target sequence
tttttcgatattttttcaag

SEQ ID NO: 148195 - DNA, 20 bp, Artificial sequence
  SiRNA target sequence
ttttcgatattttttcaagt

SEQ ID NO: 148196 - DNA, 20 bp, Artificial sequence
  SiRNA target sequence
tttcgatattttttcaagtt

SEQ ID NO: 148197 - DNA, 20 bp, Artificial sequence
  SiRNA target sequence
ttcgatattttttcaagttt

SEQ ID NO: 148198 - DNA, 20 bp, Artificial sequence
  SiRNA target sequence
tcgatattttttcaagtttt

SEQ ID NO: 148199 - DNA, 20 bp, Artificial sequence
  SiRNA target sequence
cgatattttttcaagtttta

SEQ ID NO: 148200 - DNA, 20 bp, Artificial sequence
  SiRNA target sequence
gatattttttcaagttttac

SEQ ID NO: 148201 - DNA, 20 bp, Artificial sequence
  SiRNA target sequence
atattttttcaagttttact

SEQ ID NO: 148202 - DNA, 20 bp, Artificial sequence
  SiRNA target sequence
tattttttcaagttttactg

SEQ ID NO: 148203 - DNA, 20 bp, Artificial sequence
  SiRNA target sequence
attttttcaagttttactgg

SEQ ID NO: 148204 - DNA, 20 bp, Artificial sequence
  SiRNA target sequence
ttttttcaagttttactggt

SEQ ID NO: 148205 - DNA, 20 bp, Artificial sequence
  SiRNA target sequence
tttttcaagttttactggtg

SEQ ID NO: 148206 - DNA, 20 bp, Artificial sequence
  SiRNA target sequence
ttttcaagttttactggtgg

SEQ ID NO: 148207 - DNA, 20 bp, Artificial sequence
  SiRNA target sequence
tttcaagttttactggtgga

SEQ ID NO: 148208 - DNA, 20 bp, Artificial sequence
  SiRNA target sequence
ttcaagttttactggtggag

SEQ ID NO: 148209 - DNA, 20 bp, Artificial sequence
  SiRNA target sequence
tcaagttttactggtggagg

SEQ ID NO: 148210 - DNA, 20 bp, Artificial sequence
  SiRNA target sequence
caagttttactggtggagga

SEQ ID NO: 148211 - DNA, 20 bp, Artificial sequence
  SiRNA target sequence
aagttttactggtggaggaa

SEQ ID NO: 148212 - DNA, 20 bp, Artificial sequence
  SiRNA target sequence
agttttactggtggaggaag

SEQ ID NO: 148213 - DNA, 20 bp, Artificial sequence
  SiRNA target sequence
gttttactggtggaggaaga

SEQ ID NO: 148214 - DNA, 20 bp, Artificial sequence
  SiRNA target sequence
ttttactggtggaggaagaa

SEQ ID NO: 148215 - DNA, 20 bp, Artificial sequence
  SiRNA target sequence
tttactggtggaggaagaag

SEQ ID NO: 148216 - DNA, 20 bp, Artificial sequence
  SiRNA target sequence
ttactggtggaggaagaaga

SEQ ID NO: 148217 - DNA, 20 bp, Artificial sequence
  SiRNA target sequence
tactggtggaggaagaagaa

SEQ ID NO: 148218 - DNA, 20 bp, Artificial sequence
  SiRNA target sequence
actggtggaggaagaagaaa

SEQ ID NO: 148219 - DNA, 20 bp, Artificial sequence
  SiRNA target sequence
ctggtggaggaagaagaaat

SEQ ID NO: 148220 - DNA, 20 bp, Artificial sequence
  SiRNA target sequence
tggtggaggaagaagaaatc

SEQ ID NO: 148221 - DNA, 20 bp, Artificial sequence
  SiRNA target sequence
ggtggaggaagaagaaatcg

SEQ ID NO: 148222 - DNA, 20 bp, Artificial sequence
  SiRNA target sequence
gtggaggaagaagaaatcga

SEQ ID NO: 148223 - DNA, 20 bp, Artificial sequence
  SiRNA target sequence
tggaggaagaagaaatcgag

SEQ ID NO: 148224 - DNA, 20 bp, Artificial sequence
  SiRNA target sequence
ggaggaagaagaaatcgagt

SEQ ID NO: 148225 - DNA, 20 bp, Artificial sequence
  SiRNA target sequence
gaggaagaagaaatcgagta

SEQ ID NO: 148226 - DNA, 20 bp, Artificial sequence
  SiRNA target sequence
aggaagaagaaatcgagtac

SEQ ID NO: 148227 - DNA, 20 bp, Artificial sequence
  SiRNA target sequence
ggaagaagaaatcgagtaca

SEQ ID NO: 148228 - DNA, 20 bp, Artificial sequence
  SiRNA target sequence
gaagaagaaatcgagtacaa

SEQ ID NO: 148229 - DNA, 20 bp, Artificial sequence
  SiRNA target sequence
aagaagaaatcgagtacaaa

SEQ ID NO: 148230 - DNA, 20 bp, Artificial sequence
  SiRNA target sequence
agaagaaatcgagtacaaaa

SEQ ID NO: 148231 - DNA, 20 bp, Artificial sequence
  SiRNA target sequence
gaagaaatcgagtacaaaaa

SEQ ID NO: 148232 - DNA, 20 bp, Artificial sequence
  SiRNA target sequence
aagaaatcgagtacaaaaag

SEQ ID NO: 148233 - DNA, 20 bp, Artificial sequence
  SiRNA target sequence
agaaatcgagtacaaaaagt

SEQ ID NO: 148234 - DNA, 20 bp, Artificial sequence
  SiRNA target sequence
gaaatcgagtacaaaaagtt

SEQ ID NO: 148235 - DNA, 20 bp, Artificial sequence
  SiRNA target sequence
aaatcgagtacaaaaagttc

SEQ ID NO: 148236 - DNA, 20 bp, Artificial sequence
  SiRNA target sequence
aatcgagtacaaaaagttca

SEQ ID NO: 148237 - DNA, 20 bp, Artificial sequence
  SiRNA target sequence
atcgagtacaaaaagttcaa

SEQ ID NO: 148238 - DNA, 20 bp, Artificial sequence
  SiRNA target sequence
tcgagtacaaaaagttcaag

SEQ ID NO: 148239 - DNA, 20 bp, Artificial sequence
  SiRNA target sequence
cgagtacaaaaagttcaaga

SEQ ID NO: 148240 - DNA, 20 bp, Artificial sequence
  SiRNA target sequence
gagtacaaaaagttcaagat

SEQ ID NO: 148241 - DNA, 20 bp, Artificial sequence
  SiRNA target sequence
agtacaaaaagttcaagata

SEQ ID NO: 148242 - DNA, 20 bp, Artificial sequence
  SiRNA target sequence
gtacaaaaagttcaagatac

SEQ ID NO: 148243 - DNA, 20 bp, Artificial sequence
  SiRNA target sequence
tacaaaaagttcaagataca

SEQ ID NO: 148244 - DNA, 20 bp, Artificial sequence
  SiRNA target sequence
acaaaaagttcaagatacag

SEQ ID NO: 148245 - DNA, 20 bp, Artificial sequence
  SiRNA target sequence
caaaaagttcaagatacaga

SEQ ID NO: 148246 - DNA, 20 bp, Artificial sequence
  SiRNA target sequence
aaaaagttcaagatacagaa

SEQ ID NO: 148247 - DNA, 20 bp, Artificial sequence
  SiRNA target sequence
aaaagttcaagatacagaat

SEQ ID NO: 148248 - DNA, 20 bp, Artificial sequence
  SiRNA target sequence
aaagttcaagatacagaata

SEQ ID NO: 148249 - DNA, 20 bp, Artificial sequence
  SiRNA target sequence
aagttcaagatacagaatac

SEQ ID NO: 148250 - DNA, 20 bp, Artificial sequence
  SiRNA target sequence
agttcaagatacagaatacg

SEQ ID NO: 148251 - DNA, 20 bp, Artificial sequence
  SiRNA target sequence
gttcaagatacagaatacga

SEQ ID NO: 148252 - DNA, 20 bp, Artificial sequence
  SiRNA target sequence
ttcaagatacagaatacgag

SEQ ID NO: 148253 - DNA, 20 bp, Artificial sequence
  SiRNA target sequence
tcaagatacagaatacgagt

SEQ ID NO: 148254 - DNA, 20 bp, Artificial sequence
  SiRNA target sequence
caagatacagaatacgagtt

SEQ ID NO: 148255 - DNA, 20 bp, Artificial sequence
  SiRNA target sequence
aagatacagaatacgagttt

SEQ ID NO: 148256 - DNA, 20 bp, Artificial sequence
  SiRNA target sequence
agatacagaatacgagttta

SEQ ID NO: 148257 - DNA, 20 bp, Artificial sequence
  SiRNA target sequence
gatacagaatacgagtttaa

SEQ ID NO: 148258 - DNA, 20 bp, Artificial sequence
  SiRNA target sequence
atacagaatacgagtttaat

SEQ ID NO: 148259 - DNA, 20 bp, Artificial sequence
  SiRNA target sequence
tacagaatacgagtttaata

SEQ ID NO: 148260 - DNA, 20 bp, Artificial sequence
  SiRNA target sequence
acagaatacgagtttaatat

SEQ ID NO: 148261 - DNA, 20 bp, Artificial sequence
  SiRNA target sequence
cagaatacgagtttaatatt

SEQ ID NO: 148262 - DNA, 20 bp, Artificial sequence
  SiRNA target sequence
agaatacgagtttaatattt

SEQ ID NO: 148263 - DNA, 20 bp, Artificial sequence
  SiRNA target sequence
gaatacgagtttaatatttc

SEQ ID NO: 148264 - DNA, 20 bp, Artificial sequence
  SiRNA target sequence
aatacgagtttaatatttcg

SEQ ID NO: 148265 - DNA, 20 bp, Artificial sequence
  SiRNA target sequence
atacgagtttaatatttcgt

SEQ ID NO: 148266 - DNA, 20 bp, Artificial sequence
  SiRNA target sequence
tacgagtttaatatttcgtt

SEQ ID NO: 148267 - DNA, 20 bp, Artificial sequence
  SiRNA target sequence
acgagtttaatatttcgttg

SEQ ID NO: 148268 - DNA, 20 bp, Artificial sequence
  SiRNA target sequence
cgagtttaatatttcgttga

SEQ ID NO: 148269 - DNA, 20 bp, Artificial sequence
  SiRNA target sequence
gagtttaatatttcgttgaa

SEQ ID NO: 148270 - DNA, 20 bp, Artificial sequence
  SiRNA target sequence
agtttaatatttcgttgaag

SEQ ID NO: 148271 - DNA, 20 bp, Artificial sequence
  SiRNA target sequence
gtttaatatttcgttgaagg

SEQ ID NO: 148272 - DNA, 20 bp, Artificial sequence
  SiRNA target sequence
tttaatatttcgttgaagga

SEQ ID NO: 148273 - DNA, 20 bp, Artificial sequence
  SiRNA target sequence
ttaatatttcgttgaaggaa

SEQ ID NO: 148274 - DNA, 20 bp, Artificial sequence
  SiRNA target sequence
taatatttcgttgaaggaag

SEQ ID NO: 148275 - DNA, 20 bp, Artificial sequence
  SiRNA target sequence
aatatttcgttgaaggaagc

SEQ ID NO: 148276 - DNA, 20 bp, Artificial sequence
  SiRNA target sequence
atatttcgttgaaggaagct

SEQ ID NO: 148277 - DNA, 20 bp, Artificial sequence
  SiRNA target sequence
tatttcgttgaaggaagctt

SEQ ID NO: 148278 - DNA, 20 bp, Artificial sequence
  SiRNA target sequence
atttcgttgaaggaagctta

SEQ ID NO: 148279 - DNA, 20 bp, Artificial sequence
  SiRNA target sequence
tttcgttgaaggaagcttat

SEQ ID NO: 148280 - DNA, 20 bp, Artificial sequence
  SiRNA target sequence
ttcgttgaaggaagcttata

SEQ ID NO: 148281 - DNA, 20 bp, Artificial sequence
  SiRNA target sequence
tcgttgaaggaagcttatat

SEQ ID NO: 148282 - DNA, 20 bp, Artificial sequence
  SiRNA target sequence
cgttgaaggaagcttatatg

SEQ ID NO: 148283 - DNA, 20 bp, Artificial sequence
  SiRNA target sequence
gttgaaggaagcttatatgg

SEQ ID NO: 148284 - DNA, 20 bp, Artificial sequence
  SiRNA target sequence
ttgaaggaagcttatatggg

SEQ ID NO: 148285 - DNA, 20 bp, Artificial sequence
  SiRNA target sequence
tgaaggaagcttatatggga

SEQ ID NO: 148286 - DNA, 20 bp, Artificial sequence
  SiRNA target sequence
gaaggaagcttatatgggaa

SEQ ID NO: 148287 - DNA, 20 bp, Artificial sequence
  SiRNA target sequence
aaggaagcttatatgggaaa

SEQ ID NO: 148288 - DNA, 20 bp, Artificial sequence
  SiRNA target sequence
aggaagcttatatgggaaag

SEQ ID NO: 148289 - DNA, 20 bp, Artificial sequence
  SiRNA target sequence
ggaagcttatatgggaaagc

SEQ ID NO: 148290 - DNA, 20 bp, Artificial sequence
  SiRNA target sequence
gaagcttatatgggaaagcg

SEQ ID NO: 148291 - DNA, 20 bp, Artificial sequence
  SiRNA target sequence
aagcttatatgggaaagcga

SEQ ID NO: 148292 - DNA, 20 bp, Artificial sequence
  SiRNA target sequence
agcttatatgggaaagcgag

SEQ ID NO: 148293 - DNA, 20 bp, Artificial sequence
  SiRNA target sequence
gcttatatgggaaagcgagc

SEQ ID NO: 148294 - DNA, 20 bp, Artificial sequence
  SiRNA target sequence
cttatatgggaaagcgagct

SEQ ID NO: 148295 - DNA, 20 bp, Artificial sequence
  SiRNA target sequence
ttatatgggaaagcgagcta

SEQ ID NO: 148296 - DNA, 20 bp, Artificial sequence
  SiRNA target sequence
tatatgggaaagcgagctag

SEQ ID NO: 148297 - DNA, 20 bp, Artificial sequence
  SiRNA target sequence
atatgggaaagcgagctagt

SEQ ID NO: 148298 - DNA, 20 bp, Artificial sequence
  SiRNA target sequence
tatgggaaagcgagctagtt

SEQ ID NO: 148299 - DNA, 20 bp, Artificial sequence
  SiRNA target sequence
atgggaaagcgagctagttt

SEQ ID NO: 148300 - DNA, 20 bp, Artificial sequence
  SiRNA target sequence
tgggaaagcgagctagtttt

SEQ ID NO: 148301 - DNA, 20 bp, Artificial sequence
  SiRNA target sequence
gggaaagcgagctagtttta

SEQ ID NO: 148302 - DNA, 20 bp, Artificial sequence
  SiRNA target sequence
ggaaagcgagctagttttaa

SEQ ID NO: 148303 - DNA, 20 bp, Artificial sequence
  SiRNA target sequence
gaaagcgagctagttttaat

SEQ ID NO: 148304 - DNA, 20 bp, Artificial sequence
  SiRNA target sequence
aaagcgagctagttttaatg

SEQ ID NO: 148305 - DNA, 20 bp, Artificial sequence
  SiRNA target sequence
aagcgagctagttttaatgt

SEQ ID NO: 148306 - DNA, 20 bp, Artificial sequence
  SiRNA target sequence
agcgagctagttttaatgta

SEQ ID NO: 148307 - DNA, 20 bp, Artificial sequence
  SiRNA target sequence
gcgagctagttttaatgtaa

SEQ ID NO: 148308 - DNA, 20 bp, Artificial sequence
  SiRNA target sequence
cgagctagttttaatgtaaa

SEQ ID NO: 148309 - DNA, 20 bp, Artificial sequence
  SiRNA target sequence
gagctagttttaatgtaaaa

SEQ ID NO: 148310 - DNA, 20 bp, Artificial sequence
  SiRNA target sequence
agctagttttaatgtaaaag

SEQ ID NO: 148311 - DNA, 20 bp, Artificial sequence
  SiRNA target sequence
gctagttttaatgtaaaagt

SEQ ID NO: 148312 - DNA, 20 bp, Artificial sequence
  SiRNA target sequence
ctagttttaatgtaaaagtg

SEQ ID NO: 148313 - DNA, 20 bp, Artificial sequence
  SiRNA target sequence
tagttttaatgtaaaagtgc

SEQ ID NO: 148314 - DNA, 20 bp, Artificial sequence
  SiRNA target sequence
agttttaatgtaaaagtgca

SEQ ID NO: 148315 - DNA, 20 bp, Artificial sequence
  SiRNA target sequence
gttttaatgtaaaagtgcaa

SEQ ID NO: 148316 - DNA, 20 bp, Artificial sequence
  SiRNA target sequence
ttttaatgtaaaagtgcaaa

SEQ ID NO: 148317 - DNA, 20 bp, Artificial sequence
  SiRNA target sequence
tttaatgtaaaagtgcaaag

SEQ ID NO: 148318 - DNA, 20 bp, Artificial sequence
  SiRNA target sequence
ttaatgtaaaagtgcaaaga

SEQ ID NO: 148319 - DNA, 20 bp, Artificial sequence
  SiRNA target sequence
taatgtaaaagtgcaaagag

SEQ ID NO: 148320 - DNA, 20 bp, Artificial sequence
  SiRNA target sequence
aatgtaaaagtgcaaagaga

SEQ ID NO: 148321 - DNA, 20 bp, Artificial sequence
  SiRNA target sequence
atgtaaaagtgcaaagagaa

SEQ ID NO: 148322 - DNA, 20 bp, Artificial sequence
  SiRNA target sequence
tgtaaaagtgcaaagagaat

SEQ ID NO: 148323 - DNA, 20 bp, Artificial sequence
  SiRNA target sequence
gtaaaagtgcaaagagaatg

SEQ ID NO: 148324 - DNA, 20 bp, Artificial sequence
  SiRNA target sequence
taaaagtgcaaagagaatgt

SEQ ID NO: 148325 - DNA, 20 bp, Artificial sequence
  SiRNA target sequence
aaaagtgcaaagagaatgtt

SEQ ID NO: 148326 - DNA, 20 bp, Artificial sequence
  SiRNA target sequence
aaagtgcaaagagaatgttc

SEQ ID NO: 148327 - DNA, 20 bp, Artificial sequence
  SiRNA target sequence
aagtgcaaagagaatgttct

SEQ ID NO: 148328 - DNA, 20 bp, Artificial sequence
  SiRNA target sequence
agtgcaaagagaatgttctg

SEQ ID NO: 148329 - DNA, 20 bp, Artificial sequence
  SiRNA target sequence
gtgcaaagagaatgttctgc

SEQ ID NO: 148330 - DNA, 20 bp, Artificial sequence
  SiRNA target sequence
tgcaaagagaatgttctgcg

SEQ ID NO: 148331 - DNA, 20 bp, Artificial sequence
  SiRNA target sequence
gcaaagagaatgttctgcgt

SEQ ID NO: 148332 - DNA, 20 bp, Artificial sequence
  SiRNA target sequence
caaagagaatgttctgcgtg

SEQ ID NO: 148333 - DNA, 20 bp, Artificial sequence
  SiRNA target sequence
aaagagaatgttctgcgtgt

SEQ ID NO: 148334 - DNA, 20 bp, Artificial sequence
  SiRNA target sequence
aagagaatgttctgcgtgta

SEQ ID NO: 148335 - DNA, 20 bp, Artificial sequence
  SiRNA target sequence
agagaatgttctgcgtgtaa

SEQ ID NO: 148336 - DNA, 20 bp, Artificial sequence
  SiRNA target sequence
gagaatgttctgcgtgtaac

SEQ ID NO: 148337 - DNA, 20 bp, Artificial sequence
  SiRNA target sequence
agaatgttctgcgtgtaacg

SEQ ID NO: 148338 - DNA, 20 bp, Artificial sequence
  SiRNA target sequence
gaatgttctgcgtgtaacgg

SEQ ID NO: 148339 - DNA, 20 bp, Artificial sequence
  SiRNA target sequence
aatgttctgcgtgtaacggt

SEQ ID NO: 148340 - DNA, 20 bp, Artificial sequence
  SiRNA target sequence
atgttctgcgtgtaacggta

SEQ ID NO: 148341 - DNA, 20 bp, Artificial sequence
  SiRNA target sequence
tgttctgcgtgtaacggtaa

SEQ ID NO: 148342 - DNA, 20 bp, Artificial sequence
  SiRNA target sequence
gttctgcgtgtaacggtaaa

SEQ ID NO: 148343 - DNA, 20 bp, Artificial sequence
  SiRNA target sequence
ttctgcgtgtaacggtaaag

SEQ ID NO: 148344 - DNA, 20 bp, Artificial sequence
  SiRNA target sequence
tctgcgtgtaacggtaaagg

SEQ ID NO: 148345 - DNA, 20 bp, Artificial sequence
  SiRNA target sequence
ctgcgtgtaacggtaaagga

SEQ ID NO: 148346 - DNA, 20 bp, Artificial sequence
  SiRNA target sequence
tgcgtgtaacggtaaaggag

SEQ ID NO: 148347 - DNA, 20 bp, Artificial sequence
  SiRNA target sequence
gcgtgtaacggtaaaggagg

SEQ ID NO: 148348 - DNA, 20 bp, Artificial sequence
  SiRNA target sequence
cgtgtaacggtaaaggagga

SEQ ID NO: 148349 - DNA, 20 bp, Artificial sequence
  SiRNA target sequence
gtgtaacggtaaaggaggag

SEQ ID NO: 148350 - DNA, 20 bp, Artificial sequence
  SiRNA target sequence
tgtaacggtaaaggaggaga

SEQ ID NO: 148351 - DNA, 20 bp, Artificial sequence
  SiRNA target sequence
gtaacggtaaaggaggagac

SEQ ID NO: 148352 - DNA, 20 bp, Artificial sequence
  SiRNA target sequence
taacggtaaaggaggagaca

SEQ ID NO: 148353 - DNA, 20 bp, Artificial sequence
  SiRNA target sequence
aacggtaaaggaggagacag

SEQ ID NO: 148354 - DNA, 20 bp, Artificial sequence
  SiRNA target sequence
acggtaaaggaggagacagt

SEQ ID NO: 148355 - DNA, 20 bp, Artificial sequence
  SiRNA target sequence
cggtaaaggaggagacagtg

SEQ ID NO: 148356 - DNA, 20 bp, Artificial sequence
  SiRNA target sequence
ggtaaaggaggagacagtgt

SEQ ID NO: 148357 - DNA, 20 bp, Artificial sequence
  SiRNA target sequence
gtaaaggaggagacagtgtt

SEQ ID NO: 148358 - DNA, 20 bp, Artificial sequence
  SiRNA target sequence
taaaggaggagacagtgttg

SEQ ID NO: 148359 - DNA, 20 bp, Artificial sequence
  SiRNA target sequence
aaaggaggagacagtgttga

SEQ ID NO: 148360 - DNA, 20 bp, Artificial sequence
  SiRNA target sequence
aaggaggagacagtgttgaa

SEQ ID NO: 148361 - DNA, 20 bp, Artificial sequence
  SiRNA target sequence
aggaggagacagtgttgaaa

SEQ ID NO: 148362 - DNA, 20 bp, Artificial sequence
  SiRNA target sequence
ggaggagacagtgttgaaac

SEQ ID NO: 148363 - DNA, 20 bp, Artificial sequence
  SiRNA target sequence
gaggagacagtgttgaaaca

SEQ ID NO: 148364 - DNA, 20 bp, Artificial sequence
  SiRNA target sequence
aggagacagtgttgaaacat

SEQ ID NO: 148365 - DNA, 20 bp, Artificial sequence
  SiRNA target sequence
ggagacagtgttgaaacatg

SEQ ID NO: 148366 - DNA, 20 bp, Artificial sequence
  SiRNA target sequence
gagacagtgttgaaacatgt

SEQ ID NO: 148367 - DNA, 20 bp, Artificial sequence
  SiRNA target sequence
agacagtgttgaaacatgtg

SEQ ID NO: 148368 - DNA, 20 bp, Artificial sequence
  SiRNA target sequence
gacagtgttgaaacatgtga

SEQ ID NO: 148369 - DNA, 20 bp, Artificial sequence
  SiRNA target sequence
acagtgttgaaacatgtgaa

SEQ ID NO: 148370 - DNA, 20 bp, Artificial sequence
  SiRNA target sequence
cagtgttgaaacatgtgaac

SEQ ID NO: 148371 - DNA, 20 bp, Artificial sequence
  SiRNA target sequence
agtgttgaaacatgtgaacc

SEQ ID NO: 148372 - DNA, 20 bp, Artificial sequence
  SiRNA target sequence
gtgttgaaacatgtgaacca

SEQ ID NO: 148373 - DNA, 20 bp, Artificial sequence
  SiRNA target sequence
tgttgaaacatgtgaaccat

SEQ ID NO: 148374 - DNA, 20 bp, Artificial sequence
  SiRNA target sequence
gttgaaacatgtgaaccatg

SEQ ID NO: 148375 - DNA, 20 bp, Artificial sequence
  SiRNA target sequence
ttgaaacatgtgaaccatgt

SEQ ID NO: 148376 - DNA, 20 bp, Artificial sequence
  SiRNA target sequence
tgaaacatgtgaaccatgta

SEQ ID NO: 148377 - DNA, 20 bp, Artificial sequence
  SiRNA target sequence
gaaacatgtgaaccatgtaa

SEQ ID NO: 148378 - DNA, 20 bp, Artificial sequence
  SiRNA target sequence
aaacatgtgaaccatgtaaa

SEQ ID NO: 148379 - DNA, 20 bp, Artificial sequence
  SiRNA target sequence
aacatgtgaaccatgtaaag

SEQ ID NO: 148380 - DNA, 20 bp, Artificial sequence
  SiRNA target sequence
acatgtgaaccatgtaaagg

SEQ ID NO: 148381 - DNA, 20 bp, Artificial sequence
  SiRNA target sequence
catgtgaaccatgtaaaggt

SEQ ID NO: 148382 - DNA, 20 bp, Artificial sequence
  SiRNA target sequence
atgtgaaccatgtaaaggta

SEQ ID NO: 148383 - DNA, 20 bp, Artificial sequence
  SiRNA target sequence
tgtgaaccatgtaaaggtaa

SEQ ID NO: 148384 - DNA, 20 bp, Artificial sequence
  SiRNA target sequence
gtgaaccatgtaaaggtaaa

SEQ ID NO: 148385 - DNA, 20 bp, Artificial sequence
  SiRNA target sequence
tgaaccatgtaaaggtaaag

SEQ ID NO: 148386 - DNA, 20 bp, Artificial sequence
  SiRNA target sequence
gaaccatgtaaaggtaaagg

SEQ ID NO: 148387 - DNA, 20 bp, Artificial sequence
  SiRNA target sequence
aaccatgtaaaggtaaaggt

SEQ ID NO: 148388 - DNA, 20 bp, Artificial sequence
  SiRNA target sequence
accatgtaaaggtaaaggta

SEQ ID NO: 148389 - DNA, 20 bp, Artificial sequence
  SiRNA target sequence
ccatgtaaaggtaaaggtaa

SEQ ID NO: 148390 - DNA, 20 bp, Artificial sequence
  SiRNA target sequence
catgtaaaggtaaaggtaag

SEQ ID NO: 148391 - DNA, 20 bp, Artificial sequence
  SiRNA target sequence
atgtaaaggtaaaggtaagg

SEQ ID NO: 148392 - DNA, 20 bp, Artificial sequence
  SiRNA target sequence
tgtaaaggtaaaggtaaggt

SEQ ID NO: 148393 - DNA, 20 bp, Artificial sequence
  SiRNA target sequence
gtaaaggtaaaggtaaggta

SEQ ID NO: 148394 - DNA, 20 bp, Artificial sequence
  SiRNA target sequence
taaaggtaaaggtaaggtag

SEQ ID NO: 148395 - DNA, 20 bp, Artificial sequence
  SiRNA target sequence
aaaggtaaaggtaaggtaga

SEQ ID NO: 148396 - DNA, 20 bp, Artificial sequence
  SiRNA target sequence
aaggtaaaggtaaggtagaa

SEQ ID NO: 148397 - DNA, 20 bp, Artificial sequence
  SiRNA target sequence
aggtaaaggtaaggtagaac

SEQ ID NO: 148398 - DNA, 20 bp, Artificial sequence
  SiRNA target sequence
ggtaaaggtaaggtagaaca

SEQ ID NO: 148399 - DNA, 20 bp, Artificial sequence
  SiRNA target sequence
gtaaaggtaaggtagaacat

SEQ ID NO: 148400 - DNA, 20 bp, Artificial sequence
  SiRNA target sequence
taaaggtaaggtagaacatc

SEQ ID NO: 148401 - DNA, 20 bp, Artificial sequence
  SiRNA target sequence
aaaggtaaggtagaacatca

SEQ ID NO: 148402 - DNA, 20 bp, Artificial sequence
  SiRNA target sequence
aaggtaaggtagaacatcat

SEQ ID NO: 148403 - DNA, 20 bp, Artificial sequence
  SiRNA target sequence
aggtaaggtagaacatcata

SEQ ID NO: 148404 - DNA, 20 bp, Artificial sequence
  SiRNA target sequence
ggtaaggtagaacatcatag

SEQ ID NO: 148405 - DNA, 20 bp, Artificial sequence
  SiRNA target sequence
gtaaggtagaacatcatagg

SEQ ID NO: 148406 - DNA, 20 bp, Artificial sequence
  SiRNA target sequence
taaggtagaacatcatagga

SEQ ID NO: 148407 - DNA, 20 bp, Artificial sequence
  SiRNA target sequence
aaggtagaacatcataggag

SEQ ID NO: 148408 - DNA, 20 bp, Artificial sequence
  SiRNA target sequence
aggtagaacatcataggaga

SEQ ID NO: 148409 - DNA, 20 bp, Artificial sequence
  SiRNA target sequence
ggtagaacatcataggagac

SEQ ID NO: 148410 - DNA, 20 bp, Artificial sequence
  SiRNA target sequence
gtagaacatcataggagact

SEQ ID NO: 148411 - DNA, 20 bp, Artificial sequence
  SiRNA target sequence
tagaacatcataggagacta

SEQ ID NO: 148412 - DNA, 20 bp, Artificial sequence
  SiRNA target sequence
agaacatcataggagactag

SEQ ID NO: 148413 - DNA, 20 bp, Artificial sequence
  SiRNA target sequence
gaacatcataggagactagg

SEQ ID NO: 148414 - DNA, 20 bp, Artificial sequence
  SiRNA target sequence
aacatcataggagactaggt

SEQ ID NO: 148415 - DNA, 20 bp, Artificial sequence
  SiRNA target sequence
acatcataggagactaggtc

SEQ ID NO: 148416 - DNA, 20 bp, Artificial sequence
  SiRNA target sequence
catcataggagactaggtcc

SEQ ID NO: 148417 - DNA, 20 bp, Artificial sequence
  SiRNA target sequence
atcataggagactaggtcct

SEQ ID NO: 148418 - DNA, 20 bp, Artificial sequence
  SiRNA target sequence
tcataggagactaggtcctt

SEQ ID NO: 148419 - DNA, 20 bp, Artificial sequence
  SiRNA target sequence
cataggagactaggtccttt

SEQ ID NO: 148420 - DNA, 20 bp, Artificial sequence
  SiRNA target sequence
ataggagactaggtccttta

SEQ ID NO: 148421 - DNA, 20 bp, Artificial sequence
  SiRNA target sequence
taggagactaggtcctttaa

SEQ ID NO: 148422 - DNA, 20 bp, Artificial sequence
  SiRNA target sequence
aggagactaggtcctttaat

SEQ ID NO: 148423 - DNA, 20 bp, Artificial sequence
  SiRNA target sequence
ggagactaggtcctttaatt

SEQ ID NO: 148424 - DNA, 20 bp, Artificial sequence
  SiRNA target sequence
gagactaggtcctttaattt

SEQ ID NO: 148425 - DNA, 20 bp, Artificial sequence
  SiRNA target sequence
agactaggtcctttaatttc

SEQ ID NO: 148426 - DNA, 20 bp, Artificial sequence
  SiRNA target sequence
gactaggtcctttaatttct

SEQ ID NO: 148427 - DNA, 20 bp, Artificial sequence
  SiRNA target sequence
actaggtcctttaatttctg

SEQ ID NO: 148428 - DNA, 20 bp, Artificial sequence
  SiRNA target sequence
ctaggtcctttaatttctgt

SEQ ID NO: 148429 - DNA, 20 bp, Artificial sequence
  SiRNA target sequence
taggtcctttaatttctgta

SEQ ID NO: 148430 - DNA, 20 bp, Artificial sequence
  SiRNA target sequence
aggtcctttaatttctgtac

SEQ ID NO: 148431 - DNA, 20 bp, Artificial sequence
  SiRNA target sequence
ggtcctttaatttctgtaca

SEQ ID NO: 148432 - DNA, 20 bp, Artificial sequence
  SiRNA target sequence
gtcctttaatttctgtacaa

SEQ ID NO: 148433 - DNA, 20 bp, Artificial sequence
  SiRNA target sequence
tcctttaatttctgtacaag

SEQ ID NO: 148434 - DNA, 20 bp, Artificial sequence
  SiRNA target sequence
cctttaatttctgtacaaga

SEQ ID NO: 148435 - DNA, 20 bp, Artificial sequence
  SiRNA target sequence
ctttaatttctgtacaagaa

SEQ ID NO: 148436 - DNA, 20 bp, Artificial sequence
  SiRNA target sequence
tttaatttctgtacaagaag

SEQ ID NO: 148437 - DNA, 20 bp, Artificial sequence
  SiRNA target sequence
ttaatttctgtacaagaagc

SEQ ID NO: 148438 - DNA, 20 bp, Artificial sequence
  SiRNA target sequence
taatttctgtacaagaagca

SEQ ID NO: 148439 - DNA, 20 bp, Artificial sequence
  SiRNA target sequence
aatttctgtacaagaagcac

SEQ ID NO: 148440 - DNA, 20 bp, Artificial sequence
  SiRNA target sequence
atttctgtacaagaagcacc

SEQ ID NO: 148441 - DNA, 20 bp, Artificial sequence
  SiRNA target sequence
tttctgtacaagaagcacct

SEQ ID NO: 148442 - DNA, 20 bp, Artificial sequence
  SiRNA target sequence
ttctgtacaagaagcacctt

SEQ ID NO: 148443 - DNA, 20 bp, Artificial sequence
  SiRNA target sequence
tctgtacaagaagcaccttg

SEQ ID NO: 148444 - DNA, 20 bp, Artificial sequence
  SiRNA target sequence
ctgtacaagaagcaccttgt

SEQ ID NO: 148445 - DNA, 20 bp, Artificial sequence
  SiRNA target sequence
tgtacaagaagcaccttgta

SEQ ID NO: 148446 - DNA, 20 bp, Artificial sequence
  SiRNA target sequence
gtacaagaagcaccttgtaa

SEQ ID NO: 148447 - DNA, 20 bp, Artificial sequence
  SiRNA target sequence
tacaagaagcaccttgtaat

SEQ ID NO: 148448 - DNA, 20 bp, Artificial sequence
  SiRNA target sequence
acaagaagcaccttgtaata

SEQ ID NO: 148449 - DNA, 20 bp, Artificial sequence
  SiRNA target sequence
caagaagcaccttgtaataa

SEQ ID NO: 148450 - DNA, 20 bp, Artificial sequence
  SiRNA target sequence
aagaagcaccttgtaataat

SEQ ID NO: 148451 - DNA, 20 bp, Artificial sequence
  SiRNA target sequence
agaagcaccttgtaataatt

SEQ ID NO: 148452 - DNA, 20 bp, Artificial sequence
  SiRNA target sequence
gaagcaccttgtaataattg

SEQ ID NO: 148453 - DNA, 20 bp, Artificial sequence
  SiRNA target sequence
aagcaccttgtaataattgt

SEQ ID NO: 148454 - DNA, 20 bp, Artificial sequence
  SiRNA target sequence
agcaccttgtaataattgta

SEQ ID NO: 148455 - DNA, 20 bp, Artificial sequence
  SiRNA target sequence
gcaccttgtaataattgtaa

SEQ ID NO: 148456 - DNA, 20 bp, Artificial sequence
  SiRNA target sequence
caccttgtaataattgtaat

SEQ ID NO: 148457 - DNA, 20 bp, Artificial sequence
  SiRNA target sequence
accttgtaataattgtaatt

SEQ ID NO: 148458 - DNA, 20 bp, Artificial sequence
  SiRNA target sequence
ccttgtaataattgtaattc

SEQ ID NO: 148459 - DNA, 20 bp, Artificial sequence
  SiRNA target sequence
cttgtaataattgtaattct

SEQ ID NO: 148460 - DNA, 20 bp, Artificial sequence
  SiRNA target sequence
ttgtaataattgtaattcta

SEQ ID NO: 148461 - DNA, 20 bp, Artificial sequence
  SiRNA target sequence
tgtaataattgtaattctac

SEQ ID NO: 148462 - DNA, 20 bp, Artificial sequence
  SiRNA target sequence
gtaataattgtaattctact

SEQ ID NO: 148463 - DNA, 20 bp, Artificial sequence
  SiRNA target sequence
taataattgtaattctactg

SEQ ID NO: 148464 - DNA, 20 bp, Artificial sequence
  SiRNA target sequence
aataattgtaattctactgg

SEQ ID NO: 148465 - DNA, 20 bp, Artificial sequence
  SiRNA target sequence
ataattgtaattctactgga

SEQ ID NO: 148466 - DNA, 20 bp, Artificial sequence
  SiRNA target sequence
taattgtaattctactggat

SEQ ID NO: 148467 - DNA, 20 bp, Artificial sequence
  SiRNA target sequence
aattgtaattctactggatt

SEQ ID NO: 148468 - DNA, 20 bp, Artificial sequence
  SiRNA target sequence
attgtaattctactggattt

SEQ ID NO: 148469 - DNA, 20 bp, Artificial sequence
  SiRNA target sequence
ttgtaattctactggatttg

SEQ ID NO: 148470 - DNA, 20 bp, Artificial sequence
  SiRNA target sequence
tgtaattctactggatttgt

SEQ ID NO: 148471 - DNA, 20 bp, Artificial sequence
  SiRNA target sequence
gtaattctactggatttgtt

SEQ ID NO: 148472 - DNA, 20 bp, Artificial sequence
  SiRNA target sequence
taattctactggatttgttg

SEQ ID NO: 148473 - DNA, 20 bp, Artificial sequence
  SiRNA target sequence
aattctactggatttgttgt

SEQ ID NO: 148474 - DNA, 20 bp, Artificial sequence
  SiRNA target sequence
attctactggatttgttgtt

SEQ ID NO: 148475 - DNA, 20 bp, Artificial sequence
  SiRNA target sequence
ttctactggatttgttgtta

SEQ ID NO: 148476 - DNA, 20 bp, Artificial sequence
  SiRNA target sequence
tctactggatttgttgttaa

SEQ ID NO: 148477 - DNA, 20 bp, Artificial sequence
  SiRNA target sequence
ctactggatttgttgttaaa

SEQ ID NO: 148478 - DNA, 20 bp, Artificial sequence
  SiRNA target sequence
tactggatttgttgttaaag

SEQ ID NO: 148479 - DNA, 20 bp, Artificial sequence
  SiRNA target sequence
actggatttgttgttaaagg

SEQ ID NO: 148480 - DNA, 20 bp, Artificial sequence
  SiRNA target sequence
ctggatttgttgttaaagga

SEQ ID NO: 148481 - DNA, 20 bp, Artificial sequence
  SiRNA target sequence
tggatttgttgttaaaggaa

SEQ ID NO: 148482 - DNA, 20 bp, Artificial sequence
  SiRNA target sequence
ggatttgttgttaaaggaaa

SEQ ID NO: 148483 - DNA, 20 bp, Artificial sequence
  SiRNA target sequence
gatttgttgttaaaggaaag

SEQ ID NO: 148484 - DNA, 20 bp, Artificial sequence
  SiRNA target sequence
atttgttgttaaaggaaagc

SEQ ID NO: 148485 - DNA, 20 bp, Artificial sequence
  SiRNA target sequence
tttgttgttaaaggaaagct

SEQ ID NO: 148486 - DNA, 20 bp, Artificial sequence
  SiRNA target sequence
ttgttgttaaaggaaagctt

SEQ ID NO: 148487 - DNA, 20 bp, Artificial sequence
  SiRNA target sequence
tgttgttaaaggaaagcttt

SEQ ID NO: 148488 - DNA, 20 bp, Artificial sequence
  SiRNA target sequence
gttgttaaaggaaagctttg

SEQ ID NO: 148489 - DNA, 20 bp, Artificial sequence
  SiRNA target sequence
ttgttaaaggaaagctttgt

SEQ ID NO: 148490 - DNA, 20 bp, Artificial sequence
  SiRNA target sequence
tgttaaaggaaagctttgtc

SEQ ID NO: 148491 - DNA, 20 bp, Artificial sequence
  SiRNA target sequence
gttaaaggaaagctttgtca

SEQ ID NO: 148492 - DNA, 20 bp, Artificial sequence
  SiRNA target sequence
ttaaaggaaagctttgtcaa

SEQ ID NO: 148493 - DNA, 20 bp, Artificial sequence
  SiRNA target sequence
taaaggaaagctttgtcaaa

SEQ ID NO: 148494 - DNA, 20 bp, Artificial sequence
  SiRNA target sequence
aaaggaaagctttgtcaaag

SEQ ID NO: 148495 - DNA, 20 bp, Artificial sequence
  SiRNA target sequence
aaggaaagctttgtcaaagt

SEQ ID NO: 148496 - DNA, 20 bp, Artificial sequence
  SiRNA target sequence
aggaaagctttgtcaaagtt

SEQ ID NO: 148497 - DNA, 20 bp, Artificial sequence
  SiRNA target sequence
ggaaagctttgtcaaagttg

SEQ ID NO: 148498 - DNA, 20 bp, Artificial sequence
  SiRNA target sequence
gaaagctttgtcaaagttgt

SEQ ID NO: 148499 - DNA, 20 bp, Artificial sequence
  SiRNA target sequence
aaagctttgtcaaagttgta

SEQ ID NO: 148500 - DNA, 20 bp, Artificial sequence
  SiRNA target sequence
aagctttgtcaaagttgtaa

SEQ ID NO: 148501 - DNA, 20 bp, Artificial sequence
  SiRNA target sequence
agctttgtcaaagttgtaaa

SEQ ID NO: 148502 - DNA, 20 bp, Artificial sequence
  SiRNA target sequence
gctttgtcaaagttgtaaag

SEQ ID NO: 148503 - DNA, 20 bp, Artificial sequence
  SiRNA target sequence
ctttgtcaaagttgtaaagg

SEQ ID NO: 148504 - DNA, 20 bp, Artificial sequence
  SiRNA target sequence
tttgtcaaagttgtaaaggt

SEQ ID NO: 148505 - DNA, 20 bp, Artificial sequence
  SiRNA target sequence
ttgtcaaagttgtaaaggta

SEQ ID NO: 148506 - DNA, 20 bp, Artificial sequence
  SiRNA target sequence
tgtcaaagttgtaaaggtaa

SEQ ID NO: 148507 - DNA, 20 bp, Artificial sequence
  SiRNA target sequence
gtcaaagttgtaaaggtaaa

SEQ ID NO: 148508 - DNA, 20 bp, Artificial sequence
  SiRNA target sequence
tcaaagttgtaaaggtaaac

SEQ ID NO: 148509 - DNA, 20 bp, Artificial sequence
  SiRNA target sequence
caaagttgtaaaggtaaaca

SEQ ID NO: 148510 - DNA, 20 bp, Artificial sequence
  SiRNA target sequence
aaagttgtaaaggtaaacaa

SEQ ID NO: 148511 - DNA, 20 bp, Artificial sequence
  SiRNA target sequence
aagttgtaaaggtaaacaat

SEQ ID NO: 148512 - DNA, 20 bp, Artificial sequence
  SiRNA target sequence
agttgtaaaggtaaacaata

SEQ ID NO: 148513 - DNA, 20 bp, Artificial sequence
  SiRNA target sequence
gttgtaaaggtaaacaatac

SEQ ID NO: 148514 - DNA, 20 bp, Artificial sequence
  SiRNA target sequence
ttgtaaaggtaaacaatacg

SEQ ID NO: 148515 - DNA, 20 bp, Artificial sequence
  SiRNA target sequence
tgtaaaggtaaacaatacgt

SEQ ID NO: 148516 - DNA, 20 bp, Artificial sequence
  SiRNA target sequence
gtaaaggtaaacaatacgtt

SEQ ID NO: 148517 - DNA, 20 bp, Artificial sequence
  SiRNA target sequence
taaaggtaaacaatacgttg

SEQ ID NO: 148518 - DNA, 20 bp, Artificial sequence
  SiRNA target sequence
aaaggtaaacaatacgttga

SEQ ID NO: 148519 - DNA, 20 bp, Artificial sequence
  SiRNA target sequence
aaggtaaacaatacgttgag

SEQ ID NO: 148520 - DNA, 20 bp, Artificial sequence
  SiRNA target sequence
aggtaaacaatacgttgaga

SEQ ID NO: 148521 - DNA, 20 bp, Artificial sequence
  SiRNA target sequence
ggtaaacaatacgttgagac

SEQ ID NO: 148522 - DNA, 20 bp, Artificial sequence
  SiRNA target sequence
gtaaacaatacgttgagact

SEQ ID NO: 148523 - DNA, 20 bp, Artificial sequence
  SiRNA target sequence
taaacaatacgttgagacta

SEQ ID NO: 148524 - DNA, 20 bp, Artificial sequence
  SiRNA target sequence
aaacaatacgttgagactaa

SEQ ID NO: 148525 - DNA, 20 bp, Artificial sequence
  SiRNA target sequence
aacaatacgttgagactaaa

SEQ ID NO: 148526 - DNA, 20 bp, Artificial sequence
  SiRNA target sequence
acaatacgttgagactaaag

SEQ ID NO: 148527 - DNA, 20 bp, Artificial sequence
  SiRNA target sequence
caatacgttgagactaaaga

SEQ ID NO: 148528 - DNA, 20 bp, Artificial sequence
  SiRNA target sequence
aatacgttgagactaaagaa

SEQ ID NO: 148529 - DNA, 20 bp, Artificial sequence
  SiRNA target sequence
atacgttgagactaaagaac

SEQ ID NO: 148530 - DNA, 20 bp, Artificial sequence
  SiRNA target sequence
tacgttgagactaaagaaca

SEQ ID NO: 148531 - DNA, 20 bp, Artificial sequence
  SiRNA target sequence
acgttgagactaaagaacat

SEQ ID NO: 148532 - DNA, 20 bp, Artificial sequence
  SiRNA target sequence
cgttgagactaaagaacata

SEQ ID NO: 148533 - DNA, 20 bp, Artificial sequence
  SiRNA target sequence
gttgagactaaagaacatat

SEQ ID NO: 148534 - DNA, 20 bp, Artificial sequence
  SiRNA target sequence
ttgagactaaagaacatatt

SEQ ID NO: 148535 - DNA, 20 bp, Artificial sequence
  SiRNA target sequence
tgagactaaagaacatattg

SEQ ID NO: 148536 - DNA, 20 bp, Artificial sequence
  SiRNA target sequence
gagactaaagaacatattga

SEQ ID NO: 148537 - DNA, 20 bp, Artificial sequence
  SiRNA target sequence
agactaaagaacatattgaa

SEQ ID NO: 148538 - DNA, 20 bp, Artificial sequence
  SiRNA target sequence
gactaaagaacatattgaag

SEQ ID NO: 148539 - DNA, 20 bp, Artificial sequence
  SiRNA target sequence
actaaagaacatattgaagt

SEQ ID NO: 148540 - DNA, 20 bp, Artificial sequence
  SiRNA target sequence
ctaaagaacatattgaagtg

SEQ ID NO: 148541 - DNA, 20 bp, Artificial sequence
  SiRNA target sequence
taaagaacatattgaagtgg

SEQ ID NO: 148542 - DNA, 20 bp, Artificial sequence
  SiRNA target sequence
aaagaacatattgaagtgga

SEQ ID NO: 148543 - DNA, 20 bp, Artificial sequence
  SiRNA target sequence
aagaacatattgaagtggaa

SEQ ID NO: 148544 - DNA, 20 bp, Artificial sequence
  SiRNA target sequence
agaacatattgaagtggaag

SEQ ID NO: 148545 - DNA, 20 bp, Artificial sequence
  SiRNA target sequence
gaacatattgaagtggaagt

SEQ ID NO: 148546 - DNA, 20 bp, Artificial sequence
  SiRNA target sequence
aacatattgaagtggaagta

SEQ ID NO: 148547 - DNA, 20 bp, Artificial sequence
  SiRNA target sequence
acatattgaagtggaagtag

SEQ ID NO: 148548 - DNA, 20 bp, Artificial sequence
  SiRNA target sequence
catattgaagtggaagtaga

SEQ ID NO: 148549 - DNA, 20 bp, Artificial sequence
  SiRNA target sequence
atattgaagtggaagtagag

SEQ ID NO: 148550 - DNA, 20 bp, Artificial sequence
  SiRNA target sequence
tattgaagtggaagtagagc

SEQ ID NO: 148551 - DNA, 20 bp, Artificial sequence
  SiRNA target sequence
attgaagtggaagtagagcc

SEQ ID NO: 148552 - DNA, 20 bp, Artificial sequence
  SiRNA target sequence
ttgaagtggaagtagagcca

SEQ ID NO: 148553 - DNA, 20 bp, Artificial sequence
  SiRNA target sequence
tgaagtggaagtagagccag

SEQ ID NO: 148554 - DNA, 20 bp, Artificial sequence
  SiRNA target sequence
gaagtggaagtagagccagg

SEQ ID NO: 148555 - DNA, 20 bp, Artificial sequence
  SiRNA target sequence
aagtggaagtagagccagga

SEQ ID NO: 148556 - DNA, 20 bp, Artificial sequence
  SiRNA target sequence
agtggaagtagagccaggag

SEQ ID NO: 148557 - DNA, 20 bp, Artificial sequence
  SiRNA target sequence
gtggaagtagagccaggagt

SEQ ID NO: 148558 - DNA, 20 bp, Artificial sequence
  SiRNA target sequence
tggaagtagagccaggagta

SEQ ID NO: 148559 - DNA, 20 bp, Artificial sequence
  SiRNA target sequence
ggaagtagagccaggagtac

SEQ ID NO: 148560 - DNA, 20 bp, Artificial sequence
  SiRNA target sequence
gaagtagagccaggagtaca

SEQ ID NO: 148561 - DNA, 20 bp, Artificial sequence
  SiRNA target sequence
aagtagagccaggagtacag

SEQ ID NO: 148562 - DNA, 20 bp, Artificial sequence
  SiRNA target sequence
agtagagccaggagtacaga

SEQ ID NO: 148563 - DNA, 20 bp, Artificial sequence
  SiRNA target sequence
gtagagccaggagtacagaa

SEQ ID NO: 148564 - DNA, 20 bp, Artificial sequence
  SiRNA target sequence
tagagccaggagtacagaac

SEQ ID NO: 148565 - DNA, 20 bp, Artificial sequence
  SiRNA target sequence
agagccaggagtacagaacg

SEQ ID NO: 148566 - DNA, 20 bp, Artificial sequence
  SiRNA target sequence
gagccaggagtacagaacgg

SEQ ID NO: 148567 - DNA, 20 bp, Artificial sequence
  SiRNA target sequence
agccaggagtacagaacggt

SEQ ID NO: 148568 - DNA, 20 bp, Artificial sequence
  SiRNA target sequence
gccaggagtacagaacggta

SEQ ID NO: 148569 - DNA, 20 bp, Artificial sequence
  SiRNA target sequence
ccaggagtacagaacggtag

SEQ ID NO: 148570 - DNA, 20 bp, Artificial sequence
  SiRNA target sequence
caggagtacagaacggtaga

SEQ ID NO: 148571 - DNA, 20 bp, Artificial sequence
  SiRNA target sequence
aggagtacagaacggtagaa

SEQ ID NO: 148572 - DNA, 20 bp, Artificial sequence
  SiRNA target sequence
ggagtacagaacggtagaaa

SEQ ID NO: 148573 - DNA, 20 bp, Artificial sequence
  SiRNA target sequence
gagtacagaacggtagaaaa

SEQ ID NO: 148574 - DNA, 20 bp, Artificial sequence
  SiRNA target sequence
agtacagaacggtagaaaat

SEQ ID NO: 148575 - DNA, 20 bp, Artificial sequence
  SiRNA target sequence
gtacagaacggtagaaaata

SEQ ID NO: 148576 - DNA, 20 bp, Artificial sequence
  SiRNA target sequence
tacagaacggtagaaaatat

SEQ ID NO: 148577 - DNA, 20 bp, Artificial sequence
  SiRNA target sequence
acagaacggtagaaaatata

SEQ ID NO: 148578 - DNA, 20 bp, Artificial sequence
  SiRNA target sequence
cagaacggtagaaaatatac

SEQ ID NO: 148579 - DNA, 20 bp, Artificial sequence
  SiRNA target sequence
agaacggtagaaaatataca

SEQ ID NO: 148580 - DNA, 20 bp, Artificial sequence
  SiRNA target sequence
gaacggtagaaaatatacat

SEQ ID NO: 148581 - DNA, 20 bp, Artificial sequence
  SiRNA target sequence
aacggtagaaaatatacatt

SEQ ID NO: 148582 - DNA, 20 bp, Artificial sequence
  SiRNA target sequence
acggtagaaaatatacattt

SEQ ID NO: 148583 - DNA, 20 bp, Artificial sequence
  SiRNA target sequence
cggtagaaaatatacatttt

SEQ ID NO: 148584 - DNA, 20 bp, Artificial sequence
  SiRNA target sequence
ggtagaaaatatacattttc

SEQ ID NO: 148585 - DNA, 20 bp, Artificial sequence
  SiRNA target sequence
gtagaaaatatacattttct

SEQ ID NO: 148586 - DNA, 20 bp, Artificial sequence
  SiRNA target sequence
tagaaaatatacattttctg

SEQ ID NO: 148587 - DNA, 20 bp, Artificial sequence
  SiRNA target sequence
agaaaatatacattttctgg

SEQ ID NO: 148588 - DNA, 20 bp, Artificial sequence
  SiRNA target sequence
gaaaatatacattttctggc

SEQ ID NO: 148589 - DNA, 20 bp, Artificial sequence
  SiRNA target sequence
aaaatatacattttctggca

SEQ ID NO: 148590 - DNA, 20 bp, Artificial sequence
  SiRNA target sequence
aaatatacattttctggcaa

SEQ ID NO: 148591 - DNA, 20 bp, Artificial sequence
  SiRNA target sequence
aatatacattttctggcaaa

SEQ ID NO: 148592 - DNA, 20 bp, Artificial sequence
  SiRNA target sequence
atatacattttctggcaaag

SEQ ID NO: 148593 - DNA, 20 bp, Artificial sequence
  SiRNA target sequence
tatacattttctggcaaagg

SEQ ID NO: 148594 - DNA, 20 bp, Artificial sequence
  SiRNA target sequence
atacattttctggcaaagga

SEQ ID NO: 148595 - DNA, 20 bp, Artificial sequence
  SiRNA target sequence
tacattttctggcaaaggaa

SEQ ID NO: 148596 - DNA, 20 bp, Artificial sequence
  SiRNA target sequence
acattttctggcaaaggaaa

SEQ ID NO: 148597 - DNA, 20 bp, Artificial sequence
  SiRNA target sequence
cattttctggcaaaggaaat

SEQ ID NO: 148598 - DNA, 20 bp, Artificial sequence
  SiRNA target sequence
attttctggcaaaggaaatc

SEQ ID NO: 148599 - DNA, 20 bp, Artificial sequence
  SiRNA target sequence
ttttctggcaaaggaaatca

SEQ ID NO: 148600 - DNA, 20 bp, Artificial sequence
  SiRNA target sequence
tttctggcaaaggaaatcat

SEQ ID NO: 148601 - DNA, 20 bp, Artificial sequence
  SiRNA target sequence
ttctggcaaaggaaatcata

SEQ ID NO: 148602 - DNA, 20 bp, Artificial sequence
  SiRNA target sequence
tctggcaaaggaaatcataa

SEQ ID NO: 148603 - DNA, 20 bp, Artificial sequence
  SiRNA target sequence
ctggcaaaggaaatcataaa

SEQ ID NO: 148604 - DNA, 20 bp, Artificial sequence
  SiRNA target sequence
tggcaaaggaaatcataaaa

SEQ ID NO: 148605 - DNA, 20 bp, Artificial sequence
  SiRNA target sequence
ggcaaaggaaatcataaaaa

SEQ ID NO: 148606 - DNA, 20 bp, Artificial sequence
  SiRNA target sequence
gcaaaggaaatcataaaaaa

SEQ ID NO: 148607 - DNA, 20 bp, Artificial sequence
  SiRNA target sequence
caaaggaaatcataaaaaaa

SEQ ID NO: 148608 - DNA, 20 bp, Artificial sequence
  SiRNA target sequence
aaaggaaatcataaaaaaaa

SEQ ID NO: 148609 - DNA, 20 bp, Artificial sequence
  SiRNA target sequence
aaggaaatcataaaaaaaat

SEQ ID NO: 148610 - DNA, 20 bp, Artificial sequence
  SiRNA target sequence
aggaaatcataaaaaaaatt

SEQ ID NO: 148611 - DNA, 20 bp, Artificial sequence
  SiRNA target sequence
ggaaatcataaaaaaaattg

SEQ ID NO: 148612 - DNA, 20 bp, Artificial sequence
  SiRNA target sequence
gaaatcataaaaaaaattgt

SEQ ID NO: 148613 - DNA, 20 bp, Artificial sequence
  SiRNA target sequence
aaatcataaaaaaaattgtg

SEQ ID NO: 148614 - DNA, 20 bp, Artificial sequence
  SiRNA target sequence
aatcataaaaaaaattgtgt

SEQ ID NO: 148615 - DNA, 20 bp, Artificial sequence
  SiRNA target sequence
atcataaaaaaaattgtgta

SEQ ID NO: 148616 - DNA, 20 bp, Artificial sequence
  SiRNA target sequence
tcataaaaaaaattgtgtac

SEQ ID NO: 148617 - DNA, 20 bp, Artificial sequence
  SiRNA target sequence
cataaaaaaaattgtgtacc

SEQ ID NO: 148618 - DNA, 20 bp, Artificial sequence
  SiRNA target sequence
ataaaaaaaattgtgtaccg

SEQ ID NO: 148619 - DNA, 20 bp, Artificial sequence
  SiRNA target sequence
taaaaaaaattgtgtaccgg

SEQ ID NO: 148620 - DNA, 20 bp, Artificial sequence
  SiRNA target sequence
aaaaaaaattgtgtaccggg

SEQ ID NO: 148621 - DNA, 20 bp, Artificial sequence
  SiRNA target sequence
aaaaaaattgtgtaccgggt

SEQ ID NO: 148622 - DNA, 20 bp, Artificial sequence
  SiRNA target sequence
aaaaaattgtgtaccgggtg

SEQ ID NO: 148623 - DNA, 20 bp, Artificial sequence
  SiRNA target sequence
aaaaattgtgtaccgggtga

SEQ ID NO: 148624 - DNA, 20 bp, Artificial sequence
  SiRNA target sequence
aaaattgtgtaccgggtgat

SEQ ID NO: 148625 - DNA, 20 bp, Artificial sequence
  SiRNA target sequence
aaattgtgtaccgggtgatg

SEQ ID NO: 148626 - DNA, 20 bp, Artificial sequence
  SiRNA target sequence
aattgtgtaccgggtgatgt

SEQ ID NO: 148627 - DNA, 20 bp, Artificial sequence
  SiRNA target sequence
attgtgtaccgggtgatgtg

SEQ ID NO: 148628 - DNA, 20 bp, Artificial sequence
  SiRNA target sequence
ttgtgtaccgggtgatgtga

SEQ ID NO: 148629 - DNA, 20 bp, Artificial sequence
  SiRNA target sequence
tgtgtaccgggtgatgtgat

SEQ ID NO: 148630 - DNA, 20 bp, Artificial sequence
  SiRNA target sequence
gtgtaccgggtgatgtgatt

SEQ ID NO: 148631 - DNA, 20 bp, Artificial sequence
  SiRNA target sequence
tgtaccgggtgatgtgattc

SEQ ID NO: 148632 - DNA, 20 bp, Artificial sequence
  SiRNA target sequence
gtaccgggtgatgtgattct

SEQ ID NO: 148633 - DNA, 20 bp, Artificial sequence
  SiRNA target sequence
taccgggtgatgtgattctt

SEQ ID NO: 148634 - DNA, 20 bp, Artificial sequence
  SiRNA target sequence
accgggtgatgtgattctta

SEQ ID NO: 148635 - DNA, 20 bp, Artificial sequence
  SiRNA target sequence
ccgggtgatgtgattcttat

SEQ ID NO: 148636 - DNA, 20 bp, Artificial sequence
  SiRNA target sequence
cgggtgatgtgattcttatt

SEQ ID NO: 148637 - DNA, 20 bp, Artificial sequence
  SiRNA target sequence
gggtgatgtgattcttattg

SEQ ID NO: 148638 - DNA, 20 bp, Artificial sequence
  SiRNA target sequence
ggtgatgtgattcttattgt

SEQ ID NO: 148639 - DNA, 20 bp, Artificial sequence
  SiRNA target sequence
gtgatgtgattcttattgta

SEQ ID NO: 148640 - DNA, 20 bp, Artificial sequence
  SiRNA target sequence
tgatgtgattcttattgtaa

SEQ ID NO: 148641 - DNA, 20 bp, Artificial sequence
  SiRNA target sequence
gatgtgattcttattgtaaa

SEQ ID NO: 148642 - DNA, 20 bp, Artificial sequence
  SiRNA target sequence
atgtgattcttattgtaaac

SEQ ID NO: 148643 - DNA, 20 bp, Artificial sequence
  SiRNA target sequence
tgtgattcttattgtaaaca

SEQ ID NO: 148644 - DNA, 20 bp, Artificial sequence
  SiRNA target sequence
gtgattcttattgtaaacat

SEQ ID NO: 148645 - DNA, 20 bp, Artificial sequence
  SiRNA target sequence
tgattcttattgtaaacatt

SEQ ID NO: 148646 - DNA, 20 bp, Artificial sequence
  SiRNA target sequence
gattcttattgtaaacatta

SEQ ID NO: 148647 - DNA, 20 bp, Artificial sequence
  SiRNA target sequence
attcttattgtaaacattac

SEQ ID NO: 148648 - DNA, 20 bp, Artificial sequence
  SiRNA target sequence
ttcttattgtaaacattaca

SEQ ID NO: 148649 - DNA, 20 bp, Artificial sequence
  SiRNA target sequence
tcttattgtaaacattacaa

SEQ ID NO: 148650 - DNA, 20 bp, Artificial sequence
  SiRNA target sequence
cttattgtaaacattacaaa

SEQ ID NO: 148651 - DNA, 20 bp, Artificial sequence
  SiRNA target sequence
ttattgtaaacattacaaat

SEQ ID NO: 148652 - DNA, 20 bp, Artificial sequence
  SiRNA target sequence
tattgtaaacattacaaatg

SEQ ID NO: 148653 - DNA, 20 bp, Artificial sequence
  SiRNA target sequence
attgtaaacattacaaatga

SEQ ID NO: 148654 - DNA, 20 bp, Artificial sequence
  SiRNA target sequence
ttgtaaacattacaaatgat

SEQ ID NO: 148655 - DNA, 20 bp, Artificial sequence
  SiRNA target sequence
tgtaaacattacaaatgatc

SEQ ID NO: 148656 - DNA, 20 bp, Artificial sequence
  SiRNA target sequence
gtaaacattacaaatgatcc

SEQ ID NO: 148657 - DNA, 20 bp, Artificial sequence
  SiRNA target sequence
taaacattacaaatgatcca

SEQ ID NO: 148658 - DNA, 20 bp, Artificial sequence
  SiRNA target sequence
aaacattacaaatgatccaa

SEQ ID NO: 148659 - DNA, 20 bp, Artificial sequence
  SiRNA target sequence
aacattacaaatgatccaag

SEQ ID NO: 148660 - DNA, 20 bp, Artificial sequence
  SiRNA target sequence
acattacaaatgatccaaga

SEQ ID NO: 148661 - DNA, 20 bp, Artificial sequence
  SiRNA target sequence
cattacaaatgatccaagat

SEQ ID NO: 148662 - DNA, 20 bp, Artificial sequence
  SiRNA target sequence
attacaaatgatccaagatt

SEQ ID NO: 148663 - DNA, 20 bp, Artificial sequence
  SiRNA target sequence
ttacaaatgatccaagattt

SEQ ID NO: 148664 - DNA, 20 bp, Artificial sequence
  SiRNA target sequence
tacaaatgatccaagattta

SEQ ID NO: 148665 - DNA, 20 bp, Artificial sequence
  SiRNA target sequence
acaaatgatccaagatttag

SEQ ID NO: 148666 - DNA, 20 bp, Artificial sequence
  SiRNA target sequence
caaatgatccaagatttaga

SEQ ID NO: 148667 - DNA, 20 bp, Artificial sequence
  SiRNA target sequence
aaatgatccaagatttagaa

SEQ ID NO: 148668 - DNA, 20 bp, Artificial sequence
  SiRNA target sequence
aatgatccaagatttagaaa

SEQ ID NO: 148669 - DNA, 20 bp, Artificial sequence
  SiRNA target sequence
atgatccaagatttagaaaa

SEQ ID NO: 148670 - DNA, 20 bp, Artificial sequence
  SiRNA target sequence
tgatccaagatttagaaaaa

SEQ ID NO: 148671 - DNA, 20 bp, Artificial sequence
  SiRNA target sequence
gatccaagatttagaaaaag

SEQ ID NO: 148672 - DNA, 20 bp, Artificial sequence
  SiRNA target sequence
atccaagatttagaaaaagt

SEQ ID NO: 148673 - DNA, 20 bp, Artificial sequence
  SiRNA target sequence
tccaagatttagaaaaagtg

SEQ ID NO: 148674 - DNA, 20 bp, Artificial sequence
  SiRNA target sequence
ccaagatttagaaaaagtgg

SEQ ID NO: 148675 - DNA, 20 bp, Artificial sequence
  SiRNA target sequence
caagatttagaaaaagtgga

SEQ ID NO: 148676 - DNA, 20 bp, Artificial sequence
  SiRNA target sequence
aagatttagaaaaagtggat

SEQ ID NO: 148677 - DNA, 20 bp, Artificial sequence
  SiRNA target sequence
agatttagaaaaagtggata

SEQ ID NO: 148678 - DNA, 20 bp, Artificial sequence
  SiRNA target sequence
gatttagaaaaagtggatat

SEQ ID NO: 148679 - DNA, 20 bp, Artificial sequence
  SiRNA target sequence
atttagaaaaagtggatata

SEQ ID NO: 148680 - DNA, 20 bp, Artificial sequence
  SiRNA target sequence
tttagaaaaagtggatataa

SEQ ID NO: 148681 - DNA, 20 bp, Artificial sequence
  SiRNA target sequence
ttagaaaaagtggatataat

SEQ ID NO: 148682 - DNA, 20 bp, Artificial sequence
  SiRNA target sequence
tagaaaaagtggatataatt

SEQ ID NO: 148683 - DNA, 20 bp, Artificial sequence
  SiRNA target sequence
agaaaaagtggatataattt

SEQ ID NO: 148684 - DNA, 20 bp, Artificial sequence
  SiRNA target sequence
gaaaaagtggatataattta

SEQ ID NO: 148685 - DNA, 20 bp, Artificial sequence
  SiRNA target sequence
aaaaagtggatataatttaa

SEQ ID NO: 148686 - DNA, 20 bp, Artificial sequence
  SiRNA target sequence
aaaagtggatataatttaat

SEQ ID NO: 148687 - DNA, 20 bp, Artificial sequence
  SiRNA target sequence
aaagtggatataatttaatt

SEQ ID NO: 148688 - DNA, 20 bp, Artificial sequence
  SiRNA target sequence
aagtggatataatttaatta

SEQ ID NO: 148689 - DNA, 20 bp, Artificial sequence
  SiRNA target sequence
agtggatataatttaattag

SEQ ID NO: 148690 - DNA, 20 bp, Artificial sequence
  SiRNA target sequence
gtggatataatttaattagt

SEQ ID NO: 148691 - DNA, 20 bp, Artificial sequence
  SiRNA target sequence
tggatataatttaattagta

SEQ ID NO: 148692 - DNA, 20 bp, Artificial sequence
  SiRNA target sequence
ggatataatttaattagtaa

SEQ ID NO: 148693 - DNA, 20 bp, Artificial sequence
  SiRNA target sequence
gatataatttaattagtaag

SEQ ID NO: 148694 - DNA, 20 bp, Artificial sequence
  SiRNA target sequence
atataatttaattagtaagg

SEQ ID NO: 148695 - DNA, 20 bp, Artificial sequence
  SiRNA target sequence
tataatttaattagtaaggt

SEQ ID NO: 148696 - DNA, 20 bp, Artificial sequence
  SiRNA target sequence
ataatttaattagtaaggtt

SEQ ID NO: 148697 - DNA, 20 bp, Artificial sequence
  SiRNA target sequence
taatttaattagtaaggttg

SEQ ID NO: 148698 - DNA, 20 bp, Artificial sequence
  SiRNA target sequence
aatttaattagtaaggttga

SEQ ID NO: 148699 - DNA, 20 bp, Artificial sequence
  SiRNA target sequence
atttaattagtaaggttgat

SEQ ID NO: 148700 - DNA, 20 bp, Artificial sequence
  SiRNA target sequence
tttaattagtaaggttgata

SEQ ID NO: 148701 - DNA, 20 bp, Artificial sequence
  SiRNA target sequence
ttaattagtaaggttgatat

SEQ ID NO: 148702 - DNA, 20 bp, Artificial sequence
  SiRNA target sequence
taattagtaaggttgatatt

SEQ ID NO: 148703 - DNA, 20 bp, Artificial sequence
  SiRNA target sequence
aattagtaaggttgatattc

SEQ ID NO: 148704 - DNA, 20 bp, Artificial sequence
  SiRNA target sequence
attagtaaggttgatattcc

SEQ ID NO: 148705 - DNA, 20 bp, Artificial sequence
  SiRNA target sequence
ttagtaaggttgatattcca

SEQ ID NO: 148706 - DNA, 20 bp, Artificial sequence
  SiRNA target sequence
tagtaaggttgatattccat

SEQ ID NO: 148707 - DNA, 20 bp, Artificial sequence
  SiRNA target sequence
agtaaggttgatattccatt

SEQ ID NO: 148708 - DNA, 20 bp, Artificial sequence
  SiRNA target sequence
gtaaggttgatattccattg

SEQ ID NO: 148709 - DNA, 20 bp, Artificial sequence
  SiRNA target sequence
taaggttgatattccattgt

SEQ ID NO: 148710 - DNA, 20 bp, Artificial sequence
  SiRNA target sequence
aaggttgatattccattgta

SEQ ID NO: 148711 - DNA, 20 bp, Artificial sequence
  SiRNA target sequence
aggttgatattccattgtat

SEQ ID NO: 148712 - DNA, 20 bp, Artificial sequence
  SiRNA target sequence
ggttgatattccattgtatg

SEQ ID NO: 148713 - DNA, 20 bp, Artificial sequence
  SiRNA target sequence
gttgatattccattgtatgt

SEQ ID NO: 148714 - DNA, 20 bp, Artificial sequence
  SiRNA target sequence
ttgatattccattgtatgtt

SEQ ID NO: 148715 - DNA, 20 bp, Artificial sequence
  SiRNA target sequence
tgatattccattgtatgttg

SEQ ID NO: 148716 - DNA, 20 bp, Artificial sequence
  SiRNA target sequence
gatattccattgtatgttgc

SEQ ID NO: 148717 - DNA, 20 bp, Artificial sequence
  SiRNA target sequence
atattccattgtatgttgct

SEQ ID NO: 148718 - DNA, 20 bp, Artificial sequence
  SiRNA target sequence
tattccattgtatgttgctt

SEQ ID NO: 148719 - DNA, 20 bp, Artificial sequence
  SiRNA target sequence
attccattgtatgttgcttt

SEQ ID NO: 148720 - DNA, 20 bp, Artificial sequence
  SiRNA target sequence
ttccattgtatgttgctttg

SEQ ID NO: 148721 - DNA, 20 bp, Artificial sequence
  SiRNA target sequence
tccattgtatgttgctttgg

SEQ ID NO: 148722 - DNA, 20 bp, Artificial sequence
  SiRNA target sequence
ccattgtatgttgctttggc

SEQ ID NO: 148723 - DNA, 20 bp, Artificial sequence
  SiRNA target sequence
cattgtatgttgctttggca

SEQ ID NO: 148724 - DNA, 20 bp, Artificial sequence
  SiRNA target sequence
attgtatgttgctttggcag

SEQ ID NO: 148725 - DNA, 20 bp, Artificial sequence
  SiRNA target sequence
ttgtatgttgctttggcagg

SEQ ID NO: 148726 - DNA, 20 bp, Artificial sequence
  SiRNA target sequence
tgtatgttgctttggcaggc

SEQ ID NO: 148727 - DNA, 20 bp, Artificial sequence
  SiRNA target sequence
gtatgttgctttggcaggcg

SEQ ID NO: 148728 - DNA, 20 bp, Artificial sequence
  SiRNA target sequence
tatgttgctttggcaggcgg

SEQ ID NO: 148729 - DNA, 20 bp, Artificial sequence
  SiRNA target sequence
atgttgctttggcaggcgga

SEQ ID NO: 148730 - DNA, 20 bp, Artificial sequence
  SiRNA target sequence
tgttgctttggcaggcggac

SEQ ID NO: 148731 - DNA, 20 bp, Artificial sequence
  SiRNA target sequence
gttgctttggcaggcggaca

SEQ ID NO: 148732 - DNA, 20 bp, Artificial sequence
  SiRNA target sequence
ttgctttggcaggcggacag

SEQ ID NO: 148733 - DNA, 20 bp, Artificial sequence
  SiRNA target sequence
tgctttggcaggcggacaga

SEQ ID NO: 148734 - DNA, 20 bp, Artificial sequence
  SiRNA target sequence
gctttggcaggcggacagat

SEQ ID NO: 148735 - DNA, 20 bp, Artificial sequence
  SiRNA target sequence
ctttggcaggcggacagatt

SEQ ID NO: 148736 - DNA, 20 bp, Artificial sequence
  SiRNA target sequence
tttggcaggcggacagatta

SEQ ID NO: 148737 - DNA, 20 bp, Artificial sequence
  SiRNA target sequence
ttggcaggcggacagattat

SEQ ID NO: 148738 - DNA, 20 bp, Artificial sequence
  SiRNA target sequence
tggcaggcggacagattata

SEQ ID NO: 148739 - DNA, 20 bp, Artificial sequence
  SiRNA target sequence
ggcaggcggacagattatat

SEQ ID NO: 148740 - DNA, 20 bp, Artificial sequence
  SiRNA target sequence
gcaggcggacagattatatt

SEQ ID NO: 148741 - DNA, 20 bp, Artificial sequence
  SiRNA target sequence
caggcggacagattatattt

SEQ ID NO: 148742 - DNA, 20 bp, Artificial sequence
  SiRNA target sequence
aggcggacagattatatttg

SEQ ID NO: 148743 - DNA, 20 bp, Artificial sequence
  SiRNA target sequence
ggcggacagattatatttga

SEQ ID NO: 148744 - DNA, 20 bp, Artificial sequence
  SiRNA target sequence
gcggacagattatatttgaa

SEQ ID NO: 148745 - DNA, 20 bp, Artificial sequence
  SiRNA target sequence
cggacagattatatttgaac

SEQ ID NO: 148746 - DNA, 20 bp, Artificial sequence
  SiRNA target sequence
ggacagattatatttgaaca

SEQ ID NO: 148747 - DNA, 20 bp, Artificial sequence
  SiRNA target sequence
gacagattatatttgaacat

SEQ ID NO: 148748 - DNA, 20 bp, Artificial sequence
  SiRNA target sequence
acagattatatttgaacata

SEQ ID NO: 148749 - DNA, 20 bp, Artificial sequence
  SiRNA target sequence
cagattatatttgaacatat

SEQ ID NO: 148750 - DNA, 20 bp, Artificial sequence
  SiRNA target sequence
agattatatttgaacatatc

SEQ ID NO: 148751 - DNA, 20 bp, Artificial sequence
  SiRNA target sequence
gattatatttgaacatatca

SEQ ID NO: 148752 - DNA, 20 bp, Artificial sequence
  SiRNA target sequence
attatatttgaacatatcac

SEQ ID NO: 148753 - DNA, 20 bp, Artificial sequence
  SiRNA target sequence
ttatatttgaacatatcact

SEQ ID NO: 148754 - DNA, 20 bp, Artificial sequence
  SiRNA target sequence
tatatttgaacatatcactg

SEQ ID NO: 148755 - DNA, 20 bp, Artificial sequence
  SiRNA target sequence
atatttgaacatatcactgg

SEQ ID NO: 148756 - DNA, 20 bp, Artificial sequence
  SiRNA target sequence
tatttgaacatatcactggt

SEQ ID NO: 148757 - DNA, 20 bp, Artificial sequence
  SiRNA target sequence
atttgaacatatcactggta

SEQ ID NO: 148758 - DNA, 20 bp, Artificial sequence
  SiRNA target sequence
tttgaacatatcactggtaa

SEQ ID NO: 148759 - DNA, 20 bp, Artificial sequence
  SiRNA target sequence
ttgaacatatcactggtaag

SEQ ID NO: 148760 - DNA, 20 bp, Artificial sequence
  SiRNA target sequence
tgaacatatcactggtaaga

SEQ ID NO: 148761 - DNA, 20 bp, Artificial sequence
  SiRNA target sequence
gaacatatcactggtaagaa

SEQ ID NO: 148762 - DNA, 20 bp, Artificial sequence
  SiRNA target sequence
aacatatcactggtaagaaa

SEQ ID NO: 148763 - DNA, 20 bp, Artificial sequence
  SiRNA target sequence
acatatcactggtaagaaat

SEQ ID NO: 148764 - DNA, 20 bp, Artificial sequence
  SiRNA target sequence
catatcactggtaagaaatt

SEQ ID NO: 148765 - DNA, 20 bp, Artificial sequence
  SiRNA target sequence
atatcactggtaagaaattt

SEQ ID NO: 148766 - DNA, 20 bp, Artificial sequence
  SiRNA target sequence
tatcactggtaagaaatttg

SEQ ID NO: 148767 - DNA, 20 bp, Artificial sequence
  SiRNA target sequence
atcactggtaagaaatttga

SEQ ID NO: 148768 - DNA, 20 bp, Artificial sequence
  SiRNA target sequence
tcactggtaagaaatttgaa

SEQ ID NO: 148769 - DNA, 20 bp, Artificial sequence
  SiRNA target sequence
cactggtaagaaatttgaaa

SEQ ID NO: 148770 - DNA, 20 bp, Artificial sequence
  SiRNA target sequence
actggtaagaaatttgaaat

SEQ ID NO: 148771 - DNA, 20 bp, Artificial sequence
  SiRNA target sequence
ctggtaagaaatttgaaatt

SEQ ID NO: 148772 - DNA, 20 bp, Artificial sequence
  SiRNA target sequence
tggtaagaaatttgaaatta

SEQ ID NO: 148773 - DNA, 20 bp, Artificial sequence
  SiRNA target sequence
ggtaagaaatttgaaattac

SEQ ID NO: 148774 - DNA, 20 bp, Artificial sequence
  SiRNA target sequence
gtaagaaatttgaaattact

SEQ ID NO: 148775 - DNA, 20 bp, Artificial sequence
  SiRNA target sequence
taagaaatttgaaattactt

SEQ ID NO: 148776 - DNA, 20 bp, Artificial sequence
  SiRNA target sequence
aagaaatttgaaattacttt

SEQ ID NO: 148777 - DNA, 20 bp, Artificial sequence
  SiRNA target sequence
agaaatttgaaattacttta

SEQ ID NO: 148778 - DNA, 20 bp, Artificial sequence
  SiRNA target sequence
gaaatttgaaattactttat

SEQ ID NO: 148779 - DNA, 20 bp, Artificial sequence
  SiRNA target sequence
aaatttgaaattactttata

SEQ ID NO: 148780 - DNA, 20 bp, Artificial sequence
  SiRNA target sequence
aatttgaaattactttatat

SEQ ID NO: 148781 - DNA, 20 bp, Artificial sequence
  SiRNA target sequence
atttgaaattactttatatc

SEQ ID NO: 148782 - DNA, 20 bp, Artificial sequence
  SiRNA target sequence
tttgaaattactttatatcc

SEQ ID NO: 148783 - DNA, 20 bp, Artificial sequence
  SiRNA target sequence
ttgaaattactttatatcca

SEQ ID NO: 148784 - DNA, 20 bp, Artificial sequence
  SiRNA target sequence
tgaaattactttatatccat

SEQ ID NO: 148785 - DNA, 20 bp, Artificial sequence
  SiRNA target sequence
gaaattactttatatccatt

SEQ ID NO: 148786 - DNA, 20 bp, Artificial sequence
  SiRNA target sequence
aaattactttatatccattt

SEQ ID NO: 148787 - DNA, 20 bp, Artificial sequence
  SiRNA target sequence
aattactttatatccattta

SEQ ID NO: 148788 - DNA, 20 bp, Artificial sequence
  SiRNA target sequence
attactttatatccatttaa

SEQ ID NO: 148789 - DNA, 20 bp, Artificial sequence
  SiRNA target sequence
ttactttatatccatttaaa

SEQ ID NO: 148790 - DNA, 20 bp, Artificial sequence
  SiRNA target sequence
tactttatatccatttaaag

SEQ ID NO: 148791 - DNA, 20 bp, Artificial sequence
  SiRNA target sequence
actttatatccatttaaaga

SEQ ID NO: 148792 - DNA, 20 bp, Artificial sequence
  SiRNA target sequence
ctttatatccatttaaagat

SEQ ID NO: 148793 - DNA, 20 bp, Artificial sequence
  SiRNA target sequence
tttatatccatttaaagatt

SEQ ID NO: 148794 - DNA, 20 bp, Artificial sequence
  SiRNA target sequence
ttatatccatttaaagattt

SEQ ID NO: 148795 - DNA, 20 bp, Artificial sequence
  SiRNA target sequence
tatatccatttaaagattta

SEQ ID NO: 148796 - DNA, 20 bp, Artificial sequence
  SiRNA target sequence
atatccatttaaagatttaa

SEQ ID NO: 148797 - DNA, 20 bp, Artificial sequence
  SiRNA target sequence
tatccatttaaagatttaaa

SEQ ID NO: 148798 - DNA, 20 bp, Artificial sequence
  SiRNA target sequence
atccatttaaagatttaaag

SEQ ID NO: 148799 - DNA, 20 bp, Artificial sequence
  SiRNA target sequence
tccatttaaagatttaaaga

SEQ ID NO: 148800 - DNA, 20 bp, Artificial sequence
  SiRNA target sequence
ccatttaaagatttaaagaa

SEQ ID NO: 148801 - DNA, 20 bp, Artificial sequence
  SiRNA target sequence
catttaaagatttaaagaaa

SEQ ID NO: 148802 - DNA, 20 bp, Artificial sequence
  SiRNA target sequence
atttaaagatttaaagaaat

SEQ ID NO: 148803 - DNA, 20 bp, Artificial sequence
  SiRNA target sequence
tttaaagatttaaagaaatg

SEQ ID NO: 148804 - DNA, 20 bp, Artificial sequence
  SiRNA target sequence
ttaaagatttaaagaaatgt

SEQ ID NO: 148805 - DNA, 20 bp, Artificial sequence
  SiRNA target sequence
taaagatttaaagaaatgta

SEQ ID NO: 148806 - DNA, 20 bp, Artificial sequence
  SiRNA target sequence
aaagatttaaagaaatgtat

SEQ ID NO: 148807 - DNA, 20 bp, Artificial sequence
  SiRNA target sequence
aagatttaaagaaatgtatt

SEQ ID NO: 148808 - DNA, 20 bp, Artificial sequence
  SiRNA target sequence
agatttaaagaaatgtatta

SEQ ID NO: 148809 - DNA, 20 bp, Artificial sequence
  SiRNA target sequence
gatttaaagaaatgtattat

SEQ ID NO: 148810 - DNA, 20 bp, Artificial sequence
  SiRNA target sequence
atttaaagaaatgtattatt

SEQ ID NO: 148811 - DNA, 20 bp, Artificial sequence
  SiRNA target sequence
tttaaagaaatgtattattt

SEQ ID NO: 148812 - DNA, 20 bp, Artificial sequence
  SiRNA target sequence
ttaaagaaatgtattatttt

SEQ ID NO: 148813 - DNA, 20 bp, Artificial sequence
  SiRNA target sequence
taaagaaatgtattatttta

SEQ ID NO: 148814 - DNA, 20 bp, Artificial sequence
  SiRNA target sequence
aaagaaatgtattattttaa

SEQ ID NO: 148815 - DNA, 20 bp, Artificial sequence
  SiRNA target sequence
aagaaatgtattattttaaa

SEQ ID NO: 148816 - DNA, 20 bp, Artificial sequence
  SiRNA target sequence
agaaatgtattattttaaaa

SEQ ID NO: 148817 - DNA, 20 bp, Artificial sequence
  SiRNA target sequence
gaaatgtattattttaaaag

SEQ ID NO: 148818 - DNA, 20 bp, Artificial sequence
  SiRNA target sequence
aaatgtattattttaaaagg

SEQ ID NO: 148819 - DNA, 20 bp, Artificial sequence
  SiRNA target sequence
aatgtattattttaaaaggc

SEQ ID NO: 148820 - DNA, 20 bp, Artificial sequence
  SiRNA target sequence
atgtattattttaaaaggcg

SEQ ID NO: 148821 - DNA, 20 bp, Artificial sequence
  SiRNA target sequence
tgtattattttaaaaggcga

SEQ ID NO: 148822 - DNA, 20 bp, Artificial sequence
  SiRNA target sequence
gtattattttaaaaggcgaa

SEQ ID NO: 148823 - DNA, 20 bp, Artificial sequence
  SiRNA target sequence
tattattttaaaaggcgaag

SEQ ID NO: 148824 - DNA, 20 bp, Artificial sequence
  SiRNA target sequence
attattttaaaaggcgaagg

SEQ ID NO: 148825 - DNA, 20 bp, Artificial sequence
  SiRNA target sequence
ttattttaaaaggcgaaggt

SEQ ID NO: 148826 - DNA, 20 bp, Artificial sequence
  SiRNA target sequence
tattttaaaaggcgaaggtt

SEQ ID NO: 148827 - DNA, 20 bp, Artificial sequence
  SiRNA target sequence
attttaaaaggcgaaggttt

SEQ ID NO: 148828 - DNA, 20 bp, Artificial sequence
  SiRNA target sequence
ttttaaaaggcgaaggtttt

SEQ ID NO: 148829 - DNA, 20 bp, Artificial sequence
  SiRNA target sequence
tttaaaaggcgaaggtttta

SEQ ID NO: 148830 - DNA, 20 bp, Artificial sequence
  SiRNA target sequence
ttaaaaggcgaaggttttaa

SEQ ID NO: 148831 - DNA, 20 bp, Artificial sequence
  SiRNA target sequence
taaaaggcgaaggttttaaa

SEQ ID NO: 148832 - DNA, 20 bp, Artificial sequence
  SiRNA target sequence
aaaaggcgaaggttttaaaa

SEQ ID NO: 148833 - DNA, 20 bp, Artificial sequence
  SiRNA target sequence
aaaggcgaaggttttaaaat

SEQ ID NO: 148834 - DNA, 20 bp, Artificial sequence
  SiRNA target sequence
aaggcgaaggttttaaaata

SEQ ID NO: 148835 - DNA, 20 bp, Artificial sequence
  SiRNA target sequence
aggcgaaggttttaaaataa

SEQ ID NO: 148836 - DNA, 20 bp, Artificial sequence
  SiRNA target sequence
ggcgaaggttttaaaataaa

SEQ ID NO: 148837 - DNA, 20 bp, Artificial sequence
  SiRNA target sequence
gcgaaggttttaaaataaaa

SEQ ID NO: 148838 - DNA, 20 bp, Artificial sequence
  SiRNA target sequence
cgaaggttttaaaataaaaa

SEQ ID NO: 148839 - DNA, 20 bp, Artificial sequence
  SiRNA target sequence
gaaggttttaaaataaaaaa

SEQ ID NO: 148840 - DNA, 20 bp, Artificial sequence
  SiRNA target sequence
aaggttttaaaataaaaaat

SEQ ID NO: 148841 - DNA, 20 bp, Artificial sequence
  SiRNA target sequence
aggttttaaaataaaaaata

SEQ ID NO: 148842 - DNA, 20 bp, Artificial sequence
  SiRNA target sequence
ggttttaaaataaaaaatag

SEQ ID NO: 148843 - DNA, 20 bp, Artificial sequence
  SiRNA target sequence
gttttaaaataaaaaatagt

SEQ ID NO: 148844 - DNA, 20 bp, Artificial sequence
  SiRNA target sequence
ttttaaaataaaaaatagtt

SEQ ID NO: 148845 - DNA, 20 bp, Artificial sequence
  SiRNA target sequence
tttaaaataaaaaatagtta

SEQ ID NO: 148846 - DNA, 20 bp, Artificial sequence
  SiRNA target sequence
ttaaaataaaaaatagttat

SEQ ID NO: 148847 - DNA, 20 bp, Artificial sequence
  SiRNA target sequence
taaaataaaaaatagttatt

SEQ ID NO: 148848 - DNA, 20 bp, Artificial sequence
  SiRNA target sequence
aaaataaaaaatagttattc

SEQ ID NO: 148849 - DNA, 20 bp, Artificial sequence
  SiRNA target sequence
aaataaaaaatagttattcg

SEQ ID NO: 148850 - DNA, 20 bp, Artificial sequence
  SiRNA target sequence
aataaaaaatagttattcgg

SEQ ID NO: 148851 - DNA, 20 bp, Artificial sequence
  SiRNA target sequence
ataaaaaatagttattcggg

SEQ ID NO: 148852 - DNA, 20 bp, Artificial sequence
  SiRNA target sequence
taaaaaatagttattcgggt

SEQ ID NO: 148853 - DNA, 20 bp, Artificial sequence
  SiRNA target sequence
aaaaaatagttattcgggtg

SEQ ID NO: 148854 - DNA, 20 bp, Artificial sequence
  SiRNA target sequence
aaaaatagttattcgggtgg

SEQ ID NO: 148855 - DNA, 20 bp, Artificial sequence
  SiRNA target sequence
aaaatagttattcgggtggt

SEQ ID NO: 148856 - DNA, 20 bp, Artificial sequence
  SiRNA target sequence
aaatagttattcgggtggtg

SEQ ID NO: 148857 - DNA, 20 bp, Artificial sequence
  SiRNA target sequence
aatagttattcgggtggtga

SEQ ID NO: 148858 - DNA, 20 bp, Artificial sequence
  SiRNA target sequence
atagttattcgggtggtgat

SEQ ID NO: 148859 - DNA, 20 bp, Artificial sequence
  SiRNA target sequence
tagttattcgggtggtgatc

SEQ ID NO: 148860 - DNA, 20 bp, Artificial sequence
  SiRNA target sequence
agttattcgggtggtgatct

SEQ ID NO: 148861 - DNA, 20 bp, Artificial sequence
  SiRNA target sequence
gttattcgggtggtgatctt

SEQ ID NO: 148862 - DNA, 20 bp, Artificial sequence
  SiRNA target sequence
ttattcgggtggtgatctta

SEQ ID NO: 148863 - DNA, 20 bp, Artificial sequence
  SiRNA target sequence
tattcgggtggtgatcttat

SEQ ID NO: 148864 - DNA, 20 bp, Artificial sequence
  SiRNA target sequence
attcgggtggtgatcttatt

SEQ ID NO: 148865 - DNA, 20 bp, Artificial sequence
  SiRNA target sequence
ttcgggtggtgatcttattc

SEQ ID NO: 148866 - DNA, 20 bp, Artificial sequence
  SiRNA target sequence
tcgggtggtgatcttattct

SEQ ID NO: 148867 - DNA, 20 bp, Artificial sequence
  SiRNA target sequence
cgggtggtgatcttattctc

SEQ ID NO: 148868 - DNA, 20 bp, Artificial sequence
  SiRNA target sequence
gggtggtgatcttattctcg

SEQ ID NO: 148869 - DNA, 20 bp, Artificial sequence
  SiRNA target sequence
ggtggtgatcttattctcga

SEQ ID NO: 148870 - DNA, 20 bp, Artificial sequence
  SiRNA target sequence
gtggtgatcttattctcgaa

SEQ ID NO: 148871 - DNA, 20 bp, Artificial sequence
  SiRNA target sequence
tggtgatcttattctcgaac

SEQ ID NO: 148872 - DNA, 20 bp, Artificial sequence
  SiRNA target sequence
ggtgatcttattctcgaacc

SEQ ID NO: 148873 - DNA, 20 bp, Artificial sequence
  SiRNA target sequence
gtgatcttattctcgaacct

SEQ ID NO: 148874 - DNA, 20 bp, Artificial sequence
  SiRNA target sequence
tgatcttattctcgaaccta

SEQ ID NO: 148875 - DNA, 20 bp, Artificial sequence
  SiRNA target sequence
gatcttattctcgaacctaa

SEQ ID NO: 148876 - DNA, 20 bp, Artificial sequence
  SiRNA target sequence
atcttattctcgaacctaat

SEQ ID NO: 148877 - DNA, 20 bp, Artificial sequence
  SiRNA target sequence
tcttattctcgaacctaata

SEQ ID NO: 148878 - DNA, 20 bp, Artificial sequence
  SiRNA target sequence
cttattctcgaacctaatat

SEQ ID NO: 148879 - DNA, 20 bp, Artificial sequence
  SiRNA target sequence
ttattctcgaacctaatata

SEQ ID NO: 148880 - DNA, 20 bp, Artificial sequence
  SiRNA target sequence
tattctcgaacctaatataa

SEQ ID NO: 148881 - DNA, 20 bp, Artificial sequence
  SiRNA target sequence
attctcgaacctaatataat

SEQ ID NO: 148882 - DNA, 20 bp, Artificial sequence
  SiRNA target sequence
ttctcgaacctaatataatt

SEQ ID NO: 148883 - DNA, 20 bp, Artificial sequence
  SiRNA target sequence
tctcgaacctaatataatta

SEQ ID NO: 148884 - DNA, 20 bp, Artificial sequence
  SiRNA target sequence
ctcgaacctaatataattat

SEQ ID NO: 148885 - DNA, 20 bp, Artificial sequence
  SiRNA target sequence
tcgaacctaatataattata

SEQ ID NO: 148886 - DNA, 20 bp, Artificial sequence
  SiRNA target sequence
cgaacctaatataattatag

SEQ ID NO: 148887 - DNA, 20 bp, Artificial sequence
  SiRNA target sequence
gaacctaatataattataga

SEQ ID NO: 148888 - DNA, 20 bp, Artificial sequence
  SiRNA target sequence
aacctaatataattatagat

SEQ ID NO: 148889 - DNA, 20 bp, Artificial sequence
  SiRNA target sequence
acctaatataattatagata

SEQ ID NO: 148890 - DNA, 20 bp, Artificial sequence
  SiRNA target sequence
cctaatataattatagataa

SEQ ID NO: 148891 - DNA, 20 bp, Artificial sequence
  SiRNA target sequence
ctaatataattatagataag

SEQ ID NO: 148892 - DNA, 20 bp, Artificial sequence
  SiRNA target sequence
taatataattatagataaga

SEQ ID NO: 148893 - DNA, 20 bp, Artificial sequence
  SiRNA target sequence
aatataattatagataagaa

SEQ ID NO: 148894 - DNA, 20 bp, Artificial sequence
  SiRNA target sequence
atataattatagataagaat

SEQ ID NO: 148895 - DNA, 20 bp, Artificial sequence
  SiRNA target sequence
tataattatagataagaata

SEQ ID NO: 148896 - DNA, 20 bp, Artificial sequence
  SiRNA target sequence
ataattatagataagaatat

SEQ ID NO: 148897 - DNA, 20 bp, Artificial sequence
  SiRNA target sequence
taattatagataagaatatt

SEQ ID NO: 148898 - DNA, 20 bp, Artificial sequence
  SiRNA target sequence
aattatagataagaatattg

SEQ ID NO: 148899 - DNA, 20 bp, Artificial sequence
  SiRNA target sequence
attatagataagaatattga

SEQ ID NO: 148900 - DNA, 20 bp, Artificial sequence
  SiRNA target sequence
ttatagataagaatattgat

SEQ ID NO: 148901 - DNA, 20 bp, Artificial sequence
  SiRNA target sequence
tatagataagaatattgata

SEQ ID NO: 148902 - DNA, 20 bp, Artificial sequence
  SiRNA target sequence
atagataagaatattgataa

SEQ ID NO: 148903 - DNA, 20 bp, Artificial sequence
  SiRNA target sequence
tagataagaatattgataaa

SEQ ID NO: 148904 - DNA, 20 bp, Artificial sequence
  SiRNA target sequence
agataagaatattgataaag

SEQ ID NO: 148905 - DNA, 20 bp, Artificial sequence
  SiRNA target sequence
gataagaatattgataaaga

SEQ ID NO: 148906 - DNA, 20 bp, Artificial sequence
  SiRNA target sequence
ataagaatattgataaagat

SEQ ID NO: 148907 - DNA, 20 bp, Artificial sequence
  SiRNA target sequence
taagaatattgataaagatt

SEQ ID NO: 148908 - DNA, 20 bp, Artificial sequence
  SiRNA target sequence
aagaatattgataaagattt

SEQ ID NO: 148909 - DNA, 20 bp, Artificial sequence
  SiRNA target sequence
agaatattgataaagattta

SEQ ID NO: 148910 - DNA, 20 bp, Artificial sequence
  SiRNA target sequence
gaatattgataaagatttat

SEQ ID NO: 148911 - DNA, 20 bp, Artificial sequence
  SiRNA target sequence
aatattgataaagatttatt

SEQ ID NO: 148912 - DNA, 20 bp, Artificial sequence
  SiRNA target sequence
atattgataaagatttatta

SEQ ID NO: 148913 - DNA, 20 bp, Artificial sequence
  SiRNA target sequence
tattgataaagatttattag

SEQ ID NO: 148914 - DNA, 20 bp, Artificial sequence
  SiRNA target sequence
attgataaagatttattagc

SEQ ID NO: 148915 - DNA, 20 bp, Artificial sequence
  SiRNA target sequence
ttgataaagatttattagca

SEQ ID NO: 148916 - DNA, 20 bp, Artificial sequence
  SiRNA target sequence
tgataaagatttattagcac

SEQ ID NO: 148917 - DNA, 20 bp, Artificial sequence
  SiRNA target sequence
gataaagatttattagcacg

SEQ ID NO: 148918 - DNA, 20 bp, Artificial sequence
  SiRNA target sequence
ataaagatttattagcacgc

SEQ ID NO: 148919 - DNA, 20 bp, Artificial sequence
  SiRNA target sequence
taaagatttattagcacgcg

SEQ ID NO: 148920 - DNA, 20 bp, Artificial sequence
  SiRNA target sequence
aaagatttattagcacgcgc

SEQ ID NO: 148921 - DNA, 20 bp, Artificial sequence
  SiRNA target sequence
aagatttattagcacgcgcc

SEQ ID NO: 148922 - DNA, 20 bp, Artificial sequence
  SiRNA target sequence
agatttattagcacgcgcct

SEQ ID NO: 148923 - DNA, 20 bp, Artificial sequence
  SiRNA target sequence
gatttattagcacgcgcctt

SEQ ID NO: 148924 - DNA, 20 bp, Artificial sequence
  SiRNA target sequence
atttattagcacgcgccttg

SEQ ID NO: 148925 - DNA, 20 bp, Artificial sequence
  SiRNA target sequence
tttattagcacgcgccttga

SEQ ID NO: 148926 - DNA, 20 bp, Artificial sequence
  SiRNA target sequence
ttattagcacgcgccttgaa

SEQ ID NO: 148927 - DNA, 20 bp, Artificial sequence
  SiRNA target sequence
tattagcacgcgccttgaat

SEQ ID NO: 148928 - DNA, 20 bp, Artificial sequence
  SiRNA target sequence
attagcacgcgccttgaatt

SEQ ID NO: 148929 - DNA, 20 bp, Artificial sequence
  SiRNA target sequence
ttagcacgcgccttgaatta

SEQ ID NO: 148930 - DNA, 20 bp, Artificial sequence
  SiRNA target sequence
tagcacgcgccttgaattat

SEQ ID NO: 148931 - DNA, 20 bp, Artificial sequence
  SiRNA target sequence
agcacgcgccttgaattatg

SEQ ID NO: 148932 - DNA, 20 bp, Artificial sequence
  SiRNA target sequence
gcacgcgccttgaattatgt

SEQ ID NO: 148933 - DNA, 20 bp, Artificial sequence
  SiRNA target sequence
cacgcgccttgaattatgtt

SEQ ID NO: 148934 - DNA, 20 bp, Artificial sequence
  SiRNA target sequence
acgcgccttgaattatgttc

SEQ ID NO: 148935 - DNA, 20 bp, Artificial sequence
  SiRNA target sequence
cgcgccttgaattatgttcc

SEQ ID NO: 148936 - DNA, 20 bp, Artificial sequence
  SiRNA target sequence
gcgccttgaattatgttcct

SEQ ID NO: 148937 - DNA, 20 bp, Artificial sequence
  SiRNA target sequence
cgccttgaattatgttcctg

SEQ ID NO: 148938 - DNA, 20 bp, Artificial sequence
  SiRNA target sequence
gccttgaattatgttcctgt

SEQ ID NO: 148939 - DNA, 20 bp, Artificial sequence
  SiRNA target sequence
ccttgaattatgttcctgta

SEQ ID NO: 148940 - DNA, 20 bp, Artificial sequence
  SiRNA target sequence
cttgaattatgttcctgtaa

SEQ ID NO: 148941 - DNA, 20 bp, Artificial sequence
  SiRNA target sequence
ttgaattatgttcctgtaag

SEQ ID NO: 148942 - DNA, 20 bp, Artificial sequence
  SiRNA target sequence
tgaattatgttcctgtaaga

SEQ ID NO: 148943 - DNA, 20 bp, Artificial sequence
  SiRNA target sequence
gaattatgttcctgtaagaa

SEQ ID NO: 148944 - DNA, 20 bp, Artificial sequence
  SiRNA target sequence
aattatgttcctgtaagaaa

SEQ ID NO: 148945 - DNA, 20 bp, Artificial sequence
  SiRNA target sequence
attatgttcctgtaagaaaa

SEQ ID NO: 148946 - DNA, 20 bp, Artificial sequence
  SiRNA target sequence
ttatgttcctgtaagaaaag

SEQ ID NO: 148947 - DNA, 20 bp, Artificial sequence
  SiRNA target sequence
tatgttcctgtaagaaaaga

SEQ ID NO: 148948 - DNA, 20 bp, Artificial sequence
  SiRNA target sequence
atgttcctgtaagaaaagat

SEQ ID NO: 148949 - DNA, 20 bp, Artificial sequence
  SiRNA target sequence
tgttcctgtaagaaaagatt

SEQ ID NO: 148950 - DNA, 20 bp, Artificial sequence
  SiRNA target sequence
gttcctgtaagaaaagattt

SEQ ID NO: 148951 - DNA, 20 bp, Artificial sequence
  SiRNA target sequence
ttcctgtaagaaaagatttt

SEQ ID NO: 148952 - DNA, 20 bp, Artificial sequence
  SiRNA target sequence
tcctgtaagaaaagatttta

SEQ ID NO: 148953 - DNA, 20 bp, Artificial sequence
  SiRNA target sequence
cctgtaagaaaagattttac

SEQ ID NO: 148954 - DNA, 20 bp, Artificial sequence
  SiRNA target sequence
ctgtaagaaaagattttaca

SEQ ID NO: 148955 - DNA, 20 bp, Artificial sequence
  SiRNA target sequence
tgtaagaaaagattttacag

SEQ ID NO: 148956 - DNA, 20 bp, Artificial sequence
  SiRNA target sequence
gtaagaaaagattttacagg

SEQ ID NO: 148957 - DNA, 20 bp, Artificial sequence
  SiRNA target sequence
taagaaaagattttacagga

SEQ ID NO: 148958 - DNA, 20 bp, Artificial sequence
  SiRNA target sequence
aagaaaagattttacaggaa

SEQ ID NO: 148959 - DNA, 20 bp, Artificial sequence
  SiRNA target sequence
agaaaagattttacaggaac

SEQ ID NO: 148960 - DNA, 20 bp, Artificial sequence
  SiRNA target sequence
gaaaagattttacaggaact

SEQ ID NO: 148961 - DNA, 20 bp, Artificial sequence
  SiRNA target sequence
aaaagattttacaggaactg

SEQ ID NO: 148962 - DNA, 20 bp, Artificial sequence
  SiRNA target sequence
aaagattttacaggaactgc

SEQ ID NO: 148963 - DNA, 20 bp, Artificial sequence
  SiRNA target sequence
aagattttacaggaactgct

SEQ ID NO: 148964 - DNA, 20 bp, Artificial sequence
  SiRNA target sequence
agattttacaggaactgctg

SEQ ID NO: 148965 - DNA, 20 bp, Artificial sequence
  SiRNA target sequence
gattttacaggaactgctgt

SEQ ID NO: 148966 - DNA, 20 bp, Artificial sequence
  SiRNA target sequence
attttacaggaactgctgtt

SEQ ID NO: 148967 - DNA, 20 bp, Artificial sequence
  SiRNA target sequence
ttttacaggaactgctgttc

SEQ ID NO: 148968 - DNA, 20 bp, Artificial sequence
  SiRNA target sequence
tttacaggaactgctgttcc

SEQ ID NO: 148969 - DNA, 20 bp, Artificial sequence
  SiRNA target sequence
ttacaggaactgctgttcca

SEQ ID NO: 148970 - DNA, 20 bp, Artificial sequence
  SiRNA target sequence
tacaggaactgctgttccaa

SEQ ID NO: 148971 - DNA, 20 bp, Artificial sequence
  SiRNA target sequence
acaggaactgctgttccaaa

SEQ ID NO: 148972 - DNA, 20 bp, Artificial sequence
  SiRNA target sequence
caggaactgctgttccaaaa

SEQ ID NO: 148973 - DNA, 20 bp, Artificial sequence
  SiRNA target sequence
aggaactgctgttccaaaat

SEQ ID NO: 148974 - DNA, 20 bp, Artificial sequence
  SiRNA target sequence
ggaactgctgttccaaaata

SEQ ID NO: 148975 - DNA, 20 bp, Artificial sequence
  SiRNA target sequence
gaactgctgttccaaaatat

SEQ ID NO: 148976 - DNA, 20 bp, Artificial sequence
  SiRNA target sequence
aactgctgttccaaaatatg

SEQ ID NO: 148977 - DNA, 20 bp, Artificial sequence
  SiRNA target sequence
actgctgttccaaaatatgc

SEQ ID NO: 148978 - DNA, 20 bp, Artificial sequence
  SiRNA target sequence
ctgctgttccaaaatatgca

SEQ ID NO: 148979 - DNA, 20 bp, Artificial sequence
  SiRNA target sequence
tgctgttccaaaatatgcag

SEQ ID NO: 148980 - DNA, 20 bp, Artificial sequence
  SiRNA target sequence
gctgttccaaaatatgcaga

SEQ ID NO: 148981 - DNA, 20 bp, Artificial sequence
  SiRNA target sequence
ctgttccaaaatatgcagaa

SEQ ID NO: 148982 - DNA, 20 bp, Artificial sequence
  SiRNA target sequence
tgttccaaaatatgcagaat

SEQ ID NO: 148983 - DNA, 20 bp, Artificial sequence
  SiRNA target sequence
gttccaaaatatgcagaatt

SEQ ID NO: 148984 - DNA, 20 bp, Artificial sequence
  SiRNA target sequence
ttccaaaatatgcagaattt

SEQ ID NO: 148985 - DNA, 20 bp, Artificial sequence
  SiRNA target sequence
tccaaaatatgcagaatttg

SEQ ID NO: 148986 - DNA, 20 bp, Artificial sequence
  SiRNA target sequence
ccaaaatatgcagaatttgg

SEQ ID NO: 148987 - DNA, 20 bp, Artificial sequence
  SiRNA target sequence
caaaatatgcagaatttggt

SEQ ID NO: 148988 - DNA, 20 bp, Artificial sequence
  SiRNA target sequence
aaaatatgcagaatttggtg

SEQ ID NO: 148989 - DNA, 20 bp, Artificial sequence
  SiRNA target sequence
aaatatgcagaatttggtgt

SEQ ID NO: 148990 - DNA, 20 bp, Artificial sequence
  SiRNA target sequence
aatatgcagaatttggtgtt

SEQ ID NO: 148991 - DNA, 20 bp, Artificial sequence
  SiRNA target sequence
atatgcagaatttggtgtta

SEQ ID NO: 148992 - DNA, 20 bp, Artificial sequence
  SiRNA target sequence
tatgcagaatttggtgttat

SEQ ID NO: 148993 - DNA, 20 bp, Artificial sequence
  SiRNA target sequence
atgcagaatttggtgttatg

SEQ ID NO: 148994 - DNA, 20 bp, Artificial sequence
  SiRNA target sequence
tgcagaatttggtgttatgc

SEQ ID NO: 148995 - DNA, 20 bp, Artificial sequence
  SiRNA target sequence
gcagaatttggtgttatgcc

SEQ ID NO: 148996 - DNA, 20 bp, Artificial sequence
  SiRNA target sequence
cagaatttggtgttatgcct

SEQ ID NO: 148997 - DNA, 20 bp, Artificial sequence
  SiRNA target sequence
agaatttggtgttatgccta

SEQ ID NO: 148998 - DNA, 20 bp, Artificial sequence
  SiRNA target sequence
gaatttggtgttatgcctaa

SEQ ID NO: 148999 - DNA, 20 bp, Artificial sequence
  SiRNA target sequence
aatttggtgttatgcctaaa

SEQ ID NO: 149000 - DNA, 20 bp, Artificial sequence
  SiRNA target sequence
atttggtgttatgcctaaag

SEQ ID NO: 149001 - DNA, 20 bp, Artificial sequence
  SiRNA target sequence
tttggtgttatgcctaaaga

SEQ ID NO: 149002 - DNA, 20 bp, Artificial sequence
  SiRNA target sequence
ttggtgttatgcctaaagaa

SEQ ID NO: 149003 - DNA, 20 bp, Artificial sequence
  SiRNA target sequence
tggtgttatgcctaaagaac

SEQ ID NO: 149004 - DNA, 20 bp, Artificial sequence
  SiRNA target sequence
ggtgttatgcctaaagaaca

SEQ ID NO: 149005 - DNA, 20 bp, Artificial sequence
  SiRNA target sequence
gtgttatgcctaaagaacag

SEQ ID NO: 149006 - DNA, 20 bp, Artificial sequence
  SiRNA target sequence
tgttatgcctaaagaacagg

SEQ ID NO: 149007 - DNA, 20 bp, Artificial sequence
  SiRNA target sequence
gttatgcctaaagaacagga

SEQ ID NO: 149008 - DNA, 20 bp, Artificial sequence
  SiRNA target sequence
ttatgcctaaagaacaggaa

SEQ ID NO: 149009 - DNA, 20 bp, Artificial sequence
  SiRNA target sequence
tatgcctaaagaacaggaag

SEQ ID NO: 149010 - DNA, 20 bp, Artificial sequence
  SiRNA target sequence
atgcctaaagaacaggaaga

SEQ ID NO: 149011 - DNA, 20 bp, Artificial sequence
  SiRNA target sequence
tgcctaaagaacaggaagaa

SEQ ID NO: 149012 - DNA, 20 bp, Artificial sequence
  SiRNA target sequence
gcctaaagaacaggaagaac

SEQ ID NO: 149013 - DNA, 20 bp, Artificial sequence
  SiRNA target sequence
cctaaagaacaggaagaaca

SEQ ID NO: 149014 - DNA, 20 bp, Artificial sequence
  SiRNA target sequence
ctaaagaacaggaagaacaa

SEQ ID NO: 149015 - DNA, 20 bp, Artificial sequence
  SiRNA target sequence
taaagaacaggaagaacaaa

SEQ ID NO: 149016 - DNA, 20 bp, Artificial sequence
  SiRNA target sequence
aaagaacaggaagaacaaaa

SEQ ID NO: 149017 - DNA, 20 bp, Artificial sequence
  SiRNA target sequence
aagaacaggaagaacaaaac

SEQ ID NO: 149018 - DNA, 20 bp, Artificial sequence
  SiRNA target sequence
agaacaggaagaacaaaacg

SEQ ID NO: 149019 - DNA, 20 bp, Artificial sequence
  SiRNA target sequence
gaacaggaagaacaaaacga

SEQ ID NO: 149020 - DNA, 20 bp, Artificial sequence
  SiRNA target sequence
aacaggaagaacaaaacgaa

SEQ ID NO: 149021 - DNA, 20 bp, Artificial sequence
  SiRNA target sequence
acaggaagaacaaaacgaaa

SEQ ID NO: 149022 - DNA, 20 bp, Artificial sequence
  SiRNA target sequence
caggaagaacaaaacgaaag

SEQ ID NO: 149023 - DNA, 20 bp, Artificial sequence
  SiRNA target sequence
aggaagaacaaaacgaaaga

SEQ ID NO: 149024 - DNA, 20 bp, Artificial sequence
  SiRNA target sequence
ggaagaacaaaacgaaagag

SEQ ID NO: 149025 - DNA, 20 bp, Artificial sequence
  SiRNA target sequence
gaagaacaaaacgaaagaga

SEQ ID NO: 149026 - DNA, 20 bp, Artificial sequence
  SiRNA target sequence
aagaacaaaacgaaagagaa

SEQ ID NO: 149027 - DNA, 20 bp, Artificial sequence
  SiRNA target sequence
agaacaaaacgaaagagaaa

SEQ ID NO: 149028 - DNA, 20 bp, Artificial sequence
  SiRNA target sequence
gaacaaaacgaaagagaaag

SEQ ID NO: 149029 - DNA, 20 bp, Artificial sequence
  SiRNA target sequence
aacaaaacgaaagagaaaga

SEQ ID NO: 149030 - DNA, 20 bp, Artificial sequence
  SiRNA target sequence
acaaaacgaaagagaaagat

SEQ ID NO: 149031 - DNA, 20 bp, Artificial sequence
  SiRNA target sequence
caaaacgaaagagaaagatt

SEQ ID NO: 149032 - DNA, 20 bp, Artificial sequence
  SiRNA target sequence
aaaacgaaagagaaagattc

SEQ ID NO: 149033 - DNA, 20 bp, Artificial sequence
  SiRNA target sequence
aaacgaaagagaaagattcg

SEQ ID NO: 149034 - DNA, 20 bp, Artificial sequence
  SiRNA target sequence
aacgaaagagaaagattcga

SEQ ID NO: 149035 - DNA, 20 bp, Artificial sequence
  SiRNA target sequence
acgaaagagaaagattcgaa

SEQ ID NO: 149036 - DNA, 20 bp, Artificial sequence
  SiRNA target sequence
cgaaagagaaagattcgaag

SEQ ID NO: 149037 - DNA, 20 bp, Artificial sequence
  SiRNA target sequence
gaaagagaaagattcgaagg

SEQ ID NO: 149038 - DNA, 20 bp, Artificial sequence
  SiRNA target sequence
aaagagaaagattcgaaggt

SEQ ID NO: 149039 - DNA, 20 bp, Artificial sequence
  SiRNA target sequence
aagagaaagattcgaaggtg

SEQ ID NO: 149040 - DNA, 20 bp, Artificial sequence
  SiRNA target sequence
agagaaagattcgaaggtgc

SEQ ID NO: 149041 - DNA, 20 bp, Artificial sequence
  SiRNA target sequence
gagaaagattcgaaggtgca

SEQ ID NO: 149042 - DNA, 20 bp, Artificial sequence
  SiRNA target sequence
agaaagattcgaaggtgcag

SEQ ID NO: 149043 - DNA, 20 bp, Artificial sequence
  SiRNA target sequence
gaaagattcgaaggtgcaga

SEQ ID NO: 149044 - DNA, 20 bp, Artificial sequence
  SiRNA target sequence
aaagattcgaaggtgcagaa

SEQ ID NO: 149045 - DNA, 20 bp, Artificial sequence
  SiRNA target sequence
aagattcgaaggtgcagaag

SEQ ID NO: 149046 - DNA, 20 bp, Artificial sequence
  SiRNA target sequence
agattcgaaggtgcagaaga

SEQ ID NO: 149047 - DNA, 20 bp, Artificial sequence
  SiRNA target sequence
gattcgaaggtgcagaagag

SEQ ID NO: 149048 - DNA, 20 bp, Artificial sequence
  SiRNA target sequence
attcgaaggtgcagaagagt

SEQ ID NO: 149049 - DNA, 20 bp, Artificial sequence
  SiRNA target sequence
ttcgaaggtgcagaagagtt

SEQ ID NO: 149050 - DNA, 20 bp, Artificial sequence
  SiRNA target sequence
tcgaaggtgcagaagagttt

SEQ ID NO: 149051 - DNA, 20 bp, Artificial sequence
  SiRNA target sequence
cgaaggtgcagaagagtttt

SEQ ID NO: 149052 - DNA, 20 bp, Artificial sequence
  SiRNA target sequence
gaaggtgcagaagagttttt

SEQ ID NO: 149053 - DNA, 20 bp, Artificial sequence
  SiRNA target sequence
aaggtgcagaagagtttttt

SEQ ID NO: 149054 - DNA, 20 bp, Artificial sequence
  SiRNA target sequence
aggtgcagaagagttttttg

SEQ ID NO: 149055 - DNA, 20 bp, Artificial sequence
  SiRNA target sequence
ggtgcagaagagttttttgg

SEQ ID NO: 149056 - DNA, 20 bp, Artificial sequence
  SiRNA target sequence
gtgcagaagagttttttgga

SEQ ID NO: 149057 - DNA, 20 bp, Artificial sequence
  SiRNA target sequence
tgcagaagagttttttggag

SEQ ID NO: 149058 - DNA, 20 bp, Artificial sequence
  SiRNA target sequence
gcagaagagttttttggagg

SEQ ID NO: 149059 - DNA, 20 bp, Artificial sequence
  SiRNA target sequence
cagaagagttttttggagga

SEQ ID NO: 149060 - DNA, 20 bp, Artificial sequence
  SiRNA target sequence
agaagagttttttggaggaa

SEQ ID NO: 149061 - DNA, 20 bp, Artificial sequence
  SiRNA target sequence
gaagagttttttggaggaaa

SEQ ID NO: 149062 - DNA, 20 bp, Artificial sequence
  SiRNA target sequence
aagagttttttggaggaaat

SEQ ID NO: 149063 - DNA, 20 bp, Artificial sequence
  SiRNA target sequence
agagttttttggaggaaatg

SEQ ID NO: 149064 - DNA, 20 bp, Artificial sequence
  SiRNA target sequence
gagttttttggaggaaatgg

SEQ ID NO: 149065 - DNA, 20 bp, Artificial sequence
  SiRNA target sequence
agttttttggaggaaatggt

SEQ ID NO: 149066 - DNA, 20 bp, Artificial sequence
  SiRNA target sequence
gttttttggaggaaatggta

SEQ ID NO: 149067 - DNA, 20 bp, Artificial sequence
  SiRNA target sequence
ttttttggaggaaatggtag

SEQ ID NO: 149068 - DNA, 20 bp, Artificial sequence
  SiRNA target sequence
tttttggaggaaatggtaga

SEQ ID NO: 149069 - DNA, 20 bp, Artificial sequence
  SiRNA target sequence
ttttggaggaaatggtagag

SEQ ID NO: 149070 - DNA, 20 bp, Artificial sequence
  SiRNA target sequence
tttggaggaaatggtagaga

SEQ ID NO: 149071 - DNA, 20 bp, Artificial sequence
  SiRNA target sequence
ttggaggaaatggtagagat

SEQ ID NO: 149072 - DNA, 20 bp, Artificial sequence
  SiRNA target sequence
tggaggaaatggtagagatt

SEQ ID NO: 149073 - DNA, 20 bp, Artificial sequence
  SiRNA target sequence
ggaggaaatggtagagattt

SEQ ID NO: 149074 - DNA, 20 bp, Artificial sequence
  SiRNA target sequence
gaggaaatggtagagatttt

SEQ ID NO: 149075 - DNA, 20 bp, Artificial sequence
  SiRNA target sequence
aggaaatggtagagattttt

SEQ ID NO: 149076 - DNA, 20 bp, Artificial sequence
  SiRNA target sequence
ggaaatggtagagatttttt

SEQ ID NO: 149077 - DNA, 20 bp, Artificial sequence
  SiRNA target sequence
gaaatggtagagattttttt

SEQ ID NO: 149078 - DNA, 20 bp, Artificial sequence
  SiRNA target sequence
aaatggtagagattttttta

SEQ ID NO: 149079 - DNA, 20 bp, Artificial sequence
  SiRNA target sequence
aatggtagagatttttttag

SEQ ID NO: 149080 - DNA, 20 bp, Artificial sequence
  SiRNA target sequence
atggtagagatttttttagc

SEQ ID NO: 149081 - DNA, 20 bp, Artificial sequence
  SiRNA target sequence
tggtagagatttttttagca

SEQ ID NO: 149082 - DNA, 20 bp, Artificial sequence
  SiRNA target sequence
ggtagagatttttttagcaa

SEQ ID NO: 149083 - DNA, 20 bp, Artificial sequence
  SiRNA target sequence
gtagagatttttttagcaag

SEQ ID NO: 149084 - DNA, 20 bp, Artificial sequence
  SiRNA target sequence
tagagatttttttagcaagt

SEQ ID NO: 149085 - DNA, 20 bp, Artificial sequence
  SiRNA target sequence
agagatttttttagcaagtt

SEQ ID NO: 149086 - DNA, 20 bp, Artificial sequence
  SiRNA target sequence
gagatttttttagcaagttt

SEQ ID NO: 149087 - DNA, 20 bp, Artificial sequence
  SiRNA target sequence
agatttttttagcaagtttg

SEQ ID NO: 149088 - DNA, 20 bp, Artificial sequence
  SiRNA target sequence
gatttttttagcaagtttgg

SEQ ID NO: 149089 - DNA, 20 bp, Artificial sequence
  SiRNA target sequence
atttttttagcaagtttgga

SEQ ID NO: 149090 - DNA, 20 bp, Artificial sequence
  SiRNA target sequence
tttttttagcaagtttggat

SEQ ID NO: 149091 - DNA, 20 bp, Artificial sequence
  SiRNA target sequence
ttttttagcaagtttggatt

SEQ ID NO: 149092 - DNA, 20 bp, Artificial sequence
  SiRNA target sequence
tttttagcaagtttggattt

SEQ ID NO: 149093 - DNA, 20 bp, Artificial sequence
  SiRNA target sequence
ttttagcaagtttggatttt

SEQ ID NO: 149094 - DNA, 20 bp, Artificial sequence
  SiRNA target sequence
tttagcaagtttggattttt

SEQ ID NO: 149095 - DNA, 20 bp, Artificial sequence
  SiRNA target sequence
ttagcaagtttggatttttc

SEQ ID NO: 149096 - DNA, 20 bp, Artificial sequence
  SiRNA target sequence
tagcaagtttggatttttct

SEQ ID NO: 149097 - DNA, 20 bp, Artificial sequence
  SiRNA target sequence
agcaagtttggatttttcta

SEQ ID NO: 149098 - DNA, 20 bp, Artificial sequence
  SiRNA target sequence
gcaagtttggatttttctaa

SEQ ID NO: 149099 - DNA, 21 bp, Artificial sequence
  SiRNA target sequence
atggcacaagacccccaagga

SEQ ID NO: 149100 - DNA, 21 bp, Artificial sequence
  SiRNA target sequence
tggcacaagacccccaaggac

SEQ ID NO: 149101 - DNA, 21 bp, Artificial sequence
  SiRNA target sequence
ggcacaagacccccaaggact

SEQ ID NO: 149102 - DNA, 21 bp, Artificial sequence
  SiRNA target sequence
gcacaagacccccaaggactt

SEQ ID NO: 149103 - DNA, 21 bp, Artificial sequence
  SiRNA target sequence
cacaagacccccaaggacttt

SEQ ID NO: 149104 - DNA, 21 bp, Artificial sequence
  SiRNA target sequence
acaagacccccaaggacttta

SEQ ID NO: 149105 - DNA, 21 bp, Artificial sequence
  SiRNA target sequence
caagacccccaaggactttat

SEQ ID NO: 149106 - DNA, 21 bp, Artificial sequence
  SiRNA target sequence
aagacccccaaggactttatg

SEQ ID NO: 149107 - DNA, 21 bp, Artificial sequence
  SiRNA target sequence
agacccccaaggactttatga

SEQ ID NO: 149108 - DNA, 21 bp, Artificial sequence
  SiRNA target sequence
gacccccaaggactttatgaa

SEQ ID NO: 149109 - DNA, 21 bp, Artificial sequence
  SiRNA target sequence
acccccaaggactttatgaag

SEQ ID NO: 149110 - DNA, 21 bp, Artificial sequence
  SiRNA target sequence
cccccaaggactttatgaagt

SEQ ID NO: 149111 - DNA, 21 bp, Artificial sequence
  SiRNA target sequence
ccccaaggactttatgaagta

SEQ ID NO: 149112 - DNA, 21 bp, Artificial sequence
  SiRNA target sequence
cccaaggactttatgaagtat

SEQ ID NO: 149113 - DNA, 21 bp, Artificial sequence
  SiRNA target sequence
ccaaggactttatgaagtatt

SEQ ID NO: 149114 - DNA, 21 bp, Artificial sequence
  SiRNA target sequence
caaggactttatgaagtatta

SEQ ID NO: 149115 - DNA, 21 bp, Artificial sequence
  SiRNA target sequence
aaggactttatgaagtattag

SEQ ID NO: 149116 - DNA, 21 bp, Artificial sequence
  SiRNA target sequence
aggactttatgaagtattagg

SEQ ID NO: 149117 - DNA, 21 bp, Artificial sequence
  SiRNA target sequence
ggactttatgaagtattagga

SEQ ID NO: 149118 - DNA, 21 bp, Artificial sequence
  SiRNA target sequence
gactttatgaagtattaggac

SEQ ID NO: 149119 - DNA, 21 bp, Artificial sequence
  SiRNA target sequence
actttatgaagtattaggact

SEQ ID NO: 149120 - DNA, 21 bp, Artificial sequence
  SiRNA target sequence
ctttatgaagtattaggactt

SEQ ID NO: 149121 - DNA, 21 bp, Artificial sequence
  SiRNA target sequence
tttatgaagtattaggactta

SEQ ID NO: 149122 - DNA, 21 bp, Artificial sequence
  SiRNA target sequence
ttatgaagtattaggacttaa

SEQ ID NO: 149123 - DNA, 21 bp, Artificial sequence
  SiRNA target sequence
tatgaagtattaggacttaaa

SEQ ID NO: 149124 - DNA, 21 bp, Artificial sequence
  SiRNA target sequence
atgaagtattaggacttaaag

SEQ ID NO: 149125 - DNA, 21 bp, Artificial sequence
  SiRNA target sequence
tgaagtattaggacttaaagc

SEQ ID NO: 149126 - DNA, 21 bp, Artificial sequence
  SiRNA target sequence
gaagtattaggacttaaagct

SEQ ID NO: 149127 - DNA, 21 bp, Artificial sequence
  SiRNA target sequence
aagtattaggacttaaagctg

SEQ ID NO: 149128 - DNA, 21 bp, Artificial sequence
  SiRNA target sequence
agtattaggacttaaagctgg

SEQ ID NO: 149129 - DNA, 21 bp, Artificial sequence
  SiRNA target sequence
gtattaggacttaaagctggt

SEQ ID NO: 149130 - DNA, 21 bp, Artificial sequence
  SiRNA target sequence
tattaggacttaaagctggtg

SEQ ID NO: 149131 - DNA, 21 bp, Artificial sequence
  SiRNA target sequence
attaggacttaaagctggtgc

SEQ ID NO: 149132 - DNA, 21 bp, Artificial sequence
  SiRNA target sequence
ttaggacttaaagctggtgca

SEQ ID NO: 149133 - DNA, 21 bp, Artificial sequence
  SiRNA target sequence
taggacttaaagctggtgcaa

SEQ ID NO: 149134 - DNA, 21 bp, Artificial sequence
  SiRNA target sequence
aggacttaaagctggtgcaag

SEQ ID NO: 149135 - DNA, 21 bp, Artificial sequence
  SiRNA target sequence
ggacttaaagctggtgcaagc

SEQ ID NO: 149136 - DNA, 21 bp, Artificial sequence
  SiRNA target sequence
gacttaaagctggtgcaagca

SEQ ID NO: 149137 - DNA, 21 bp, Artificial sequence
  SiRNA target sequence
acttaaagctggtgcaagcat

SEQ ID NO: 149138 - DNA, 21 bp, Artificial sequence
  SiRNA target sequence
cttaaagctggtgcaagcatt

SEQ ID NO: 149139 - DNA, 21 bp, Artificial sequence
  SiRNA target sequence
ttaaagctggtgcaagcattg

SEQ ID NO: 149140 - DNA, 21 bp, Artificial sequence
  SiRNA target sequence
taaagctggtgcaagcattga

SEQ ID NO: 149141 - DNA, 21 bp, Artificial sequence
  SiRNA target sequence
aaagctggtgcaagcattgat

SEQ ID NO: 149142 - DNA, 21 bp, Artificial sequence
  SiRNA target sequence
aagctggtgcaagcattgatg

SEQ ID NO: 149143 - DNA, 21 bp, Artificial sequence
  SiRNA target sequence
agctggtgcaagcattgatga

SEQ ID NO: 149144 - DNA, 21 bp, Artificial sequence
  SiRNA target sequence
gctggtgcaagcattgatgaa

SEQ ID NO: 149145 - DNA, 21 bp, Artificial sequence
  SiRNA target sequence
ctggtgcaagcattgatgaag

SEQ ID NO: 149146 - DNA, 21 bp, Artificial sequence
  SiRNA target sequence
tggtgcaagcattgatgaagt

SEQ ID NO: 149147 - DNA, 21 bp, Artificial sequence
  SiRNA target sequence
ggtgcaagcattgatgaagtt

SEQ ID NO: 149148 - DNA, 21 bp, Artificial sequence
  SiRNA target sequence
gtgcaagcattgatgaagtta

SEQ ID NO: 149149 - DNA, 21 bp, Artificial sequence
  SiRNA target sequence
tgcaagcattgatgaagttaa

SEQ ID NO: 149150 - DNA, 21 bp, Artificial sequence
  SiRNA target sequence
gcaagcattgatgaagttaaa

SEQ ID NO: 149151 - DNA, 21 bp, Artificial sequence
  SiRNA target sequence
caagcattgatgaagttaaaa

SEQ ID NO: 149152 - DNA, 21 bp, Artificial sequence
  SiRNA target sequence
aagcattgatgaagttaaaaa

SEQ ID NO: 149153 - DNA, 21 bp, Artificial sequence
  SiRNA target sequence
agcattgatgaagttaaaaaa

SEQ ID NO: 149154 - DNA, 21 bp, Artificial sequence
  SiRNA target sequence
gcattgatgaagttaaaaaag

SEQ ID NO: 149155 - DNA, 21 bp, Artificial sequence
  SiRNA target sequence
cattgatgaagttaaaaaagc

SEQ ID NO: 149156 - DNA, 21 bp, Artificial sequence
  SiRNA target sequence
attgatgaagttaaaaaagca

SEQ ID NO: 149157 - DNA, 21 bp, Artificial sequence
  SiRNA target sequence
ttgatgaagttaaaaaagcat

SEQ ID NO: 149158 - DNA, 21 bp, Artificial sequence
  SiRNA target sequence
tgatgaagttaaaaaagcatt

SEQ ID NO: 149159 - DNA, 21 bp, Artificial sequence
  SiRNA target sequence
gatgaagttaaaaaagcattt

SEQ ID NO: 149160 - DNA, 21 bp, Artificial sequence
  SiRNA target sequence
atgaagttaaaaaagcattta

SEQ ID NO: 149161 - DNA, 21 bp, Artificial sequence
  SiRNA target sequence
tgaagttaaaaaagcatttac

SEQ ID NO: 149162 - DNA, 21 bp, Artificial sequence
  SiRNA target sequence
gaagttaaaaaagcatttaca

SEQ ID NO: 149163 - DNA, 21 bp, Artificial sequence
  SiRNA target sequence
aagttaaaaaagcatttacaa

SEQ ID NO: 149164 - DNA, 21 bp, Artificial sequence
  SiRNA target sequence
agttaaaaaagcatttacaaa

SEQ ID NO: 149165 - DNA, 21 bp, Artificial sequence
  SiRNA target sequence
gttaaaaaagcatttacaaaa

SEQ ID NO: 149166 - DNA, 21 bp, Artificial sequence
  SiRNA target sequence
ttaaaaaagcatttacaaaaa

SEQ ID NO: 149167 - DNA, 21 bp, Artificial sequence
  SiRNA target sequence
taaaaaagcatttacaaaaaa

SEQ ID NO: 149168 - DNA, 21 bp, Artificial sequence
  SiRNA target sequence
aaaaaagcatttacaaaaaaa

SEQ ID NO: 149169 - DNA, 21 bp, Artificial sequence
  SiRNA target sequence
aaaaagcatttacaaaaaaac

SEQ ID NO: 149170 - DNA, 21 bp, Artificial sequence
  SiRNA target sequence
aaaagcatttacaaaaaaaca

SEQ ID NO: 149171 - DNA, 21 bp, Artificial sequence
  SiRNA target sequence
aaagcatttacaaaaaaacaa

SEQ ID NO: 149172 - DNA, 21 bp, Artificial sequence
  SiRNA target sequence
aagcatttacaaaaaaacaaa

SEQ ID NO: 149173 - DNA, 21 bp, Artificial sequence
  SiRNA target sequence
agcatttacaaaaaaacaaag

SEQ ID NO: 149174 - DNA, 21 bp, Artificial sequence
  SiRNA target sequence
gcatttacaaaaaaacaaagg

SEQ ID NO: 149175 - DNA, 21 bp, Artificial sequence
  SiRNA target sequence
catttacaaaaaaacaaaggg

SEQ ID NO: 149176 - DNA, 21 bp, Artificial sequence
  SiRNA target sequence
atttacaaaaaaacaaaggga

SEQ ID NO: 149177 - DNA, 21 bp, Artificial sequence
  SiRNA target sequence
tttacaaaaaaacaaagggaa

SEQ ID NO: 149178 - DNA, 21 bp, Artificial sequence
  SiRNA target sequence
ttacaaaaaaacaaagggaat

SEQ ID NO: 149179 - DNA, 21 bp, Artificial sequence
  SiRNA target sequence
tacaaaaaaacaaagggaatg

SEQ ID NO: 149180 - DNA, 21 bp, Artificial sequence
  SiRNA target sequence
acaaaaaaacaaagggaatgt

SEQ ID NO: 149181 - DNA, 21 bp, Artificial sequence
  SiRNA target sequence
caaaaaaacaaagggaatgtc

SEQ ID NO: 149182 - DNA, 21 bp, Artificial sequence
  SiRNA target sequence
aaaaaaacaaagggaatgtca

SEQ ID NO: 149183 - DNA, 21 bp, Artificial sequence
  SiRNA target sequence
aaaaaacaaagggaatgtcat

SEQ ID NO: 149184 - DNA, 21 bp, Artificial sequence
  SiRNA target sequence
aaaaacaaagggaatgtcatc

SEQ ID NO: 149185 - DNA, 21 bp, Artificial sequence
  SiRNA target sequence
aaaacaaagggaatgtcatcc

SEQ ID NO: 149186 - DNA, 21 bp, Artificial sequence
  SiRNA target sequence
aaacaaagggaatgtcatccc

SEQ ID NO: 149187 - DNA, 21 bp, Artificial sequence
  SiRNA target sequence
aacaaagggaatgtcatcccg

SEQ ID NO: 149188 - DNA, 21 bp, Artificial sequence
  SiRNA target sequence
acaaagggaatgtcatcccga

SEQ ID NO: 149189 - DNA, 21 bp, Artificial sequence
  SiRNA target sequence
caaagggaatgtcatcccgat

SEQ ID NO: 149190 - DNA, 21 bp, Artificial sequence
  SiRNA target sequence
aaagggaatgtcatcccgatg

SEQ ID NO: 149191 - DNA, 21 bp, Artificial sequence
  SiRNA target sequence
aagggaatgtcatcccgatgg

SEQ ID NO: 149192 - DNA, 21 bp, Artificial sequence
  SiRNA target sequence
agggaatgtcatcccgatggt

SEQ ID NO: 149193 - DNA, 21 bp, Artificial sequence
  SiRNA target sequence
gggaatgtcatcccgatggtg

SEQ ID NO: 149194 - DNA, 21 bp, Artificial sequence
  SiRNA target sequence
ggaatgtcatcccgatggtgc

SEQ ID NO: 149195 - DNA, 21 bp, Artificial sequence
  SiRNA target sequence
gaatgtcatcccgatggtgca

SEQ ID NO: 149196 - DNA, 21 bp, Artificial sequence
  SiRNA target sequence
aatgtcatcccgatggtgcat

SEQ ID NO: 149197 - DNA, 21 bp, Artificial sequence
  SiRNA target sequence
atgtcatcccgatggtgcatt

SEQ ID NO: 149198 - DNA, 21 bp, Artificial sequence
  SiRNA target sequence
tgtcatcccgatggtgcattt

SEQ ID NO: 149199 - DNA, 21 bp, Artificial sequence
  SiRNA target sequence
gtcatcccgatggtgcatttt

SEQ ID NO: 149200 - DNA, 21 bp, Artificial sequence
  SiRNA target sequence
tcatcccgatggtgcattttt

SEQ ID NO: 149201 - DNA, 21 bp, Artificial sequence
  SiRNA target sequence
catcccgatggtgcatttttt

SEQ ID NO: 149202 - DNA, 21 bp, Artificial sequence
  SiRNA target sequence
atcccgatggtgcatttttta

SEQ ID NO: 149203 - DNA, 21 bp, Artificial sequence
  SiRNA target sequence
tcccgatggtgcattttttaa

SEQ ID NO: 149204 - DNA, 21 bp, Artificial sequence
  SiRNA target sequence
cccgatggtgcattttttaaa

SEQ ID NO: 149205 - DNA, 21 bp, Artificial sequence
  SiRNA target sequence
ccgatggtgcattttttaaag

SEQ ID NO: 149206 - DNA, 21 bp, Artificial sequence
  SiRNA target sequence
cgatggtgcattttttaaagc

SEQ ID NO: 149207 - DNA, 21 bp, Artificial sequence
  SiRNA target sequence
gatggtgcattttttaaagct

SEQ ID NO: 149208 - DNA, 21 bp, Artificial sequence
  SiRNA target sequence
atggtgcattttttaaagctg

SEQ ID NO: 149209 - DNA, 21 bp, Artificial sequence
  SiRNA target sequence
tggtgcattttttaaagctgc

SEQ ID NO: 149210 - DNA, 21 bp, Artificial sequence
  SiRNA target sequence
ggtgcattttttaaagctgct

SEQ ID NO: 149211 - DNA, 21 bp, Artificial sequence
  SiRNA target sequence
gtgcattttttaaagctgctc

SEQ ID NO: 149212 - DNA, 21 bp, Artificial sequence
  SiRNA target sequence
tgcattttttaaagctgctct

SEQ ID NO: 149213 - DNA, 21 bp, Artificial sequence
  SiRNA target sequence
gcattttttaaagctgctctt

SEQ ID NO: 149214 - DNA, 21 bp, Artificial sequence
  SiRNA target sequence
cattttttaaagctgctctta

SEQ ID NO: 149215 - DNA, 21 bp, Artificial sequence
  SiRNA target sequence
attttttaaagctgctcttag

SEQ ID NO: 149216 - DNA, 21 bp, Artificial sequence
  SiRNA target sequence
ttttttaaagctgctcttaga

SEQ ID NO: 149217 - DNA, 21 bp, Artificial sequence
  SiRNA target sequence
tttttaaagctgctcttagaa

SEQ ID NO: 149218 - DNA, 21 bp, Artificial sequence
  SiRNA target sequence
ttttaaagctgctcttagaaa

SEQ ID NO: 149219 - DNA, 21 bp, Artificial sequence
  SiRNA target sequence
tttaaagctgctcttagaaaa

SEQ ID NO: 149220 - DNA, 21 bp, Artificial sequence
  SiRNA target sequence
ttaaagctgctcttagaaaat

SEQ ID NO: 149221 - DNA, 21 bp, Artificial sequence
  SiRNA target sequence
taaagctgctcttagaaaatg

SEQ ID NO: 149222 - DNA, 21 bp, Artificial sequence
  SiRNA target sequence
aaagctgctcttagaaaatgt

SEQ ID NO: 149223 - DNA, 21 bp, Artificial sequence
  SiRNA target sequence
aagctgctcttagaaaatgta

SEQ ID NO: 149224 - DNA, 21 bp, Artificial sequence
  SiRNA target sequence
agctgctcttagaaaatgtaa

SEQ ID NO: 149225 - DNA, 21 bp, Artificial sequence
  SiRNA target sequence
gctgctcttagaaaatgtaaa

SEQ ID NO: 149226 - DNA, 21 bp, Artificial sequence
  SiRNA target sequence
ctgctcttagaaaatgtaaaa

SEQ ID NO: 149227 - DNA, 21 bp, Artificial sequence
  SiRNA target sequence
tgctcttagaaaatgtaaaac

SEQ ID NO: 149228 - DNA, 21 bp, Artificial sequence
  SiRNA target sequence
gctcttagaaaatgtaaaaca

SEQ ID NO: 149229 - DNA, 21 bp, Artificial sequence
  SiRNA target sequence
ctcttagaaaatgtaaaacag

SEQ ID NO: 149230 - DNA, 21 bp, Artificial sequence
  SiRNA target sequence
tcttagaaaatgtaaaacaga

SEQ ID NO: 149231 - DNA, 21 bp, Artificial sequence
  SiRNA target sequence
cttagaaaatgtaaaacagat

SEQ ID NO: 149232 - DNA, 21 bp, Artificial sequence
  SiRNA target sequence
ttagaaaatgtaaaacagatg

SEQ ID NO: 149233 - DNA, 21 bp, Artificial sequence
  SiRNA target sequence
tagaaaatgtaaaacagatga

SEQ ID NO: 149234 - DNA, 21 bp, Artificial sequence
  SiRNA target sequence
agaaaatgtaaaacagatgaa

SEQ ID NO: 149235 - DNA, 21 bp, Artificial sequence
  SiRNA target sequence
gaaaatgtaaaacagatgaag

SEQ ID NO: 149236 - DNA, 21 bp, Artificial sequence
  SiRNA target sequence
aaaatgtaaaacagatgaaga

SEQ ID NO: 149237 - DNA, 21 bp, Artificial sequence
  SiRNA target sequence
aaatgtaaaacagatgaagaa

SEQ ID NO: 149238 - DNA, 21 bp, Artificial sequence
  SiRNA target sequence
aatgtaaaacagatgaagaaa

SEQ ID NO: 149239 - DNA, 21 bp, Artificial sequence
  SiRNA target sequence
atgtaaaacagatgaagaaag

SEQ ID NO: 149240 - DNA, 21 bp, Artificial sequence
  SiRNA target sequence
tgtaaaacagatgaagaaaga

SEQ ID NO: 149241 - DNA, 21 bp, Artificial sequence
  SiRNA target sequence
gtaaaacagatgaagaaagag

SEQ ID NO: 149242 - DNA, 21 bp, Artificial sequence
  SiRNA target sequence
taaaacagatgaagaaagagc

SEQ ID NO: 149243 - DNA, 21 bp, Artificial sequence
  SiRNA target sequence
aaaacagatgaagaaagagca

SEQ ID NO: 149244 - DNA, 21 bp, Artificial sequence
  SiRNA target sequence
aaacagatgaagaaagagcaa

SEQ ID NO: 149245 - DNA, 21 bp, Artificial sequence
  SiRNA target sequence
aacagatgaagaaagagcaaa

SEQ ID NO: 149246 - DNA, 21 bp, Artificial sequence
  SiRNA target sequence
acagatgaagaaagagcaaaa

SEQ ID NO: 149247 - DNA, 21 bp, Artificial sequence
  SiRNA target sequence
cagatgaagaaagagcaaaag

SEQ ID NO: 149248 - DNA, 21 bp, Artificial sequence
  SiRNA target sequence
agatgaagaaagagcaaaagt

SEQ ID NO: 149249 - DNA, 21 bp, Artificial sequence
  SiRNA target sequence
gatgaagaaagagcaaaagtt

SEQ ID NO: 149250 - DNA, 21 bp, Artificial sequence
  SiRNA target sequence
atgaagaaagagcaaaagttg

SEQ ID NO: 149251 - DNA, 21 bp, Artificial sequence
  SiRNA target sequence
tgaagaaagagcaaaagttga

SEQ ID NO: 149252 - DNA, 21 bp, Artificial sequence
  SiRNA target sequence
gaagaaagagcaaaagttgaa

SEQ ID NO: 149253 - DNA, 21 bp, Artificial sequence
  SiRNA target sequence
aagaaagagcaaaagttgaaa

SEQ ID NO: 149254 - DNA, 21 bp, Artificial sequence
  SiRNA target sequence
agaaagagcaaaagttgaaaa

SEQ ID NO: 149255 - DNA, 21 bp, Artificial sequence
  SiRNA target sequence
gaaagagcaaaagttgaaaaa

SEQ ID NO: 149256 - DNA, 21 bp, Artificial sequence
  SiRNA target sequence
aaagagcaaaagttgaaaaag

SEQ ID NO: 149257 - DNA, 21 bp, Artificial sequence
  SiRNA target sequence
aagagcaaaagttgaaaaaga

SEQ ID NO: 149258 - DNA, 21 bp, Artificial sequence
  SiRNA target sequence
agagcaaaagttgaaaaagaa

SEQ ID NO: 149259 - DNA, 21 bp, Artificial sequence
  SiRNA target sequence
gagcaaaagttgaaaaagaat

SEQ ID NO: 149260 - DNA, 21 bp, Artificial sequence
  SiRNA target sequence
agcaaaagttgaaaaagaatt

SEQ ID NO: 149261 - DNA, 21 bp, Artificial sequence
  SiRNA target sequence
gcaaaagttgaaaaagaattt

SEQ ID NO: 149262 - DNA, 21 bp, Artificial sequence
  SiRNA target sequence
caaaagttgaaaaagaattta

SEQ ID NO: 149263 - DNA, 21 bp, Artificial sequence
  SiRNA target sequence
aaaagttgaaaaagaatttaa

SEQ ID NO: 149264 - DNA, 21 bp, Artificial sequence
  SiRNA target sequence
aaagttgaaaaagaatttaaa

SEQ ID NO: 149265 - DNA, 21 bp, Artificial sequence
  SiRNA target sequence
aagttgaaaaagaatttaaag

SEQ ID NO: 149266 - DNA, 21 bp, Artificial sequence
  SiRNA target sequence
agttgaaaaagaatttaaaga

SEQ ID NO: 149267 - DNA, 21 bp, Artificial sequence
  SiRNA target sequence
gttgaaaaagaatttaaagaa

SEQ ID NO: 149268 - DNA, 21 bp, Artificial sequence
  SiRNA target sequence
ttgaaaaagaatttaaagaaa

SEQ ID NO: 149269 - DNA, 21 bp, Artificial sequence
  SiRNA target sequence
tgaaaaagaatttaaagaaaa

SEQ ID NO: 149270 - DNA, 21 bp, Artificial sequence
  SiRNA target sequence
gaaaaagaatttaaagaaaaa

SEQ ID NO: 149271 - DNA, 21 bp, Artificial sequence
  SiRNA target sequence
aaaaagaatttaaagaaaaat

SEQ ID NO: 149272 - DNA, 21 bp, Artificial sequence
  SiRNA target sequence
aaaagaatttaaagaaaaatc

SEQ ID NO: 149273 - DNA, 21 bp, Artificial sequence
  SiRNA target sequence
aaagaatttaaagaaaaatca

SEQ ID NO: 149274 - DNA, 21 bp, Artificial sequence
  SiRNA target sequence
aagaatttaaagaaaaatcac

SEQ ID NO: 149275 - DNA, 21 bp, Artificial sequence
  SiRNA target sequence
agaatttaaagaaaaatcaca

SEQ ID NO: 149276 - DNA, 21 bp, Artificial sequence
  SiRNA target sequence
gaatttaaagaaaaatcacaa

SEQ ID NO: 149277 - DNA, 21 bp, Artificial sequence
  SiRNA target sequence
aatttaaagaaaaatcacaaa

SEQ ID NO: 149278 - DNA, 21 bp, Artificial sequence
  SiRNA target sequence
atttaaagaaaaatcacaaaa

SEQ ID NO: 149279 - DNA, 21 bp, Artificial sequence
  SiRNA target sequence
tttaaagaaaaatcacaaaaa

SEQ ID NO: 149280 - DNA, 21 bp, Artificial sequence
  SiRNA target sequence
ttaaagaaaaatcacaaaaat

SEQ ID NO: 149281 - DNA, 21 bp, Artificial sequence
  SiRNA target sequence
taaagaaaaatcacaaaaatg

SEQ ID NO: 149282 - DNA, 21 bp, Artificial sequence
  SiRNA target sequence
aaagaaaaatcacaaaaatgt

SEQ ID NO: 149283 - DNA, 21 bp, Artificial sequence
  SiRNA target sequence
aagaaaaatcacaaaaatgta

SEQ ID NO: 149284 - DNA, 21 bp, Artificial sequence
  SiRNA target sequence
agaaaaatcacaaaaatgtaa

SEQ ID NO: 149285 - DNA, 21 bp, Artificial sequence
  SiRNA target sequence
gaaaaatcacaaaaatgtaat

SEQ ID NO: 149286 - DNA, 21 bp, Artificial sequence
  SiRNA target sequence
aaaaatcacaaaaatgtaatc

SEQ ID NO: 149287 - DNA, 21 bp, Artificial sequence
  SiRNA target sequence
aaaatcacaaaaatgtaatca

SEQ ID NO: 149288 - DNA, 21 bp, Artificial sequence
  SiRNA target sequence
aaatcacaaaaatgtaatcaa

SEQ ID NO: 149289 - DNA, 21 bp, Artificial sequence
  SiRNA target sequence
aatcacaaaaatgtaatcaag

SEQ ID NO: 149290 - DNA, 21 bp, Artificial sequence
  SiRNA target sequence
atcacaaaaatgtaatcaagc

SEQ ID NO: 149291 - DNA, 21 bp, Artificial sequence
  SiRNA target sequence
tcacaaaaatgtaatcaagct

SEQ ID NO: 149292 - DNA, 21 bp, Artificial sequence
  SiRNA target sequence
cacaaaaatgtaatcaagcta

SEQ ID NO: 149293 - DNA, 21 bp, Artificial sequence
  SiRNA target sequence
acaaaaatgtaatcaagctaa

SEQ ID NO: 149294 - DNA, 21 bp, Artificial sequence
  SiRNA target sequence
caaaaatgtaatcaagctaaa

SEQ ID NO: 149295 - DNA, 21 bp, Artificial sequence
  SiRNA target sequence
aaaaatgtaatcaagctaaag

SEQ ID NO: 149296 - DNA, 21 bp, Artificial sequence
  SiRNA target sequence
aaaatgtaatcaagctaaagc

SEQ ID NO: 149297 - DNA, 21 bp, Artificial sequence
  SiRNA target sequence
aaatgtaatcaagctaaagca

SEQ ID NO: 149298 - DNA, 21 bp, Artificial sequence
  SiRNA target sequence
aatgtaatcaagctaaagcag

SEQ ID NO: 149299 - DNA, 21 bp, Artificial sequence
  SiRNA target sequence
atgtaatcaagctaaagcagt

SEQ ID NO: 149300 - DNA, 21 bp, Artificial sequence
  SiRNA target sequence
tgtaatcaagctaaagcagtt

SEQ ID NO: 149301 - DNA, 21 bp, Artificial sequence
  SiRNA target sequence
gtaatcaagctaaagcagttt

SEQ ID NO: 149302 - DNA, 21 bp, Artificial sequence
  SiRNA target sequence
taatcaagctaaagcagtttt

SEQ ID NO: 149303 - DNA, 21 bp, Artificial sequence
  SiRNA target sequence
aatcaagctaaagcagtttta

SEQ ID NO: 149304 - DNA, 21 bp, Artificial sequence
  SiRNA target sequence
atcaagctaaagcagttttat

SEQ ID NO: 149305 - DNA, 21 bp, Artificial sequence
  SiRNA target sequence
tcaagctaaagcagttttatt

SEQ ID NO: 149306 - DNA, 21 bp, Artificial sequence
  SiRNA target sequence
caagctaaagcagttttattt

SEQ ID NO: 149307 - DNA, 21 bp, Artificial sequence
  SiRNA target sequence
aagctaaagcagttttatttg

SEQ ID NO: 149308 - DNA, 21 bp, Artificial sequence
  SiRNA target sequence
agctaaagcagttttatttga

SEQ ID NO: 149309 - DNA, 21 bp, Artificial sequence
  SiRNA target sequence
gctaaagcagttttatttgat

SEQ ID NO: 149310 - DNA, 21 bp, Artificial sequence
  SiRNA target sequence
ctaaagcagttttatttgatg

SEQ ID NO: 149311 - DNA, 21 bp, Artificial sequence
  SiRNA target sequence
taaagcagttttatttgatga

SEQ ID NO: 149312 - DNA, 21 bp, Artificial sequence
  SiRNA target sequence
aaagcagttttatttgatgag

SEQ ID NO: 149313 - DNA, 21 bp, Artificial sequence
  SiRNA target sequence
aagcagttttatttgatgaga

SEQ ID NO: 149314 - DNA, 21 bp, Artificial sequence
  SiRNA target sequence
agcagttttatttgatgagaa

SEQ ID NO: 149315 - DNA, 21 bp, Artificial sequence
  SiRNA target sequence
gcagttttatttgatgagaaa

SEQ ID NO: 149316 - DNA, 21 bp, Artificial sequence
  SiRNA target sequence
cagttttatttgatgagaaaa

SEQ ID NO: 149317 - DNA, 21 bp, Artificial sequence
  SiRNA target sequence
agttttatttgatgagaaaaa

SEQ ID NO: 149318 - DNA, 21 bp, Artificial sequence
  SiRNA target sequence
gttttatttgatgagaaaaaa

SEQ ID NO: 149319 - DNA, 21 bp, Artificial sequence
  SiRNA target sequence
ttttatttgatgagaaaaaaa

SEQ ID NO: 149320 - DNA, 21 bp, Artificial sequence
  SiRNA target sequence
tttatttgatgagaaaaaaaa

SEQ ID NO: 149321 - DNA, 21 bp, Artificial sequence
  SiRNA target sequence
ttatttgatgagaaaaaaaag

SEQ ID NO: 149322 - DNA, 21 bp, Artificial sequence
  SiRNA target sequence
tatttgatgagaaaaaaaagc

SEQ ID NO: 149323 - DNA, 21 bp, Artificial sequence
  SiRNA target sequence
atttgatgagaaaaaaaagca

SEQ ID NO: 149324 - DNA, 21 bp, Artificial sequence
  SiRNA target sequence
tttgatgagaaaaaaaagcaa

SEQ ID NO: 149325 - DNA, 21 bp, Artificial sequence
  SiRNA target sequence
ttgatgagaaaaaaaagcaag

SEQ ID NO: 149326 - DNA, 21 bp, Artificial sequence
  SiRNA target sequence
tgatgagaaaaaaaagcaaga

SEQ ID NO: 149327 - DNA, 21 bp, Artificial sequence
  SiRNA target sequence
gatgagaaaaaaaagcaagag

SEQ ID NO: 149328 - DNA, 21 bp, Artificial sequence
  SiRNA target sequence
atgagaaaaaaaagcaagagt

SEQ ID NO: 149329 - DNA, 21 bp, Artificial sequence
  SiRNA target sequence
tgagaaaaaaaagcaagagta

SEQ ID NO: 149330 - DNA, 21 bp, Artificial sequence
  SiRNA target sequence
gagaaaaaaaagcaagagtat

SEQ ID NO: 149331 - DNA, 21 bp, Artificial sequence
  SiRNA target sequence
agaaaaaaaagcaagagtatg

SEQ ID NO: 149332 - DNA, 21 bp, Artificial sequence
  SiRNA target sequence
gaaaaaaaagcaagagtatga

SEQ ID NO: 149333 - DNA, 21 bp, Artificial sequence
  SiRNA target sequence
aaaaaaaagcaagagtatgat

SEQ ID NO: 149334 - DNA, 21 bp, Artificial sequence
  SiRNA target sequence
aaaaaaagcaagagtatgata

SEQ ID NO: 149335 - DNA, 21 bp, Artificial sequence
  SiRNA target sequence
aaaaaagcaagagtatgatat

SEQ ID NO: 149336 - DNA, 21 bp, Artificial sequence
  SiRNA target sequence
aaaaagcaagagtatgatatg

SEQ ID NO: 149337 - DNA, 21 bp, Artificial sequence
  SiRNA target sequence
aaaagcaagagtatgatatgg

SEQ ID NO: 149338 - DNA, 21 bp, Artificial sequence
  SiRNA target sequence
aaagcaagagtatgatatggg

SEQ ID NO: 149339 - DNA, 21 bp, Artificial sequence
  SiRNA target sequence
aagcaagagtatgatatggga

SEQ ID NO: 149340 - DNA, 21 bp, Artificial sequence
  SiRNA target sequence
agcaagagtatgatatgggaa

SEQ ID NO: 149341 - DNA, 21 bp, Artificial sequence
  SiRNA target sequence
gcaagagtatgatatgggaat

SEQ ID NO: 149342 - DNA, 21 bp, Artificial sequence
  SiRNA target sequence
caagagtatgatatgggaatg

SEQ ID NO: 149343 - DNA, 21 bp, Artificial sequence
  SiRNA target sequence
aagagtatgatatgggaatga

SEQ ID NO: 149344 - DNA, 21 bp, Artificial sequence
  SiRNA target sequence
agagtatgatatgggaatgac

SEQ ID NO: 149345 - DNA, 21 bp, Artificial sequence
  SiRNA target sequence
gagtatgatatgggaatgact

SEQ ID NO: 149346 - DNA, 21 bp, Artificial sequence
  SiRNA target sequence
agtatgatatgggaatgactg

SEQ ID NO: 149347 - DNA, 21 bp, Artificial sequence
  SiRNA target sequence
gtatgatatgggaatgactgg

SEQ ID NO: 149348 - DNA, 21 bp, Artificial sequence
  SiRNA target sequence
tatgatatgggaatgactggc

SEQ ID NO: 149349 - DNA, 21 bp, Artificial sequence
  SiRNA target sequence
atgatatgggaatgactggcg

SEQ ID NO: 149350 - DNA, 21 bp, Artificial sequence
  SiRNA target sequence
tgatatgggaatgactggcga

SEQ ID NO: 149351 - DNA, 21 bp, Artificial sequence
  SiRNA target sequence
gatatgggaatgactggcgat

SEQ ID NO: 149352 - DNA, 21 bp, Artificial sequence
  SiRNA target sequence
atatgggaatgactggcgatt

SEQ ID NO: 149353 - DNA, 21 bp, Artificial sequence
  SiRNA target sequence
tatgggaatgactggcgattt

SEQ ID NO: 149354 - DNA, 21 bp, Artificial sequence
  SiRNA target sequence
atgggaatgactggcgatttt

SEQ ID NO: 149355 - DNA, 21 bp, Artificial sequence
  SiRNA target sequence
tgggaatgactggcgattttg

SEQ ID NO: 149356 - DNA, 21 bp, Artificial sequence
  SiRNA target sequence
gggaatgactggcgattttgg

SEQ ID NO: 149357 - DNA, 21 bp, Artificial sequence
  SiRNA target sequence
ggaatgactggcgattttgga

SEQ ID NO: 149358 - DNA, 21 bp, Artificial sequence
  SiRNA target sequence
gaatgactggcgattttggat

SEQ ID NO: 149359 - DNA, 21 bp, Artificial sequence
  SiRNA target sequence
aatgactggcgattttggatt

SEQ ID NO: 149360 - DNA, 21 bp, Artificial sequence
  SiRNA target sequence
atgactggcgattttggattt

SEQ ID NO: 149361 - DNA, 21 bp, Artificial sequence
  SiRNA target sequence
tgactggcgattttggatttt

SEQ ID NO: 149362 - DNA, 21 bp, Artificial sequence
  SiRNA target sequence
gactggcgattttggattttc

SEQ ID NO: 149363 - DNA, 21 bp, Artificial sequence
  SiRNA target sequence
actggcgattttggattttct

SEQ ID NO: 149364 - DNA, 21 bp, Artificial sequence
  SiRNA target sequence
ctggcgattttggattttctg

SEQ ID NO: 149365 - DNA, 21 bp, Artificial sequence
  SiRNA target sequence
tggcgattttggattttctgc

SEQ ID NO: 149366 - DNA, 21 bp, Artificial sequence
  SiRNA target sequence
ggcgattttggattttctgca

SEQ ID NO: 149367 - DNA, 21 bp, Artificial sequence
  SiRNA target sequence
gcgattttggattttctgcag

SEQ ID NO: 149368 - DNA, 21 bp, Artificial sequence
  SiRNA target sequence
cgattttggattttctgcagg

SEQ ID NO: 149369 - DNA, 21 bp, Artificial sequence
  SiRNA target sequence
gattttggattttctgcaggt

SEQ ID NO: 149370 - DNA, 21 bp, Artificial sequence
  SiRNA target sequence
attttggattttctgcaggtg

SEQ ID NO: 149371 - DNA, 21 bp, Artificial sequence
  SiRNA target sequence
ttttggattttctgcaggtgg

SEQ ID NO: 149372 - DNA, 21 bp, Artificial sequence
  SiRNA target sequence
tttggattttctgcaggtggt

SEQ ID NO: 149373 - DNA, 21 bp, Artificial sequence
  SiRNA target sequence
ttggattttctgcaggtggtg

SEQ ID NO: 149374 - DNA, 21 bp, Artificial sequence
  SiRNA target sequence
tggattttctgcaggtggtgg

SEQ ID NO: 149375 - DNA, 21 bp, Artificial sequence
  SiRNA target sequence
ggattttctgcaggtggtgga

SEQ ID NO: 149376 - DNA, 21 bp, Artificial sequence
  SiRNA target sequence
gattttctgcaggtggtggag

SEQ ID NO: 149377 - DNA, 21 bp, Artificial sequence
  SiRNA target sequence
attttctgcaggtggtggaga

SEQ ID NO: 149378 - DNA, 21 bp, Artificial sequence
  SiRNA target sequence
ttttctgcaggtggtggagac

SEQ ID NO: 149379 - DNA, 21 bp, Artificial sequence
  SiRNA target sequence
tttctgcaggtggtggagact

SEQ ID NO: 149380 - DNA, 21 bp, Artificial sequence
  SiRNA target sequence
ttctgcaggtggtggagactt

SEQ ID NO: 149381 - DNA, 21 bp, Artificial sequence
  SiRNA target sequence
tctgcaggtggtggagacttt

SEQ ID NO: 149382 - DNA, 21 bp, Artificial sequence
  SiRNA target sequence
ctgcaggtggtggagactttt

SEQ ID NO: 149383 - DNA, 21 bp, Artificial sequence
  SiRNA target sequence
tgcaggtggtggagacttttt

SEQ ID NO: 149384 - DNA, 21 bp, Artificial sequence
  SiRNA target sequence
gcaggtggtggagactttttc

SEQ ID NO: 149385 - DNA, 21 bp, Artificial sequence
  SiRNA target sequence
caggtggtggagactttttcg

SEQ ID NO: 149386 - DNA, 21 bp, Artificial sequence
  SiRNA target sequence
aggtggtggagactttttcga

SEQ ID NO: 149387 - DNA, 21 bp, Artificial sequence
  SiRNA target sequence
ggtggtggagactttttcgat

SEQ ID NO: 149388 - DNA, 21 bp, Artificial sequence
  SiRNA target sequence
gtggtggagactttttcgata

SEQ ID NO: 149389 - DNA, 21 bp, Artificial sequence
  SiRNA target sequence
tggtggagactttttcgatat

SEQ ID NO: 149390 - DNA, 21 bp, Artificial sequence
  SiRNA target sequence
ggtggagactttttcgatatt

SEQ ID NO: 149391 - DNA, 21 bp, Artificial sequence
  SiRNA target sequence
gtggagactttttcgatattt

SEQ ID NO: 149392 - DNA, 21 bp, Artificial sequence
  SiRNA target sequence
tggagactttttcgatatttt

SEQ ID NO: 149393 - DNA, 21 bp, Artificial sequence
  SiRNA target sequence
ggagactttttcgatattttt

SEQ ID NO: 149394 - DNA, 21 bp, Artificial sequence
  SiRNA target sequence
gagactttttcgatatttttt

SEQ ID NO: 149395 - DNA, 21 bp, Artificial sequence
  SiRNA target sequence
agactttttcgatattttttc

SEQ ID NO: 149396 - DNA, 21 bp, Artificial sequence
  SiRNA target sequence
gactttttcgatattttttca

SEQ ID NO: 149397 - DNA, 21 bp, Artificial sequence
  SiRNA target sequence
actttttcgatattttttcaa

SEQ ID NO: 149398 - DNA, 21 bp, Artificial sequence
  SiRNA target sequence
ctttttcgatattttttcaag

SEQ ID NO: 149399 - DNA, 21 bp, Artificial sequence
  SiRNA target sequence
tttttcgatattttttcaagt

SEQ ID NO: 149400 - DNA, 21 bp, Artificial sequence
  SiRNA target sequence
ttttcgatattttttcaagtt

SEQ ID NO: 149401 - DNA, 21 bp, Artificial sequence
  SiRNA target sequence
tttcgatattttttcaagttt

SEQ ID NO: 149402 - DNA, 21 bp, Artificial sequence
  SiRNA target sequence
ttcgatattttttcaagtttt

SEQ ID NO: 149403 - DNA, 21 bp, Artificial sequence
  SiRNA target sequence
tcgatattttttcaagtttta

SEQ ID NO: 149404 - DNA, 21 bp, Artificial sequence
  SiRNA target sequence
cgatattttttcaagttttac

SEQ ID NO: 149405 - DNA, 21 bp, Artificial sequence
  SiRNA target sequence
gatattttttcaagttttact

SEQ ID NO: 149406 - DNA, 21 bp, Artificial sequence
  SiRNA target sequence
atattttttcaagttttactg

SEQ ID NO: 149407 - DNA, 21 bp, Artificial sequence
  SiRNA target sequence
tattttttcaagttttactgg

SEQ ID NO: 149408 - DNA, 21 bp, Artificial sequence
  SiRNA target sequence
attttttcaagttttactggt

SEQ ID NO: 149409 - DNA, 21 bp, Artificial sequence
  SiRNA target sequence
ttttttcaagttttactggtg

SEQ ID NO: 149410 - DNA, 21 bp, Artificial sequence
  SiRNA target sequence
tttttcaagttttactggtgg

SEQ ID NO: 149411 - DNA, 21 bp, Artificial sequence
  SiRNA target sequence
ttttcaagttttactggtgga

SEQ ID NO: 149412 - DNA, 21 bp, Artificial sequence
  SiRNA target sequence
tttcaagttttactggtggag

SEQ ID NO: 149413 - DNA, 21 bp, Artificial sequence
  SiRNA target sequence
ttcaagttttactggtggagg

SEQ ID NO: 149414 - DNA, 21 bp, Artificial sequence
  SiRNA target sequence
tcaagttttactggtggagga

SEQ ID NO: 149415 - DNA, 21 bp, Artificial sequence
  SiRNA target sequence
caagttttactggtggaggaa

SEQ ID NO: 149416 - DNA, 21 bp, Artificial sequence
  SiRNA target sequence
aagttttactggtggaggaag

SEQ ID NO: 149417 - DNA, 21 bp, Artificial sequence
  SiRNA target sequence
agttttactggtggaggaaga

SEQ ID NO: 149418 - DNA, 21 bp, Artificial sequence
  SiRNA target sequence
gttttactggtggaggaagaa

SEQ ID NO: 149419 - DNA, 21 bp, Artificial sequence
  SiRNA target sequence
ttttactggtggaggaagaag

SEQ ID NO: 149420 - DNA, 21 bp, Artificial sequence
  SiRNA target sequence
tttactggtggaggaagaaga

SEQ ID NO: 149421 - DNA, 21 bp, Artificial sequence
  SiRNA target sequence
ttactggtggaggaagaagaa

SEQ ID NO: 149422 - DNA, 21 bp, Artificial sequence
  SiRNA target sequence
tactggtggaggaagaagaaa

SEQ ID NO: 149423 - DNA, 21 bp, Artificial sequence
  SiRNA target sequence
actggtggaggaagaagaaat

SEQ ID NO: 149424 - DNA, 21 bp, Artificial sequence
  SiRNA target sequence
ctggtggaggaagaagaaatc

SEQ ID NO: 149425 - DNA, 21 bp, Artificial sequence
  SiRNA target sequence
tggtggaggaagaagaaatcg

SEQ ID NO: 149426 - DNA, 21 bp, Artificial sequence
  SiRNA target sequence
ggtggaggaagaagaaatcga

SEQ ID NO: 149427 - DNA, 21 bp, Artificial sequence
  SiRNA target sequence
gtggaggaagaagaaatcgag

SEQ ID NO: 149428 - DNA, 21 bp, Artificial sequence
  SiRNA target sequence
tggaggaagaagaaatcgagt

SEQ ID NO: 149429 - DNA, 21 bp, Artificial sequence
  SiRNA target sequence
ggaggaagaagaaatcgagta

SEQ ID NO: 149430 - DNA, 21 bp, Artificial sequence
  SiRNA target sequence
gaggaagaagaaatcgagtac

SEQ ID NO: 149431 - DNA, 21 bp, Artificial sequence
  SiRNA target sequence
aggaagaagaaatcgagtaca

SEQ ID NO: 149432 - DNA, 21 bp, Artificial sequence
  SiRNA target sequence
ggaagaagaaatcgagtacaa

SEQ ID NO: 149433 - DNA, 21 bp, Artificial sequence
  SiRNA target sequence
gaagaagaaatcgagtacaaa

SEQ ID NO: 149434 - DNA, 21 bp, Artificial sequence
  SiRNA target sequence
aagaagaaatcgagtacaaaa

SEQ ID NO: 149435 - DNA, 21 bp, Artificial sequence
  SiRNA target sequence
agaagaaatcgagtacaaaaa

SEQ ID NO: 149436 - DNA, 21 bp, Artificial sequence
  SiRNA target sequence
gaagaaatcgagtacaaaaag

SEQ ID NO: 149437 - DNA, 21 bp, Artificial sequence
  SiRNA target sequence
aagaaatcgagtacaaaaagt

SEQ ID NO: 149438 - DNA, 21 bp, Artificial sequence
  SiRNA target sequence
agaaatcgagtacaaaaagtt

SEQ ID NO: 149439 - DNA, 21 bp, Artificial sequence
  SiRNA target sequence
gaaatcgagtacaaaaagttc

SEQ ID NO: 149440 - DNA, 21 bp, Artificial sequence
  SiRNA target sequence
aaatcgagtacaaaaagttca

SEQ ID NO: 149441 - DNA, 21 bp, Artificial sequence
  SiRNA target sequence
aatcgagtacaaaaagttcaa

SEQ ID NO: 149442 - DNA, 21 bp, Artificial sequence
  SiRNA target sequence
atcgagtacaaaaagttcaag

SEQ ID NO: 149443 - DNA, 21 bp, Artificial sequence
  SiRNA target sequence
tcgagtacaaaaagttcaaga

SEQ ID NO: 149444 - DNA, 21 bp, Artificial sequence
  SiRNA target sequence
cgagtacaaaaagttcaagat

SEQ ID NO: 149445 - DNA, 21 bp, Artificial sequence
  SiRNA target sequence
gagtacaaaaagttcaagata

SEQ ID NO: 149446 - DNA, 21 bp, Artificial sequence
  SiRNA target sequence
agtacaaaaagttcaagatac

SEQ ID NO: 149447 - DNA, 21 bp, Artificial sequence
  SiRNA target sequence
gtacaaaaagttcaagataca

SEQ ID NO: 149448 - DNA, 21 bp, Artificial sequence
  SiRNA target sequence
tacaaaaagttcaagatacag

SEQ ID NO: 149449 - DNA, 21 bp, Artificial sequence
  SiRNA target sequence
acaaaaagttcaagatacaga

SEQ ID NO: 149450 - DNA, 21 bp, Artificial sequence
  SiRNA target sequence
caaaaagttcaagatacagaa

SEQ ID NO: 149451 - DNA, 21 bp, Artificial sequence
  SiRNA target sequence
aaaaagttcaagatacagaat

SEQ ID NO: 149452 - DNA, 21 bp, Artificial sequence
  SiRNA target sequence
aaaagttcaagatacagaata

SEQ ID NO: 149453 - DNA, 21 bp, Artificial sequence
  SiRNA target sequence
aaagttcaagatacagaatac

SEQ ID NO: 149454 - DNA, 21 bp, Artificial sequence
  SiRNA target sequence
aagttcaagatacagaatacg

SEQ ID NO: 149455 - DNA, 21 bp, Artificial sequence
  SiRNA target sequence
agttcaagatacagaatacga

SEQ ID NO: 149456 - DNA, 21 bp, Artificial sequence
  SiRNA target sequence
gttcaagatacagaatacgag

SEQ ID NO: 149457 - DNA, 21 bp, Artificial sequence
  SiRNA target sequence
ttcaagatacagaatacgagt

SEQ ID NO: 149458 - DNA, 21 bp, Artificial sequence
  SiRNA target sequence
tcaagatacagaatacgagtt

SEQ ID NO: 149459 - DNA, 21 bp, Artificial sequence
  SiRNA target sequence
caagatacagaatacgagttt

SEQ ID NO: 149460 - DNA, 21 bp, Artificial sequence
  SiRNA target sequence
aagatacagaatacgagttta

SEQ ID NO: 149461 - DNA, 21 bp, Artificial sequence
  SiRNA target sequence
agatacagaatacgagtttaa

SEQ ID NO: 149462 - DNA, 21 bp, Artificial sequence
  SiRNA target sequence
gatacagaatacgagtttaat

SEQ ID NO: 149463 - DNA, 21 bp, Artificial sequence
  SiRNA target sequence
atacagaatacgagtttaata

SEQ ID NO: 149464 - DNA, 21 bp, Artificial sequence
  SiRNA target sequence
tacagaatacgagtttaatat

SEQ ID NO: 149465 - DNA, 21 bp, Artificial sequence
  SiRNA target sequence
acagaatacgagtttaatatt

SEQ ID NO: 149466 - DNA, 21 bp, Artificial sequence
  SiRNA target sequence
cagaatacgagtttaatattt

SEQ ID NO: 149467 - DNA, 21 bp, Artificial sequence
  SiRNA target sequence
agaatacgagtttaatatttc

SEQ ID NO: 149468 - DNA, 21 bp, Artificial sequence
  SiRNA target sequence
gaatacgagtttaatatttcg

SEQ ID NO: 149469 - DNA, 21 bp, Artificial sequence
  SiRNA target sequence
aatacgagtttaatatttcgt

SEQ ID NO: 149470 - DNA, 21 bp, Artificial sequence
  SiRNA target sequence
atacgagtttaatatttcgtt

SEQ ID NO: 149471 - DNA, 21 bp, Artificial sequence
  SiRNA target sequence
tacgagtttaatatttcgttg

SEQ ID NO: 149472 - DNA, 21 bp, Artificial sequence
  SiRNA target sequence
acgagtttaatatttcgttga

SEQ ID NO: 149473 - DNA, 21 bp, Artificial sequence
  SiRNA target sequence
cgagtttaatatttcgttgaa

SEQ ID NO: 149474 - DNA, 21 bp, Artificial sequence
  SiRNA target sequence
gagtttaatatttcgttgaag

SEQ ID NO: 149475 - DNA, 21 bp, Artificial sequence
  SiRNA target sequence
agtttaatatttcgttgaagg

SEQ ID NO: 149476 - DNA, 21 bp, Artificial sequence
  SiRNA target sequence
gtttaatatttcgttgaagga

SEQ ID NO: 149477 - DNA, 21 bp, Artificial sequence
  SiRNA target sequence
tttaatatttcgttgaaggaa

SEQ ID NO: 149478 - DNA, 21 bp, Artificial sequence
  SiRNA target sequence
ttaatatttcgttgaaggaag

SEQ ID NO: 149479 - DNA, 21 bp, Artificial sequence
  SiRNA target sequence
taatatttcgttgaaggaagc

SEQ ID NO: 149480 - DNA, 21 bp, Artificial sequence
  SiRNA target sequence
aatatttcgttgaaggaagct

SEQ ID NO: 149481 - DNA, 21 bp, Artificial sequence
  SiRNA target sequence
atatttcgttgaaggaagctt

SEQ ID NO: 149482 - DNA, 21 bp, Artificial sequence
  SiRNA target sequence
tatttcgttgaaggaagctta

SEQ ID NO: 149483 - DNA, 21 bp, Artificial sequence
  SiRNA target sequence
atttcgttgaaggaagcttat

SEQ ID NO: 149484 - DNA, 21 bp, Artificial sequence
  SiRNA target sequence
tttcgttgaaggaagcttata

SEQ ID NO: 149485 - DNA, 21 bp, Artificial sequence
  SiRNA target sequence
ttcgttgaaggaagcttatat

SEQ ID NO: 149486 - DNA, 21 bp, Artificial sequence
  SiRNA target sequence
tcgttgaaggaagcttatatg

SEQ ID NO: 149487 - DNA, 21 bp, Artificial sequence
  SiRNA target sequence
cgttgaaggaagcttatatgg

SEQ ID NO: 149488 - DNA, 21 bp, Artificial sequence
  SiRNA target sequence
gttgaaggaagcttatatggg

SEQ ID NO: 149489 - DNA, 21 bp, Artificial sequence
  SiRNA target sequence
ttgaaggaagcttatatggga

SEQ ID NO: 149490 - DNA, 21 bp, Artificial sequence
  SiRNA target sequence
tgaaggaagcttatatgggaa

SEQ ID NO: 149491 - DNA, 21 bp, Artificial sequence
  SiRNA target sequence
gaaggaagcttatatgggaaa

SEQ ID NO: 149492 - DNA, 21 bp, Artificial sequence
  SiRNA target sequence
aaggaagcttatatgggaaag

SEQ ID NO: 149493 - DNA, 21 bp, Artificial sequence
  SiRNA target sequence
aggaagcttatatgggaaagc

SEQ ID NO: 149494 - DNA, 21 bp, Artificial sequence
  SiRNA target sequence
ggaagcttatatgggaaagcg

SEQ ID NO: 149495 - DNA, 21 bp, Artificial sequence
  SiRNA target sequence
gaagcttatatgggaaagcga

SEQ ID NO: 149496 - DNA, 21 bp, Artificial sequence
  SiRNA target sequence
aagcttatatgggaaagcgag

SEQ ID NO: 149497 - DNA, 21 bp, Artificial sequence
  SiRNA target sequence
agcttatatgggaaagcgagc

SEQ ID NO: 149498 - DNA, 21 bp, Artificial sequence
  SiRNA target sequence
gcttatatgggaaagcgagct

SEQ ID NO: 149499 - DNA, 21 bp, Artificial sequence
  SiRNA target sequence
cttatatgggaaagcgagcta

SEQ ID NO: 149500 - DNA, 21 bp, Artificial sequence
  SiRNA target sequence
ttatatgggaaagcgagctag

SEQ ID NO: 149501 - DNA, 21 bp, Artificial sequence
  SiRNA target sequence
tatatgggaaagcgagctagt

SEQ ID NO: 149502 - DNA, 21 bp, Artificial sequence
  SiRNA target sequence
atatgggaaagcgagctagtt

SEQ ID NO: 149503 - DNA, 21 bp, Artificial sequence
  SiRNA target sequence
tatgggaaagcgagctagttt

SEQ ID NO: 149504 - DNA, 21 bp, Artificial sequence
  SiRNA target sequence
atgggaaagcgagctagtttt

SEQ ID NO: 149505 - DNA, 21 bp, Artificial sequence
  SiRNA target sequence
tgggaaagcgagctagtttta

SEQ ID NO: 149506 - DNA, 21 bp, Artificial sequence
  SiRNA target sequence
gggaaagcgagctagttttaa

SEQ ID NO: 149507 - DNA, 21 bp, Artificial sequence
  SiRNA target sequence
ggaaagcgagctagttttaat

SEQ ID NO: 149508 - DNA, 21 bp, Artificial sequence
  SiRNA target sequence
gaaagcgagctagttttaatg

SEQ ID NO: 149509 - DNA, 21 bp, Artificial sequence
  SiRNA target sequence
aaagcgagctagttttaatgt

SEQ ID NO: 149510 - DNA, 21 bp, Artificial sequence
  SiRNA target sequence
aagcgagctagttttaatgta

SEQ ID NO: 149511 - DNA, 21 bp, Artificial sequence
  SiRNA target sequence
agcgagctagttttaatgtaa

SEQ ID NO: 149512 - DNA, 21 bp, Artificial sequence
  SiRNA target sequence
gcgagctagttttaatgtaaa

SEQ ID NO: 149513 - DNA, 21 bp, Artificial sequence
  SiRNA target sequence
cgagctagttttaatgtaaaa

SEQ ID NO: 149514 - DNA, 21 bp, Artificial sequence
  SiRNA target sequence
gagctagttttaatgtaaaag

SEQ ID NO: 149515 - DNA, 21 bp, Artificial sequence
  SiRNA target sequence
agctagttttaatgtaaaagt

SEQ ID NO: 149516 - DNA, 21 bp, Artificial sequence
  SiRNA target sequence
gctagttttaatgtaaaagtg

SEQ ID NO: 149517 - DNA, 21 bp, Artificial sequence
  SiRNA target sequence
ctagttttaatgtaaaagtgc

SEQ ID NO: 149518 - DNA, 21 bp, Artificial sequence
  SiRNA target sequence
tagttttaatgtaaaagtgca

SEQ ID NO: 149519 - DNA, 21 bp, Artificial sequence
  SiRNA target sequence
agttttaatgtaaaagtgcaa

SEQ ID NO: 149520 - DNA, 21 bp, Artificial sequence
  SiRNA target sequence
gttttaatgtaaaagtgcaaa

SEQ ID NO: 149521 - DNA, 21 bp, Artificial sequence
  SiRNA target sequence
ttttaatgtaaaagtgcaaag

SEQ ID NO: 149522 - DNA, 21 bp, Artificial sequence
  SiRNA target sequence
tttaatgtaaaagtgcaaaga

SEQ ID NO: 149523 - DNA, 21 bp, Artificial sequence
  SiRNA target sequence
ttaatgtaaaagtgcaaagag

SEQ ID NO: 149524 - DNA, 21 bp, Artificial sequence
  SiRNA target sequence
taatgtaaaagtgcaaagaga

SEQ ID NO: 149525 - DNA, 21 bp, Artificial sequence
  SiRNA target sequence
aatgtaaaagtgcaaagagaa

SEQ ID NO: 149526 - DNA, 21 bp, Artificial sequence
  SiRNA target sequence
atgtaaaagtgcaaagagaat

SEQ ID NO: 149527 - DNA, 21 bp, Artificial sequence
  SiRNA target sequence
tgtaaaagtgcaaagagaatg

SEQ ID NO: 149528 - DNA, 21 bp, Artificial sequence
  SiRNA target sequence
gtaaaagtgcaaagagaatgt

SEQ ID NO: 149529 - DNA, 21 bp, Artificial sequence
  SiRNA target sequence
taaaagtgcaaagagaatgtt

SEQ ID NO: 149530 - DNA, 21 bp, Artificial sequence
  SiRNA target sequence
aaaagtgcaaagagaatgttc

SEQ ID NO: 149531 - DNA, 21 bp, Artificial sequence
  SiRNA target sequence
aaagtgcaaagagaatgttct

SEQ ID NO: 149532 - DNA, 21 bp, Artificial sequence
  SiRNA target sequence
aagtgcaaagagaatgttctg

SEQ ID NO: 149533 - DNA, 21 bp, Artificial sequence
  SiRNA target sequence
agtgcaaagagaatgttctgc

SEQ ID NO: 149534 - DNA, 21 bp, Artificial sequence
  SiRNA target sequence
gtgcaaagagaatgttctgcg

SEQ ID NO: 149535 - DNA, 21 bp, Artificial sequence
  SiRNA target sequence
tgcaaagagaatgttctgcgt

SEQ ID NO: 149536 - DNA, 21 bp, Artificial sequence
  SiRNA target sequence
gcaaagagaatgttctgcgtg

SEQ ID NO: 149537 - DNA, 21 bp, Artificial sequence
  SiRNA target sequence
caaagagaatgttctgcgtgt

SEQ ID NO: 149538 - DNA, 21 bp, Artificial sequence
  SiRNA target sequence
aaagagaatgttctgcgtgta

SEQ ID NO: 149539 - DNA, 21 bp, Artificial sequence
  SiRNA target sequence
aagagaatgttctgcgtgtaa

SEQ ID NO: 149540 - DNA, 21 bp, Artificial sequence
  SiRNA target sequence
agagaatgttctgcgtgtaac

SEQ ID NO: 149541 - DNA, 21 bp, Artificial sequence
  SiRNA target sequence
gagaatgttctgcgtgtaacg

SEQ ID NO: 149542 - DNA, 21 bp, Artificial sequence
  SiRNA target sequence
agaatgttctgcgtgtaacgg

SEQ ID NO: 149543 - DNA, 21 bp, Artificial sequence
  SiRNA target sequence
gaatgttctgcgtgtaacggt

SEQ ID NO: 149544 - DNA, 21 bp, Artificial sequence
  SiRNA target sequence
aatgttctgcgtgtaacggta

SEQ ID NO: 149545 - DNA, 21 bp, Artificial sequence
  SiRNA target sequence
atgttctgcgtgtaacggtaa

SEQ ID NO: 149546 - DNA, 21 bp, Artificial sequence
  SiRNA target sequence
tgttctgcgtgtaacggtaaa

SEQ ID NO: 149547 - DNA, 21 bp, Artificial sequence
  SiRNA target sequence
gttctgcgtgtaacggtaaag

SEQ ID NO: 149548 - DNA, 21 bp, Artificial sequence
  SiRNA target sequence
ttctgcgtgtaacggtaaagg

SEQ ID NO: 149549 - DNA, 21 bp, Artificial sequence
  SiRNA target sequence
tctgcgtgtaacggtaaagga

SEQ ID NO: 149550 - DNA, 21 bp, Artificial sequence
  SiRNA target sequence
ctgcgtgtaacggtaaaggag

SEQ ID NO: 149551 - DNA, 21 bp, Artificial sequence
  SiRNA target sequence
tgcgtgtaacggtaaaggagg

SEQ ID NO: 149552 - DNA, 21 bp, Artificial sequence
  SiRNA target sequence
gcgtgtaacggtaaaggagga

SEQ ID NO: 149553 - DNA, 21 bp, Artificial sequence
  SiRNA target sequence
cgtgtaacggtaaaggaggag

SEQ ID NO: 149554 - DNA, 21 bp, Artificial sequence
  SiRNA target sequence
gtgtaacggtaaaggaggaga

SEQ ID NO: 149555 - DNA, 21 bp, Artificial sequence
  SiRNA target sequence
tgtaacggtaaaggaggagac

SEQ ID NO: 149556 - DNA, 21 bp, Artificial sequence
  SiRNA target sequence
gtaacggtaaaggaggagaca

SEQ ID NO: 149557 - DNA, 21 bp, Artificial sequence
  SiRNA target sequence
taacggtaaaggaggagacag

SEQ ID NO: 149558 - DNA, 21 bp, Artificial sequence
  SiRNA target sequence
aacggtaaaggaggagacagt

SEQ ID NO: 149559 - DNA, 21 bp, Artificial sequence
  SiRNA target sequence
acggtaaaggaggagacagtg

SEQ ID NO: 149560 - DNA, 21 bp, Artificial sequence
  SiRNA target sequence
cggtaaaggaggagacagtgt

SEQ ID NO: 149561 - DNA, 21 bp, Artificial sequence
  SiRNA target sequence
ggtaaaggaggagacagtgtt

SEQ ID NO: 149562 - DNA, 21 bp, Artificial sequence
  SiRNA target sequence
gtaaaggaggagacagtgttg

SEQ ID NO: 149563 - DNA, 21 bp, Artificial sequence
  SiRNA target sequence
taaaggaggagacagtgttga

SEQ ID NO: 149564 - DNA, 21 bp, Artificial sequence
  SiRNA target sequence
aaaggaggagacagtgttgaa

SEQ ID NO: 149565 - DNA, 21 bp, Artificial sequence
  SiRNA target sequence
aaggaggagacagtgttgaaa

SEQ ID NO: 149566 - DNA, 21 bp, Artificial sequence
  SiRNA target sequence
aggaggagacagtgttgaaac

SEQ ID NO: 149567 - DNA, 21 bp, Artificial sequence
  SiRNA target sequence
ggaggagacagtgttgaaaca

SEQ ID NO: 149568 - DNA, 21 bp, Artificial sequence
  SiRNA target sequence
gaggagacagtgttgaaacat

SEQ ID NO: 149569 - DNA, 21 bp, Artificial sequence
  SiRNA target sequence
aggagacagtgttgaaacatg

SEQ ID NO: 149570 - DNA, 21 bp, Artificial sequence
  SiRNA target sequence
ggagacagtgttgaaacatgt

SEQ ID NO: 149571 - DNA, 21 bp, Artificial sequence
  SiRNA target sequence
gagacagtgttgaaacatgtg

SEQ ID NO: 149572 - DNA, 21 bp, Artificial sequence
  SiRNA target sequence
agacagtgttgaaacatgtga

SEQ ID NO: 149573 - DNA, 21 bp, Artificial sequence
  SiRNA target sequence
gacagtgttgaaacatgtgaa

SEQ ID NO: 149574 - DNA, 21 bp, Artificial sequence
  SiRNA target sequence
acagtgttgaaacatgtgaac

SEQ ID NO: 149575 - DNA, 21 bp, Artificial sequence
  SiRNA target sequence
cagtgttgaaacatgtgaacc

SEQ ID NO: 149576 - DNA, 21 bp, Artificial sequence
  SiRNA target sequence
agtgttgaaacatgtgaacca

SEQ ID NO: 149577 - DNA, 21 bp, Artificial sequence
  SiRNA target sequence
gtgttgaaacatgtgaaccat

SEQ ID NO: 149578 - DNA, 21 bp, Artificial sequence
  SiRNA target sequence
tgttgaaacatgtgaaccatg

SEQ ID NO: 149579 - DNA, 21 bp, Artificial sequence
  SiRNA target sequence
gttgaaacatgtgaaccatgt

SEQ ID NO: 149580 - DNA, 21 bp, Artificial sequence
  SiRNA target sequence
ttgaaacatgtgaaccatgta

SEQ ID NO: 149581 - DNA, 21 bp, Artificial sequence
  SiRNA target sequence
tgaaacatgtgaaccatgtaa

SEQ ID NO: 149582 - DNA, 21 bp, Artificial sequence
  SiRNA target sequence
gaaacatgtgaaccatgtaaa

SEQ ID NO: 149583 - DNA, 21 bp, Artificial sequence
  SiRNA target sequence
aaacatgtgaaccatgtaaag

SEQ ID NO: 149584 - DNA, 21 bp, Artificial sequence
  SiRNA target sequence
aacatgtgaaccatgtaaagg

SEQ ID NO: 149585 - DNA, 21 bp, Artificial sequence
  SiRNA target sequence
acatgtgaaccatgtaaaggt

SEQ ID NO: 149586 - DNA, 21 bp, Artificial sequence
  SiRNA target sequence
catgtgaaccatgtaaaggta

SEQ ID NO: 149587 - DNA, 21 bp, Artificial sequence
  SiRNA target sequence
atgtgaaccatgtaaaggtaa

SEQ ID NO: 149588 - DNA, 21 bp, Artificial sequence
  SiRNA target sequence
tgtgaaccatgtaaaggtaaa

SEQ ID NO: 149589 - DNA, 21 bp, Artificial sequence
  SiRNA target sequence
gtgaaccatgtaaaggtaaag

SEQ ID NO: 149590 - DNA, 21 bp, Artificial sequence
  SiRNA target sequence
tgaaccatgtaaaggtaaagg

SEQ ID NO: 149591 - DNA, 21 bp, Artificial sequence
  SiRNA target sequence
gaaccatgtaaaggtaaaggt

SEQ ID NO: 149592 - DNA, 21 bp, Artificial sequence
  SiRNA target sequence
aaccatgtaaaggtaaaggta

SEQ ID NO: 149593 - DNA, 21 bp, Artificial sequence
  SiRNA target sequence
accatgtaaaggtaaaggtaa

SEQ ID NO: 149594 - DNA, 21 bp, Artificial sequence
  SiRNA target sequence
ccatgtaaaggtaaaggtaag

SEQ ID NO: 149595 - DNA, 21 bp, Artificial sequence
  SiRNA target sequence
catgtaaaggtaaaggtaagg

SEQ ID NO: 149596 - DNA, 21 bp, Artificial sequence
  SiRNA target sequence
atgtaaaggtaaaggtaaggt

SEQ ID NO: 149597 - DNA, 21 bp, Artificial sequence
  SiRNA target sequence
tgtaaaggtaaaggtaaggta

SEQ ID NO: 149598 - DNA, 21 bp, Artificial sequence
  SiRNA target sequence
gtaaaggtaaaggtaaggtag

SEQ ID NO: 149599 - DNA, 21 bp, Artificial sequence
  SiRNA target sequence
taaaggtaaaggtaaggtaga

SEQ ID NO: 149600 - DNA, 21 bp, Artificial sequence
  SiRNA target sequence
aaaggtaaaggtaaggtagaa

SEQ ID NO: 149601 - DNA, 21 bp, Artificial sequence
  SiRNA target sequence
aaggtaaaggtaaggtagaac

SEQ ID NO: 149602 - DNA, 21 bp, Artificial sequence
  SiRNA target sequence
aggtaaaggtaaggtagaaca

SEQ ID NO: 149603 - DNA, 21 bp, Artificial sequence
  SiRNA target sequence
ggtaaaggtaaggtagaacat

SEQ ID NO: 149604 - DNA, 21 bp, Artificial sequence
  SiRNA target sequence
gtaaaggtaaggtagaacatc

SEQ ID NO: 149605 - DNA, 21 bp, Artificial sequence
  SiRNA target sequence
taaaggtaaggtagaacatca

SEQ ID NO: 149606 - DNA, 21 bp, Artificial sequence
  SiRNA target sequence
aaaggtaaggtagaacatcat

SEQ ID NO: 149607 - DNA, 21 bp, Artificial sequence
  SiRNA target sequence
aaggtaaggtagaacatcata

SEQ ID NO: 149608 - DNA, 21 bp, Artificial sequence
  SiRNA target sequence
aggtaaggtagaacatcatag

SEQ ID NO: 149609 - DNA, 21 bp, Artificial sequence
  SiRNA target sequence
ggtaaggtagaacatcatagg

SEQ ID NO: 149610 - DNA, 21 bp, Artificial sequence
  SiRNA target sequence
gtaaggtagaacatcatagga

SEQ ID NO: 149611 - DNA, 21 bp, Artificial sequence
  SiRNA target sequence
taaggtagaacatcataggag

SEQ ID NO: 149612 - DNA, 21 bp, Artificial sequence
  SiRNA target sequence
aaggtagaacatcataggaga

SEQ ID NO: 149613 - DNA, 21 bp, Artificial sequence
  SiRNA target sequence
aggtagaacatcataggagac

SEQ ID NO: 149614 - DNA, 21 bp, Artificial sequence
  SiRNA target sequence
ggtagaacatcataggagact

SEQ ID NO: 149615 - DNA, 21 bp, Artificial sequence
  SiRNA target sequence
gtagaacatcataggagacta

SEQ ID NO: 149616 - DNA, 21 bp, Artificial sequence
  SiRNA target sequence
tagaacatcataggagactag

SEQ ID NO: 149617 - DNA, 21 bp, Artificial sequence
  SiRNA target sequence
agaacatcataggagactagg

SEQ ID NO: 149618 - DNA, 21 bp, Artificial sequence
  SiRNA target sequence
gaacatcataggagactaggt

SEQ ID NO: 149619 - DNA, 21 bp, Artificial sequence
  SiRNA target sequence
aacatcataggagactaggtc

SEQ ID NO: 149620 - DNA, 21 bp, Artificial sequence
  SiRNA target sequence
acatcataggagactaggtcc

SEQ ID NO: 149621 - DNA, 21 bp, Artificial sequence
  SiRNA target sequence
catcataggagactaggtcct

SEQ ID NO: 149622 - DNA, 21 bp, Artificial sequence
  SiRNA target sequence
atcataggagactaggtcctt

SEQ ID NO: 149623 - DNA, 21 bp, Artificial sequence
  SiRNA target sequence
tcataggagactaggtccttt

SEQ ID NO: 149624 - DNA, 21 bp, Artificial sequence
  SiRNA target sequence
cataggagactaggtccttta

SEQ ID NO: 149625 - DNA, 21 bp, Artificial sequence
  SiRNA target sequence
ataggagactaggtcctttaa

SEQ ID NO: 149626 - DNA, 21 bp, Artificial sequence
  SiRNA target sequence
taggagactaggtcctttaat

SEQ ID NO: 149627 - DNA, 21 bp, Artificial sequence
  SiRNA target sequence
aggagactaggtcctttaatt

SEQ ID NO: 149628 - DNA, 21 bp, Artificial sequence
  SiRNA target sequence
ggagactaggtcctttaattt

SEQ ID NO: 149629 - DNA, 21 bp, Artificial sequence
  SiRNA target sequence
gagactaggtcctttaatttc

SEQ ID NO: 149630 - DNA, 21 bp, Artificial sequence
  SiRNA target sequence
agactaggtcctttaatttct

SEQ ID NO: 149631 - DNA, 21 bp, Artificial sequence
  SiRNA target sequence
gactaggtcctttaatttctg

SEQ ID NO: 149632 - DNA, 21 bp, Artificial sequence
  SiRNA target sequence
actaggtcctttaatttctgt

SEQ ID NO: 149633 - DNA, 21 bp, Artificial sequence
  SiRNA target sequence
ctaggtcctttaatttctgta

SEQ ID NO: 149634 - DNA, 21 bp, Artificial sequence
  SiRNA target sequence
taggtcctttaatttctgtac

SEQ ID NO: 149635 - DNA, 21 bp, Artificial sequence
  SiRNA target sequence
aggtcctttaatttctgtaca

SEQ ID NO: 149636 - DNA, 21 bp, Artificial sequence
  SiRNA target sequence
ggtcctttaatttctgtacaa

SEQ ID NO: 149637 - DNA, 21 bp, Artificial sequence
  SiRNA target sequence
gtcctttaatttctgtacaag

SEQ ID NO: 149638 - DNA, 21 bp, Artificial sequence
  SiRNA target sequence
tcctttaatttctgtacaaga

SEQ ID NO: 149639 - DNA, 21 bp, Artificial sequence
  SiRNA target sequence
cctttaatttctgtacaagaa

SEQ ID NO: 149640 - DNA, 21 bp, Artificial sequence
  SiRNA target sequence
ctttaatttctgtacaagaag

SEQ ID NO: 149641 - DNA, 21 bp, Artificial sequence
  SiRNA target sequence
tttaatttctgtacaagaagc

SEQ ID NO: 149642 - DNA, 21 bp, Artificial sequence
  SiRNA target sequence
ttaatttctgtacaagaagca

SEQ ID NO: 149643 - DNA, 21 bp, Artificial sequence
  SiRNA target sequence
taatttctgtacaagaagcac

SEQ ID NO: 149644 - DNA, 21 bp, Artificial sequence
  SiRNA target sequence
aatttctgtacaagaagcacc

SEQ ID NO: 149645 - DNA, 21 bp, Artificial sequence
  SiRNA target sequence
atttctgtacaagaagcacct

SEQ ID NO: 149646 - DNA, 21 bp, Artificial sequence
  SiRNA target sequence
tttctgtacaagaagcacctt

SEQ ID NO: 149647 - DNA, 21 bp, Artificial sequence
  SiRNA target sequence
ttctgtacaagaagcaccttg

SEQ ID NO: 149648 - DNA, 21 bp, Artificial sequence
  SiRNA target sequence
tctgtacaagaagcaccttgt

SEQ ID NO: 149649 - DNA, 21 bp, Artificial sequence
  SiRNA target sequence
ctgtacaagaagcaccttgta

SEQ ID NO: 149650 - DNA, 21 bp, Artificial sequence
  SiRNA target sequence
tgtacaagaagcaccttgtaa

SEQ ID NO: 149651 - DNA, 21 bp, Artificial sequence
  SiRNA target sequence
gtacaagaagcaccttgtaat

SEQ ID NO: 149652 - DNA, 21 bp, Artificial sequence
  SiRNA target sequence
tacaagaagcaccttgtaata

SEQ ID NO: 149653 - DNA, 21 bp, Artificial sequence
  SiRNA target sequence
acaagaagcaccttgtaataa

SEQ ID NO: 149654 - DNA, 21 bp, Artificial sequence
  SiRNA target sequence
caagaagcaccttgtaataat

SEQ ID NO: 149655 - DNA, 21 bp, Artificial sequence
  SiRNA target sequence
aagaagcaccttgtaataatt

SEQ ID NO: 149656 - DNA, 21 bp, Artificial sequence
  SiRNA target sequence
agaagcaccttgtaataattg

SEQ ID NO: 149657 - DNA, 21 bp, Artificial sequence
  SiRNA target sequence
gaagcaccttgtaataattgt

SEQ ID NO: 149658 - DNA, 21 bp, Artificial sequence
  SiRNA target sequence
aagcaccttgtaataattgta

SEQ ID NO: 149659 - DNA, 21 bp, Artificial sequence
  SiRNA target sequence
agcaccttgtaataattgtaa

SEQ ID NO: 149660 - DNA, 21 bp, Artificial sequence
  SiRNA target sequence
gcaccttgtaataattgtaat

SEQ ID NO: 149661 - DNA, 21 bp, Artificial sequence
  SiRNA target sequence
caccttgtaataattgtaatt

SEQ ID NO: 149662 - DNA, 21 bp, Artificial sequence
  SiRNA target sequence
accttgtaataattgtaattc

SEQ ID NO: 149663 - DNA, 21 bp, Artificial sequence
  SiRNA target sequence
ccttgtaataattgtaattct

SEQ ID NO: 149664 - DNA, 21 bp, Artificial sequence
  SiRNA target sequence
cttgtaataattgtaattcta

SEQ ID NO: 149665 - DNA, 21 bp, Artificial sequence
  SiRNA target sequence
ttgtaataattgtaattctac

SEQ ID NO: 149666 - DNA, 21 bp, Artificial sequence
  SiRNA target sequence
tgtaataattgtaattctact

SEQ ID NO: 149667 - DNA, 21 bp, Artificial sequence
  SiRNA target sequence
gtaataattgtaattctactg

SEQ ID NO: 149668 - DNA, 21 bp, Artificial sequence
  SiRNA target sequence
taataattgtaattctactgg

SEQ ID NO: 149669 - DNA, 21 bp, Artificial sequence
  SiRNA target sequence
aataattgtaattctactgga

SEQ ID NO: 149670 - DNA, 21 bp, Artificial sequence
  SiRNA target sequence
ataattgtaattctactggat

SEQ ID NO: 149671 - DNA, 21 bp, Artificial sequence
  SiRNA target sequence
taattgtaattctactggatt

SEQ ID NO: 149672 - DNA, 21 bp, Artificial sequence
  SiRNA target sequence
aattgtaattctactggattt

SEQ ID NO: 149673 - DNA, 21 bp, Artificial sequence
  SiRNA target sequence
attgtaattctactggatttg

SEQ ID NO: 149674 - DNA, 21 bp, Artificial sequence
  SiRNA target sequence
ttgtaattctactggatttgt

SEQ ID NO: 149675 - DNA, 21 bp, Artificial sequence
  SiRNA target sequence
tgtaattctactggatttgtt

SEQ ID NO: 149676 - DNA, 21 bp, Artificial sequence
  SiRNA target sequence
gtaattctactggatttgttg

SEQ ID NO: 149677 - DNA, 21 bp, Artificial sequence
  SiRNA target sequence
taattctactggatttgttgt

SEQ ID NO: 149678 - DNA, 21 bp, Artificial sequence
  SiRNA target sequence
aattctactggatttgttgtt

SEQ ID NO: 149679 - DNA, 21 bp, Artificial sequence
  SiRNA target sequence
attctactggatttgttgtta

SEQ ID NO: 149680 - DNA, 21 bp, Artificial sequence
  SiRNA target sequence
ttctactggatttgttgttaa

SEQ ID NO: 149681 - DNA, 21 bp, Artificial sequence
  SiRNA target sequence
tctactggatttgttgttaaa

SEQ ID NO: 149682 - DNA, 21 bp, Artificial sequence
  SiRNA target sequence
ctactggatttgttgttaaag

SEQ ID NO: 149683 - DNA, 21 bp, Artificial sequence
  SiRNA target sequence
tactggatttgttgttaaagg

SEQ ID NO: 149684 - DNA, 21 bp, Artificial sequence
  SiRNA target sequence
actggatttgttgttaaagga

SEQ ID NO: 149685 - DNA, 21 bp, Artificial sequence
  SiRNA target sequence
ctggatttgttgttaaaggaa

SEQ ID NO: 149686 - DNA, 21 bp, Artificial sequence
  SiRNA target sequence
tggatttgttgttaaaggaaa

SEQ ID NO: 149687 - DNA, 21 bp, Artificial sequence
  SiRNA target sequence
ggatttgttgttaaaggaaag

SEQ ID NO: 149688 - DNA, 21 bp, Artificial sequence
  SiRNA target sequence
gatttgttgttaaaggaaagc

SEQ ID NO: 149689 - DNA, 21 bp, Artificial sequence
  SiRNA target sequence
atttgttgttaaaggaaagct

SEQ ID NO: 149690 - DNA, 21 bp, Artificial sequence
  SiRNA target sequence
tttgttgttaaaggaaagctt

SEQ ID NO: 149691 - DNA, 21 bp, Artificial sequence
  SiRNA target sequence
ttgttgttaaaggaaagcttt

SEQ ID NO: 149692 - DNA, 21 bp, Artificial sequence
  SiRNA target sequence
tgttgttaaaggaaagctttg

SEQ ID NO: 149693 - DNA, 21 bp, Artificial sequence
  SiRNA target sequence
gttgttaaaggaaagctttgt

SEQ ID NO: 149694 - DNA, 21 bp, Artificial sequence
  SiRNA target sequence
ttgttaaaggaaagctttgtc

SEQ ID NO: 149695 - DNA, 21 bp, Artificial sequence
  SiRNA target sequence
tgttaaaggaaagctttgtca

SEQ ID NO: 149696 - DNA, 21 bp, Artificial sequence
  SiRNA target sequence
gttaaaggaaagctttgtcaa

SEQ ID NO: 149697 - DNA, 21 bp, Artificial sequence
  SiRNA target sequence
ttaaaggaaagctttgtcaaa

SEQ ID NO: 149698 - DNA, 21 bp, Artificial sequence
  SiRNA target sequence
taaaggaaagctttgtcaaag

SEQ ID NO: 149699 - DNA, 21 bp, Artificial sequence
  SiRNA target sequence
aaaggaaagctttgtcaaagt

SEQ ID NO: 149700 - DNA, 21 bp, Artificial sequence
  SiRNA target sequence
aaggaaagctttgtcaaagtt

SEQ ID NO: 149701 - DNA, 21 bp, Artificial sequence
  SiRNA target sequence
aggaaagctttgtcaaagttg

SEQ ID NO: 149702 - DNA, 21 bp, Artificial sequence
  SiRNA target sequence
ggaaagctttgtcaaagttgt

SEQ ID NO: 149703 - DNA, 21 bp, Artificial sequence
  SiRNA target sequence
gaaagctttgtcaaagttgta

SEQ ID NO: 149704 - DNA, 21 bp, Artificial sequence
  SiRNA target sequence
aaagctttgtcaaagttgtaa

SEQ ID NO: 149705 - DNA, 21 bp, Artificial sequence
  SiRNA target sequence
aagctttgtcaaagttgtaaa

SEQ ID NO: 149706 - DNA, 21 bp, Artificial sequence
  SiRNA target sequence
agctttgtcaaagttgtaaag

SEQ ID NO: 149707 - DNA, 21 bp, Artificial sequence
  SiRNA target sequence
gctttgtcaaagttgtaaagg

SEQ ID NO: 149708 - DNA, 21 bp, Artificial sequence
  SiRNA target sequence
ctttgtcaaagttgtaaaggt

SEQ ID NO: 149709 - DNA, 21 bp, Artificial sequence
  SiRNA target sequence
tttgtcaaagttgtaaaggta

SEQ ID NO: 149710 - DNA, 21 bp, Artificial sequence
  SiRNA target sequence
ttgtcaaagttgtaaaggtaa

SEQ ID NO: 149711 - DNA, 21 bp, Artificial sequence
  SiRNA target sequence
tgtcaaagttgtaaaggtaaa

SEQ ID NO: 149712 - DNA, 21 bp, Artificial sequence
  SiRNA target sequence
gtcaaagttgtaaaggtaaac

SEQ ID NO: 149713 - DNA, 21 bp, Artificial sequence
  SiRNA target sequence
tcaaagttgtaaaggtaaaca

SEQ ID NO: 149714 - DNA, 21 bp, Artificial sequence
  SiRNA target sequence
caaagttgtaaaggtaaacaa

SEQ ID NO: 149715 - DNA, 21 bp, Artificial sequence
  SiRNA target sequence
aaagttgtaaaggtaaacaat

SEQ ID NO: 149716 - DNA, 21 bp, Artificial sequence
  SiRNA target sequence
aagttgtaaaggtaaacaata

SEQ ID NO: 149717 - DNA, 21 bp, Artificial sequence
  SiRNA target sequence
agttgtaaaggtaaacaatac

SEQ ID NO: 149718 - DNA, 21 bp, Artificial sequence
  SiRNA target sequence
gttgtaaaggtaaacaatacg

SEQ ID NO: 149719 - DNA, 21 bp, Artificial sequence
  SiRNA target sequence
ttgtaaaggtaaacaatacgt

SEQ ID NO: 149720 - DNA, 21 bp, Artificial sequence
  SiRNA target sequence
tgtaaaggtaaacaatacgtt

SEQ ID NO: 149721 - DNA, 21 bp, Artificial sequence
  SiRNA target sequence
gtaaaggtaaacaatacgttg

SEQ ID NO: 149722 - DNA, 21 bp, Artificial sequence
  SiRNA target sequence
taaaggtaaacaatacgttga

SEQ ID NO: 149723 - DNA, 21 bp, Artificial sequence
  SiRNA target sequence
aaaggtaaacaatacgttgag

SEQ ID NO: 149724 - DNA, 21 bp, Artificial sequence
  SiRNA target sequence
aaggtaaacaatacgttgaga

SEQ ID NO: 149725 - DNA, 21 bp, Artificial sequence
  SiRNA target sequence
aggtaaacaatacgttgagac

SEQ ID NO: 149726 - DNA, 21 bp, Artificial sequence
  SiRNA target sequence
ggtaaacaatacgttgagact

SEQ ID NO: 149727 - DNA, 21 bp, Artificial sequence
  SiRNA target sequence
gtaaacaatacgttgagacta

SEQ ID NO: 149728 - DNA, 21 bp, Artificial sequence
  SiRNA target sequence
taaacaatacgttgagactaa

SEQ ID NO: 149729 - DNA, 21 bp, Artificial sequence
  SiRNA target sequence
aaacaatacgttgagactaaa

SEQ ID NO: 149730 - DNA, 21 bp, Artificial sequence
  SiRNA target sequence
aacaatacgttgagactaaag

SEQ ID NO: 149731 - DNA, 21 bp, Artificial sequence
  SiRNA target sequence
acaatacgttgagactaaaga

SEQ ID NO: 149732 - DNA, 21 bp, Artificial sequence
  SiRNA target sequence
caatacgttgagactaaagaa

SEQ ID NO: 149733 - DNA, 21 bp, Artificial sequence
  SiRNA target sequence
aatacgttgagactaaagaac

SEQ ID NO: 149734 - DNA, 21 bp, Artificial sequence
  SiRNA target sequence
atacgttgagactaaagaaca

SEQ ID NO: 149735 - DNA, 21 bp, Artificial sequence
  SiRNA target sequence
tacgttgagactaaagaacat

SEQ ID NO: 149736 - DNA, 21 bp, Artificial sequence
  SiRNA target sequence
acgttgagactaaagaacata

SEQ ID NO: 149737 - DNA, 21 bp, Artificial sequence
  SiRNA target sequence
cgttgagactaaagaacatat

SEQ ID NO: 149738 - DNA, 21 bp, Artificial sequence
  SiRNA target sequence
gttgagactaaagaacatatt

SEQ ID NO: 149739 - DNA, 21 bp, Artificial sequence
  SiRNA target sequence
ttgagactaaagaacatattg

SEQ ID NO: 149740 - DNA, 21 bp, Artificial sequence
  SiRNA target sequence
tgagactaaagaacatattga

SEQ ID NO: 149741 - DNA, 21 bp, Artificial sequence
  SiRNA target sequence
gagactaaagaacatattgaa

SEQ ID NO: 149742 - DNA, 21 bp, Artificial sequence
  SiRNA target sequence
agactaaagaacatattgaag

SEQ ID NO: 149743 - DNA, 21 bp, Artificial sequence
  SiRNA target sequence
gactaaagaacatattgaagt

SEQ ID NO: 149744 - DNA, 21 bp, Artificial sequence
  SiRNA target sequence
actaaagaacatattgaagtg

SEQ ID NO: 149745 - DNA, 21 bp, Artificial sequence
  SiRNA target sequence
ctaaagaacatattgaagtgg

SEQ ID NO: 149746 - DNA, 21 bp, Artificial sequence
  SiRNA target sequence
taaagaacatattgaagtgga

SEQ ID NO: 149747 - DNA, 21 bp, Artificial sequence
  SiRNA target sequence
aaagaacatattgaagtggaa

SEQ ID NO: 149748 - DNA, 21 bp, Artificial sequence
  SiRNA target sequence
aagaacatattgaagtggaag

SEQ ID NO: 149749 - DNA, 21 bp, Artificial sequence
  SiRNA target sequence
agaacatattgaagtggaagt

SEQ ID NO: 149750 - DNA, 21 bp, Artificial sequence
  SiRNA target sequence
gaacatattgaagtggaagta

SEQ ID NO: 149751 - DNA, 21 bp, Artificial sequence
  SiRNA target sequence
aacatattgaagtggaagtag

SEQ ID NO: 149752 - DNA, 21 bp, Artificial sequence
  SiRNA target sequence
acatattgaagtggaagtaga

SEQ ID NO: 149753 - DNA, 21 bp, Artificial sequence
  SiRNA target sequence
catattgaagtggaagtagag

SEQ ID NO: 149754 - DNA, 21 bp, Artificial sequence
  SiRNA target sequence
atattgaagtggaagtagagc

SEQ ID NO: 149755 - DNA, 21 bp, Artificial sequence
  SiRNA target sequence
tattgaagtggaagtagagcc

SEQ ID NO: 149756 - DNA, 21 bp, Artificial sequence
  SiRNA target sequence
attgaagtggaagtagagcca

SEQ ID NO: 149757 - DNA, 21 bp, Artificial sequence
  SiRNA target sequence
ttgaagtggaagtagagccag

SEQ ID NO: 149758 - DNA, 21 bp, Artificial sequence
  SiRNA target sequence
tgaagtggaagtagagccagg

SEQ ID NO: 149759 - DNA, 21 bp, Artificial sequence
  SiRNA target sequence
gaagtggaagtagagccagga

SEQ ID NO: 149760 - DNA, 21 bp, Artificial sequence
  SiRNA target sequence
aagtggaagtagagccaggag

SEQ ID NO: 149761 - DNA, 21 bp, Artificial sequence
  SiRNA target sequence
agtggaagtagagccaggagt

SEQ ID NO: 149762 - DNA, 21 bp, Artificial sequence
  SiRNA target sequence
gtggaagtagagccaggagta

SEQ ID NO: 149763 - DNA, 21 bp, Artificial sequence
  SiRNA target sequence
tggaagtagagccaggagtac

SEQ ID NO: 149764 - DNA, 21 bp, Artificial sequence
  SiRNA target sequence
ggaagtagagccaggagtaca

SEQ ID NO: 149765 - DNA, 21 bp, Artificial sequence
  SiRNA target sequence
gaagtagagccaggagtacag

SEQ ID NO: 149766 - DNA, 21 bp, Artificial sequence
  SiRNA target sequence
aagtagagccaggagtacaga

SEQ ID NO: 149767 - DNA, 21 bp, Artificial sequence
  SiRNA target sequence
agtagagccaggagtacagaa

SEQ ID NO: 149768 - DNA, 21 bp, Artificial sequence
  SiRNA target sequence
gtagagccaggagtacagaac

SEQ ID NO: 149769 - DNA, 21 bp, Artificial sequence
  SiRNA target sequence
tagagccaggagtacagaacg

SEQ ID NO: 149770 - DNA, 21 bp, Artificial sequence
  SiRNA target sequence
agagccaggagtacagaacgg

SEQ ID NO: 149771 - DNA, 21 bp, Artificial sequence
  SiRNA target sequence
gagccaggagtacagaacggt

SEQ ID NO: 149772 - DNA, 21 bp, Artificial sequence
  SiRNA target sequence
agccaggagtacagaacggta

SEQ ID NO: 149773 - DNA, 21 bp, Artificial sequence
  SiRNA target sequence
gccaggagtacagaacggtag

SEQ ID NO: 149774 - DNA, 21 bp, Artificial sequence
  SiRNA target sequence
ccaggagtacagaacggtaga

SEQ ID NO: 149775 - DNA, 21 bp, Artificial sequence
  SiRNA target sequence
caggagtacagaacggtagaa

SEQ ID NO: 149776 - DNA, 21 bp, Artificial sequence
  SiRNA target sequence
aggagtacagaacggtagaaa

SEQ ID NO: 149777 - DNA, 21 bp, Artificial sequence
  SiRNA target sequence
ggagtacagaacggtagaaaa

SEQ ID NO: 149778 - DNA, 21 bp, Artificial sequence
  SiRNA target sequence
gagtacagaacggtagaaaat

SEQ ID NO: 149779 - DNA, 21 bp, Artificial sequence
  SiRNA target sequence
agtacagaacggtagaaaata

SEQ ID NO: 149780 - DNA, 21 bp, Artificial sequence
  SiRNA target sequence
gtacagaacggtagaaaatat

SEQ ID NO: 149781 - DNA, 21 bp, Artificial sequence
  SiRNA target sequence
tacagaacggtagaaaatata

SEQ ID NO: 149782 - DNA, 21 bp, Artificial sequence
  SiRNA target sequence
acagaacggtagaaaatatac

SEQ ID NO: 149783 - DNA, 21 bp, Artificial sequence
  SiRNA target sequence
cagaacggtagaaaatataca

SEQ ID NO: 149784 - DNA, 21 bp, Artificial sequence
  SiRNA target sequence
agaacggtagaaaatatacat

SEQ ID NO: 149785 - DNA, 21 bp, Artificial sequence
  SiRNA target sequence
gaacggtagaaaatatacatt

SEQ ID NO: 149786 - DNA, 21 bp, Artificial sequence
  SiRNA target sequence
aacggtagaaaatatacattt

SEQ ID NO: 149787 - DNA, 21 bp, Artificial sequence
  SiRNA target sequence
acggtagaaaatatacatttt

SEQ ID NO: 149788 - DNA, 21 bp, Artificial sequence
  SiRNA target sequence
cggtagaaaatatacattttc

SEQ ID NO: 149789 - DNA, 21 bp, Artificial sequence
  SiRNA target sequence
ggtagaaaatatacattttct

SEQ ID NO: 149790 - DNA, 21 bp, Artificial sequence
  SiRNA target sequence
gtagaaaatatacattttctg

SEQ ID NO: 149791 - DNA, 21 bp, Artificial sequence
  SiRNA target sequence
tagaaaatatacattttctgg

SEQ ID NO: 149792 - DNA, 21 bp, Artificial sequence
  SiRNA target sequence
agaaaatatacattttctggc

SEQ ID NO: 149793 - DNA, 21 bp, Artificial sequence
  SiRNA target sequence
gaaaatatacattttctggca

SEQ ID NO: 149794 - DNA, 21 bp, Artificial sequence
  SiRNA target sequence
aaaatatacattttctggcaa

SEQ ID NO: 149795 - DNA, 21 bp, Artificial sequence
  SiRNA target sequence
aaatatacattttctggcaaa

SEQ ID NO: 149796 - DNA, 21 bp, Artificial sequence
  SiRNA target sequence
aatatacattttctggcaaag

SEQ ID NO: 149797 - DNA, 21 bp, Artificial sequence
  SiRNA target sequence
atatacattttctggcaaagg

SEQ ID NO: 149798 - DNA, 21 bp, Artificial sequence
  SiRNA target sequence
tatacattttctggcaaagga

SEQ ID NO: 149799 - DNA, 21 bp, Artificial sequence
  SiRNA target sequence
atacattttctggcaaaggaa

SEQ ID NO: 149800 - DNA, 21 bp, Artificial sequence
  SiRNA target sequence
tacattttctggcaaaggaaa

SEQ ID NO: 149801 - DNA, 21 bp, Artificial sequence
  SiRNA target sequence
acattttctggcaaaggaaat

SEQ ID NO: 149802 - DNA, 21 bp, Artificial sequence
  SiRNA target sequence
cattttctggcaaaggaaatc

SEQ ID NO: 149803 - DNA, 21 bp, Artificial sequence
  SiRNA target sequence
attttctggcaaaggaaatca

SEQ ID NO: 149804 - DNA, 21 bp, Artificial sequence
  SiRNA target sequence
ttttctggcaaaggaaatcat

SEQ ID NO: 149805 - DNA, 21 bp, Artificial sequence
  SiRNA target sequence
tttctggcaaaggaaatcata

SEQ ID NO: 149806 - DNA, 21 bp, Artificial sequence
  SiRNA target sequence
ttctggcaaaggaaatcataa

SEQ ID NO: 149807 - DNA, 21 bp, Artificial sequence
  SiRNA target sequence
tctggcaaaggaaatcataaa

SEQ ID NO: 149808 - DNA, 21 bp, Artificial sequence
  SiRNA target sequence
ctggcaaaggaaatcataaaa

SEQ ID NO: 149809 - DNA, 21 bp, Artificial sequence
  SiRNA target sequence
tggcaaaggaaatcataaaaa

SEQ ID NO: 149810 - DNA, 21 bp, Artificial sequence
  SiRNA target sequence
ggcaaaggaaatcataaaaaa

SEQ ID NO: 149811 - DNA, 21 bp, Artificial sequence
  SiRNA target sequence
gcaaaggaaatcataaaaaaa

SEQ ID NO: 149812 - DNA, 21 bp, Artificial sequence
  SiRNA target sequence
caaaggaaatcataaaaaaaa

SEQ ID NO: 149813 - DNA, 21 bp, Artificial sequence
  SiRNA target sequence
aaaggaaatcataaaaaaaat

SEQ ID NO: 149814 - DNA, 21 bp, Artificial sequence
  SiRNA target sequence
aaggaaatcataaaaaaaatt

SEQ ID NO: 149815 - DNA, 21 bp, Artificial sequence
  SiRNA target sequence
aggaaatcataaaaaaaattg

SEQ ID NO: 149816 - DNA, 21 bp, Artificial sequence
  SiRNA target sequence
ggaaatcataaaaaaaattgt

SEQ ID NO: 149817 - DNA, 21 bp, Artificial sequence
  SiRNA target sequence
gaaatcataaaaaaaattgtg

SEQ ID NO: 149818 - DNA, 21 bp, Artificial sequence
  SiRNA target sequence
aaatcataaaaaaaattgtgt

SEQ ID NO: 149819 - DNA, 21 bp, Artificial sequence
  SiRNA target sequence
aatcataaaaaaaattgtgta

SEQ ID NO: 149820 - DNA, 21 bp, Artificial sequence
  SiRNA target sequence
atcataaaaaaaattgtgtac

SEQ ID NO: 149821 - DNA, 21 bp, Artificial sequence
  SiRNA target sequence
tcataaaaaaaattgtgtacc

SEQ ID NO: 149822 - DNA, 21 bp, Artificial sequence
  SiRNA target sequence
cataaaaaaaattgtgtaccg

SEQ ID NO: 149823 - DNA, 21 bp, Artificial sequence
  SiRNA target sequence
ataaaaaaaattgtgtaccgg

SEQ ID NO: 149824 - DNA, 21 bp, Artificial sequence
  SiRNA target sequence
taaaaaaaattgtgtaccggg

SEQ ID NO: 149825 - DNA, 21 bp, Artificial sequence
  SiRNA target sequence
aaaaaaaattgtgtaccgggt

SEQ ID NO: 149826 - DNA, 21 bp, Artificial sequence
  SiRNA target sequence
aaaaaaattgtgtaccgggtg

SEQ ID NO: 149827 - DNA, 21 bp, Artificial sequence
  SiRNA target sequence
aaaaaattgtgtaccgggtga

SEQ ID NO: 149828 - DNA, 21 bp, Artificial sequence
  SiRNA target sequence
aaaaattgtgtaccgggtgat

SEQ ID NO: 149829 - DNA, 21 bp, Artificial sequence
  SiRNA target sequence
aaaattgtgtaccgggtgatg

SEQ ID NO: 149830 - DNA, 21 bp, Artificial sequence
  SiRNA target sequence
aaattgtgtaccgggtgatgt

SEQ ID NO: 149831 - DNA, 21 bp, Artificial sequence
  SiRNA target sequence
aattgtgtaccgggtgatgtg

SEQ ID NO: 149832 - DNA, 21 bp, Artificial sequence
  SiRNA target sequence
attgtgtaccgggtgatgtga

SEQ ID NO: 149833 - DNA, 21 bp, Artificial sequence
  SiRNA target sequence
ttgtgtaccgggtgatgtgat

SEQ ID NO: 149834 - DNA, 21 bp, Artificial sequence
  SiRNA target sequence
tgtgtaccgggtgatgtgatt

SEQ ID NO: 149835 - DNA, 21 bp, Artificial sequence
  SiRNA target sequence
gtgtaccgggtgatgtgattc

SEQ ID NO: 149836 - DNA, 21 bp, Artificial sequence
  SiRNA target sequence
tgtaccgggtgatgtgattct

SEQ ID NO: 149837 - DNA, 21 bp, Artificial sequence
  SiRNA target sequence
gtaccgggtgatgtgattctt

SEQ ID NO: 149838 - DNA, 21 bp, Artificial sequence
  SiRNA target sequence
taccgggtgatgtgattctta

SEQ ID NO: 149839 - DNA, 21 bp, Artificial sequence
  SiRNA target sequence
accgggtgatgtgattcttat

SEQ ID NO: 149840 - DNA, 21 bp, Artificial sequence
  SiRNA target sequence
ccgggtgatgtgattcttatt

SEQ ID NO: 149841 - DNA, 21 bp, Artificial sequence
  SiRNA target sequence
cgggtgatgtgattcttattg

SEQ ID NO: 149842 - DNA, 21 bp, Artificial sequence
  SiRNA target sequence
gggtgatgtgattcttattgt

SEQ ID NO: 149843 - DNA, 21 bp, Artificial sequence
  SiRNA target sequence
ggtgatgtgattcttattgta

SEQ ID NO: 149844 - DNA, 21 bp, Artificial sequence
  SiRNA target sequence
gtgatgtgattcttattgtaa

SEQ ID NO: 149845 - DNA, 21 bp, Artificial sequence
  SiRNA target sequence
tgatgtgattcttattgtaaa

SEQ ID NO: 149846 - DNA, 21 bp, Artificial sequence
  SiRNA target sequence
gatgtgattcttattgtaaac

SEQ ID NO: 149847 - DNA, 21 bp, Artificial sequence
  SiRNA target sequence
atgtgattcttattgtaaaca

SEQ ID NO: 149848 - DNA, 21 bp, Artificial sequence
  SiRNA target sequence
tgtgattcttattgtaaacat

SEQ ID NO: 149849 - DNA, 21 bp, Artificial sequence
  SiRNA target sequence
gtgattcttattgtaaacatt

SEQ ID NO: 149850 - DNA, 21 bp, Artificial sequence
  SiRNA target sequence
tgattcttattgtaaacatta

SEQ ID NO: 149851 - DNA, 21 bp, Artificial sequence
  SiRNA target sequence
gattcttattgtaaacattac

SEQ ID NO: 149852 - DNA, 21 bp, Artificial sequence
  SiRNA target sequence
attcttattgtaaacattaca

SEQ ID NO: 149853 - DNA, 21 bp, Artificial sequence
  SiRNA target sequence
ttcttattgtaaacattacaa

SEQ ID NO: 149854 - DNA, 21 bp, Artificial sequence
  SiRNA target sequence
tcttattgtaaacattacaaa

SEQ ID NO: 149855 - DNA, 21 bp, Artificial sequence
  SiRNA target sequence
cttattgtaaacattacaaat

SEQ ID NO: 149856 - DNA, 21 bp, Artificial sequence
  SiRNA target sequence
ttattgtaaacattacaaatg

SEQ ID NO: 149857 - DNA, 21 bp, Artificial sequence
  SiRNA target sequence
tattgtaaacattacaaatga

SEQ ID NO: 149858 - DNA, 21 bp, Artificial sequence
  SiRNA target sequence
attgtaaacattacaaatgat

SEQ ID NO: 149859 - DNA, 21 bp, Artificial sequence
  SiRNA target sequence
ttgtaaacattacaaatgatc

SEQ ID NO: 149860 - DNA, 21 bp, Artificial sequence
  SiRNA target sequence
tgtaaacattacaaatgatcc

SEQ ID NO: 149861 - DNA, 21 bp, Artificial sequence
  SiRNA target sequence
gtaaacattacaaatgatcca

SEQ ID NO: 149862 - DNA, 21 bp, Artificial sequence
  SiRNA target sequence
taaacattacaaatgatccaa

SEQ ID NO: 149863 - DNA, 21 bp, Artificial sequence
  SiRNA target sequence
aaacattacaaatgatccaag

SEQ ID NO: 149864 - DNA, 21 bp, Artificial sequence
  SiRNA target sequence
aacattacaaatgatccaaga

SEQ ID NO: 149865 - DNA, 21 bp, Artificial sequence
  SiRNA target sequence
acattacaaatgatccaagat

SEQ ID NO: 149866 - DNA, 21 bp, Artificial sequence
  SiRNA target sequence
cattacaaatgatccaagatt

SEQ ID NO: 149867 - DNA, 21 bp, Artificial sequence
  SiRNA target sequence
attacaaatgatccaagattt

SEQ ID NO: 149868 - DNA, 21 bp, Artificial sequence
  SiRNA target sequence
ttacaaatgatccaagattta

SEQ ID NO: 149869 - DNA, 21 bp, Artificial sequence
  SiRNA target sequence
tacaaatgatccaagatttag

SEQ ID NO: 149870 - DNA, 21 bp, Artificial sequence
  SiRNA target sequence
acaaatgatccaagatttaga

SEQ ID NO: 149871 - DNA, 21 bp, Artificial sequence
  SiRNA target sequence
caaatgatccaagatttagaa

SEQ ID NO: 149872 - DNA, 21 bp, Artificial sequence
  SiRNA target sequence
aaatgatccaagatttagaaa

SEQ ID NO: 149873 - DNA, 21 bp, Artificial sequence
  SiRNA target sequence
aatgatccaagatttagaaaa

SEQ ID NO: 149874 - DNA, 21 bp, Artificial sequence
  SiRNA target sequence
atgatccaagatttagaaaaa

SEQ ID NO: 149875 - DNA, 21 bp, Artificial sequence
  SiRNA target sequence
tgatccaagatttagaaaaag

SEQ ID NO: 149876 - DNA, 21 bp, Artificial sequence
  SiRNA target sequence
gatccaagatttagaaaaagt

SEQ ID NO: 149877 - DNA, 21 bp, Artificial sequence
  SiRNA target sequence
atccaagatttagaaaaagtg

SEQ ID NO: 149878 - DNA, 21 bp, Artificial sequence
  SiRNA target sequence
tccaagatttagaaaaagtgg

SEQ ID NO: 149879 - DNA, 21 bp, Artificial sequence
  SiRNA target sequence
ccaagatttagaaaaagtgga

SEQ ID NO: 149880 - DNA, 21 bp, Artificial sequence
  SiRNA target sequence
caagatttagaaaaagtggat

SEQ ID NO: 149881 - DNA, 21 bp, Artificial sequence
  SiRNA target sequence
aagatttagaaaaagtggata

SEQ ID NO: 149882 - DNA, 21 bp, Artificial sequence
  SiRNA target sequence
agatttagaaaaagtggatat

SEQ ID NO: 149883 - DNA, 21 bp, Artificial sequence
  SiRNA target sequence
gatttagaaaaagtggatata

SEQ ID NO: 149884 - DNA, 21 bp, Artificial sequence
  SiRNA target sequence
atttagaaaaagtggatataa

SEQ ID NO: 149885 - DNA, 21 bp, Artificial sequence
  SiRNA target sequence
tttagaaaaagtggatataat

SEQ ID NO: 149886 - DNA, 21 bp, Artificial sequence
  SiRNA target sequence
ttagaaaaagtggatataatt

SEQ ID NO: 149887 - DNA, 21 bp, Artificial sequence
  SiRNA target sequence
tagaaaaagtggatataattt

SEQ ID NO: 149888 - DNA, 21 bp, Artificial sequence
  SiRNA target sequence
agaaaaagtggatataattta

SEQ ID NO: 149889 - DNA, 21 bp, Artificial sequence
  SiRNA target sequence
gaaaaagtggatataatttaa

SEQ ID NO: 149890 - DNA, 21 bp, Artificial sequence
  SiRNA target sequence
aaaaagtggatataatttaat

SEQ ID NO: 149891 - DNA, 21 bp, Artificial sequence
  SiRNA target sequence
aaaagtggatataatttaatt

SEQ ID NO: 149892 - DNA, 21 bp, Artificial sequence
  SiRNA target sequence
aaagtggatataatttaatta

SEQ ID NO: 149893 - DNA, 21 bp, Artificial sequence
  SiRNA target sequence
aagtggatataatttaattag

SEQ ID NO: 149894 - DNA, 21 bp, Artificial sequence
  SiRNA target sequence
agtggatataatttaattagt

SEQ ID NO: 149895 - DNA, 21 bp, Artificial sequence
  SiRNA target sequence
gtggatataatttaattagta

SEQ ID NO: 149896 - DNA, 21 bp, Artificial sequence
  SiRNA target sequence
tggatataatttaattagtaa

SEQ ID NO: 149897 - DNA, 21 bp, Artificial sequence
  SiRNA target sequence
ggatataatttaattagtaag

SEQ ID NO: 149898 - DNA, 21 bp, Artificial sequence
  SiRNA target sequence
gatataatttaattagtaagg

SEQ ID NO: 149899 - DNA, 21 bp, Artificial sequence
  SiRNA target sequence
atataatttaattagtaaggt

SEQ ID NO: 149900 - DNA, 21 bp, Artificial sequence
  SiRNA target sequence
tataatttaattagtaaggtt

SEQ ID NO: 149901 - DNA, 21 bp, Artificial sequence
  SiRNA target sequence
ataatttaattagtaaggttg

SEQ ID NO: 149902 - DNA, 21 bp, Artificial sequence
  SiRNA target sequence
taatttaattagtaaggttga

SEQ ID NO: 149903 - DNA, 21 bp, Artificial sequence
  SiRNA target sequence
aatttaattagtaaggttgat

SEQ ID NO: 149904 - DNA, 21 bp, Artificial sequence
  SiRNA target sequence
atttaattagtaaggttgata

SEQ ID NO: 149905 - DNA, 21 bp, Artificial sequence
  SiRNA target sequence
tttaattagtaaggttgatat

SEQ ID NO: 149906 - DNA, 21 bp, Artificial sequence
  SiRNA target sequence
ttaattagtaaggttgatatt

SEQ ID NO: 149907 - DNA, 21 bp, Artificial sequence
  SiRNA target sequence
taattagtaaggttgatattc

SEQ ID NO: 149908 - DNA, 21 bp, Artificial sequence
  SiRNA target sequence
aattagtaaggttgatattcc

SEQ ID NO: 149909 - DNA, 21 bp, Artificial sequence
  SiRNA target sequence
attagtaaggttgatattcca

SEQ ID NO: 149910 - DNA, 21 bp, Artificial sequence
  SiRNA target sequence
ttagtaaggttgatattccat

SEQ ID NO: 149911 - DNA, 21 bp, Artificial sequence
  SiRNA target sequence
tagtaaggttgatattccatt

SEQ ID NO: 149912 - DNA, 21 bp, Artificial sequence
  SiRNA target sequence
agtaaggttgatattccattg

SEQ ID NO: 149913 - DNA, 21 bp, Artificial sequence
  SiRNA target sequence
gtaaggttgatattccattgt

SEQ ID NO: 149914 - DNA, 21 bp, Artificial sequence
  SiRNA target sequence
taaggttgatattccattgta

SEQ ID NO: 149915 - DNA, 21 bp, Artificial sequence
  SiRNA target sequence
aaggttgatattccattgtat

SEQ ID NO: 149916 - DNA, 21 bp, Artificial sequence
  SiRNA target sequence
aggttgatattccattgtatg

SEQ ID NO: 149917 - DNA, 21 bp, Artificial sequence
  SiRNA target sequence
ggttgatattccattgtatgt

SEQ ID NO: 149918 - DNA, 21 bp, Artificial sequence
  SiRNA target sequence
gttgatattccattgtatgtt

SEQ ID NO: 149919 - DNA, 21 bp, Artificial sequence
  SiRNA target sequence
ttgatattccattgtatgttg

SEQ ID NO: 149920 - DNA, 21 bp, Artificial sequence
  SiRNA target sequence
tgatattccattgtatgttgc

SEQ ID NO: 149921 - DNA, 21 bp, Artificial sequence
  SiRNA target sequence
gatattccattgtatgttgct

SEQ ID NO: 149922 - DNA, 21 bp, Artificial sequence
  SiRNA target sequence
atattccattgtatgttgctt

SEQ ID NO: 149923 - DNA, 21 bp, Artificial sequence
  SiRNA target sequence
tattccattgtatgttgcttt

SEQ ID NO: 149924 - DNA, 21 bp, Artificial sequence
  SiRNA target sequence
attccattgtatgttgctttg

SEQ ID NO: 149925 - DNA, 21 bp, Artificial sequence
  SiRNA target sequence
ttccattgtatgttgctttgg

SEQ ID NO: 149926 - DNA, 21 bp, Artificial sequence
  SiRNA target sequence
tccattgtatgttgctttggc

SEQ ID NO: 149927 - DNA, 21 bp, Artificial sequence
  SiRNA target sequence
ccattgtatgttgctttggca

SEQ ID NO: 149928 - DNA, 21 bp, Artificial sequence
  SiRNA target sequence
cattgtatgttgctttggcag

SEQ ID NO: 149929 - DNA, 21 bp, Artificial sequence
  SiRNA target sequence
attgtatgttgctttggcagg

SEQ ID NO: 149930 - DNA, 21 bp, Artificial sequence
  SiRNA target sequence
ttgtatgttgctttggcaggc

SEQ ID NO: 149931 - DNA, 21 bp, Artificial sequence
  SiRNA target sequence
tgtatgttgctttggcaggcg

SEQ ID NO: 149932 - DNA, 21 bp, Artificial sequence
  SiRNA target sequence
gtatgttgctttggcaggcgg

SEQ ID NO: 149933 - DNA, 21 bp, Artificial sequence
  SiRNA target sequence
tatgttgctttggcaggcgga

SEQ ID NO: 149934 - DNA, 21 bp, Artificial sequence
  SiRNA target sequence
atgttgctttggcaggcggac

SEQ ID NO: 149935 - DNA, 21 bp, Artificial sequence
  SiRNA target sequence
tgttgctttggcaggcggaca

SEQ ID NO: 149936 - DNA, 21 bp, Artificial sequence
  SiRNA target sequence
gttgctttggcaggcggacag

SEQ ID NO: 149937 - DNA, 21 bp, Artificial sequence
  SiRNA target sequence
ttgctttggcaggcggacaga

SEQ ID NO: 149938 - DNA, 21 bp, Artificial sequence
  SiRNA target sequence
tgctttggcaggcggacagat

SEQ ID NO: 149939 - DNA, 21 bp, Artificial sequence
  SiRNA target sequence
gctttggcaggcggacagatt

SEQ ID NO: 149940 - DNA, 21 bp, Artificial sequence
  SiRNA target sequence
ctttggcaggcggacagatta

SEQ ID NO: 149941 - DNA, 21 bp, Artificial sequence
  SiRNA target sequence
tttggcaggcggacagattat

SEQ ID NO: 149942 - DNA, 21 bp, Artificial sequence
  SiRNA target sequence
ttggcaggcggacagattata

SEQ ID NO: 149943 - DNA, 21 bp, Artificial sequence
  SiRNA target sequence
tggcaggcggacagattatat

SEQ ID NO: 149944 - DNA, 21 bp, Artificial sequence
  SiRNA target sequence
ggcaggcggacagattatatt

SEQ ID NO: 149945 - DNA, 21 bp, Artificial sequence
  SiRNA target sequence
gcaggcggacagattatattt

SEQ ID NO: 149946 - DNA, 21 bp, Artificial sequence
  SiRNA target sequence
caggcggacagattatatttg

SEQ ID NO: 149947 - DNA, 21 bp, Artificial sequence
  SiRNA target sequence
aggcggacagattatatttga

SEQ ID NO: 149948 - DNA, 21 bp, Artificial sequence
  SiRNA target sequence
ggcggacagattatatttgaa

SEQ ID NO: 149949 - DNA, 21 bp, Artificial sequence
  SiRNA target sequence
gcggacagattatatttgaac

SEQ ID NO: 149950 - DNA, 21 bp, Artificial sequence
  SiRNA target sequence
cggacagattatatttgaaca

SEQ ID NO: 149951 - DNA, 21 bp, Artificial sequence
  SiRNA target sequence
ggacagattatatttgaacat

SEQ ID NO: 149952 - DNA, 21 bp, Artificial sequence
  SiRNA target sequence
gacagattatatttgaacata

SEQ ID NO: 149953 - DNA, 21 bp, Artificial sequence
  SiRNA target sequence
acagattatatttgaacatat

SEQ ID NO: 149954 - DNA, 21 bp, Artificial sequence
  SiRNA target sequence
cagattatatttgaacatatc

SEQ ID NO: 149955 - DNA, 21 bp, Artificial sequence
  SiRNA target sequence
agattatatttgaacatatca

SEQ ID NO: 149956 - DNA, 21 bp, Artificial sequence
  SiRNA target sequence
gattatatttgaacatatcac

SEQ ID NO: 149957 - DNA, 21 bp, Artificial sequence
  SiRNA target sequence
attatatttgaacatatcact

SEQ ID NO: 149958 - DNA, 21 bp, Artificial sequence
  SiRNA target sequence
ttatatttgaacatatcactg

SEQ ID NO: 149959 - DNA, 21 bp, Artificial sequence
  SiRNA target sequence
tatatttgaacatatcactgg

SEQ ID NO: 149960 - DNA, 21 bp, Artificial sequence
  SiRNA target sequence
atatttgaacatatcactggt

SEQ ID NO: 149961 - DNA, 21 bp, Artificial sequence
  SiRNA target sequence
tatttgaacatatcactggta

SEQ ID NO: 149962 - DNA, 21 bp, Artificial sequence
  SiRNA target sequence
atttgaacatatcactggtaa

SEQ ID NO: 149963 - DNA, 21 bp, Artificial sequence
  SiRNA target sequence
tttgaacatatcactggtaag

SEQ ID NO: 149964 - DNA, 21 bp, Artificial sequence
  SiRNA target sequence
ttgaacatatcactggtaaga

SEQ ID NO: 149965 - DNA, 21 bp, Artificial sequence
  SiRNA target sequence
tgaacatatcactggtaagaa

SEQ ID NO: 149966 - DNA, 21 bp, Artificial sequence
  SiRNA target sequence
gaacatatcactggtaagaaa

SEQ ID NO: 149967 - DNA, 21 bp, Artificial sequence
  SiRNA target sequence
aacatatcactggtaagaaat

SEQ ID NO: 149968 - DNA, 21 bp, Artificial sequence
  SiRNA target sequence
acatatcactggtaagaaatt

SEQ ID NO: 149969 - DNA, 21 bp, Artificial sequence
  SiRNA target sequence
catatcactggtaagaaattt

SEQ ID NO: 149970 - DNA, 21 bp, Artificial sequence
  SiRNA target sequence
atatcactggtaagaaatttg

SEQ ID NO: 149971 - DNA, 21 bp, Artificial sequence
  SiRNA target sequence
tatcactggtaagaaatttga

SEQ ID NO: 149972 - DNA, 21 bp, Artificial sequence
  SiRNA target sequence
atcactggtaagaaatttgaa

SEQ ID NO: 149973 - DNA, 21 bp, Artificial sequence
  SiRNA target sequence
tcactggtaagaaatttgaaa

SEQ ID NO: 149974 - DNA, 21 bp, Artificial sequence
  SiRNA target sequence
cactggtaagaaatttgaaat

SEQ ID NO: 149975 - DNA, 21 bp, Artificial sequence
  SiRNA target sequence
actggtaagaaatttgaaatt

SEQ ID NO: 149976 - DNA, 21 bp, Artificial sequence
  SiRNA target sequence
ctggtaagaaatttgaaatta

SEQ ID NO: 149977 - DNA, 21 bp, Artificial sequence
  SiRNA target sequence
tggtaagaaatttgaaattac

SEQ ID NO: 149978 - DNA, 21 bp, Artificial sequence
  SiRNA target sequence
ggtaagaaatttgaaattact

SEQ ID NO: 149979 - DNA, 21 bp, Artificial sequence
  SiRNA target sequence
gtaagaaatttgaaattactt

SEQ ID NO: 149980 - DNA, 21 bp, Artificial sequence
  SiRNA target sequence
taagaaatttgaaattacttt

SEQ ID NO: 149981 - DNA, 21 bp, Artificial sequence
  SiRNA target sequence
aagaaatttgaaattacttta

SEQ ID NO: 149982 - DNA, 21 bp, Artificial sequence
  SiRNA target sequence
agaaatttgaaattactttat

SEQ ID NO: 149983 - DNA, 21 bp, Artificial sequence
  SiRNA target sequence
gaaatttgaaattactttata

SEQ ID NO: 149984 - DNA, 21 bp, Artificial sequence
  SiRNA target sequence
aaatttgaaattactttatat

SEQ ID NO: 149985 - DNA, 21 bp, Artificial sequence
  SiRNA target sequence
aatttgaaattactttatatc

SEQ ID NO: 149986 - DNA, 21 bp, Artificial sequence
  SiRNA target sequence
atttgaaattactttatatcc

SEQ ID NO: 149987 - DNA, 21 bp, Artificial sequence
  SiRNA target sequence
tttgaaattactttatatcca

SEQ ID NO: 149988 - DNA, 21 bp, Artificial sequence
  SiRNA target sequence
ttgaaattactttatatccat

SEQ ID NO: 149989 - DNA, 21 bp, Artificial sequence
  SiRNA target sequence
tgaaattactttatatccatt

SEQ ID NO: 149990 - DNA, 21 bp, Artificial sequence
  SiRNA target sequence
gaaattactttatatccattt

SEQ ID NO: 149991 - DNA, 21 bp, Artificial sequence
  SiRNA target sequence
aaattactttatatccattta

SEQ ID NO: 149992 - DNA, 21 bp, Artificial sequence
  SiRNA target sequence
aattactttatatccatttaa

SEQ ID NO: 149993 - DNA, 21 bp, Artificial sequence
  SiRNA target sequence
attactttatatccatttaaa

SEQ ID NO: 149994 - DNA, 21 bp, Artificial sequence
  SiRNA target sequence
ttactttatatccatttaaag

SEQ ID NO: 149995 - DNA, 21 bp, Artificial sequence
  SiRNA target sequence
tactttatatccatttaaaga

SEQ ID NO: 149996 - DNA, 21 bp, Artificial sequence
  SiRNA target sequence
actttatatccatttaaagat

SEQ ID NO: 149997 - DNA, 21 bp, Artificial sequence
  SiRNA target sequence
ctttatatccatttaaagatt

SEQ ID NO: 149998 - DNA, 21 bp, Artificial sequence
  SiRNA target sequence
tttatatccatttaaagattt

SEQ ID NO: 149999 - DNA, 21 bp, Artificial sequence
  SiRNA target sequence
ttatatccatttaaagattta

SEQ ID NO: 150000 - DNA, 21 bp, Artificial sequence
  SiRNA target sequence
tatatccatttaaagatttaa

SEQ ID NO: 150001 - DNA, 21 bp, Artificial sequence
  SiRNA target sequence
atatccatttaaagatttaaa

SEQ ID NO: 150002 - DNA, 21 bp, Artificial sequence
  SiRNA target sequence
tatccatttaaagatttaaag

SEQ ID NO: 150003 - DNA, 21 bp, Artificial sequence
  SiRNA target sequence
atccatttaaagatttaaaga

SEQ ID NO: 150004 - DNA, 21 bp, Artificial sequence
  SiRNA target sequence
tccatttaaagatttaaagaa

SEQ ID NO: 150005 - DNA, 21 bp, Artificial sequence
  SiRNA target sequence
ccatttaaagatttaaagaaa

SEQ ID NO: 150006 - DNA, 21 bp, Artificial sequence
  SiRNA target sequence
catttaaagatttaaagaaat

SEQ ID NO: 150007 - DNA, 21 bp, Artificial sequence
  SiRNA target sequence
atttaaagatttaaagaaatg

SEQ ID NO: 150008 - DNA, 21 bp, Artificial sequence
  SiRNA target sequence
tttaaagatttaaagaaatgt

SEQ ID NO: 150009 - DNA, 21 bp, Artificial sequence
  SiRNA target sequence
ttaaagatttaaagaaatgta

SEQ ID NO: 150010 - DNA, 21 bp, Artificial sequence
  SiRNA target sequence
taaagatttaaagaaatgtat

SEQ ID NO: 150011 - DNA, 21 bp, Artificial sequence
  SiRNA target sequence
aaagatttaaagaaatgtatt

SEQ ID NO: 150012 - DNA, 21 bp, Artificial sequence
  SiRNA target sequence
aagatttaaagaaatgtatta

SEQ ID NO: 150013 - DNA, 21 bp, Artificial sequence
  SiRNA target sequence
agatttaaagaaatgtattat

SEQ ID NO: 150014 - DNA, 21 bp, Artificial sequence
  SiRNA target sequence
gatttaaagaaatgtattatt

SEQ ID NO: 150015 - DNA, 21 bp, Artificial sequence
  SiRNA target sequence
atttaaagaaatgtattattt

SEQ ID NO: 150016 - DNA, 21 bp, Artificial sequence
  SiRNA target sequence
tttaaagaaatgtattatttt

SEQ ID NO: 150017 - DNA, 21 bp, Artificial sequence
  SiRNA target sequence
ttaaagaaatgtattatttta

SEQ ID NO: 150018 - DNA, 21 bp, Artificial sequence
  SiRNA target sequence
taaagaaatgtattattttaa

SEQ ID NO: 150019 - DNA, 21 bp, Artificial sequence
  SiRNA target sequence
aaagaaatgtattattttaaa

SEQ ID NO: 150020 - DNA, 21 bp, Artificial sequence
  SiRNA target sequence
aagaaatgtattattttaaaa

SEQ ID NO: 150021 - DNA, 21 bp, Artificial sequence
  SiRNA target sequence
agaaatgtattattttaaaag

SEQ ID NO: 150022 - DNA, 21 bp, Artificial sequence
  SiRNA target sequence
gaaatgtattattttaaaagg

SEQ ID NO: 150023 - DNA, 21 bp, Artificial sequence
  SiRNA target sequence
aaatgtattattttaaaaggc

SEQ ID NO: 150024 - DNA, 21 bp, Artificial sequence
  SiRNA target sequence
aatgtattattttaaaaggcg

SEQ ID NO: 150025 - DNA, 21 bp, Artificial sequence
  SiRNA target sequence
atgtattattttaaaaggcga

SEQ ID NO: 150026 - DNA, 21 bp, Artificial sequence
  SiRNA target sequence
tgtattattttaaaaggcgaa

SEQ ID NO: 150027 - DNA, 21 bp, Artificial sequence
  SiRNA target sequence
gtattattttaaaaggcgaag

SEQ ID NO: 150028 - DNA, 21 bp, Artificial sequence
  SiRNA target sequence
tattattttaaaaggcgaagg

SEQ ID NO: 150029 - DNA, 21 bp, Artificial sequence
  SiRNA target sequence
attattttaaaaggcgaaggt

SEQ ID NO: 150030 - DNA, 21 bp, Artificial sequence
  SiRNA target sequence
ttattttaaaaggcgaaggtt

SEQ ID NO: 150031 - DNA, 21 bp, Artificial sequence
  SiRNA target sequence
tattttaaaaggcgaaggttt

SEQ ID NO: 150032 - DNA, 21 bp, Artificial sequence
  SiRNA target sequence
attttaaaaggcgaaggtttt

SEQ ID NO: 150033 - DNA, 21 bp, Artificial sequence
  SiRNA target sequence
ttttaaaaggcgaaggtttta

SEQ ID NO: 150034 - DNA, 21 bp, Artificial sequence
  SiRNA target sequence
tttaaaaggcgaaggttttaa

SEQ ID NO: 150035 - DNA, 21 bp, Artificial sequence
  SiRNA target sequence
ttaaaaggcgaaggttttaaa

SEQ ID NO: 150036 - DNA, 21 bp, Artificial sequence
  SiRNA target sequence
taaaaggcgaaggttttaaaa

SEQ ID NO: 150037 - DNA, 21 bp, Artificial sequence
  SiRNA target sequence
aaaaggcgaaggttttaaaat

SEQ ID NO: 150038 - DNA, 21 bp, Artificial sequence
  SiRNA target sequence
aaaggcgaaggttttaaaata

SEQ ID NO: 150039 - DNA, 21 bp, Artificial sequence
  SiRNA target sequence
aaggcgaaggttttaaaataa

SEQ ID NO: 150040 - DNA, 21 bp, Artificial sequence
  SiRNA target sequence
aggcgaaggttttaaaataaa

SEQ ID NO: 150041 - DNA, 21 bp, Artificial sequence
  SiRNA target sequence
ggcgaaggttttaaaataaaa

SEQ ID NO: 150042 - DNA, 21 bp, Artificial sequence
  SiRNA target sequence
gcgaaggttttaaaataaaaa

SEQ ID NO: 150043 - DNA, 21 bp, Artificial sequence
  SiRNA target sequence
cgaaggttttaaaataaaaaa

SEQ ID NO: 150044 - DNA, 21 bp, Artificial sequence
  SiRNA target sequence
gaaggttttaaaataaaaaat

SEQ ID NO: 150045 - DNA, 21 bp, Artificial sequence
  SiRNA target sequence
aaggttttaaaataaaaaata

SEQ ID NO: 150046 - DNA, 21 bp, Artificial sequence
  SiRNA target sequence
aggttttaaaataaaaaatag

SEQ ID NO: 150047 - DNA, 21 bp, Artificial sequence
  SiRNA target sequence
ggttttaaaataaaaaatagt

SEQ ID NO: 150048 - DNA, 21 bp, Artificial sequence
  SiRNA target sequence
gttttaaaataaaaaatagtt

SEQ ID NO: 150049 - DNA, 21 bp, Artificial sequence
  SiRNA target sequence
ttttaaaataaaaaatagtta

SEQ ID NO: 150050 - DNA, 21 bp, Artificial sequence
  SiRNA target sequence
tttaaaataaaaaatagttat

SEQ ID NO: 150051 - DNA, 21 bp, Artificial sequence
  SiRNA target sequence
ttaaaataaaaaatagttatt

SEQ ID NO: 150052 - DNA, 21 bp, Artificial sequence
  SiRNA target sequence
taaaataaaaaatagttattc

SEQ ID NO: 150053 - DNA, 21 bp, Artificial sequence
  SiRNA target sequence
aaaataaaaaatagttattcg

SEQ ID NO: 150054 - DNA, 21 bp, Artificial sequence
  SiRNA target sequence
aaataaaaaatagttattcgg

SEQ ID NO: 150055 - DNA, 21 bp, Artificial sequence
  SiRNA target sequence
aataaaaaatagttattcggg

SEQ ID NO: 150056 - DNA, 21 bp, Artificial sequence
  SiRNA target sequence
ataaaaaatagttattcgggt

SEQ ID NO: 150057 - DNA, 21 bp, Artificial sequence
  SiRNA target sequence
taaaaaatagttattcgggtg

SEQ ID NO: 150058 - DNA, 21 bp, Artificial sequence
  SiRNA target sequence
aaaaaatagttattcgggtgg

SEQ ID NO: 150059 - DNA, 21 bp, Artificial sequence
  SiRNA target sequence
aaaaatagttattcgggtggt

SEQ ID NO: 150060 - DNA, 21 bp, Artificial sequence
  SiRNA target sequence
aaaatagttattcgggtggtg

SEQ ID NO: 150061 - DNA, 21 bp, Artificial sequence
  SiRNA target sequence
aaatagttattcgggtggtga

SEQ ID NO: 150062 - DNA, 21 bp, Artificial sequence
  SiRNA target sequence
aatagttattcgggtggtgat

SEQ ID NO: 150063 - DNA, 21 bp, Artificial sequence
  SiRNA target sequence
atagttattcgggtggtgatc

SEQ ID NO: 150064 - DNA, 21 bp, Artificial sequence
  SiRNA target sequence
tagttattcgggtggtgatct

SEQ ID NO: 150065 - DNA, 21 bp, Artificial sequence
  SiRNA target sequence
agttattcgggtggtgatctt

SEQ ID NO: 150066 - DNA, 21 bp, Artificial sequence
  SiRNA target sequence
gttattcgggtggtgatctta

SEQ ID NO: 150067 - DNA, 21 bp, Artificial sequence
  SiRNA target sequence
ttattcgggtggtgatcttat

SEQ ID NO: 150068 - DNA, 21 bp, Artificial sequence
  SiRNA target sequence
tattcgggtggtgatcttatt

SEQ ID NO: 150069 - DNA, 21 bp, Artificial sequence
  SiRNA target sequence
attcgggtggtgatcttattc

SEQ ID NO: 150070 - DNA, 21 bp, Artificial sequence
  SiRNA target sequence
ttcgggtggtgatcttattct

SEQ ID NO: 150071 - DNA, 21 bp, Artificial sequence
  SiRNA target sequence
tcgggtggtgatcttattctc

SEQ ID NO: 150072 - DNA, 21 bp, Artificial sequence
  SiRNA target sequence
cgggtggtgatcttattctcg

SEQ ID NO: 150073 - DNA, 21 bp, Artificial sequence
  SiRNA target sequence
gggtggtgatcttattctcga

SEQ ID NO: 150074 - DNA, 21 bp, Artificial sequence
  SiRNA target sequence
ggtggtgatcttattctcgaa

SEQ ID NO: 150075 - DNA, 21 bp, Artificial sequence
  SiRNA target sequence
gtggtgatcttattctcgaac

SEQ ID NO: 150076 - DNA, 21 bp, Artificial sequence
  SiRNA target sequence
tggtgatcttattctcgaacc

SEQ ID NO: 150077 - DNA, 21 bp, Artificial sequence
  SiRNA target sequence
ggtgatcttattctcgaacct

SEQ ID NO: 150078 - DNA, 21 bp, Artificial sequence
  SiRNA target sequence
gtgatcttattctcgaaccta

SEQ ID NO: 150079 - DNA, 21 bp, Artificial sequence
  SiRNA target sequence
tgatcttattctcgaacctaa

SEQ ID NO: 150080 - DNA, 21 bp, Artificial sequence
  SiRNA target sequence
gatcttattctcgaacctaat

SEQ ID NO: 150081 - DNA, 21 bp, Artificial sequence
  SiRNA target sequence
atcttattctcgaacctaata

SEQ ID NO: 150082 - DNA, 21 bp, Artificial sequence
  SiRNA target sequence
tcttattctcgaacctaatat

SEQ ID NO: 150083 - DNA, 21 bp, Artificial sequence
  SiRNA target sequence
cttattctcgaacctaatata

SEQ ID NO: 150084 - DNA, 21 bp, Artificial sequence
  SiRNA target sequence
ttattctcgaacctaatataa

SEQ ID NO: 150085 - DNA, 21 bp, Artificial sequence
  SiRNA target sequence
tattctcgaacctaatataat

SEQ ID NO: 150086 - DNA, 21 bp, Artificial sequence
  SiRNA target sequence
attctcgaacctaatataatt

SEQ ID NO: 150087 - DNA, 21 bp, Artificial sequence
  SiRNA target sequence
ttctcgaacctaatataatta

SEQ ID NO: 150088 - DNA, 21 bp, Artificial sequence
  SiRNA target sequence
tctcgaacctaatataattat

SEQ ID NO: 150089 - DNA, 21 bp, Artificial sequence
  SiRNA target sequence
ctcgaacctaatataattata

SEQ ID NO: 150090 - DNA, 21 bp, Artificial sequence
  SiRNA target sequence
tcgaacctaatataattatag

SEQ ID NO: 150091 - DNA, 21 bp, Artificial sequence
  SiRNA target sequence
cgaacctaatataattataga

SEQ ID NO: 150092 - DNA, 21 bp, Artificial sequence
  SiRNA target sequence
gaacctaatataattatagat

SEQ ID NO: 150093 - DNA, 21 bp, Artificial sequence
  SiRNA target sequence
aacctaatataattatagata

SEQ ID NO: 150094 - DNA, 21 bp, Artificial sequence
  SiRNA target sequence
acctaatataattatagataa

SEQ ID NO: 150095 - DNA, 21 bp, Artificial sequence
  SiRNA target sequence
cctaatataattatagataag

SEQ ID NO: 150096 - DNA, 21 bp, Artificial sequence
  SiRNA target sequence
ctaatataattatagataaga

SEQ ID NO: 150097 - DNA, 21 bp, Artificial sequence
  SiRNA target sequence
taatataattatagataagaa

SEQ ID NO: 150098 - DNA, 21 bp, Artificial sequence
  SiRNA target sequence
aatataattatagataagaat

SEQ ID NO: 150099 - DNA, 21 bp, Artificial sequence
  SiRNA target sequence
atataattatagataagaata

SEQ ID NO: 150100 - DNA, 21 bp, Artificial sequence
  SiRNA target sequence
tataattatagataagaatat

SEQ ID NO: 150101 - DNA, 21 bp, Artificial sequence
  SiRNA target sequence
ataattatagataagaatatt

SEQ ID NO: 150102 - DNA, 21 bp, Artificial sequence
  SiRNA target sequence
taattatagataagaatattg

SEQ ID NO: 150103 - DNA, 21 bp, Artificial sequence
  SiRNA target sequence
aattatagataagaatattga

SEQ ID NO: 150104 - DNA, 21 bp, Artificial sequence
  SiRNA target sequence
attatagataagaatattgat

SEQ ID NO: 150105 - DNA, 21 bp, Artificial sequence
  SiRNA target sequence
ttatagataagaatattgata

SEQ ID NO: 150106 - DNA, 21 bp, Artificial sequence
  SiRNA target sequence
tatagataagaatattgataa

SEQ ID NO: 150107 - DNA, 21 bp, Artificial sequence
  SiRNA target sequence
atagataagaatattgataaa

SEQ ID NO: 150108 - DNA, 21 bp, Artificial sequence
  SiRNA target sequence
tagataagaatattgataaag

SEQ ID NO: 150109 - DNA, 21 bp, Artificial sequence
  SiRNA target sequence
agataagaatattgataaaga

SEQ ID NO: 150110 - DNA, 21 bp, Artificial sequence
  SiRNA target sequence
gataagaatattgataaagat

SEQ ID NO: 150111 - DNA, 21 bp, Artificial sequence
  SiRNA target sequence
ataagaatattgataaagatt

SEQ ID NO: 150112 - DNA, 21 bp, Artificial sequence
  SiRNA target sequence
taagaatattgataaagattt

SEQ ID NO: 150113 - DNA, 21 bp, Artificial sequence
  SiRNA target sequence
aagaatattgataaagattta

SEQ ID NO: 150114 - DNA, 21 bp, Artificial sequence
  SiRNA target sequence
agaatattgataaagatttat

SEQ ID NO: 150115 - DNA, 21 bp, Artificial sequence
  SiRNA target sequence
gaatattgataaagatttatt

SEQ ID NO: 150116 - DNA, 21 bp, Artificial sequence
  SiRNA target sequence
aatattgataaagatttatta

SEQ ID NO: 150117 - DNA, 21 bp, Artificial sequence
  SiRNA target sequence
atattgataaagatttattag

SEQ ID NO: 150118 - DNA, 21 bp, Artificial sequence
  SiRNA target sequence
tattgataaagatttattagc

SEQ ID NO: 150119 - DNA, 21 bp, Artificial sequence
  SiRNA target sequence
attgataaagatttattagca

SEQ ID NO: 150120 - DNA, 21 bp, Artificial sequence
  SiRNA target sequence
ttgataaagatttattagcac

SEQ ID NO: 150121 - DNA, 21 bp, Artificial sequence
  SiRNA target sequence
tgataaagatttattagcacg

SEQ ID NO: 150122 - DNA, 21 bp, Artificial sequence
  SiRNA target sequence
gataaagatttattagcacgc

SEQ ID NO: 150123 - DNA, 21 bp, Artificial sequence
  SiRNA target sequence
ataaagatttattagcacgcg

SEQ ID NO: 150124 - DNA, 21 bp, Artificial sequence
  SiRNA target sequence
taaagatttattagcacgcgc

SEQ ID NO: 150125 - DNA, 21 bp, Artificial sequence
  SiRNA target sequence
aaagatttattagcacgcgcc

SEQ ID NO: 150126 - DNA, 21 bp, Artificial sequence
  SiRNA target sequence
aagatttattagcacgcgcct

SEQ ID NO: 150127 - DNA, 21 bp, Artificial sequence
  SiRNA target sequence
agatttattagcacgcgcctt

SEQ ID NO: 150128 - DNA, 21 bp, Artificial sequence
  SiRNA target sequence
gatttattagcacgcgccttg

SEQ ID NO: 150129 - DNA, 21 bp, Artificial sequence
  SiRNA target sequence
atttattagcacgcgccttga

SEQ ID NO: 150130 - DNA, 21 bp, Artificial sequence
  SiRNA target sequence
tttattagcacgcgccttgaa

SEQ ID NO: 150131 - DNA, 21 bp, Artificial sequence
  SiRNA target sequence
ttattagcacgcgccttgaat

SEQ ID NO: 150132 - DNA, 21 bp, Artificial sequence
  SiRNA target sequence
tattagcacgcgccttgaatt

SEQ ID NO: 150133 - DNA, 21 bp, Artificial sequence
  SiRNA target sequence
attagcacgcgccttgaatta

SEQ ID NO: 150134 - DNA, 21 bp, Artificial sequence
  SiRNA target sequence
ttagcacgcgccttgaattat

SEQ ID NO: 150135 - DNA, 21 bp, Artificial sequence
  SiRNA target sequence
tagcacgcgccttgaattatg

SEQ ID NO: 150136 - DNA, 21 bp, Artificial sequence
  SiRNA target sequence
agcacgcgccttgaattatgt

SEQ ID NO: 150137 - DNA, 21 bp, Artificial sequence
  SiRNA target sequence
gcacgcgccttgaattatgtt

SEQ ID NO: 150138 - DNA, 21 bp, Artificial sequence
  SiRNA target sequence
cacgcgccttgaattatgttc

SEQ ID NO: 150139 - DNA, 21 bp, Artificial sequence
  SiRNA target sequence
acgcgccttgaattatgttcc

SEQ ID NO: 150140 - DNA, 21 bp, Artificial sequence
  SiRNA target sequence
cgcgccttgaattatgttcct

SEQ ID NO: 150141 - DNA, 21 bp, Artificial sequence
  SiRNA target sequence
gcgccttgaattatgttcctg

SEQ ID NO: 150142 - DNA, 21 bp, Artificial sequence
  SiRNA target sequence
cgccttgaattatgttcctgt

SEQ ID NO: 150143 - DNA, 21 bp, Artificial sequence
  SiRNA target sequence
gccttgaattatgttcctgta

SEQ ID NO: 150144 - DNA, 21 bp, Artificial sequence
  SiRNA target sequence
ccttgaattatgttcctgtaa

SEQ ID NO: 150145 - DNA, 21 bp, Artificial sequence
  SiRNA target sequence
cttgaattatgttcctgtaag

SEQ ID NO: 150146 - DNA, 21 bp, Artificial sequence
  SiRNA target sequence
ttgaattatgttcctgtaaga

SEQ ID NO: 150147 - DNA, 21 bp, Artificial sequence
  SiRNA target sequence
tgaattatgttcctgtaagaa

SEQ ID NO: 150148 - DNA, 21 bp, Artificial sequence
  SiRNA target sequence
gaattatgttcctgtaagaaa

SEQ ID NO: 150149 - DNA, 21 bp, Artificial sequence
  SiRNA target sequence
aattatgttcctgtaagaaaa

SEQ ID NO: 150150 - DNA, 21 bp, Artificial sequence
  SiRNA target sequence
attatgttcctgtaagaaaag

SEQ ID NO: 150151 - DNA, 21 bp, Artificial sequence
  SiRNA target sequence
ttatgttcctgtaagaaaaga

SEQ ID NO: 150152 - DNA, 21 bp, Artificial sequence
  SiRNA target sequence
tatgttcctgtaagaaaagat

SEQ ID NO: 150153 - DNA, 21 bp, Artificial sequence
  SiRNA target sequence
atgttcctgtaagaaaagatt

SEQ ID NO: 150154 - DNA, 21 bp, Artificial sequence
  SiRNA target sequence
tgttcctgtaagaaaagattt

SEQ ID NO: 150155 - DNA, 21 bp, Artificial sequence
  SiRNA target sequence
gttcctgtaagaaaagatttt

SEQ ID NO: 150156 - DNA, 21 bp, Artificial sequence
  SiRNA target sequence
ttcctgtaagaaaagatttta

SEQ ID NO: 150157 - DNA, 21 bp, Artificial sequence
  SiRNA target sequence
tcctgtaagaaaagattttac

SEQ ID NO: 150158 - DNA, 21 bp, Artificial sequence
  SiRNA target sequence
cctgtaagaaaagattttaca

SEQ ID NO: 150159 - DNA, 21 bp, Artificial sequence
  SiRNA target sequence
ctgtaagaaaagattttacag

SEQ ID NO: 150160 - DNA, 21 bp, Artificial sequence
  SiRNA target sequence
tgtaagaaaagattttacagg

SEQ ID NO: 150161 - DNA, 21 bp, Artificial sequence
  SiRNA target sequence
gtaagaaaagattttacagga

SEQ ID NO: 150162 - DNA, 21 bp, Artificial sequence
  SiRNA target sequence
taagaaaagattttacaggaa

SEQ ID NO: 150163 - DNA, 21 bp, Artificial sequence
  SiRNA target sequence
aagaaaagattttacaggaac

SEQ ID NO: 150164 - DNA, 21 bp, Artificial sequence
  SiRNA target sequence
agaaaagattttacaggaact

SEQ ID NO: 150165 - DNA, 21 bp, Artificial sequence
  SiRNA target sequence
gaaaagattttacaggaactg

SEQ ID NO: 150166 - DNA, 21 bp, Artificial sequence
  SiRNA target sequence
aaaagattttacaggaactgc

SEQ ID NO: 150167 - DNA, 21 bp, Artificial sequence
  SiRNA target sequence
aaagattttacaggaactgct

SEQ ID NO: 150168 - DNA, 21 bp, Artificial sequence
  SiRNA target sequence
aagattttacaggaactgctg

SEQ ID NO: 150169 - DNA, 21 bp, Artificial sequence
  SiRNA target sequence
agattttacaggaactgctgt

SEQ ID NO: 150170 - DNA, 21 bp, Artificial sequence
  SiRNA target sequence
gattttacaggaactgctgtt

SEQ ID NO: 150171 - DNA, 21 bp, Artificial sequence
  SiRNA target sequence
attttacaggaactgctgttc

SEQ ID NO: 150172 - DNA, 21 bp, Artificial sequence
  SiRNA target sequence
ttttacaggaactgctgttcc

SEQ ID NO: 150173 - DNA, 21 bp, Artificial sequence
  SiRNA target sequence
tttacaggaactgctgttcca

SEQ ID NO: 150174 - DNA, 21 bp, Artificial sequence
  SiRNA target sequence
ttacaggaactgctgttccaa

SEQ ID NO: 150175 - DNA, 21 bp, Artificial sequence
  SiRNA target sequence
tacaggaactgctgttccaaa

SEQ ID NO: 150176 - DNA, 21 bp, Artificial sequence
  SiRNA target sequence
acaggaactgctgttccaaaa

SEQ ID NO: 150177 - DNA, 21 bp, Artificial sequence
  SiRNA target sequence
caggaactgctgttccaaaat

SEQ ID NO: 150178 - DNA, 21 bp, Artificial sequence
  SiRNA target sequence
aggaactgctgttccaaaata

SEQ ID NO: 150179 - DNA, 21 bp, Artificial sequence
  SiRNA target sequence
ggaactgctgttccaaaatat

SEQ ID NO: 150180 - DNA, 21 bp, Artificial sequence
  SiRNA target sequence
gaactgctgttccaaaatatg

SEQ ID NO: 150181 - DNA, 21 bp, Artificial sequence
  SiRNA target sequence
aactgctgttccaaaatatgc

SEQ ID NO: 150182 - DNA, 21 bp, Artificial sequence
  SiRNA target sequence
actgctgttccaaaatatgca

SEQ ID NO: 150183 - DNA, 21 bp, Artificial sequence
  SiRNA target sequence
ctgctgttccaaaatatgcag

SEQ ID NO: 150184 - DNA, 21 bp, Artificial sequence
  SiRNA target sequence
tgctgttccaaaatatgcaga

SEQ ID NO: 150185 - DNA, 21 bp, Artificial sequence
  SiRNA target sequence
gctgttccaaaatatgcagaa

SEQ ID NO: 150186 - DNA, 21 bp, Artificial sequence
  SiRNA target sequence
ctgttccaaaatatgcagaat

SEQ ID NO: 150187 - DNA, 21 bp, Artificial sequence
  SiRNA target sequence
tgttccaaaatatgcagaatt

SEQ ID NO: 150188 - DNA, 21 bp, Artificial sequence
  SiRNA target sequence
gttccaaaatatgcagaattt

SEQ ID NO: 150189 - DNA, 21 bp, Artificial sequence
  SiRNA target sequence
ttccaaaatatgcagaatttg

SEQ ID NO: 150190 - DNA, 21 bp, Artificial sequence
  SiRNA target sequence
tccaaaatatgcagaatttgg

SEQ ID NO: 150191 - DNA, 21 bp, Artificial sequence
  SiRNA target sequence
ccaaaatatgcagaatttggt

SEQ ID NO: 150192 - DNA, 21 bp, Artificial sequence
  SiRNA target sequence
caaaatatgcagaatttggtg

SEQ ID NO: 150193 - DNA, 21 bp, Artificial sequence
  SiRNA target sequence
aaaatatgcagaatttggtgt

SEQ ID NO: 150194 - DNA, 21 bp, Artificial sequence
  SiRNA target sequence
aaatatgcagaatttggtgtt

SEQ ID NO: 150195 - DNA, 21 bp, Artificial sequence
  SiRNA target sequence
aatatgcagaatttggtgtta

SEQ ID NO: 150196 - DNA, 21 bp, Artificial sequence
  SiRNA target sequence
atatgcagaatttggtgttat

SEQ ID NO: 150197 - DNA, 21 bp, Artificial sequence
  SiRNA target sequence
tatgcagaatttggtgttatg

SEQ ID NO: 150198 - DNA, 21 bp, Artificial sequence
  SiRNA target sequence
atgcagaatttggtgttatgc

SEQ ID NO: 150199 - DNA, 21 bp, Artificial sequence
  SiRNA target sequence
tgcagaatttggtgttatgcc

SEQ ID NO: 150200 - DNA, 21 bp, Artificial sequence
  SiRNA target sequence
gcagaatttggtgttatgcct

SEQ ID NO: 150201 - DNA, 21 bp, Artificial sequence
  SiRNA target sequence
cagaatttggtgttatgccta

SEQ ID NO: 150202 - DNA, 21 bp, Artificial sequence
  SiRNA target sequence
agaatttggtgttatgcctaa

SEQ ID NO: 150203 - DNA, 21 bp, Artificial sequence
  SiRNA target sequence
gaatttggtgttatgcctaaa

SEQ ID NO: 150204 - DNA, 21 bp, Artificial sequence
  SiRNA target sequence
aatttggtgttatgcctaaag

SEQ ID NO: 150205 - DNA, 21 bp, Artificial sequence
  SiRNA target sequence
atttggtgttatgcctaaaga

SEQ ID NO: 150206 - DNA, 21 bp, Artificial sequence
  SiRNA target sequence
tttggtgttatgcctaaagaa

SEQ ID NO: 150207 - DNA, 21 bp, Artificial sequence
  SiRNA target sequence
ttggtgttatgcctaaagaac

SEQ ID NO: 150208 - DNA, 21 bp, Artificial sequence
  SiRNA target sequence
tggtgttatgcctaaagaaca

SEQ ID NO: 150209 - DNA, 21 bp, Artificial sequence
  SiRNA target sequence
ggtgttatgcctaaagaacag

SEQ ID NO: 150210 - DNA, 21 bp, Artificial sequence
  SiRNA target sequence
gtgttatgcctaaagaacagg

SEQ ID NO: 150211 - DNA, 21 bp, Artificial sequence
  SiRNA target sequence
tgttatgcctaaagaacagga

SEQ ID NO: 150212 - DNA, 21 bp, Artificial sequence
  SiRNA target sequence
gttatgcctaaagaacaggaa

SEQ ID NO: 150213 - DNA, 21 bp, Artificial sequence
  SiRNA target sequence
ttatgcctaaagaacaggaag

SEQ ID NO: 150214 - DNA, 21 bp, Artificial sequence
  SiRNA target sequence
tatgcctaaagaacaggaaga

SEQ ID NO: 150215 - DNA, 21 bp, Artificial sequence
  SiRNA target sequence
atgcctaaagaacaggaagaa

SEQ ID NO: 150216 - DNA, 21 bp, Artificial sequence
  SiRNA target sequence
tgcctaaagaacaggaagaac

SEQ ID NO: 150217 - DNA, 21 bp, Artificial sequence
  SiRNA target sequence
gcctaaagaacaggaagaaca

SEQ ID NO: 150218 - DNA, 21 bp, Artificial sequence
  SiRNA target sequence
cctaaagaacaggaagaacaa

SEQ ID NO: 150219 - DNA, 21 bp, Artificial sequence
  SiRNA target sequence
ctaaagaacaggaagaacaaa

SEQ ID NO: 150220 - DNA, 21 bp, Artificial sequence
  SiRNA target sequence
taaagaacaggaagaacaaaa

SEQ ID NO: 150221 - DNA, 21 bp, Artificial sequence
  SiRNA target sequence
aaagaacaggaagaacaaaac

SEQ ID NO: 150222 - DNA, 21 bp, Artificial sequence
  SiRNA target sequence
aagaacaggaagaacaaaacg

SEQ ID NO: 150223 - DNA, 21 bp, Artificial sequence
  SiRNA target sequence
agaacaggaagaacaaaacga

SEQ ID NO: 150224 - DNA, 21 bp, Artificial sequence
  SiRNA target sequence
gaacaggaagaacaaaacgaa

SEQ ID NO: 150225 - DNA, 21 bp, Artificial sequence
  SiRNA target sequence
aacaggaagaacaaaacgaaa

SEQ ID NO: 150226 - DNA, 21 bp, Artificial sequence
  SiRNA target sequence
acaggaagaacaaaacgaaag

SEQ ID NO: 150227 - DNA, 21 bp, Artificial sequence
  SiRNA target sequence
caggaagaacaaaacgaaaga

SEQ ID NO: 150228 - DNA, 21 bp, Artificial sequence
  SiRNA target sequence
aggaagaacaaaacgaaagag

SEQ ID NO: 150229 - DNA, 21 bp, Artificial sequence
  SiRNA target sequence
ggaagaacaaaacgaaagaga

SEQ ID NO: 150230 - DNA, 21 bp, Artificial sequence
  SiRNA target sequence
gaagaacaaaacgaaagagaa

SEQ ID NO: 150231 - DNA, 21 bp, Artificial sequence
  SiRNA target sequence
aagaacaaaacgaaagagaaa

SEQ ID NO: 150232 - DNA, 21 bp, Artificial sequence
  SiRNA target sequence
agaacaaaacgaaagagaaag

SEQ ID NO: 150233 - DNA, 21 bp, Artificial sequence
  SiRNA target sequence
gaacaaaacgaaagagaaaga

SEQ ID NO: 150234 - DNA, 21 bp, Artificial sequence
  SiRNA target sequence
aacaaaacgaaagagaaagat

SEQ ID NO: 150235 - DNA, 21 bp, Artificial sequence
  SiRNA target sequence
acaaaacgaaagagaaagatt

SEQ ID NO: 150236 - DNA, 21 bp, Artificial sequence
  SiRNA target sequence
caaaacgaaagagaaagattc

SEQ ID NO: 150237 - DNA, 21 bp, Artificial sequence
  SiRNA target sequence
aaaacgaaagagaaagattcg

SEQ ID NO: 150238 - DNA, 21 bp, Artificial sequence
  SiRNA target sequence
aaacgaaagagaaagattcga

SEQ ID NO: 150239 - DNA, 21 bp, Artificial sequence
  SiRNA target sequence
aacgaaagagaaagattcgaa

SEQ ID NO: 150240 - DNA, 21 bp, Artificial sequence
  SiRNA target sequence
acgaaagagaaagattcgaag

SEQ ID NO: 150241 - DNA, 21 bp, Artificial sequence
  SiRNA target sequence
cgaaagagaaagattcgaagg

SEQ ID NO: 150242 - DNA, 21 bp, Artificial sequence
  SiRNA target sequence
gaaagagaaagattcgaaggt

SEQ ID NO: 150243 - DNA, 21 bp, Artificial sequence
  SiRNA target sequence
aaagagaaagattcgaaggtg

SEQ ID NO: 150244 - DNA, 21 bp, Artificial sequence
  SiRNA target sequence
aagagaaagattcgaaggtgc

SEQ ID NO: 150245 - DNA, 21 bp, Artificial sequence
  SiRNA target sequence
agagaaagattcgaaggtgca

SEQ ID NO: 150246 - DNA, 21 bp, Artificial sequence
  SiRNA target sequence
gagaaagattcgaaggtgcag

SEQ ID NO: 150247 - DNA, 21 bp, Artificial sequence
  SiRNA target sequence
agaaagattcgaaggtgcaga

SEQ ID NO: 150248 - DNA, 21 bp, Artificial sequence
  SiRNA target sequence
gaaagattcgaaggtgcagaa

SEQ ID NO: 150249 - DNA, 21 bp, Artificial sequence
  SiRNA target sequence
aaagattcgaaggtgcagaag

SEQ ID NO: 150250 - DNA, 21 bp, Artificial sequence
  SiRNA target sequence
aagattcgaaggtgcagaaga

SEQ ID NO: 150251 - DNA, 21 bp, Artificial sequence
  SiRNA target sequence
agattcgaaggtgcagaagag

SEQ ID NO: 150252 - DNA, 21 bp, Artificial sequence
  SiRNA target sequence
gattcgaaggtgcagaagagt

SEQ ID NO: 150253 - DNA, 21 bp, Artificial sequence
  SiRNA target sequence
attcgaaggtgcagaagagtt

SEQ ID NO: 150254 - DNA, 21 bp, Artificial sequence
  SiRNA target sequence
ttcgaaggtgcagaagagttt

SEQ ID NO: 150255 - DNA, 21 bp, Artificial sequence
  SiRNA target sequence
tcgaaggtgcagaagagtttt

SEQ ID NO: 150256 - DNA, 21 bp, Artificial sequence
  SiRNA target sequence
cgaaggtgcagaagagttttt

SEQ ID NO: 150257 - DNA, 21 bp, Artificial sequence
  SiRNA target sequence
gaaggtgcagaagagtttttt

SEQ ID NO: 150258 - DNA, 21 bp, Artificial sequence
  SiRNA target sequence
aaggtgcagaagagttttttg

SEQ ID NO: 150259 - DNA, 21 bp, Artificial sequence
  SiRNA target sequence
aggtgcagaagagttttttgg

SEQ ID NO: 150260 - DNA, 21 bp, Artificial sequence
  SiRNA target sequence
ggtgcagaagagttttttgga

SEQ ID NO: 150261 - DNA, 21 bp, Artificial sequence
  SiRNA target sequence
gtgcagaagagttttttggag

SEQ ID NO: 150262 - DNA, 21 bp, Artificial sequence
  SiRNA target sequence
tgcagaagagttttttggagg

SEQ ID NO: 150263 - DNA, 21 bp, Artificial sequence
  SiRNA target sequence
gcagaagagttttttggagga

SEQ ID NO: 150264 - DNA, 21 bp, Artificial sequence
  SiRNA target sequence
cagaagagttttttggaggaa

SEQ ID NO: 150265 - DNA, 21 bp, Artificial sequence
  SiRNA target sequence
agaagagttttttggaggaaa

SEQ ID NO: 150266 - DNA, 21 bp, Artificial sequence
  SiRNA target sequence
gaagagttttttggaggaaat

SEQ ID NO: 150267 - DNA, 21 bp, Artificial sequence
  SiRNA target sequence
aagagttttttggaggaaatg

SEQ ID NO: 150268 - DNA, 21 bp, Artificial sequence
  SiRNA target sequence
agagttttttggaggaaatgg

SEQ ID NO: 150269 - DNA, 21 bp, Artificial sequence
  SiRNA target sequence
gagttttttggaggaaatggt

SEQ ID NO: 150270 - DNA, 21 bp, Artificial sequence
  SiRNA target sequence
agttttttggaggaaatggta

SEQ ID NO: 150271 - DNA, 21 bp, Artificial sequence
  SiRNA target sequence
gttttttggaggaaatggtag

SEQ ID NO: 150272 - DNA, 21 bp, Artificial sequence
  SiRNA target sequence
ttttttggaggaaatggtaga

SEQ ID NO: 150273 - DNA, 21 bp, Artificial sequence
  SiRNA target sequence
tttttggaggaaatggtagag

SEQ ID NO: 150274 - DNA, 21 bp, Artificial sequence
  SiRNA target sequence
ttttggaggaaatggtagaga

SEQ ID NO: 150275 - DNA, 21 bp, Artificial sequence
  SiRNA target sequence
tttggaggaaatggtagagat

SEQ ID NO: 150276 - DNA, 21 bp, Artificial sequence
  SiRNA target sequence
ttggaggaaatggtagagatt

SEQ ID NO: 150277 - DNA, 21 bp, Artificial sequence
  SiRNA target sequence
tggaggaaatggtagagattt

SEQ ID NO: 150278 - DNA, 21 bp, Artificial sequence
  SiRNA target sequence
ggaggaaatggtagagatttt

SEQ ID NO: 150279 - DNA, 21 bp, Artificial sequence
  SiRNA target sequence
gaggaaatggtagagattttt

SEQ ID NO: 150280 - DNA, 21 bp, Artificial sequence
  SiRNA target sequence
aggaaatggtagagatttttt

SEQ ID NO: 150281 - DNA, 21 bp, Artificial sequence
  SiRNA target sequence
ggaaatggtagagattttttt

SEQ ID NO: 150282 - DNA, 21 bp, Artificial sequence
  SiRNA target sequence
gaaatggtagagattttttta

SEQ ID NO: 150283 - DNA, 21 bp, Artificial sequence
  SiRNA target sequence
aaatggtagagatttttttag

SEQ ID NO: 150284 - DNA, 21 bp, Artificial sequence
  SiRNA target sequence
aatggtagagatttttttagc

SEQ ID NO: 150285 - DNA, 21 bp, Artificial sequence
  SiRNA target sequence
atggtagagatttttttagca

SEQ ID NO: 150286 - DNA, 21 bp, Artificial sequence
  SiRNA target sequence
tggtagagatttttttagcaa

SEQ ID NO: 150287 - DNA, 21 bp, Artificial sequence
  SiRNA target sequence
ggtagagatttttttagcaag

SEQ ID NO: 150288 - DNA, 21 bp, Artificial sequence
  SiRNA target sequence
gtagagatttttttagcaagt

SEQ ID NO: 150289 - DNA, 21 bp, Artificial sequence
  SiRNA target sequence
tagagatttttttagcaagtt

SEQ ID NO: 150290 - DNA, 21 bp, Artificial sequence
  SiRNA target sequence
agagatttttttagcaagttt

SEQ ID NO: 150291 - DNA, 21 bp, Artificial sequence
  SiRNA target sequence
gagatttttttagcaagtttg

SEQ ID NO: 150292 - DNA, 21 bp, Artificial sequence
  SiRNA target sequence
agatttttttagcaagtttgg

SEQ ID NO: 150293 - DNA, 21 bp, Artificial sequence
  SiRNA target sequence
gatttttttagcaagtttgga

SEQ ID NO: 150294 - DNA, 21 bp, Artificial sequence
  SiRNA target sequence
atttttttagcaagtttggat

SEQ ID NO: 150295 - DNA, 21 bp, Artificial sequence
  SiRNA target sequence
tttttttagcaagtttggatt

SEQ ID NO: 150296 - DNA, 21 bp, Artificial sequence
  SiRNA target sequence
ttttttagcaagtttggattt

SEQ ID NO: 150297 - DNA, 21 bp, Artificial sequence
  SiRNA target sequence
tttttagcaagtttggatttt

SEQ ID NO: 150298 - DNA, 21 bp, Artificial sequence
  SiRNA target sequence
ttttagcaagtttggattttt

SEQ ID NO: 150299 - DNA, 21 bp, Artificial sequence
  SiRNA target sequence
tttagcaagtttggatttttc

SEQ ID NO: 150300 - DNA, 21 bp, Artificial sequence
  SiRNA target sequence
ttagcaagtttggatttttct

SEQ ID NO: 150301 - DNA, 21 bp, Artificial sequence
  SiRNA target sequence
tagcaagtttggatttttcta

SEQ ID NO: 150302 - DNA, 21 bp, Artificial sequence
  SiRNA target sequence
agcaagtttggatttttctaa

SEQ ID NO: 150303 - DNA, 22 bp, Artificial sequence
  SiRNA target sequence
atggcacaagacccccaaggac

SEQ ID NO: 150304 - DNA, 22 bp, Artificial sequence
  SiRNA target sequence
tggcacaagacccccaaggact

SEQ ID NO: 150305 - DNA, 22 bp, Artificial sequence
  SiRNA target sequence
ggcacaagacccccaaggactt

SEQ ID NO: 150306 - DNA, 22 bp, Artificial sequence
  SiRNA target sequence
gcacaagacccccaaggacttt

SEQ ID NO: 150307 - DNA, 22 bp, Artificial sequence
  SiRNA target sequence
cacaagacccccaaggacttta

SEQ ID NO: 150308 - DNA, 22 bp, Artificial sequence
  SiRNA target sequence
acaagacccccaaggactttat

SEQ ID NO: 150309 - DNA, 22 bp, Artificial sequence
  SiRNA target sequence
caagacccccaaggactttatg

SEQ ID NO: 150310 - DNA, 22 bp, Artificial sequence
  SiRNA target sequence
aagacccccaaggactttatga

SEQ ID NO: 150311 - DNA, 22 bp, Artificial sequence
  SiRNA target sequence
agacccccaaggactttatgaa

SEQ ID NO: 150312 - DNA, 22 bp, Artificial sequence
  SiRNA target sequence
gacccccaaggactttatgaag

SEQ ID NO: 150313 - DNA, 22 bp, Artificial sequence
  SiRNA target sequence
acccccaaggactttatgaagt

SEQ ID NO: 150314 - DNA, 22 bp, Artificial sequence
  SiRNA target sequence
cccccaaggactttatgaagta

SEQ ID NO: 150315 - DNA, 22 bp, Artificial sequence
  SiRNA target sequence
ccccaaggactttatgaagtat

SEQ ID NO: 150316 - DNA, 22 bp, Artificial sequence
  SiRNA target sequence
cccaaggactttatgaagtatt

SEQ ID NO: 150317 - DNA, 22 bp, Artificial sequence
  SiRNA target sequence
ccaaggactttatgaagtatta

SEQ ID NO: 150318 - DNA, 22 bp, Artificial sequence
  SiRNA target sequence
caaggactttatgaagtattag

SEQ ID NO: 150319 - DNA, 22 bp, Artificial sequence
  SiRNA target sequence
aaggactttatgaagtattagg

SEQ ID NO: 150320 - DNA, 22 bp, Artificial sequence
  SiRNA target sequence
aggactttatgaagtattagga

SEQ ID NO: 150321 - DNA, 22 bp, Artificial sequence
  SiRNA target sequence
ggactttatgaagtattaggac

SEQ ID NO: 150322 - DNA, 22 bp, Artificial sequence
  SiRNA target sequence
gactttatgaagtattaggact

SEQ ID NO: 150323 - DNA, 22 bp, Artificial sequence
  SiRNA target sequence
actttatgaagtattaggactt

SEQ ID NO: 150324 - DNA, 22 bp, Artificial sequence
  SiRNA target sequence
ctttatgaagtattaggactta

SEQ ID NO: 150325 - DNA, 22 bp, Artificial sequence
  SiRNA target sequence
tttatgaagtattaggacttaa

SEQ ID NO: 150326 - DNA, 22 bp, Artificial sequence
  SiRNA target sequence
ttatgaagtattaggacttaaa

SEQ ID NO: 150327 - DNA, 22 bp, Artificial sequence
  SiRNA target sequence
tatgaagtattaggacttaaag

SEQ ID NO: 150328 - DNA, 22 bp, Artificial sequence
  SiRNA target sequence
atgaagtattaggacttaaagc

SEQ ID NO: 150329 - DNA, 22 bp, Artificial sequence
  SiRNA target sequence
tgaagtattaggacttaaagct

SEQ ID NO: 150330 - DNA, 22 bp, Artificial sequence
  SiRNA target sequence
gaagtattaggacttaaagctg

SEQ ID NO: 150331 - DNA, 22 bp, Artificial sequence
  SiRNA target sequence
aagtattaggacttaaagctgg

SEQ ID NO: 150332 - DNA, 22 bp, Artificial sequence
  SiRNA target sequence
agtattaggacttaaagctggt

SEQ ID NO: 150333 - DNA, 22 bp, Artificial sequence
  SiRNA target sequence
gtattaggacttaaagctggtg

SEQ ID NO: 150334 - DNA, 22 bp, Artificial sequence
  SiRNA target sequence
tattaggacttaaagctggtgc

SEQ ID NO: 150335 - DNA, 22 bp, Artificial sequence
  SiRNA target sequence
attaggacttaaagctggtgca

SEQ ID NO: 150336 - DNA, 22 bp, Artificial sequence
  SiRNA target sequence
ttaggacttaaagctggtgcaa

SEQ ID NO: 150337 - DNA, 22 bp, Artificial sequence
  SiRNA target sequence
taggacttaaagctggtgcaag

SEQ ID NO: 150338 - DNA, 22 bp, Artificial sequence
  SiRNA target sequence
aggacttaaagctggtgcaagc

SEQ ID NO: 150339 - DNA, 22 bp, Artificial sequence
  SiRNA target sequence
ggacttaaagctggtgcaagca

SEQ ID NO: 150340 - DNA, 22 bp, Artificial sequence
  SiRNA target sequence
gacttaaagctggtgcaagcat

SEQ ID NO: 150341 - DNA, 22 bp, Artificial sequence
  SiRNA target sequence
acttaaagctggtgcaagcatt

SEQ ID NO: 150342 - DNA, 22 bp, Artificial sequence
  SiRNA target sequence
cttaaagctggtgcaagcattg

SEQ ID NO: 150343 - DNA, 22 bp, Artificial sequence
  SiRNA target sequence
ttaaagctggtgcaagcattga

SEQ ID NO: 150344 - DNA, 22 bp, Artificial sequence
  SiRNA target sequence
taaagctggtgcaagcattgat

SEQ ID NO: 150345 - DNA, 22 bp, Artificial sequence
  SiRNA target sequence
aaagctggtgcaagcattgatg

SEQ ID NO: 150346 - DNA, 22 bp, Artificial sequence
  SiRNA target sequence
aagctggtgcaagcattgatga

SEQ ID NO: 150347 - DNA, 22 bp, Artificial sequence
  SiRNA target sequence
agctggtgcaagcattgatgaa

SEQ ID NO: 150348 - DNA, 22 bp, Artificial sequence
  SiRNA target sequence
gctggtgcaagcattgatgaag

SEQ ID NO: 150349 - DNA, 22 bp, Artificial sequence
  SiRNA target sequence
ctggtgcaagcattgatgaagt

SEQ ID NO: 150350 - DNA, 22 bp, Artificial sequence
  SiRNA target sequence
tggtgcaagcattgatgaagtt

SEQ ID NO: 150351 - DNA, 22 bp, Artificial sequence
  SiRNA target sequence
ggtgcaagcattgatgaagtta

SEQ ID NO: 150352 - DNA, 22 bp, Artificial sequence
  SiRNA target sequence
gtgcaagcattgatgaagttaa

SEQ ID NO: 150353 - DNA, 22 bp, Artificial sequence
  SiRNA target sequence
tgcaagcattgatgaagttaaa

SEQ ID NO: 150354 - DNA, 22 bp, Artificial sequence
  SiRNA target sequence
gcaagcattgatgaagttaaaa

SEQ ID NO: 150355 - DNA, 22 bp, Artificial sequence
  SiRNA target sequence
caagcattgatgaagttaaaaa

SEQ ID NO: 150356 - DNA, 22 bp, Artificial sequence
  SiRNA target sequence
aagcattgatgaagttaaaaaa

SEQ ID NO: 150357 - DNA, 22 bp, Artificial sequence
  SiRNA target sequence
agcattgatgaagttaaaaaag

SEQ ID NO: 150358 - DNA, 22 bp, Artificial sequence
  SiRNA target sequence
gcattgatgaagttaaaaaagc

SEQ ID NO: 150359 - DNA, 22 bp, Artificial sequence
  SiRNA target sequence
cattgatgaagttaaaaaagca

SEQ ID NO: 150360 - DNA, 22 bp, Artificial sequence
  SiRNA target sequence
attgatgaagttaaaaaagcat

SEQ ID NO: 150361 - DNA, 22 bp, Artificial sequence
  SiRNA target sequence
ttgatgaagttaaaaaagcatt

SEQ ID NO: 150362 - DNA, 22 bp, Artificial sequence
  SiRNA target sequence
tgatgaagttaaaaaagcattt

SEQ ID NO: 150363 - DNA, 22 bp, Artificial sequence
  SiRNA target sequence
gatgaagttaaaaaagcattta

SEQ ID NO: 150364 - DNA, 22 bp, Artificial sequence
  SiRNA target sequence
atgaagttaaaaaagcatttac

SEQ ID NO: 150365 - DNA, 22 bp, Artificial sequence
  SiRNA target sequence
tgaagttaaaaaagcatttaca

SEQ ID NO: 150366 - DNA, 22 bp, Artificial sequence
  SiRNA target sequence
gaagttaaaaaagcatttacaa

SEQ ID NO: 150367 - DNA, 22 bp, Artificial sequence
  SiRNA target sequence
aagttaaaaaagcatttacaaa

SEQ ID NO: 150368 - DNA, 22 bp, Artificial sequence
  SiRNA target sequence
agttaaaaaagcatttacaaaa

SEQ ID NO: 150369 - DNA, 22 bp, Artificial sequence
  SiRNA target sequence
gttaaaaaagcatttacaaaaa

SEQ ID NO: 150370 - DNA, 22 bp, Artificial sequence
  SiRNA target sequence
ttaaaaaagcatttacaaaaaa

SEQ ID NO: 150371 - DNA, 22 bp, Artificial sequence
  SiRNA target sequence
taaaaaagcatttacaaaaaaa

SEQ ID NO: 150372 - DNA, 22 bp, Artificial sequence
  SiRNA target sequence
aaaaaagcatttacaaaaaaac

SEQ ID NO: 150373 - DNA, 22 bp, Artificial sequence
  SiRNA target sequence
aaaaagcatttacaaaaaaaca

SEQ ID NO: 150374 - DNA, 22 bp, Artificial sequence
  SiRNA target sequence
aaaagcatttacaaaaaaacaa

SEQ ID NO: 150375 - DNA, 22 bp, Artificial sequence
  SiRNA target sequence
aaagcatttacaaaaaaacaaa

SEQ ID NO: 150376 - DNA, 22 bp, Artificial sequence
  SiRNA target sequence
aagcatttacaaaaaaacaaag

SEQ ID NO: 150377 - DNA, 22 bp, Artificial sequence
  SiRNA target sequence
agcatttacaaaaaaacaaagg

SEQ ID NO: 150378 - DNA, 22 bp, Artificial sequence
  SiRNA target sequence
gcatttacaaaaaaacaaaggg

SEQ ID NO: 150379 - DNA, 22 bp, Artificial sequence
  SiRNA target sequence
catttacaaaaaaacaaaggga

SEQ ID NO: 150380 - DNA, 22 bp, Artificial sequence
  SiRNA target sequence
atttacaaaaaaacaaagggaa

SEQ ID NO: 150381 - DNA, 22 bp, Artificial sequence
  SiRNA target sequence
tttacaaaaaaacaaagggaat

SEQ ID NO: 150382 - DNA, 22 bp, Artificial sequence
  SiRNA target sequence
ttacaaaaaaacaaagggaatg

SEQ ID NO: 150383 - DNA, 22 bp, Artificial sequence
  SiRNA target sequence
tacaaaaaaacaaagggaatgt

SEQ ID NO: 150384 - DNA, 22 bp, Artificial sequence
  SiRNA target sequence
acaaaaaaacaaagggaatgtc

SEQ ID NO: 150385 - DNA, 22 bp, Artificial sequence
  SiRNA target sequence
caaaaaaacaaagggaatgtca

SEQ ID NO: 150386 - DNA, 22 bp, Artificial sequence
  SiRNA target sequence
aaaaaaacaaagggaatgtcat

SEQ ID NO: 150387 - DNA, 22 bp, Artificial sequence
  SiRNA target sequence
aaaaaacaaagggaatgtcatc

SEQ ID NO: 150388 - DNA, 22 bp, Artificial sequence
  SiRNA target sequence
aaaaacaaagggaatgtcatcc

SEQ ID NO: 150389 - DNA, 22 bp, Artificial sequence
  SiRNA target sequence
aaaacaaagggaatgtcatccc

SEQ ID NO: 150390 - DNA, 22 bp, Artificial sequence
  SiRNA target sequence
aaacaaagggaatgtcatcccg

SEQ ID NO: 150391 - DNA, 22 bp, Artificial sequence
  SiRNA target sequence
aacaaagggaatgtcatcccga

SEQ ID NO: 150392 - DNA, 22 bp, Artificial sequence
  SiRNA target sequence
acaaagggaatgtcatcccgat

SEQ ID NO: 150393 - DNA, 22 bp, Artificial sequence
  SiRNA target sequence
caaagggaatgtcatcccgatg

SEQ ID NO: 150394 - DNA, 22 bp, Artificial sequence
  SiRNA target sequence
aaagggaatgtcatcccgatgg

SEQ ID NO: 150395 - DNA, 22 bp, Artificial sequence
  SiRNA target sequence
aagggaatgtcatcccgatggt

SEQ ID NO: 150396 - DNA, 22 bp, Artificial sequence
  SiRNA target sequence
agggaatgtcatcccgatggtg

SEQ ID NO: 150397 - DNA, 22 bp, Artificial sequence
  SiRNA target sequence
gggaatgtcatcccgatggtgc

SEQ ID NO: 150398 - DNA, 22 bp, Artificial sequence
  SiRNA target sequence
ggaatgtcatcccgatggtgca

SEQ ID NO: 150399 - DNA, 22 bp, Artificial sequence
  SiRNA target sequence
gaatgtcatcccgatggtgcat

SEQ ID NO: 150400 - DNA, 22 bp, Artificial sequence
  SiRNA target sequence
aatgtcatcccgatggtgcatt

SEQ ID NO: 150401 - DNA, 22 bp, Artificial sequence
  SiRNA target sequence
atgtcatcccgatggtgcattt

SEQ ID NO: 150402 - DNA, 22 bp, Artificial sequence
  SiRNA target sequence
tgtcatcccgatggtgcatttt

SEQ ID NO: 150403 - DNA, 22 bp, Artificial sequence
  SiRNA target sequence
gtcatcccgatggtgcattttt

SEQ ID NO: 150404 - DNA, 22 bp, Artificial sequence
  SiRNA target sequence
tcatcccgatggtgcatttttt

SEQ ID NO: 150405 - DNA, 22 bp, Artificial sequence
  SiRNA target sequence
catcccgatggtgcatttttta

SEQ ID NO: 150406 - DNA, 22 bp, Artificial sequence
  SiRNA target sequence
atcccgatggtgcattttttaa

SEQ ID NO: 150407 - DNA, 22 bp, Artificial sequence
  SiRNA target sequence
tcccgatggtgcattttttaaa

SEQ ID NO: 150408 - DNA, 22 bp, Artificial sequence
  SiRNA target sequence
cccgatggtgcattttttaaag

SEQ ID NO: 150409 - DNA, 22 bp, Artificial sequence
  SiRNA target sequence
ccgatggtgcattttttaaagc

SEQ ID NO: 150410 - DNA, 22 bp, Artificial sequence
  SiRNA target sequence
cgatggtgcattttttaaagct

SEQ ID NO: 150411 - DNA, 22 bp, Artificial sequence
  SiRNA target sequence
gatggtgcattttttaaagctg

SEQ ID NO: 150412 - DNA, 22 bp, Artificial sequence
  SiRNA target sequence
atggtgcattttttaaagctgc

SEQ ID NO: 150413 - DNA, 22 bp, Artificial sequence
  SiRNA target sequence
tggtgcattttttaaagctgct

SEQ ID NO: 150414 - DNA, 22 bp, Artificial sequence
  SiRNA target sequence
ggtgcattttttaaagctgctc

SEQ ID NO: 150415 - DNA, 22 bp, Artificial sequence
  SiRNA target sequence
gtgcattttttaaagctgctct

SEQ ID NO: 150416 - DNA, 22 bp, Artificial sequence
  SiRNA target sequence
tgcattttttaaagctgctctt

SEQ ID NO: 150417 - DNA, 22 bp, Artificial sequence
  SiRNA target sequence
gcattttttaaagctgctctta

SEQ ID NO: 150418 - DNA, 22 bp, Artificial sequence
  SiRNA target sequence
cattttttaaagctgctcttag

SEQ ID NO: 150419 - DNA, 22 bp, Artificial sequence
  SiRNA target sequence
attttttaaagctgctcttaga

SEQ ID NO: 150420 - DNA, 22 bp, Artificial sequence
  SiRNA target sequence
ttttttaaagctgctcttagaa

SEQ ID NO: 150421 - DNA, 22 bp, Artificial sequence
  SiRNA target sequence
tttttaaagctgctcttagaaa

SEQ ID NO: 150422 - DNA, 22 bp, Artificial sequence
  SiRNA target sequence
ttttaaagctgctcttagaaaa

SEQ ID NO: 150423 - DNA, 22 bp, Artificial sequence
  SiRNA target sequence
tttaaagctgctcttagaaaat

SEQ ID NO: 150424 - DNA, 22 bp, Artificial sequence
  SiRNA target sequence
ttaaagctgctcttagaaaatg

SEQ ID NO: 150425 - DNA, 22 bp, Artificial sequence
  SiRNA target sequence
taaagctgctcttagaaaatgt

SEQ ID NO: 150426 - DNA, 22 bp, Artificial sequence
  SiRNA target sequence
aaagctgctcttagaaaatgta

SEQ ID NO: 150427 - DNA, 22 bp, Artificial sequence
  SiRNA target sequence
aagctgctcttagaaaatgtaa

SEQ ID NO: 150428 - DNA, 22 bp, Artificial sequence
  SiRNA target sequence
agctgctcttagaaaatgtaaa

SEQ ID NO: 150429 - DNA, 22 bp, Artificial sequence
  SiRNA target sequence
gctgctcttagaaaatgtaaaa

SEQ ID NO: 150430 - DNA, 22 bp, Artificial sequence
  SiRNA target sequence
ctgctcttagaaaatgtaaaac

SEQ ID NO: 150431 - DNA, 22 bp, Artificial sequence
  SiRNA target sequence
tgctcttagaaaatgtaaaaca

SEQ ID NO: 150432 - DNA, 22 bp, Artificial sequence
  SiRNA target sequence
gctcttagaaaatgtaaaacag

SEQ ID NO: 150433 - DNA, 22 bp, Artificial sequence
  SiRNA target sequence
ctcttagaaaatgtaaaacaga

SEQ ID NO: 150434 - DNA, 22 bp, Artificial sequence
  SiRNA target sequence
tcttagaaaatgtaaaacagat

SEQ ID NO: 150435 - DNA, 22 bp, Artificial sequence
  SiRNA target sequence
cttagaaaatgtaaaacagatg

SEQ ID NO: 150436 - DNA, 22 bp, Artificial sequence
  SiRNA target sequence
ttagaaaatgtaaaacagatga

SEQ ID NO: 150437 - DNA, 22 bp, Artificial sequence
  SiRNA target sequence
tagaaaatgtaaaacagatgaa

SEQ ID NO: 150438 - DNA, 22 bp, Artificial sequence
  SiRNA target sequence
agaaaatgtaaaacagatgaag

SEQ ID NO: 150439 - DNA, 22 bp, Artificial sequence
  SiRNA target sequence
gaaaatgtaaaacagatgaaga

SEQ ID NO: 150440 - DNA, 22 bp, Artificial sequence
  SiRNA target sequence
aaaatgtaaaacagatgaagaa

SEQ ID NO: 150441 - DNA, 22 bp, Artificial sequence
  SiRNA target sequence
aaatgtaaaacagatgaagaaa

SEQ ID NO: 150442 - DNA, 22 bp, Artificial sequence
  SiRNA target sequence
aatgtaaaacagatgaagaaag

SEQ ID NO: 150443 - DNA, 22 bp, Artificial sequence
  SiRNA target sequence
atgtaaaacagatgaagaaaga

SEQ ID NO: 150444 - DNA, 22 bp, Artificial sequence
  SiRNA target sequence
tgtaaaacagatgaagaaagag

SEQ ID NO: 150445 - DNA, 22 bp, Artificial sequence
  SiRNA target sequence
gtaaaacagatgaagaaagagc

SEQ ID NO: 150446 - DNA, 22 bp, Artificial sequence
  SiRNA target sequence
taaaacagatgaagaaagagca

SEQ ID NO: 150447 - DNA, 22 bp, Artificial sequence
  SiRNA target sequence
aaaacagatgaagaaagagcaa

SEQ ID NO: 150448 - DNA, 22 bp, Artificial sequence
  SiRNA target sequence
aaacagatgaagaaagagcaaa

SEQ ID NO: 150449 - DNA, 22 bp, Artificial sequence
  SiRNA target sequence
aacagatgaagaaagagcaaaa

SEQ ID NO: 150450 - DNA, 22 bp, Artificial sequence
  SiRNA target sequence
acagatgaagaaagagcaaaag

SEQ ID NO: 150451 - DNA, 22 bp, Artificial sequence
  SiRNA target sequence
cagatgaagaaagagcaaaagt

SEQ ID NO: 150452 - DNA, 22 bp, Artificial sequence
  SiRNA target sequence
agatgaagaaagagcaaaagtt

SEQ ID NO: 150453 - DNA, 22 bp, Artificial sequence
  SiRNA target sequence
gatgaagaaagagcaaaagttg

SEQ ID NO: 150454 - DNA, 22 bp, Artificial sequence
  SiRNA target sequence
atgaagaaagagcaaaagttga

SEQ ID NO: 150455 - DNA, 22 bp, Artificial sequence
  SiRNA target sequence
tgaagaaagagcaaaagttgaa

SEQ ID NO: 150456 - DNA, 22 bp, Artificial sequence
  SiRNA target sequence
gaagaaagagcaaaagttgaaa

SEQ ID NO: 150457 - DNA, 22 bp, Artificial sequence
  SiRNA target sequence
aagaaagagcaaaagttgaaaa

SEQ ID NO: 150458 - DNA, 22 bp, Artificial sequence
  SiRNA target sequence
agaaagagcaaaagttgaaaaa

SEQ ID NO: 150459 - DNA, 22 bp, Artificial sequence
  SiRNA target sequence
gaaagagcaaaagttgaaaaag

SEQ ID NO: 150460 - DNA, 22 bp, Artificial sequence
  SiRNA target sequence
aaagagcaaaagttgaaaaaga

SEQ ID NO: 150461 - DNA, 22 bp, Artificial sequence
  SiRNA target sequence
aagagcaaaagttgaaaaagaa

SEQ ID NO: 150462 - DNA, 22 bp, Artificial sequence
  SiRNA target sequence
agagcaaaagttgaaaaagaat

SEQ ID NO: 150463 - DNA, 22 bp, Artificial sequence
  SiRNA target sequence
gagcaaaagttgaaaaagaatt

SEQ ID NO: 150464 - DNA, 22 bp, Artificial sequence
  SiRNA target sequence
agcaaaagttgaaaaagaattt

SEQ ID NO: 150465 - DNA, 22 bp, Artificial sequence
  SiRNA target sequence
gcaaaagttgaaaaagaattta

SEQ ID NO: 150466 - DNA, 22 bp, Artificial sequence
  SiRNA target sequence
caaaagttgaaaaagaatttaa

SEQ ID NO: 150467 - DNA, 22 bp, Artificial sequence
  SiRNA target sequence
aaaagttgaaaaagaatttaaa

SEQ ID NO: 150468 - DNA, 22 bp, Artificial sequence
  SiRNA target sequence
aaagttgaaaaagaatttaaag

SEQ ID NO: 150469 - DNA, 22 bp, Artificial sequence
  SiRNA target sequence
aagttgaaaaagaatttaaaga

SEQ ID NO: 150470 - DNA, 22 bp, Artificial sequence
  SiRNA target sequence
agttgaaaaagaatttaaagaa

SEQ ID NO: 150471 - DNA, 22 bp, Artificial sequence
  SiRNA target sequence
gttgaaaaagaatttaaagaaa

SEQ ID NO: 150472 - DNA, 22 bp, Artificial sequence
  SiRNA target sequence
ttgaaaaagaatttaaagaaaa

SEQ ID NO: 150473 - DNA, 22 bp, Artificial sequence
  SiRNA target sequence
tgaaaaagaatttaaagaaaaa

SEQ ID NO: 150474 - DNA, 22 bp, Artificial sequence
  SiRNA target sequence
gaaaaagaatttaaagaaaaat

SEQ ID NO: 150475 - DNA, 22 bp, Artificial sequence
  SiRNA target sequence
aaaaagaatttaaagaaaaatc

SEQ ID NO: 150476 - DNA, 22 bp, Artificial sequence
  SiRNA target sequence
aaaagaatttaaagaaaaatca

SEQ ID NO: 150477 - DNA, 22 bp, Artificial sequence
  SiRNA target sequence
aaagaatttaaagaaaaatcac

SEQ ID NO: 150478 - DNA, 22 bp, Artificial sequence
  SiRNA target sequence
aagaatttaaagaaaaatcaca

SEQ ID NO: 150479 - DNA, 22 bp, Artificial sequence
  SiRNA target sequence
agaatttaaagaaaaatcacaa

SEQ ID NO: 150480 - DNA, 22 bp, Artificial sequence
  SiRNA target sequence
gaatttaaagaaaaatcacaaa

SEQ ID NO: 150481 - DNA, 22 bp, Artificial sequence
  SiRNA target sequence
aatttaaagaaaaatcacaaaa

SEQ ID NO: 150482 - DNA, 22 bp, Artificial sequence
  SiRNA target sequence
atttaaagaaaaatcacaaaaa

SEQ ID NO: 150483 - DNA, 22 bp, Artificial sequence
  SiRNA target sequence
tttaaagaaaaatcacaaaaat

SEQ ID NO: 150484 - DNA, 22 bp, Artificial sequence
  SiRNA target sequence
ttaaagaaaaatcacaaaaatg

SEQ ID NO: 150485 - DNA, 22 bp, Artificial sequence
  SiRNA target sequence
taaagaaaaatcacaaaaatgt

SEQ ID NO: 150486 - DNA, 22 bp, Artificial sequence
  SiRNA target sequence
aaagaaaaatcacaaaaatgta

SEQ ID NO: 150487 - DNA, 22 bp, Artificial sequence
  SiRNA target sequence
aagaaaaatcacaaaaatgtaa

SEQ ID NO: 150488 - DNA, 22 bp, Artificial sequence
  SiRNA target sequence
agaaaaatcacaaaaatgtaat

SEQ ID NO: 150489 - DNA, 22 bp, Artificial sequence
  SiRNA target sequence
gaaaaatcacaaaaatgtaatc

SEQ ID NO: 150490 - DNA, 22 bp, Artificial sequence
  SiRNA target sequence
aaaaatcacaaaaatgtaatca

SEQ ID NO: 150491 - DNA, 22 bp, Artificial sequence
  SiRNA target sequence
aaaatcacaaaaatgtaatcaa

SEQ ID NO: 150492 - DNA, 22 bp, Artificial sequence
  SiRNA target sequence
aaatcacaaaaatgtaatcaag

SEQ ID NO: 150493 - DNA, 22 bp, Artificial sequence
  SiRNA target sequence
aatcacaaaaatgtaatcaagc

SEQ ID NO: 150494 - DNA, 22 bp, Artificial sequence
  SiRNA target sequence
atcacaaaaatgtaatcaagct

SEQ ID NO: 150495 - DNA, 22 bp, Artificial sequence
  SiRNA target sequence
tcacaaaaatgtaatcaagcta

SEQ ID NO: 150496 - DNA, 22 bp, Artificial sequence
  SiRNA target sequence
cacaaaaatgtaatcaagctaa

SEQ ID NO: 150497 - DNA, 22 bp, Artificial sequence
  SiRNA target sequence
acaaaaatgtaatcaagctaaa

SEQ ID NO: 150498 - DNA, 22 bp, Artificial sequence
  SiRNA target sequence
caaaaatgtaatcaagctaaag

SEQ ID NO: 150499 - DNA, 22 bp, Artificial sequence
  SiRNA target sequence
aaaaatgtaatcaagctaaagc

SEQ ID NO: 150500 - DNA, 22 bp, Artificial sequence
  SiRNA target sequence
aaaatgtaatcaagctaaagca

SEQ ID NO: 150501 - DNA, 22 bp, Artificial sequence
  SiRNA target sequence
aaatgtaatcaagctaaagcag

SEQ ID NO: 150502 - DNA, 22 bp, Artificial sequence
  SiRNA target sequence
aatgtaatcaagctaaagcagt

SEQ ID NO: 150503 - DNA, 22 bp, Artificial sequence
  SiRNA target sequence
atgtaatcaagctaaagcagtt

SEQ ID NO: 150504 - DNA, 22 bp, Artificial sequence
  SiRNA target sequence
tgtaatcaagctaaagcagttt

SEQ ID NO: 150505 - DNA, 22 bp, Artificial sequence
  SiRNA target sequence
gtaatcaagctaaagcagtttt

SEQ ID NO: 150506 - DNA, 22 bp, Artificial sequence
  SiRNA target sequence
taatcaagctaaagcagtttta

SEQ ID NO: 150507 - DNA, 22 bp, Artificial sequence
  SiRNA target sequence
aatcaagctaaagcagttttat

SEQ ID NO: 150508 - DNA, 22 bp, Artificial sequence
  SiRNA target sequence
atcaagctaaagcagttttatt

SEQ ID NO: 150509 - DNA, 22 bp, Artificial sequence
  SiRNA target sequence
tcaagctaaagcagttttattt

SEQ ID NO: 150510 - DNA, 22 bp, Artificial sequence
  SiRNA target sequence
caagctaaagcagttttatttg

SEQ ID NO: 150511 - DNA, 22 bp, Artificial sequence
  SiRNA target sequence
aagctaaagcagttttatttga

SEQ ID NO: 150512 - DNA, 22 bp, Artificial sequence
  SiRNA target sequence
agctaaagcagttttatttgat

SEQ ID NO: 150513 - DNA, 22 bp, Artificial sequence
  SiRNA target sequence
gctaaagcagttttatttgatg

SEQ ID NO: 150514 - DNA, 22 bp, Artificial sequence
  SiRNA target sequence
ctaaagcagttttatttgatga

SEQ ID NO: 150515 - DNA, 22 bp, Artificial sequence
  SiRNA target sequence
taaagcagttttatttgatgag

SEQ ID NO: 150516 - DNA, 22 bp, Artificial sequence
  SiRNA target sequence
aaagcagttttatttgatgaga

SEQ ID NO: 150517 - DNA, 22 bp, Artificial sequence
  SiRNA target sequence
aagcagttttatttgatgagaa

SEQ ID NO: 150518 - DNA, 22 bp, Artificial sequence
  SiRNA target sequence
agcagttttatttgatgagaaa

SEQ ID NO: 150519 - DNA, 22 bp, Artificial sequence
  SiRNA target sequence
gcagttttatttgatgagaaaa

SEQ ID NO: 150520 - DNA, 22 bp, Artificial sequence
  SiRNA target sequence
cagttttatttgatgagaaaaa

SEQ ID NO: 150521 - DNA, 22 bp, Artificial sequence
  SiRNA target sequence
agttttatttgatgagaaaaaa

SEQ ID NO: 150522 - DNA, 22 bp, Artificial sequence
  SiRNA target sequence
gttttatttgatgagaaaaaaa

SEQ ID NO: 150523 - DNA, 22 bp, Artificial sequence
  SiRNA target sequence
ttttatttgatgagaaaaaaaa

SEQ ID NO: 150524 - DNA, 22 bp, Artificial sequence
  SiRNA target sequence
tttatttgatgagaaaaaaaag

SEQ ID NO: 150525 - DNA, 22 bp, Artificial sequence
  SiRNA target sequence
ttatttgatgagaaaaaaaagc

SEQ ID NO: 150526 - DNA, 22 bp, Artificial sequence
  SiRNA target sequence
tatttgatgagaaaaaaaagca

SEQ ID NO: 150527 - DNA, 22 bp, Artificial sequence
  SiRNA target sequence
atttgatgagaaaaaaaagcaa

SEQ ID NO: 150528 - DNA, 22 bp, Artificial sequence
  SiRNA target sequence
tttgatgagaaaaaaaagcaag

SEQ ID NO: 150529 - DNA, 22 bp, Artificial sequence
  SiRNA target sequence
ttgatgagaaaaaaaagcaaga

SEQ ID NO: 150530 - DNA, 22 bp, Artificial sequence
  SiRNA target sequence
tgatgagaaaaaaaagcaagag

SEQ ID NO: 150531 - DNA, 22 bp, Artificial sequence
  SiRNA target sequence
gatgagaaaaaaaagcaagagt

SEQ ID NO: 150532 - DNA, 22 bp, Artificial sequence
  SiRNA target sequence
atgagaaaaaaaagcaagagta

SEQ ID NO: 150533 - DNA, 22 bp, Artificial sequence
  SiRNA target sequence
tgagaaaaaaaagcaagagtat

SEQ ID NO: 150534 - DNA, 22 bp, Artificial sequence
  SiRNA target sequence
gagaaaaaaaagcaagagtatg

SEQ ID NO: 150535 - DNA, 22 bp, Artificial sequence
  SiRNA target sequence
agaaaaaaaagcaagagtatga

SEQ ID NO: 150536 - DNA, 22 bp, Artificial sequence
  SiRNA target sequence
gaaaaaaaagcaagagtatgat

SEQ ID NO: 150537 - DNA, 22 bp, Artificial sequence
  SiRNA target sequence
aaaaaaaagcaagagtatgata

SEQ ID NO: 150538 - DNA, 22 bp, Artificial sequence
  SiRNA target sequence
aaaaaaagcaagagtatgatat

SEQ ID NO: 150539 - DNA, 22 bp, Artificial sequence
  SiRNA target sequence
aaaaaagcaagagtatgatatg

SEQ ID NO: 150540 - DNA, 22 bp, Artificial sequence
  SiRNA target sequence
aaaaagcaagagtatgatatgg

SEQ ID NO: 150541 - DNA, 22 bp, Artificial sequence
  SiRNA target sequence
aaaagcaagagtatgatatggg

SEQ ID NO: 150542 - DNA, 22 bp, Artificial sequence
  SiRNA target sequence
aaagcaagagtatgatatggga

SEQ ID NO: 150543 - DNA, 22 bp, Artificial sequence
  SiRNA target sequence
aagcaagagtatgatatgggaa

SEQ ID NO: 150544 - DNA, 22 bp, Artificial sequence
  SiRNA target sequence
agcaagagtatgatatgggaat

SEQ ID NO: 150545 - DNA, 22 bp, Artificial sequence
  SiRNA target sequence
gcaagagtatgatatgggaatg

SEQ ID NO: 150546 - DNA, 22 bp, Artificial sequence
  SiRNA target sequence
caagagtatgatatgggaatga

SEQ ID NO: 150547 - DNA, 22 bp, Artificial sequence
  SiRNA target sequence
aagagtatgatatgggaatgac

SEQ ID NO: 150548 - DNA, 22 bp, Artificial sequence
  SiRNA target sequence
agagtatgatatgggaatgact

SEQ ID NO: 150549 - DNA, 22 bp, Artificial sequence
  SiRNA target sequence
gagtatgatatgggaatgactg

SEQ ID NO: 150550 - DNA, 22 bp, Artificial sequence
  SiRNA target sequence
agtatgatatgggaatgactgg

SEQ ID NO: 150551 - DNA, 22 bp, Artificial sequence
  SiRNA target sequence
gtatgatatgggaatgactggc

SEQ ID NO: 150552 - DNA, 22 bp, Artificial sequence
  SiRNA target sequence
tatgatatgggaatgactggcg

SEQ ID NO: 150553 - DNA, 22 bp, Artificial sequence
  SiRNA target sequence
atgatatgggaatgactggcga

SEQ ID NO: 150554 - DNA, 22 bp, Artificial sequence
  SiRNA target sequence
tgatatgggaatgactggcgat

SEQ ID NO: 150555 - DNA, 22 bp, Artificial sequence
  SiRNA target sequence
gatatgggaatgactggcgatt

SEQ ID NO: 150556 - DNA, 22 bp, Artificial sequence
  SiRNA target sequence
atatgggaatgactggcgattt

SEQ ID NO: 150557 - DNA, 22 bp, Artificial sequence
  SiRNA target sequence
tatgggaatgactggcgatttt

SEQ ID NO: 150558 - DNA, 22 bp, Artificial sequence
  SiRNA target sequence
atgggaatgactggcgattttg

SEQ ID NO: 150559 - DNA, 22 bp, Artificial sequence
  SiRNA target sequence
tgggaatgactggcgattttgg

SEQ ID NO: 150560 - DNA, 22 bp, Artificial sequence
  SiRNA target sequence
gggaatgactggcgattttgga

SEQ ID NO: 150561 - DNA, 22 bp, Artificial sequence
  SiRNA target sequence
ggaatgactggcgattttggat

SEQ ID NO: 150562 - DNA, 22 bp, Artificial sequence
  SiRNA target sequence
gaatgactggcgattttggatt

SEQ ID NO: 150563 - DNA, 22 bp, Artificial sequence
  SiRNA target sequence
aatgactggcgattttggattt

SEQ ID NO: 150564 - DNA, 22 bp, Artificial sequence
  SiRNA target sequence
atgactggcgattttggatttt

SEQ ID NO: 150565 - DNA, 22 bp, Artificial sequence
  SiRNA target sequence
tgactggcgattttggattttc

SEQ ID NO: 150566 - DNA, 22 bp, Artificial sequence
  SiRNA target sequence
gactggcgattttggattttct

SEQ ID NO: 150567 - DNA, 22 bp, Artificial sequence
  SiRNA target sequence
actggcgattttggattttctg

SEQ ID NO: 150568 - DNA, 22 bp, Artificial sequence
  SiRNA target sequence
ctggcgattttggattttctgc

SEQ ID NO: 150569 - DNA, 22 bp, Artificial sequence
  SiRNA target sequence
tggcgattttggattttctgca

SEQ ID NO: 150570 - DNA, 22 bp, Artificial sequence
  SiRNA target sequence
ggcgattttggattttctgcag

SEQ ID NO: 150571 - DNA, 22 bp, Artificial sequence
  SiRNA target sequence
gcgattttggattttctgcagg

SEQ ID NO: 150572 - DNA, 22 bp, Artificial sequence
  SiRNA target sequence
cgattttggattttctgcaggt

SEQ ID NO: 150573 - DNA, 22 bp, Artificial sequence
  SiRNA target sequence
gattttggattttctgcaggtg

SEQ ID NO: 150574 - DNA, 22 bp, Artificial sequence
  SiRNA target sequence
attttggattttctgcaggtgg

SEQ ID NO: 150575 - DNA, 22 bp, Artificial sequence
  SiRNA target sequence
ttttggattttctgcaggtggt

SEQ ID NO: 150576 - DNA, 22 bp, Artificial sequence
  SiRNA target sequence
tttggattttctgcaggtggtg

SEQ ID NO: 150577 - DNA, 22 bp, Artificial sequence
  SiRNA target sequence
ttggattttctgcaggtggtgg

SEQ ID NO: 150578 - DNA, 22 bp, Artificial sequence
  SiRNA target sequence
tggattttctgcaggtggtgga

SEQ ID NO: 150579 - DNA, 22 bp, Artificial sequence
  SiRNA target sequence
ggattttctgcaggtggtggag

SEQ ID NO: 150580 - DNA, 22 bp, Artificial sequence
  SiRNA target sequence
gattttctgcaggtggtggaga

SEQ ID NO: 150581 - DNA, 22 bp, Artificial sequence
  SiRNA target sequence
attttctgcaggtggtggagac

SEQ ID NO: 150582 - DNA, 22 bp, Artificial sequence
  SiRNA target sequence
ttttctgcaggtggtggagact

SEQ ID NO: 150583 - DNA, 22 bp, Artificial sequence
  SiRNA target sequence
tttctgcaggtggtggagactt

SEQ ID NO: 150584 - DNA, 22 bp, Artificial sequence
  SiRNA target sequence
ttctgcaggtggtggagacttt

SEQ ID NO: 150585 - DNA, 22 bp, Artificial sequence
  SiRNA target sequence
tctgcaggtggtggagactttt

SEQ ID NO: 150586 - DNA, 22 bp, Artificial sequence
  SiRNA target sequence
ctgcaggtggtggagacttttt

SEQ ID NO: 150587 - DNA, 22 bp, Artificial sequence
  SiRNA target sequence
tgcaggtggtggagactttttc

SEQ ID NO: 150588 - DNA, 22 bp, Artificial sequence
  SiRNA target sequence
gcaggtggtggagactttttcg

SEQ ID NO: 150589 - DNA, 22 bp, Artificial sequence
  SiRNA target sequence
caggtggtggagactttttcga

SEQ ID NO: 150590 - DNA, 22 bp, Artificial sequence
  SiRNA target sequence
aggtggtggagactttttcgat

SEQ ID NO: 150591 - DNA, 22 bp, Artificial sequence
  SiRNA target sequence
ggtggtggagactttttcgata

SEQ ID NO: 150592 - DNA, 22 bp, Artificial sequence
  SiRNA target sequence
gtggtggagactttttcgatat

SEQ ID NO: 150593 - DNA, 22 bp, Artificial sequence
  SiRNA target sequence
tggtggagactttttcgatatt

SEQ ID NO: 150594 - DNA, 22 bp, Artificial sequence
  SiRNA target sequence
ggtggagactttttcgatattt

SEQ ID NO: 150595 - DNA, 22 bp, Artificial sequence
  SiRNA target sequence
gtggagactttttcgatatttt

SEQ ID NO: 150596 - DNA, 22 bp, Artificial sequence
  SiRNA target sequence
tggagactttttcgatattttt

SEQ ID NO: 150597 - DNA, 22 bp, Artificial sequence
  SiRNA target sequence
ggagactttttcgatatttttt

SEQ ID NO: 150598 - DNA, 22 bp, Artificial sequence
  SiRNA target sequence
gagactttttcgatattttttc

SEQ ID NO: 150599 - DNA, 22 bp, Artificial sequence
  SiRNA target sequence
agactttttcgatattttttca

SEQ ID NO: 150600 - DNA, 22 bp, Artificial sequence
  SiRNA target sequence
gactttttcgatattttttcaa

SEQ ID NO: 150601 - DNA, 22 bp, Artificial sequence
  SiRNA target sequence
actttttcgatattttttcaag

SEQ ID NO: 150602 - DNA, 22 bp, Artificial sequence
  SiRNA target sequence
ctttttcgatattttttcaagt

SEQ ID NO: 150603 - DNA, 22 bp, Artificial sequence
  SiRNA target sequence
tttttcgatattttttcaagtt

SEQ ID NO: 150604 - DNA, 22 bp, Artificial sequence
  SiRNA target sequence
ttttcgatattttttcaagttt

SEQ ID NO: 150605 - DNA, 22 bp, Artificial sequence
  SiRNA target sequence
tttcgatattttttcaagtttt

SEQ ID NO: 150606 - DNA, 22 bp, Artificial sequence
  SiRNA target sequence
ttcgatattttttcaagtttta

SEQ ID NO: 150607 - DNA, 22 bp, Artificial sequence
  SiRNA target sequence
tcgatattttttcaagttttac

SEQ ID NO: 150608 - DNA, 22 bp, Artificial sequence
  SiRNA target sequence
cgatattttttcaagttttact

SEQ ID NO: 150609 - DNA, 22 bp, Artificial sequence
  SiRNA target sequence
gatattttttcaagttttactg

SEQ ID NO: 150610 - DNA, 22 bp, Artificial sequence
  SiRNA target sequence
atattttttcaagttttactgg

SEQ ID NO: 150611 - DNA, 22 bp, Artificial sequence
  SiRNA target sequence
tattttttcaagttttactggt

SEQ ID NO: 150612 - DNA, 22 bp, Artificial sequence
  SiRNA target sequence
attttttcaagttttactggtg

SEQ ID NO: 150613 - DNA, 22 bp, Artificial sequence
  SiRNA target sequence
ttttttcaagttttactggtgg

SEQ ID NO: 150614 - DNA, 22 bp, Artificial sequence
  SiRNA target sequence
tttttcaagttttactggtgga

SEQ ID NO: 150615 - DNA, 22 bp, Artificial sequence
  SiRNA target sequence
ttttcaagttttactggtggag

SEQ ID NO: 150616 - DNA, 22 bp, Artificial sequence
  SiRNA target sequence
tttcaagttttactggtggagg

SEQ ID NO: 150617 - DNA, 22 bp, Artificial sequence
  SiRNA target sequence
ttcaagttttactggtggagga

SEQ ID NO: 150618 - DNA, 22 bp, Artificial sequence
  SiRNA target sequence
tcaagttttactggtggaggaa

SEQ ID NO: 150619 - DNA, 22 bp, Artificial sequence
  SiRNA target sequence
caagttttactggtggaggaag

SEQ ID NO: 150620 - DNA, 22 bp, Artificial sequence
  SiRNA target sequence
aagttttactggtggaggaaga

SEQ ID NO: 150621 - DNA, 22 bp, Artificial sequence
  SiRNA target sequence
agttttactggtggaggaagaa

SEQ ID NO: 150622 - DNA, 22 bp, Artificial sequence
  SiRNA target sequence
gttttactggtggaggaagaag

SEQ ID NO: 150623 - DNA, 22 bp, Artificial sequence
  SiRNA target sequence
ttttactggtggaggaagaaga

SEQ ID NO: 150624 - DNA, 22 bp, Artificial sequence
  SiRNA target sequence
tttactggtggaggaagaagaa

SEQ ID NO: 150625 - DNA, 22 bp, Artificial sequence
  SiRNA target sequence
ttactggtggaggaagaagaaa

SEQ ID NO: 150626 - DNA, 22 bp, Artificial sequence
  SiRNA target sequence
tactggtggaggaagaagaaat

SEQ ID NO: 150627 - DNA, 22 bp, Artificial sequence
  SiRNA target sequence
actggtggaggaagaagaaatc

SEQ ID NO: 150628 - DNA, 22 bp, Artificial sequence
  SiRNA target sequence
ctggtggaggaagaagaaatcg

SEQ ID NO: 150629 - DNA, 22 bp, Artificial sequence
  SiRNA target sequence
tggtggaggaagaagaaatcga

SEQ ID NO: 150630 - DNA, 22 bp, Artificial sequence
  SiRNA target sequence
ggtggaggaagaagaaatcgag

SEQ ID NO: 150631 - DNA, 22 bp, Artificial sequence
  SiRNA target sequence
gtggaggaagaagaaatcgagt

SEQ ID NO: 150632 - DNA, 22 bp, Artificial sequence
  SiRNA target sequence
tggaggaagaagaaatcgagta

SEQ ID NO: 150633 - DNA, 22 bp, Artificial sequence
  SiRNA target sequence
ggaggaagaagaaatcgagtac

SEQ ID NO: 150634 - DNA, 22 bp, Artificial sequence
  SiRNA target sequence
gaggaagaagaaatcgagtaca

SEQ ID NO: 150635 - DNA, 22 bp, Artificial sequence
  SiRNA target sequence
aggaagaagaaatcgagtacaa

SEQ ID NO: 150636 - DNA, 22 bp, Artificial sequence
  SiRNA target sequence
ggaagaagaaatcgagtacaaa

SEQ ID NO: 150637 - DNA, 22 bp, Artificial sequence
  SiRNA target sequence
gaagaagaaatcgagtacaaaa

SEQ ID NO: 150638 - DNA, 22 bp, Artificial sequence
  SiRNA target sequence
aagaagaaatcgagtacaaaaa

SEQ ID NO: 150639 - DNA, 22 bp, Artificial sequence
  SiRNA target sequence
agaagaaatcgagtacaaaaag

SEQ ID NO: 150640 - DNA, 22 bp, Artificial sequence
  SiRNA target sequence
gaagaaatcgagtacaaaaagt

SEQ ID NO: 150641 - DNA, 22 bp, Artificial sequence
  SiRNA target sequence
aagaaatcgagtacaaaaagtt

SEQ ID NO: 150642 - DNA, 22 bp, Artificial sequence
  SiRNA target sequence
agaaatcgagtacaaaaagttc

SEQ ID NO: 150643 - DNA, 22 bp, Artificial sequence
  SiRNA target sequence
gaaatcgagtacaaaaagttca

SEQ ID NO: 150644 - DNA, 22 bp, Artificial sequence
  SiRNA target sequence
aaatcgagtacaaaaagttcaa

SEQ ID NO: 150645 - DNA, 22 bp, Artificial sequence
  SiRNA target sequence
aatcgagtacaaaaagttcaag

SEQ ID NO: 150646 - DNA, 22 bp, Artificial sequence
  SiRNA target sequence
atcgagtacaaaaagttcaaga

SEQ ID NO: 150647 - DNA, 22 bp, Artificial sequence
  SiRNA target sequence
tcgagtacaaaaagttcaagat

SEQ ID NO: 150648 - DNA, 22 bp, Artificial sequence
  SiRNA target sequence
cgagtacaaaaagttcaagata

SEQ ID NO: 150649 - DNA, 22 bp, Artificial sequence
  SiRNA target sequence
gagtacaaaaagttcaagatac

SEQ ID NO: 150650 - DNA, 22 bp, Artificial sequence
  SiRNA target sequence
agtacaaaaagttcaagataca

SEQ ID NO: 150651 - DNA, 22 bp, Artificial sequence
  SiRNA target sequence
gtacaaaaagttcaagatacag

SEQ ID NO: 150652 - DNA, 22 bp, Artificial sequence
  SiRNA target sequence
tacaaaaagttcaagatacaga

SEQ ID NO: 150653 - DNA, 22 bp, Artificial sequence
  SiRNA target sequence
acaaaaagttcaagatacagaa

SEQ ID NO: 150654 - DNA, 22 bp, Artificial sequence
  SiRNA target sequence
caaaaagttcaagatacagaat

SEQ ID NO: 150655 - DNA, 22 bp, Artificial sequence
  SiRNA target sequence
aaaaagttcaagatacagaata

SEQ ID NO: 150656 - DNA, 22 bp, Artificial sequence
  SiRNA target sequence
aaaagttcaagatacagaatac

SEQ ID NO: 150657 - DNA, 22 bp, Artificial sequence
  SiRNA target sequence
aaagttcaagatacagaatacg

SEQ ID NO: 150658 - DNA, 22 bp, Artificial sequence
  SiRNA target sequence
aagttcaagatacagaatacga

SEQ ID NO: 150659 - DNA, 22 bp, Artificial sequence
  SiRNA target sequence
agttcaagatacagaatacgag

SEQ ID NO: 150660 - DNA, 22 bp, Artificial sequence
  SiRNA target sequence
gttcaagatacagaatacgagt

SEQ ID NO: 150661 - DNA, 22 bp, Artificial sequence
  SiRNA target sequence
ttcaagatacagaatacgagtt

SEQ ID NO: 150662 - DNA, 22 bp, Artificial sequence
  SiRNA target sequence
tcaagatacagaatacgagttt

SEQ ID NO: 150663 - DNA, 22 bp, Artificial sequence
  SiRNA target sequence
caagatacagaatacgagttta

SEQ ID NO: 150664 - DNA, 22 bp, Artificial sequence
  SiRNA target sequence
aagatacagaatacgagtttaa

SEQ ID NO: 150665 - DNA, 22 bp, Artificial sequence
  SiRNA target sequence
agatacagaatacgagtttaat

SEQ ID NO: 150666 - DNA, 22 bp, Artificial sequence
  SiRNA target sequence
gatacagaatacgagtttaata

SEQ ID NO: 150667 - DNA, 22 bp, Artificial sequence
  SiRNA target sequence
atacagaatacgagtttaatat

SEQ ID NO: 150668 - DNA, 22 bp, Artificial sequence
  SiRNA target sequence
tacagaatacgagtttaatatt

SEQ ID NO: 150669 - DNA, 22 bp, Artificial sequence
  SiRNA target sequence
acagaatacgagtttaatattt

SEQ ID NO: 150670 - DNA, 22 bp, Artificial sequence
  SiRNA target sequence
cagaatacgagtttaatatttc

SEQ ID NO: 150671 - DNA, 22 bp, Artificial sequence
  SiRNA target sequence
agaatacgagtttaatatttcg

SEQ ID NO: 150672 - DNA, 22 bp, Artificial sequence
  SiRNA target sequence
gaatacgagtttaatatttcgt

SEQ ID NO: 150673 - DNA, 22 bp, Artificial sequence
  SiRNA target sequence
aatacgagtttaatatttcgtt

SEQ ID NO: 150674 - DNA, 22 bp, Artificial sequence
  SiRNA target sequence
atacgagtttaatatttcgttg

SEQ ID NO: 150675 - DNA, 22 bp, Artificial sequence
  SiRNA target sequence
tacgagtttaatatttcgttga

SEQ ID NO: 150676 - DNA, 22 bp, Artificial sequence
  SiRNA target sequence
acgagtttaatatttcgttgaa

SEQ ID NO: 150677 - DNA, 22 bp, Artificial sequence
  SiRNA target sequence
cgagtttaatatttcgttgaag

SEQ ID NO: 150678 - DNA, 22 bp, Artificial sequence
  SiRNA target sequence
gagtttaatatttcgttgaagg

SEQ ID NO: 150679 - DNA, 22 bp, Artificial sequence
  SiRNA target sequence
agtttaatatttcgttgaagga

SEQ ID NO: 150680 - DNA, 22 bp, Artificial sequence
  SiRNA target sequence
gtttaatatttcgttgaaggaa

SEQ ID NO: 150681 - DNA, 22 bp, Artificial sequence
  SiRNA target sequence
tttaatatttcgttgaaggaag

SEQ ID NO: 150682 - DNA, 22 bp, Artificial sequence
  SiRNA target sequence
ttaatatttcgttgaaggaagc

SEQ ID NO: 150683 - DNA, 22 bp, Artificial sequence
  SiRNA target sequence
taatatttcgttgaaggaagct

SEQ ID NO: 150684 - DNA, 22 bp, Artificial sequence
  SiRNA target sequence
aatatttcgttgaaggaagctt

SEQ ID NO: 150685 - DNA, 22 bp, Artificial sequence
  SiRNA target sequence
atatttcgttgaaggaagctta

SEQ ID NO: 150686 - DNA, 22 bp, Artificial sequence
  SiRNA target sequence
tatttcgttgaaggaagcttat

SEQ ID NO: 150687 - DNA, 22 bp, Artificial sequence
  SiRNA target sequence
atttcgttgaaggaagcttata

SEQ ID NO: 150688 - DNA, 22 bp, Artificial sequence
  SiRNA target sequence
tttcgttgaaggaagcttatat

SEQ ID NO: 150689 - DNA, 22 bp, Artificial sequence
  SiRNA target sequence
ttcgttgaaggaagcttatatg

SEQ ID NO: 150690 - DNA, 22 bp, Artificial sequence
  SiRNA target sequence
tcgttgaaggaagcttatatgg

SEQ ID NO: 150691 - DNA, 22 bp, Artificial sequence
  SiRNA target sequence
cgttgaaggaagcttatatggg

SEQ ID NO: 150692 - DNA, 22 bp, Artificial sequence
  SiRNA target sequence
gttgaaggaagcttatatggga

SEQ ID NO: 150693 - DNA, 22 bp, Artificial sequence
  SiRNA target sequence
ttgaaggaagcttatatgggaa

SEQ ID NO: 150694 - DNA, 22 bp, Artificial sequence
  SiRNA target sequence
tgaaggaagcttatatgggaaa

SEQ ID NO: 150695 - DNA, 22 bp, Artificial sequence
  SiRNA target sequence
gaaggaagcttatatgggaaag

SEQ ID NO: 150696 - DNA, 22 bp, Artificial sequence
  SiRNA target sequence
aaggaagcttatatgggaaagc

SEQ ID NO: 150697 - DNA, 22 bp, Artificial sequence
  SiRNA target sequence
aggaagcttatatgggaaagcg

SEQ ID NO: 150698 - DNA, 22 bp, Artificial sequence
  SiRNA target sequence
ggaagcttatatgggaaagcga

SEQ ID NO: 150699 - DNA, 22 bp, Artificial sequence
  SiRNA target sequence
gaagcttatatgggaaagcgag

SEQ ID NO: 150700 - DNA, 22 bp, Artificial sequence
  SiRNA target sequence
aagcttatatgggaaagcgagc

SEQ ID NO: 150701 - DNA, 22 bp, Artificial sequence
  SiRNA target sequence
agcttatatgggaaagcgagct

SEQ ID NO: 150702 - DNA, 22 bp, Artificial sequence
  SiRNA target sequence
gcttatatgggaaagcgagcta

SEQ ID NO: 150703 - DNA, 22 bp, Artificial sequence
  SiRNA target sequence
cttatatgggaaagcgagctag

SEQ ID NO: 150704 - DNA, 22 bp, Artificial sequence
  SiRNA target sequence
ttatatgggaaagcgagctagt

SEQ ID NO: 150705 - DNA, 22 bp, Artificial sequence
  SiRNA target sequence
tatatgggaaagcgagctagtt

SEQ ID NO: 150706 - DNA, 22 bp, Artificial sequence
  SiRNA target sequence
atatgggaaagcgagctagttt

SEQ ID NO: 150707 - DNA, 22 bp, Artificial sequence
  SiRNA target sequence
tatgggaaagcgagctagtttt

SEQ ID NO: 150708 - DNA, 22 bp, Artificial sequence
  SiRNA target sequence
atgggaaagcgagctagtttta

SEQ ID NO: 150709 - DNA, 22 bp, Artificial sequence
  SiRNA target sequence
tgggaaagcgagctagttttaa

SEQ ID NO: 150710 - DNA, 22 bp, Artificial sequence
  SiRNA target sequence
gggaaagcgagctagttttaat

SEQ ID NO: 150711 - DNA, 22 bp, Artificial sequence
  SiRNA target sequence
ggaaagcgagctagttttaatg

SEQ ID NO: 150712 - DNA, 22 bp, Artificial sequence
  SiRNA target sequence
gaaagcgagctagttttaatgt

SEQ ID NO: 150713 - DNA, 22 bp, Artificial sequence
  SiRNA target sequence
aaagcgagctagttttaatgta

SEQ ID NO: 150714 - DNA, 22 bp, Artificial sequence
  SiRNA target sequence
aagcgagctagttttaatgtaa

SEQ ID NO: 150715 - DNA, 22 bp, Artificial sequence
  SiRNA target sequence
agcgagctagttttaatgtaaa

SEQ ID NO: 150716 - DNA, 22 bp, Artificial sequence
  SiRNA target sequence
gcgagctagttttaatgtaaaa

SEQ ID NO: 150717 - DNA, 22 bp, Artificial sequence
  SiRNA target sequence
cgagctagttttaatgtaaaag

SEQ ID NO: 150718 - DNA, 22 bp, Artificial sequence
  SiRNA target sequence
gagctagttttaatgtaaaagt

SEQ ID NO: 150719 - DNA, 22 bp, Artificial sequence
  SiRNA target sequence
agctagttttaatgtaaaagtg

SEQ ID NO: 150720 - DNA, 22 bp, Artificial sequence
  SiRNA target sequence
gctagttttaatgtaaaagtgc

SEQ ID NO: 150721 - DNA, 22 bp, Artificial sequence
  SiRNA target sequence
ctagttttaatgtaaaagtgca

SEQ ID NO: 150722 - DNA, 22 bp, Artificial sequence
  SiRNA target sequence
tagttttaatgtaaaagtgcaa

SEQ ID NO: 150723 - DNA, 22 bp, Artificial sequence
  SiRNA target sequence
agttttaatgtaaaagtgcaaa

SEQ ID NO: 150724 - DNA, 22 bp, Artificial sequence
  SiRNA target sequence
gttttaatgtaaaagtgcaaag

SEQ ID NO: 150725 - DNA, 22 bp, Artificial sequence
  SiRNA target sequence
ttttaatgtaaaagtgcaaaga

SEQ ID NO: 150726 - DNA, 22 bp, Artificial sequence
  SiRNA target sequence
tttaatgtaaaagtgcaaagag

SEQ ID NO: 150727 - DNA, 22 bp, Artificial sequence
  SiRNA target sequence
ttaatgtaaaagtgcaaagaga

SEQ ID NO: 150728 - DNA, 22 bp, Artificial sequence
  SiRNA target sequence
taatgtaaaagtgcaaagagaa

SEQ ID NO: 150729 - DNA, 22 bp, Artificial sequence
  SiRNA target sequence
aatgtaaaagtgcaaagagaat

SEQ ID NO: 150730 - DNA, 22 bp, Artificial sequence
  SiRNA target sequence
atgtaaaagtgcaaagagaatg

SEQ ID NO: 150731 - DNA, 22 bp, Artificial sequence
  SiRNA target sequence
tgtaaaagtgcaaagagaatgt

SEQ ID NO: 150732 - DNA, 22 bp, Artificial sequence
  SiRNA target sequence
gtaaaagtgcaaagagaatgtt

SEQ ID NO: 150733 - DNA, 22 bp, Artificial sequence
  SiRNA target sequence
taaaagtgcaaagagaatgttc

SEQ ID NO: 150734 - DNA, 22 bp, Artificial sequence
  SiRNA target sequence
aaaagtgcaaagagaatgttct

SEQ ID NO: 150735 - DNA, 22 bp, Artificial sequence
  SiRNA target sequence
aaagtgcaaagagaatgttctg

SEQ ID NO: 150736 - DNA, 22 bp, Artificial sequence
  SiRNA target sequence
aagtgcaaagagaatgttctgc

SEQ ID NO: 150737 - DNA, 22 bp, Artificial sequence
  SiRNA target sequence
agtgcaaagagaatgttctgcg

SEQ ID NO: 150738 - DNA, 22 bp, Artificial sequence
  SiRNA target sequence
gtgcaaagagaatgttctgcgt

SEQ ID NO: 150739 - DNA, 22 bp, Artificial sequence
  SiRNA target sequence
tgcaaagagaatgttctgcgtg

SEQ ID NO: 150740 - DNA, 22 bp, Artificial sequence
  SiRNA target sequence
gcaaagagaatgttctgcgtgt

SEQ ID NO: 150741 - DNA, 22 bp, Artificial sequence
  SiRNA target sequence
caaagagaatgttctgcgtgta

SEQ ID NO: 150742 - DNA, 22 bp, Artificial sequence
  SiRNA target sequence
aaagagaatgttctgcgtgtaa

SEQ ID NO: 150743 - DNA, 22 bp, Artificial sequence
  SiRNA target sequence
aagagaatgttctgcgtgtaac

SEQ ID NO: 150744 - DNA, 22 bp, Artificial sequence
  SiRNA target sequence
agagaatgttctgcgtgtaacg

SEQ ID NO: 150745 - DNA, 22 bp, Artificial sequence
  SiRNA target sequence
gagaatgttctgcgtgtaacgg

SEQ ID NO: 150746 - DNA, 22 bp, Artificial sequence
  SiRNA target sequence
agaatgttctgcgtgtaacggt

SEQ ID NO: 150747 - DNA, 22 bp, Artificial sequence
  SiRNA target sequence
gaatgttctgcgtgtaacggta

SEQ ID NO: 150748 - DNA, 22 bp, Artificial sequence
  SiRNA target sequence
aatgttctgcgtgtaacggtaa

SEQ ID NO: 150749 - DNA, 22 bp, Artificial sequence
  SiRNA target sequence
atgttctgcgtgtaacggtaaa

SEQ ID NO: 150750 - DNA, 22 bp, Artificial sequence
  SiRNA target sequence
tgttctgcgtgtaacggtaaag

SEQ ID NO: 150751 - DNA, 22 bp, Artificial sequence
  SiRNA target sequence
gttctgcgtgtaacggtaaagg

SEQ ID NO: 150752 - DNA, 22 bp, Artificial sequence
  SiRNA target sequence
ttctgcgtgtaacggtaaagga

SEQ ID NO: 150753 - DNA, 22 bp, Artificial sequence
  SiRNA target sequence
tctgcgtgtaacggtaaaggag

SEQ ID NO: 150754 - DNA, 22 bp, Artificial sequence
  SiRNA target sequence
ctgcgtgtaacggtaaaggagg

SEQ ID NO: 150755 - DNA, 22 bp, Artificial sequence
  SiRNA target sequence
tgcgtgtaacggtaaaggagga

SEQ ID NO: 150756 - DNA, 22 bp, Artificial sequence
  SiRNA target sequence
gcgtgtaacggtaaaggaggag

SEQ ID NO: 150757 - DNA, 22 bp, Artificial sequence
  SiRNA target sequence
cgtgtaacggtaaaggaggaga

SEQ ID NO: 150758 - DNA, 22 bp, Artificial sequence
  SiRNA target sequence
gtgtaacggtaaaggaggagac

SEQ ID NO: 150759 - DNA, 22 bp, Artificial sequence
  SiRNA target sequence
tgtaacggtaaaggaggagaca

SEQ ID NO: 150760 - DNA, 22 bp, Artificial sequence
  SiRNA target sequence
gtaacggtaaaggaggagacag

SEQ ID NO: 150761 - DNA, 22 bp, Artificial sequence
  SiRNA target sequence
taacggtaaaggaggagacagt

SEQ ID NO: 150762 - DNA, 22 bp, Artificial sequence
  SiRNA target sequence
aacggtaaaggaggagacagtg

SEQ ID NO: 150763 - DNA, 22 bp, Artificial sequence
  SiRNA target sequence
acggtaaaggaggagacagtgt

SEQ ID NO: 150764 - DNA, 22 bp, Artificial sequence
  SiRNA target sequence
cggtaaaggaggagacagtgtt

SEQ ID NO: 150765 - DNA, 22 bp, Artificial sequence
  SiRNA target sequence
ggtaaaggaggagacagtgttg

SEQ ID NO: 150766 - DNA, 22 bp, Artificial sequence
  SiRNA target sequence
gtaaaggaggagacagtgttga

SEQ ID NO: 150767 - DNA, 22 bp, Artificial sequence
  SiRNA target sequence
taaaggaggagacagtgttgaa

SEQ ID NO: 150768 - DNA, 22 bp, Artificial sequence
  SiRNA target sequence
aaaggaggagacagtgttgaaa

SEQ ID NO: 150769 - DNA, 22 bp, Artificial sequence
  SiRNA target sequence
aaggaggagacagtgttgaaac

SEQ ID NO: 150770 - DNA, 22 bp, Artificial sequence
  SiRNA target sequence
aggaggagacagtgttgaaaca

SEQ ID NO: 150771 - DNA, 22 bp, Artificial sequence
  SiRNA target sequence
ggaggagacagtgttgaaacat

SEQ ID NO: 150772 - DNA, 22 bp, Artificial sequence
  SiRNA target sequence
gaggagacagtgttgaaacatg

SEQ ID NO: 150773 - DNA, 22 bp, Artificial sequence
  SiRNA target sequence
aggagacagtgttgaaacatgt

SEQ ID NO: 150774 - DNA, 22 bp, Artificial sequence
  SiRNA target sequence
ggagacagtgttgaaacatgtg

SEQ ID NO: 150775 - DNA, 22 bp, Artificial sequence
  SiRNA target sequence
gagacagtgttgaaacatgtga

SEQ ID NO: 150776 - DNA, 22 bp, Artificial sequence
  SiRNA target sequence
agacagtgttgaaacatgtgaa

SEQ ID NO: 150777 - DNA, 22 bp, Artificial sequence
  SiRNA target sequence
gacagtgttgaaacatgtgaac

SEQ ID NO: 150778 - DNA, 22 bp, Artificial sequence
  SiRNA target sequence
acagtgttgaaacatgtgaacc

SEQ ID NO: 150779 - DNA, 22 bp, Artificial sequence
  SiRNA target sequence
cagtgttgaaacatgtgaacca

SEQ ID NO: 150780 - DNA, 22 bp, Artificial sequence
  SiRNA target sequence
agtgttgaaacatgtgaaccat

SEQ ID NO: 150781 - DNA, 22 bp, Artificial sequence
  SiRNA target sequence
gtgttgaaacatgtgaaccatg

SEQ ID NO: 150782 - DNA, 22 bp, Artificial sequence
  SiRNA target sequence
tgttgaaacatgtgaaccatgt

SEQ ID NO: 150783 - DNA, 22 bp, Artificial sequence
  SiRNA target sequence
gttgaaacatgtgaaccatgta

SEQ ID NO: 150784 - DNA, 22 bp, Artificial sequence
  SiRNA target sequence
ttgaaacatgtgaaccatgtaa

SEQ ID NO: 150785 - DNA, 22 bp, Artificial sequence
  SiRNA target sequence
tgaaacatgtgaaccatgtaaa

SEQ ID NO: 150786 - DNA, 22 bp, Artificial sequence
  SiRNA target sequence
gaaacatgtgaaccatgtaaag

SEQ ID NO: 150787 - DNA, 22 bp, Artificial sequence
  SiRNA target sequence
aaacatgtgaaccatgtaaagg

SEQ ID NO: 150788 - DNA, 22 bp, Artificial sequence
  SiRNA target sequence
aacatgtgaaccatgtaaaggt

SEQ ID NO: 150789 - DNA, 22 bp, Artificial sequence
  SiRNA target sequence
acatgtgaaccatgtaaaggta

SEQ ID NO: 150790 - DNA, 22 bp, Artificial sequence
  SiRNA target sequence
catgtgaaccatgtaaaggtaa

SEQ ID NO: 150791 - DNA, 22 bp, Artificial sequence
  SiRNA target sequence
atgtgaaccatgtaaaggtaaa

SEQ ID NO: 150792 - DNA, 22 bp, Artificial sequence
  SiRNA target sequence
tgtgaaccatgtaaaggtaaag

SEQ ID NO: 150793 - DNA, 22 bp, Artificial sequence
  SiRNA target sequence
gtgaaccatgtaaaggtaaagg

SEQ ID NO: 150794 - DNA, 22 bp, Artificial sequence
  SiRNA target sequence
tgaaccatgtaaaggtaaaggt

SEQ ID NO: 150795 - DNA, 22 bp, Artificial sequence
  SiRNA target sequence
gaaccatgtaaaggtaaaggta

SEQ ID NO: 150796 - DNA, 22 bp, Artificial sequence
  SiRNA target sequence
aaccatgtaaaggtaaaggtaa

SEQ ID NO: 150797 - DNA, 22 bp, Artificial sequence
  SiRNA target sequence
accatgtaaaggtaaaggtaag

SEQ ID NO: 150798 - DNA, 22 bp, Artificial sequence
  SiRNA target sequence
ccatgtaaaggtaaaggtaagg

SEQ ID NO: 150799 - DNA, 22 bp, Artificial sequence
  SiRNA target sequence
catgtaaaggtaaaggtaaggt

SEQ ID NO: 150800 - DNA, 22 bp, Artificial sequence
  SiRNA target sequence
atgtaaaggtaaaggtaaggta

SEQ ID NO: 150801 - DNA, 22 bp, Artificial sequence
  SiRNA target sequence
tgtaaaggtaaaggtaaggtag

SEQ ID NO: 150802 - DNA, 22 bp, Artificial sequence
  SiRNA target sequence
gtaaaggtaaaggtaaggtaga

SEQ ID NO: 150803 - DNA, 22 bp, Artificial sequence
  SiRNA target sequence
taaaggtaaaggtaaggtagaa

SEQ ID NO: 150804 - DNA, 22 bp, Artificial sequence
  SiRNA target sequence
aaaggtaaaggtaaggtagaac

SEQ ID NO: 150805 - DNA, 22 bp, Artificial sequence
  SiRNA target sequence
aaggtaaaggtaaggtagaaca

SEQ ID NO: 150806 - DNA, 22 bp, Artificial sequence
  SiRNA target sequence
aggtaaaggtaaggtagaacat

SEQ ID NO: 150807 - DNA, 22 bp, Artificial sequence
  SiRNA target sequence
ggtaaaggtaaggtagaacatc

SEQ ID NO: 150808 - DNA, 22 bp, Artificial sequence
  SiRNA target sequence
gtaaaggtaaggtagaacatca

SEQ ID NO: 150809 - DNA, 22 bp, Artificial sequence
  SiRNA target sequence
taaaggtaaggtagaacatcat

SEQ ID NO: 150810 - DNA, 22 bp, Artificial sequence
  SiRNA target sequence
aaaggtaaggtagaacatcata

SEQ ID NO: 150811 - DNA, 22 bp, Artificial sequence
  SiRNA target sequence
aaggtaaggtagaacatcatag

SEQ ID NO: 150812 - DNA, 22 bp, Artificial sequence
  SiRNA target sequence
aggtaaggtagaacatcatagg

SEQ ID NO: 150813 - DNA, 22 bp, Artificial sequence
  SiRNA target sequence
ggtaaggtagaacatcatagga

SEQ ID NO: 150814 - DNA, 22 bp, Artificial sequence
  SiRNA target sequence
gtaaggtagaacatcataggag

SEQ ID NO: 150815 - DNA, 22 bp, Artificial sequence
  SiRNA target sequence
taaggtagaacatcataggaga

SEQ ID NO: 150816 - DNA, 22 bp, Artificial sequence
  SiRNA target sequence
aaggtagaacatcataggagac

SEQ ID NO: 150817 - DNA, 22 bp, Artificial sequence
  SiRNA target sequence
aggtagaacatcataggagact

SEQ ID NO: 150818 - DNA, 22 bp, Artificial sequence
  SiRNA target sequence
ggtagaacatcataggagacta

SEQ ID NO: 150819 - DNA, 22 bp, Artificial sequence
  SiRNA target sequence
gtagaacatcataggagactag

SEQ ID NO: 150820 - DNA, 22 bp, Artificial sequence
  SiRNA target sequence
tagaacatcataggagactagg

SEQ ID NO: 150821 - DNA, 22 bp, Artificial sequence
  SiRNA target sequence
agaacatcataggagactaggt

SEQ ID NO: 150822 - DNA, 22 bp, Artificial sequence
  SiRNA target sequence
gaacatcataggagactaggtc

SEQ ID NO: 150823 - DNA, 22 bp, Artificial sequence
  SiRNA target sequence
aacatcataggagactaggtcc

SEQ ID NO: 150824 - DNA, 22 bp, Artificial sequence
  SiRNA target sequence
acatcataggagactaggtcct

SEQ ID NO: 150825 - DNA, 22 bp, Artificial sequence
  SiRNA target sequence
catcataggagactaggtcctt

SEQ ID NO: 150826 - DNA, 22 bp, Artificial sequence
  SiRNA target sequence
atcataggagactaggtccttt

SEQ ID NO: 150827 - DNA, 22 bp, Artificial sequence
  SiRNA target sequence
tcataggagactaggtccttta

SEQ ID NO: 150828 - DNA, 22 bp, Artificial sequence
  SiRNA target sequence
cataggagactaggtcctttaa

SEQ ID NO: 150829 - DNA, 22 bp, Artificial sequence
  SiRNA target sequence
ataggagactaggtcctttaat

SEQ ID NO: 150830 - DNA, 22 bp, Artificial sequence
  SiRNA target sequence
taggagactaggtcctttaatt

SEQ ID NO: 150831 - DNA, 22 bp, Artificial sequence
  SiRNA target sequence
aggagactaggtcctttaattt

SEQ ID NO: 150832 - DNA, 22 bp, Artificial sequence
  SiRNA target sequence
ggagactaggtcctttaatttc

SEQ ID NO: 150833 - DNA, 22 bp, Artificial sequence
  SiRNA target sequence
gagactaggtcctttaatttct

SEQ ID NO: 150834 - DNA, 22 bp, Artificial sequence
  SiRNA target sequence
agactaggtcctttaatttctg

SEQ ID NO: 150835 - DNA, 22 bp, Artificial sequence
  SiRNA target sequence
gactaggtcctttaatttctgt

SEQ ID NO: 150836 - DNA, 22 bp, Artificial sequence
  SiRNA target sequence
actaggtcctttaatttctgta

SEQ ID NO: 150837 - DNA, 22 bp, Artificial sequence
  SiRNA target sequence
ctaggtcctttaatttctgtac

SEQ ID NO: 150838 - DNA, 22 bp, Artificial sequence
  SiRNA target sequence
taggtcctttaatttctgtaca

SEQ ID NO: 150839 - DNA, 22 bp, Artificial sequence
  SiRNA target sequence
aggtcctttaatttctgtacaa

SEQ ID NO: 150840 - DNA, 22 bp, Artificial sequence
  SiRNA target sequence
ggtcctttaatttctgtacaag

SEQ ID NO: 150841 - DNA, 22 bp, Artificial sequence
  SiRNA target sequence
gtcctttaatttctgtacaaga

SEQ ID NO: 150842 - DNA, 22 bp, Artificial sequence
  SiRNA target sequence
tcctttaatttctgtacaagaa

SEQ ID NO: 150843 - DNA, 22 bp, Artificial sequence
  SiRNA target sequence
cctttaatttctgtacaagaag

SEQ ID NO: 150844 - DNA, 22 bp, Artificial sequence
  SiRNA target sequence
ctttaatttctgtacaagaagc

SEQ ID NO: 150845 - DNA, 22 bp, Artificial sequence
  SiRNA target sequence
tttaatttctgtacaagaagca

SEQ ID NO: 150846 - DNA, 22 bp, Artificial sequence
  SiRNA target sequence
ttaatttctgtacaagaagcac

SEQ ID NO: 150847 - DNA, 22 bp, Artificial sequence
  SiRNA target sequence
taatttctgtacaagaagcacc

SEQ ID NO: 150848 - DNA, 22 bp, Artificial sequence
  SiRNA target sequence
aatttctgtacaagaagcacct

SEQ ID NO: 150849 - DNA, 22 bp, Artificial sequence
  SiRNA target sequence
atttctgtacaagaagcacctt

SEQ ID NO: 150850 - DNA, 22 bp, Artificial sequence
  SiRNA target sequence
tttctgtacaagaagcaccttg

SEQ ID NO: 150851 - DNA, 22 bp, Artificial sequence
  SiRNA target sequence
ttctgtacaagaagcaccttgt

SEQ ID NO: 150852 - DNA, 22 bp, Artificial sequence
  SiRNA target sequence
tctgtacaagaagcaccttgta

SEQ ID NO: 150853 - DNA, 22 bp, Artificial sequence
  SiRNA target sequence
ctgtacaagaagcaccttgtaa

SEQ ID NO: 150854 - DNA, 22 bp, Artificial sequence
  SiRNA target sequence
tgtacaagaagcaccttgtaat

SEQ ID NO: 150855 - DNA, 22 bp, Artificial sequence
  SiRNA target sequence
gtacaagaagcaccttgtaata

SEQ ID NO: 150856 - DNA, 22 bp, Artificial sequence
  SiRNA target sequence
tacaagaagcaccttgtaataa

SEQ ID NO: 150857 - DNA, 22 bp, Artificial sequence
  SiRNA target sequence
acaagaagcaccttgtaataat

SEQ ID NO: 150858 - DNA, 22 bp, Artificial sequence
  SiRNA target sequence
caagaagcaccttgtaataatt

SEQ ID NO: 150859 - DNA, 22 bp, Artificial sequence
  SiRNA target sequence
aagaagcaccttgtaataattg

SEQ ID NO: 150860 - DNA, 22 bp, Artificial sequence
  SiRNA target sequence
agaagcaccttgtaataattgt

SEQ ID NO: 150861 - DNA, 22 bp, Artificial sequence
  SiRNA target sequence
gaagcaccttgtaataattgta

SEQ ID NO: 150862 - DNA, 22 bp, Artificial sequence
  SiRNA target sequence
aagcaccttgtaataattgtaa

SEQ ID NO: 150863 - DNA, 22 bp, Artificial sequence
  SiRNA target sequence
agcaccttgtaataattgtaat

SEQ ID NO: 150864 - DNA, 22 bp, Artificial sequence
  SiRNA target sequence
gcaccttgtaataattgtaatt

SEQ ID NO: 150865 - DNA, 22 bp, Artificial sequence
  SiRNA target sequence
caccttgtaataattgtaattc

SEQ ID NO: 150866 - DNA, 22 bp, Artificial sequence
  SiRNA target sequence
accttgtaataattgtaattct

SEQ ID NO: 150867 - DNA, 22 bp, Artificial sequence
  SiRNA target sequence
ccttgtaataattgtaattcta

SEQ ID NO: 150868 - DNA, 22 bp, Artificial sequence
  SiRNA target sequence
cttgtaataattgtaattctac

SEQ ID NO: 150869 - DNA, 22 bp, Artificial sequence
  SiRNA target sequence
ttgtaataattgtaattctact

SEQ ID NO: 150870 - DNA, 22 bp, Artificial sequence
  SiRNA target sequence
tgtaataattgtaattctactg

SEQ ID NO: 150871 - DNA, 22 bp, Artificial sequence
  SiRNA target sequence
gtaataattgtaattctactgg

SEQ ID NO: 150872 - DNA, 22 bp, Artificial sequence
  SiRNA target sequence
taataattgtaattctactgga

SEQ ID NO: 150873 - DNA, 22 bp, Artificial sequence
  SiRNA target sequence
aataattgtaattctactggat

SEQ ID NO: 150874 - DNA, 22 bp, Artificial sequence
  SiRNA target sequence
ataattgtaattctactggatt

SEQ ID NO: 150875 - DNA, 22 bp, Artificial sequence
  SiRNA target sequence
taattgtaattctactggattt

SEQ ID NO: 150876 - DNA, 22 bp, Artificial sequence
  SiRNA target sequence
aattgtaattctactggatttg

SEQ ID NO: 150877 - DNA, 22 bp, Artificial sequence
  SiRNA target sequence
attgtaattctactggatttgt

SEQ ID NO: 150878 - DNA, 22 bp, Artificial sequence
  SiRNA target sequence
ttgtaattctactggatttgtt

SEQ ID NO: 150879 - DNA, 22 bp, Artificial sequence
  SiRNA target sequence
tgtaattctactggatttgttg

SEQ ID NO: 150880 - DNA, 22 bp, Artificial sequence
  SiRNA target sequence
gtaattctactggatttgttgt

SEQ ID NO: 150881 - DNA, 22 bp, Artificial sequence
  SiRNA target sequence
taattctactggatttgttgtt

SEQ ID NO: 150882 - DNA, 22 bp, Artificial sequence
  SiRNA target sequence
aattctactggatttgttgtta

SEQ ID NO: 150883 - DNA, 22 bp, Artificial sequence
  SiRNA target sequence
attctactggatttgttgttaa

SEQ ID NO: 150884 - DNA, 22 bp, Artificial sequence
  SiRNA target sequence
ttctactggatttgttgttaaa

SEQ ID NO: 150885 - DNA, 22 bp, Artificial sequence
  SiRNA target sequence
tctactggatttgttgttaaag

SEQ ID NO: 150886 - DNA, 22 bp, Artificial sequence
  SiRNA target sequence
ctactggatttgttgttaaagg

SEQ ID NO: 150887 - DNA, 22 bp, Artificial sequence
  SiRNA target sequence
tactggatttgttgttaaagga

SEQ ID NO: 150888 - DNA, 22 bp, Artificial sequence
  SiRNA target sequence
actggatttgttgttaaaggaa

SEQ ID NO: 150889 - DNA, 22 bp, Artificial sequence
  SiRNA target sequence
ctggatttgttgttaaaggaaa

SEQ ID NO: 150890 - DNA, 22 bp, Artificial sequence
  SiRNA target sequence
tggatttgttgttaaaggaaag

SEQ ID NO: 150891 - DNA, 22 bp, Artificial sequence
  SiRNA target sequence
ggatttgttgttaaaggaaagc

SEQ ID NO: 150892 - DNA, 22 bp, Artificial sequence
  SiRNA target sequence
gatttgttgttaaaggaaagct

SEQ ID NO: 150893 - DNA, 22 bp, Artificial sequence
  SiRNA target sequence
atttgttgttaaaggaaagctt

SEQ ID NO: 150894 - DNA, 22 bp, Artificial sequence
  SiRNA target sequence
tttgttgttaaaggaaagcttt

SEQ ID NO: 150895 - DNA, 22 bp, Artificial sequence
  SiRNA target sequence
ttgttgttaaaggaaagctttg

SEQ ID NO: 150896 - DNA, 22 bp, Artificial sequence
  SiRNA target sequence
tgttgttaaaggaaagctttgt

SEQ ID NO: 150897 - DNA, 22 bp, Artificial sequence
  SiRNA target sequence
gttgttaaaggaaagctttgtc

SEQ ID NO: 150898 - DNA, 22 bp, Artificial sequence
  SiRNA target sequence
ttgttaaaggaaagctttgtca

SEQ ID NO: 150899 - DNA, 22 bp, Artificial sequence
  SiRNA target sequence
tgttaaaggaaagctttgtcaa

SEQ ID NO: 150900 - DNA, 22 bp, Artificial sequence
  SiRNA target sequence
gttaaaggaaagctttgtcaaa

SEQ ID NO: 150901 - DNA, 22 bp, Artificial sequence
  SiRNA target sequence
ttaaaggaaagctttgtcaaag

SEQ ID NO: 150902 - DNA, 22 bp, Artificial sequence
  SiRNA target sequence
taaaggaaagctttgtcaaagt

SEQ ID NO: 150903 - DNA, 22 bp, Artificial sequence
  SiRNA target sequence
aaaggaaagctttgtcaaagtt

SEQ ID NO: 150904 - DNA, 22 bp, Artificial sequence
  SiRNA target sequence
aaggaaagctttgtcaaagttg

SEQ ID NO: 150905 - DNA, 22 bp, Artificial sequence
  SiRNA target sequence
aggaaagctttgtcaaagttgt

SEQ ID NO: 150906 - DNA, 22 bp, Artificial sequence
  SiRNA target sequence
ggaaagctttgtcaaagttgta

SEQ ID NO: 150907 - DNA, 22 bp, Artificial sequence
  SiRNA target sequence
gaaagctttgtcaaagttgtaa

SEQ ID NO: 150908 - DNA, 22 bp, Artificial sequence
  SiRNA target sequence
aaagctttgtcaaagttgtaaa

SEQ ID NO: 150909 - DNA, 22 bp, Artificial sequence
  SiRNA target sequence
aagctttgtcaaagttgtaaag

SEQ ID NO: 150910 - DNA, 22 bp, Artificial sequence
  SiRNA target sequence
agctttgtcaaagttgtaaagg

SEQ ID NO: 150911 - DNA, 22 bp, Artificial sequence
  SiRNA target sequence
gctttgtcaaagttgtaaaggt

SEQ ID NO: 150912 - DNA, 22 bp, Artificial sequence
  SiRNA target sequence
ctttgtcaaagttgtaaaggta

SEQ ID NO: 150913 - DNA, 22 bp, Artificial sequence
  SiRNA target sequence
tttgtcaaagttgtaaaggtaa

SEQ ID NO: 150914 - DNA, 22 bp, Artificial sequence
  SiRNA target sequence
ttgtcaaagttgtaaaggtaaa

SEQ ID NO: 150915 - DNA, 22 bp, Artificial sequence
  SiRNA target sequence
tgtcaaagttgtaaaggtaaac

SEQ ID NO: 150916 - DNA, 22 bp, Artificial sequence
  SiRNA target sequence
gtcaaagttgtaaaggtaaaca

SEQ ID NO: 150917 - DNA, 22 bp, Artificial sequence
  SiRNA target sequence
tcaaagttgtaaaggtaaacaa

SEQ ID NO: 150918 - DNA, 22 bp, Artificial sequence
  SiRNA target sequence
caaagttgtaaaggtaaacaat

SEQ ID NO: 150919 - DNA, 22 bp, Artificial sequence
  SiRNA target sequence
aaagttgtaaaggtaaacaata

SEQ ID NO: 150920 - DNA, 22 bp, Artificial sequence
  SiRNA target sequence
aagttgtaaaggtaaacaatac

SEQ ID NO: 150921 - DNA, 22 bp, Artificial sequence
  SiRNA target sequence
agttgtaaaggtaaacaatacg

SEQ ID NO: 150922 - DNA, 22 bp, Artificial sequence
  SiRNA target sequence
gttgtaaaggtaaacaatacgt

SEQ ID NO: 150923 - DNA, 22 bp, Artificial sequence
  SiRNA target sequence
ttgtaaaggtaaacaatacgtt

SEQ ID NO: 150924 - DNA, 22 bp, Artificial sequence
  SiRNA target sequence
tgtaaaggtaaacaatacgttg

SEQ ID NO: 150925 - DNA, 22 bp, Artificial sequence
  SiRNA target sequence
gtaaaggtaaacaatacgttga

SEQ ID NO: 150926 - DNA, 22 bp, Artificial sequence
  SiRNA target sequence
taaaggtaaacaatacgttgag

SEQ ID NO: 150927 - DNA, 22 bp, Artificial sequence
  SiRNA target sequence
aaaggtaaacaatacgttgaga

SEQ ID NO: 150928 - DNA, 22 bp, Artificial sequence
  SiRNA target sequence
aaggtaaacaatacgttgagac

SEQ ID NO: 150929 - DNA, 22 bp, Artificial sequence
  SiRNA target sequence
aggtaaacaatacgttgagact

SEQ ID NO: 150930 - DNA, 22 bp, Artificial sequence
  SiRNA target sequence
ggtaaacaatacgttgagacta

SEQ ID NO: 150931 - DNA, 22 bp, Artificial sequence
  SiRNA target sequence
gtaaacaatacgttgagactaa

SEQ ID NO: 150932 - DNA, 22 bp, Artificial sequence
  SiRNA target sequence
taaacaatacgttgagactaaa

SEQ ID NO: 150933 - DNA, 22 bp, Artificial sequence
  SiRNA target sequence
aaacaatacgttgagactaaag

SEQ ID NO: 150934 - DNA, 22 bp, Artificial sequence
  SiRNA target sequence
aacaatacgttgagactaaaga

SEQ ID NO: 150935 - DNA, 22 bp, Artificial sequence
  SiRNA target sequence
acaatacgttgagactaaagaa

SEQ ID NO: 150936 - DNA, 22 bp, Artificial sequence
  SiRNA target sequence
caatacgttgagactaaagaac

SEQ ID NO: 150937 - DNA, 22 bp, Artificial sequence
  SiRNA target sequence
aatacgttgagactaaagaaca

SEQ ID NO: 150938 - DNA, 22 bp, Artificial sequence
  SiRNA target sequence
atacgttgagactaaagaacat

SEQ ID NO: 150939 - DNA, 22 bp, Artificial sequence
  SiRNA target sequence
tacgttgagactaaagaacata

SEQ ID NO: 150940 - DNA, 22 bp, Artificial sequence
  SiRNA target sequence
acgttgagactaaagaacatat

SEQ ID NO: 150941 - DNA, 22 bp, Artificial sequence
  SiRNA target sequence
cgttgagactaaagaacatatt

SEQ ID NO: 150942 - DNA, 22 bp, Artificial sequence
  SiRNA target sequence
gttgagactaaagaacatattg

SEQ ID NO: 150943 - DNA, 22 bp, Artificial sequence
  SiRNA target sequence
ttgagactaaagaacatattga

SEQ ID NO: 150944 - DNA, 22 bp, Artificial sequence
  SiRNA target sequence
tgagactaaagaacatattgaa

SEQ ID NO: 150945 - DNA, 22 bp, Artificial sequence
  SiRNA target sequence
gagactaaagaacatattgaag

SEQ ID NO: 150946 - DNA, 22 bp, Artificial sequence
  SiRNA target sequence
agactaaagaacatattgaagt

SEQ ID NO: 150947 - DNA, 22 bp, Artificial sequence
  SiRNA target sequence
gactaaagaacatattgaagtg

SEQ ID NO: 150948 - DNA, 22 bp, Artificial sequence
  SiRNA target sequence
actaaagaacatattgaagtgg

SEQ ID NO: 150949 - DNA, 22 bp, Artificial sequence
  SiRNA target sequence
ctaaagaacatattgaagtgga

SEQ ID NO: 150950 - DNA, 22 bp, Artificial sequence
  SiRNA target sequence
taaagaacatattgaagtggaa

SEQ ID NO: 150951 - DNA, 22 bp, Artificial sequence
  SiRNA target sequence
aaagaacatattgaagtggaag

SEQ ID NO: 150952 - DNA, 22 bp, Artificial sequence
  SiRNA target sequence
aagaacatattgaagtggaagt

SEQ ID NO: 150953 - DNA, 22 bp, Artificial sequence
  SiRNA target sequence
agaacatattgaagtggaagta

SEQ ID NO: 150954 - DNA, 22 bp, Artificial sequence
  SiRNA target sequence
gaacatattgaagtggaagtag

SEQ ID NO: 150955 - DNA, 22 bp, Artificial sequence
  SiRNA target sequence
aacatattgaagtggaagtaga

SEQ ID NO: 150956 - DNA, 22 bp, Artificial sequence
  SiRNA target sequence
acatattgaagtggaagtagag

SEQ ID NO: 150957 - DNA, 22 bp, Artificial sequence
  SiRNA target sequence
catattgaagtggaagtagagc

SEQ ID NO: 150958 - DNA, 22 bp, Artificial sequence
  SiRNA target sequence
atattgaagtggaagtagagcc

SEQ ID NO: 150959 - DNA, 22 bp, Artificial sequence
  SiRNA target sequence
tattgaagtggaagtagagcca

SEQ ID NO: 150960 - DNA, 22 bp, Artificial sequence
  SiRNA target sequence
attgaagtggaagtagagccag

SEQ ID NO: 150961 - DNA, 22 bp, Artificial sequence
  SiRNA target sequence
ttgaagtggaagtagagccagg

SEQ ID NO: 150962 - DNA, 22 bp, Artificial sequence
  SiRNA target sequence
tgaagtggaagtagagccagga

SEQ ID NO: 150963 - DNA, 22 bp, Artificial sequence
  SiRNA target sequence
gaagtggaagtagagccaggag

SEQ ID NO: 150964 - DNA, 22 bp, Artificial sequence
  SiRNA target sequence
aagtggaagtagagccaggagt

SEQ ID NO: 150965 - DNA, 22 bp, Artificial sequence
  SiRNA target sequence
agtggaagtagagccaggagta

SEQ ID NO: 150966 - DNA, 22 bp, Artificial sequence
  SiRNA target sequence
gtggaagtagagccaggagtac

SEQ ID NO: 150967 - DNA, 22 bp, Artificial sequence
  SiRNA target sequence
tggaagtagagccaggagtaca

SEQ ID NO: 150968 - DNA, 22 bp, Artificial sequence
  SiRNA target sequence
ggaagtagagccaggagtacag

SEQ ID NO: 150969 - DNA, 22 bp, Artificial sequence
  SiRNA target sequence
gaagtagagccaggagtacaga

SEQ ID NO: 150970 - DNA, 22 bp, Artificial sequence
  SiRNA target sequence
aagtagagccaggagtacagaa

SEQ ID NO: 150971 - DNA, 22 bp, Artificial sequence
  SiRNA target sequence
agtagagccaggagtacagaac

SEQ ID NO: 150972 - DNA, 22 bp, Artificial sequence
  SiRNA target sequence
gtagagccaggagtacagaacg

SEQ ID NO: 150973 - DNA, 22 bp, Artificial sequence
  SiRNA target sequence
tagagccaggagtacagaacgg

SEQ ID NO: 150974 - DNA, 22 bp, Artificial sequence
  SiRNA target sequence
agagccaggagtacagaacggt

SEQ ID NO: 150975 - DNA, 22 bp, Artificial sequence
  SiRNA target sequence
gagccaggagtacagaacggta

SEQ ID NO: 150976 - DNA, 22 bp, Artificial sequence
  SiRNA target sequence
agccaggagtacagaacggtag

SEQ ID NO: 150977 - DNA, 22 bp, Artificial sequence
  SiRNA target sequence
gccaggagtacagaacggtaga

SEQ ID NO: 150978 - DNA, 22 bp, Artificial sequence
  SiRNA target sequence
ccaggagtacagaacggtagaa

SEQ ID NO: 150979 - DNA, 22 bp, Artificial sequence
  SiRNA target sequence
caggagtacagaacggtagaaa

SEQ ID NO: 150980 - DNA, 22 bp, Artificial sequence
  SiRNA target sequence
aggagtacagaacggtagaaaa

SEQ ID NO: 150981 - DNA, 22 bp, Artificial sequence
  SiRNA target sequence
ggagtacagaacggtagaaaat

SEQ ID NO: 150982 - DNA, 22 bp, Artificial sequence
  SiRNA target sequence
gagtacagaacggtagaaaata

SEQ ID NO: 150983 - DNA, 22 bp, Artificial sequence
  SiRNA target sequence
agtacagaacggtagaaaatat

SEQ ID NO: 150984 - DNA, 22 bp, Artificial sequence
  SiRNA target sequence
gtacagaacggtagaaaatata

SEQ ID NO: 150985 - DNA, 22 bp, Artificial sequence
  SiRNA target sequence
tacagaacggtagaaaatatac

SEQ ID NO: 150986 - DNA, 22 bp, Artificial sequence
  SiRNA target sequence
acagaacggtagaaaatataca

SEQ ID NO: 150987 - DNA, 22 bp, Artificial sequence
  SiRNA target sequence
cagaacggtagaaaatatacat

SEQ ID NO: 150988 - DNA, 22 bp, Artificial sequence
  SiRNA target sequence
agaacggtagaaaatatacatt

SEQ ID NO: 150989 - DNA, 22 bp, Artificial sequence
  SiRNA target sequence
gaacggtagaaaatatacattt

SEQ ID NO: 150990 - DNA, 22 bp, Artificial sequence
  SiRNA target sequence
aacggtagaaaatatacatttt

SEQ ID NO: 150991 - DNA, 22 bp, Artificial sequence
  SiRNA target sequence
acggtagaaaatatacattttc

SEQ ID NO: 150992 - DNA, 22 bp, Artificial sequence
  SiRNA target sequence
cggtagaaaatatacattttct

SEQ ID NO: 150993 - DNA, 22 bp, Artificial sequence
  SiRNA target sequence
ggtagaaaatatacattttctg

SEQ ID NO: 150994 - DNA, 22 bp, Artificial sequence
  SiRNA target sequence
gtagaaaatatacattttctgg

SEQ ID NO: 150995 - DNA, 22 bp, Artificial sequence
  SiRNA target sequence
tagaaaatatacattttctggc

SEQ ID NO: 150996 - DNA, 22 bp, Artificial sequence
  SiRNA target sequence
agaaaatatacattttctggca

SEQ ID NO: 150997 - DNA, 22 bp, Artificial sequence
  SiRNA target sequence
gaaaatatacattttctggcaa

SEQ ID NO: 150998 - DNA, 22 bp, Artificial sequence
  SiRNA target sequence
aaaatatacattttctggcaaa

SEQ ID NO: 150999 - DNA, 22 bp, Artificial sequence
  SiRNA target sequence
aaatatacattttctggcaaag

SEQ ID NO: 151000 - DNA, 22 bp, Artificial sequence
  SiRNA target sequence
aatatacattttctggcaaagg

SEQ ID NO: 151001 - DNA, 22 bp, Artificial sequence
  SiRNA target sequence
atatacattttctggcaaagga

SEQ ID NO: 151002 - DNA, 22 bp, Artificial sequence
  SiRNA target sequence
tatacattttctggcaaaggaa

SEQ ID NO: 151003 - DNA, 22 bp, Artificial sequence
  SiRNA target sequence
atacattttctggcaaaggaaa

SEQ ID NO: 151004 - DNA, 22 bp, Artificial sequence
  SiRNA target sequence
tacattttctggcaaaggaaat

SEQ ID NO: 151005 - DNA, 22 bp, Artificial sequence
  SiRNA target sequence
acattttctggcaaaggaaatc

SEQ ID NO: 151006 - DNA, 22 bp, Artificial sequence
  SiRNA target sequence
cattttctggcaaaggaaatca

SEQ ID NO: 151007 - DNA, 22 bp, Artificial sequence
  SiRNA target sequence
attttctggcaaaggaaatcat

SEQ ID NO: 151008 - DNA, 22 bp, Artificial sequence
  SiRNA target sequence
ttttctggcaaaggaaatcata

SEQ ID NO: 151009 - DNA, 22 bp, Artificial sequence
  SiRNA target sequence
tttctggcaaaggaaatcataa

SEQ ID NO: 151010 - DNA, 22 bp, Artificial sequence
  SiRNA target sequence
ttctggcaaaggaaatcataaa

SEQ ID NO: 151011 - DNA, 22 bp, Artificial sequence
  SiRNA target sequence
tctggcaaaggaaatcataaaa

SEQ ID NO: 151012 - DNA, 22 bp, Artificial sequence
  SiRNA target sequence
ctggcaaaggaaatcataaaaa

SEQ ID NO: 151013 - DNA, 22 bp, Artificial sequence
  SiRNA target sequence
tggcaaaggaaatcataaaaaa

SEQ ID NO: 151014 - DNA, 22 bp, Artificial sequence
  SiRNA target sequence
ggcaaaggaaatcataaaaaaa

SEQ ID NO: 151015 - DNA, 22 bp, Artificial sequence
  SiRNA target sequence
gcaaaggaaatcataaaaaaaa

SEQ ID NO: 151016 - DNA, 22 bp, Artificial sequence
  SiRNA target sequence
caaaggaaatcataaaaaaaat

SEQ ID NO: 151017 - DNA, 22 bp, Artificial sequence
  SiRNA target sequence
aaaggaaatcataaaaaaaatt

SEQ ID NO: 151018 - DNA, 22 bp, Artificial sequence
  SiRNA target sequence
aaggaaatcataaaaaaaattg

SEQ ID NO: 151019 - DNA, 22 bp, Artificial sequence
  SiRNA target sequence
aggaaatcataaaaaaaattgt

SEQ ID NO: 151020 - DNA, 22 bp, Artificial sequence
  SiRNA target sequence
ggaaatcataaaaaaaattgtg

SEQ ID NO: 151021 - DNA, 22 bp, Artificial sequence
  SiRNA target sequence
gaaatcataaaaaaaattgtgt

SEQ ID NO: 151022 - DNA, 22 bp, Artificial sequence
  SiRNA target sequence
aaatcataaaaaaaattgtgta

SEQ ID NO: 151023 - DNA, 22 bp, Artificial sequence
  SiRNA target sequence
aatcataaaaaaaattgtgtac

SEQ ID NO: 151024 - DNA, 22 bp, Artificial sequence
  SiRNA target sequence
atcataaaaaaaattgtgtacc

SEQ ID NO: 151025 - DNA, 22 bp, Artificial sequence
  SiRNA target sequence
tcataaaaaaaattgtgtaccg

SEQ ID NO: 151026 - DNA, 22 bp, Artificial sequence
  SiRNA target sequence
cataaaaaaaattgtgtaccgg

SEQ ID NO: 151027 - DNA, 22 bp, Artificial sequence
  SiRNA target sequence
ataaaaaaaattgtgtaccggg

SEQ ID NO: 151028 - DNA, 22 bp, Artificial sequence
  SiRNA target sequence
taaaaaaaattgtgtaccgggt

SEQ ID NO: 151029 - DNA, 22 bp, Artificial sequence
  SiRNA target sequence
aaaaaaaattgtgtaccgggtg

SEQ ID NO: 151030 - DNA, 22 bp, Artificial sequence
  SiRNA target sequence
aaaaaaattgtgtaccgggtga

SEQ ID NO: 151031 - DNA, 22 bp, Artificial sequence
  SiRNA target sequence
aaaaaattgtgtaccgggtgat

SEQ ID NO: 151032 - DNA, 22 bp, Artificial sequence
  SiRNA target sequence
aaaaattgtgtaccgggtgatg

SEQ ID NO: 151033 - DNA, 22 bp, Artificial sequence
  SiRNA target sequence
aaaattgtgtaccgggtgatgt

SEQ ID NO: 151034 - DNA, 22 bp, Artificial sequence
  SiRNA target sequence
aaattgtgtaccgggtgatgtg

SEQ ID NO: 151035 - DNA, 22 bp, Artificial sequence
  SiRNA target sequence
aattgtgtaccgggtgatgtga

SEQ ID NO: 151036 - DNA, 22 bp, Artificial sequence
  SiRNA target sequence
attgtgtaccgggtgatgtgat

SEQ ID NO: 151037 - DNA, 22 bp, Artificial sequence
  SiRNA target sequence
ttgtgtaccgggtgatgtgatt

SEQ ID NO: 151038 - DNA, 22 bp, Artificial sequence
  SiRNA target sequence
tgtgtaccgggtgatgtgattc

SEQ ID NO: 151039 - DNA, 22 bp, Artificial sequence
  SiRNA target sequence
gtgtaccgggtgatgtgattct

SEQ ID NO: 151040 - DNA, 22 bp, Artificial sequence
  SiRNA target sequence
tgtaccgggtgatgtgattctt

SEQ ID NO: 151041 - DNA, 22 bp, Artificial sequence
  SiRNA target sequence
gtaccgggtgatgtgattctta

SEQ ID NO: 151042 - DNA, 22 bp, Artificial sequence
  SiRNA target sequence
taccgggtgatgtgattcttat

SEQ ID NO: 151043 - DNA, 22 bp, Artificial sequence
  SiRNA target sequence
accgggtgatgtgattcttatt

SEQ ID NO: 151044 - DNA, 22 bp, Artificial sequence
  SiRNA target sequence
ccgggtgatgtgattcttattg

SEQ ID NO: 151045 - DNA, 22 bp, Artificial sequence
  SiRNA target sequence
cgggtgatgtgattcttattgt

SEQ ID NO: 151046 - DNA, 22 bp, Artificial sequence
  SiRNA target sequence
gggtgatgtgattcttattgta

SEQ ID NO: 151047 - DNA, 22 bp, Artificial sequence
  SiRNA target sequence
ggtgatgtgattcttattgtaa

SEQ ID NO: 151048 - DNA, 22 bp, Artificial sequence
  SiRNA target sequence
gtgatgtgattcttattgtaaa

SEQ ID NO: 151049 - DNA, 22 bp, Artificial sequence
  SiRNA target sequence
tgatgtgattcttattgtaaac

SEQ ID NO: 151050 - DNA, 22 bp, Artificial sequence
  SiRNA target sequence
gatgtgattcttattgtaaaca

SEQ ID NO: 151051 - DNA, 22 bp, Artificial sequence
  SiRNA target sequence
atgtgattcttattgtaaacat

SEQ ID NO: 151052 - DNA, 22 bp, Artificial sequence
  SiRNA target sequence
tgtgattcttattgtaaacatt

SEQ ID NO: 151053 - DNA, 22 bp, Artificial sequence
  SiRNA target sequence
gtgattcttattgtaaacatta

SEQ ID NO: 151054 - DNA, 22 bp, Artificial sequence
  SiRNA target sequence
tgattcttattgtaaacattac

SEQ ID NO: 151055 - DNA, 22 bp, Artificial sequence
  SiRNA target sequence
gattcttattgtaaacattaca

SEQ ID NO: 151056 - DNA, 22 bp, Artificial sequence
  SiRNA target sequence
attcttattgtaaacattacaa

SEQ ID NO: 151057 - DNA, 22 bp, Artificial sequence
  SiRNA target sequence
ttcttattgtaaacattacaaa

SEQ ID NO: 151058 - DNA, 22 bp, Artificial sequence
  SiRNA target sequence
tcttattgtaaacattacaaat

SEQ ID NO: 151059 - DNA, 22 bp, Artificial sequence
  SiRNA target sequence
cttattgtaaacattacaaatg

SEQ ID NO: 151060 - DNA, 22 bp, Artificial sequence
  SiRNA target sequence
ttattgtaaacattacaaatga

SEQ ID NO: 151061 - DNA, 22 bp, Artificial sequence
  SiRNA target sequence
tattgtaaacattacaaatgat

SEQ ID NO: 151062 - DNA, 22 bp, Artificial sequence
  SiRNA target sequence
attgtaaacattacaaatgatc

SEQ ID NO: 151063 - DNA, 22 bp, Artificial sequence
  SiRNA target sequence
ttgtaaacattacaaatgatcc

SEQ ID NO: 151064 - DNA, 22 bp, Artificial sequence
  SiRNA target sequence
tgtaaacattacaaatgatcca

SEQ ID NO: 151065 - DNA, 22 bp, Artificial sequence
  SiRNA target sequence
gtaaacattacaaatgatccaa

SEQ ID NO: 151066 - DNA, 22 bp, Artificial sequence
  SiRNA target sequence
taaacattacaaatgatccaag

SEQ ID NO: 151067 - DNA, 22 bp, Artificial sequence
  SiRNA target sequence
aaacattacaaatgatccaaga

SEQ ID NO: 151068 - DNA, 22 bp, Artificial sequence
  SiRNA target sequence
aacattacaaatgatccaagat

SEQ ID NO: 151069 - DNA, 22 bp, Artificial sequence
  SiRNA target sequence
acattacaaatgatccaagatt

SEQ ID NO: 151070 - DNA, 22 bp, Artificial sequence
  SiRNA target sequence
cattacaaatgatccaagattt

SEQ ID NO: 151071 - DNA, 22 bp, Artificial sequence
  SiRNA target sequence
attacaaatgatccaagattta

SEQ ID NO: 151072 - DNA, 22 bp, Artificial sequence
  SiRNA target sequence
ttacaaatgatccaagatttag

SEQ ID NO: 151073 - DNA, 22 bp, Artificial sequence
  SiRNA target sequence
tacaaatgatccaagatttaga

SEQ ID NO: 151074 - DNA, 22 bp, Artificial sequence
  SiRNA target sequence
acaaatgatccaagatttagaa

SEQ ID NO: 151075 - DNA, 22 bp, Artificial sequence
  SiRNA target sequence
caaatgatccaagatttagaaa

SEQ ID NO: 151076 - DNA, 22 bp, Artificial sequence
  SiRNA target sequence
aaatgatccaagatttagaaaa

SEQ ID NO: 151077 - DNA, 22 bp, Artificial sequence
  SiRNA target sequence
aatgatccaagatttagaaaaa

SEQ ID NO: 151078 - DNA, 22 bp, Artificial sequence
  SiRNA target sequence
atgatccaagatttagaaaaag

SEQ ID NO: 151079 - DNA, 22 bp, Artificial sequence
  SiRNA target sequence
tgatccaagatttagaaaaagt

SEQ ID NO: 151080 - DNA, 22 bp, Artificial sequence
  SiRNA target sequence
gatccaagatttagaaaaagtg

SEQ ID NO: 151081 - DNA, 22 bp, Artificial sequence
  SiRNA target sequence
atccaagatttagaaaaagtgg

SEQ ID NO: 151082 - DNA, 22 bp, Artificial sequence
  SiRNA target sequence
tccaagatttagaaaaagtgga

SEQ ID NO: 151083 - DNA, 22 bp, Artificial sequence
  SiRNA target sequence
ccaagatttagaaaaagtggat

SEQ ID NO: 151084 - DNA, 22 bp, Artificial sequence
  SiRNA target sequence
caagatttagaaaaagtggata

SEQ ID NO: 151085 - DNA, 22 bp, Artificial sequence
  SiRNA target sequence
aagatttagaaaaagtggatat

SEQ ID NO: 151086 - DNA, 22 bp, Artificial sequence
  SiRNA target sequence
agatttagaaaaagtggatata

SEQ ID NO: 151087 - DNA, 22 bp, Artificial sequence
  SiRNA target sequence
gatttagaaaaagtggatataa

SEQ ID NO: 151088 - DNA, 22 bp, Artificial sequence
  SiRNA target sequence
atttagaaaaagtggatataat

SEQ ID NO: 151089 - DNA, 22 bp, Artificial sequence
  SiRNA target sequence
tttagaaaaagtggatataatt

SEQ ID NO: 151090 - DNA, 22 bp, Artificial sequence
  SiRNA target sequence
ttagaaaaagtggatataattt

SEQ ID NO: 151091 - DNA, 22 bp, Artificial sequence
  SiRNA target sequence
tagaaaaagtggatataattta

SEQ ID NO: 151092 - DNA, 22 bp, Artificial sequence
  SiRNA target sequence
agaaaaagtggatataatttaa

SEQ ID NO: 151093 - DNA, 22 bp, Artificial sequence
  SiRNA target sequence
gaaaaagtggatataatttaat

SEQ ID NO: 151094 - DNA, 22 bp, Artificial sequence
  SiRNA target sequence
aaaaagtggatataatttaatt

SEQ ID NO: 151095 - DNA, 22 bp, Artificial sequence
  SiRNA target sequence
aaaagtggatataatttaatta

SEQ ID NO: 151096 - DNA, 22 bp, Artificial sequence
  SiRNA target sequence
aaagtggatataatttaattag

SEQ ID NO: 151097 - DNA, 22 bp, Artificial sequence
  SiRNA target sequence
aagtggatataatttaattagt

SEQ ID NO: 151098 - DNA, 22 bp, Artificial sequence
  SiRNA target sequence
agtggatataatttaattagta

SEQ ID NO: 151099 - DNA, 22 bp, Artificial sequence
  SiRNA target sequence
gtggatataatttaattagtaa

SEQ ID NO: 151100 - DNA, 22 bp, Artificial sequence
  SiRNA target sequence
tggatataatttaattagtaag

SEQ ID NO: 151101 - DNA, 22 bp, Artificial sequence
  SiRNA target sequence
ggatataatttaattagtaagg

SEQ ID NO: 151102 - DNA, 22 bp, Artificial sequence
  SiRNA target sequence
gatataatttaattagtaaggt

SEQ ID NO: 151103 - DNA, 22 bp, Artificial sequence
  SiRNA target sequence
atataatttaattagtaaggtt

SEQ ID NO: 151104 - DNA, 22 bp, Artificial sequence
  SiRNA target sequence
tataatttaattagtaaggttg

SEQ ID NO: 151105 - DNA, 22 bp, Artificial sequence
  SiRNA target sequence
ataatttaattagtaaggttga

SEQ ID NO: 151106 - DNA, 22 bp, Artificial sequence
  SiRNA target sequence
taatttaattagtaaggttgat

SEQ ID NO: 151107 - DNA, 22 bp, Artificial sequence
  SiRNA target sequence
aatttaattagtaaggttgata

SEQ ID NO: 151108 - DNA, 22 bp, Artificial sequence
  SiRNA target sequence
atttaattagtaaggttgatat

SEQ ID NO: 151109 - DNA, 22 bp, Artificial sequence
  SiRNA target sequence
tttaattagtaaggttgatatt

SEQ ID NO: 151110 - DNA, 22 bp, Artificial sequence
  SiRNA target sequence
ttaattagtaaggttgatattc

SEQ ID NO: 151111 - DNA, 22 bp, Artificial sequence
  SiRNA target sequence
taattagtaaggttgatattcc

SEQ ID NO: 151112 - DNA, 22 bp, Artificial sequence
  SiRNA target sequence
aattagtaaggttgatattcca

SEQ ID NO: 151113 - DNA, 22 bp, Artificial sequence
  SiRNA target sequence
attagtaaggttgatattccat

SEQ ID NO: 151114 - DNA, 22 bp, Artificial sequence
  SiRNA target sequence
ttagtaaggttgatattccatt

SEQ ID NO: 151115 - DNA, 22 bp, Artificial sequence
  SiRNA target sequence
tagtaaggttgatattccattg

SEQ ID NO: 151116 - DNA, 22 bp, Artificial sequence
  SiRNA target sequence
agtaaggttgatattccattgt

SEQ ID NO: 151117 - DNA, 22 bp, Artificial sequence
  SiRNA target sequence
gtaaggttgatattccattgta

SEQ ID NO: 151118 - DNA, 22 bp, Artificial sequence
  SiRNA target sequence
taaggttgatattccattgtat

SEQ ID NO: 151119 - DNA, 22 bp, Artificial sequence
  SiRNA target sequence
aaggttgatattccattgtatg

SEQ ID NO: 151120 - DNA, 22 bp, Artificial sequence
  SiRNA target sequence
aggttgatattccattgtatgt

SEQ ID NO: 151121 - DNA, 22 bp, Artificial sequence
  SiRNA target sequence
ggttgatattccattgtatgtt

SEQ ID NO: 151122 - DNA, 22 bp, Artificial sequence
  SiRNA target sequence
gttgatattccattgtatgttg

SEQ ID NO: 151123 - DNA, 22 bp, Artificial sequence
  SiRNA target sequence
ttgatattccattgtatgttgc

SEQ ID NO: 151124 - DNA, 22 bp, Artificial sequence
  SiRNA target sequence
tgatattccattgtatgttgct

SEQ ID NO: 151125 - DNA, 22 bp, Artificial sequence
  SiRNA target sequence
gatattccattgtatgttgctt

SEQ ID NO: 151126 - DNA, 22 bp, Artificial sequence
  SiRNA target sequence
atattccattgtatgttgcttt

SEQ ID NO: 151127 - DNA, 22 bp, Artificial sequence
  SiRNA target sequence
tattccattgtatgttgctttg

SEQ ID NO: 151128 - DNA, 22 bp, Artificial sequence
  SiRNA target sequence
attccattgtatgttgctttgg

SEQ ID NO: 151129 - DNA, 22 bp, Artificial sequence
  SiRNA target sequence
ttccattgtatgttgctttggc

SEQ ID NO: 151130 - DNA, 22 bp, Artificial sequence
  SiRNA target sequence
tccattgtatgttgctttggca

SEQ ID NO: 151131 - DNA, 22 bp, Artificial sequence
  SiRNA target sequence
ccattgtatgttgctttggcag

SEQ ID NO: 151132 - DNA, 22 bp, Artificial sequence
  SiRNA target sequence
cattgtatgttgctttggcagg

SEQ ID NO: 151133 - DNA, 22 bp, Artificial sequence
  SiRNA target sequence
attgtatgttgctttggcaggc

SEQ ID NO: 151134 - DNA, 22 bp, Artificial sequence
  SiRNA target sequence
ttgtatgttgctttggcaggcg

SEQ ID NO: 151135 - DNA, 22 bp, Artificial sequence
  SiRNA target sequence
tgtatgttgctttggcaggcgg

SEQ ID NO: 151136 - DNA, 22 bp, Artificial sequence
  SiRNA target sequence
gtatgttgctttggcaggcgga

SEQ ID NO: 151137 - DNA, 22 bp, Artificial sequence
  SiRNA target sequence
tatgttgctttggcaggcggac

SEQ ID NO: 151138 - DNA, 22 bp, Artificial sequence
  SiRNA target sequence
atgttgctttggcaggcggaca

SEQ ID NO: 151139 - DNA, 22 bp, Artificial sequence
  SiRNA target sequence
tgttgctttggcaggcggacag

SEQ ID NO: 151140 - DNA, 22 bp, Artificial sequence
  SiRNA target sequence
gttgctttggcaggcggacaga

SEQ ID NO: 151141 - DNA, 22 bp, Artificial sequence
  SiRNA target sequence
ttgctttggcaggcggacagat

SEQ ID NO: 151142 - DNA, 22 bp, Artificial sequence
  SiRNA target sequence
tgctttggcaggcggacagatt

SEQ ID NO: 151143 - DNA, 22 bp, Artificial sequence
  SiRNA target sequence
gctttggcaggcggacagatta

SEQ ID NO: 151144 - DNA, 22 bp, Artificial sequence
  SiRNA target sequence
ctttggcaggcggacagattat

SEQ ID NO: 151145 - DNA, 22 bp, Artificial sequence
  SiRNA target sequence
tttggcaggcggacagattata

SEQ ID NO: 151146 - DNA, 22 bp, Artificial sequence
  SiRNA target sequence
ttggcaggcggacagattatat

SEQ ID NO: 151147 - DNA, 22 bp, Artificial sequence
  SiRNA target sequence
tggcaggcggacagattatatt

SEQ ID NO: 151148 - DNA, 22 bp, Artificial sequence
  SiRNA target sequence
ggcaggcggacagattatattt

SEQ ID NO: 151149 - DNA, 22 bp, Artificial sequence
  SiRNA target sequence
gcaggcggacagattatatttg

SEQ ID NO: 151150 - DNA, 22 bp, Artificial sequence
  SiRNA target sequence
caggcggacagattatatttga

SEQ ID NO: 151151 - DNA, 22 bp, Artificial sequence
  SiRNA target sequence
aggcggacagattatatttgaa

SEQ ID NO: 151152 - DNA, 22 bp, Artificial sequence
  SiRNA target sequence
ggcggacagattatatttgaac

SEQ ID NO: 151153 - DNA, 22 bp, Artificial sequence
  SiRNA target sequence
gcggacagattatatttgaaca

SEQ ID NO: 151154 - DNA, 22 bp, Artificial sequence
  SiRNA target sequence
cggacagattatatttgaacat

SEQ ID NO: 151155 - DNA, 22 bp, Artificial sequence
  SiRNA target sequence
ggacagattatatttgaacata

SEQ ID NO: 151156 - DNA, 22 bp, Artificial sequence
  SiRNA target sequence
gacagattatatttgaacatat

SEQ ID NO: 151157 - DNA, 22 bp, Artificial sequence
  SiRNA target sequence
acagattatatttgaacatatc

SEQ ID NO: 151158 - DNA, 22 bp, Artificial sequence
  SiRNA target sequence
cagattatatttgaacatatca

SEQ ID NO: 151159 - DNA, 22 bp, Artificial sequence
  SiRNA target sequence
agattatatttgaacatatcac

SEQ ID NO: 151160 - DNA, 22 bp, Artificial sequence
  SiRNA target sequence
gattatatttgaacatatcact

SEQ ID NO: 151161 - DNA, 22 bp, Artificial sequence
  SiRNA target sequence
attatatttgaacatatcactg

SEQ ID NO: 151162 - DNA, 22 bp, Artificial sequence
  SiRNA target sequence
ttatatttgaacatatcactgg

SEQ ID NO: 151163 - DNA, 22 bp, Artificial sequence
  SiRNA target sequence
tatatttgaacatatcactggt

SEQ ID NO: 151164 - DNA, 22 bp, Artificial sequence
  SiRNA target sequence
atatttgaacatatcactggta

SEQ ID NO: 151165 - DNA, 22 bp, Artificial sequence
  SiRNA target sequence
tatttgaacatatcactggtaa

SEQ ID NO: 151166 - DNA, 22 bp, Artificial sequence
  SiRNA target sequence
atttgaacatatcactggtaag

SEQ ID NO: 151167 - DNA, 22 bp, Artificial sequence
  SiRNA target sequence
tttgaacatatcactggtaaga

SEQ ID NO: 151168 - DNA, 22 bp, Artificial sequence
  SiRNA target sequence
ttgaacatatcactggtaagaa

SEQ ID NO: 151169 - DNA, 22 bp, Artificial sequence
  SiRNA target sequence
tgaacatatcactggtaagaaa

SEQ ID NO: 151170 - DNA, 22 bp, Artificial sequence
  SiRNA target sequence
gaacatatcactggtaagaaat

SEQ ID NO: 151171 - DNA, 22 bp, Artificial sequence
  SiRNA target sequence
aacatatcactggtaagaaatt

SEQ ID NO: 151172 - DNA, 22 bp, Artificial sequence
  SiRNA target sequence
acatatcactggtaagaaattt

SEQ ID NO: 151173 - DNA, 22 bp, Artificial sequence
  SiRNA target sequence
catatcactggtaagaaatttg

SEQ ID NO: 151174 - DNA, 22 bp, Artificial sequence
  SiRNA target sequence
atatcactggtaagaaatttga

SEQ ID NO: 151175 - DNA, 22 bp, Artificial sequence
  SiRNA target sequence
tatcactggtaagaaatttgaa

SEQ ID NO: 151176 - DNA, 22 bp, Artificial sequence
  SiRNA target sequence
atcactggtaagaaatttgaaa

SEQ ID NO: 151177 - DNA, 22 bp, Artificial sequence
  SiRNA target sequence
tcactggtaagaaatttgaaat

SEQ ID NO: 151178 - DNA, 22 bp, Artificial sequence
  SiRNA target sequence
cactggtaagaaatttgaaatt

SEQ ID NO: 151179 - DNA, 22 bp, Artificial sequence
  SiRNA target sequence
actggtaagaaatttgaaatta

SEQ ID NO: 151180 - DNA, 22 bp, Artificial sequence
  SiRNA target sequence
ctggtaagaaatttgaaattac

SEQ ID NO: 151181 - DNA, 22 bp, Artificial sequence
  SiRNA target sequence
tggtaagaaatttgaaattact

SEQ ID NO: 151182 - DNA, 22 bp, Artificial sequence
  SiRNA target sequence
ggtaagaaatttgaaattactt

SEQ ID NO: 151183 - DNA, 22 bp, Artificial sequence
  SiRNA target sequence
gtaagaaatttgaaattacttt

SEQ ID NO: 151184 - DNA, 22 bp, Artificial sequence
  SiRNA target sequence
taagaaatttgaaattacttta

SEQ ID NO: 151185 - DNA, 22 bp, Artificial sequence
  SiRNA target sequence
aagaaatttgaaattactttat

SEQ ID NO: 151186 - DNA, 22 bp, Artificial sequence
  SiRNA target sequence
agaaatttgaaattactttata

SEQ ID NO: 151187 - DNA, 22 bp, Artificial sequence
  SiRNA target sequence
gaaatttgaaattactttatat

SEQ ID NO: 151188 - DNA, 22 bp, Artificial sequence
  SiRNA target sequence
aaatttgaaattactttatatc

SEQ ID NO: 151189 - DNA, 22 bp, Artificial sequence
  SiRNA target sequence
aatttgaaattactttatatcc

SEQ ID NO: 151190 - DNA, 22 bp, Artificial sequence
  SiRNA target sequence
atttgaaattactttatatcca

SEQ ID NO: 151191 - DNA, 22 bp, Artificial sequence
  SiRNA target sequence
tttgaaattactttatatccat

SEQ ID NO: 151192 - DNA, 22 bp, Artificial sequence
  SiRNA target sequence
ttgaaattactttatatccatt

SEQ ID NO: 151193 - DNA, 22 bp, Artificial sequence
  SiRNA target sequence
tgaaattactttatatccattt

SEQ ID NO: 151194 - DNA, 22 bp, Artificial sequence
  SiRNA target sequence
gaaattactttatatccattta

SEQ ID NO: 151195 - DNA, 22 bp, Artificial sequence
  SiRNA target sequence
aaattactttatatccatttaa

SEQ ID NO: 151196 - DNA, 22 bp, Artificial sequence
  SiRNA target sequence
aattactttatatccatttaaa

SEQ ID NO: 151197 - DNA, 22 bp, Artificial sequence
  SiRNA target sequence
attactttatatccatttaaag

SEQ ID NO: 151198 - DNA, 22 bp, Artificial sequence
  SiRNA target sequence
ttactttatatccatttaaaga

SEQ ID NO: 151199 - DNA, 22 bp, Artificial sequence
  SiRNA target sequence
tactttatatccatttaaagat

SEQ ID NO: 151200 - DNA, 22 bp, Artificial sequence
  SiRNA target sequence
actttatatccatttaaagatt

SEQ ID NO: 151201 - DNA, 22 bp, Artificial sequence
  SiRNA target sequence
ctttatatccatttaaagattt

SEQ ID NO: 151202 - DNA, 22 bp, Artificial sequence
  SiRNA target sequence
tttatatccatttaaagattta

SEQ ID NO: 151203 - DNA, 22 bp, Artificial sequence
  SiRNA target sequence
ttatatccatttaaagatttaa

SEQ ID NO: 151204 - DNA, 22 bp, Artificial sequence
  SiRNA target sequence
tatatccatttaaagatttaaa

SEQ ID NO: 151205 - DNA, 22 bp, Artificial sequence
  SiRNA target sequence
atatccatttaaagatttaaag

SEQ ID NO: 151206 - DNA, 22 bp, Artificial sequence
  SiRNA target sequence
tatccatttaaagatttaaaga

SEQ ID NO: 151207 - DNA, 22 bp, Artificial sequence
  SiRNA target sequence
atccatttaaagatttaaagaa

SEQ ID NO: 151208 - DNA, 22 bp, Artificial sequence
  SiRNA target sequence
tccatttaaagatttaaagaaa

SEQ ID NO: 151209 - DNA, 22 bp, Artificial sequence
  SiRNA target sequence
ccatttaaagatttaaagaaat

SEQ ID NO: 151210 - DNA, 22 bp, Artificial sequence
  SiRNA target sequence
catttaaagatttaaagaaatg

SEQ ID NO: 151211 - DNA, 22 bp, Artificial sequence
  SiRNA target sequence
atttaaagatttaaagaaatgt

SEQ ID NO: 151212 - DNA, 22 bp, Artificial sequence
  SiRNA target sequence
tttaaagatttaaagaaatgta

SEQ ID NO: 151213 - DNA, 22 bp, Artificial sequence
  SiRNA target sequence
ttaaagatttaaagaaatgtat

SEQ ID NO: 151214 - DNA, 22 bp, Artificial sequence
  SiRNA target sequence
taaagatttaaagaaatgtatt

SEQ ID NO: 151215 - DNA, 22 bp, Artificial sequence
  SiRNA target sequence
aaagatttaaagaaatgtatta

SEQ ID NO: 151216 - DNA, 22 bp, Artificial sequence
  SiRNA target sequence
aagatttaaagaaatgtattat

SEQ ID NO: 151217 - DNA, 22 bp, Artificial sequence
  SiRNA target sequence
agatttaaagaaatgtattatt

SEQ ID NO: 151218 - DNA, 22 bp, Artificial sequence
  SiRNA target sequence
gatttaaagaaatgtattattt

SEQ ID NO: 151219 - DNA, 22 bp, Artificial sequence
  SiRNA target sequence
atttaaagaaatgtattatttt

SEQ ID NO: 151220 - DNA, 22 bp, Artificial sequence
  SiRNA target sequence
tttaaagaaatgtattatttta

SEQ ID NO: 151221 - DNA, 22 bp, Artificial sequence
  SiRNA target sequence
ttaaagaaatgtattattttaa

SEQ ID NO: 151222 - DNA, 22 bp, Artificial sequence
  SiRNA target sequence
taaagaaatgtattattttaaa

SEQ ID NO: 151223 - DNA, 22 bp, Artificial sequence
  SiRNA target sequence
aaagaaatgtattattttaaaa

SEQ ID NO: 151224 - DNA, 22 bp, Artificial sequence
  SiRNA target sequence
aagaaatgtattattttaaaag

SEQ ID NO: 151225 - DNA, 22 bp, Artificial sequence
  SiRNA target sequence
agaaatgtattattttaaaagg

SEQ ID NO: 151226 - DNA, 22 bp, Artificial sequence
  SiRNA target sequence
gaaatgtattattttaaaaggc

SEQ ID NO: 151227 - DNA, 22 bp, Artificial sequence
  SiRNA target sequence
aaatgtattattttaaaaggcg

SEQ ID NO: 151228 - DNA, 22 bp, Artificial sequence
  SiRNA target sequence
aatgtattattttaaaaggcga

SEQ ID NO: 151229 - DNA, 22 bp, Artificial sequence
  SiRNA target sequence
atgtattattttaaaaggcgaa

SEQ ID NO: 151230 - DNA, 22 bp, Artificial sequence
  SiRNA target sequence
tgtattattttaaaaggcgaag

SEQ ID NO: 151231 - DNA, 22 bp, Artificial sequence
  SiRNA target sequence
gtattattttaaaaggcgaagg

SEQ ID NO: 151232 - DNA, 22 bp, Artificial sequence
  SiRNA target sequence
tattattttaaaaggcgaaggt

SEQ ID NO: 151233 - DNA, 22 bp, Artificial sequence
  SiRNA target sequence
attattttaaaaggcgaaggtt

SEQ ID NO: 151234 - DNA, 22 bp, Artificial sequence
  SiRNA target sequence
ttattttaaaaggcgaaggttt

SEQ ID NO: 151235 - DNA, 22 bp, Artificial sequence
  SiRNA target sequence
tattttaaaaggcgaaggtttt

SEQ ID NO: 151236 - DNA, 22 bp, Artificial sequence
  SiRNA target sequence
attttaaaaggcgaaggtttta

SEQ ID NO: 151237 - DNA, 22 bp, Artificial sequence
  SiRNA target sequence
ttttaaaaggcgaaggttttaa

SEQ ID NO: 151238 - DNA, 22 bp, Artificial sequence
  SiRNA target sequence
tttaaaaggcgaaggttttaaa

SEQ ID NO: 151239 - DNA, 22 bp, Artificial sequence
  SiRNA target sequence
ttaaaaggcgaaggttttaaaa

SEQ ID NO: 151240 - DNA, 22 bp, Artificial sequence
  SiRNA target sequence
taaaaggcgaaggttttaaaat

SEQ ID NO: 151241 - DNA, 22 bp, Artificial sequence
  SiRNA target sequence
aaaaggcgaaggttttaaaata

SEQ ID NO: 151242 - DNA, 22 bp, Artificial sequence
  SiRNA target sequence
aaaggcgaaggttttaaaataa

SEQ ID NO: 151243 - DNA, 22 bp, Artificial sequence
  SiRNA target sequence
aaggcgaaggttttaaaataaa

SEQ ID NO: 151244 - DNA, 22 bp, Artificial sequence
  SiRNA target sequence
aggcgaaggttttaaaataaaa

SEQ ID NO: 151245 - DNA, 22 bp, Artificial sequence
  SiRNA target sequence
ggcgaaggttttaaaataaaaa

SEQ ID NO: 151246 - DNA, 22 bp, Artificial sequence
  SiRNA target sequence
gcgaaggttttaaaataaaaaa

SEQ ID NO: 151247 - DNA, 22 bp, Artificial sequence
  SiRNA target sequence
cgaaggttttaaaataaaaaat

SEQ ID NO: 151248 - DNA, 22 bp, Artificial sequence
  SiRNA target sequence
gaaggttttaaaataaaaaata

SEQ ID NO: 151249 - DNA, 22 bp, Artificial sequence
  SiRNA target sequence
aaggttttaaaataaaaaatag

SEQ ID NO: 151250 - DNA, 22 bp, Artificial sequence
  SiRNA target sequence
aggttttaaaataaaaaatagt

SEQ ID NO: 151251 - DNA, 22 bp, Artificial sequence
  SiRNA target sequence
ggttttaaaataaaaaatagtt

SEQ ID NO: 151252 - DNA, 22 bp, Artificial sequence
  SiRNA target sequence
gttttaaaataaaaaatagtta

SEQ ID NO: 151253 - DNA, 22 bp, Artificial sequence
  SiRNA target sequence
ttttaaaataaaaaatagttat

SEQ ID NO: 151254 - DNA, 22 bp, Artificial sequence
  SiRNA target sequence
tttaaaataaaaaatagttatt

SEQ ID NO: 151255 - DNA, 22 bp, Artificial sequence
  SiRNA target sequence
ttaaaataaaaaatagttattc

SEQ ID NO: 151256 - DNA, 22 bp, Artificial sequence
  SiRNA target sequence
taaaataaaaaatagttattcg

SEQ ID NO: 151257 - DNA, 22 bp, Artificial sequence
  SiRNA target sequence
aaaataaaaaatagttattcgg

SEQ ID NO: 151258 - DNA, 22 bp, Artificial sequence
  SiRNA target sequence
aaataaaaaatagttattcggg

SEQ ID NO: 151259 - DNA, 22 bp, Artificial sequence
  SiRNA target sequence
aataaaaaatagttattcgggt

SEQ ID NO: 151260 - DNA, 22 bp, Artificial sequence
  SiRNA target sequence
ataaaaaatagttattcgggtg

SEQ ID NO: 151261 - DNA, 22 bp, Artificial sequence
  SiRNA target sequence
taaaaaatagttattcgggtgg

SEQ ID NO: 151262 - DNA, 22 bp, Artificial sequence
  SiRNA target sequence
aaaaaatagttattcgggtggt

SEQ ID NO: 151263 - DNA, 22 bp, Artificial sequence
  SiRNA target sequence
aaaaatagttattcgggtggtg

SEQ ID NO: 151264 - DNA, 22 bp, Artificial sequence
  SiRNA target sequence
aaaatagttattcgggtggtga

SEQ ID NO: 151265 - DNA, 22 bp, Artificial sequence
  SiRNA target sequence
aaatagttattcgggtggtgat

SEQ ID NO: 151266 - DNA, 22 bp, Artificial sequence
  SiRNA target sequence
aatagttattcgggtggtgatc

SEQ ID NO: 151267 - DNA, 22 bp, Artificial sequence
  SiRNA target sequence
atagttattcgggtggtgatct

SEQ ID NO: 151268 - DNA, 22 bp, Artificial sequence
  SiRNA target sequence
tagttattcgggtggtgatctt

SEQ ID NO: 151269 - DNA, 22 bp, Artificial sequence
  SiRNA target sequence
agttattcgggtggtgatctta

SEQ ID NO: 151270 - DNA, 22 bp, Artificial sequence
  SiRNA target sequence
gttattcgggtggtgatcttat

SEQ ID NO: 151271 - DNA, 22 bp, Artificial sequence
  SiRNA target sequence
ttattcgggtggtgatcttatt

SEQ ID NO: 151272 - DNA, 22 bp, Artificial sequence
  SiRNA target sequence
tattcgggtggtgatcttattc

SEQ ID NO: 151273 - DNA, 22 bp, Artificial sequence
  SiRNA target sequence
attcgggtggtgatcttattct

SEQ ID NO: 151274 - DNA, 22 bp, Artificial sequence
  SiRNA target sequence
ttcgggtggtgatcttattctc

SEQ ID NO: 151275 - DNA, 22 bp, Artificial sequence
  SiRNA target sequence
tcgggtggtgatcttattctcg

SEQ ID NO: 151276 - DNA, 22 bp, Artificial sequence
  SiRNA target sequence
cgggtggtgatcttattctcga

SEQ ID NO: 151277 - DNA, 22 bp, Artificial sequence
  SiRNA target sequence
gggtggtgatcttattctcgaa

SEQ ID NO: 151278 - DNA, 22 bp, Artificial sequence
  SiRNA target sequence
ggtggtgatcttattctcgaac

SEQ ID NO: 151279 - DNA, 22 bp, Artificial sequence
  SiRNA target sequence
gtggtgatcttattctcgaacc

SEQ ID NO: 151280 - DNA, 22 bp, Artificial sequence
  SiRNA target sequence
tggtgatcttattctcgaacct

SEQ ID NO: 151281 - DNA, 22 bp, Artificial sequence
  SiRNA target sequence
ggtgatcttattctcgaaccta

SEQ ID NO: 151282 - DNA, 22 bp, Artificial sequence
  SiRNA target sequence
gtgatcttattctcgaacctaa

SEQ ID NO: 151283 - DNA, 22 bp, Artificial sequence
  SiRNA target sequence
tgatcttattctcgaacctaat

SEQ ID NO: 151284 - DNA, 22 bp, Artificial sequence
  SiRNA target sequence
gatcttattctcgaacctaata

SEQ ID NO: 151285 - DNA, 22 bp, Artificial sequence
  SiRNA target sequence
atcttattctcgaacctaatat

SEQ ID NO: 151286 - DNA, 22 bp, Artificial sequence
  SiRNA target sequence
tcttattctcgaacctaatata

SEQ ID NO: 151287 - DNA, 22 bp, Artificial sequence
  SiRNA target sequence
cttattctcgaacctaatataa

SEQ ID NO: 151288 - DNA, 22 bp, Artificial sequence
  SiRNA target sequence
ttattctcgaacctaatataat

SEQ ID NO: 151289 - DNA, 22 bp, Artificial sequence
  SiRNA target sequence
tattctcgaacctaatataatt

SEQ ID NO: 151290 - DNA, 22 bp, Artificial sequence
  SiRNA target sequence
attctcgaacctaatataatta

SEQ ID NO: 151291 - DNA, 22 bp, Artificial sequence
  SiRNA target sequence
ttctcgaacctaatataattat

SEQ ID NO: 151292 - DNA, 22 bp, Artificial sequence
  SiRNA target sequence
tctcgaacctaatataattata

SEQ ID NO: 151293 - DNA, 22 bp, Artificial sequence
  SiRNA target sequence
ctcgaacctaatataattatag

SEQ ID NO: 151294 - DNA, 22 bp, Artificial sequence
  SiRNA target sequence
tcgaacctaatataattataga

SEQ ID NO: 151295 - DNA, 22 bp, Artificial sequence
  SiRNA target sequence
cgaacctaatataattatagat

SEQ ID NO: 151296 - DNA, 22 bp, Artificial sequence
  SiRNA target sequence
gaacctaatataattatagata

SEQ ID NO: 151297 - DNA, 22 bp, Artificial sequence
  SiRNA target sequence
aacctaatataattatagataa

SEQ ID NO: 151298 - DNA, 22 bp, Artificial sequence
  SiRNA target sequence
acctaatataattatagataag

SEQ ID NO: 151299 - DNA, 22 bp, Artificial sequence
  SiRNA target sequence
cctaatataattatagataaga

SEQ ID NO: 151300 - DNA, 22 bp, Artificial sequence
  SiRNA target sequence
ctaatataattatagataagaa

SEQ ID NO: 151301 - DNA, 22 bp, Artificial sequence
  SiRNA target sequence
taatataattatagataagaat

SEQ ID NO: 151302 - DNA, 22 bp, Artificial sequence
  SiRNA target sequence
aatataattatagataagaata

SEQ ID NO: 151303 - DNA, 22 bp, Artificial sequence
  SiRNA target sequence
atataattatagataagaatat

SEQ ID NO: 151304 - DNA, 22 bp, Artificial sequence
  SiRNA target sequence
tataattatagataagaatatt

SEQ ID NO: 151305 - DNA, 22 bp, Artificial sequence
  SiRNA target sequence
ataattatagataagaatattg

SEQ ID NO: 151306 - DNA, 22 bp, Artificial sequence
  SiRNA target sequence
taattatagataagaatattga

SEQ ID NO: 151307 - DNA, 22 bp, Artificial sequence
  SiRNA target sequence
aattatagataagaatattgat

SEQ ID NO: 151308 - DNA, 22 bp, Artificial sequence
  SiRNA target sequence
attatagataagaatattgata

SEQ ID NO: 151309 - DNA, 22 bp, Artificial sequence
  SiRNA target sequence
ttatagataagaatattgataa

SEQ ID NO: 151310 - DNA, 22 bp, Artificial sequence
  SiRNA target sequence
tatagataagaatattgataaa

SEQ ID NO: 151311 - DNA, 22 bp, Artificial sequence
  SiRNA target sequence
atagataagaatattgataaag

SEQ ID NO: 151312 - DNA, 22 bp, Artificial sequence
  SiRNA target sequence
tagataagaatattgataaaga

SEQ ID NO: 151313 - DNA, 22 bp, Artificial sequence
  SiRNA target sequence
agataagaatattgataaagat

SEQ ID NO: 151314 - DNA, 22 bp, Artificial sequence
  SiRNA target sequence
gataagaatattgataaagatt

SEQ ID NO: 151315 - DNA, 22 bp, Artificial sequence
  SiRNA target sequence
ataagaatattgataaagattt

SEQ ID NO: 151316 - DNA, 22 bp, Artificial sequence
  SiRNA target sequence
taagaatattgataaagattta

SEQ ID NO: 151317 - DNA, 22 bp, Artificial sequence
  SiRNA target sequence
aagaatattgataaagatttat

SEQ ID NO: 151318 - DNA, 22 bp, Artificial sequence
  SiRNA target sequence
agaatattgataaagatttatt

SEQ ID NO: 151319 - DNA, 22 bp, Artificial sequence
  SiRNA target sequence
gaatattgataaagatttatta

SEQ ID NO: 151320 - DNA, 22 bp, Artificial sequence
  SiRNA target sequence
aatattgataaagatttattag

SEQ ID NO: 151321 - DNA, 22 bp, Artificial sequence
  SiRNA target sequence
atattgataaagatttattagc

SEQ ID NO: 151322 - DNA, 22 bp, Artificial sequence
  SiRNA target sequence
tattgataaagatttattagca

SEQ ID NO: 151323 - DNA, 22 bp, Artificial sequence
  SiRNA target sequence
attgataaagatttattagcac

SEQ ID NO: 151324 - DNA, 22 bp, Artificial sequence
  SiRNA target sequence
ttgataaagatttattagcacg

SEQ ID NO: 151325 - DNA, 22 bp, Artificial sequence
  SiRNA target sequence
tgataaagatttattagcacgc

SEQ ID NO: 151326 - DNA, 22 bp, Artificial sequence
  SiRNA target sequence
gataaagatttattagcacgcg

SEQ ID NO: 151327 - DNA, 22 bp, Artificial sequence
  SiRNA target sequence
ataaagatttattagcacgcgc

SEQ ID NO: 151328 - DNA, 22 bp, Artificial sequence
  SiRNA target sequence
taaagatttattagcacgcgcc

SEQ ID NO: 151329 - DNA, 22 bp, Artificial sequence
  SiRNA target sequence
aaagatttattagcacgcgcct

SEQ ID NO: 151330 - DNA, 22 bp, Artificial sequence
  SiRNA target sequence
aagatttattagcacgcgcctt

SEQ ID NO: 151331 - DNA, 22 bp, Artificial sequence
  SiRNA target sequence
agatttattagcacgcgccttg

SEQ ID NO: 151332 - DNA, 22 bp, Artificial sequence
  SiRNA target sequence
gatttattagcacgcgccttga

SEQ ID NO: 151333 - DNA, 22 bp, Artificial sequence
  SiRNA target sequence
atttattagcacgcgccttgaa

SEQ ID NO: 151334 - DNA, 22 bp, Artificial sequence
  SiRNA target sequence
tttattagcacgcgccttgaat

SEQ ID NO: 151335 - DNA, 22 bp, Artificial sequence
  SiRNA target sequence
ttattagcacgcgccttgaatt

SEQ ID NO: 151336 - DNA, 22 bp, Artificial sequence
  SiRNA target sequence
tattagcacgcgccttgaatta

SEQ ID NO: 151337 - DNA, 22 bp, Artificial sequence
  SiRNA target sequence
attagcacgcgccttgaattat

SEQ ID NO: 151338 - DNA, 22 bp, Artificial sequence
  SiRNA target sequence
ttagcacgcgccttgaattatg

SEQ ID NO: 151339 - DNA, 22 bp, Artificial sequence
  SiRNA target sequence
tagcacgcgccttgaattatgt

SEQ ID NO: 151340 - DNA, 22 bp, Artificial sequence
  SiRNA target sequence
agcacgcgccttgaattatgtt

SEQ ID NO: 151341 - DNA, 22 bp, Artificial sequence
  SiRNA target sequence
gcacgcgccttgaattatgttc

SEQ ID NO: 151342 - DNA, 22 bp, Artificial sequence
  SiRNA target sequence
cacgcgccttgaattatgttcc

SEQ ID NO: 151343 - DNA, 22 bp, Artificial sequence
  SiRNA target sequence
acgcgccttgaattatgttcct

SEQ ID NO: 151344 - DNA, 22 bp, Artificial sequence
  SiRNA target sequence
cgcgccttgaattatgttcctg

SEQ ID NO: 151345 - DNA, 22 bp, Artificial sequence
  SiRNA target sequence
gcgccttgaattatgttcctgt

SEQ ID NO: 151346 - DNA, 22 bp, Artificial sequence
  SiRNA target sequence
cgccttgaattatgttcctgta

SEQ ID NO: 151347 - DNA, 22 bp, Artificial sequence
  SiRNA target sequence
gccttgaattatgttcctgtaa

SEQ ID NO: 151348 - DNA, 22 bp, Artificial sequence
  SiRNA target sequence
ccttgaattatgttcctgtaag

SEQ ID NO: 151349 - DNA, 22 bp, Artificial sequence
  SiRNA target sequence
cttgaattatgttcctgtaaga

SEQ ID NO: 151350 - DNA, 22 bp, Artificial sequence
  SiRNA target sequence
ttgaattatgttcctgtaagaa

SEQ ID NO: 151351 - DNA, 22 bp, Artificial sequence
  SiRNA target sequence
tgaattatgttcctgtaagaaa

SEQ ID NO: 151352 - DNA, 22 bp, Artificial sequence
  SiRNA target sequence
gaattatgttcctgtaagaaaa

SEQ ID NO: 151353 - DNA, 22 bp, Artificial sequence
  SiRNA target sequence
aattatgttcctgtaagaaaag

SEQ ID NO: 151354 - DNA, 22 bp, Artificial sequence
  SiRNA target sequence
attatgttcctgtaagaaaaga

SEQ ID NO: 151355 - DNA, 22 bp, Artificial sequence
  SiRNA target sequence
ttatgttcctgtaagaaaagat

SEQ ID NO: 151356 - DNA, 22 bp, Artificial sequence
  SiRNA target sequence
tatgttcctgtaagaaaagatt

SEQ ID NO: 151357 - DNA, 22 bp, Artificial sequence
  SiRNA target sequence
atgttcctgtaagaaaagattt

SEQ ID NO: 151358 - DNA, 22 bp, Artificial sequence
  SiRNA target sequence
tgttcctgtaagaaaagatttt

SEQ ID NO: 151359 - DNA, 22 bp, Artificial sequence
  SiRNA target sequence
gttcctgtaagaaaagatttta

SEQ ID NO: 151360 - DNA, 22 bp, Artificial sequence
  SiRNA target sequence
ttcctgtaagaaaagattttac

SEQ ID NO: 151361 - DNA, 22 bp, Artificial sequence
  SiRNA target sequence
tcctgtaagaaaagattttaca

SEQ ID NO: 151362 - DNA, 22 bp, Artificial sequence
  SiRNA target sequence
cctgtaagaaaagattttacag

SEQ ID NO: 151363 - DNA, 22 bp, Artificial sequence
  SiRNA target sequence
ctgtaagaaaagattttacagg

SEQ ID NO: 151364 - DNA, 22 bp, Artificial sequence
  SiRNA target sequence
tgtaagaaaagattttacagga

SEQ ID NO: 151365 - DNA, 22 bp, Artificial sequence
  SiRNA target sequence
gtaagaaaagattttacaggaa

SEQ ID NO: 151366 - DNA, 22 bp, Artificial sequence
  SiRNA target sequence
taagaaaagattttacaggaac

SEQ ID NO: 151367 - DNA, 22 bp, Artificial sequence
  SiRNA target sequence
aagaaaagattttacaggaact

SEQ ID NO: 151368 - DNA, 22 bp, Artificial sequence
  SiRNA target sequence
agaaaagattttacaggaactg

SEQ ID NO: 151369 - DNA, 22 bp, Artificial sequence
  SiRNA target sequence
gaaaagattttacaggaactgc

SEQ ID NO: 151370 - DNA, 22 bp, Artificial sequence
  SiRNA target sequence
aaaagattttacaggaactgct

SEQ ID NO: 151371 - DNA, 22 bp, Artificial sequence
  SiRNA target sequence
aaagattttacaggaactgctg

SEQ ID NO: 151372 - DNA, 22 bp, Artificial sequence
  SiRNA target sequence
aagattttacaggaactgctgt

SEQ ID NO: 151373 - DNA, 22 bp, Artificial sequence
  SiRNA target sequence
agattttacaggaactgctgtt

SEQ ID NO: 151374 - DNA, 22 bp, Artificial sequence
  SiRNA target sequence
gattttacaggaactgctgttc

SEQ ID NO: 151375 - DNA, 22 bp, Artificial sequence
  SiRNA target sequence
attttacaggaactgctgttcc

SEQ ID NO: 151376 - DNA, 22 bp, Artificial sequence
  SiRNA target sequence
ttttacaggaactgctgttcca

SEQ ID NO: 151377 - DNA, 22 bp, Artificial sequence
  SiRNA target sequence
tttacaggaactgctgttccaa

SEQ ID NO: 151378 - DNA, 22 bp, Artificial sequence
  SiRNA target sequence
ttacaggaactgctgttccaaa

SEQ ID NO: 151379 - DNA, 22 bp, Artificial sequence
  SiRNA target sequence
tacaggaactgctgttccaaaa

SEQ ID NO: 151380 - DNA, 22 bp, Artificial sequence
  SiRNA target sequence
acaggaactgctgttccaaaat

SEQ ID NO: 151381 - DNA, 22 bp, Artificial sequence
  SiRNA target sequence
caggaactgctgttccaaaata

SEQ ID NO: 151382 - DNA, 22 bp, Artificial sequence
  SiRNA target sequence
aggaactgctgttccaaaatat

SEQ ID NO: 151383 - DNA, 22 bp, Artificial sequence
  SiRNA target sequence
ggaactgctgttccaaaatatg

SEQ ID NO: 151384 - DNA, 22 bp, Artificial sequence
  SiRNA target sequence
gaactgctgttccaaaatatgc

SEQ ID NO: 151385 - DNA, 22 bp, Artificial sequence
  SiRNA target sequence
aactgctgttccaaaatatgca

SEQ ID NO: 151386 - DNA, 22 bp, Artificial sequence
  SiRNA target sequence
actgctgttccaaaatatgcag

SEQ ID NO: 151387 - DNA, 22 bp, Artificial sequence
  SiRNA target sequence
ctgctgttccaaaatatgcaga

SEQ ID NO: 151388 - DNA, 22 bp, Artificial sequence
  SiRNA target sequence
tgctgttccaaaatatgcagaa

SEQ ID NO: 151389 - DNA, 22 bp, Artificial sequence
  SiRNA target sequence
gctgttccaaaatatgcagaat

SEQ ID NO: 151390 - DNA, 22 bp, Artificial sequence
  SiRNA target sequence
ctgttccaaaatatgcagaatt

SEQ ID NO: 151391 - DNA, 22 bp, Artificial sequence
  SiRNA target sequence
tgttccaaaatatgcagaattt

SEQ ID NO: 151392 - DNA, 22 bp, Artificial sequence
  SiRNA target sequence
gttccaaaatatgcagaatttg

SEQ ID NO: 151393 - DNA, 22 bp, Artificial sequence
  SiRNA target sequence
ttccaaaatatgcagaatttgg

SEQ ID NO: 151394 - DNA, 22 bp, Artificial sequence
  SiRNA target sequence
tccaaaatatgcagaatttggt

SEQ ID NO: 151395 - DNA, 22 bp, Artificial sequence
  SiRNA target sequence
ccaaaatatgcagaatttggtg

SEQ ID NO: 151396 - DNA, 22 bp, Artificial sequence
  SiRNA target sequence
caaaatatgcagaatttggtgt

SEQ ID NO: 151397 - DNA, 22 bp, Artificial sequence
  SiRNA target sequence
aaaatatgcagaatttggtgtt

SEQ ID NO: 151398 - DNA, 22 bp, Artificial sequence
  SiRNA target sequence
aaatatgcagaatttggtgtta

SEQ ID NO: 151399 - DNA, 22 bp, Artificial sequence
  SiRNA target sequence
aatatgcagaatttggtgttat

SEQ ID NO: 151400 - DNA, 22 bp, Artificial sequence
  SiRNA target sequence
atatgcagaatttggtgttatg

SEQ ID NO: 151401 - DNA, 22 bp, Artificial sequence
  SiRNA target sequence
tatgcagaatttggtgttatgc

SEQ ID NO: 151402 - DNA, 22 bp, Artificial sequence
  SiRNA target sequence
atgcagaatttggtgttatgcc

SEQ ID NO: 151403 - DNA, 22 bp, Artificial sequence
  SiRNA target sequence
tgcagaatttggtgttatgcct

SEQ ID NO: 151404 - DNA, 22 bp, Artificial sequence
  SiRNA target sequence
gcagaatttggtgttatgccta

SEQ ID NO: 151405 - DNA, 22 bp, Artificial sequence
  SiRNA target sequence
cagaatttggtgttatgcctaa

SEQ ID NO: 151406 - DNA, 22 bp, Artificial sequence
  SiRNA target sequence
agaatttggtgttatgcctaaa

SEQ ID NO: 151407 - DNA, 22 bp, Artificial sequence
  SiRNA target sequence
gaatttggtgttatgcctaaag

SEQ ID NO: 151408 - DNA, 22 bp, Artificial sequence
  SiRNA target sequence
aatttggtgttatgcctaaaga

SEQ ID NO: 151409 - DNA, 22 bp, Artificial sequence
  SiRNA target sequence
atttggtgttatgcctaaagaa

SEQ ID NO: 151410 - DNA, 22 bp, Artificial sequence
  SiRNA target sequence
tttggtgttatgcctaaagaac

SEQ ID NO: 151411 - DNA, 22 bp, Artificial sequence
  SiRNA target sequence
ttggtgttatgcctaaagaaca

SEQ ID NO: 151412 - DNA, 22 bp, Artificial sequence
  SiRNA target sequence
tggtgttatgcctaaagaacag

SEQ ID NO: 151413 - DNA, 22 bp, Artificial sequence
  SiRNA target sequence
ggtgttatgcctaaagaacagg

SEQ ID NO: 151414 - DNA, 22 bp, Artificial sequence
  SiRNA target sequence
gtgttatgcctaaagaacagga

SEQ ID NO: 151415 - DNA, 22 bp, Artificial sequence
  SiRNA target sequence
tgttatgcctaaagaacaggaa

SEQ ID NO: 151416 - DNA, 22 bp, Artificial sequence
  SiRNA target sequence
gttatgcctaaagaacaggaag

SEQ ID NO: 151417 - DNA, 22 bp, Artificial sequence
  SiRNA target sequence
ttatgcctaaagaacaggaaga

SEQ ID NO: 151418 - DNA, 22 bp, Artificial sequence
  SiRNA target sequence
tatgcctaaagaacaggaagaa

SEQ ID NO: 151419 - DNA, 22 bp, Artificial sequence
  SiRNA target sequence
atgcctaaagaacaggaagaac

SEQ ID NO: 151420 - DNA, 22 bp, Artificial sequence
  SiRNA target sequence
tgcctaaagaacaggaagaaca

SEQ ID NO: 151421 - DNA, 22 bp, Artificial sequence
  SiRNA target sequence
gcctaaagaacaggaagaacaa

SEQ ID NO: 151422 - DNA, 22 bp, Artificial sequence
  SiRNA target sequence
cctaaagaacaggaagaacaaa

SEQ ID NO: 151423 - DNA, 22 bp, Artificial sequence
  SiRNA target sequence
ctaaagaacaggaagaacaaaa

SEQ ID NO: 151424 - DNA, 22 bp, Artificial sequence
  SiRNA target sequence
taaagaacaggaagaacaaaac

SEQ ID NO: 151425 - DNA, 22 bp, Artificial sequence
  SiRNA target sequence
aaagaacaggaagaacaaaacg

SEQ ID NO: 151426 - DNA, 22 bp, Artificial sequence
  SiRNA target sequence
aagaacaggaagaacaaaacga

SEQ ID NO: 151427 - DNA, 22 bp, Artificial sequence
  SiRNA target sequence
agaacaggaagaacaaaacgaa

SEQ ID NO: 151428 - DNA, 22 bp, Artificial sequence
  SiRNA target sequence
gaacaggaagaacaaaacgaaa

SEQ ID NO: 151429 - DNA, 22 bp, Artificial sequence
  SiRNA target sequence
aacaggaagaacaaaacgaaag

SEQ ID NO: 151430 - DNA, 22 bp, Artificial sequence
  SiRNA target sequence
acaggaagaacaaaacgaaaga

SEQ ID NO: 151431 - DNA, 22 bp, Artificial sequence
  SiRNA target sequence
caggaagaacaaaacgaaagag

SEQ ID NO: 151432 - DNA, 22 bp, Artificial sequence
  SiRNA target sequence
aggaagaacaaaacgaaagaga

SEQ ID NO: 151433 - DNA, 22 bp, Artificial sequence
  SiRNA target sequence
ggaagaacaaaacgaaagagaa

SEQ ID NO: 151434 - DNA, 22 bp, Artificial sequence
  SiRNA target sequence
gaagaacaaaacgaaagagaaa

SEQ ID NO: 151435 - DNA, 22 bp, Artificial sequence
  SiRNA target sequence
aagaacaaaacgaaagagaaag

SEQ ID NO: 151436 - DNA, 22 bp, Artificial sequence
  SiRNA target sequence
agaacaaaacgaaagagaaaga

SEQ ID NO: 151437 - DNA, 22 bp, Artificial sequence
  SiRNA target sequence
gaacaaaacgaaagagaaagat

SEQ ID NO: 151438 - DNA, 22 bp, Artificial sequence
  SiRNA target sequence
aacaaaacgaaagagaaagatt

SEQ ID NO: 151439 - DNA, 22 bp, Artificial sequence
  SiRNA target sequence
acaaaacgaaagagaaagattc

SEQ ID NO: 151440 - DNA, 22 bp, Artificial sequence
  SiRNA target sequence
caaaacgaaagagaaagattcg

SEQ ID NO: 151441 - DNA, 22 bp, Artificial sequence
  SiRNA target sequence
aaaacgaaagagaaagattcga

SEQ ID NO: 151442 - DNA, 22 bp, Artificial sequence
  SiRNA target sequence
aaacgaaagagaaagattcgaa

SEQ ID NO: 151443 - DNA, 22 bp, Artificial sequence
  SiRNA target sequence
aacgaaagagaaagattcgaag

SEQ ID NO: 151444 - DNA, 22 bp, Artificial sequence
  SiRNA target sequence
acgaaagagaaagattcgaagg

SEQ ID NO: 151445 - DNA, 22 bp, Artificial sequence
  SiRNA target sequence
cgaaagagaaagattcgaaggt

SEQ ID NO: 151446 - DNA, 22 bp, Artificial sequence
  SiRNA target sequence
gaaagagaaagattcgaaggtg

SEQ ID NO: 151447 - DNA, 22 bp, Artificial sequence
  SiRNA target sequence
aaagagaaagattcgaaggtgc

SEQ ID NO: 151448 - DNA, 22 bp, Artificial sequence
  SiRNA target sequence
aagagaaagattcgaaggtgca

SEQ ID NO: 151449 - DNA, 22 bp, Artificial sequence
  SiRNA target sequence
agagaaagattcgaaggtgcag

SEQ ID NO: 151450 - DNA, 22 bp, Artificial sequence
  SiRNA target sequence
gagaaagattcgaaggtgcaga

SEQ ID NO: 151451 - DNA, 22 bp, Artificial sequence
  SiRNA target sequence
agaaagattcgaaggtgcagaa

SEQ ID NO: 151452 - DNA, 22 bp, Artificial sequence
  SiRNA target sequence
gaaagattcgaaggtgcagaag

SEQ ID NO: 151453 - DNA, 22 bp, Artificial sequence
  SiRNA target sequence
aaagattcgaaggtgcagaaga

SEQ ID NO: 151454 - DNA, 22 bp, Artificial sequence
  SiRNA target sequence
aagattcgaaggtgcagaagag

SEQ ID NO: 151455 - DNA, 22 bp, Artificial sequence
  SiRNA target sequence
agattcgaaggtgcagaagagt

SEQ ID NO: 151456 - DNA, 22 bp, Artificial sequence
  SiRNA target sequence
gattcgaaggtgcagaagagtt

SEQ ID NO: 151457 - DNA, 22 bp, Artificial sequence
  SiRNA target sequence
attcgaaggtgcagaagagttt

SEQ ID NO: 151458 - DNA, 22 bp, Artificial sequence
  SiRNA target sequence
ttcgaaggtgcagaagagtttt

SEQ ID NO: 151459 - DNA, 22 bp, Artificial sequence
  SiRNA target sequence
tcgaaggtgcagaagagttttt

SEQ ID NO: 151460 - DNA, 22 bp, Artificial sequence
  SiRNA target sequence
cgaaggtgcagaagagtttttt

SEQ ID NO: 151461 - DNA, 22 bp, Artificial sequence
  SiRNA target sequence
gaaggtgcagaagagttttttg

SEQ ID NO: 151462 - DNA, 22 bp, Artificial sequence
  SiRNA target sequence
aaggtgcagaagagttttttgg

SEQ ID NO: 151463 - DNA, 22 bp, Artificial sequence
  SiRNA target sequence
aggtgcagaagagttttttgga

SEQ ID NO: 151464 - DNA, 22 bp, Artificial sequence
  SiRNA target sequence
ggtgcagaagagttttttggag

SEQ ID NO: 151465 - DNA, 22 bp, Artificial sequence
  SiRNA target sequence
gtgcagaagagttttttggagg

SEQ ID NO: 151466 - DNA, 22 bp, Artificial sequence
  SiRNA target sequence
tgcagaagagttttttggagga

SEQ ID NO: 151467 - DNA, 22 bp, Artificial sequence
  SiRNA target sequence
gcagaagagttttttggaggaa

SEQ ID NO: 151468 - DNA, 22 bp, Artificial sequence
  SiRNA target sequence
cagaagagttttttggaggaaa

SEQ ID NO: 151469 - DNA, 22 bp, Artificial sequence
  SiRNA target sequence
agaagagttttttggaggaaat

SEQ ID NO: 151470 - DNA, 22 bp, Artificial sequence
  SiRNA target sequence
gaagagttttttggaggaaatg

SEQ ID NO: 151471 - DNA, 22 bp, Artificial sequence
  SiRNA target sequence
aagagttttttggaggaaatgg

SEQ ID NO: 151472 - DNA, 22 bp, Artificial sequence
  SiRNA target sequence
agagttttttggaggaaatggt

SEQ ID NO: 151473 - DNA, 22 bp, Artificial sequence
  SiRNA target sequence
gagttttttggaggaaatggta

SEQ ID NO: 151474 - DNA, 22 bp, Artificial sequence
  SiRNA target sequence
agttttttggaggaaatggtag

SEQ ID NO: 151475 - DNA, 22 bp, Artificial sequence
  SiRNA target sequence
gttttttggaggaaatggtaga

SEQ ID NO: 151476 - DNA, 22 bp, Artificial sequence
  SiRNA target sequence
ttttttggaggaaatggtagag

SEQ ID NO: 151477 - DNA, 22 bp, Artificial sequence
  SiRNA target sequence
tttttggaggaaatggtagaga

SEQ ID NO: 151478 - DNA, 22 bp, Artificial sequence
  SiRNA target sequence
ttttggaggaaatggtagagat

SEQ ID NO: 151479 - DNA, 22 bp, Artificial sequence
  SiRNA target sequence
tttggaggaaatggtagagatt

SEQ ID NO: 151480 - DNA, 22 bp, Artificial sequence
  SiRNA target sequence
ttggaggaaatggtagagattt

SEQ ID NO: 151481 - DNA, 22 bp, Artificial sequence
  SiRNA target sequence
tggaggaaatggtagagatttt

SEQ ID NO: 151482 - DNA, 22 bp, Artificial sequence
  SiRNA target sequence
ggaggaaatggtagagattttt

SEQ ID NO: 151483 - DNA, 22 bp, Artificial sequence
  SiRNA target sequence
gaggaaatggtagagatttttt

SEQ ID NO: 151484 - DNA, 22 bp, Artificial sequence
  SiRNA target sequence
aggaaatggtagagattttttt

SEQ ID NO: 151485 - DNA, 22 bp, Artificial sequence
  SiRNA target sequence
ggaaatggtagagattttttta

SEQ ID NO: 151486 - DNA, 22 bp, Artificial sequence
  SiRNA target sequence
gaaatggtagagatttttttag

SEQ ID NO: 151487 - DNA, 22 bp, Artificial sequence
  SiRNA target sequence
aaatggtagagatttttttagc

SEQ ID NO: 151488 - DNA, 22 bp, Artificial sequence
  SiRNA target sequence
aatggtagagatttttttagca

SEQ ID NO: 151489 - DNA, 22 bp, Artificial sequence
  SiRNA target sequence
atggtagagatttttttagcaa

SEQ ID NO: 151490 - DNA, 22 bp, Artificial sequence
  SiRNA target sequence
tggtagagatttttttagcaag

SEQ ID NO: 151491 - DNA, 22 bp, Artificial sequence
  SiRNA target sequence
ggtagagatttttttagcaagt

SEQ ID NO: 151492 - DNA, 22 bp, Artificial sequence
  SiRNA target sequence
gtagagatttttttagcaagtt

SEQ ID NO: 151493 - DNA, 22 bp, Artificial sequence
  SiRNA target sequence
tagagatttttttagcaagttt

SEQ ID NO: 151494 - DNA, 22 bp, Artificial sequence
  SiRNA target sequence
agagatttttttagcaagtttg

SEQ ID NO: 151495 - DNA, 22 bp, Artificial sequence
  SiRNA target sequence
gagatttttttagcaagtttgg

SEQ ID NO: 151496 - DNA, 22 bp, Artificial sequence
  SiRNA target sequence
agatttttttagcaagtttgga

SEQ ID NO: 151497 - DNA, 22 bp, Artificial sequence
  SiRNA target sequence
gatttttttagcaagtttggat

SEQ ID NO: 151498 - DNA, 22 bp, Artificial sequence
  SiRNA target sequence
atttttttagcaagtttggatt

SEQ ID NO: 151499 - DNA, 22 bp, Artificial sequence
  SiRNA target sequence
tttttttagcaagtttggattt

SEQ ID NO: 151500 - DNA, 22 bp, Artificial sequence
  SiRNA target sequence
ttttttagcaagtttggatttt

SEQ ID NO: 151501 - DNA, 22 bp, Artificial sequence
  SiRNA target sequence
tttttagcaagtttggattttt

SEQ ID NO: 151502 - DNA, 22 bp, Artificial sequence
  SiRNA target sequence
ttttagcaagtttggatttttc

SEQ ID NO: 151503 - DNA, 22 bp, Artificial sequence
  SiRNA target sequence
tttagcaagtttggatttttct

SEQ ID NO: 151504 - DNA, 22 bp, Artificial sequence
  SiRNA target sequence
ttagcaagtttggatttttcta

SEQ ID NO: 151505 - DNA, 22 bp, Artificial sequence
  SiRNA target sequence
tagcaagtttggatttttctaa

SEQ ID NO: 151506 - DNA, 23 bp, Artificial sequence
  SiRNA target sequence
atggcacaagacccccaaggact

SEQ ID NO: 151507 - DNA, 23 bp, Artificial sequence
  SiRNA target sequence
tggcacaagacccccaaggactt

SEQ ID NO: 151508 - DNA, 23 bp, Artificial sequence
  SiRNA target sequence
ggcacaagacccccaaggacttt

SEQ ID NO: 151509 - DNA, 23 bp, Artificial sequence
  SiRNA target sequence
gcacaagacccccaaggacttta

SEQ ID NO: 151510 - DNA, 23 bp, Artificial sequence
  SiRNA target sequence
cacaagacccccaaggactttat

SEQ ID NO: 151511 - DNA, 23 bp, Artificial sequence
  SiRNA target sequence
acaagacccccaaggactttatg

SEQ ID NO: 151512 - DNA, 23 bp, Artificial sequence
  SiRNA target sequence
caagacccccaaggactttatga

SEQ ID NO: 151513 - DNA, 23 bp, Artificial sequence
  SiRNA target sequence
aagacccccaaggactttatgaa

SEQ ID NO: 151514 - DNA, 23 bp, Artificial sequence
  SiRNA target sequence
agacccccaaggactttatgaag

SEQ ID NO: 151515 - DNA, 23 bp, Artificial sequence
  SiRNA target sequence
gacccccaaggactttatgaagt

SEQ ID NO: 151516 - DNA, 23 bp, Artificial sequence
  SiRNA target sequence
acccccaaggactttatgaagta

SEQ ID NO: 151517 - DNA, 23 bp, Artificial sequence
  SiRNA target sequence
cccccaaggactttatgaagtat

SEQ ID NO: 151518 - DNA, 23 bp, Artificial sequence
  SiRNA target sequence
ccccaaggactttatgaagtatt

SEQ ID NO: 151519 - DNA, 23 bp, Artificial sequence
  SiRNA target sequence
cccaaggactttatgaagtatta

SEQ ID NO: 151520 - DNA, 23 bp, Artificial sequence
  SiRNA target sequence
ccaaggactttatgaagtattag

SEQ ID NO: 151521 - DNA, 23 bp, Artificial sequence
  SiRNA target sequence
caaggactttatgaagtattagg

SEQ ID NO: 151522 - DNA, 23 bp, Artificial sequence
  SiRNA target sequence
aaggactttatgaagtattagga

SEQ ID NO: 151523 - DNA, 23 bp, Artificial sequence
  SiRNA target sequence
aggactttatgaagtattaggac

SEQ ID NO: 151524 - DNA, 23 bp, Artificial sequence
  SiRNA target sequence
ggactttatgaagtattaggact

SEQ ID NO: 151525 - DNA, 23 bp, Artificial sequence
  SiRNA target sequence
gactttatgaagtattaggactt

SEQ ID NO: 151526 - DNA, 23 bp, Artificial sequence
  SiRNA target sequence
actttatgaagtattaggactta

SEQ ID NO: 151527 - DNA, 23 bp, Artificial sequence
  SiRNA target sequence
ctttatgaagtattaggacttaa

SEQ ID NO: 151528 - DNA, 23 bp, Artificial sequence
  SiRNA target sequence
tttatgaagtattaggacttaaa

SEQ ID NO: 151529 - DNA, 23 bp, Artificial sequence
  SiRNA target sequence
ttatgaagtattaggacttaaag

SEQ ID NO: 151530 - DNA, 23 bp, Artificial sequence
  SiRNA target sequence
tatgaagtattaggacttaaagc

SEQ ID NO: 151531 - DNA, 23 bp, Artificial sequence
  SiRNA target sequence
atgaagtattaggacttaaagct

SEQ ID NO: 151532 - DNA, 23 bp, Artificial sequence
  SiRNA target sequence
tgaagtattaggacttaaagctg

SEQ ID NO: 151533 - DNA, 23 bp, Artificial sequence
  SiRNA target sequence
gaagtattaggacttaaagctgg

SEQ ID NO: 151534 - DNA, 23 bp, Artificial sequence
  SiRNA target sequence
aagtattaggacttaaagctggt

SEQ ID NO: 151535 - DNA, 23 bp, Artificial sequence
  SiRNA target sequence
agtattaggacttaaagctggtg

SEQ ID NO: 151536 - DNA, 23 bp, Artificial sequence
  SiRNA target sequence
gtattaggacttaaagctggtgc

SEQ ID NO: 151537 - DNA, 23 bp, Artificial sequence
  SiRNA target sequence
tattaggacttaaagctggtgca

SEQ ID NO: 151538 - DNA, 23 bp, Artificial sequence
  SiRNA target sequence
attaggacttaaagctggtgcaa

SEQ ID NO: 151539 - DNA, 23 bp, Artificial sequence
  SiRNA target sequence
ttaggacttaaagctggtgcaag

SEQ ID NO: 151540 - DNA, 23 bp, Artificial sequence
  SiRNA target sequence
taggacttaaagctggtgcaagc

SEQ ID NO: 151541 - DNA, 23 bp, Artificial sequence
  SiRNA target sequence
aggacttaaagctggtgcaagca

SEQ ID NO: 151542 - DNA, 23 bp, Artificial sequence
  SiRNA target sequence
ggacttaaagctggtgcaagcat

SEQ ID NO: 151543 - DNA, 23 bp, Artificial sequence
  SiRNA target sequence
gacttaaagctggtgcaagcatt

SEQ ID NO: 151544 - DNA, 23 bp, Artificial sequence
  SiRNA target sequence
acttaaagctggtgcaagcattg

SEQ ID NO: 151545 - DNA, 23 bp, Artificial sequence
  SiRNA target sequence
cttaaagctggtgcaagcattga

SEQ ID NO: 151546 - DNA, 23 bp, Artificial sequence
  SiRNA target sequence
ttaaagctggtgcaagcattgat

SEQ ID NO: 151547 - DNA, 23 bp, Artificial sequence
  SiRNA target sequence
taaagctggtgcaagcattgatg

SEQ ID NO: 151548 - DNA, 23 bp, Artificial sequence
  SiRNA target sequence
aaagctggtgcaagcattgatga

SEQ ID NO: 151549 - DNA, 23 bp, Artificial sequence
  SiRNA target sequence
aagctggtgcaagcattgatgaa

SEQ ID NO: 151550 - DNA, 23 bp, Artificial sequence
  SiRNA target sequence
agctggtgcaagcattgatgaag

SEQ ID NO: 151551 - DNA, 23 bp, Artificial sequence
  SiRNA target sequence
gctggtgcaagcattgatgaagt

SEQ ID NO: 151552 - DNA, 23 bp, Artificial sequence
  SiRNA target sequence
ctggtgcaagcattgatgaagtt

SEQ ID NO: 151553 - DNA, 23 bp, Artificial sequence
  SiRNA target sequence
tggtgcaagcattgatgaagtta

SEQ ID NO: 151554 - DNA, 23 bp, Artificial sequence
  SiRNA target sequence
ggtgcaagcattgatgaagttaa

SEQ ID NO: 151555 - DNA, 23 bp, Artificial sequence
  SiRNA target sequence
gtgcaagcattgatgaagttaaa

SEQ ID NO: 151556 - DNA, 23 bp, Artificial sequence
  SiRNA target sequence
tgcaagcattgatgaagttaaaa

SEQ ID NO: 151557 - DNA, 23 bp, Artificial sequence
  SiRNA target sequence
gcaagcattgatgaagttaaaaa

SEQ ID NO: 151558 - DNA, 23 bp, Artificial sequence
  SiRNA target sequence
caagcattgatgaagttaaaaaa

SEQ ID NO: 151559 - DNA, 23 bp, Artificial sequence
  SiRNA target sequence
aagcattgatgaagttaaaaaag

SEQ ID NO: 151560 - DNA, 23 bp, Artificial sequence
  SiRNA target sequence
agcattgatgaagttaaaaaagc

SEQ ID NO: 151561 - DNA, 23 bp, Artificial sequence
  SiRNA target sequence
gcattgatgaagttaaaaaagca

SEQ ID NO: 151562 - DNA, 23 bp, Artificial sequence
  SiRNA target sequence
cattgatgaagttaaaaaagcat

SEQ ID NO: 151563 - DNA, 23 bp, Artificial sequence
  SiRNA target sequence
attgatgaagttaaaaaagcatt

SEQ ID NO: 151564 - DNA, 23 bp, Artificial sequence
  SiRNA target sequence
ttgatgaagttaaaaaagcattt

SEQ ID NO: 151565 - DNA, 23 bp, Artificial sequence
  SiRNA target sequence
tgatgaagttaaaaaagcattta

SEQ ID NO: 151566 - DNA, 23 bp, Artificial sequence
  SiRNA target sequence
gatgaagttaaaaaagcatttac

SEQ ID NO: 151567 - DNA, 23 bp, Artificial sequence
  SiRNA target sequence
atgaagttaaaaaagcatttaca

SEQ ID NO: 151568 - DNA, 23 bp, Artificial sequence
  SiRNA target sequence
tgaagttaaaaaagcatttacaa

SEQ ID NO: 151569 - DNA, 23 bp, Artificial sequence
  SiRNA target sequence
gaagttaaaaaagcatttacaaa

SEQ ID NO: 151570 - DNA, 23 bp, Artificial sequence
  SiRNA target sequence
aagttaaaaaagcatttacaaaa

SEQ ID NO: 151571 - DNA, 23 bp, Artificial sequence
  SiRNA target sequence
agttaaaaaagcatttacaaaaa

SEQ ID NO: 151572 - DNA, 23 bp, Artificial sequence
  SiRNA target sequence
gttaaaaaagcatttacaaaaaa

SEQ ID NO: 151573 - DNA, 23 bp, Artificial sequence
  SiRNA target sequence
ttaaaaaagcatttacaaaaaaa

SEQ ID NO: 151574 - DNA, 23 bp, Artificial sequence
  SiRNA target sequence
taaaaaagcatttacaaaaaaac

SEQ ID NO: 151575 - DNA, 23 bp, Artificial sequence
  SiRNA target sequence
aaaaaagcatttacaaaaaaaca

SEQ ID NO: 151576 - DNA, 23 bp, Artificial sequence
  SiRNA target sequence
aaaaagcatttacaaaaaaacaa

SEQ ID NO: 151577 - DNA, 23 bp, Artificial sequence
  SiRNA target sequence
aaaagcatttacaaaaaaacaaa

SEQ ID NO: 151578 - DNA, 23 bp, Artificial sequence
  SiRNA target sequence
aaagcatttacaaaaaaacaaag

SEQ ID NO: 151579 - DNA, 23 bp, Artificial sequence
  SiRNA target sequence
aagcatttacaaaaaaacaaagg

SEQ ID NO: 151580 - DNA, 23 bp, Artificial sequence
  SiRNA target sequence
agcatttacaaaaaaacaaaggg

SEQ ID NO: 151581 - DNA, 23 bp, Artificial sequence
  SiRNA target sequence
gcatttacaaaaaaacaaaggga

SEQ ID NO: 151582 - DNA, 23 bp, Artificial sequence
  SiRNA target sequence
catttacaaaaaaacaaagggaa

SEQ ID NO: 151583 - DNA, 23 bp, Artificial sequence
  SiRNA target sequence
atttacaaaaaaacaaagggaat

SEQ ID NO: 151584 - DNA, 23 bp, Artificial sequence
  SiRNA target sequence
tttacaaaaaaacaaagggaatg

SEQ ID NO: 151585 - DNA, 23 bp, Artificial sequence
  SiRNA target sequence
ttacaaaaaaacaaagggaatgt

SEQ ID NO: 151586 - DNA, 23 bp, Artificial sequence
  SiRNA target sequence
tacaaaaaaacaaagggaatgtc

SEQ ID NO: 151587 - DNA, 23 bp, Artificial sequence
  SiRNA target sequence
acaaaaaaacaaagggaatgtca

SEQ ID NO: 151588 - DNA, 23 bp, Artificial sequence
  SiRNA target sequence
caaaaaaacaaagggaatgtcat

SEQ ID NO: 151589 - DNA, 23 bp, Artificial sequence
  SiRNA target sequence
aaaaaaacaaagggaatgtcatc

SEQ ID NO: 151590 - DNA, 23 bp, Artificial sequence
  SiRNA target sequence
aaaaaacaaagggaatgtcatcc

SEQ ID NO: 151591 - DNA, 23 bp, Artificial sequence
  SiRNA target sequence
aaaaacaaagggaatgtcatccc

SEQ ID NO: 151592 - DNA, 23 bp, Artificial sequence
  SiRNA target sequence
aaaacaaagggaatgtcatcccg

SEQ ID NO: 151593 - DNA, 23 bp, Artificial sequence
  SiRNA target sequence
aaacaaagggaatgtcatcccga

SEQ ID NO: 151594 - DNA, 23 bp, Artificial sequence
  SiRNA target sequence
aacaaagggaatgtcatcccgat

SEQ ID NO: 151595 - DNA, 23 bp, Artificial sequence
  SiRNA target sequence
acaaagggaatgtcatcccgatg

SEQ ID NO: 151596 - DNA, 23 bp, Artificial sequence
  SiRNA target sequence
caaagggaatgtcatcccgatgg

SEQ ID NO: 151597 - DNA, 23 bp, Artificial sequence
  SiRNA target sequence
aaagggaatgtcatcccgatggt

SEQ ID NO: 151598 - DNA, 23 bp, Artificial sequence
  SiRNA target sequence
aagggaatgtcatcccgatggtg

SEQ ID NO: 151599 - DNA, 23 bp, Artificial sequence
  SiRNA target sequence
agggaatgtcatcccgatggtgc

SEQ ID NO: 151600 - DNA, 23 bp, Artificial sequence
  SiRNA target sequence
gggaatgtcatcccgatggtgca

SEQ ID NO: 151601 - DNA, 23 bp, Artificial sequence
  SiRNA target sequence
ggaatgtcatcccgatggtgcat

SEQ ID NO: 151602 - DNA, 23 bp, Artificial sequence
  SiRNA target sequence
gaatgtcatcccgatggtgcatt

SEQ ID NO: 151603 - DNA, 23 bp, Artificial sequence
  SiRNA target sequence
aatgtcatcccgatggtgcattt

SEQ ID NO: 151604 - DNA, 23 bp, Artificial sequence
  SiRNA target sequence
atgtcatcccgatggtgcatttt

SEQ ID NO: 151605 - DNA, 23 bp, Artificial sequence
  SiRNA target sequence
tgtcatcccgatggtgcattttt

SEQ ID NO: 151606 - DNA, 23 bp, Artificial sequence
  SiRNA target sequence
gtcatcccgatggtgcatttttt

SEQ ID NO: 151607 - DNA, 23 bp, Artificial sequence
  SiRNA target sequence
tcatcccgatggtgcatttttta

SEQ ID NO: 151608 - DNA, 23 bp, Artificial sequence
  SiRNA target sequence
catcccgatggtgcattttttaa

SEQ ID NO: 151609 - DNA, 23 bp, Artificial sequence
  SiRNA target sequence
atcccgatggtgcattttttaaa

SEQ ID NO: 151610 - DNA, 23 bp, Artificial sequence
  SiRNA target sequence
tcccgatggtgcattttttaaag

SEQ ID NO: 151611 - DNA, 23 bp, Artificial sequence
  SiRNA target sequence
cccgatggtgcattttttaaagc

SEQ ID NO: 151612 - DNA, 23 bp, Artificial sequence
  SiRNA target sequence
ccgatggtgcattttttaaagct

SEQ ID NO: 151613 - DNA, 23 bp, Artificial sequence
  SiRNA target sequence
cgatggtgcattttttaaagctg

SEQ ID NO: 151614 - DNA, 23 bp, Artificial sequence
  SiRNA target sequence
gatggtgcattttttaaagctgc

SEQ ID NO: 151615 - DNA, 23 bp, Artificial sequence
  SiRNA target sequence
atggtgcattttttaaagctgct

SEQ ID NO: 151616 - DNA, 23 bp, Artificial sequence
  SiRNA target sequence
tggtgcattttttaaagctgctc

SEQ ID NO: 151617 - DNA, 23 bp, Artificial sequence
  SiRNA target sequence
ggtgcattttttaaagctgctct

SEQ ID NO: 151618 - DNA, 23 bp, Artificial sequence
  SiRNA target sequence
gtgcattttttaaagctgctctt

SEQ ID NO: 151619 - DNA, 23 bp, Artificial sequence
  SiRNA target sequence
tgcattttttaaagctgctctta

SEQ ID NO: 151620 - DNA, 23 bp, Artificial sequence
  SiRNA target sequence
gcattttttaaagctgctcttag

SEQ ID NO: 151621 - DNA, 23 bp, Artificial sequence
  SiRNA target sequence
cattttttaaagctgctcttaga

SEQ ID NO: 151622 - DNA, 23 bp, Artificial sequence
  SiRNA target sequence
attttttaaagctgctcttagaa

SEQ ID NO: 151623 - DNA, 23 bp, Artificial sequence
  SiRNA target sequence
ttttttaaagctgctcttagaaa

SEQ ID NO: 151624 - DNA, 23 bp, Artificial sequence
  SiRNA target sequence
tttttaaagctgctcttagaaaa

SEQ ID NO: 151625 - DNA, 23 bp, Artificial sequence
  SiRNA target sequence
ttttaaagctgctcttagaaaat

SEQ ID NO: 151626 - DNA, 23 bp, Artificial sequence
  SiRNA target sequence
tttaaagctgctcttagaaaatg

SEQ ID NO: 151627 - DNA, 23 bp, Artificial sequence
  SiRNA target sequence
ttaaagctgctcttagaaaatgt

SEQ ID NO: 151628 - DNA, 23 bp, Artificial sequence
  SiRNA target sequence
taaagctgctcttagaaaatgta

SEQ ID NO: 151629 - DNA, 23 bp, Artificial sequence
  SiRNA target sequence
aaagctgctcttagaaaatgtaa

SEQ ID NO: 151630 - DNA, 23 bp, Artificial sequence
  SiRNA target sequence
aagctgctcttagaaaatgtaaa

SEQ ID NO: 151631 - DNA, 23 bp, Artificial sequence
  SiRNA target sequence
agctgctcttagaaaatgtaaaa

SEQ ID NO: 151632 - DNA, 23 bp, Artificial sequence
  SiRNA target sequence
gctgctcttagaaaatgtaaaac

SEQ ID NO: 151633 - DNA, 23 bp, Artificial sequence
  SiRNA target sequence
ctgctcttagaaaatgtaaaaca

SEQ ID NO: 151634 - DNA, 23 bp, Artificial sequence
  SiRNA target sequence
tgctcttagaaaatgtaaaacag

SEQ ID NO: 151635 - DNA, 23 bp, Artificial sequence
  SiRNA target sequence
gctcttagaaaatgtaaaacaga

SEQ ID NO: 151636 - DNA, 23 bp, Artificial sequence
  SiRNA target sequence
ctcttagaaaatgtaaaacagat

SEQ ID NO: 151637 - DNA, 23 bp, Artificial sequence
  SiRNA target sequence
tcttagaaaatgtaaaacagatg

SEQ ID NO: 151638 - DNA, 23 bp, Artificial sequence
  SiRNA target sequence
cttagaaaatgtaaaacagatga

SEQ ID NO: 151639 - DNA, 23 bp, Artificial sequence
  SiRNA target sequence
ttagaaaatgtaaaacagatgaa

SEQ ID NO: 151640 - DNA, 23 bp, Artificial sequence
  SiRNA target sequence
tagaaaatgtaaaacagatgaag

SEQ ID NO: 151641 - DNA, 23 bp, Artificial sequence
  SiRNA target sequence
agaaaatgtaaaacagatgaaga

SEQ ID NO: 151642 - DNA, 23 bp, Artificial sequence
  SiRNA target sequence
gaaaatgtaaaacagatgaagaa

SEQ ID NO: 151643 - DNA, 23 bp, Artificial sequence
  SiRNA target sequence
aaaatgtaaaacagatgaagaaa

SEQ ID NO: 151644 - DNA, 23 bp, Artificial sequence
  SiRNA target sequence
aaatgtaaaacagatgaagaaag

SEQ ID NO: 151645 - DNA, 23 bp, Artificial sequence
  SiRNA target sequence
aatgtaaaacagatgaagaaaga

SEQ ID NO: 151646 - DNA, 23 bp, Artificial sequence
  SiRNA target sequence
atgtaaaacagatgaagaaagag

SEQ ID NO: 151647 - DNA, 23 bp, Artificial sequence
  SiRNA target sequence
tgtaaaacagatgaagaaagagc

SEQ ID NO: 151648 - DNA, 23 bp, Artificial sequence
  SiRNA target sequence
gtaaaacagatgaagaaagagca

SEQ ID NO: 151649 - DNA, 23 bp, Artificial sequence
  SiRNA target sequence
taaaacagatgaagaaagagcaa

SEQ ID NO: 151650 - DNA, 23 bp, Artificial sequence
  SiRNA target sequence
aaaacagatgaagaaagagcaaa

SEQ ID NO: 151651 - DNA, 23 bp, Artificial sequence
  SiRNA target sequence
aaacagatgaagaaagagcaaaa

SEQ ID NO: 151652 - DNA, 23 bp, Artificial sequence
  SiRNA target sequence
aacagatgaagaaagagcaaaag

SEQ ID NO: 151653 - DNA, 23 bp, Artificial sequence
  SiRNA target sequence
acagatgaagaaagagcaaaagt

SEQ ID NO: 151654 - DNA, 23 bp, Artificial sequence
  SiRNA target sequence
cagatgaagaaagagcaaaagtt

SEQ ID NO: 151655 - DNA, 23 bp, Artificial sequence
  SiRNA target sequence
agatgaagaaagagcaaaagttg

SEQ ID NO: 151656 - DNA, 23 bp, Artificial sequence
  SiRNA target sequence
gatgaagaaagagcaaaagttga

SEQ ID NO: 151657 - DNA, 23 bp, Artificial sequence
  SiRNA target sequence
atgaagaaagagcaaaagttgaa

SEQ ID NO: 151658 - DNA, 23 bp, Artificial sequence
  SiRNA target sequence
tgaagaaagagcaaaagttgaaa

SEQ ID NO: 151659 - DNA, 23 bp, Artificial sequence
  SiRNA target sequence
gaagaaagagcaaaagttgaaaa

SEQ ID NO: 151660 - DNA, 23 bp, Artificial sequence
  SiRNA target sequence
aagaaagagcaaaagttgaaaaa

SEQ ID NO: 151661 - DNA, 23 bp, Artificial sequence
  SiRNA target sequence
agaaagagcaaaagttgaaaaag

SEQ ID NO: 151662 - DNA, 23 bp, Artificial sequence
  SiRNA target sequence
gaaagagcaaaagttgaaaaaga

SEQ ID NO: 151663 - DNA, 23 bp, Artificial sequence
  SiRNA target sequence
aaagagcaaaagttgaaaaagaa

SEQ ID NO: 151664 - DNA, 23 bp, Artificial sequence
  SiRNA target sequence
aagagcaaaagttgaaaaagaat

SEQ ID NO: 151665 - DNA, 23 bp, Artificial sequence
  SiRNA target sequence
agagcaaaagttgaaaaagaatt

SEQ ID NO: 151666 - DNA, 23 bp, Artificial sequence
  SiRNA target sequence
gagcaaaagttgaaaaagaattt

SEQ ID NO: 151667 - DNA, 23 bp, Artificial sequence
  SiRNA target sequence
agcaaaagttgaaaaagaattta

SEQ ID NO: 151668 - DNA, 23 bp, Artificial sequence
  SiRNA target sequence
gcaaaagttgaaaaagaatttaa

SEQ ID NO: 151669 - DNA, 23 bp, Artificial sequence
  SiRNA target sequence
caaaagttgaaaaagaatttaaa

SEQ ID NO: 151670 - DNA, 23 bp, Artificial sequence
  SiRNA target sequence
aaaagttgaaaaagaatttaaag

SEQ ID NO: 151671 - DNA, 23 bp, Artificial sequence
  SiRNA target sequence
aaagttgaaaaagaatttaaaga

SEQ ID NO: 151672 - DNA, 23 bp, Artificial sequence
  SiRNA target sequence
aagttgaaaaagaatttaaagaa

SEQ ID NO: 151673 - DNA, 23 bp, Artificial sequence
  SiRNA target sequence
agttgaaaaagaatttaaagaaa

SEQ ID NO: 151674 - DNA, 23 bp, Artificial sequence
  SiRNA target sequence
gttgaaaaagaatttaaagaaaa

SEQ ID NO: 151675 - DNA, 23 bp, Artificial sequence
  SiRNA target sequence
ttgaaaaagaatttaaagaaaaa

SEQ ID NO: 151676 - DNA, 23 bp, Artificial sequence
  SiRNA target sequence
tgaaaaagaatttaaagaaaaat

SEQ ID NO: 151677 - DNA, 23 bp, Artificial sequence
  SiRNA target sequence
gaaaaagaatttaaagaaaaatc

SEQ ID NO: 151678 - DNA, 23 bp, Artificial sequence
  SiRNA target sequence
aaaaagaatttaaagaaaaatca

SEQ ID NO: 151679 - DNA, 23 bp, Artificial sequence
  SiRNA target sequence
aaaagaatttaaagaaaaatcac

SEQ ID NO: 151680 - DNA, 23 bp, Artificial sequence
  SiRNA target sequence
aaagaatttaaagaaaaatcaca

SEQ ID NO: 151681 - DNA, 23 bp, Artificial sequence
  SiRNA target sequence
aagaatttaaagaaaaatcacaa

SEQ ID NO: 151682 - DNA, 23 bp, Artificial sequence
  SiRNA target sequence
agaatttaaagaaaaatcacaaa

SEQ ID NO: 151683 - DNA, 23 bp, Artificial sequence
  SiRNA target sequence
gaatttaaagaaaaatcacaaaa

SEQ ID NO: 151684 - DNA, 23 bp, Artificial sequence
  SiRNA target sequence
aatttaaagaaaaatcacaaaaa

SEQ ID NO: 151685 - DNA, 23 bp, Artificial sequence
  SiRNA target sequence
atttaaagaaaaatcacaaaaat

SEQ ID NO: 151686 - DNA, 23 bp, Artificial sequence
  SiRNA target sequence
tttaaagaaaaatcacaaaaatg

SEQ ID NO: 151687 - DNA, 23 bp, Artificial sequence
  SiRNA target sequence
ttaaagaaaaatcacaaaaatgt

SEQ ID NO: 151688 - DNA, 23 bp, Artificial sequence
  SiRNA target sequence
taaagaaaaatcacaaaaatgta

SEQ ID NO: 151689 - DNA, 23 bp, Artificial sequence
  SiRNA target sequence
aaagaaaaatcacaaaaatgtaa

SEQ ID NO: 151690 - DNA, 23 bp, Artificial sequence
  SiRNA target sequence
aagaaaaatcacaaaaatgtaat

SEQ ID NO: 151691 - DNA, 23 bp, Artificial sequence
  SiRNA target sequence
agaaaaatcacaaaaatgtaatc

SEQ ID NO: 151692 - DNA, 23 bp, Artificial sequence
  SiRNA target sequence
gaaaaatcacaaaaatgtaatca

SEQ ID NO: 151693 - DNA, 23 bp, Artificial sequence
  SiRNA target sequence
aaaaatcacaaaaatgtaatcaa

SEQ ID NO: 151694 - DNA, 23 bp, Artificial sequence
  SiRNA target sequence
aaaatcacaaaaatgtaatcaag

SEQ ID NO: 151695 - DNA, 23 bp, Artificial sequence
  SiRNA target sequence
aaatcacaaaaatgtaatcaagc

SEQ ID NO: 151696 - DNA, 23 bp, Artificial sequence
  SiRNA target sequence
aatcacaaaaatgtaatcaagct

SEQ ID NO: 151697 - DNA, 23 bp, Artificial sequence
  SiRNA target sequence
atcacaaaaatgtaatcaagcta

SEQ ID NO: 151698 - DNA, 23 bp, Artificial sequence
  SiRNA target sequence
tcacaaaaatgtaatcaagctaa

SEQ ID NO: 151699 - DNA, 23 bp, Artificial sequence
  SiRNA target sequence
cacaaaaatgtaatcaagctaaa

SEQ ID NO: 151700 - DNA, 23 bp, Artificial sequence
  SiRNA target sequence
acaaaaatgtaatcaagctaaag

SEQ ID NO: 151701 - DNA, 23 bp, Artificial sequence
  SiRNA target sequence
caaaaatgtaatcaagctaaagc

SEQ ID NO: 151702 - DNA, 23 bp, Artificial sequence
  SiRNA target sequence
aaaaatgtaatcaagctaaagca

SEQ ID NO: 151703 - DNA, 23 bp, Artificial sequence
  SiRNA target sequence
aaaatgtaatcaagctaaagcag

SEQ ID NO: 151704 - DNA, 23 bp, Artificial sequence
  SiRNA target sequence
aaatgtaatcaagctaaagcagt

SEQ ID NO: 151705 - DNA, 23 bp, Artificial sequence
  SiRNA target sequence
aatgtaatcaagctaaagcagtt

SEQ ID NO: 151706 - DNA, 23 bp, Artificial sequence
  SiRNA target sequence
atgtaatcaagctaaagcagttt

SEQ ID NO: 151707 - DNA, 23 bp, Artificial sequence
  SiRNA target sequence
tgtaatcaagctaaagcagtttt

SEQ ID NO: 151708 - DNA, 23 bp, Artificial sequence
  SiRNA target sequence
gtaatcaagctaaagcagtttta

SEQ ID NO: 151709 - DNA, 23 bp, Artificial sequence
  SiRNA target sequence
taatcaagctaaagcagttttat

SEQ ID NO: 151710 - DNA, 23 bp, Artificial sequence
  SiRNA target sequence
aatcaagctaaagcagttttatt

SEQ ID NO: 151711 - DNA, 23 bp, Artificial sequence
  SiRNA target sequence
atcaagctaaagcagttttattt

SEQ ID NO: 151712 - DNA, 23 bp, Artificial sequence
  SiRNA target sequence
tcaagctaaagcagttttatttg

SEQ ID NO: 151713 - DNA, 23 bp, Artificial sequence
  SiRNA target sequence
caagctaaagcagttttatttga

SEQ ID NO: 151714 - DNA, 23 bp, Artificial sequence
  SiRNA target sequence
aagctaaagcagttttatttgat

SEQ ID NO: 151715 - DNA, 23 bp, Artificial sequence
  SiRNA target sequence
agctaaagcagttttatttgatg

SEQ ID NO: 151716 - DNA, 23 bp, Artificial sequence
  SiRNA target sequence
gctaaagcagttttatttgatga

SEQ ID NO: 151717 - DNA, 23 bp, Artificial sequence
  SiRNA target sequence
ctaaagcagttttatttgatgag

SEQ ID NO: 151718 - DNA, 23 bp, Artificial sequence
  SiRNA target sequence
taaagcagttttatttgatgaga

SEQ ID NO: 151719 - DNA, 23 bp, Artificial sequence
  SiRNA target sequence
aaagcagttttatttgatgagaa

SEQ ID NO: 151720 - DNA, 23 bp, Artificial sequence
  SiRNA target sequence
aagcagttttatttgatgagaaa

SEQ ID NO: 151721 - DNA, 23 bp, Artificial sequence
  SiRNA target sequence
agcagttttatttgatgagaaaa

SEQ ID NO: 151722 - DNA, 23 bp, Artificial sequence
  SiRNA target sequence
gcagttttatttgatgagaaaaa

SEQ ID NO: 151723 - DNA, 23 bp, Artificial sequence
  SiRNA target sequence
cagttttatttgatgagaaaaaa

SEQ ID NO: 151724 - DNA, 23 bp, Artificial sequence
  SiRNA target sequence
agttttatttgatgagaaaaaaa

SEQ ID NO: 151725 - DNA, 23 bp, Artificial sequence
  SiRNA target sequence
gttttatttgatgagaaaaaaaa

SEQ ID NO: 151726 - DNA, 23 bp, Artificial sequence
  SiRNA target sequence
ttttatttgatgagaaaaaaaag

SEQ ID NO: 151727 - DNA, 23 bp, Artificial sequence
  SiRNA target sequence
tttatttgatgagaaaaaaaagc

SEQ ID NO: 151728 - DNA, 23 bp, Artificial sequence
  SiRNA target sequence
ttatttgatgagaaaaaaaagca

SEQ ID NO: 151729 - DNA, 23 bp, Artificial sequence
  SiRNA target sequence
tatttgatgagaaaaaaaagcaa

SEQ ID NO: 151730 - DNA, 23 bp, Artificial sequence
  SiRNA target sequence
atttgatgagaaaaaaaagcaag

SEQ ID NO: 151731 - DNA, 23 bp, Artificial sequence
  SiRNA target sequence
tttgatgagaaaaaaaagcaaga

SEQ ID NO: 151732 - DNA, 23 bp, Artificial sequence
  SiRNA target sequence
ttgatgagaaaaaaaagcaagag

SEQ ID NO: 151733 - DNA, 23 bp, Artificial sequence
  SiRNA target sequence
tgatgagaaaaaaaagcaagagt

SEQ ID NO: 151734 - DNA, 23 bp, Artificial sequence
  SiRNA target sequence
gatgagaaaaaaaagcaagagta

SEQ ID NO: 151735 - DNA, 23 bp, Artificial sequence
  SiRNA target sequence
atgagaaaaaaaagcaagagtat

SEQ ID NO: 151736 - DNA, 23 bp, Artificial sequence
  SiRNA target sequence
tgagaaaaaaaagcaagagtatg

SEQ ID NO: 151737 - DNA, 23 bp, Artificial sequence
  SiRNA target sequence
gagaaaaaaaagcaagagtatga

SEQ ID NO: 151738 - DNA, 23 bp, Artificial sequence
  SiRNA target sequence
agaaaaaaaagcaagagtatgat

SEQ ID NO: 151739 - DNA, 23 bp, Artificial sequence
  SiRNA target sequence
gaaaaaaaagcaagagtatgata

SEQ ID NO: 151740 - DNA, 23 bp, Artificial sequence
  SiRNA target sequence
aaaaaaaagcaagagtatgatat

SEQ ID NO: 151741 - DNA, 23 bp, Artificial sequence
  SiRNA target sequence
aaaaaaagcaagagtatgatatg

SEQ ID NO: 151742 - DNA, 23 bp, Artificial sequence
  SiRNA target sequence
aaaaaagcaagagtatgatatgg

SEQ ID NO: 151743 - DNA, 23 bp, Artificial sequence
  SiRNA target sequence
aaaaagcaagagtatgatatggg

SEQ ID NO: 151744 - DNA, 23 bp, Artificial sequence
  SiRNA target sequence
aaaagcaagagtatgatatggga

SEQ ID NO: 151745 - DNA, 23 bp, Artificial sequence
  SiRNA target sequence
aaagcaagagtatgatatgggaa

SEQ ID NO: 151746 - DNA, 23 bp, Artificial sequence
  SiRNA target sequence
aagcaagagtatgatatgggaat

SEQ ID NO: 151747 - DNA, 23 bp, Artificial sequence
  SiRNA target sequence
agcaagagtatgatatgggaatg

SEQ ID NO: 151748 - DNA, 23 bp, Artificial sequence
  SiRNA target sequence
gcaagagtatgatatgggaatga

SEQ ID NO: 151749 - DNA, 23 bp, Artificial sequence
  SiRNA target sequence
caagagtatgatatgggaatgac

SEQ ID NO: 151750 - DNA, 23 bp, Artificial sequence
  SiRNA target sequence
aagagtatgatatgggaatgact

SEQ ID NO: 151751 - DNA, 23 bp, Artificial sequence
  SiRNA target sequence
agagtatgatatgggaatgactg

SEQ ID NO: 151752 - DNA, 23 bp, Artificial sequence
  SiRNA target sequence
gagtatgatatgggaatgactgg

SEQ ID NO: 151753 - DNA, 23 bp, Artificial sequence
  SiRNA target sequence
agtatgatatgggaatgactggc

SEQ ID NO: 151754 - DNA, 23 bp, Artificial sequence
  SiRNA target sequence
gtatgatatgggaatgactggcg

SEQ ID NO: 151755 - DNA, 23 bp, Artificial sequence
  SiRNA target sequence
tatgatatgggaatgactggcga

SEQ ID NO: 151756 - DNA, 23 bp, Artificial sequence
  SiRNA target sequence
atgatatgggaatgactggcgat

SEQ ID NO: 151757 - DNA, 23 bp, Artificial sequence
  SiRNA target sequence
tgatatgggaatgactggcgatt

SEQ ID NO: 151758 - DNA, 23 bp, Artificial sequence
  SiRNA target sequence
gatatgggaatgactggcgattt

SEQ ID NO: 151759 - DNA, 23 bp, Artificial sequence
  SiRNA target sequence
atatgggaatgactggcgatttt

SEQ ID NO: 151760 - DNA, 23 bp, Artificial sequence
  SiRNA target sequence
tatgggaatgactggcgattttg

SEQ ID NO: 151761 - DNA, 23 bp, Artificial sequence
  SiRNA target sequence
atgggaatgactggcgattttgg

SEQ ID NO: 151762 - DNA, 23 bp, Artificial sequence
  SiRNA target sequence
tgggaatgactggcgattttgga

SEQ ID NO: 151763 - DNA, 23 bp, Artificial sequence
  SiRNA target sequence
gggaatgactggcgattttggat

SEQ ID NO: 151764 - DNA, 23 bp, Artificial sequence
  SiRNA target sequence
ggaatgactggcgattttggatt

SEQ ID NO: 151765 - DNA, 23 bp, Artificial sequence
  SiRNA target sequence
gaatgactggcgattttggattt

SEQ ID NO: 151766 - DNA, 23 bp, Artificial sequence
  SiRNA target sequence
aatgactggcgattttggatttt

SEQ ID NO: 151767 - DNA, 23 bp, Artificial sequence
  SiRNA target sequence
atgactggcgattttggattttc

SEQ ID NO: 151768 - DNA, 23 bp, Artificial sequence
  SiRNA target sequence
tgactggcgattttggattttct

SEQ ID NO: 151769 - DNA, 23 bp, Artificial sequence
  SiRNA target sequence
gactggcgattttggattttctg

SEQ ID NO: 151770 - DNA, 23 bp, Artificial sequence
  SiRNA target sequence
actggcgattttggattttctgc

SEQ ID NO: 151771 - DNA, 23 bp, Artificial sequence
  SiRNA target sequence
ctggcgattttggattttctgca

SEQ ID NO: 151772 - DNA, 23 bp, Artificial sequence
  SiRNA target sequence
tggcgattttggattttctgcag

SEQ ID NO: 151773 - DNA, 23 bp, Artificial sequence
  SiRNA target sequence
ggcgattttggattttctgcagg

SEQ ID NO: 151774 - DNA, 23 bp, Artificial sequence
  SiRNA target sequence
gcgattttggattttctgcaggt

SEQ ID NO: 151775 - DNA, 23 bp, Artificial sequence
  SiRNA target sequence
cgattttggattttctgcaggtg

SEQ ID NO: 151776 - DNA, 23 bp, Artificial sequence
  SiRNA target sequence
gattttggattttctgcaggtgg

SEQ ID NO: 151777 - DNA, 23 bp, Artificial sequence
  SiRNA target sequence
attttggattttctgcaggtggt

SEQ ID NO: 151778 - DNA, 23 bp, Artificial sequence
  SiRNA target sequence
ttttggattttctgcaggtggtg

SEQ ID NO: 151779 - DNA, 23 bp, Artificial sequence
  SiRNA target sequence
tttggattttctgcaggtggtgg

SEQ ID NO: 151780 - DNA, 23 bp, Artificial sequence
  SiRNA target sequence
ttggattttctgcaggtggtgga

SEQ ID NO: 151781 - DNA, 23 bp, Artificial sequence
  SiRNA target sequence
tggattttctgcaggtggtggag

SEQ ID NO: 151782 - DNA, 23 bp, Artificial sequence
  SiRNA target sequence
ggattttctgcaggtggtggaga

SEQ ID NO: 151783 - DNA, 23 bp, Artificial sequence
  SiRNA target sequence
gattttctgcaggtggtggagac

SEQ ID NO: 151784 - DNA, 23 bp, Artificial sequence
  SiRNA target sequence
attttctgcaggtggtggagact

SEQ ID NO: 151785 - DNA, 23 bp, Artificial sequence
  SiRNA target sequence
ttttctgcaggtggtggagactt

SEQ ID NO: 151786 - DNA, 23 bp, Artificial sequence
  SiRNA target sequence
tttctgcaggtggtggagacttt

SEQ ID NO: 151787 - DNA, 23 bp, Artificial sequence
  SiRNA target sequence
ttctgcaggtggtggagactttt

SEQ ID NO: 151788 - DNA, 23 bp, Artificial sequence
  SiRNA target sequence
tctgcaggtggtggagacttttt

SEQ ID NO: 151789 - DNA, 23 bp, Artificial sequence
  SiRNA target sequence
ctgcaggtggtggagactttttc

SEQ ID NO: 151790 - DNA, 23 bp, Artificial sequence
  SiRNA target sequence
tgcaggtggtggagactttttcg

SEQ ID NO: 151791 - DNA, 23 bp, Artificial sequence
  SiRNA target sequence
gcaggtggtggagactttttcga

SEQ ID NO: 151792 - DNA, 23 bp, Artificial sequence
  SiRNA target sequence
caggtggtggagactttttcgat

SEQ ID NO: 151793 - DNA, 23 bp, Artificial sequence
  SiRNA target sequence
aggtggtggagactttttcgata

SEQ ID NO: 151794 - DNA, 23 bp, Artificial sequence
  SiRNA target sequence
ggtggtggagactttttcgatat

SEQ ID NO: 151795 - DNA, 23 bp, Artificial sequence
  SiRNA target sequence
gtggtggagactttttcgatatt

SEQ ID NO: 151796 - DNA, 23 bp, Artificial sequence
  SiRNA target sequence
tggtggagactttttcgatattt

SEQ ID NO: 151797 - DNA, 23 bp, Artificial sequence
  SiRNA target sequence
ggtggagactttttcgatatttt

SEQ ID NO: 151798 - DNA, 23 bp, Artificial sequence
  SiRNA target sequence
gtggagactttttcgatattttt

SEQ ID NO: 151799 - DNA, 23 bp, Artificial sequence
  SiRNA target sequence
tggagactttttcgatatttttt

SEQ ID NO: 151800 - DNA, 23 bp, Artificial sequence
  SiRNA target sequence
ggagactttttcgatattttttc

SEQ ID NO: 151801 - DNA, 23 bp, Artificial sequence
  SiRNA target sequence
gagactttttcgatattttttca

SEQ ID NO: 151802 - DNA, 23 bp, Artificial sequence
  SiRNA target sequence
agactttttcgatattttttcaa

SEQ ID NO: 151803 - DNA, 23 bp, Artificial sequence
  SiRNA target sequence
gactttttcgatattttttcaag

SEQ ID NO: 151804 - DNA, 23 bp, Artificial sequence
  SiRNA target sequence
actttttcgatattttttcaagt

SEQ ID NO: 151805 - DNA, 23 bp, Artificial sequence
  SiRNA target sequence
ctttttcgatattttttcaagtt

SEQ ID NO: 151806 - DNA, 23 bp, Artificial sequence
  SiRNA target sequence
tttttcgatattttttcaagttt

SEQ ID NO: 151807 - DNA, 23 bp, Artificial sequence
  SiRNA target sequence
ttttcgatattttttcaagtttt

SEQ ID NO: 151808 - DNA, 23 bp, Artificial sequence
  SiRNA target sequence
tttcgatattttttcaagtttta

SEQ ID NO: 151809 - DNA, 23 bp, Artificial sequence
  SiRNA target sequence
ttcgatattttttcaagttttac

SEQ ID NO: 151810 - DNA, 23 bp, Artificial sequence
  SiRNA target sequence
tcgatattttttcaagttttact

SEQ ID NO: 151811 - DNA, 23 bp, Artificial sequence
  SiRNA target sequence
cgatattttttcaagttttactg

SEQ ID NO: 151812 - DNA, 23 bp, Artificial sequence
  SiRNA target sequence
gatattttttcaagttttactgg

SEQ ID NO: 151813 - DNA, 23 bp, Artificial sequence
  SiRNA target sequence
atattttttcaagttttactggt

SEQ ID NO: 151814 - DNA, 23 bp, Artificial sequence
  SiRNA target sequence
tattttttcaagttttactggtg

SEQ ID NO: 151815 - DNA, 23 bp, Artificial sequence
  SiRNA target sequence
attttttcaagttttactggtgg

SEQ ID NO: 151816 - DNA, 23 bp, Artificial sequence
  SiRNA target sequence
ttttttcaagttttactggtgga

SEQ ID NO: 151817 - DNA, 23 bp, Artificial sequence
  SiRNA target sequence
tttttcaagttttactggtggag

SEQ ID NO: 151818 - DNA, 23 bp, Artificial sequence
  SiRNA target sequence
ttttcaagttttactggtggagg

SEQ ID NO: 151819 - DNA, 23 bp, Artificial sequence
  SiRNA target sequence
tttcaagttttactggtggagga

SEQ ID NO: 151820 - DNA, 23 bp, Artificial sequence
  SiRNA target sequence
ttcaagttttactggtggaggaa

SEQ ID NO: 151821 - DNA, 23 bp, Artificial sequence
  SiRNA target sequence
tcaagttttactggtggaggaag

SEQ ID NO: 151822 - DNA, 23 bp, Artificial sequence
  SiRNA target sequence
caagttttactggtggaggaaga

SEQ ID NO: 151823 - DNA, 23 bp, Artificial sequence
  SiRNA target sequence
aagttttactggtggaggaagaa

SEQ ID NO: 151824 - DNA, 23 bp, Artificial sequence
  SiRNA target sequence
agttttactggtggaggaagaag

SEQ ID NO: 151825 - DNA, 23 bp, Artificial sequence
  SiRNA target sequence
gttttactggtggaggaagaaga

SEQ ID NO: 151826 - DNA, 23 bp, Artificial sequence
  SiRNA target sequence
ttttactggtggaggaagaagaa

SEQ ID NO: 151827 - DNA, 23 bp, Artificial sequence
  SiRNA target sequence
tttactggtggaggaagaagaaa

SEQ ID NO: 151828 - DNA, 23 bp, Artificial sequence
  SiRNA target sequence
ttactggtggaggaagaagaaat

SEQ ID NO: 151829 - DNA, 23 bp, Artificial sequence
  SiRNA target sequence
tactggtggaggaagaagaaatc

SEQ ID NO: 151830 - DNA, 23 bp, Artificial sequence
  SiRNA target sequence
actggtggaggaagaagaaatcg

SEQ ID NO: 151831 - DNA, 23 bp, Artificial sequence
  SiRNA target sequence
ctggtggaggaagaagaaatcga

SEQ ID NO: 151832 - DNA, 23 bp, Artificial sequence
  SiRNA target sequence
tggtggaggaagaagaaatcgag

SEQ ID NO: 151833 - DNA, 23 bp, Artificial sequence
  SiRNA target sequence
ggtggaggaagaagaaatcgagt

SEQ ID NO: 151834 - DNA, 23 bp, Artificial sequence
  SiRNA target sequence
gtggaggaagaagaaatcgagta

SEQ ID NO: 151835 - DNA, 23 bp, Artificial sequence
  SiRNA target sequence
tggaggaagaagaaatcgagtac

SEQ ID NO: 151836 - DNA, 23 bp, Artificial sequence
  SiRNA target sequence
ggaggaagaagaaatcgagtaca

SEQ ID NO: 151837 - DNA, 23 bp, Artificial sequence
  SiRNA target sequence
gaggaagaagaaatcgagtacaa

SEQ ID NO: 151838 - DNA, 23 bp, Artificial sequence
  SiRNA target sequence
aggaagaagaaatcgagtacaaa

SEQ ID NO: 151839 - DNA, 23 bp, Artificial sequence
  SiRNA target sequence
ggaagaagaaatcgagtacaaaa

SEQ ID NO: 151840 - DNA, 23 bp, Artificial sequence
  SiRNA target sequence
gaagaagaaatcgagtacaaaaa

SEQ ID NO: 151841 - DNA, 23 bp, Artificial sequence
  SiRNA target sequence
aagaagaaatcgagtacaaaaag

SEQ ID NO: 151842 - DNA, 23 bp, Artificial sequence
  SiRNA target sequence
agaagaaatcgagtacaaaaagt

SEQ ID NO: 151843 - DNA, 23 bp, Artificial sequence
  SiRNA target sequence
gaagaaatcgagtacaaaaagtt

SEQ ID NO: 151844 - DNA, 23 bp, Artificial sequence
  SiRNA target sequence
aagaaatcgagtacaaaaagttc

SEQ ID NO: 151845 - DNA, 23 bp, Artificial sequence
  SiRNA target sequence
agaaatcgagtacaaaaagttca

SEQ ID NO: 151846 - DNA, 23 bp, Artificial sequence
  SiRNA target sequence
gaaatcgagtacaaaaagttcaa

SEQ ID NO: 151847 - DNA, 23 bp, Artificial sequence
  SiRNA target sequence
aaatcgagtacaaaaagttcaag

SEQ ID NO: 151848 - DNA, 23 bp, Artificial sequence
  SiRNA target sequence
aatcgagtacaaaaagttcaaga

SEQ ID NO: 151849 - DNA, 23 bp, Artificial sequence
  SiRNA target sequence
atcgagtacaaaaagttcaagat

SEQ ID NO: 151850 - DNA, 23 bp, Artificial sequence
  SiRNA target sequence
tcgagtacaaaaagttcaagata

SEQ ID NO: 151851 - DNA, 23 bp, Artificial sequence
  SiRNA target sequence
cgagtacaaaaagttcaagatac

SEQ ID NO: 151852 - DNA, 23 bp, Artificial sequence
  SiRNA target sequence
gagtacaaaaagttcaagataca

SEQ ID NO: 151853 - DNA, 23 bp, Artificial sequence
  SiRNA target sequence
agtacaaaaagttcaagatacag

SEQ ID NO: 151854 - DNA, 23 bp, Artificial sequence
  SiRNA target sequence
gtacaaaaagttcaagatacaga

SEQ ID NO: 151855 - DNA, 23 bp, Artificial sequence
  SiRNA target sequence
tacaaaaagttcaagatacagaa

SEQ ID NO: 151856 - DNA, 23 bp, Artificial sequence
  SiRNA target sequence
acaaaaagttcaagatacagaat

SEQ ID NO: 151857 - DNA, 23 bp, Artificial sequence
  SiRNA target sequence
caaaaagttcaagatacagaata

SEQ ID NO: 151858 - DNA, 23 bp, Artificial sequence
  SiRNA target sequence
aaaaagttcaagatacagaatac

SEQ ID NO: 151859 - DNA, 23 bp, Artificial sequence
  SiRNA target sequence
aaaagttcaagatacagaatacg

SEQ ID NO: 151860 - DNA, 23 bp, Artificial sequence
  SiRNA target sequence
aaagttcaagatacagaatacga

SEQ ID NO: 151861 - DNA, 23 bp, Artificial sequence
  SiRNA target sequence
aagttcaagatacagaatacgag

SEQ ID NO: 151862 - DNA, 23 bp, Artificial sequence
  SiRNA target sequence
agttcaagatacagaatacgagt

SEQ ID NO: 151863 - DNA, 23 bp, Artificial sequence
  SiRNA target sequence
gttcaagatacagaatacgagtt

SEQ ID NO: 151864 - DNA, 23 bp, Artificial sequence
  SiRNA target sequence
ttcaagatacagaatacgagttt

SEQ ID NO: 151865 - DNA, 23 bp, Artificial sequence
  SiRNA target sequence
tcaagatacagaatacgagttta

SEQ ID NO: 151866 - DNA, 23 bp, Artificial sequence
  SiRNA target sequence
caagatacagaatacgagtttaa

SEQ ID NO: 151867 - DNA, 23 bp, Artificial sequence
  SiRNA target sequence
aagatacagaatacgagtttaat

SEQ ID NO: 151868 - DNA, 23 bp, Artificial sequence
  SiRNA target sequence
agatacagaatacgagtttaata

SEQ ID NO: 151869 - DNA, 23 bp, Artificial sequence
  SiRNA target sequence
gatacagaatacgagtttaatat

SEQ ID NO: 151870 - DNA, 23 bp, Artificial sequence
  SiRNA target sequence
atacagaatacgagtttaatatt

SEQ ID NO: 151871 - DNA, 23 bp, Artificial sequence
  SiRNA target sequence
tacagaatacgagtttaatattt

SEQ ID NO: 151872 - DNA, 23 bp, Artificial sequence
  SiRNA target sequence
acagaatacgagtttaatatttc

SEQ ID NO: 151873 - DNA, 23 bp, Artificial sequence
  SiRNA target sequence
cagaatacgagtttaatatttcg

SEQ ID NO: 151874 - DNA, 23 bp, Artificial sequence
  SiRNA target sequence
agaatacgagtttaatatttcgt

SEQ ID NO: 151875 - DNA, 23 bp, Artificial sequence
  SiRNA target sequence
gaatacgagtttaatatttcgtt

SEQ ID NO: 151876 - DNA, 23 bp, Artificial sequence
  SiRNA target sequence
aatacgagtttaatatttcgttg

SEQ ID NO: 151877 - DNA, 23 bp, Artificial sequence
  SiRNA target sequence
atacgagtttaatatttcgttga

SEQ ID NO: 151878 - DNA, 23 bp, Artificial sequence
  SiRNA target sequence
tacgagtttaatatttcgttgaa

SEQ ID NO: 151879 - DNA, 23 bp, Artificial sequence
  SiRNA target sequence
acgagtttaatatttcgttgaag

SEQ ID NO: 151880 - DNA, 23 bp, Artificial sequence
  SiRNA target sequence
cgagtttaatatttcgttgaagg

SEQ ID NO: 151881 - DNA, 23 bp, Artificial sequence
  SiRNA target sequence
gagtttaatatttcgttgaagga

SEQ ID NO: 151882 - DNA, 23 bp, Artificial sequence
  SiRNA target sequence
agtttaatatttcgttgaaggaa

SEQ ID NO: 151883 - DNA, 23 bp, Artificial sequence
  SiRNA target sequence
gtttaatatttcgttgaaggaag

SEQ ID NO: 151884 - DNA, 23 bp, Artificial sequence
  SiRNA target sequence
tttaatatttcgttgaaggaagc

SEQ ID NO: 151885 - DNA, 23 bp, Artificial sequence
  SiRNA target sequence
ttaatatttcgttgaaggaagct

SEQ ID NO: 151886 - DNA, 23 bp, Artificial sequence
  SiRNA target sequence
taatatttcgttgaaggaagctt

SEQ ID NO: 151887 - DNA, 23 bp, Artificial sequence
  SiRNA target sequence
aatatttcgttgaaggaagctta

SEQ ID NO: 151888 - DNA, 23 bp, Artificial sequence
  SiRNA target sequence
atatttcgttgaaggaagcttat

SEQ ID NO: 151889 - DNA, 23 bp, Artificial sequence
  SiRNA target sequence
tatttcgttgaaggaagcttata

SEQ ID NO: 151890 - DNA, 23 bp, Artificial sequence
  SiRNA target sequence
atttcgttgaaggaagcttatat

SEQ ID NO: 151891 - DNA, 23 bp, Artificial sequence
  SiRNA target sequence
tttcgttgaaggaagcttatatg

SEQ ID NO: 151892 - DNA, 23 bp, Artificial sequence
  SiRNA target sequence
ttcgttgaaggaagcttatatgg

SEQ ID NO: 151893 - DNA, 23 bp, Artificial sequence
  SiRNA target sequence
tcgttgaaggaagcttatatggg

SEQ ID NO: 151894 - DNA, 23 bp, Artificial sequence
  SiRNA target sequence
cgttgaaggaagcttatatggga

SEQ ID NO: 151895 - DNA, 23 bp, Artificial sequence
  SiRNA target sequence
gttgaaggaagcttatatgggaa

SEQ ID NO: 151896 - DNA, 23 bp, Artificial sequence
  SiRNA target sequence
ttgaaggaagcttatatgggaaa

SEQ ID NO: 151897 - DNA, 23 bp, Artificial sequence
  SiRNA target sequence
tgaaggaagcttatatgggaaag

SEQ ID NO: 151898 - DNA, 23 bp, Artificial sequence
  SiRNA target sequence
gaaggaagcttatatgggaaagc

SEQ ID NO: 151899 - DNA, 23 bp, Artificial sequence
  SiRNA target sequence
aaggaagcttatatgggaaagcg

SEQ ID NO: 151900 - DNA, 23 bp, Artificial sequence
  SiRNA target sequence
aggaagcttatatgggaaagcga

SEQ ID NO: 151901 - DNA, 23 bp, Artificial sequence
  SiRNA target sequence
ggaagcttatatgggaaagcgag

SEQ ID NO: 151902 - DNA, 23 bp, Artificial sequence
  SiRNA target sequence
gaagcttatatgggaaagcgagc

SEQ ID NO: 151903 - DNA, 23 bp, Artificial sequence
  SiRNA target sequence
aagcttatatgggaaagcgagct

SEQ ID NO: 151904 - DNA, 23 bp, Artificial sequence
  SiRNA target sequence
agcttatatgggaaagcgagcta

SEQ ID NO: 151905 - DNA, 23 bp, Artificial sequence
  SiRNA target sequence
gcttatatgggaaagcgagctag

SEQ ID NO: 151906 - DNA, 23 bp, Artificial sequence
  SiRNA target sequence
cttatatgggaaagcgagctagt

SEQ ID NO: 151907 - DNA, 23 bp, Artificial sequence
  SiRNA target sequence
ttatatgggaaagcgagctagtt

SEQ ID NO: 151908 - DNA, 23 bp, Artificial sequence
  SiRNA target sequence
tatatgggaaagcgagctagttt

SEQ ID NO: 151909 - DNA, 23 bp, Artificial sequence
  SiRNA target sequence
atatgggaaagcgagctagtttt

SEQ ID NO: 151910 - DNA, 23 bp, Artificial sequence
  SiRNA target sequence
tatgggaaagcgagctagtttta

SEQ ID NO: 151911 - DNA, 23 bp, Artificial sequence
  SiRNA target sequence
atgggaaagcgagctagttttaa

SEQ ID NO: 151912 - DNA, 23 bp, Artificial sequence
  SiRNA target sequence
tgggaaagcgagctagttttaat

SEQ ID NO: 151913 - DNA, 23 bp, Artificial sequence
  SiRNA target sequence
gggaaagcgagctagttttaatg

SEQ ID NO: 151914 - DNA, 23 bp, Artificial sequence
  SiRNA target sequence
ggaaagcgagctagttttaatgt

SEQ ID NO: 151915 - DNA, 23 bp, Artificial sequence
  SiRNA target sequence
gaaagcgagctagttttaatgta

SEQ ID NO: 151916 - DNA, 23 bp, Artificial sequence
  SiRNA target sequence
aaagcgagctagttttaatgtaa

SEQ ID NO: 151917 - DNA, 23 bp, Artificial sequence
  SiRNA target sequence
aagcgagctagttttaatgtaaa

SEQ ID NO: 151918 - DNA, 23 bp, Artificial sequence
  SiRNA target sequence
agcgagctagttttaatgtaaaa

SEQ ID NO: 151919 - DNA, 23 bp, Artificial sequence
  SiRNA target sequence
gcgagctagttttaatgtaaaag

SEQ ID NO: 151920 - DNA, 23 bp, Artificial sequence
  SiRNA target sequence
cgagctagttttaatgtaaaagt

SEQ ID NO: 151921 - DNA, 23 bp, Artificial sequence
  SiRNA target sequence
gagctagttttaatgtaaaagtg

SEQ ID NO: 151922 - DNA, 23 bp, Artificial sequence
  SiRNA target sequence
agctagttttaatgtaaaagtgc

SEQ ID NO: 151923 - DNA, 23 bp, Artificial sequence
  SiRNA target sequence
gctagttttaatgtaaaagtgca

SEQ ID NO: 151924 - DNA, 23 bp, Artificial sequence
  SiRNA target sequence
ctagttttaatgtaaaagtgcaa

SEQ ID NO: 151925 - DNA, 23 bp, Artificial sequence
  SiRNA target sequence
tagttttaatgtaaaagtgcaaa

SEQ ID NO: 151926 - DNA, 23 bp, Artificial sequence
  SiRNA target sequence
agttttaatgtaaaagtgcaaag

SEQ ID NO: 151927 - DNA, 23 bp, Artificial sequence
  SiRNA target sequence
gttttaatgtaaaagtgcaaaga

SEQ ID NO: 151928 - DNA, 23 bp, Artificial sequence
  SiRNA target sequence
ttttaatgtaaaagtgcaaagag

SEQ ID NO: 151929 - DNA, 23 bp, Artificial sequence
  SiRNA target sequence
tttaatgtaaaagtgcaaagaga

SEQ ID NO: 151930 - DNA, 23 bp, Artificial sequence
  SiRNA target sequence
ttaatgtaaaagtgcaaagagaa

SEQ ID NO: 151931 - DNA, 23 bp, Artificial sequence
  SiRNA target sequence
taatgtaaaagtgcaaagagaat

SEQ ID NO: 151932 - DNA, 23 bp, Artificial sequence
  SiRNA target sequence
aatgtaaaagtgcaaagagaatg

SEQ ID NO: 151933 - DNA, 23 bp, Artificial sequence
  SiRNA target sequence
atgtaaaagtgcaaagagaatgt

SEQ ID NO: 151934 - DNA, 23 bp, Artificial sequence
  SiRNA target sequence
tgtaaaagtgcaaagagaatgtt

SEQ ID NO: 151935 - DNA, 23 bp, Artificial sequence
  SiRNA target sequence
gtaaaagtgcaaagagaatgttc

SEQ ID NO: 151936 - DNA, 23 bp, Artificial sequence
  SiRNA target sequence
taaaagtgcaaagagaatgttct

SEQ ID NO: 151937 - DNA, 23 bp, Artificial sequence
  SiRNA target sequence
aaaagtgcaaagagaatgttctg

SEQ ID NO: 151938 - DNA, 23 bp, Artificial sequence
  SiRNA target sequence
aaagtgcaaagagaatgttctgc

SEQ ID NO: 151939 - DNA, 23 bp, Artificial sequence
  SiRNA target sequence
aagtgcaaagagaatgttctgcg

SEQ ID NO: 151940 - DNA, 23 bp, Artificial sequence
  SiRNA target sequence
agtgcaaagagaatgttctgcgt

SEQ ID NO: 151941 - DNA, 23 bp, Artificial sequence
  SiRNA target sequence
gtgcaaagagaatgttctgcgtg

SEQ ID NO: 151942 - DNA, 23 bp, Artificial sequence
  SiRNA target sequence
tgcaaagagaatgttctgcgtgt

SEQ ID NO: 151943 - DNA, 23 bp, Artificial sequence
  SiRNA target sequence
gcaaagagaatgttctgcgtgta

SEQ ID NO: 151944 - DNA, 23 bp, Artificial sequence
  SiRNA target sequence
caaagagaatgttctgcgtgtaa

SEQ ID NO: 151945 - DNA, 23 bp, Artificial sequence
  SiRNA target sequence
aaagagaatgttctgcgtgtaac

SEQ ID NO: 151946 - DNA, 23 bp, Artificial sequence
  SiRNA target sequence
aagagaatgttctgcgtgtaacg

SEQ ID NO: 151947 - DNA, 23 bp, Artificial sequence
  SiRNA target sequence
agagaatgttctgcgtgtaacgg

SEQ ID NO: 151948 - DNA, 23 bp, Artificial sequence
  SiRNA target sequence
gagaatgttctgcgtgtaacggt

SEQ ID NO: 151949 - DNA, 23 bp, Artificial sequence
  SiRNA target sequence
agaatgttctgcgtgtaacggta

SEQ ID NO: 151950 - DNA, 23 bp, Artificial sequence
  SiRNA target sequence
gaatgttctgcgtgtaacggtaa

SEQ ID NO: 151951 - DNA, 23 bp, Artificial sequence
  SiRNA target sequence
aatgttctgcgtgtaacggtaaa

SEQ ID NO: 151952 - DNA, 23 bp, Artificial sequence
  SiRNA target sequence
atgttctgcgtgtaacggtaaag

SEQ ID NO: 151953 - DNA, 23 bp, Artificial sequence
  SiRNA target sequence
tgttctgcgtgtaacggtaaagg

SEQ ID NO: 151954 - DNA, 23 bp, Artificial sequence
  SiRNA target sequence
gttctgcgtgtaacggtaaagga

SEQ ID NO: 151955 - DNA, 23 bp, Artificial sequence
  SiRNA target sequence
ttctgcgtgtaacggtaaaggag

SEQ ID NO: 151956 - DNA, 23 bp, Artificial sequence
  SiRNA target sequence
tctgcgtgtaacggtaaaggagg

SEQ ID NO: 151957 - DNA, 23 bp, Artificial sequence
  SiRNA target sequence
ctgcgtgtaacggtaaaggagga

SEQ ID NO: 151958 - DNA, 23 bp, Artificial sequence
  SiRNA target sequence
tgcgtgtaacggtaaaggaggag

SEQ ID NO: 151959 - DNA, 23 bp, Artificial sequence
  SiRNA target sequence
gcgtgtaacggtaaaggaggaga

SEQ ID NO: 151960 - DNA, 23 bp, Artificial sequence
  SiRNA target sequence
cgtgtaacggtaaaggaggagac

SEQ ID NO: 151961 - DNA, 23 bp, Artificial sequence
  SiRNA target sequence
gtgtaacggtaaaggaggagaca

SEQ ID NO: 151962 - DNA, 23 bp, Artificial sequence
  SiRNA target sequence
tgtaacggtaaaggaggagacag

SEQ ID NO: 151963 - DNA, 23 bp, Artificial sequence
  SiRNA target sequence
gtaacggtaaaggaggagacagt

SEQ ID NO: 151964 - DNA, 23 bp, Artificial sequence
  SiRNA target sequence
taacggtaaaggaggagacagtg

SEQ ID NO: 151965 - DNA, 23 bp, Artificial sequence
  SiRNA target sequence
aacggtaaaggaggagacagtgt

SEQ ID NO: 151966 - DNA, 23 bp, Artificial sequence
  SiRNA target sequence
acggtaaaggaggagacagtgtt

SEQ ID NO: 151967 - DNA, 23 bp, Artificial sequence
  SiRNA target sequence
cggtaaaggaggagacagtgttg

SEQ ID NO: 151968 - DNA, 23 bp, Artificial sequence
  SiRNA target sequence
ggtaaaggaggagacagtgttga

SEQ ID NO: 151969 - DNA, 23 bp, Artificial sequence
  SiRNA target sequence
gtaaaggaggagacagtgttgaa

SEQ ID NO: 151970 - DNA, 23 bp, Artificial sequence
  SiRNA target sequence
taaaggaggagacagtgttgaaa

SEQ ID NO: 151971 - DNA, 23 bp, Artificial sequence
  SiRNA target sequence
aaaggaggagacagtgttgaaac

SEQ ID NO: 151972 - DNA, 23 bp, Artificial sequence
  SiRNA target sequence
aaggaggagacagtgttgaaaca

SEQ ID NO: 151973 - DNA, 23 bp, Artificial sequence
  SiRNA target sequence
aggaggagacagtgttgaaacat

SEQ ID NO: 151974 - DNA, 23 bp, Artificial sequence
  SiRNA target sequence
ggaggagacagtgttgaaacatg

SEQ ID NO: 151975 - DNA, 23 bp, Artificial sequence
  SiRNA target sequence
gaggagacagtgttgaaacatgt

SEQ ID NO: 151976 - DNA, 23 bp, Artificial sequence
  SiRNA target sequence
aggagacagtgttgaaacatgtg

SEQ ID NO: 151977 - DNA, 23 bp, Artificial sequence
  SiRNA target sequence
ggagacagtgttgaaacatgtga

SEQ ID NO: 151978 - DNA, 23 bp, Artificial sequence
  SiRNA target sequence
gagacagtgttgaaacatgtgaa

SEQ ID NO: 151979 - DNA, 23 bp, Artificial sequence
  SiRNA target sequence
agacagtgttgaaacatgtgaac

SEQ ID NO: 151980 - DNA, 23 bp, Artificial sequence
  SiRNA target sequence
gacagtgttgaaacatgtgaacc

SEQ ID NO: 151981 - DNA, 23 bp, Artificial sequence
  SiRNA target sequence
acagtgttgaaacatgtgaacca

SEQ ID NO: 151982 - DNA, 23 bp, Artificial sequence
  SiRNA target sequence
cagtgttgaaacatgtgaaccat

SEQ ID NO: 151983 - DNA, 23 bp, Artificial sequence
  SiRNA target sequence
agtgttgaaacatgtgaaccatg

SEQ ID NO: 151984 - DNA, 23 bp, Artificial sequence
  SiRNA target sequence
gtgttgaaacatgtgaaccatgt

SEQ ID NO: 151985 - DNA, 23 bp, Artificial sequence
  SiRNA target sequence
tgttgaaacatgtgaaccatgta

SEQ ID NO: 151986 - DNA, 23 bp, Artificial sequence
  SiRNA target sequence
gttgaaacatgtgaaccatgtaa

SEQ ID NO: 151987 - DNA, 23 bp, Artificial sequence
  SiRNA target sequence
ttgaaacatgtgaaccatgtaaa

SEQ ID NO: 151988 - DNA, 23 bp, Artificial sequence
  SiRNA target sequence
tgaaacatgtgaaccatgtaaag

SEQ ID NO: 151989 - DNA, 23 bp, Artificial sequence
  SiRNA target sequence
gaaacatgtgaaccatgtaaagg

SEQ ID NO: 151990 - DNA, 23 bp, Artificial sequence
  SiRNA target sequence
aaacatgtgaaccatgtaaaggt

SEQ ID NO: 151991 - DNA, 23 bp, Artificial sequence
  SiRNA target sequence
aacatgtgaaccatgtaaaggta

SEQ ID NO: 151992 - DNA, 23 bp, Artificial sequence
  SiRNA target sequence
acatgtgaaccatgtaaaggtaa

SEQ ID NO: 151993 - DNA, 23 bp, Artificial sequence
  SiRNA target sequence
catgtgaaccatgtaaaggtaaa

SEQ ID NO: 151994 - DNA, 23 bp, Artificial sequence
  SiRNA target sequence
atgtgaaccatgtaaaggtaaag

SEQ ID NO: 151995 - DNA, 23 bp, Artificial sequence
  SiRNA target sequence
tgtgaaccatgtaaaggtaaagg

SEQ ID NO: 151996 - DNA, 23 bp, Artificial sequence
  SiRNA target sequence
gtgaaccatgtaaaggtaaaggt

SEQ ID NO: 151997 - DNA, 23 bp, Artificial sequence
  SiRNA target sequence
tgaaccatgtaaaggtaaaggta

SEQ ID NO: 151998 - DNA, 23 bp, Artificial sequence
  SiRNA target sequence
gaaccatgtaaaggtaaaggtaa

SEQ ID NO: 151999 - DNA, 23 bp, Artificial sequence
  SiRNA target sequence
aaccatgtaaaggtaaaggtaag

SEQ ID NO: 152000 - DNA, 23 bp, Artificial sequence
  SiRNA target sequence
accatgtaaaggtaaaggtaagg

SEQ ID NO: 152001 - DNA, 23 bp, Artificial sequence
  SiRNA target sequence
ccatgtaaaggtaaaggtaaggt

SEQ ID NO: 152002 - DNA, 23 bp, Artificial sequence
  SiRNA target sequence
catgtaaaggtaaaggtaaggta

SEQ ID NO: 152003 - DNA, 23 bp, Artificial sequence
  SiRNA target sequence
atgtaaaggtaaaggtaaggtag

SEQ ID NO: 152004 - DNA, 23 bp, Artificial sequence
  SiRNA target sequence
tgtaaaggtaaaggtaaggtaga

SEQ ID NO: 152005 - DNA, 23 bp, Artificial sequence
  SiRNA target sequence
gtaaaggtaaaggtaaggtagaa

SEQ ID NO: 152006 - DNA, 23 bp, Artificial sequence
  SiRNA target sequence
taaaggtaaaggtaaggtagaac

SEQ ID NO: 152007 - DNA, 23 bp, Artificial sequence
  SiRNA target sequence
aaaggtaaaggtaaggtagaaca

SEQ ID NO: 152008 - DNA, 23 bp, Artificial sequence
  SiRNA target sequence
aaggtaaaggtaaggtagaacat

SEQ ID NO: 152009 - DNA, 23 bp, Artificial sequence
  SiRNA target sequence
aggtaaaggtaaggtagaacatc

SEQ ID NO: 152010 - DNA, 23 bp, Artificial sequence
  SiRNA target sequence
ggtaaaggtaaggtagaacatca

SEQ ID NO: 152011 - DNA, 23 bp, Artificial sequence
  SiRNA target sequence
gtaaaggtaaggtagaacatcat

SEQ ID NO: 152012 - DNA, 23 bp, Artificial sequence
  SiRNA target sequence
taaaggtaaggtagaacatcata

SEQ ID NO: 152013 - DNA, 23 bp, Artificial sequence
  SiRNA target sequence
aaaggtaaggtagaacatcatag

SEQ ID NO: 152014 - DNA, 23 bp, Artificial sequence
  SiRNA target sequence
aaggtaaggtagaacatcatagg

SEQ ID NO: 152015 - DNA, 23 bp, Artificial sequence
  SiRNA target sequence
aggtaaggtagaacatcatagga

SEQ ID NO: 152016 - DNA, 23 bp, Artificial sequence
  SiRNA target sequence
ggtaaggtagaacatcataggag

SEQ ID NO: 152017 - DNA, 23 bp, Artificial sequence
  SiRNA target sequence
gtaaggtagaacatcataggaga

SEQ ID NO: 152018 - DNA, 23 bp, Artificial sequence
  SiRNA target sequence
taaggtagaacatcataggagac

SEQ ID NO: 152019 - DNA, 23 bp, Artificial sequence
  SiRNA target sequence
aaggtagaacatcataggagact

SEQ ID NO: 152020 - DNA, 23 bp, Artificial sequence
  SiRNA target sequence
aggtagaacatcataggagacta

SEQ ID NO: 152021 - DNA, 23 bp, Artificial sequence
  SiRNA target sequence
ggtagaacatcataggagactag

SEQ ID NO: 152022 - DNA, 23 bp, Artificial sequence
  SiRNA target sequence
gtagaacatcataggagactagg

SEQ ID NO: 152023 - DNA, 23 bp, Artificial sequence
  SiRNA target sequence
tagaacatcataggagactaggt

SEQ ID NO: 152024 - DNA, 23 bp, Artificial sequence
  SiRNA target sequence
agaacatcataggagactaggtc

SEQ ID NO: 152025 - DNA, 23 bp, Artificial sequence
  SiRNA target sequence
gaacatcataggagactaggtcc

SEQ ID NO: 152026 - DNA, 23 bp, Artificial sequence
  SiRNA target sequence
aacatcataggagactaggtcct

SEQ ID NO: 152027 - DNA, 23 bp, Artificial sequence
  SiRNA target sequence
acatcataggagactaggtcctt

SEQ ID NO: 152028 - DNA, 23 bp, Artificial sequence
  SiRNA target sequence
catcataggagactaggtccttt

SEQ ID NO: 152029 - DNA, 23 bp, Artificial sequence
  SiRNA target sequence
atcataggagactaggtccttta

SEQ ID NO: 152030 - DNA, 23 bp, Artificial sequence
  SiRNA target sequence
tcataggagactaggtcctttaa

SEQ ID NO: 152031 - DNA, 23 bp, Artificial sequence
  SiRNA target sequence
cataggagactaggtcctttaat

SEQ ID NO: 152032 - DNA, 23 bp, Artificial sequence
  SiRNA target sequence
ataggagactaggtcctttaatt

SEQ ID NO: 152033 - DNA, 23 bp, Artificial sequence
  SiRNA target sequence
taggagactaggtcctttaattt

SEQ ID NO: 152034 - DNA, 23 bp, Artificial sequence
  SiRNA target sequence
aggagactaggtcctttaatttc

SEQ ID NO: 152035 - DNA, 23 bp, Artificial sequence
  SiRNA target sequence
ggagactaggtcctttaatttct

SEQ ID NO: 152036 - DNA, 23 bp, Artificial sequence
  SiRNA target sequence
gagactaggtcctttaatttctg

SEQ ID NO: 152037 - DNA, 23 bp, Artificial sequence
  SiRNA target sequence
agactaggtcctttaatttctgt

SEQ ID NO: 152038 - DNA, 23 bp, Artificial sequence
  SiRNA target sequence
gactaggtcctttaatttctgta

SEQ ID NO: 152039 - DNA, 23 bp, Artificial sequence
  SiRNA target sequence
actaggtcctttaatttctgtac

SEQ ID NO: 152040 - DNA, 23 bp, Artificial sequence
  SiRNA target sequence
ctaggtcctttaatttctgtaca

SEQ ID NO: 152041 - DNA, 23 bp, Artificial sequence
  SiRNA target sequence
taggtcctttaatttctgtacaa

SEQ ID NO: 152042 - DNA, 23 bp, Artificial sequence
  SiRNA target sequence
aggtcctttaatttctgtacaag

SEQ ID NO: 152043 - DNA, 23 bp, Artificial sequence
  SiRNA target sequence
ggtcctttaatttctgtacaaga

SEQ ID NO: 152044 - DNA, 23 bp, Artificial sequence
  SiRNA target sequence
gtcctttaatttctgtacaagaa

SEQ ID NO: 152045 - DNA, 23 bp, Artificial sequence
  SiRNA target sequence
tcctttaatttctgtacaagaag

SEQ ID NO: 152046 - DNA, 23 bp, Artificial sequence
  SiRNA target sequence
cctttaatttctgtacaagaagc

SEQ ID NO: 152047 - DNA, 23 bp, Artificial sequence
  SiRNA target sequence
ctttaatttctgtacaagaagca

SEQ ID NO: 152048 - DNA, 23 bp, Artificial sequence
  SiRNA target sequence
tttaatttctgtacaagaagcac

SEQ ID NO: 152049 - DNA, 23 bp, Artificial sequence
  SiRNA target sequence
ttaatttctgtacaagaagcacc

SEQ ID NO: 152050 - DNA, 23 bp, Artificial sequence
  SiRNA target sequence
taatttctgtacaagaagcacct

SEQ ID NO: 152051 - DNA, 23 bp, Artificial sequence
  SiRNA target sequence
aatttctgtacaagaagcacctt

SEQ ID NO: 152052 - DNA, 23 bp, Artificial sequence
  SiRNA target sequence
atttctgtacaagaagcaccttg

SEQ ID NO: 152053 - DNA, 23 bp, Artificial sequence
  SiRNA target sequence
tttctgtacaagaagcaccttgt

SEQ ID NO: 152054 - DNA, 23 bp, Artificial sequence
  SiRNA target sequence
ttctgtacaagaagcaccttgta

SEQ ID NO: 152055 - DNA, 23 bp, Artificial sequence
  SiRNA target sequence
tctgtacaagaagcaccttgtaa

SEQ ID NO: 152056 - DNA, 23 bp, Artificial sequence
  SiRNA target sequence
ctgtacaagaagcaccttgtaat

SEQ ID NO: 152057 - DNA, 23 bp, Artificial sequence
  SiRNA target sequence
tgtacaagaagcaccttgtaata

SEQ ID NO: 152058 - DNA, 23 bp, Artificial sequence
  SiRNA target sequence
gtacaagaagcaccttgtaataa

SEQ ID NO: 152059 - DNA, 23 bp, Artificial sequence
  SiRNA target sequence
tacaagaagcaccttgtaataat

SEQ ID NO: 152060 - DNA, 23 bp, Artificial sequence
  SiRNA target sequence
acaagaagcaccttgtaataatt

SEQ ID NO: 152061 - DNA, 23 bp, Artificial sequence
  SiRNA target sequence
caagaagcaccttgtaataattg

SEQ ID NO: 152062 - DNA, 23 bp, Artificial sequence
  SiRNA target sequence
aagaagcaccttgtaataattgt

SEQ ID NO: 152063 - DNA, 23 bp, Artificial sequence
  SiRNA target sequence
agaagcaccttgtaataattgta

SEQ ID NO: 152064 - DNA, 23 bp, Artificial sequence
  SiRNA target sequence
gaagcaccttgtaataattgtaa

SEQ ID NO: 152065 - DNA, 23 bp, Artificial sequence
  SiRNA target sequence
aagcaccttgtaataattgtaat

SEQ ID NO: 152066 - DNA, 23 bp, Artificial sequence
  SiRNA target sequence
agcaccttgtaataattgtaatt

SEQ ID NO: 152067 - DNA, 23 bp, Artificial sequence
  SiRNA target sequence
gcaccttgtaataattgtaattc

SEQ ID NO: 152068 - DNA, 23 bp, Artificial sequence
  SiRNA target sequence
caccttgtaataattgtaattct

SEQ ID NO: 152069 - DNA, 23 bp, Artificial sequence
  SiRNA target sequence
accttgtaataattgtaattcta

SEQ ID NO: 152070 - DNA, 23 bp, Artificial sequence
  SiRNA target sequence
ccttgtaataattgtaattctac

SEQ ID NO: 152071 - DNA, 23 bp, Artificial sequence
  SiRNA target sequence
cttgtaataattgtaattctact

SEQ ID NO: 152072 - DNA, 23 bp, Artificial sequence
  SiRNA target sequence
ttgtaataattgtaattctactg

SEQ ID NO: 152073 - DNA, 23 bp, Artificial sequence
  SiRNA target sequence
tgtaataattgtaattctactgg

SEQ ID NO: 152074 - DNA, 23 bp, Artificial sequence
  SiRNA target sequence
gtaataattgtaattctactgga

SEQ ID NO: 152075 - DNA, 23 bp, Artificial sequence
  SiRNA target sequence
taataattgtaattctactggat

SEQ ID NO: 152076 - DNA, 23 bp, Artificial sequence
  SiRNA target sequence
aataattgtaattctactggatt

SEQ ID NO: 152077 - DNA, 23 bp, Artificial sequence
  SiRNA target sequence
ataattgtaattctactggattt

SEQ ID NO: 152078 - DNA, 23 bp, Artificial sequence
  SiRNA target sequence
taattgtaattctactggatttg

SEQ ID NO: 152079 - DNA, 23 bp, Artificial sequence
  SiRNA target sequence
aattgtaattctactggatttgt

SEQ ID NO: 152080 - DNA, 23 bp, Artificial sequence
  SiRNA target sequence
attgtaattctactggatttgtt

SEQ ID NO: 152081 - DNA, 23 bp, Artificial sequence
  SiRNA target sequence
ttgtaattctactggatttgttg

SEQ ID NO: 152082 - DNA, 23 bp, Artificial sequence
  SiRNA target sequence
tgtaattctactggatttgttgt

SEQ ID NO: 152083 - DNA, 23 bp, Artificial sequence
  SiRNA target sequence
gtaattctactggatttgttgtt

SEQ ID NO: 152084 - DNA, 23 bp, Artificial sequence
  SiRNA target sequence
taattctactggatttgttgtta

SEQ ID NO: 152085 - DNA, 23 bp, Artificial sequence
  SiRNA target sequence
aattctactggatttgttgttaa

SEQ ID NO: 152086 - DNA, 23 bp, Artificial sequence
  SiRNA target sequence
attctactggatttgttgttaaa

SEQ ID NO: 152087 - DNA, 23 bp, Artificial sequence
  SiRNA target sequence
ttctactggatttgttgttaaag

SEQ ID NO: 152088 - DNA, 23 bp, Artificial sequence
  SiRNA target sequence
tctactggatttgttgttaaagg

SEQ ID NO: 152089 - DNA, 23 bp, Artificial sequence
  SiRNA target sequence
ctactggatttgttgttaaagga

SEQ ID NO: 152090 - DNA, 23 bp, Artificial sequence
  SiRNA target sequence
tactggatttgttgttaaaggaa

SEQ ID NO: 152091 - DNA, 23 bp, Artificial sequence
  SiRNA target sequence
actggatttgttgttaaaggaaa

SEQ ID NO: 152092 - DNA, 23 bp, Artificial sequence
  SiRNA target sequence
ctggatttgttgttaaaggaaag

SEQ ID NO: 152093 - DNA, 23 bp, Artificial sequence
  SiRNA target sequence
tggatttgttgttaaaggaaagc

SEQ ID NO: 152094 - DNA, 23 bp, Artificial sequence
  SiRNA target sequence
ggatttgttgttaaaggaaagct

SEQ ID NO: 152095 - DNA, 23 bp, Artificial sequence
  SiRNA target sequence
gatttgttgttaaaggaaagctt

SEQ ID NO: 152096 - DNA, 23 bp, Artificial sequence
  SiRNA target sequence
atttgttgttaaaggaaagcttt

SEQ ID NO: 152097 - DNA, 23 bp, Artificial sequence
  SiRNA target sequence
tttgttgttaaaggaaagctttg

SEQ ID NO: 152098 - DNA, 23 bp, Artificial sequence
  SiRNA target sequence
ttgttgttaaaggaaagctttgt

SEQ ID NO: 152099 - DNA, 23 bp, Artificial sequence
  SiRNA target sequence
tgttgttaaaggaaagctttgtc

SEQ ID NO: 152100 - DNA, 23 bp, Artificial sequence
  SiRNA target sequence
gttgttaaaggaaagctttgtca

SEQ ID NO: 152101 - DNA, 23 bp, Artificial sequence
  SiRNA target sequence
ttgttaaaggaaagctttgtcaa

SEQ ID NO: 152102 - DNA, 23 bp, Artificial sequence
  SiRNA target sequence
tgttaaaggaaagctttgtcaaa

SEQ ID NO: 152103 - DNA, 23 bp, Artificial sequence
  SiRNA target sequence
gttaaaggaaagctttgtcaaag

SEQ ID NO: 152104 - DNA, 23 bp, Artificial sequence
  SiRNA target sequence
ttaaaggaaagctttgtcaaagt

SEQ ID NO: 152105 - DNA, 23 bp, Artificial sequence
  SiRNA target sequence
taaaggaaagctttgtcaaagtt

SEQ ID NO: 152106 - DNA, 23 bp, Artificial sequence
  SiRNA target sequence
aaaggaaagctttgtcaaagttg

SEQ ID NO: 152107 - DNA, 23 bp, Artificial sequence
  SiRNA target sequence
aaggaaagctttgtcaaagttgt

SEQ ID NO: 152108 - DNA, 23 bp, Artificial sequence
  SiRNA target sequence
aggaaagctttgtcaaagttgta

SEQ ID NO: 152109 - DNA, 23 bp, Artificial sequence
  SiRNA target sequence
ggaaagctttgtcaaagttgtaa

SEQ ID NO: 152110 - DNA, 23 bp, Artificial sequence
  SiRNA target sequence
gaaagctttgtcaaagttgtaaa

SEQ ID NO: 152111 - DNA, 23 bp, Artificial sequence
  SiRNA target sequence
aaagctttgtcaaagttgtaaag

SEQ ID NO: 152112 - DNA, 23 bp, Artificial sequence
  SiRNA target sequence
aagctttgtcaaagttgtaaagg

SEQ ID NO: 152113 - DNA, 23 bp, Artificial sequence
  SiRNA target sequence
agctttgtcaaagttgtaaaggt

SEQ ID NO: 152114 - DNA, 23 bp, Artificial sequence
  SiRNA target sequence
gctttgtcaaagttgtaaaggta

SEQ ID NO: 152115 - DNA, 23 bp, Artificial sequence
  SiRNA target sequence
ctttgtcaaagttgtaaaggtaa

SEQ ID NO: 152116 - DNA, 23 bp, Artificial sequence
  SiRNA target sequence
tttgtcaaagttgtaaaggtaaa

SEQ ID NO: 152117 - DNA, 23 bp, Artificial sequence
  SiRNA target sequence
ttgtcaaagttgtaaaggtaaac

SEQ ID NO: 152118 - DNA, 23 bp, Artificial sequence
  SiRNA target sequence
tgtcaaagttgtaaaggtaaaca

SEQ ID NO: 152119 - DNA, 23 bp, Artificial sequence
  SiRNA target sequence
gtcaaagttgtaaaggtaaacaa

SEQ ID NO: 152120 - DNA, 23 bp, Artificial sequence
  SiRNA target sequence
tcaaagttgtaaaggtaaacaat

SEQ ID NO: 152121 - DNA, 23 bp, Artificial sequence
  SiRNA target sequence
caaagttgtaaaggtaaacaata

SEQ ID NO: 152122 - DNA, 23 bp, Artificial sequence
  SiRNA target sequence
aaagttgtaaaggtaaacaatac

SEQ ID NO: 152123 - DNA, 23 bp, Artificial sequence
  SiRNA target sequence
aagttgtaaaggtaaacaatacg

SEQ ID NO: 152124 - DNA, 23 bp, Artificial sequence
  SiRNA target sequence
agttgtaaaggtaaacaatacgt

SEQ ID NO: 152125 - DNA, 23 bp, Artificial sequence
  SiRNA target sequence
gttgtaaaggtaaacaatacgtt

SEQ ID NO: 152126 - DNA, 23 bp, Artificial sequence
  SiRNA target sequence
ttgtaaaggtaaacaatacgttg

SEQ ID NO: 152127 - DNA, 23 bp, Artificial sequence
  SiRNA target sequence
tgtaaaggtaaacaatacgttga

SEQ ID NO: 152128 - DNA, 23 bp, Artificial sequence
  SiRNA target sequence
gtaaaggtaaacaatacgttgag

SEQ ID NO: 152129 - DNA, 23 bp, Artificial sequence
  SiRNA target sequence
taaaggtaaacaatacgttgaga

SEQ ID NO: 152130 - DNA, 23 bp, Artificial sequence
  SiRNA target sequence
aaaggtaaacaatacgttgagac

SEQ ID NO: 152131 - DNA, 23 bp, Artificial sequence
  SiRNA target sequence
aaggtaaacaatacgttgagact

SEQ ID NO: 152132 - DNA, 23 bp, Artificial sequence
  SiRNA target sequence
aggtaaacaatacgttgagacta

SEQ ID NO: 152133 - DNA, 23 bp, Artificial sequence
  SiRNA target sequence
ggtaaacaatacgttgagactaa

SEQ ID NO: 152134 - DNA, 23 bp, Artificial sequence
  SiRNA target sequence
gtaaacaatacgttgagactaaa

SEQ ID NO: 152135 - DNA, 23 bp, Artificial sequence
  SiRNA target sequence
taaacaatacgttgagactaaag

SEQ ID NO: 152136 - DNA, 23 bp, Artificial sequence
  SiRNA target sequence
aaacaatacgttgagactaaaga

SEQ ID NO: 152137 - DNA, 23 bp, Artificial sequence
  SiRNA target sequence
aacaatacgttgagactaaagaa

SEQ ID NO: 152138 - DNA, 23 bp, Artificial sequence
  SiRNA target sequence
acaatacgttgagactaaagaac

SEQ ID NO: 152139 - DNA, 23 bp, Artificial sequence
  SiRNA target sequence
caatacgttgagactaaagaaca

SEQ ID NO: 152140 - DNA, 23 bp, Artificial sequence
  SiRNA target sequence
aatacgttgagactaaagaacat

SEQ ID NO: 152141 - DNA, 23 bp, Artificial sequence
  SiRNA target sequence
atacgttgagactaaagaacata

SEQ ID NO: 152142 - DNA, 23 bp, Artificial sequence
  SiRNA target sequence
tacgttgagactaaagaacatat

SEQ ID NO: 152143 - DNA, 23 bp, Artificial sequence
  SiRNA target sequence
acgttgagactaaagaacatatt

SEQ ID NO: 152144 - DNA, 23 bp, Artificial sequence
  SiRNA target sequence
cgttgagactaaagaacatattg

SEQ ID NO: 152145 - DNA, 23 bp, Artificial sequence
  SiRNA target sequence
gttgagactaaagaacatattga

SEQ ID NO: 152146 - DNA, 23 bp, Artificial sequence
  SiRNA target sequence
ttgagactaaagaacatattgaa

SEQ ID NO: 152147 - DNA, 23 bp, Artificial sequence
  SiRNA target sequence
tgagactaaagaacatattgaag

SEQ ID NO: 152148 - DNA, 23 bp, Artificial sequence
  SiRNA target sequence
gagactaaagaacatattgaagt

SEQ ID NO: 152149 - DNA, 23 bp, Artificial sequence
  SiRNA target sequence
agactaaagaacatattgaagtg

SEQ ID NO: 152150 - DNA, 23 bp, Artificial sequence
  SiRNA target sequence
gactaaagaacatattgaagtgg

SEQ ID NO: 152151 - DNA, 23 bp, Artificial sequence
  SiRNA target sequence
actaaagaacatattgaagtgga

SEQ ID NO: 152152 - DNA, 23 bp, Artificial sequence
  SiRNA target sequence
ctaaagaacatattgaagtggaa

SEQ ID NO: 152153 - DNA, 23 bp, Artificial sequence
  SiRNA target sequence
taaagaacatattgaagtggaag

SEQ ID NO: 152154 - DNA, 23 bp, Artificial sequence
  SiRNA target sequence
aaagaacatattgaagtggaagt

SEQ ID NO: 152155 - DNA, 23 bp, Artificial sequence
  SiRNA target sequence
aagaacatattgaagtggaagta

SEQ ID NO: 152156 - DNA, 23 bp, Artificial sequence
  SiRNA target sequence
agaacatattgaagtggaagtag

SEQ ID NO: 152157 - DNA, 23 bp, Artificial sequence
  SiRNA target sequence
gaacatattgaagtggaagtaga

SEQ ID NO: 152158 - DNA, 23 bp, Artificial sequence
  SiRNA target sequence
aacatattgaagtggaagtagag

SEQ ID NO: 152159 - DNA, 23 bp, Artificial sequence
  SiRNA target sequence
acatattgaagtggaagtagagc

SEQ ID NO: 152160 - DNA, 23 bp, Artificial sequence
  SiRNA target sequence
catattgaagtggaagtagagcc

SEQ ID NO: 152161 - DNA, 23 bp, Artificial sequence
  SiRNA target sequence
atattgaagtggaagtagagcca

SEQ ID NO: 152162 - DNA, 23 bp, Artificial sequence
  SiRNA target sequence
tattgaagtggaagtagagccag

SEQ ID NO: 152163 - DNA, 23 bp, Artificial sequence
  SiRNA target sequence
attgaagtggaagtagagccagg

SEQ ID NO: 152164 - DNA, 23 bp, Artificial sequence
  SiRNA target sequence
ttgaagtggaagtagagccagga

SEQ ID NO: 152165 - DNA, 23 bp, Artificial sequence
  SiRNA target sequence
tgaagtggaagtagagccaggag

SEQ ID NO: 152166 - DNA, 23 bp, Artificial sequence
  SiRNA target sequence
gaagtggaagtagagccaggagt

SEQ ID NO: 152167 - DNA, 23 bp, Artificial sequence
  SiRNA target sequence
aagtggaagtagagccaggagta

SEQ ID NO: 152168 - DNA, 23 bp, Artificial sequence
  SiRNA target sequence
agtggaagtagagccaggagtac

SEQ ID NO: 152169 - DNA, 23 bp, Artificial sequence
  SiRNA target sequence
gtggaagtagagccaggagtaca

SEQ ID NO: 152170 - DNA, 23 bp, Artificial sequence
  SiRNA target sequence
tggaagtagagccaggagtacag

SEQ ID NO: 152171 - DNA, 23 bp, Artificial sequence
  SiRNA target sequence
ggaagtagagccaggagtacaga

SEQ ID NO: 152172 - DNA, 23 bp, Artificial sequence
  SiRNA target sequence
gaagtagagccaggagtacagaa

SEQ ID NO: 152173 - DNA, 23 bp, Artificial sequence
  SiRNA target sequence
aagtagagccaggagtacagaac

SEQ ID NO: 152174 - DNA, 23 bp, Artificial sequence
  SiRNA target sequence
agtagagccaggagtacagaacg

SEQ ID NO: 152175 - DNA, 23 bp, Artificial sequence
  SiRNA target sequence
gtagagccaggagtacagaacgg

SEQ ID NO: 152176 - DNA, 23 bp, Artificial sequence
  SiRNA target sequence
tagagccaggagtacagaacggt

SEQ ID NO: 152177 - DNA, 23 bp, Artificial sequence
  SiRNA target sequence
agagccaggagtacagaacggta

SEQ ID NO: 152178 - DNA, 23 bp, Artificial sequence
  SiRNA target sequence
gagccaggagtacagaacggtag

SEQ ID NO: 152179 - DNA, 23 bp, Artificial sequence
  SiRNA target sequence
agccaggagtacagaacggtaga

SEQ ID NO: 152180 - DNA, 23 bp, Artificial sequence
  SiRNA target sequence
gccaggagtacagaacggtagaa

SEQ ID NO: 152181 - DNA, 23 bp, Artificial sequence
  SiRNA target sequence
ccaggagtacagaacggtagaaa

SEQ ID NO: 152182 - DNA, 23 bp, Artificial sequence
  SiRNA target sequence
caggagtacagaacggtagaaaa

SEQ ID NO: 152183 - DNA, 23 bp, Artificial sequence
  SiRNA target sequence
aggagtacagaacggtagaaaat

SEQ ID NO: 152184 - DNA, 23 bp, Artificial sequence
  SiRNA target sequence
ggagtacagaacggtagaaaata

SEQ ID NO: 152185 - DNA, 23 bp, Artificial sequence
  SiRNA target sequence
gagtacagaacggtagaaaatat

SEQ ID NO: 152186 - DNA, 23 bp, Artificial sequence
  SiRNA target sequence
agtacagaacggtagaaaatata

SEQ ID NO: 152187 - DNA, 23 bp, Artificial sequence
  SiRNA target sequence
gtacagaacggtagaaaatatac

SEQ ID NO: 152188 - DNA, 23 bp, Artificial sequence
  SiRNA target sequence
tacagaacggtagaaaatataca

SEQ ID NO: 152189 - DNA, 23 bp, Artificial sequence
  SiRNA target sequence
acagaacggtagaaaatatacat

SEQ ID NO: 152190 - DNA, 23 bp, Artificial sequence
  SiRNA target sequence
cagaacggtagaaaatatacatt

SEQ ID NO: 152191 - DNA, 23 bp, Artificial sequence
  SiRNA target sequence
agaacggtagaaaatatacattt

SEQ ID NO: 152192 - DNA, 23 bp, Artificial sequence
  SiRNA target sequence
gaacggtagaaaatatacatttt

SEQ ID NO: 152193 - DNA, 23 bp, Artificial sequence
  SiRNA target sequence
aacggtagaaaatatacattttc

SEQ ID NO: 152194 - DNA, 23 bp, Artificial sequence
  SiRNA target sequence
acggtagaaaatatacattttct

SEQ ID NO: 152195 - DNA, 23 bp, Artificial sequence
  SiRNA target sequence
cggtagaaaatatacattttctg

SEQ ID NO: 152196 - DNA, 23 bp, Artificial sequence
  SiRNA target sequence
ggtagaaaatatacattttctgg

SEQ ID NO: 152197 - DNA, 23 bp, Artificial sequence
  SiRNA target sequence
gtagaaaatatacattttctggc

SEQ ID NO: 152198 - DNA, 23 bp, Artificial sequence
  SiRNA target sequence
tagaaaatatacattttctggca

SEQ ID NO: 152199 - DNA, 23 bp, Artificial sequence
  SiRNA target sequence
agaaaatatacattttctggcaa

SEQ ID NO: 152200 - DNA, 23 bp, Artificial sequence
  SiRNA target sequence
gaaaatatacattttctggcaaa

SEQ ID NO: 152201 - DNA, 23 bp, Artificial sequence
  SiRNA target sequence
aaaatatacattttctggcaaag

SEQ ID NO: 152202 - DNA, 23 bp, Artificial sequence
  SiRNA target sequence
aaatatacattttctggcaaagg

SEQ ID NO: 152203 - DNA, 23 bp, Artificial sequence
  SiRNA target sequence
aatatacattttctggcaaagga

SEQ ID NO: 152204 - DNA, 23 bp, Artificial sequence
  SiRNA target sequence
atatacattttctggcaaaggaa

SEQ ID NO: 152205 - DNA, 23 bp, Artificial sequence
  SiRNA target sequence
tatacattttctggcaaaggaaa

SEQ ID NO: 152206 - DNA, 23 bp, Artificial sequence
  SiRNA target sequence
atacattttctggcaaaggaaat

SEQ ID NO: 152207 - DNA, 23 bp, Artificial sequence
  SiRNA target sequence
tacattttctggcaaaggaaatc

SEQ ID NO: 152208 - DNA, 23 bp, Artificial sequence
  SiRNA target sequence
acattttctggcaaaggaaatca

SEQ ID NO: 152209 - DNA, 23 bp, Artificial sequence
  SiRNA target sequence
cattttctggcaaaggaaatcat

SEQ ID NO: 152210 - DNA, 23 bp, Artificial sequence
  SiRNA target sequence
attttctggcaaaggaaatcata

SEQ ID NO: 152211 - DNA, 23 bp, Artificial sequence
  SiRNA target sequence
ttttctggcaaaggaaatcataa

SEQ ID NO: 152212 - DNA, 23 bp, Artificial sequence
  SiRNA target sequence
tttctggcaaaggaaatcataaa

SEQ ID NO: 152213 - DNA, 23 bp, Artificial sequence
  SiRNA target sequence
ttctggcaaaggaaatcataaaa

SEQ ID NO: 152214 - DNA, 23 bp, Artificial sequence
  SiRNA target sequence
tctggcaaaggaaatcataaaaa

SEQ ID NO: 152215 - DNA, 23 bp, Artificial sequence
  SiRNA target sequence
ctggcaaaggaaatcataaaaaa

SEQ ID NO: 152216 - DNA, 23 bp, Artificial sequence
  SiRNA target sequence
tggcaaaggaaatcataaaaaaa

SEQ ID NO: 152217 - DNA, 23 bp, Artificial sequence
  SiRNA target sequence
ggcaaaggaaatcataaaaaaaa

SEQ ID NO: 152218 - DNA, 23 bp, Artificial sequence
  SiRNA target sequence
gcaaaggaaatcataaaaaaaat

SEQ ID NO: 152219 - DNA, 23 bp, Artificial sequence
  SiRNA target sequence
caaaggaaatcataaaaaaaatt

SEQ ID NO: 152220 - DNA, 23 bp, Artificial sequence
  SiRNA target sequence
aaaggaaatcataaaaaaaattg

SEQ ID NO: 152221 - DNA, 23 bp, Artificial sequence
  SiRNA target sequence
aaggaaatcataaaaaaaattgt

SEQ ID NO: 152222 - DNA, 23 bp, Artificial sequence
  SiRNA target sequence
aggaaatcataaaaaaaattgtg

SEQ ID NO: 152223 - DNA, 23 bp, Artificial sequence
  SiRNA target sequence
ggaaatcataaaaaaaattgtgt

SEQ ID NO: 152224 - DNA, 23 bp, Artificial sequence
  SiRNA target sequence
gaaatcataaaaaaaattgtgta

SEQ ID NO: 152225 - DNA, 23 bp, Artificial sequence
  SiRNA target sequence
aaatcataaaaaaaattgtgtac

SEQ ID NO: 152226 - DNA, 23 bp, Artificial sequence
  SiRNA target sequence
aatcataaaaaaaattgtgtacc

SEQ ID NO: 152227 - DNA, 23 bp, Artificial sequence
  SiRNA target sequence
atcataaaaaaaattgtgtaccg

SEQ ID NO: 152228 - DNA, 23 bp, Artificial sequence
  SiRNA target sequence
tcataaaaaaaattgtgtaccgg

SEQ ID NO: 152229 - DNA, 23 bp, Artificial sequence
  SiRNA target sequence
cataaaaaaaattgtgtaccggg

SEQ ID NO: 152230 - DNA, 23 bp, Artificial sequence
  SiRNA target sequence
ataaaaaaaattgtgtaccgggt

SEQ ID NO: 152231 - DNA, 23 bp, Artificial sequence
  SiRNA target sequence
taaaaaaaattgtgtaccgggtg

SEQ ID NO: 152232 - DNA, 23 bp, Artificial sequence
  SiRNA target sequence
aaaaaaaattgtgtaccgggtga

SEQ ID NO: 152233 - DNA, 23 bp, Artificial sequence
  SiRNA target sequence
aaaaaaattgtgtaccgggtgat

SEQ ID NO: 152234 - DNA, 23 bp, Artificial sequence
  SiRNA target sequence
aaaaaattgtgtaccgggtgatg

SEQ ID NO: 152235 - DNA, 23 bp, Artificial sequence
  SiRNA target sequence
aaaaattgtgtaccgggtgatgt

SEQ ID NO: 152236 - DNA, 23 bp, Artificial sequence
  SiRNA target sequence
aaaattgtgtaccgggtgatgtg

SEQ ID NO: 152237 - DNA, 23 bp, Artificial sequence
  SiRNA target sequence
aaattgtgtaccgggtgatgtga

SEQ ID NO: 152238 - DNA, 23 bp, Artificial sequence
  SiRNA target sequence
aattgtgtaccgggtgatgtgat

SEQ ID NO: 152239 - DNA, 23 bp, Artificial sequence
  SiRNA target sequence
attgtgtaccgggtgatgtgatt

SEQ ID NO: 152240 - DNA, 23 bp, Artificial sequence
  SiRNA target sequence
ttgtgtaccgggtgatgtgattc

SEQ ID NO: 152241 - DNA, 23 bp, Artificial sequence
  SiRNA target sequence
tgtgtaccgggtgatgtgattct

SEQ ID NO: 152242 - DNA, 23 bp, Artificial sequence
  SiRNA target sequence
gtgtaccgggtgatgtgattctt

SEQ ID NO: 152243 - DNA, 23 bp, Artificial sequence
  SiRNA target sequence
tgtaccgggtgatgtgattctta

SEQ ID NO: 152244 - DNA, 23 bp, Artificial sequence
  SiRNA target sequence
gtaccgggtgatgtgattcttat

SEQ ID NO: 152245 - DNA, 23 bp, Artificial sequence
  SiRNA target sequence
taccgggtgatgtgattcttatt

SEQ ID NO: 152246 - DNA, 23 bp, Artificial sequence
  SiRNA target sequence
accgggtgatgtgattcttattg

SEQ ID NO: 152247 - DNA, 23 bp, Artificial sequence
  SiRNA target sequence
ccgggtgatgtgattcttattgt

SEQ ID NO: 152248 - DNA, 23 bp, Artificial sequence
  SiRNA target sequence
cgggtgatgtgattcttattgta

SEQ ID NO: 152249 - DNA, 23 bp, Artificial sequence
  SiRNA target sequence
gggtgatgtgattcttattgtaa

SEQ ID NO: 152250 - DNA, 23 bp, Artificial sequence
  SiRNA target sequence
ggtgatgtgattcttattgtaaa

SEQ ID NO: 152251 - DNA, 23 bp, Artificial sequence
  SiRNA target sequence
gtgatgtgattcttattgtaaac

SEQ ID NO: 152252 - DNA, 23 bp, Artificial sequence
  SiRNA target sequence
tgatgtgattcttattgtaaaca

SEQ ID NO: 152253 - DNA, 23 bp, Artificial sequence
  SiRNA target sequence
gatgtgattcttattgtaaacat

SEQ ID NO: 152254 - DNA, 23 bp, Artificial sequence
  SiRNA target sequence
atgtgattcttattgtaaacatt

SEQ ID NO: 152255 - DNA, 23 bp, Artificial sequence
  SiRNA target sequence
tgtgattcttattgtaaacatta

SEQ ID NO: 152256 - DNA, 23 bp, Artificial sequence
  SiRNA target sequence
gtgattcttattgtaaacattac

SEQ ID NO: 152257 - DNA, 23 bp, Artificial sequence
  SiRNA target sequence
tgattcttattgtaaacattaca

SEQ ID NO: 152258 - DNA, 23 bp, Artificial sequence
  SiRNA target sequence
gattcttattgtaaacattacaa

SEQ ID NO: 152259 - DNA, 23 bp, Artificial sequence
  SiRNA target sequence
attcttattgtaaacattacaaa

SEQ ID NO: 152260 - DNA, 23 bp, Artificial sequence
  SiRNA target sequence
ttcttattgtaaacattacaaat

SEQ ID NO: 152261 - DNA, 23 bp, Artificial sequence
  SiRNA target sequence
tcttattgtaaacattacaaatg

SEQ ID NO: 152262 - DNA, 23 bp, Artificial sequence
  SiRNA target sequence
cttattgtaaacattacaaatga

SEQ ID NO: 152263 - DNA, 23 bp, Artificial sequence
  SiRNA target sequence
ttattgtaaacattacaaatgat

SEQ ID NO: 152264 - DNA, 23 bp, Artificial sequence
  SiRNA target sequence
tattgtaaacattacaaatgatc

SEQ ID NO: 152265 - DNA, 23 bp, Artificial sequence
  SiRNA target sequence
attgtaaacattacaaatgatcc

SEQ ID NO: 152266 - DNA, 23 bp, Artificial sequence
  SiRNA target sequence
ttgtaaacattacaaatgatcca

SEQ ID NO: 152267 - DNA, 23 bp, Artificial sequence
  SiRNA target sequence
tgtaaacattacaaatgatccaa

SEQ ID NO: 152268 - DNA, 23 bp, Artificial sequence
  SiRNA target sequence
gtaaacattacaaatgatccaag

SEQ ID NO: 152269 - DNA, 23 bp, Artificial sequence
  SiRNA target sequence
taaacattacaaatgatccaaga

SEQ ID NO: 152270 - DNA, 23 bp, Artificial sequence
  SiRNA target sequence
aaacattacaaatgatccaagat

SEQ ID NO: 152271 - DNA, 23 bp, Artificial sequence
  SiRNA target sequence
aacattacaaatgatccaagatt

SEQ ID NO: 152272 - DNA, 23 bp, Artificial sequence
  SiRNA target sequence
acattacaaatgatccaagattt

SEQ ID NO: 152273 - DNA, 23 bp, Artificial sequence
  SiRNA target sequence
cattacaaatgatccaagattta

SEQ ID NO: 152274 - DNA, 23 bp, Artificial sequence
  SiRNA target sequence
attacaaatgatccaagatttag

SEQ ID NO: 152275 - DNA, 23 bp, Artificial sequence
  SiRNA target sequence
ttacaaatgatccaagatttaga

SEQ ID NO: 152276 - DNA, 23 bp, Artificial sequence
  SiRNA target sequence
tacaaatgatccaagatttagaa

SEQ ID NO: 152277 - DNA, 23 bp, Artificial sequence
  SiRNA target sequence
acaaatgatccaagatttagaaa

SEQ ID NO: 152278 - DNA, 23 bp, Artificial sequence
  SiRNA target sequence
caaatgatccaagatttagaaaa

SEQ ID NO: 152279 - DNA, 23 bp, Artificial sequence
  SiRNA target sequence
aaatgatccaagatttagaaaaa

SEQ ID NO: 152280 - DNA, 23 bp, Artificial sequence
  SiRNA target sequence
aatgatccaagatttagaaaaag

SEQ ID NO: 152281 - DNA, 23 bp, Artificial sequence
  SiRNA target sequence
atgatccaagatttagaaaaagt

SEQ ID NO: 152282 - DNA, 23 bp, Artificial sequence
  SiRNA target sequence
tgatccaagatttagaaaaagtg

SEQ ID NO: 152283 - DNA, 23 bp, Artificial sequence
  SiRNA target sequence
gatccaagatttagaaaaagtgg

SEQ ID NO: 152284 - DNA, 23 bp, Artificial sequence
  SiRNA target sequence
atccaagatttagaaaaagtgga

SEQ ID NO: 152285 - DNA, 23 bp, Artificial sequence
  SiRNA target sequence
tccaagatttagaaaaagtggat

SEQ ID NO: 152286 - DNA, 23 bp, Artificial sequence
  SiRNA target sequence
ccaagatttagaaaaagtggata

SEQ ID NO: 152287 - DNA, 23 bp, Artificial sequence
  SiRNA target sequence
caagatttagaaaaagtggatat

SEQ ID NO: 152288 - DNA, 23 bp, Artificial sequence
  SiRNA target sequence
aagatttagaaaaagtggatata

SEQ ID NO: 152289 - DNA, 23 bp, Artificial sequence
  SiRNA target sequence
agatttagaaaaagtggatataa

SEQ ID NO: 152290 - DNA, 23 bp, Artificial sequence
  SiRNA target sequence
gatttagaaaaagtggatataat

SEQ ID NO: 152291 - DNA, 23 bp, Artificial sequence
  SiRNA target sequence
atttagaaaaagtggatataatt

SEQ ID NO: 152292 - DNA, 23 bp, Artificial sequence
  SiRNA target sequence
tttagaaaaagtggatataattt

SEQ ID NO: 152293 - DNA, 23 bp, Artificial sequence
  SiRNA target sequence
ttagaaaaagtggatataattta

SEQ ID NO: 152294 - DNA, 23 bp, Artificial sequence
  SiRNA target sequence
tagaaaaagtggatataatttaa

SEQ ID NO: 152295 - DNA, 23 bp, Artificial sequence
  SiRNA target sequence
agaaaaagtggatataatttaat

SEQ ID NO: 152296 - DNA, 23 bp, Artificial sequence
  SiRNA target sequence
gaaaaagtggatataatttaatt

SEQ ID NO: 152297 - DNA, 23 bp, Artificial sequence
  SiRNA target sequence
aaaaagtggatataatttaatta

SEQ ID NO: 152298 - DNA, 23 bp, Artificial sequence
  SiRNA target sequence
aaaagtggatataatttaattag

SEQ ID NO: 152299 - DNA, 23 bp, Artificial sequence
  SiRNA target sequence
aaagtggatataatttaattagt

SEQ ID NO: 152300 - DNA, 23 bp, Artificial sequence
  SiRNA target sequence
aagtggatataatttaattagta

SEQ ID NO: 152301 - DNA, 23 bp, Artificial sequence
  SiRNA target sequence
agtggatataatttaattagtaa

SEQ ID NO: 152302 - DNA, 23 bp, Artificial sequence
  SiRNA target sequence
gtggatataatttaattagtaag

SEQ ID NO: 152303 - DNA, 23 bp, Artificial sequence
  SiRNA target sequence
tggatataatttaattagtaagg

SEQ ID NO: 152304 - DNA, 23 bp, Artificial sequence
  SiRNA target sequence
ggatataatttaattagtaaggt

SEQ ID NO: 152305 - DNA, 23 bp, Artificial sequence
  SiRNA target sequence
gatataatttaattagtaaggtt

SEQ ID NO: 152306 - DNA, 23 bp, Artificial sequence
  SiRNA target sequence
atataatttaattagtaaggttg

SEQ ID NO: 152307 - DNA, 23 bp, Artificial sequence
  SiRNA target sequence
tataatttaattagtaaggttga

SEQ ID NO: 152308 - DNA, 23 bp, Artificial sequence
  SiRNA target sequence
ataatttaattagtaaggttgat

SEQ ID NO: 152309 - DNA, 23 bp, Artificial sequence
  SiRNA target sequence
taatttaattagtaaggttgata

SEQ ID NO: 152310 - DNA, 23 bp, Artificial sequence
  SiRNA target sequence
aatttaattagtaaggttgatat

SEQ ID NO: 152311 - DNA, 23 bp, Artificial sequence
  SiRNA target sequence
atttaattagtaaggttgatatt

SEQ ID NO: 152312 - DNA, 23 bp, Artificial sequence
  SiRNA target sequence
tttaattagtaaggttgatattc

SEQ ID NO: 152313 - DNA, 23 bp, Artificial sequence
  SiRNA target sequence
ttaattagtaaggttgatattcc

SEQ ID NO: 152314 - DNA, 23 bp, Artificial sequence
  SiRNA target sequence
taattagtaaggttgatattcca

SEQ ID NO: 152315 - DNA, 23 bp, Artificial sequence
  SiRNA target sequence
aattagtaaggttgatattccat

SEQ ID NO: 152316 - DNA, 23 bp, Artificial sequence
  SiRNA target sequence
attagtaaggttgatattccatt

SEQ ID NO: 152317 - DNA, 23 bp, Artificial sequence
  SiRNA target sequence
ttagtaaggttgatattccattg

SEQ ID NO: 152318 - DNA, 23 bp, Artificial sequence
  SiRNA target sequence
tagtaaggttgatattccattgt

SEQ ID NO: 152319 - DNA, 23 bp, Artificial sequence
  SiRNA target sequence
agtaaggttgatattccattgta

SEQ ID NO: 152320 - DNA, 23 bp, Artificial sequence
  SiRNA target sequence
gtaaggttgatattccattgtat

SEQ ID NO: 152321 - DNA, 23 bp, Artificial sequence
  SiRNA target sequence
taaggttgatattccattgtatg

SEQ ID NO: 152322 - DNA, 23 bp, Artificial sequence
  SiRNA target sequence
aaggttgatattccattgtatgt

SEQ ID NO: 152323 - DNA, 23 bp, Artificial sequence
  SiRNA target sequence
aggttgatattccattgtatgtt

SEQ ID NO: 152324 - DNA, 23 bp, Artificial sequence
  SiRNA target sequence
ggttgatattccattgtatgttg

SEQ ID NO: 152325 - DNA, 23 bp, Artificial sequence
  SiRNA target sequence
gttgatattccattgtatgttgc

SEQ ID NO: 152326 - DNA, 23 bp, Artificial sequence
  SiRNA target sequence
ttgatattccattgtatgttgct

SEQ ID NO: 152327 - DNA, 23 bp, Artificial sequence
  SiRNA target sequence
tgatattccattgtatgttgctt

SEQ ID NO: 152328 - DNA, 23 bp, Artificial sequence
  SiRNA target sequence
gatattccattgtatgttgcttt

SEQ ID NO: 152329 - DNA, 23 bp, Artificial sequence
  SiRNA target sequence
atattccattgtatgttgctttg

SEQ ID NO: 152330 - DNA, 23 bp, Artificial sequence
  SiRNA target sequence
tattccattgtatgttgctttgg

SEQ ID NO: 152331 - DNA, 23 bp, Artificial sequence
  SiRNA target sequence
attccattgtatgttgctttggc

SEQ ID NO: 152332 - DNA, 23 bp, Artificial sequence
  SiRNA target sequence
ttccattgtatgttgctttggca

SEQ ID NO: 152333 - DNA, 23 bp, Artificial sequence
  SiRNA target sequence
tccattgtatgttgctttggcag

SEQ ID NO: 152334 - DNA, 23 bp, Artificial sequence
  SiRNA target sequence
ccattgtatgttgctttggcagg

SEQ ID NO: 152335 - DNA, 23 bp, Artificial sequence
  SiRNA target sequence
cattgtatgttgctttggcaggc

SEQ ID NO: 152336 - DNA, 23 bp, Artificial sequence
  SiRNA target sequence
attgtatgttgctttggcaggcg

SEQ ID NO: 152337 - DNA, 23 bp, Artificial sequence
  SiRNA target sequence
ttgtatgttgctttggcaggcgg

SEQ ID NO: 152338 - DNA, 23 bp, Artificial sequence
  SiRNA target sequence
tgtatgttgctttggcaggcgga

SEQ ID NO: 152339 - DNA, 23 bp, Artificial sequence
  SiRNA target sequence
gtatgttgctttggcaggcggac

SEQ ID NO: 152340 - DNA, 23 bp, Artificial sequence
  SiRNA target sequence
tatgttgctttggcaggcggaca

SEQ ID NO: 152341 - DNA, 23 bp, Artificial sequence
  SiRNA target sequence
atgttgctttggcaggcggacag

SEQ ID NO: 152342 - DNA, 23 bp, Artificial sequence
  SiRNA target sequence
tgttgctttggcaggcggacaga

SEQ ID NO: 152343 - DNA, 23 bp, Artificial sequence
  SiRNA target sequence
gttgctttggcaggcggacagat

SEQ ID NO: 152344 - DNA, 23 bp, Artificial sequence
  SiRNA target sequence
ttgctttggcaggcggacagatt

SEQ ID NO: 152345 - DNA, 23 bp, Artificial sequence
  SiRNA target sequence
tgctttggcaggcggacagatta

SEQ ID NO: 152346 - DNA, 23 bp, Artificial sequence
  SiRNA target sequence
gctttggcaggcggacagattat

SEQ ID NO: 152347 - DNA, 23 bp, Artificial sequence
  SiRNA target sequence
ctttggcaggcggacagattata

SEQ ID NO: 152348 - DNA, 23 bp, Artificial sequence
  SiRNA target sequence
tttggcaggcggacagattatat

SEQ ID NO: 152349 - DNA, 23 bp, Artificial sequence
  SiRNA target sequence
ttggcaggcggacagattatatt

SEQ ID NO: 152350 - DNA, 23 bp, Artificial sequence
  SiRNA target sequence
tggcaggcggacagattatattt

SEQ ID NO: 152351 - DNA, 23 bp, Artificial sequence
  SiRNA target sequence
ggcaggcggacagattatatttg

SEQ ID NO: 152352 - DNA, 23 bp, Artificial sequence
  SiRNA target sequence
gcaggcggacagattatatttga

SEQ ID NO: 152353 - DNA, 23 bp, Artificial sequence
  SiRNA target sequence
caggcggacagattatatttgaa

SEQ ID NO: 152354 - DNA, 23 bp, Artificial sequence
  SiRNA target sequence
aggcggacagattatatttgaac

SEQ ID NO: 152355 - DNA, 23 bp, Artificial sequence
  SiRNA target sequence
ggcggacagattatatttgaaca

SEQ ID NO: 152356 - DNA, 23 bp, Artificial sequence
  SiRNA target sequence
gcggacagattatatttgaacat

SEQ ID NO: 152357 - DNA, 23 bp, Artificial sequence
  SiRNA target sequence
cggacagattatatttgaacata

SEQ ID NO: 152358 - DNA, 23 bp, Artificial sequence
  SiRNA target sequence
ggacagattatatttgaacatat

SEQ ID NO: 152359 - DNA, 23 bp, Artificial sequence
  SiRNA target sequence
gacagattatatttgaacatatc

SEQ ID NO: 152360 - DNA, 23 bp, Artificial sequence
  SiRNA target sequence
acagattatatttgaacatatca

SEQ ID NO: 152361 - DNA, 23 bp, Artificial sequence
  SiRNA target sequence
cagattatatttgaacatatcac

SEQ ID NO: 152362 - DNA, 23 bp, Artificial sequence
  SiRNA target sequence
agattatatttgaacatatcact

SEQ ID NO: 152363 - DNA, 23 bp, Artificial sequence
  SiRNA target sequence
gattatatttgaacatatcactg

SEQ ID NO: 152364 - DNA, 23 bp, Artificial sequence
  SiRNA target sequence
attatatttgaacatatcactgg

SEQ ID NO: 152365 - DNA, 23 bp, Artificial sequence
  SiRNA target sequence
ttatatttgaacatatcactggt

SEQ ID NO: 152366 - DNA, 23 bp, Artificial sequence
  SiRNA target sequence
tatatttgaacatatcactggta

SEQ ID NO: 152367 - DNA, 23 bp, Artificial sequence
  SiRNA target sequence
atatttgaacatatcactggtaa

SEQ ID NO: 152368 - DNA, 23 bp, Artificial sequence
  SiRNA target sequence
tatttgaacatatcactggtaag

SEQ ID NO: 152369 - DNA, 23 bp, Artificial sequence
  SiRNA target sequence
atttgaacatatcactggtaaga

SEQ ID NO: 152370 - DNA, 23 bp, Artificial sequence
  SiRNA target sequence
tttgaacatatcactggtaagaa

SEQ ID NO: 152371 - DNA, 23 bp, Artificial sequence
  SiRNA target sequence
ttgaacatatcactggtaagaaa

SEQ ID NO: 152372 - DNA, 23 bp, Artificial sequence
  SiRNA target sequence
tgaacatatcactggtaagaaat

SEQ ID NO: 152373 - DNA, 23 bp, Artificial sequence
  SiRNA target sequence
gaacatatcactggtaagaaatt

SEQ ID NO: 152374 - DNA, 23 bp, Artificial sequence
  SiRNA target sequence
aacatatcactggtaagaaattt

SEQ ID NO: 152375 - DNA, 23 bp, Artificial sequence
  SiRNA target sequence
acatatcactggtaagaaatttg

SEQ ID NO: 152376 - DNA, 23 bp, Artificial sequence
  SiRNA target sequence
catatcactggtaagaaatttga

SEQ ID NO: 152377 - DNA, 23 bp, Artificial sequence
  SiRNA target sequence
atatcactggtaagaaatttgaa

SEQ ID NO: 152378 - DNA, 23 bp, Artificial sequence
  SiRNA target sequence
tatcactggtaagaaatttgaaa

SEQ ID NO: 152379 - DNA, 23 bp, Artificial sequence
  SiRNA target sequence
atcactggtaagaaatttgaaat

SEQ ID NO: 152380 - DNA, 23 bp, Artificial sequence
  SiRNA target sequence
tcactggtaagaaatttgaaatt

SEQ ID NO: 152381 - DNA, 23 bp, Artificial sequence
  SiRNA target sequence
cactggtaagaaatttgaaatta

SEQ ID NO: 152382 - DNA, 23 bp, Artificial sequence
  SiRNA target sequence
actggtaagaaatttgaaattac

SEQ ID NO: 152383 - DNA, 23 bp, Artificial sequence
  SiRNA target sequence
ctggtaagaaatttgaaattact

SEQ ID NO: 152384 - DNA, 23 bp, Artificial sequence
  SiRNA target sequence
tggtaagaaatttgaaattactt

SEQ ID NO: 152385 - DNA, 23 bp, Artificial sequence
  SiRNA target sequence
ggtaagaaatttgaaattacttt

SEQ ID NO: 152386 - DNA, 23 bp, Artificial sequence
  SiRNA target sequence
gtaagaaatttgaaattacttta

SEQ ID NO: 152387 - DNA, 23 bp, Artificial sequence
  SiRNA target sequence
taagaaatttgaaattactttat

SEQ ID NO: 152388 - DNA, 23 bp, Artificial sequence
  SiRNA target sequence
aagaaatttgaaattactttata

SEQ ID NO: 152389 - DNA, 23 bp, Artificial sequence
  SiRNA target sequence
agaaatttgaaattactttatat

SEQ ID NO: 152390 - DNA, 23 bp, Artificial sequence
  SiRNA target sequence
gaaatttgaaattactttatatc

SEQ ID NO: 152391 - DNA, 23 bp, Artificial sequence
  SiRNA target sequence
aaatttgaaattactttatatcc

SEQ ID NO: 152392 - DNA, 23 bp, Artificial sequence
  SiRNA target sequence
aatttgaaattactttatatcca

SEQ ID NO: 152393 - DNA, 23 bp, Artificial sequence
  SiRNA target sequence
atttgaaattactttatatccat

SEQ ID NO: 152394 - DNA, 23 bp, Artificial sequence
  SiRNA target sequence
tttgaaattactttatatccatt

SEQ ID NO: 152395 - DNA, 23 bp, Artificial sequence
  SiRNA target sequence
ttgaaattactttatatccattt

SEQ ID NO: 152396 - DNA, 23 bp, Artificial sequence
  SiRNA target sequence
tgaaattactttatatccattta

SEQ ID NO: 152397 - DNA, 23 bp, Artificial sequence
  SiRNA target sequence
gaaattactttatatccatttaa

SEQ ID NO: 152398 - DNA, 23 bp, Artificial sequence
  SiRNA target sequence
aaattactttatatccatttaaa

SEQ ID NO: 152399 - DNA, 23 bp, Artificial sequence
  SiRNA target sequence
aattactttatatccatttaaag

SEQ ID NO: 152400 - DNA, 23 bp, Artificial sequence
  SiRNA target sequence
attactttatatccatttaaaga

SEQ ID NO: 152401 - DNA, 23 bp, Artificial sequence
  SiRNA target sequence
ttactttatatccatttaaagat

SEQ ID NO: 152402 - DNA, 23 bp, Artificial sequence
  SiRNA target sequence
tactttatatccatttaaagatt

SEQ ID NO: 152403 - DNA, 23 bp, Artificial sequence
  SiRNA target sequence
actttatatccatttaaagattt

SEQ ID NO: 152404 - DNA, 23 bp, Artificial sequence
  SiRNA target sequence
ctttatatccatttaaagattta

SEQ ID NO: 152405 - DNA, 23 bp, Artificial sequence
  SiRNA target sequence
tttatatccatttaaagatttaa

SEQ ID NO: 152406 - DNA, 23 bp, Artificial sequence
  SiRNA target sequence
ttatatccatttaaagatttaaa

SEQ ID NO: 152407 - DNA, 23 bp, Artificial sequence
  SiRNA target sequence
tatatccatttaaagatttaaag

SEQ ID NO: 152408 - DNA, 23 bp, Artificial sequence
  SiRNA target sequence
atatccatttaaagatttaaaga

SEQ ID NO: 152409 - DNA, 23 bp, Artificial sequence
  SiRNA target sequence
tatccatttaaagatttaaagaa

SEQ ID NO: 152410 - DNA, 23 bp, Artificial sequence
  SiRNA target sequence
atccatttaaagatttaaagaaa

SEQ ID NO: 152411 - DNA, 23 bp, Artificial sequence
  SiRNA target sequence
tccatttaaagatttaaagaaat

SEQ ID NO: 152412 - DNA, 23 bp, Artificial sequence
  SiRNA target sequence
ccatttaaagatttaaagaaatg

SEQ ID NO: 152413 - DNA, 23 bp, Artificial sequence
  SiRNA target sequence
catttaaagatttaaagaaatgt

SEQ ID NO: 152414 - DNA, 23 bp, Artificial sequence
  SiRNA target sequence
atttaaagatttaaagaaatgta

SEQ ID NO: 152415 - DNA, 23 bp, Artificial sequence
  SiRNA target sequence
tttaaagatttaaagaaatgtat

SEQ ID NO: 152416 - DNA, 23 bp, Artificial sequence
  SiRNA target sequence
ttaaagatttaaagaaatgtatt

SEQ ID NO: 152417 - DNA, 23 bp, Artificial sequence
  SiRNA target sequence
taaagatttaaagaaatgtatta

SEQ ID NO: 152418 - DNA, 23 bp, Artificial sequence
  SiRNA target sequence
aaagatttaaagaaatgtattat

SEQ ID NO: 152419 - DNA, 23 bp, Artificial sequence
  SiRNA target sequence
aagatttaaagaaatgtattatt

SEQ ID NO: 152420 - DNA, 23 bp, Artificial sequence
  SiRNA target sequence
agatttaaagaaatgtattattt

SEQ ID NO: 152421 - DNA, 23 bp, Artificial sequence
  SiRNA target sequence
gatttaaagaaatgtattatttt

SEQ ID NO: 152422 - DNA, 23 bp, Artificial sequence
  SiRNA target sequence
atttaaagaaatgtattatttta

SEQ ID NO: 152423 - DNA, 23 bp, Artificial sequence
  SiRNA target sequence
tttaaagaaatgtattattttaa

SEQ ID NO: 152424 - DNA, 23 bp, Artificial sequence
  SiRNA target sequence
ttaaagaaatgtattattttaaa

SEQ ID NO: 152425 - DNA, 23 bp, Artificial sequence
  SiRNA target sequence
taaagaaatgtattattttaaaa

SEQ ID NO: 152426 - DNA, 23 bp, Artificial sequence
  SiRNA target sequence
aaagaaatgtattattttaaaag

SEQ ID NO: 152427 - DNA, 23 bp, Artificial sequence
  SiRNA target sequence
aagaaatgtattattttaaaagg

SEQ ID NO: 152428 - DNA, 23 bp, Artificial sequence
  SiRNA target sequence
agaaatgtattattttaaaaggc

SEQ ID NO: 152429 - DNA, 23 bp, Artificial sequence
  SiRNA target sequence
gaaatgtattattttaaaaggcg

SEQ ID NO: 152430 - DNA, 23 bp, Artificial sequence
  SiRNA target sequence
aaatgtattattttaaaaggcga

SEQ ID NO: 152431 - DNA, 23 bp, Artificial sequence
  SiRNA target sequence
aatgtattattttaaaaggcgaa

SEQ ID NO: 152432 - DNA, 23 bp, Artificial sequence
  SiRNA target sequence
atgtattattttaaaaggcgaag

SEQ ID NO: 152433 - DNA, 23 bp, Artificial sequence
  SiRNA target sequence
tgtattattttaaaaggcgaagg

SEQ ID NO: 152434 - DNA, 23 bp, Artificial sequence
  SiRNA target sequence
gtattattttaaaaggcgaaggt

SEQ ID NO: 152435 - DNA, 23 bp, Artificial sequence
  SiRNA target sequence
tattattttaaaaggcgaaggtt

SEQ ID NO: 152436 - DNA, 23 bp, Artificial sequence
  SiRNA target sequence
attattttaaaaggcgaaggttt

SEQ ID NO: 152437 - DNA, 23 bp, Artificial sequence
  SiRNA target sequence
ttattttaaaaggcgaaggtttt

SEQ ID NO: 152438 - DNA, 23 bp, Artificial sequence
  SiRNA target sequence
tattttaaaaggcgaaggtttta

SEQ ID NO: 152439 - DNA, 23 bp, Artificial sequence
  SiRNA target sequence
attttaaaaggcgaaggttttaa

SEQ ID NO: 152440 - DNA, 23 bp, Artificial sequence
  SiRNA target sequence
ttttaaaaggcgaaggttttaaa

SEQ ID NO: 152441 - DNA, 23 bp, Artificial sequence
  SiRNA target sequence
tttaaaaggcgaaggttttaaaa

SEQ ID NO: 152442 - DNA, 23 bp, Artificial sequence
  SiRNA target sequence
ttaaaaggcgaaggttttaaaat

SEQ ID NO: 152443 - DNA, 23 bp, Artificial sequence
  SiRNA target sequence
taaaaggcgaaggttttaaaata

SEQ ID NO: 152444 - DNA, 23 bp, Artificial sequence
  SiRNA target sequence
aaaaggcgaaggttttaaaataa

SEQ ID NO: 152445 - DNA, 23 bp, Artificial sequence
  SiRNA target sequence
aaaggcgaaggttttaaaataaa

SEQ ID NO: 152446 - DNA, 23 bp, Artificial sequence
  SiRNA target sequence
aaggcgaaggttttaaaataaaa

SEQ ID NO: 152447 - DNA, 23 bp, Artificial sequence
  SiRNA target sequence
aggcgaaggttttaaaataaaaa

SEQ ID NO: 152448 - DNA, 23 bp, Artificial sequence
  SiRNA target sequence
ggcgaaggttttaaaataaaaaa

SEQ ID NO: 152449 - DNA, 23 bp, Artificial sequence
  SiRNA target sequence
gcgaaggttttaaaataaaaaat

SEQ ID NO: 152450 - DNA, 23 bp, Artificial sequence
  SiRNA target sequence
cgaaggttttaaaataaaaaata

SEQ ID NO: 152451 - DNA, 23 bp, Artificial sequence
  SiRNA target sequence
gaaggttttaaaataaaaaatag

SEQ ID NO: 152452 - DNA, 23 bp, Artificial sequence
  SiRNA target sequence
aaggttttaaaataaaaaatagt

SEQ ID NO: 152453 - DNA, 23 bp, Artificial sequence
  SiRNA target sequence
aggttttaaaataaaaaatagtt

SEQ ID NO: 152454 - DNA, 23 bp, Artificial sequence
  SiRNA target sequence
ggttttaaaataaaaaatagtta

SEQ ID NO: 152455 - DNA, 23 bp, Artificial sequence
  SiRNA target sequence
gttttaaaataaaaaatagttat

SEQ ID NO: 152456 - DNA, 23 bp, Artificial sequence
  SiRNA target sequence
ttttaaaataaaaaatagttatt

SEQ ID NO: 152457 - DNA, 23 bp, Artificial sequence
  SiRNA target sequence
tttaaaataaaaaatagttattc

SEQ ID NO: 152458 - DNA, 23 bp, Artificial sequence
  SiRNA target sequence
ttaaaataaaaaatagttattcg

SEQ ID NO: 152459 - DNA, 23 bp, Artificial sequence
  SiRNA target sequence
taaaataaaaaatagttattcgg

SEQ ID NO: 152460 - DNA, 23 bp, Artificial sequence
  SiRNA target sequence
aaaataaaaaatagttattcggg

SEQ ID NO: 152461 - DNA, 23 bp, Artificial sequence
  SiRNA target sequence
aaataaaaaatagttattcgggt

SEQ ID NO: 152462 - DNA, 23 bp, Artificial sequence
  SiRNA target sequence
aataaaaaatagttattcgggtg

SEQ ID NO: 152463 - DNA, 23 bp, Artificial sequence
  SiRNA target sequence
ataaaaaatagttattcgggtgg

SEQ ID NO: 152464 - DNA, 23 bp, Artificial sequence
  SiRNA target sequence
taaaaaatagttattcgggtggt

SEQ ID NO: 152465 - DNA, 23 bp, Artificial sequence
  SiRNA target sequence
aaaaaatagttattcgggtggtg

SEQ ID NO: 152466 - DNA, 23 bp, Artificial sequence
  SiRNA target sequence
aaaaatagttattcgggtggtga

SEQ ID NO: 152467 - DNA, 23 bp, Artificial sequence
  SiRNA target sequence
aaaatagttattcgggtggtgat

SEQ ID NO: 152468 - DNA, 23 bp, Artificial sequence
  SiRNA target sequence
aaatagttattcgggtggtgatc

SEQ ID NO: 152469 - DNA, 23 bp, Artificial sequence
  SiRNA target sequence
aatagttattcgggtggtgatct

SEQ ID NO: 152470 - DNA, 23 bp, Artificial sequence
  SiRNA target sequence
atagttattcgggtggtgatctt

SEQ ID NO: 152471 - DNA, 23 bp, Artificial sequence
  SiRNA target sequence
tagttattcgggtggtgatctta

SEQ ID NO: 152472 - DNA, 23 bp, Artificial sequence
  SiRNA target sequence
agttattcgggtggtgatcttat

SEQ ID NO: 152473 - DNA, 23 bp, Artificial sequence
  SiRNA target sequence
gttattcgggtggtgatcttatt

SEQ ID NO: 152474 - DNA, 23 bp, Artificial sequence
  SiRNA target sequence
ttattcgggtggtgatcttattc

SEQ ID NO: 152475 - DNA, 23 bp, Artificial sequence
  SiRNA target sequence
tattcgggtggtgatcttattct

SEQ ID NO: 152476 - DNA, 23 bp, Artificial sequence
  SiRNA target sequence
attcgggtggtgatcttattctc

SEQ ID NO: 152477 - DNA, 23 bp, Artificial sequence
  SiRNA target sequence
ttcgggtggtgatcttattctcg

SEQ ID NO: 152478 - DNA, 23 bp, Artificial sequence
  SiRNA target sequence
tcgggtggtgatcttattctcga

SEQ ID NO: 152479 - DNA, 23 bp, Artificial sequence
  SiRNA target sequence
cgggtggtgatcttattctcgaa

SEQ ID NO: 152480 - DNA, 23 bp, Artificial sequence
  SiRNA target sequence
gggtggtgatcttattctcgaac

SEQ ID NO: 152481 - DNA, 23 bp, Artificial sequence
  SiRNA target sequence
ggtggtgatcttattctcgaacc

SEQ ID NO: 152482 - DNA, 23 bp, Artificial sequence
  SiRNA target sequence
gtggtgatcttattctcgaacct

SEQ ID NO: 152483 - DNA, 23 bp, Artificial sequence
  SiRNA target sequence
tggtgatcttattctcgaaccta

SEQ ID NO: 152484 - DNA, 23 bp, Artificial sequence
  SiRNA target sequence
ggtgatcttattctcgaacctaa

SEQ ID NO: 152485 - DNA, 23 bp, Artificial sequence
  SiRNA target sequence
gtgatcttattctcgaacctaat

SEQ ID NO: 152486 - DNA, 23 bp, Artificial sequence
  SiRNA target sequence
tgatcttattctcgaacctaata

SEQ ID NO: 152487 - DNA, 23 bp, Artificial sequence
  SiRNA target sequence
gatcttattctcgaacctaatat

SEQ ID NO: 152488 - DNA, 23 bp, Artificial sequence
  SiRNA target sequence
atcttattctcgaacctaatata

SEQ ID NO: 152489 - DNA, 23 bp, Artificial sequence
  SiRNA target sequence
tcttattctcgaacctaatataa

SEQ ID NO: 152490 - DNA, 23 bp, Artificial sequence
  SiRNA target sequence
cttattctcgaacctaatataat

SEQ ID NO: 152491 - DNA, 23 bp, Artificial sequence
  SiRNA target sequence
ttattctcgaacctaatataatt

SEQ ID NO: 152492 - DNA, 23 bp, Artificial sequence
  SiRNA target sequence
tattctcgaacctaatataatta

SEQ ID NO: 152493 - DNA, 23 bp, Artificial sequence
  SiRNA target sequence
attctcgaacctaatataattat

SEQ ID NO: 152494 - DNA, 23 bp, Artificial sequence
  SiRNA target sequence
ttctcgaacctaatataattata

SEQ ID NO: 152495 - DNA, 23 bp, Artificial sequence
  SiRNA target sequence
tctcgaacctaatataattatag

SEQ ID NO: 152496 - DNA, 23 bp, Artificial sequence
  SiRNA target sequence
ctcgaacctaatataattataga

SEQ ID NO: 152497 - DNA, 23 bp, Artificial sequence
  SiRNA target sequence
tcgaacctaatataattatagat

SEQ ID NO: 152498 - DNA, 23 bp, Artificial sequence
  SiRNA target sequence
cgaacctaatataattatagata

SEQ ID NO: 152499 - DNA, 23 bp, Artificial sequence
  SiRNA target sequence
gaacctaatataattatagataa

SEQ ID NO: 152500 - DNA, 23 bp, Artificial sequence
  SiRNA target sequence
aacctaatataattatagataag

SEQ ID NO: 152501 - DNA, 23 bp, Artificial sequence
  SiRNA target sequence
acctaatataattatagataaga

SEQ ID NO: 152502 - DNA, 23 bp, Artificial sequence
  SiRNA target sequence
cctaatataattatagataagaa

SEQ ID NO: 152503 - DNA, 23 bp, Artificial sequence
  SiRNA target sequence
ctaatataattatagataagaat

SEQ ID NO: 152504 - DNA, 23 bp, Artificial sequence
  SiRNA target sequence
taatataattatagataagaata

SEQ ID NO: 152505 - DNA, 23 bp, Artificial sequence
  SiRNA target sequence
aatataattatagataagaatat

SEQ ID NO: 152506 - DNA, 23 bp, Artificial sequence
  SiRNA target sequence
atataattatagataagaatatt

SEQ ID NO: 152507 - DNA, 23 bp, Artificial sequence
  SiRNA target sequence
tataattatagataagaatattg

SEQ ID NO: 152508 - DNA, 23 bp, Artificial sequence
  SiRNA target sequence
ataattatagataagaatattga

SEQ ID NO: 152509 - DNA, 23 bp, Artificial sequence
  SiRNA target sequence
taattatagataagaatattgat

SEQ ID NO: 152510 - DNA, 23 bp, Artificial sequence
  SiRNA target sequence
aattatagataagaatattgata

SEQ ID NO: 152511 - DNA, 23 bp, Artificial sequence
  SiRNA target sequence
attatagataagaatattgataa

SEQ ID NO: 152512 - DNA, 23 bp, Artificial sequence
  SiRNA target sequence
ttatagataagaatattgataaa

SEQ ID NO: 152513 - DNA, 23 bp, Artificial sequence
  SiRNA target sequence
tatagataagaatattgataaag

SEQ ID NO: 152514 - DNA, 23 bp, Artificial sequence
  SiRNA target sequence
atagataagaatattgataaaga

SEQ ID NO: 152515 - DNA, 23 bp, Artificial sequence
  SiRNA target sequence
tagataagaatattgataaagat

SEQ ID NO: 152516 - DNA, 23 bp, Artificial sequence
  SiRNA target sequence
agataagaatattgataaagatt

SEQ ID NO: 152517 - DNA, 23 bp, Artificial sequence
  SiRNA target sequence
gataagaatattgataaagattt

SEQ ID NO: 152518 - DNA, 23 bp, Artificial sequence
  SiRNA target sequence
ataagaatattgataaagattta

SEQ ID NO: 152519 - DNA, 23 bp, Artificial sequence
  SiRNA target sequence
taagaatattgataaagatttat

SEQ ID NO: 152520 - DNA, 23 bp, Artificial sequence
  SiRNA target sequence
aagaatattgataaagatttatt

SEQ ID NO: 152521 - DNA, 23 bp, Artificial sequence
  SiRNA target sequence
agaatattgataaagatttatta

SEQ ID NO: 152522 - DNA, 23 bp, Artificial sequence
  SiRNA target sequence
gaatattgataaagatttattag

SEQ ID NO: 152523 - DNA, 23 bp, Artificial sequence
  SiRNA target sequence
aatattgataaagatttattagc

SEQ ID NO: 152524 - DNA, 23 bp, Artificial sequence
  SiRNA target sequence
atattgataaagatttattagca

SEQ ID NO: 152525 - DNA, 23 bp, Artificial sequence
  SiRNA target sequence
tattgataaagatttattagcac

SEQ ID NO: 152526 - DNA, 23 bp, Artificial sequence
  SiRNA target sequence
attgataaagatttattagcacg

SEQ ID NO: 152527 - DNA, 23 bp, Artificial sequence
  SiRNA target sequence
ttgataaagatttattagcacgc

SEQ ID NO: 152528 - DNA, 23 bp, Artificial sequence
  SiRNA target sequence
tgataaagatttattagcacgcg

SEQ ID NO: 152529 - DNA, 23 bp, Artificial sequence
  SiRNA target sequence
gataaagatttattagcacgcgc

SEQ ID NO: 152530 - DNA, 23 bp, Artificial sequence
  SiRNA target sequence
ataaagatttattagcacgcgcc

SEQ ID NO: 152531 - DNA, 23 bp, Artificial sequence
  SiRNA target sequence
taaagatttattagcacgcgcct

SEQ ID NO: 152532 - DNA, 23 bp, Artificial sequence
  SiRNA target sequence
aaagatttattagcacgcgcctt

SEQ ID NO: 152533 - DNA, 23 bp, Artificial sequence
  SiRNA target sequence
aagatttattagcacgcgccttg

SEQ ID NO: 152534 - DNA, 23 bp, Artificial sequence
  SiRNA target sequence
agatttattagcacgcgccttga

SEQ ID NO: 152535 - DNA, 23 bp, Artificial sequence
  SiRNA target sequence
gatttattagcacgcgccttgaa

SEQ ID NO: 152536 - DNA, 23 bp, Artificial sequence
  SiRNA target sequence
atttattagcacgcgccttgaat

SEQ ID NO: 152537 - DNA, 23 bp, Artificial sequence
  SiRNA target sequence
tttattagcacgcgccttgaatt

SEQ ID NO: 152538 - DNA, 23 bp, Artificial sequence
  SiRNA target sequence
ttattagcacgcgccttgaatta

SEQ ID NO: 152539 - DNA, 23 bp, Artificial sequence
  SiRNA target sequence
tattagcacgcgccttgaattat

SEQ ID NO: 152540 - DNA, 23 bp, Artificial sequence
  SiRNA target sequence
attagcacgcgccttgaattatg

SEQ ID NO: 152541 - DNA, 23 bp, Artificial sequence
  SiRNA target sequence
ttagcacgcgccttgaattatgt

SEQ ID NO: 152542 - DNA, 23 bp, Artificial sequence
  SiRNA target sequence
tagcacgcgccttgaattatgtt

SEQ ID NO: 152543 - DNA, 23 bp, Artificial sequence
  SiRNA target sequence
agcacgcgccttgaattatgttc

SEQ ID NO: 152544 - DNA, 23 bp, Artificial sequence
  SiRNA target sequence
gcacgcgccttgaattatgttcc

SEQ ID NO: 152545 - DNA, 23 bp, Artificial sequence
  SiRNA target sequence
cacgcgccttgaattatgttcct

SEQ ID NO: 152546 - DNA, 23 bp, Artificial sequence
  SiRNA target sequence
acgcgccttgaattatgttcctg

SEQ ID NO: 152547 - DNA, 23 bp, Artificial sequence
  SiRNA target sequence
cgcgccttgaattatgttcctgt

SEQ ID NO: 152548 - DNA, 23 bp, Artificial sequence
  SiRNA target sequence
gcgccttgaattatgttcctgta

SEQ ID NO: 152549 - DNA, 23 bp, Artificial sequence
  SiRNA target sequence
cgccttgaattatgttcctgtaa

SEQ ID NO: 152550 - DNA, 23 bp, Artificial sequence
  SiRNA target sequence
gccttgaattatgttcctgtaag

SEQ ID NO: 152551 - DNA, 23 bp, Artificial sequence
  SiRNA target sequence
ccttgaattatgttcctgtaaga

SEQ ID NO: 152552 - DNA, 23 bp, Artificial sequence
  SiRNA target sequence
cttgaattatgttcctgtaagaa

SEQ ID NO: 152553 - DNA, 23 bp, Artificial sequence
  SiRNA target sequence
ttgaattatgttcctgtaagaaa

SEQ ID NO: 152554 - DNA, 23 bp, Artificial sequence
  SiRNA target sequence
tgaattatgttcctgtaagaaaa

SEQ ID NO: 152555 - DNA, 23 bp, Artificial sequence
  SiRNA target sequence
gaattatgttcctgtaagaaaag

SEQ ID NO: 152556 - DNA, 23 bp, Artificial sequence
  SiRNA target sequence
aattatgttcctgtaagaaaaga

SEQ ID NO: 152557 - DNA, 23 bp, Artificial sequence
  SiRNA target sequence
attatgttcctgtaagaaaagat

SEQ ID NO: 152558 - DNA, 23 bp, Artificial sequence
  SiRNA target sequence
ttatgttcctgtaagaaaagatt

SEQ ID NO: 152559 - DNA, 23 bp, Artificial sequence
  SiRNA target sequence
tatgttcctgtaagaaaagattt

SEQ ID NO: 152560 - DNA, 23 bp, Artificial sequence
  SiRNA target sequence
atgttcctgtaagaaaagatttt

SEQ ID NO: 152561 - DNA, 23 bp, Artificial sequence
  SiRNA target sequence
tgttcctgtaagaaaagatttta

SEQ ID NO: 152562 - DNA, 23 bp, Artificial sequence
  SiRNA target sequence
gttcctgtaagaaaagattttac

SEQ ID NO: 152563 - DNA, 23 bp, Artificial sequence
  SiRNA target sequence
ttcctgtaagaaaagattttaca

SEQ ID NO: 152564 - DNA, 23 bp, Artificial sequence
  SiRNA target sequence
tcctgtaagaaaagattttacag

SEQ ID NO: 152565 - DNA, 23 bp, Artificial sequence
  SiRNA target sequence
cctgtaagaaaagattttacagg

SEQ ID NO: 152566 - DNA, 23 bp, Artificial sequence
  SiRNA target sequence
ctgtaagaaaagattttacagga

SEQ ID NO: 152567 - DNA, 23 bp, Artificial sequence
  SiRNA target sequence
tgtaagaaaagattttacaggaa

SEQ ID NO: 152568 - DNA, 23 bp, Artificial sequence
  SiRNA target sequence
gtaagaaaagattttacaggaac

SEQ ID NO: 152569 - DNA, 23 bp, Artificial sequence
  SiRNA target sequence
taagaaaagattttacaggaact

SEQ ID NO: 152570 - DNA, 23 bp, Artificial sequence
  SiRNA target sequence
aagaaaagattttacaggaactg

SEQ ID NO: 152571 - DNA, 23 bp, Artificial sequence
  SiRNA target sequence
agaaaagattttacaggaactgc

SEQ ID NO: 152572 - DNA, 23 bp, Artificial sequence
  SiRNA target sequence
gaaaagattttacaggaactgct

SEQ ID NO: 152573 - DNA, 23 bp, Artificial sequence
  SiRNA target sequence
aaaagattttacaggaactgctg

SEQ ID NO: 152574 - DNA, 23 bp, Artificial sequence
  SiRNA target sequence
aaagattttacaggaactgctgt

SEQ ID NO: 152575 - DNA, 23 bp, Artificial sequence
  SiRNA target sequence
aagattttacaggaactgctgtt

SEQ ID NO: 152576 - DNA, 23 bp, Artificial sequence
  SiRNA target sequence
agattttacaggaactgctgttc

SEQ ID NO: 152577 - DNA, 23 bp, Artificial sequence
  SiRNA target sequence
gattttacaggaactgctgttcc

SEQ ID NO: 152578 - DNA, 23 bp, Artificial sequence
  SiRNA target sequence
attttacaggaactgctgttcca

SEQ ID NO: 152579 - DNA, 23 bp, Artificial sequence
  SiRNA target sequence
ttttacaggaactgctgttccaa

SEQ ID NO: 152580 - DNA, 23 bp, Artificial sequence
  SiRNA target sequence
tttacaggaactgctgttccaaa

SEQ ID NO: 152581 - DNA, 23 bp, Artificial sequence
  SiRNA target sequence
ttacaggaactgctgttccaaaa

SEQ ID NO: 152582 - DNA, 23 bp, Artificial sequence
  SiRNA target sequence
tacaggaactgctgttccaaaat

SEQ ID NO: 152583 - DNA, 23 bp, Artificial sequence
  SiRNA target sequence
acaggaactgctgttccaaaata

SEQ ID NO: 152584 - DNA, 23 bp, Artificial sequence
  SiRNA target sequence
caggaactgctgttccaaaatat

SEQ ID NO: 152585 - DNA, 23 bp, Artificial sequence
  SiRNA target sequence
aggaactgctgttccaaaatatg

SEQ ID NO: 152586 - DNA, 23 bp, Artificial sequence
  SiRNA target sequence
ggaactgctgttccaaaatatgc

SEQ ID NO: 152587 - DNA, 23 bp, Artificial sequence
  SiRNA target sequence
gaactgctgttccaaaatatgca

SEQ ID NO: 152588 - DNA, 23 bp, Artificial sequence
  SiRNA target sequence
aactgctgttccaaaatatgcag

SEQ ID NO: 152589 - DNA, 23 bp, Artificial sequence
  SiRNA target sequence
actgctgttccaaaatatgcaga

SEQ ID NO: 152590 - DNA, 23 bp, Artificial sequence
  SiRNA target sequence
ctgctgttccaaaatatgcagaa

SEQ ID NO: 152591 - DNA, 23 bp, Artificial sequence
  SiRNA target sequence
tgctgttccaaaatatgcagaat

SEQ ID NO: 152592 - DNA, 23 bp, Artificial sequence
  SiRNA target sequence
gctgttccaaaatatgcagaatt

SEQ ID NO: 152593 - DNA, 23 bp, Artificial sequence
  SiRNA target sequence
ctgttccaaaatatgcagaattt

SEQ ID NO: 152594 - DNA, 23 bp, Artificial sequence
  SiRNA target sequence
tgttccaaaatatgcagaatttg

SEQ ID NO: 152595 - DNA, 23 bp, Artificial sequence
  SiRNA target sequence
gttccaaaatatgcagaatttgg

SEQ ID NO: 152596 - DNA, 23 bp, Artificial sequence
  SiRNA target sequence
ttccaaaatatgcagaatttggt

SEQ ID NO: 152597 - DNA, 23 bp, Artificial sequence
  SiRNA target sequence
tccaaaatatgcagaatttggtg

SEQ ID NO: 152598 - DNA, 23 bp, Artificial sequence
  SiRNA target sequence
ccaaaatatgcagaatttggtgt

SEQ ID NO: 152599 - DNA, 23 bp, Artificial sequence
  SiRNA target sequence
caaaatatgcagaatttggtgtt

SEQ ID NO: 152600 - DNA, 23 bp, Artificial sequence
  SiRNA target sequence
aaaatatgcagaatttggtgtta

SEQ ID NO: 152601 - DNA, 23 bp, Artificial sequence
  SiRNA target sequence
aaatatgcagaatttggtgttat

SEQ ID NO: 152602 - DNA, 23 bp, Artificial sequence
  SiRNA target sequence
aatatgcagaatttggtgttatg

SEQ ID NO: 152603 - DNA, 23 bp, Artificial sequence
  SiRNA target sequence
atatgcagaatttggtgttatgc

SEQ ID NO: 152604 - DNA, 23 bp, Artificial sequence
  SiRNA target sequence
tatgcagaatttggtgttatgcc

SEQ ID NO: 152605 - DNA, 23 bp, Artificial sequence
  SiRNA target sequence
atgcagaatttggtgttatgcct

SEQ ID NO: 152606 - DNA, 23 bp, Artificial sequence
  SiRNA target sequence
tgcagaatttggtgttatgccta

SEQ ID NO: 152607 - DNA, 23 bp, Artificial sequence
  SiRNA target sequence
gcagaatttggtgttatgcctaa

SEQ ID NO: 152608 - DNA, 23 bp, Artificial sequence
  SiRNA target sequence
cagaatttggtgttatgcctaaa

SEQ ID NO: 152609 - DNA, 23 bp, Artificial sequence
  SiRNA target sequence
agaatttggtgttatgcctaaag

SEQ ID NO: 152610 - DNA, 23 bp, Artificial sequence
  SiRNA target sequence
gaatttggtgttatgcctaaaga

SEQ ID NO: 152611 - DNA, 23 bp, Artificial sequence
  SiRNA target sequence
aatttggtgttatgcctaaagaa

SEQ ID NO: 152612 - DNA, 23 bp, Artificial sequence
  SiRNA target sequence
atttggtgttatgcctaaagaac

SEQ ID NO: 152613 - DNA, 23 bp, Artificial sequence
  SiRNA target sequence
tttggtgttatgcctaaagaaca

SEQ ID NO: 152614 - DNA, 23 bp, Artificial sequence
  SiRNA target sequence
ttggtgttatgcctaaagaacag

SEQ ID NO: 152615 - DNA, 23 bp, Artificial sequence
  SiRNA target sequence
tggtgttatgcctaaagaacagg

SEQ ID NO: 152616 - DNA, 23 bp, Artificial sequence
  SiRNA target sequence
ggtgttatgcctaaagaacagga

SEQ ID NO: 152617 - DNA, 23 bp, Artificial sequence
  SiRNA target sequence
gtgttatgcctaaagaacaggaa

SEQ ID NO: 152618 - DNA, 23 bp, Artificial sequence
  SiRNA target sequence
tgttatgcctaaagaacaggaag

SEQ ID NO: 152619 - DNA, 23 bp, Artificial sequence
  SiRNA target sequence
gttatgcctaaagaacaggaaga

SEQ ID NO: 152620 - DNA, 23 bp, Artificial sequence
  SiRNA target sequence
ttatgcctaaagaacaggaagaa

SEQ ID NO: 152621 - DNA, 23 bp, Artificial sequence
  SiRNA target sequence
tatgcctaaagaacaggaagaac

SEQ ID NO: 152622 - DNA, 23 bp, Artificial sequence
  SiRNA target sequence
atgcctaaagaacaggaagaaca

SEQ ID NO: 152623 - DNA, 23 bp, Artificial sequence
  SiRNA target sequence
tgcctaaagaacaggaagaacaa

SEQ ID NO: 152624 - DNA, 23 bp, Artificial sequence
  SiRNA target sequence
gcctaaagaacaggaagaacaaa

SEQ ID NO: 152625 - DNA, 23 bp, Artificial sequence
  SiRNA target sequence
cctaaagaacaggaagaacaaaa

SEQ ID NO: 152626 - DNA, 23 bp, Artificial sequence
  SiRNA target sequence
ctaaagaacaggaagaacaaaac

SEQ ID NO: 152627 - DNA, 23 bp, Artificial sequence
  SiRNA target sequence
taaagaacaggaagaacaaaacg

SEQ ID NO: 152628 - DNA, 23 bp, Artificial sequence
  SiRNA target sequence
aaagaacaggaagaacaaaacga

SEQ ID NO: 152629 - DNA, 23 bp, Artificial sequence
  SiRNA target sequence
aagaacaggaagaacaaaacgaa

SEQ ID NO: 152630 - DNA, 23 bp, Artificial sequence
  SiRNA target sequence
agaacaggaagaacaaaacgaaa

SEQ ID NO: 152631 - DNA, 23 bp, Artificial sequence
  SiRNA target sequence
gaacaggaagaacaaaacgaaag

SEQ ID NO: 152632 - DNA, 23 bp, Artificial sequence
  SiRNA target sequence
aacaggaagaacaaaacgaaaga

SEQ ID NO: 152633 - DNA, 23 bp, Artificial sequence
  SiRNA target sequence
acaggaagaacaaaacgaaagag

SEQ ID NO: 152634 - DNA, 23 bp, Artificial sequence
  SiRNA target sequence
caggaagaacaaaacgaaagaga

SEQ ID NO: 152635 - DNA, 23 bp, Artificial sequence
  SiRNA target sequence
aggaagaacaaaacgaaagagaa

SEQ ID NO: 152636 - DNA, 23 bp, Artificial sequence
  SiRNA target sequence
ggaagaacaaaacgaaagagaaa

SEQ ID NO: 152637 - DNA, 23 bp, Artificial sequence
  SiRNA target sequence
gaagaacaaaacgaaagagaaag

SEQ ID NO: 152638 - DNA, 23 bp, Artificial sequence
  SiRNA target sequence
aagaacaaaacgaaagagaaaga

SEQ ID NO: 152639 - DNA, 23 bp, Artificial sequence
  SiRNA target sequence
agaacaaaacgaaagagaaagat

SEQ ID NO: 152640 - DNA, 23 bp, Artificial sequence
  SiRNA target sequence
gaacaaaacgaaagagaaagatt

SEQ ID NO: 152641 - DNA, 23 bp, Artificial sequence
  SiRNA target sequence
aacaaaacgaaagagaaagattc

SEQ ID NO: 152642 - DNA, 23 bp, Artificial sequence
  SiRNA target sequence
acaaaacgaaagagaaagattcg

SEQ ID NO: 152643 - DNA, 23 bp, Artificial sequence
  SiRNA target sequence
caaaacgaaagagaaagattcga

SEQ ID NO: 152644 - DNA, 23 bp, Artificial sequence
  SiRNA target sequence
aaaacgaaagagaaagattcgaa

SEQ ID NO: 152645 - DNA, 23 bp, Artificial sequence
  SiRNA target sequence
aaacgaaagagaaagattcgaag

SEQ ID NO: 152646 - DNA, 23 bp, Artificial sequence
  SiRNA target sequence
aacgaaagagaaagattcgaagg

SEQ ID NO: 152647 - DNA, 23 bp, Artificial sequence
  SiRNA target sequence
acgaaagagaaagattcgaaggt

SEQ ID NO: 152648 - DNA, 23 bp, Artificial sequence
  SiRNA target sequence
cgaaagagaaagattcgaaggtg

SEQ ID NO: 152649 - DNA, 23 bp, Artificial sequence
  SiRNA target sequence
gaaagagaaagattcgaaggtgc

SEQ ID NO: 152650 - DNA, 23 bp, Artificial sequence
  SiRNA target sequence
aaagagaaagattcgaaggtgca

SEQ ID NO: 152651 - DNA, 23 bp, Artificial sequence
  SiRNA target sequence
aagagaaagattcgaaggtgcag

SEQ ID NO: 152652 - DNA, 23 bp, Artificial sequence
  SiRNA target sequence
agagaaagattcgaaggtgcaga

SEQ ID NO: 152653 - DNA, 23 bp, Artificial sequence
  SiRNA target sequence
gagaaagattcgaaggtgcagaa

SEQ ID NO: 152654 - DNA, 23 bp, Artificial sequence
  SiRNA target sequence
agaaagattcgaaggtgcagaag

SEQ ID NO: 152655 - DNA, 23 bp, Artificial sequence
  SiRNA target sequence
gaaagattcgaaggtgcagaaga

SEQ ID NO: 152656 - DNA, 23 bp, Artificial sequence
  SiRNA target sequence
aaagattcgaaggtgcagaagag

SEQ ID NO: 152657 - DNA, 23 bp, Artificial sequence
  SiRNA target sequence
aagattcgaaggtgcagaagagt

SEQ ID NO: 152658 - DNA, 23 bp, Artificial sequence
  SiRNA target sequence
agattcgaaggtgcagaagagtt

SEQ ID NO: 152659 - DNA, 23 bp, Artificial sequence
  SiRNA target sequence
gattcgaaggtgcagaagagttt

SEQ ID NO: 152660 - DNA, 23 bp, Artificial sequence
  SiRNA target sequence
attcgaaggtgcagaagagtttt

SEQ ID NO: 152661 - DNA, 23 bp, Artificial sequence
  SiRNA target sequence
ttcgaaggtgcagaagagttttt

SEQ ID NO: 152662 - DNA, 23 bp, Artificial sequence
  SiRNA target sequence
tcgaaggtgcagaagagtttttt

SEQ ID NO: 152663 - DNA, 23 bp, Artificial sequence
  SiRNA target sequence
cgaaggtgcagaagagttttttg

SEQ ID NO: 152664 - DNA, 23 bp, Artificial sequence
  SiRNA target sequence
gaaggtgcagaagagttttttgg

SEQ ID NO: 152665 - DNA, 23 bp, Artificial sequence
  SiRNA target sequence
aaggtgcagaagagttttttgga

SEQ ID NO: 152666 - DNA, 23 bp, Artificial sequence
  SiRNA target sequence
aggtgcagaagagttttttggag

SEQ ID NO: 152667 - DNA, 23 bp, Artificial sequence
  SiRNA target sequence
ggtgcagaagagttttttggagg

SEQ ID NO: 152668 - DNA, 23 bp, Artificial sequence
  SiRNA target sequence
gtgcagaagagttttttggagga

SEQ ID NO: 152669 - DNA, 23 bp, Artificial sequence
  SiRNA target sequence
tgcagaagagttttttggaggaa

SEQ ID NO: 152670 - DNA, 23 bp, Artificial sequence
  SiRNA target sequence
gcagaagagttttttggaggaaa

SEQ ID NO: 152671 - DNA, 23 bp, Artificial sequence
  SiRNA target sequence
cagaagagttttttggaggaaat

SEQ ID NO: 152672 - DNA, 23 bp, Artificial sequence
  SiRNA target sequence
agaagagttttttggaggaaatg

SEQ ID NO: 152673 - DNA, 23 bp, Artificial sequence
  SiRNA target sequence
gaagagttttttggaggaaatgg

SEQ ID NO: 152674 - DNA, 23 bp, Artificial sequence
  SiRNA target sequence
aagagttttttggaggaaatggt

SEQ ID NO: 152675 - DNA, 23 bp, Artificial sequence
  SiRNA target sequence
agagttttttggaggaaatggta

SEQ ID NO: 152676 - DNA, 23 bp, Artificial sequence
  SiRNA target sequence
gagttttttggaggaaatggtag

SEQ ID NO: 152677 - DNA, 23 bp, Artificial sequence
  SiRNA target sequence
agttttttggaggaaatggtaga

SEQ ID NO: 152678 - DNA, 23 bp, Artificial sequence
  SiRNA target sequence
gttttttggaggaaatggtagag

SEQ ID NO: 152679 - DNA, 23 bp, Artificial sequence
  SiRNA target sequence
ttttttggaggaaatggtagaga

SEQ ID NO: 152680 - DNA, 23 bp, Artificial sequence
  SiRNA target sequence
tttttggaggaaatggtagagat

SEQ ID NO: 152681 - DNA, 23 bp, Artificial sequence
  SiRNA target sequence
ttttggaggaaatggtagagatt

SEQ ID NO: 152682 - DNA, 23 bp, Artificial sequence
  SiRNA target sequence
tttggaggaaatggtagagattt

SEQ ID NO: 152683 - DNA, 23 bp, Artificial sequence
  SiRNA target sequence
ttggaggaaatggtagagatttt

SEQ ID NO: 152684 - DNA, 23 bp, Artificial sequence
  SiRNA target sequence
tggaggaaatggtagagattttt

SEQ ID NO: 152685 - DNA, 23 bp, Artificial sequence
  SiRNA target sequence
ggaggaaatggtagagatttttt

SEQ ID NO: 152686 - DNA, 23 bp, Artificial sequence
  SiRNA target sequence
gaggaaatggtagagattttttt

SEQ ID NO: 152687 - DNA, 23 bp, Artificial sequence
  SiRNA target sequence
aggaaatggtagagattttttta

SEQ ID NO: 152688 - DNA, 23 bp, Artificial sequence
  SiRNA target sequence
ggaaatggtagagatttttttag

SEQ ID NO: 152689 - DNA, 23 bp, Artificial sequence
  SiRNA target sequence
gaaatggtagagatttttttagc

SEQ ID NO: 152690 - DNA, 23 bp, Artificial sequence
  SiRNA target sequence
aaatggtagagatttttttagca

SEQ ID NO: 152691 - DNA, 23 bp, Artificial sequence
  SiRNA target sequence
aatggtagagatttttttagcaa

SEQ ID NO: 152692 - DNA, 23 bp, Artificial sequence
  SiRNA target sequence
atggtagagatttttttagcaag

SEQ ID NO: 152693 - DNA, 23 bp, Artificial sequence
  SiRNA target sequence
tggtagagatttttttagcaagt

SEQ ID NO: 152694 - DNA, 23 bp, Artificial sequence
  SiRNA target sequence
ggtagagatttttttagcaagtt

SEQ ID NO: 152695 - DNA, 23 bp, Artificial sequence
  SiRNA target sequence
gtagagatttttttagcaagttt

SEQ ID NO: 152696 - DNA, 23 bp, Artificial sequence
  SiRNA target sequence
tagagatttttttagcaagtttg

SEQ ID NO: 152697 - DNA, 23 bp, Artificial sequence
  SiRNA target sequence
agagatttttttagcaagtttgg

SEQ ID NO: 152698 - DNA, 23 bp, Artificial sequence
  SiRNA target sequence
gagatttttttagcaagtttgga

SEQ ID NO: 152699 - DNA, 23 bp, Artificial sequence
  SiRNA target sequence
agatttttttagcaagtttggat

SEQ ID NO: 152700 - DNA, 23 bp, Artificial sequence
  SiRNA target sequence
gatttttttagcaagtttggatt

SEQ ID NO: 152701 - DNA, 23 bp, Artificial sequence
  SiRNA target sequence
atttttttagcaagtttggattt

SEQ ID NO: 152702 - DNA, 23 bp, Artificial sequence
  SiRNA target sequence
tttttttagcaagtttggatttt

SEQ ID NO: 152703 - DNA, 23 bp, Artificial sequence
  SiRNA target sequence
ttttttagcaagtttggattttt

SEQ ID NO: 152704 - DNA, 23 bp, Artificial sequence
  SiRNA target sequence
tttttagcaagtttggatttttc

SEQ ID NO: 152705 - DNA, 23 bp, Artificial sequence
  SiRNA target sequence
ttttagcaagtttggatttttct

SEQ ID NO: 152706 - DNA, 23 bp, Artificial sequence
  SiRNA target sequence
tttagcaagtttggatttttcta

SEQ ID NO: 152707 - DNA, 23 bp, Artificial sequence
  SiRNA target sequence
ttagcaagtttggatttttctaa

SEQ ID NO: 152708 - DNA, 24 bp, Artificial sequence
  SiRNA target sequence
atggcacaagacccccaaggactt

SEQ ID NO: 152709 - DNA, 24 bp, Artificial sequence
  SiRNA target sequence
tggcacaagacccccaaggacttt

SEQ ID NO: 152710 - DNA, 24 bp, Artificial sequence
  SiRNA target sequence
ggcacaagacccccaaggacttta

SEQ ID NO: 152711 - DNA, 24 bp, Artificial sequence
  SiRNA target sequence
gcacaagacccccaaggactttat

SEQ ID NO: 152712 - DNA, 24 bp, Artificial sequence
  SiRNA target sequence
cacaagacccccaaggactttatg

SEQ ID NO: 152713 - DNA, 24 bp, Artificial sequence
  SiRNA target sequence
acaagacccccaaggactttatga

SEQ ID NO: 152714 - DNA, 24 bp, Artificial sequence
  SiRNA target sequence
caagacccccaaggactttatgaa

SEQ ID NO: 152715 - DNA, 24 bp, Artificial sequence
  SiRNA target sequence
aagacccccaaggactttatgaag

SEQ ID NO: 152716 - DNA, 24 bp, Artificial sequence
  SiRNA target sequence
agacccccaaggactttatgaagt

SEQ ID NO: 152717 - DNA, 24 bp, Artificial sequence
  SiRNA target sequence
gacccccaaggactttatgaagta

SEQ ID NO: 152718 - DNA, 24 bp, Artificial sequence
  SiRNA target sequence
acccccaaggactttatgaagtat

SEQ ID NO: 152719 - DNA, 24 bp, Artificial sequence
  SiRNA target sequence
cccccaaggactttatgaagtatt

SEQ ID NO: 152720 - DNA, 24 bp, Artificial sequence
  SiRNA target sequence
ccccaaggactttatgaagtatta

SEQ ID NO: 152721 - DNA, 24 bp, Artificial sequence
  SiRNA target sequence
cccaaggactttatgaagtattag

SEQ ID NO: 152722 - DNA, 24 bp, Artificial sequence
  SiRNA target sequence
ccaaggactttatgaagtattagg

SEQ ID NO: 152723 - DNA, 24 bp, Artificial sequence
  SiRNA target sequence
caaggactttatgaagtattagga

SEQ ID NO: 152724 - DNA, 24 bp, Artificial sequence
  SiRNA target sequence
aaggactttatgaagtattaggac

SEQ ID NO: 152725 - DNA, 24 bp, Artificial sequence
  SiRNA target sequence
aggactttatgaagtattaggact

SEQ ID NO: 152726 - DNA, 24 bp, Artificial sequence
  SiRNA target sequence
ggactttatgaagtattaggactt

SEQ ID NO: 152727 - DNA, 24 bp, Artificial sequence
  SiRNA target sequence
gactttatgaagtattaggactta

SEQ ID NO: 152728 - DNA, 24 bp, Artificial sequence
  SiRNA target sequence
actttatgaagtattaggacttaa

SEQ ID NO: 152729 - DNA, 24 bp, Artificial sequence
  SiRNA target sequence
ctttatgaagtattaggacttaaa

SEQ ID NO: 152730 - DNA, 24 bp, Artificial sequence
  SiRNA target sequence
tttatgaagtattaggacttaaag

SEQ ID NO: 152731 - DNA, 24 bp, Artificial sequence
  SiRNA target sequence
ttatgaagtattaggacttaaagc

SEQ ID NO: 152732 - DNA, 24 bp, Artificial sequence
  SiRNA target sequence
tatgaagtattaggacttaaagct

SEQ ID NO: 152733 - DNA, 24 bp, Artificial sequence
  SiRNA target sequence
atgaagtattaggacttaaagctg

SEQ ID NO: 152734 - DNA, 24 bp, Artificial sequence
  SiRNA target sequence
tgaagtattaggacttaaagctgg

SEQ ID NO: 152735 - DNA, 24 bp, Artificial sequence
  SiRNA target sequence
gaagtattaggacttaaagctggt

SEQ ID NO: 152736 - DNA, 24 bp, Artificial sequence
  SiRNA target sequence
aagtattaggacttaaagctggtg

SEQ ID NO: 152737 - DNA, 24 bp, Artificial sequence
  SiRNA target sequence
agtattaggacttaaagctggtgc

SEQ ID NO: 152738 - DNA, 24 bp, Artificial sequence
  SiRNA target sequence
gtattaggacttaaagctggtgca

SEQ ID NO: 152739 - DNA, 24 bp, Artificial sequence
  SiRNA target sequence
tattaggacttaaagctggtgcaa

SEQ ID NO: 152740 - DNA, 24 bp, Artificial sequence
  SiRNA target sequence
attaggacttaaagctggtgcaag

SEQ ID NO: 152741 - DNA, 24 bp, Artificial sequence
  SiRNA target sequence
ttaggacttaaagctggtgcaagc

SEQ ID NO: 152742 - DNA, 24 bp, Artificial sequence
  SiRNA target sequence
taggacttaaagctggtgcaagca

SEQ ID NO: 152743 - DNA, 24 bp, Artificial sequence
  SiRNA target sequence
aggacttaaagctggtgcaagcat

SEQ ID NO: 152744 - DNA, 24 bp, Artificial sequence
  SiRNA target sequence
ggacttaaagctggtgcaagcatt

SEQ ID NO: 152745 - DNA, 24 bp, Artificial sequence
  SiRNA target sequence
gacttaaagctggtgcaagcattg

SEQ ID NO: 152746 - DNA, 24 bp, Artificial sequence
  SiRNA target sequence
acttaaagctggtgcaagcattga

SEQ ID NO: 152747 - DNA, 24 bp, Artificial sequence
  SiRNA target sequence
cttaaagctggtgcaagcattgat

SEQ ID NO: 152748 - DNA, 24 bp, Artificial sequence
  SiRNA target sequence
ttaaagctggtgcaagcattgatg

SEQ ID NO: 152749 - DNA, 24 bp, Artificial sequence
  SiRNA target sequence
taaagctggtgcaagcattgatga

SEQ ID NO: 152750 - DNA, 24 bp, Artificial sequence
  SiRNA target sequence
aaagctggtgcaagcattgatgaa

SEQ ID NO: 152751 - DNA, 24 bp, Artificial sequence
  SiRNA target sequence
aagctggtgcaagcattgatgaag

SEQ ID NO: 152752 - DNA, 24 bp, Artificial sequence
  SiRNA target sequence
agctggtgcaagcattgatgaagt

SEQ ID NO: 152753 - DNA, 24 bp, Artificial sequence
  SiRNA target sequence
gctggtgcaagcattgatgaagtt

SEQ ID NO: 152754 - DNA, 24 bp, Artificial sequence
  SiRNA target sequence
ctggtgcaagcattgatgaagtta

SEQ ID NO: 152755 - DNA, 24 bp, Artificial sequence
  SiRNA target sequence
tggtgcaagcattgatgaagttaa

SEQ ID NO: 152756 - DNA, 24 bp, Artificial sequence
  SiRNA target sequence
ggtgcaagcattgatgaagttaaa

SEQ ID NO: 152757 - DNA, 24 bp, Artificial sequence
  SiRNA target sequence
gtgcaagcattgatgaagttaaaa

SEQ ID NO: 152758 - DNA, 24 bp, Artificial sequence
  SiRNA target sequence
tgcaagcattgatgaagttaaaaa

SEQ ID NO: 152759 - DNA, 24 bp, Artificial sequence
  SiRNA target sequence
gcaagcattgatgaagttaaaaaa

SEQ ID NO: 152760 - DNA, 24 bp, Artificial sequence
  SiRNA target sequence
caagcattgatgaagttaaaaaag

SEQ ID NO: 152761 - DNA, 24 bp, Artificial sequence
  SiRNA target sequence
aagcattgatgaagttaaaaaagc

SEQ ID NO: 152762 - DNA, 24 bp, Artificial sequence
  SiRNA target sequence
agcattgatgaagttaaaaaagca

SEQ ID NO: 152763 - DNA, 24 bp, Artificial sequence
  SiRNA target sequence
gcattgatgaagttaaaaaagcat

SEQ ID NO: 152764 - DNA, 24 bp, Artificial sequence
  SiRNA target sequence
cattgatgaagttaaaaaagcatt

SEQ ID NO: 152765 - DNA, 24 bp, Artificial sequence
  SiRNA target sequence
attgatgaagttaaaaaagcattt

SEQ ID NO: 152766 - DNA, 24 bp, Artificial sequence
  SiRNA target sequence
ttgatgaagttaaaaaagcattta

SEQ ID NO: 152767 - DNA, 24 bp, Artificial sequence
  SiRNA target sequence
tgatgaagttaaaaaagcatttac

SEQ ID NO: 152768 - DNA, 24 bp, Artificial sequence
  SiRNA target sequence
gatgaagttaaaaaagcatttaca

SEQ ID NO: 152769 - DNA, 24 bp, Artificial sequence
  SiRNA target sequence
atgaagttaaaaaagcatttacaa

SEQ ID NO: 152770 - DNA, 24 bp, Artificial sequence
  SiRNA target sequence
tgaagttaaaaaagcatttacaaa

SEQ ID NO: 152771 - DNA, 24 bp, Artificial sequence
  SiRNA target sequence
gaagttaaaaaagcatttacaaaa

SEQ ID NO: 152772 - DNA, 24 bp, Artificial sequence
  SiRNA target sequence
aagttaaaaaagcatttacaaaaa

SEQ ID NO: 152773 - DNA, 24 bp, Artificial sequence
  SiRNA target sequence
agttaaaaaagcatttacaaaaaa

SEQ ID NO: 152774 - DNA, 24 bp, Artificial sequence
  SiRNA target sequence
gttaaaaaagcatttacaaaaaaa

SEQ ID NO: 152775 - DNA, 24 bp, Artificial sequence
  SiRNA target sequence
ttaaaaaagcatttacaaaaaaac

SEQ ID NO: 152776 - DNA, 24 bp, Artificial sequence
  SiRNA target sequence
taaaaaagcatttacaaaaaaaca

SEQ ID NO: 152777 - DNA, 24 bp, Artificial sequence
  SiRNA target sequence
aaaaaagcatttacaaaaaaacaa

SEQ ID NO: 152778 - DNA, 24 bp, Artificial sequence
  SiRNA target sequence
aaaaagcatttacaaaaaaacaaa

SEQ ID NO: 152779 - DNA, 24 bp, Artificial sequence
  SiRNA target sequence
aaaagcatttacaaaaaaacaaag

SEQ ID NO: 152780 - DNA, 24 bp, Artificial sequence
  SiRNA target sequence
aaagcatttacaaaaaaacaaagg

SEQ ID NO: 152781 - DNA, 24 bp, Artificial sequence
  SiRNA target sequence
aagcatttacaaaaaaacaaaggg

SEQ ID NO: 152782 - DNA, 24 bp, Artificial sequence
  SiRNA target sequence
agcatttacaaaaaaacaaaggga

SEQ ID NO: 152783 - DNA, 24 bp, Artificial sequence
  SiRNA target sequence
gcatttacaaaaaaacaaagggaa

SEQ ID NO: 152784 - DNA, 24 bp, Artificial sequence
  SiRNA target sequence
catttacaaaaaaacaaagggaat

SEQ ID NO: 152785 - DNA, 24 bp, Artificial sequence
  SiRNA target sequence
atttacaaaaaaacaaagggaatg

SEQ ID NO: 152786 - DNA, 24 bp, Artificial sequence
  SiRNA target sequence
tttacaaaaaaacaaagggaatgt

SEQ ID NO: 152787 - DNA, 24 bp, Artificial sequence
  SiRNA target sequence
ttacaaaaaaacaaagggaatgtc

SEQ ID NO: 152788 - DNA, 24 bp, Artificial sequence
  SiRNA target sequence
tacaaaaaaacaaagggaatgtca

SEQ ID NO: 152789 - DNA, 24 bp, Artificial sequence
  SiRNA target sequence
acaaaaaaacaaagggaatgtcat

SEQ ID NO: 152790 - DNA, 24 bp, Artificial sequence
  SiRNA target sequence
caaaaaaacaaagggaatgtcatc

SEQ ID NO: 152791 - DNA, 24 bp, Artificial sequence
  SiRNA target sequence
aaaaaaacaaagggaatgtcatcc

SEQ ID NO: 152792 - DNA, 24 bp, Artificial sequence
  SiRNA target sequence
aaaaaacaaagggaatgtcatccc

SEQ ID NO: 152793 - DNA, 24 bp, Artificial sequence
  SiRNA target sequence
aaaaacaaagggaatgtcatcccg

SEQ ID NO: 152794 - DNA, 24 bp, Artificial sequence
  SiRNA target sequence
aaaacaaagggaatgtcatcccga

SEQ ID NO: 152795 - DNA, 24 bp, Artificial sequence
  SiRNA target sequence
aaacaaagggaatgtcatcccgat

SEQ ID NO: 152796 - DNA, 24 bp, Artificial sequence
  SiRNA target sequence
aacaaagggaatgtcatcccgatg

SEQ ID NO: 152797 - DNA, 24 bp, Artificial sequence
  SiRNA target sequence
acaaagggaatgtcatcccgatgg

SEQ ID NO: 152798 - DNA, 24 bp, Artificial sequence
  SiRNA target sequence
caaagggaatgtcatcccgatggt

SEQ ID NO: 152799 - DNA, 24 bp, Artificial sequence
  SiRNA target sequence
aaagggaatgtcatcccgatggtg

SEQ ID NO: 152800 - DNA, 24 bp, Artificial sequence
  SiRNA target sequence
aagggaatgtcatcccgatggtgc

SEQ ID NO: 152801 - DNA, 24 bp, Artificial sequence
  SiRNA target sequence
agggaatgtcatcccgatggtgca

SEQ ID NO: 152802 - DNA, 24 bp, Artificial sequence
  SiRNA target sequence
gggaatgtcatcccgatggtgcat

SEQ ID NO: 152803 - DNA, 24 bp, Artificial sequence
  SiRNA target sequence
ggaatgtcatcccgatggtgcatt

SEQ ID NO: 152804 - DNA, 24 bp, Artificial sequence
  SiRNA target sequence
gaatgtcatcccgatggtgcattt

SEQ ID NO: 152805 - DNA, 24 bp, Artificial sequence
  SiRNA target sequence
aatgtcatcccgatggtgcatttt

SEQ ID NO: 152806 - DNA, 24 bp, Artificial sequence
  SiRNA target sequence
atgtcatcccgatggtgcattttt

SEQ ID NO: 152807 - DNA, 24 bp, Artificial sequence
  SiRNA target sequence
tgtcatcccgatggtgcatttttt

SEQ ID NO: 152808 - DNA, 24 bp, Artificial sequence
  SiRNA target sequence
gtcatcccgatggtgcatttttta

SEQ ID NO: 152809 - DNA, 24 bp, Artificial sequence
  SiRNA target sequence
tcatcccgatggtgcattttttaa

SEQ ID NO: 152810 - DNA, 24 bp, Artificial sequence
  SiRNA target sequence
catcccgatggtgcattttttaaa

SEQ ID NO: 152811 - DNA, 24 bp, Artificial sequence
  SiRNA target sequence
atcccgatggtgcattttttaaag

SEQ ID NO: 152812 - DNA, 24 bp, Artificial sequence
  SiRNA target sequence
tcccgatggtgcattttttaaagc

SEQ ID NO: 152813 - DNA, 24 bp, Artificial sequence
  SiRNA target sequence
cccgatggtgcattttttaaagct

SEQ ID NO: 152814 - DNA, 24 bp, Artificial sequence
  SiRNA target sequence
ccgatggtgcattttttaaagctg

SEQ ID NO: 152815 - DNA, 24 bp, Artificial sequence
  SiRNA target sequence
cgatggtgcattttttaaagctgc

SEQ ID NO: 152816 - DNA, 24 bp, Artificial sequence
  SiRNA target sequence
gatggtgcattttttaaagctgct

SEQ ID NO: 152817 - DNA, 24 bp, Artificial sequence
  SiRNA target sequence
atggtgcattttttaaagctgctc

SEQ ID NO: 152818 - DNA, 24 bp, Artificial sequence
  SiRNA target sequence
tggtgcattttttaaagctgctct

SEQ ID NO: 152819 - DNA, 24 bp, Artificial sequence
  SiRNA target sequence
ggtgcattttttaaagctgctctt

SEQ ID NO: 152820 - DNA, 24 bp, Artificial sequence
  SiRNA target sequence
gtgcattttttaaagctgctctta

SEQ ID NO: 152821 - DNA, 24 bp, Artificial sequence
  SiRNA target sequence
tgcattttttaaagctgctcttag

SEQ ID NO: 152822 - DNA, 24 bp, Artificial sequence
  SiRNA target sequence
gcattttttaaagctgctcttaga

SEQ ID NO: 152823 - DNA, 24 bp, Artificial sequence
  SiRNA target sequence
cattttttaaagctgctcttagaa

SEQ ID NO: 152824 - DNA, 24 bp, Artificial sequence
  SiRNA target sequence
attttttaaagctgctcttagaaa

SEQ ID NO: 152825 - DNA, 24 bp, Artificial sequence
  SiRNA target sequence
ttttttaaagctgctcttagaaaa

SEQ ID NO: 152826 - DNA, 24 bp, Artificial sequence
  SiRNA target sequence
tttttaaagctgctcttagaaaat

SEQ ID NO: 152827 - DNA, 24 bp, Artificial sequence
  SiRNA target sequence
ttttaaagctgctcttagaaaatg

SEQ ID NO: 152828 - DNA, 24 bp, Artificial sequence
  SiRNA target sequence
tttaaagctgctcttagaaaatgt

SEQ ID NO: 152829 - DNA, 24 bp, Artificial sequence
  SiRNA target sequence
ttaaagctgctcttagaaaatgta

SEQ ID NO: 152830 - DNA, 24 bp, Artificial sequence
  SiRNA target sequence
taaagctgctcttagaaaatgtaa

SEQ ID NO: 152831 - DNA, 24 bp, Artificial sequence
  SiRNA target sequence
aaagctgctcttagaaaatgtaaa

SEQ ID NO: 152832 - DNA, 24 bp, Artificial sequence
  SiRNA target sequence
aagctgctcttagaaaatgtaaaa

SEQ ID NO: 152833 - DNA, 24 bp, Artificial sequence
  SiRNA target sequence
agctgctcttagaaaatgtaaaac

SEQ ID NO: 152834 - DNA, 24 bp, Artificial sequence
  SiRNA target sequence
gctgctcttagaaaatgtaaaaca

SEQ ID NO: 152835 - DNA, 24 bp, Artificial sequence
  SiRNA target sequence
ctgctcttagaaaatgtaaaacag

SEQ ID NO: 152836 - DNA, 24 bp, Artificial sequence
  SiRNA target sequence
tgctcttagaaaatgtaaaacaga

SEQ ID NO: 152837 - DNA, 24 bp, Artificial sequence
  SiRNA target sequence
gctcttagaaaatgtaaaacagat

SEQ ID NO: 152838 - DNA, 24 bp, Artificial sequence
  SiRNA target sequence
ctcttagaaaatgtaaaacagatg

SEQ ID NO: 152839 - DNA, 24 bp, Artificial sequence
  SiRNA target sequence
tcttagaaaatgtaaaacagatga

SEQ ID NO: 152840 - DNA, 24 bp, Artificial sequence
  SiRNA target sequence
cttagaaaatgtaaaacagatgaa

SEQ ID NO: 152841 - DNA, 24 bp, Artificial sequence
  SiRNA target sequence
ttagaaaatgtaaaacagatgaag

SEQ ID NO: 152842 - DNA, 24 bp, Artificial sequence
  SiRNA target sequence
tagaaaatgtaaaacagatgaaga

SEQ ID NO: 152843 - DNA, 24 bp, Artificial sequence
  SiRNA target sequence
agaaaatgtaaaacagatgaagaa

SEQ ID NO: 152844 - DNA, 24 bp, Artificial sequence
  SiRNA target sequence
gaaaatgtaaaacagatgaagaaa

SEQ ID NO: 152845 - DNA, 24 bp, Artificial sequence
  SiRNA target sequence
aaaatgtaaaacagatgaagaaag

SEQ ID NO: 152846 - DNA, 24 bp, Artificial sequence
  SiRNA target sequence
aaatgtaaaacagatgaagaaaga

SEQ ID NO: 152847 - DNA, 24 bp, Artificial sequence
  SiRNA target sequence
aatgtaaaacagatgaagaaagag

SEQ ID NO: 152848 - DNA, 24 bp, Artificial sequence
  SiRNA target sequence
atgtaaaacagatgaagaaagagc

SEQ ID NO: 152849 - DNA, 24 bp, Artificial sequence
  SiRNA target sequence
tgtaaaacagatgaagaaagagca

SEQ ID NO: 152850 - DNA, 24 bp, Artificial sequence
  SiRNA target sequence
gtaaaacagatgaagaaagagcaa

SEQ ID NO: 152851 - DNA, 24 bp, Artificial sequence
  SiRNA target sequence
taaaacagatgaagaaagagcaaa

SEQ ID NO: 152852 - DNA, 24 bp, Artificial sequence
  SiRNA target sequence
aaaacagatgaagaaagagcaaaa

SEQ ID NO: 152853 - DNA, 24 bp, Artificial sequence
  SiRNA target sequence
aaacagatgaagaaagagcaaaag

SEQ ID NO: 152854 - DNA, 24 bp, Artificial sequence
  SiRNA target sequence
aacagatgaagaaagagcaaaagt

SEQ ID NO: 152855 - DNA, 24 bp, Artificial sequence
  SiRNA target sequence
acagatgaagaaagagcaaaagtt

SEQ ID NO: 152856 - DNA, 24 bp, Artificial sequence
  SiRNA target sequence
cagatgaagaaagagcaaaagttg

SEQ ID NO: 152857 - DNA, 24 bp, Artificial sequence
  SiRNA target sequence
agatgaagaaagagcaaaagttga

SEQ ID NO: 152858 - DNA, 24 bp, Artificial sequence
  SiRNA target sequence
gatgaagaaagagcaaaagttgaa

SEQ ID NO: 152859 - DNA, 24 bp, Artificial sequence
  SiRNA target sequence
atgaagaaagagcaaaagttgaaa

SEQ ID NO: 152860 - DNA, 24 bp, Artificial sequence
  SiRNA target sequence
tgaagaaagagcaaaagttgaaaa

SEQ ID NO: 152861 - DNA, 24 bp, Artificial sequence
  SiRNA target sequence
gaagaaagagcaaaagttgaaaaa

SEQ ID NO: 152862 - DNA, 24 bp, Artificial sequence
  SiRNA target sequence
aagaaagagcaaaagttgaaaaag

SEQ ID NO: 152863 - DNA, 24 bp, Artificial sequence
  SiRNA target sequence
agaaagagcaaaagttgaaaaaga

SEQ ID NO: 152864 - DNA, 24 bp, Artificial sequence
  SiRNA target sequence
gaaagagcaaaagttgaaaaagaa

SEQ ID NO: 152865 - DNA, 24 bp, Artificial sequence
  SiRNA target sequence
aaagagcaaaagttgaaaaagaat

SEQ ID NO: 152866 - DNA, 24 bp, Artificial sequence
  SiRNA target sequence
aagagcaaaagttgaaaaagaatt

SEQ ID NO: 152867 - DNA, 24 bp, Artificial sequence
  SiRNA target sequence
agagcaaaagttgaaaaagaattt

SEQ ID NO: 152868 - DNA, 24 bp, Artificial sequence
  SiRNA target sequence
gagcaaaagttgaaaaagaattta

SEQ ID NO: 152869 - DNA, 24 bp, Artificial sequence
  SiRNA target sequence
agcaaaagttgaaaaagaatttaa

SEQ ID NO: 152870 - DNA, 24 bp, Artificial sequence
  SiRNA target sequence
gcaaaagttgaaaaagaatttaaa

SEQ ID NO: 152871 - DNA, 24 bp, Artificial sequence
  SiRNA target sequence
caaaagttgaaaaagaatttaaag

SEQ ID NO: 152872 - DNA, 24 bp, Artificial sequence
  SiRNA target sequence
aaaagttgaaaaagaatttaaaga

SEQ ID NO: 152873 - DNA, 24 bp, Artificial sequence
  SiRNA target sequence
aaagttgaaaaagaatttaaagaa

SEQ ID NO: 152874 - DNA, 24 bp, Artificial sequence
  SiRNA target sequence
aagttgaaaaagaatttaaagaaa

SEQ ID NO: 152875 - DNA, 24 bp, Artificial sequence
  SiRNA target sequence
agttgaaaaagaatttaaagaaaa

SEQ ID NO: 152876 - DNA, 24 bp, Artificial sequence
  SiRNA target sequence
gttgaaaaagaatttaaagaaaaa

SEQ ID NO: 152877 - DNA, 24 bp, Artificial sequence
  SiRNA target sequence
ttgaaaaagaatttaaagaaaaat

SEQ ID NO: 152878 - DNA, 24 bp, Artificial sequence
  SiRNA target sequence
tgaaaaagaatttaaagaaaaatc

SEQ ID NO: 152879 - DNA, 24 bp, Artificial sequence
  SiRNA target sequence
gaaaaagaatttaaagaaaaatca

SEQ ID NO: 152880 - DNA, 24 bp, Artificial sequence
  SiRNA target sequence
aaaaagaatttaaagaaaaatcac

SEQ ID NO: 152881 - DNA, 24 bp, Artificial sequence
  SiRNA target sequence
aaaagaatttaaagaaaaatcaca

SEQ ID NO: 152882 - DNA, 24 bp, Artificial sequence
  SiRNA target sequence
aaagaatttaaagaaaaatcacaa

SEQ ID NO: 152883 - DNA, 24 bp, Artificial sequence
  SiRNA target sequence
aagaatttaaagaaaaatcacaaa

SEQ ID NO: 152884 - DNA, 24 bp, Artificial sequence
  SiRNA target sequence
agaatttaaagaaaaatcacaaaa

SEQ ID NO: 152885 - DNA, 24 bp, Artificial sequence
  SiRNA target sequence
gaatttaaagaaaaatcacaaaaa

SEQ ID NO: 152886 - DNA, 24 bp, Artificial sequence
  SiRNA target sequence
aatttaaagaaaaatcacaaaaat

SEQ ID NO: 152887 - DNA, 24 bp, Artificial sequence
  SiRNA target sequence
atttaaagaaaaatcacaaaaatg

SEQ ID NO: 152888 - DNA, 24 bp, Artificial sequence
  SiRNA target sequence
tttaaagaaaaatcacaaaaatgt

SEQ ID NO: 152889 - DNA, 24 bp, Artificial sequence
  SiRNA target sequence
ttaaagaaaaatcacaaaaatgta

SEQ ID NO: 152890 - DNA, 24 bp, Artificial sequence
  SiRNA target sequence
taaagaaaaatcacaaaaatgtaa

SEQ ID NO: 152891 - DNA, 24 bp, Artificial sequence
  SiRNA target sequence
aaagaaaaatcacaaaaatgtaat

SEQ ID NO: 152892 - DNA, 24 bp, Artificial sequence
  SiRNA target sequence
aagaaaaatcacaaaaatgtaatc

SEQ ID NO: 152893 - DNA, 24 bp, Artificial sequence
  SiRNA target sequence
agaaaaatcacaaaaatgtaatca

SEQ ID NO: 152894 - DNA, 24 bp, Artificial sequence
  SiRNA target sequence
gaaaaatcacaaaaatgtaatcaa

SEQ ID NO: 152895 - DNA, 24 bp, Artificial sequence
  SiRNA target sequence
aaaaatcacaaaaatgtaatcaag

SEQ ID NO: 152896 - DNA, 24 bp, Artificial sequence
  SiRNA target sequence
aaaatcacaaaaatgtaatcaagc

SEQ ID NO: 152897 - DNA, 24 bp, Artificial sequence
  SiRNA target sequence
aaatcacaaaaatgtaatcaagct

SEQ ID NO: 152898 - DNA, 24 bp, Artificial sequence
  SiRNA target sequence
aatcacaaaaatgtaatcaagcta

SEQ ID NO: 152899 - DNA, 24 bp, Artificial sequence
  SiRNA target sequence
atcacaaaaatgtaatcaagctaa

SEQ ID NO: 152900 - DNA, 24 bp, Artificial sequence
  SiRNA target sequence
tcacaaaaatgtaatcaagctaaa

SEQ ID NO: 152901 - DNA, 24 bp, Artificial sequence
  SiRNA target sequence
cacaaaaatgtaatcaagctaaag

SEQ ID NO: 152902 - DNA, 24 bp, Artificial sequence
  SiRNA target sequence
acaaaaatgtaatcaagctaaagc

SEQ ID NO: 152903 - DNA, 24 bp, Artificial sequence
  SiRNA target sequence
caaaaatgtaatcaagctaaagca

SEQ ID NO: 152904 - DNA, 24 bp, Artificial sequence
  SiRNA target sequence
aaaaatgtaatcaagctaaagcag

SEQ ID NO: 152905 - DNA, 24 bp, Artificial sequence
  SiRNA target sequence
aaaatgtaatcaagctaaagcagt

SEQ ID NO: 152906 - DNA, 24 bp, Artificial sequence
  SiRNA target sequence
aaatgtaatcaagctaaagcagtt

SEQ ID NO: 152907 - DNA, 24 bp, Artificial sequence
  SiRNA target sequence
aatgtaatcaagctaaagcagttt

SEQ ID NO: 152908 - DNA, 24 bp, Artificial sequence
  SiRNA target sequence
atgtaatcaagctaaagcagtttt

SEQ ID NO: 152909 - DNA, 24 bp, Artificial sequence
  SiRNA target sequence
tgtaatcaagctaaagcagtttta

SEQ ID NO: 152910 - DNA, 24 bp, Artificial sequence
  SiRNA target sequence
gtaatcaagctaaagcagttttat

SEQ ID NO: 152911 - DNA, 24 bp, Artificial sequence
  SiRNA target sequence
taatcaagctaaagcagttttatt

SEQ ID NO: 152912 - DNA, 24 bp, Artificial sequence
  SiRNA target sequence
aatcaagctaaagcagttttattt

SEQ ID NO: 152913 - DNA, 24 bp, Artificial sequence
  SiRNA target sequence
atcaagctaaagcagttttatttg

SEQ ID NO: 152914 - DNA, 24 bp, Artificial sequence
  SiRNA target sequence
tcaagctaaagcagttttatttga

SEQ ID NO: 152915 - DNA, 24 bp, Artificial sequence
  SiRNA target sequence
caagctaaagcagttttatttgat

SEQ ID NO: 152916 - DNA, 24 bp, Artificial sequence
  SiRNA target sequence
aagctaaagcagttttatttgatg

SEQ ID NO: 152917 - DNA, 24 bp, Artificial sequence
  SiRNA target sequence
agctaaagcagttttatttgatga

SEQ ID NO: 152918 - DNA, 24 bp, Artificial sequence
  SiRNA target sequence
gctaaagcagttttatttgatgag

SEQ ID NO: 152919 - DNA, 24 bp, Artificial sequence
  SiRNA target sequence
ctaaagcagttttatttgatgaga

SEQ ID NO: 152920 - DNA, 24 bp, Artificial sequence
  SiRNA target sequence
taaagcagttttatttgatgagaa

SEQ ID NO: 152921 - DNA, 24 bp, Artificial sequence
  SiRNA target sequence
aaagcagttttatttgatgagaaa

SEQ ID NO: 152922 - DNA, 24 bp, Artificial sequence
  SiRNA target sequence
aagcagttttatttgatgagaaaa

SEQ ID NO: 152923 - DNA, 24 bp, Artificial sequence
  SiRNA target sequence
agcagttttatttgatgagaaaaa

SEQ ID NO: 152924 - DNA, 24 bp, Artificial sequence
  SiRNA target sequence
gcagttttatttgatgagaaaaaa

SEQ ID NO: 152925 - DNA, 24 bp, Artificial sequence
  SiRNA target sequence
cagttttatttgatgagaaaaaaa

SEQ ID NO: 152926 - DNA, 24 bp, Artificial sequence
  SiRNA target sequence
agttttatttgatgagaaaaaaaa

SEQ ID NO: 152927 - DNA, 24 bp, Artificial sequence
  SiRNA target sequence
gttttatttgatgagaaaaaaaag

SEQ ID NO: 152928 - DNA, 24 bp, Artificial sequence
  SiRNA target sequence
ttttatttgatgagaaaaaaaagc

SEQ ID NO: 152929 - DNA, 24 bp, Artificial sequence
  SiRNA target sequence
tttatttgatgagaaaaaaaagca

SEQ ID NO: 152930 - DNA, 24 bp, Artificial sequence
  SiRNA target sequence
ttatttgatgagaaaaaaaagcaa

SEQ ID NO: 152931 - DNA, 24 bp, Artificial sequence
  SiRNA target sequence
tatttgatgagaaaaaaaagcaag

SEQ ID NO: 152932 - DNA, 24 bp, Artificial sequence
  SiRNA target sequence
atttgatgagaaaaaaaagcaaga

SEQ ID NO: 152933 - DNA, 24 bp, Artificial sequence
  SiRNA target sequence
tttgatgagaaaaaaaagcaagag

SEQ ID NO: 152934 - DNA, 24 bp, Artificial sequence
  SiRNA target sequence
ttgatgagaaaaaaaagcaagagt

SEQ ID NO: 152935 - DNA, 24 bp, Artificial sequence
  SiRNA target sequence
tgatgagaaaaaaaagcaagagta

SEQ ID NO: 152936 - DNA, 24 bp, Artificial sequence
  SiRNA target sequence
gatgagaaaaaaaagcaagagtat

SEQ ID NO: 152937 - DNA, 24 bp, Artificial sequence
  SiRNA target sequence
atgagaaaaaaaagcaagagtatg

SEQ ID NO: 152938 - DNA, 24 bp, Artificial sequence
  SiRNA target sequence
tgagaaaaaaaagcaagagtatga

SEQ ID NO: 152939 - DNA, 24 bp, Artificial sequence
  SiRNA target sequence
gagaaaaaaaagcaagagtatgat

SEQ ID NO: 152940 - DNA, 24 bp, Artificial sequence
  SiRNA target sequence
agaaaaaaaagcaagagtatgata

SEQ ID NO: 152941 - DNA, 24 bp, Artificial sequence
  SiRNA target sequence
gaaaaaaaagcaagagtatgatat

SEQ ID NO: 152942 - DNA, 24 bp, Artificial sequence
  SiRNA target sequence
aaaaaaaagcaagagtatgatatg

SEQ ID NO: 152943 - DNA, 24 bp, Artificial sequence
  SiRNA target sequence
aaaaaaagcaagagtatgatatgg

SEQ ID NO: 152944 - DNA, 24 bp, Artificial sequence
  SiRNA target sequence
aaaaaagcaagagtatgatatggg

SEQ ID NO: 152945 - DNA, 24 bp, Artificial sequence
  SiRNA target sequence
aaaaagcaagagtatgatatggga

SEQ ID NO: 152946 - DNA, 24 bp, Artificial sequence
  SiRNA target sequence
aaaagcaagagtatgatatgggaa

SEQ ID NO: 152947 - DNA, 24 bp, Artificial sequence
  SiRNA target sequence
aaagcaagagtatgatatgggaat

SEQ ID NO: 152948 - DNA, 24 bp, Artificial sequence
  SiRNA target sequence
aagcaagagtatgatatgggaatg

SEQ ID NO: 152949 - DNA, 24 bp, Artificial sequence
  SiRNA target sequence
agcaagagtatgatatgggaatga

SEQ ID NO: 152950 - DNA, 24 bp, Artificial sequence
  SiRNA target sequence
gcaagagtatgatatgggaatgac

SEQ ID NO: 152951 - DNA, 24 bp, Artificial sequence
  SiRNA target sequence
caagagtatgatatgggaatgact

SEQ ID NO: 152952 - DNA, 24 bp, Artificial sequence
  SiRNA target sequence
aagagtatgatatgggaatgactg

SEQ ID NO: 152953 - DNA, 24 bp, Artificial sequence
  SiRNA target sequence
agagtatgatatgggaatgactgg

SEQ ID NO: 152954 - DNA, 24 bp, Artificial sequence
  SiRNA target sequence
gagtatgatatgggaatgactggc

SEQ ID NO: 152955 - DNA, 24 bp, Artificial sequence
  SiRNA target sequence
agtatgatatgggaatgactggcg

SEQ ID NO: 152956 - DNA, 24 bp, Artificial sequence
  SiRNA target sequence
gtatgatatgggaatgactggcga

SEQ ID NO: 152957 - DNA, 24 bp, Artificial sequence
  SiRNA target sequence
tatgatatgggaatgactggcgat

SEQ ID NO: 152958 - DNA, 24 bp, Artificial sequence
  SiRNA target sequence
atgatatgggaatgactggcgatt

SEQ ID NO: 152959 - DNA, 24 bp, Artificial sequence
  SiRNA target sequence
tgatatgggaatgactggcgattt

SEQ ID NO: 152960 - DNA, 24 bp, Artificial sequence
  SiRNA target sequence
gatatgggaatgactggcgatttt

SEQ ID NO: 152961 - DNA, 24 bp, Artificial sequence
  SiRNA target sequence
atatgggaatgactggcgattttg

SEQ ID NO: 152962 - DNA, 24 bp, Artificial sequence
  SiRNA target sequence
tatgggaatgactggcgattttgg

SEQ ID NO: 152963 - DNA, 24 bp, Artificial sequence
  SiRNA target sequence
atgggaatgactggcgattttgga

SEQ ID NO: 152964 - DNA, 24 bp, Artificial sequence
  SiRNA target sequence
tgggaatgactggcgattttggat

SEQ ID NO: 152965 - DNA, 24 bp, Artificial sequence
  SiRNA target sequence
gggaatgactggcgattttggatt

SEQ ID NO: 152966 - DNA, 24 bp, Artificial sequence
  SiRNA target sequence
ggaatgactggcgattttggattt

SEQ ID NO: 152967 - DNA, 24 bp, Artificial sequence
  SiRNA target sequence
gaatgactggcgattttggatttt

SEQ ID NO: 152968 - DNA, 24 bp, Artificial sequence
  SiRNA target sequence
aatgactggcgattttggattttc

SEQ ID NO: 152969 - DNA, 24 bp, Artificial sequence
  SiRNA target sequence
atgactggcgattttggattttct

SEQ ID NO: 152970 - DNA, 24 bp, Artificial sequence
  SiRNA target sequence
tgactggcgattttggattttctg

SEQ ID NO: 152971 - DNA, 24 bp, Artificial sequence
  SiRNA target sequence
gactggcgattttggattttctgc

SEQ ID NO: 152972 - DNA, 24 bp, Artificial sequence
  SiRNA target sequence
actggcgattttggattttctgca

SEQ ID NO: 152973 - DNA, 24 bp, Artificial sequence
  SiRNA target sequence
ctggcgattttggattttctgcag

SEQ ID NO: 152974 - DNA, 24 bp, Artificial sequence
  SiRNA target sequence
tggcgattttggattttctgcagg

SEQ ID NO: 152975 - DNA, 24 bp, Artificial sequence
  SiRNA target sequence
ggcgattttggattttctgcaggt

SEQ ID NO: 152976 - DNA, 24 bp, Artificial sequence
  SiRNA target sequence
gcgattttggattttctgcaggtg

SEQ ID NO: 152977 - DNA, 24 bp, Artificial sequence
  SiRNA target sequence
cgattttggattttctgcaggtgg

SEQ ID NO: 152978 - DNA, 24 bp, Artificial sequence
  SiRNA target sequence
gattttggattttctgcaggtggt

SEQ ID NO: 152979 - DNA, 24 bp, Artificial sequence
  SiRNA target sequence
attttggattttctgcaggtggtg

SEQ ID NO: 152980 - DNA, 24 bp, Artificial sequence
  SiRNA target sequence
ttttggattttctgcaggtggtgg

SEQ ID NO: 152981 - DNA, 24 bp, Artificial sequence
  SiRNA target sequence
tttggattttctgcaggtggtgga

SEQ ID NO: 152982 - DNA, 24 bp, Artificial sequence
  SiRNA target sequence
ttggattttctgcaggtggtggag

SEQ ID NO: 152983 - DNA, 24 bp, Artificial sequence
  SiRNA target sequence
tggattttctgcaggtggtggaga

SEQ ID NO: 152984 - DNA, 24 bp, Artificial sequence
  SiRNA target sequence
ggattttctgcaggtggtggagac

SEQ ID NO: 152985 - DNA, 24 bp, Artificial sequence
  SiRNA target sequence
gattttctgcaggtggtggagact

SEQ ID NO: 152986 - DNA, 24 bp, Artificial sequence
  SiRNA target sequence
attttctgcaggtggtggagactt

SEQ ID NO: 152987 - DNA, 24 bp, Artificial sequence
  SiRNA target sequence
ttttctgcaggtggtggagacttt

SEQ ID NO: 152988 - DNA, 24 bp, Artificial sequence
  SiRNA target sequence
tttctgcaggtggtggagactttt

SEQ ID NO: 152989 - DNA, 24 bp, Artificial sequence
  SiRNA target sequence
ttctgcaggtggtggagacttttt

SEQ ID NO: 152990 - DNA, 24 bp, Artificial sequence
  SiRNA target sequence
tctgcaggtggtggagactttttc

SEQ ID NO: 152991 - DNA, 24 bp, Artificial sequence
  SiRNA target sequence
ctgcaggtggtggagactttttcg

SEQ ID NO: 152992 - DNA, 24 bp, Artificial sequence
  SiRNA target sequence
tgcaggtggtggagactttttcga

SEQ ID NO: 152993 - DNA, 24 bp, Artificial sequence
  SiRNA target sequence
gcaggtggtggagactttttcgat

SEQ ID NO: 152994 - DNA, 24 bp, Artificial sequence
  SiRNA target sequence
caggtggtggagactttttcgata

SEQ ID NO: 152995 - DNA, 24 bp, Artificial sequence
  SiRNA target sequence
aggtggtggagactttttcgatat

SEQ ID NO: 152996 - DNA, 24 bp, Artificial sequence
  SiRNA target sequence
ggtggtggagactttttcgatatt

SEQ ID NO: 152997 - DNA, 24 bp, Artificial sequence
  SiRNA target sequence
gtggtggagactttttcgatattt

SEQ ID NO: 152998 - DNA, 24 bp, Artificial sequence
  SiRNA target sequence
tggtggagactttttcgatatttt

SEQ ID NO: 152999 - DNA, 24 bp, Artificial sequence
  SiRNA target sequence
ggtggagactttttcgatattttt

SEQ ID NO: 153000 - DNA, 24 bp, Artificial sequence
  SiRNA target sequence
gtggagactttttcgatatttttt

SEQ ID NO: 153001 - DNA, 24 bp, Artificial sequence
  SiRNA target sequence
tggagactttttcgatattttttc

SEQ ID NO: 153002 - DNA, 24 bp, Artificial sequence
  SiRNA target sequence
ggagactttttcgatattttttca

SEQ ID NO: 153003 - DNA, 24 bp, Artificial sequence
  SiRNA target sequence
gagactttttcgatattttttcaa

SEQ ID NO: 153004 - DNA, 24 bp, Artificial sequence
  SiRNA target sequence
agactttttcgatattttttcaag

SEQ ID NO: 153005 - DNA, 24 bp, Artificial sequence
  SiRNA target sequence
gactttttcgatattttttcaagt

SEQ ID NO: 153006 - DNA, 24 bp, Artificial sequence
  SiRNA target sequence
actttttcgatattttttcaagtt

SEQ ID NO: 153007 - DNA, 24 bp, Artificial sequence
  SiRNA target sequence
ctttttcgatattttttcaagttt

SEQ ID NO: 153008 - DNA, 24 bp, Artificial sequence
  SiRNA target sequence
tttttcgatattttttcaagtttt

SEQ ID NO: 153009 - DNA, 24 bp, Artificial sequence
  SiRNA target sequence
ttttcgatattttttcaagtttta

SEQ ID NO: 153010 - DNA, 24 bp, Artificial sequence
  SiRNA target sequence
tttcgatattttttcaagttttac

SEQ ID NO: 153011 - DNA, 24 bp, Artificial sequence
  SiRNA target sequence
ttcgatattttttcaagttttact

SEQ ID NO: 153012 - DNA, 24 bp, Artificial sequence
  SiRNA target sequence
tcgatattttttcaagttttactg

SEQ ID NO: 153013 - DNA, 24 bp, Artificial sequence
  SiRNA target sequence
cgatattttttcaagttttactgg

SEQ ID NO: 153014 - DNA, 24 bp, Artificial sequence
  SiRNA target sequence
gatattttttcaagttttactggt

SEQ ID NO: 153015 - DNA, 24 bp, Artificial sequence
  SiRNA target sequence
atattttttcaagttttactggtg

SEQ ID NO: 153016 - DNA, 24 bp, Artificial sequence
  SiRNA target sequence
tattttttcaagttttactggtgg

SEQ ID NO: 153017 - DNA, 24 bp, Artificial sequence
  SiRNA target sequence
attttttcaagttttactggtgga

SEQ ID NO: 153018 - DNA, 24 bp, Artificial sequence
  SiRNA target sequence
ttttttcaagttttactggtggag

SEQ ID NO: 153019 - DNA, 24 bp, Artificial sequence
  SiRNA target sequence
tttttcaagttttactggtggagg

SEQ ID NO: 153020 - DNA, 24 bp, Artificial sequence
  SiRNA target sequence
ttttcaagttttactggtggagga

SEQ ID NO: 153021 - DNA, 24 bp, Artificial sequence
  SiRNA target sequence
tttcaagttttactggtggaggaa

SEQ ID NO: 153022 - DNA, 24 bp, Artificial sequence
  SiRNA target sequence
ttcaagttttactggtggaggaag

SEQ ID NO: 153023 - DNA, 24 bp, Artificial sequence
  SiRNA target sequence
tcaagttttactggtggaggaaga

SEQ ID NO: 153024 - DNA, 24 bp, Artificial sequence
  SiRNA target sequence
caagttttactggtggaggaagaa

SEQ ID NO: 153025 - DNA, 24 bp, Artificial sequence
  SiRNA target sequence
aagttttactggtggaggaagaag

SEQ ID NO: 153026 - DNA, 24 bp, Artificial sequence
  SiRNA target sequence
agttttactggtggaggaagaaga

SEQ ID NO: 153027 - DNA, 24 bp, Artificial sequence
  SiRNA target sequence
gttttactggtggaggaagaagaa

SEQ ID NO: 153028 - DNA, 24 bp, Artificial sequence
  SiRNA target sequence
ttttactggtggaggaagaagaaa

SEQ ID NO: 153029 - DNA, 24 bp, Artificial sequence
  SiRNA target sequence
tttactggtggaggaagaagaaat

SEQ ID NO: 153030 - DNA, 24 bp, Artificial sequence
  SiRNA target sequence
ttactggtggaggaagaagaaatc

SEQ ID NO: 153031 - DNA, 24 bp, Artificial sequence
  SiRNA target sequence
tactggtggaggaagaagaaatcg

SEQ ID NO: 153032 - DNA, 24 bp, Artificial sequence
  SiRNA target sequence
actggtggaggaagaagaaatcga

SEQ ID NO: 153033 - DNA, 24 bp, Artificial sequence
  SiRNA target sequence
ctggtggaggaagaagaaatcgag

SEQ ID NO: 153034 - DNA, 24 bp, Artificial sequence
  SiRNA target sequence
tggtggaggaagaagaaatcgagt

SEQ ID NO: 153035 - DNA, 24 bp, Artificial sequence
  SiRNA target sequence
ggtggaggaagaagaaatcgagta

SEQ ID NO: 153036 - DNA, 24 bp, Artificial sequence
  SiRNA target sequence
gtggaggaagaagaaatcgagtac

SEQ ID NO: 153037 - DNA, 24 bp, Artificial sequence
  SiRNA target sequence
tggaggaagaagaaatcgagtaca

SEQ ID NO: 153038 - DNA, 24 bp, Artificial sequence
  SiRNA target sequence
ggaggaagaagaaatcgagtacaa

SEQ ID NO: 153039 - DNA, 24 bp, Artificial sequence
  SiRNA target sequence
gaggaagaagaaatcgagtacaaa

SEQ ID NO: 153040 - DNA, 24 bp, Artificial sequence
  SiRNA target sequence
aggaagaagaaatcgagtacaaaa

SEQ ID NO: 153041 - DNA, 24 bp, Artificial sequence
  SiRNA target sequence
ggaagaagaaatcgagtacaaaaa

SEQ ID NO: 153042 - DNA, 24 bp, Artificial sequence
  SiRNA target sequence
gaagaagaaatcgagtacaaaaag

SEQ ID NO: 153043 - DNA, 24 bp, Artificial sequence
  SiRNA target sequence
aagaagaaatcgagtacaaaaagt

SEQ ID NO: 153044 - DNA, 24 bp, Artificial sequence
  SiRNA target sequence
agaagaaatcgagtacaaaaagtt

SEQ ID NO: 153045 - DNA, 24 bp, Artificial sequence
  SiRNA target sequence
gaagaaatcgagtacaaaaagttc

SEQ ID NO: 153046 - DNA, 24 bp, Artificial sequence
  SiRNA target sequence
aagaaatcgagtacaaaaagttca

SEQ ID NO: 153047 - DNA, 24 bp, Artificial sequence
  SiRNA target sequence
agaaatcgagtacaaaaagttcaa

SEQ ID NO: 153048 - DNA, 24 bp, Artificial sequence
  SiRNA target sequence
gaaatcgagtacaaaaagttcaag

SEQ ID NO: 153049 - DNA, 24 bp, Artificial sequence
  SiRNA target sequence
aaatcgagtacaaaaagttcaaga

SEQ ID NO: 153050 - DNA, 24 bp, Artificial sequence
  SiRNA target sequence
aatcgagtacaaaaagttcaagat

SEQ ID NO: 153051 - DNA, 24 bp, Artificial sequence
  SiRNA target sequence
atcgagtacaaaaagttcaagata

SEQ ID NO: 153052 - DNA, 24 bp, Artificial sequence
  SiRNA target sequence
tcgagtacaaaaagttcaagatac

SEQ ID NO: 153053 - DNA, 24 bp, Artificial sequence
  SiRNA target sequence
cgagtacaaaaagttcaagataca

SEQ ID NO: 153054 - DNA, 24 bp, Artificial sequence
  SiRNA target sequence
gagtacaaaaagttcaagatacag

SEQ ID NO: 153055 - DNA, 24 bp, Artificial sequence
  SiRNA target sequence
agtacaaaaagttcaagatacaga

SEQ ID NO: 153056 - DNA, 24 bp, Artificial sequence
  SiRNA target sequence
gtacaaaaagttcaagatacagaa

SEQ ID NO: 153057 - DNA, 24 bp, Artificial sequence
  SiRNA target sequence
tacaaaaagttcaagatacagaat

SEQ ID NO: 153058 - DNA, 24 bp, Artificial sequence
  SiRNA target sequence
acaaaaagttcaagatacagaata

SEQ ID NO: 153059 - DNA, 24 bp, Artificial sequence
  SiRNA target sequence
caaaaagttcaagatacagaatac

SEQ ID NO: 153060 - DNA, 24 bp, Artificial sequence
  SiRNA target sequence
aaaaagttcaagatacagaatacg

SEQ ID NO: 153061 - DNA, 24 bp, Artificial sequence
  SiRNA target sequence
aaaagttcaagatacagaatacga

SEQ ID NO: 153062 - DNA, 24 bp, Artificial sequence
  SiRNA target sequence
aaagttcaagatacagaatacgag

SEQ ID NO: 153063 - DNA, 24 bp, Artificial sequence
  SiRNA target sequence
aagttcaagatacagaatacgagt

SEQ ID NO: 153064 - DNA, 24 bp, Artificial sequence
  SiRNA target sequence
agttcaagatacagaatacgagtt

SEQ ID NO: 153065 - DNA, 24 bp, Artificial sequence
  SiRNA target sequence
gttcaagatacagaatacgagttt

SEQ ID NO: 153066 - DNA, 24 bp, Artificial sequence
  SiRNA target sequence
ttcaagatacagaatacgagttta

SEQ ID NO: 153067 - DNA, 24 bp, Artificial sequence
  SiRNA target sequence
tcaagatacagaatacgagtttaa

SEQ ID NO: 153068 - DNA, 24 bp, Artificial sequence
  SiRNA target sequence
caagatacagaatacgagtttaat

SEQ ID NO: 153069 - DNA, 24 bp, Artificial sequence
  SiRNA target sequence
aagatacagaatacgagtttaata

SEQ ID NO: 153070 - DNA, 24 bp, Artificial sequence
  SiRNA target sequence
agatacagaatacgagtttaatat

SEQ ID NO: 153071 - DNA, 24 bp, Artificial sequence
  SiRNA target sequence
gatacagaatacgagtttaatatt

SEQ ID NO: 153072 - DNA, 24 bp, Artificial sequence
  SiRNA target sequence
atacagaatacgagtttaatattt

SEQ ID NO: 153073 - DNA, 24 bp, Artificial sequence
  SiRNA target sequence
tacagaatacgagtttaatatttc

SEQ ID NO: 153074 - DNA, 24 bp, Artificial sequence
  SiRNA target sequence
acagaatacgagtttaatatttcg

SEQ ID NO: 153075 - DNA, 24 bp, Artificial sequence
  SiRNA target sequence
cagaatacgagtttaatatttcgt

SEQ ID NO: 153076 - DNA, 24 bp, Artificial sequence
  SiRNA target sequence
agaatacgagtttaatatttcgtt

SEQ ID NO: 153077 - DNA, 24 bp, Artificial sequence
  SiRNA target sequence
gaatacgagtttaatatttcgttg

SEQ ID NO: 153078 - DNA, 24 bp, Artificial sequence
  SiRNA target sequence
aatacgagtttaatatttcgttga

SEQ ID NO: 153079 - DNA, 24 bp, Artificial sequence
  SiRNA target sequence
atacgagtttaatatttcgttgaa

SEQ ID NO: 153080 - DNA, 24 bp, Artificial sequence
  SiRNA target sequence
tacgagtttaatatttcgttgaag

SEQ ID NO: 153081 - DNA, 24 bp, Artificial sequence
  SiRNA target sequence
acgagtttaatatttcgttgaagg

SEQ ID NO: 153082 - DNA, 24 bp, Artificial sequence
  SiRNA target sequence
cgagtttaatatttcgttgaagga

SEQ ID NO: 153083 - DNA, 24 bp, Artificial sequence
  SiRNA target sequence
gagtttaatatttcgttgaaggaa

SEQ ID NO: 153084 - DNA, 24 bp, Artificial sequence
  SiRNA target sequence
agtttaatatttcgttgaaggaag

SEQ ID NO: 153085 - DNA, 24 bp, Artificial sequence
  SiRNA target sequence
gtttaatatttcgttgaaggaagc

SEQ ID NO: 153086 - DNA, 24 bp, Artificial sequence
  SiRNA target sequence
tttaatatttcgttgaaggaagct

SEQ ID NO: 153087 - DNA, 24 bp, Artificial sequence
  SiRNA target sequence
ttaatatttcgttgaaggaagctt

SEQ ID NO: 153088 - DNA, 24 bp, Artificial sequence
  SiRNA target sequence
taatatttcgttgaaggaagctta

SEQ ID NO: 153089 - DNA, 24 bp, Artificial sequence
  SiRNA target sequence
aatatttcgttgaaggaagcttat

SEQ ID NO: 153090 - DNA, 24 bp, Artificial sequence
  SiRNA target sequence
atatttcgttgaaggaagcttata

SEQ ID NO: 153091 - DNA, 24 bp, Artificial sequence
  SiRNA target sequence
tatttcgttgaaggaagcttatat

SEQ ID NO: 153092 - DNA, 24 bp, Artificial sequence
  SiRNA target sequence
atttcgttgaaggaagcttatatg

SEQ ID NO: 153093 - DNA, 24 bp, Artificial sequence
  SiRNA target sequence
tttcgttgaaggaagcttatatgg

SEQ ID NO: 153094 - DNA, 24 bp, Artificial sequence
  SiRNA target sequence
ttcgttgaaggaagcttatatggg

SEQ ID NO: 153095 - DNA, 24 bp, Artificial sequence
  SiRNA target sequence
tcgttgaaggaagcttatatggga

SEQ ID NO: 153096 - DNA, 24 bp, Artificial sequence
  SiRNA target sequence
cgttgaaggaagcttatatgggaa

SEQ ID NO: 153097 - DNA, 24 bp, Artificial sequence
  SiRNA target sequence
gttgaaggaagcttatatgggaaa

SEQ ID NO: 153098 - DNA, 24 bp, Artificial sequence
  SiRNA target sequence
ttgaaggaagcttatatgggaaag

SEQ ID NO: 153099 - DNA, 24 bp, Artificial sequence
  SiRNA target sequence
tgaaggaagcttatatgggaaagc

SEQ ID NO: 153100 - DNA, 24 bp, Artificial sequence
  SiRNA target sequence
gaaggaagcttatatgggaaagcg

SEQ ID NO: 153101 - DNA, 24 bp, Artificial sequence
  SiRNA target sequence
aaggaagcttatatgggaaagcga

SEQ ID NO: 153102 - DNA, 24 bp, Artificial sequence
  SiRNA target sequence
aggaagcttatatgggaaagcgag

SEQ ID NO: 153103 - DNA, 24 bp, Artificial sequence
  SiRNA target sequence
ggaagcttatatgggaaagcgagc

SEQ ID NO: 153104 - DNA, 24 bp, Artificial sequence
  SiRNA target sequence
gaagcttatatgggaaagcgagct

SEQ ID NO: 153105 - DNA, 24 bp, Artificial sequence
  SiRNA target sequence
aagcttatatgggaaagcgagcta

SEQ ID NO: 153106 - DNA, 24 bp, Artificial sequence
  SiRNA target sequence
agcttatatgggaaagcgagctag

SEQ ID NO: 153107 - DNA, 24 bp, Artificial sequence
  SiRNA target sequence
gcttatatgggaaagcgagctagt

SEQ ID NO: 153108 - DNA, 24 bp, Artificial sequence
  SiRNA target sequence
cttatatgggaaagcgagctagtt

SEQ ID NO: 153109 - DNA, 24 bp, Artificial sequence
  SiRNA target sequence
ttatatgggaaagcgagctagttt

SEQ ID NO: 153110 - DNA, 24 bp, Artificial sequence
  SiRNA target sequence
tatatgggaaagcgagctagtttt

SEQ ID NO: 153111 - DNA, 24 bp, Artificial sequence
  SiRNA target sequence
atatgggaaagcgagctagtttta

SEQ ID NO: 153112 - DNA, 24 bp, Artificial sequence
  SiRNA target sequence
tatgggaaagcgagctagttttaa

SEQ ID NO: 153113 - DNA, 24 bp, Artificial sequence
  SiRNA target sequence
atgggaaagcgagctagttttaat

SEQ ID NO: 153114 - DNA, 24 bp, Artificial sequence
  SiRNA target sequence
tgggaaagcgagctagttttaatg

SEQ ID NO: 153115 - DNA, 24 bp, Artificial sequence
  SiRNA target sequence
gggaaagcgagctagttttaatgt

SEQ ID NO: 153116 - DNA, 24 bp, Artificial sequence
  SiRNA target sequence
ggaaagcgagctagttttaatgta

SEQ ID NO: 153117 - DNA, 24 bp, Artificial sequence
  SiRNA target sequence
gaaagcgagctagttttaatgtaa

SEQ ID NO: 153118 - DNA, 24 bp, Artificial sequence
  SiRNA target sequence
aaagcgagctagttttaatgtaaa

SEQ ID NO: 153119 - DNA, 24 bp, Artificial sequence
  SiRNA target sequence
aagcgagctagttttaatgtaaaa

SEQ ID NO: 153120 - DNA, 24 bp, Artificial sequence
  SiRNA target sequence
agcgagctagttttaatgtaaaag

SEQ ID NO: 153121 - DNA, 24 bp, Artificial sequence
  SiRNA target sequence
gcgagctagttttaatgtaaaagt

SEQ ID NO: 153122 - DNA, 24 bp, Artificial sequence
  SiRNA target sequence
cgagctagttttaatgtaaaagtg

SEQ ID NO: 153123 - DNA, 24 bp, Artificial sequence
  SiRNA target sequence
gagctagttttaatgtaaaagtgc

SEQ ID NO: 153124 - DNA, 24 bp, Artificial sequence
  SiRNA target sequence
agctagttttaatgtaaaagtgca

SEQ ID NO: 153125 - DNA, 24 bp, Artificial sequence
  SiRNA target sequence
gctagttttaatgtaaaagtgcaa

SEQ ID NO: 153126 - DNA, 24 bp, Artificial sequence
  SiRNA target sequence
ctagttttaatgtaaaagtgcaaa

SEQ ID NO: 153127 - DNA, 24 bp, Artificial sequence
  SiRNA target sequence
tagttttaatgtaaaagtgcaaag

SEQ ID NO: 153128 - DNA, 24 bp, Artificial sequence
  SiRNA target sequence
agttttaatgtaaaagtgcaaaga

SEQ ID NO: 153129 - DNA, 24 bp, Artificial sequence
  SiRNA target sequence
gttttaatgtaaaagtgcaaagag

SEQ ID NO: 153130 - DNA, 24 bp, Artificial sequence
  SiRNA target sequence
ttttaatgtaaaagtgcaaagaga

SEQ ID NO: 153131 - DNA, 24 bp, Artificial sequence
  SiRNA target sequence
tttaatgtaaaagtgcaaagagaa

SEQ ID NO: 153132 - DNA, 24 bp, Artificial sequence
  SiRNA target sequence
ttaatgtaaaagtgcaaagagaat

SEQ ID NO: 153133 - DNA, 24 bp, Artificial sequence
  SiRNA target sequence
taatgtaaaagtgcaaagagaatg

SEQ ID NO: 153134 - DNA, 24 bp, Artificial sequence
  SiRNA target sequence
aatgtaaaagtgcaaagagaatgt

SEQ ID NO: 153135 - DNA, 24 bp, Artificial sequence
  SiRNA target sequence
atgtaaaagtgcaaagagaatgtt

SEQ ID NO: 153136 - DNA, 24 bp, Artificial sequence
  SiRNA target sequence
tgtaaaagtgcaaagagaatgttc

SEQ ID NO: 153137 - DNA, 24 bp, Artificial sequence
  SiRNA target sequence
gtaaaagtgcaaagagaatgttct

SEQ ID NO: 153138 - DNA, 24 bp, Artificial sequence
  SiRNA target sequence
taaaagtgcaaagagaatgttctg

SEQ ID NO: 153139 - DNA, 24 bp, Artificial sequence
  SiRNA target sequence
aaaagtgcaaagagaatgttctgc

SEQ ID NO: 153140 - DNA, 24 bp, Artificial sequence
  SiRNA target sequence
aaagtgcaaagagaatgttctgcg

SEQ ID NO: 153141 - DNA, 24 bp, Artificial sequence
  SiRNA target sequence
aagtgcaaagagaatgttctgcgt

SEQ ID NO: 153142 - DNA, 24 bp, Artificial sequence
  SiRNA target sequence
agtgcaaagagaatgttctgcgtg

SEQ ID NO: 153143 - DNA, 24 bp, Artificial sequence
  SiRNA target sequence
gtgcaaagagaatgttctgcgtgt

SEQ ID NO: 153144 - DNA, 24 bp, Artificial sequence
  SiRNA target sequence
tgcaaagagaatgttctgcgtgta

SEQ ID NO: 153145 - DNA, 24 bp, Artificial sequence
  SiRNA target sequence
gcaaagagaatgttctgcgtgtaa

SEQ ID NO: 153146 - DNA, 24 bp, Artificial sequence
  SiRNA target sequence
caaagagaatgttctgcgtgtaac

SEQ ID NO: 153147 - DNA, 24 bp, Artificial sequence
  SiRNA target sequence
aaagagaatgttctgcgtgtaacg

SEQ ID NO: 153148 - DNA, 24 bp, Artificial sequence
  SiRNA target sequence
aagagaatgttctgcgtgtaacgg

SEQ ID NO: 153149 - DNA, 24 bp, Artificial sequence
  SiRNA target sequence
agagaatgttctgcgtgtaacggt

SEQ ID NO: 153150 - DNA, 24 bp, Artificial sequence
  SiRNA target sequence
gagaatgttctgcgtgtaacggta

SEQ ID NO: 153151 - DNA, 24 bp, Artificial sequence
  SiRNA target sequence
agaatgttctgcgtgtaacggtaa

SEQ ID NO: 153152 - DNA, 24 bp, Artificial sequence
  SiRNA target sequence
gaatgttctgcgtgtaacggtaaa

SEQ ID NO: 153153 - DNA, 24 bp, Artificial sequence
  SiRNA target sequence
aatgttctgcgtgtaacggtaaag

SEQ ID NO: 153154 - DNA, 24 bp, Artificial sequence
  SiRNA target sequence
atgttctgcgtgtaacggtaaagg

SEQ ID NO: 153155 - DNA, 24 bp, Artificial sequence
  SiRNA target sequence
tgttctgcgtgtaacggtaaagga

SEQ ID NO: 153156 - DNA, 24 bp, Artificial sequence
  SiRNA target sequence
gttctgcgtgtaacggtaaaggag

SEQ ID NO: 153157 - DNA, 24 bp, Artificial sequence
  SiRNA target sequence
ttctgcgtgtaacggtaaaggagg

SEQ ID NO: 153158 - DNA, 24 bp, Artificial sequence
  SiRNA target sequence
tctgcgtgtaacggtaaaggagga

SEQ ID NO: 153159 - DNA, 24 bp, Artificial sequence
  SiRNA target sequence
ctgcgtgtaacggtaaaggaggag

SEQ ID NO: 153160 - DNA, 24 bp, Artificial sequence
  SiRNA target sequence
tgcgtgtaacggtaaaggaggaga

SEQ ID NO: 153161 - DNA, 24 bp, Artificial sequence
  SiRNA target sequence
gcgtgtaacggtaaaggaggagac

SEQ ID NO: 153162 - DNA, 24 bp, Artificial sequence
  SiRNA target sequence
cgtgtaacggtaaaggaggagaca

SEQ ID NO: 153163 - DNA, 24 bp, Artificial sequence
  SiRNA target sequence
gtgtaacggtaaaggaggagacag

SEQ ID NO: 153164 - DNA, 24 bp, Artificial sequence
  SiRNA target sequence
tgtaacggtaaaggaggagacagt

SEQ ID NO: 153165 - DNA, 24 bp, Artificial sequence
  SiRNA target sequence
gtaacggtaaaggaggagacagtg

SEQ ID NO: 153166 - DNA, 24 bp, Artificial sequence
  SiRNA target sequence
taacggtaaaggaggagacagtgt

SEQ ID NO: 153167 - DNA, 24 bp, Artificial sequence
  SiRNA target sequence
aacggtaaaggaggagacagtgtt

SEQ ID NO: 153168 - DNA, 24 bp, Artificial sequence
  SiRNA target sequence
acggtaaaggaggagacagtgttg

SEQ ID NO: 153169 - DNA, 24 bp, Artificial sequence
  SiRNA target sequence
cggtaaaggaggagacagtgttga

SEQ ID NO: 153170 - DNA, 24 bp, Artificial sequence
  SiRNA target sequence
ggtaaaggaggagacagtgttgaa

SEQ ID NO: 153171 - DNA, 24 bp, Artificial sequence
  SiRNA target sequence
gtaaaggaggagacagtgttgaaa

SEQ ID NO: 153172 - DNA, 24 bp, Artificial sequence
  SiRNA target sequence
taaaggaggagacagtgttgaaac

SEQ ID NO: 153173 - DNA, 24 bp, Artificial sequence
  SiRNA target sequence
aaaggaggagacagtgttgaaaca

SEQ ID NO: 153174 - DNA, 24 bp, Artificial sequence
  SiRNA target sequence
aaggaggagacagtgttgaaacat

SEQ ID NO: 153175 - DNA, 24 bp, Artificial sequence
  SiRNA target sequence
aggaggagacagtgttgaaacatg

SEQ ID NO: 153176 - DNA, 24 bp, Artificial sequence
  SiRNA target sequence
ggaggagacagtgttgaaacatgt

SEQ ID NO: 153177 - DNA, 24 bp, Artificial sequence
  SiRNA target sequence
gaggagacagtgttgaaacatgtg

SEQ ID NO: 153178 - DNA, 24 bp, Artificial sequence
  SiRNA target sequence
aggagacagtgttgaaacatgtga

SEQ ID NO: 153179 - DNA, 24 bp, Artificial sequence
  SiRNA target sequence
ggagacagtgttgaaacatgtgaa

SEQ ID NO: 153180 - DNA, 24 bp, Artificial sequence
  SiRNA target sequence
gagacagtgttgaaacatgtgaac

SEQ ID NO: 153181 - DNA, 24 bp, Artificial sequence
  SiRNA target sequence
agacagtgttgaaacatgtgaacc

SEQ ID NO: 153182 - DNA, 24 bp, Artificial sequence
  SiRNA target sequence
gacagtgttgaaacatgtgaacca

SEQ ID NO: 153183 - DNA, 24 bp, Artificial sequence
  SiRNA target sequence
acagtgttgaaacatgtgaaccat

SEQ ID NO: 153184 - DNA, 24 bp, Artificial sequence
  SiRNA target sequence
cagtgttgaaacatgtgaaccatg

SEQ ID NO: 153185 - DNA, 24 bp, Artificial sequence
  SiRNA target sequence
agtgttgaaacatgtgaaccatgt

SEQ ID NO: 153186 - DNA, 24 bp, Artificial sequence
  SiRNA target sequence
gtgttgaaacatgtgaaccatgta

SEQ ID NO: 153187 - DNA, 24 bp, Artificial sequence
  SiRNA target sequence
tgttgaaacatgtgaaccatgtaa

SEQ ID NO: 153188 - DNA, 24 bp, Artificial sequence
  SiRNA target sequence
gttgaaacatgtgaaccatgtaaa

SEQ ID NO: 153189 - DNA, 24 bp, Artificial sequence
  SiRNA target sequence
ttgaaacatgtgaaccatgtaaag

SEQ ID NO: 153190 - DNA, 24 bp, Artificial sequence
  SiRNA target sequence
tgaaacatgtgaaccatgtaaagg

SEQ ID NO: 153191 - DNA, 24 bp, Artificial sequence
  SiRNA target sequence
gaaacatgtgaaccatgtaaaggt

SEQ ID NO: 153192 - DNA, 24 bp, Artificial sequence
  SiRNA target sequence
aaacatgtgaaccatgtaaaggta

SEQ ID NO: 153193 - DNA, 24 bp, Artificial sequence
  SiRNA target sequence
aacatgtgaaccatgtaaaggtaa

SEQ ID NO: 153194 - DNA, 24 bp, Artificial sequence
  SiRNA target sequence
acatgtgaaccatgtaaaggtaaa

SEQ ID NO: 153195 - DNA, 24 bp, Artificial sequence
  SiRNA target sequence
catgtgaaccatgtaaaggtaaag

SEQ ID NO: 153196 - DNA, 24 bp, Artificial sequence
  SiRNA target sequence
atgtgaaccatgtaaaggtaaagg

SEQ ID NO: 153197 - DNA, 24 bp, Artificial sequence
  SiRNA target sequence
tgtgaaccatgtaaaggtaaaggt

SEQ ID NO: 153198 - DNA, 24 bp, Artificial sequence
  SiRNA target sequence
gtgaaccatgtaaaggtaaaggta

SEQ ID NO: 153199 - DNA, 24 bp, Artificial sequence
  SiRNA target sequence
tgaaccatgtaaaggtaaaggtaa

SEQ ID NO: 153200 - DNA, 24 bp, Artificial sequence
  SiRNA target sequence
gaaccatgtaaaggtaaaggtaag

SEQ ID NO: 153201 - DNA, 24 bp, Artificial sequence
  SiRNA target sequence
aaccatgtaaaggtaaaggtaagg

SEQ ID NO: 153202 - DNA, 24 bp, Artificial sequence
  SiRNA target sequence
accatgtaaaggtaaaggtaaggt

SEQ ID NO: 153203 - DNA, 24 bp, Artificial sequence
  SiRNA target sequence
ccatgtaaaggtaaaggtaaggta

SEQ ID NO: 153204 - DNA, 24 bp, Artificial sequence
  SiRNA target sequence
catgtaaaggtaaaggtaaggtag

SEQ ID NO: 153205 - DNA, 24 bp, Artificial sequence
  SiRNA target sequence
atgtaaaggtaaaggtaaggtaga

SEQ ID NO: 153206 - DNA, 24 bp, Artificial sequence
  SiRNA target sequence
tgtaaaggtaaaggtaaggtagaa

SEQ ID NO: 153207 - DNA, 24 bp, Artificial sequence
  SiRNA target sequence
gtaaaggtaaaggtaaggtagaac

SEQ ID NO: 153208 - DNA, 24 bp, Artificial sequence
  SiRNA target sequence
taaaggtaaaggtaaggtagaaca

SEQ ID NO: 153209 - DNA, 24 bp, Artificial sequence
  SiRNA target sequence
aaaggtaaaggtaaggtagaacat

SEQ ID NO: 153210 - DNA, 24 bp, Artificial sequence
  SiRNA target sequence
aaggtaaaggtaaggtagaacatc

SEQ ID NO: 153211 - DNA, 24 bp, Artificial sequence
  SiRNA target sequence
aggtaaaggtaaggtagaacatca

SEQ ID NO: 153212 - DNA, 24 bp, Artificial sequence
  SiRNA target sequence
ggtaaaggtaaggtagaacatcat

SEQ ID NO: 153213 - DNA, 24 bp, Artificial sequence
  SiRNA target sequence
gtaaaggtaaggtagaacatcata

SEQ ID NO: 153214 - DNA, 24 bp, Artificial sequence
  SiRNA target sequence
taaaggtaaggtagaacatcatag

SEQ ID NO: 153215 - DNA, 24 bp, Artificial sequence
  SiRNA target sequence
aaaggtaaggtagaacatcatagg

SEQ ID NO: 153216 - DNA, 24 bp, Artificial sequence
  SiRNA target sequence
aaggtaaggtagaacatcatagga

SEQ ID NO: 153217 - DNA, 24 bp, Artificial sequence
  SiRNA target sequence
aggtaaggtagaacatcataggag

SEQ ID NO: 153218 - DNA, 24 bp, Artificial sequence
  SiRNA target sequence
ggtaaggtagaacatcataggaga

SEQ ID NO: 153219 - DNA, 24 bp, Artificial sequence
  SiRNA target sequence
gtaaggtagaacatcataggagac

SEQ ID NO: 153220 - DNA, 24 bp, Artificial sequence
  SiRNA target sequence
taaggtagaacatcataggagact

SEQ ID NO: 153221 - DNA, 24 bp, Artificial sequence
  SiRNA target sequence
aaggtagaacatcataggagacta

SEQ ID NO: 153222 - DNA, 24 bp, Artificial sequence
  SiRNA target sequence
aggtagaacatcataggagactag

SEQ ID NO: 153223 - DNA, 24 bp, Artificial sequence
  SiRNA target sequence
ggtagaacatcataggagactagg

SEQ ID NO: 153224 - DNA, 24 bp, Artificial sequence
  SiRNA target sequence
gtagaacatcataggagactaggt

SEQ ID NO: 153225 - DNA, 24 bp, Artificial sequence
  SiRNA target sequence
tagaacatcataggagactaggtc

SEQ ID NO: 153226 - DNA, 24 bp, Artificial sequence
  SiRNA target sequence
agaacatcataggagactaggtcc

SEQ ID NO: 153227 - DNA, 24 bp, Artificial sequence
  SiRNA target sequence
gaacatcataggagactaggtcct

SEQ ID NO: 153228 - DNA, 24 bp, Artificial sequence
  SiRNA target sequence
aacatcataggagactaggtcctt

SEQ ID NO: 153229 - DNA, 24 bp, Artificial sequence
  SiRNA target sequence
acatcataggagactaggtccttt

SEQ ID NO: 153230 - DNA, 24 bp, Artificial sequence
  SiRNA target sequence
catcataggagactaggtccttta

SEQ ID NO: 153231 - DNA, 24 bp, Artificial sequence
  SiRNA target sequence
atcataggagactaggtcctttaa

SEQ ID NO: 153232 - DNA, 24 bp, Artificial sequence
  SiRNA target sequence
tcataggagactaggtcctttaat

SEQ ID NO: 153233 - DNA, 24 bp, Artificial sequence
  SiRNA target sequence
cataggagactaggtcctttaatt

SEQ ID NO: 153234 - DNA, 24 bp, Artificial sequence
  SiRNA target sequence
ataggagactaggtcctttaattt

SEQ ID NO: 153235 - DNA, 24 bp, Artificial sequence
  SiRNA target sequence
taggagactaggtcctttaatttc

SEQ ID NO: 153236 - DNA, 24 bp, Artificial sequence
  SiRNA target sequence
aggagactaggtcctttaatttct

SEQ ID NO: 153237 - DNA, 24 bp, Artificial sequence
  SiRNA target sequence
ggagactaggtcctttaatttctg

SEQ ID NO: 153238 - DNA, 24 bp, Artificial sequence
  SiRNA target sequence
gagactaggtcctttaatttctgt

SEQ ID NO: 153239 - DNA, 24 bp, Artificial sequence
  SiRNA target sequence
agactaggtcctttaatttctgta

SEQ ID NO: 153240 - DNA, 24 bp, Artificial sequence
  SiRNA target sequence
gactaggtcctttaatttctgtac

SEQ ID NO: 153241 - DNA, 24 bp, Artificial sequence
  SiRNA target sequence
actaggtcctttaatttctgtaca

SEQ ID NO: 153242 - DNA, 24 bp, Artificial sequence
  SiRNA target sequence
ctaggtcctttaatttctgtacaa

SEQ ID NO: 153243 - DNA, 24 bp, Artificial sequence
  SiRNA target sequence
taggtcctttaatttctgtacaag

SEQ ID NO: 153244 - DNA, 24 bp, Artificial sequence
  SiRNA target sequence
aggtcctttaatttctgtacaaga

SEQ ID NO: 153245 - DNA, 24 bp, Artificial sequence
  SiRNA target sequence
ggtcctttaatttctgtacaagaa

SEQ ID NO: 153246 - DNA, 24 bp, Artificial sequence
  SiRNA target sequence
gtcctttaatttctgtacaagaag

SEQ ID NO: 153247 - DNA, 24 bp, Artificial sequence
  SiRNA target sequence
tcctttaatttctgtacaagaagc

SEQ ID NO: 153248 - DNA, 24 bp, Artificial sequence
  SiRNA target sequence
cctttaatttctgtacaagaagca

SEQ ID NO: 153249 - DNA, 24 bp, Artificial sequence
  SiRNA target sequence
ctttaatttctgtacaagaagcac

SEQ ID NO: 153250 - DNA, 24 bp, Artificial sequence
  SiRNA target sequence
tttaatttctgtacaagaagcacc

SEQ ID NO: 153251 - DNA, 24 bp, Artificial sequence
  SiRNA target sequence
ttaatttctgtacaagaagcacct

SEQ ID NO: 153252 - DNA, 24 bp, Artificial sequence
  SiRNA target sequence
taatttctgtacaagaagcacctt

SEQ ID NO: 153253 - DNA, 24 bp, Artificial sequence
  SiRNA target sequence
aatttctgtacaagaagcaccttg

SEQ ID NO: 153254 - DNA, 24 bp, Artificial sequence
  SiRNA target sequence
atttctgtacaagaagcaccttgt

SEQ ID NO: 153255 - DNA, 24 bp, Artificial sequence
  SiRNA target sequence
tttctgtacaagaagcaccttgta

SEQ ID NO: 153256 - DNA, 24 bp, Artificial sequence
  SiRNA target sequence
ttctgtacaagaagcaccttgtaa

SEQ ID NO: 153257 - DNA, 24 bp, Artificial sequence
  SiRNA target sequence
tctgtacaagaagcaccttgtaat

SEQ ID NO: 153258 - DNA, 24 bp, Artificial sequence
  SiRNA target sequence
ctgtacaagaagcaccttgtaata

SEQ ID NO: 153259 - DNA, 24 bp, Artificial sequence
  SiRNA target sequence
tgtacaagaagcaccttgtaataa

SEQ ID NO: 153260 - DNA, 24 bp, Artificial sequence
  SiRNA target sequence
gtacaagaagcaccttgtaataat

SEQ ID NO: 153261 - DNA, 24 bp, Artificial sequence
  SiRNA target sequence
tacaagaagcaccttgtaataatt

SEQ ID NO: 153262 - DNA, 24 bp, Artificial sequence
  SiRNA target sequence
acaagaagcaccttgtaataattg

SEQ ID NO: 153263 - DNA, 24 bp, Artificial sequence
  SiRNA target sequence
caagaagcaccttgtaataattgt

SEQ ID NO: 153264 - DNA, 24 bp, Artificial sequence
  SiRNA target sequence
aagaagcaccttgtaataattgta

SEQ ID NO: 153265 - DNA, 24 bp, Artificial sequence
  SiRNA target sequence
agaagcaccttgtaataattgtaa

SEQ ID NO: 153266 - DNA, 24 bp, Artificial sequence
  SiRNA target sequence
gaagcaccttgtaataattgtaat

SEQ ID NO: 153267 - DNA, 24 bp, Artificial sequence
  SiRNA target sequence
aagcaccttgtaataattgtaatt

SEQ ID NO: 153268 - DNA, 24 bp, Artificial sequence
  SiRNA target sequence
agcaccttgtaataattgtaattc

SEQ ID NO: 153269 - DNA, 24 bp, Artificial sequence
  SiRNA target sequence
gcaccttgtaataattgtaattct

SEQ ID NO: 153270 - DNA, 24 bp, Artificial sequence
  SiRNA target sequence
caccttgtaataattgtaattcta

SEQ ID NO: 153271 - DNA, 24 bp, Artificial sequence
  SiRNA target sequence
accttgtaataattgtaattctac

SEQ ID NO: 153272 - DNA, 24 bp, Artificial sequence
  SiRNA target sequence
ccttgtaataattgtaattctact

SEQ ID NO: 153273 - DNA, 24 bp, Artificial sequence
  SiRNA target sequence
cttgtaataattgtaattctactg

SEQ ID NO: 153274 - DNA, 24 bp, Artificial sequence
  SiRNA target sequence
ttgtaataattgtaattctactgg

SEQ ID NO: 153275 - DNA, 24 bp, Artificial sequence
  SiRNA target sequence
tgtaataattgtaattctactgga

SEQ ID NO: 153276 - DNA, 24 bp, Artificial sequence
  SiRNA target sequence
gtaataattgtaattctactggat

SEQ ID NO: 153277 - DNA, 24 bp, Artificial sequence
  SiRNA target sequence
taataattgtaattctactggatt

SEQ ID NO: 153278 - DNA, 24 bp, Artificial sequence
  SiRNA target sequence
aataattgtaattctactggattt

SEQ ID NO: 153279 - DNA, 24 bp, Artificial sequence
  SiRNA target sequence
ataattgtaattctactggatttg

SEQ ID NO: 153280 - DNA, 24 bp, Artificial sequence
  SiRNA target sequence
taattgtaattctactggatttgt

SEQ ID NO: 153281 - DNA, 24 bp, Artificial sequence
  SiRNA target sequence
aattgtaattctactggatttgtt

SEQ ID NO: 153282 - DNA, 24 bp, Artificial sequence
  SiRNA target sequence
attgtaattctactggatttgttg

SEQ ID NO: 153283 - DNA, 24 bp, Artificial sequence
  SiRNA target sequence
ttgtaattctactggatttgttgt

SEQ ID NO: 153284 - DNA, 24 bp, Artificial sequence
  SiRNA target sequence
tgtaattctactggatttgttgtt

SEQ ID NO: 153285 - DNA, 24 bp, Artificial sequence
  SiRNA target sequence
gtaattctactggatttgttgtta

SEQ ID NO: 153286 - DNA, 24 bp, Artificial sequence
  SiRNA target sequence
taattctactggatttgttgttaa

SEQ ID NO: 153287 - DNA, 24 bp, Artificial sequence
  SiRNA target sequence
aattctactggatttgttgttaaa

SEQ ID NO: 153288 - DNA, 24 bp, Artificial sequence
  SiRNA target sequence
attctactggatttgttgttaaag

SEQ ID NO: 153289 - DNA, 24 bp, Artificial sequence
  SiRNA target sequence
ttctactggatttgttgttaaagg

SEQ ID NO: 153290 - DNA, 24 bp, Artificial sequence
  SiRNA target sequence
tctactggatttgttgttaaagga

SEQ ID NO: 153291 - DNA, 24 bp, Artificial sequence
  SiRNA target sequence
ctactggatttgttgttaaaggaa

SEQ ID NO: 153292 - DNA, 24 bp, Artificial sequence
  SiRNA target sequence
tactggatttgttgttaaaggaaa

SEQ ID NO: 153293 - DNA, 24 bp, Artificial sequence
  SiRNA target sequence
actggatttgttgttaaaggaaag

SEQ ID NO: 153294 - DNA, 24 bp, Artificial sequence
  SiRNA target sequence
ctggatttgttgttaaaggaaagc

SEQ ID NO: 153295 - DNA, 24 bp, Artificial sequence
  SiRNA target sequence
tggatttgttgttaaaggaaagct

SEQ ID NO: 153296 - DNA, 24 bp, Artificial sequence
  SiRNA target sequence
ggatttgttgttaaaggaaagctt

SEQ ID NO: 153297 - DNA, 24 bp, Artificial sequence
  SiRNA target sequence
gatttgttgttaaaggaaagcttt

SEQ ID NO: 153298 - DNA, 24 bp, Artificial sequence
  SiRNA target sequence
atttgttgttaaaggaaagctttg

SEQ ID NO: 153299 - DNA, 24 bp, Artificial sequence
  SiRNA target sequence
tttgttgttaaaggaaagctttgt

SEQ ID NO: 153300 - DNA, 24 bp, Artificial sequence
  SiRNA target sequence
ttgttgttaaaggaaagctttgtc

SEQ ID NO: 153301 - DNA, 24 bp, Artificial sequence
  SiRNA target sequence
tgttgttaaaggaaagctttgtca

SEQ ID NO: 153302 - DNA, 24 bp, Artificial sequence
  SiRNA target sequence
gttgttaaaggaaagctttgtcaa

SEQ ID NO: 153303 - DNA, 24 bp, Artificial sequence
  SiRNA target sequence
ttgttaaaggaaagctttgtcaaa

SEQ ID NO: 153304 - DNA, 24 bp, Artificial sequence
  SiRNA target sequence
tgttaaaggaaagctttgtcaaag

SEQ ID NO: 153305 - DNA, 24 bp, Artificial sequence
  SiRNA target sequence
gttaaaggaaagctttgtcaaagt

SEQ ID NO: 153306 - DNA, 24 bp, Artificial sequence
  SiRNA target sequence
ttaaaggaaagctttgtcaaagtt

SEQ ID NO: 153307 - DNA, 24 bp, Artificial sequence
  SiRNA target sequence
taaaggaaagctttgtcaaagttg

SEQ ID NO: 153308 - DNA, 24 bp, Artificial sequence
  SiRNA target sequence
aaaggaaagctttgtcaaagttgt

SEQ ID NO: 153309 - DNA, 24 bp, Artificial sequence
  SiRNA target sequence
aaggaaagctttgtcaaagttgta

SEQ ID NO: 153310 - DNA, 24 bp, Artificial sequence
  SiRNA target sequence
aggaaagctttgtcaaagttgtaa

SEQ ID NO: 153311 - DNA, 24 bp, Artificial sequence
  SiRNA target sequence
ggaaagctttgtcaaagttgtaaa

SEQ ID NO: 153312 - DNA, 24 bp, Artificial sequence
  SiRNA target sequence
gaaagctttgtcaaagttgtaaag

SEQ ID NO: 153313 - DNA, 24 bp, Artificial sequence
  SiRNA target sequence
aaagctttgtcaaagttgtaaagg

SEQ ID NO: 153314 - DNA, 24 bp, Artificial sequence
  SiRNA target sequence
aagctttgtcaaagttgtaaaggt

SEQ ID NO: 153315 - DNA, 24 bp, Artificial sequence
  SiRNA target sequence
agctttgtcaaagttgtaaaggta

SEQ ID NO: 153316 - DNA, 24 bp, Artificial sequence
  SiRNA target sequence
gctttgtcaaagttgtaaaggtaa

SEQ ID NO: 153317 - DNA, 24 bp, Artificial sequence
  SiRNA target sequence
ctttgtcaaagttgtaaaggtaaa

SEQ ID NO: 153318 - DNA, 24 bp, Artificial sequence
  SiRNA target sequence
tttgtcaaagttgtaaaggtaaac

SEQ ID NO: 153319 - DNA, 24 bp, Artificial sequence
  SiRNA target sequence
ttgtcaaagttgtaaaggtaaaca

SEQ ID NO: 153320 - DNA, 24 bp, Artificial sequence
  SiRNA target sequence
tgtcaaagttgtaaaggtaaacaa

SEQ ID NO: 153321 - DNA, 24 bp, Artificial sequence
  SiRNA target sequence
gtcaaagttgtaaaggtaaacaat

SEQ ID NO: 153322 - DNA, 24 bp, Artificial sequence
  SiRNA target sequence
tcaaagttgtaaaggtaaacaata

SEQ ID NO: 153323 - DNA, 24 bp, Artificial sequence
  SiRNA target sequence
caaagttgtaaaggtaaacaatac

SEQ ID NO: 153324 - DNA, 24 bp, Artificial sequence
  SiRNA target sequence
aaagttgtaaaggtaaacaatacg

SEQ ID NO: 153325 - DNA, 24 bp, Artificial sequence
  SiRNA target sequence
aagttgtaaaggtaaacaatacgt

SEQ ID NO: 153326 - DNA, 24 bp, Artificial sequence
  SiRNA target sequence
agttgtaaaggtaaacaatacgtt

SEQ ID NO: 153327 - DNA, 24 bp, Artificial sequence
  SiRNA target sequence
gttgtaaaggtaaacaatacgttg

SEQ ID NO: 153328 - DNA, 24 bp, Artificial sequence
  SiRNA target sequence
ttgtaaaggtaaacaatacgttga

SEQ ID NO: 153329 - DNA, 24 bp, Artificial sequence
  SiRNA target sequence
tgtaaaggtaaacaatacgttgag

SEQ ID NO: 153330 - DNA, 24 bp, Artificial sequence
  SiRNA target sequence
gtaaaggtaaacaatacgttgaga

SEQ ID NO: 153331 - DNA, 24 bp, Artificial sequence
  SiRNA target sequence
taaaggtaaacaatacgttgagac

SEQ ID NO: 153332 - DNA, 24 bp, Artificial sequence
  SiRNA target sequence
aaaggtaaacaatacgttgagact

SEQ ID NO: 153333 - DNA, 24 bp, Artificial sequence
  SiRNA target sequence
aaggtaaacaatacgttgagacta

SEQ ID NO: 153334 - DNA, 24 bp, Artificial sequence
  SiRNA target sequence
aggtaaacaatacgttgagactaa

SEQ ID NO: 153335 - DNA, 24 bp, Artificial sequence
  SiRNA target sequence
ggtaaacaatacgttgagactaaa

SEQ ID NO: 153336 - DNA, 24 bp, Artificial sequence
  SiRNA target sequence
gtaaacaatacgttgagactaaag

SEQ ID NO: 153337 - DNA, 24 bp, Artificial sequence
  SiRNA target sequence
taaacaatacgttgagactaaaga

SEQ ID NO: 153338 - DNA, 24 bp, Artificial sequence
  SiRNA target sequence
aaacaatacgttgagactaaagaa

SEQ ID NO: 153339 - DNA, 24 bp, Artificial sequence
  SiRNA target sequence
aacaatacgttgagactaaagaac

SEQ ID NO: 153340 - DNA, 24 bp, Artificial sequence
  SiRNA target sequence
acaatacgttgagactaaagaaca

SEQ ID NO: 153341 - DNA, 24 bp, Artificial sequence
  SiRNA target sequence
caatacgttgagactaaagaacat

SEQ ID NO: 153342 - DNA, 24 bp, Artificial sequence
  SiRNA target sequence
aatacgttgagactaaagaacata

SEQ ID NO: 153343 - DNA, 24 bp, Artificial sequence
  SiRNA target sequence
atacgttgagactaaagaacatat

SEQ ID NO: 153344 - DNA, 24 bp, Artificial sequence
  SiRNA target sequence
tacgttgagactaaagaacatatt

SEQ ID NO: 153345 - DNA, 24 bp, Artificial sequence
  SiRNA target sequence
acgttgagactaaagaacatattg

SEQ ID NO: 153346 - DNA, 24 bp, Artificial sequence
  SiRNA target sequence
cgttgagactaaagaacatattga

SEQ ID NO: 153347 - DNA, 24 bp, Artificial sequence
  SiRNA target sequence
gttgagactaaagaacatattgaa

SEQ ID NO: 153348 - DNA, 24 bp, Artificial sequence
  SiRNA target sequence
ttgagactaaagaacatattgaag

SEQ ID NO: 153349 - DNA, 24 bp, Artificial sequence
  SiRNA target sequence
tgagactaaagaacatattgaagt

SEQ ID NO: 153350 - DNA, 24 bp, Artificial sequence
  SiRNA target sequence
gagactaaagaacatattgaagtg

SEQ ID NO: 153351 - DNA, 24 bp, Artificial sequence
  SiRNA target sequence
agactaaagaacatattgaagtgg

SEQ ID NO: 153352 - DNA, 24 bp, Artificial sequence
  SiRNA target sequence
gactaaagaacatattgaagtgga

SEQ ID NO: 153353 - DNA, 24 bp, Artificial sequence
  SiRNA target sequence
actaaagaacatattgaagtggaa

SEQ ID NO: 153354 - DNA, 24 bp, Artificial sequence
  SiRNA target sequence
ctaaagaacatattgaagtggaag

SEQ ID NO: 153355 - DNA, 24 bp, Artificial sequence
  SiRNA target sequence
taaagaacatattgaagtggaagt

SEQ ID NO: 153356 - DNA, 24 bp, Artificial sequence
  SiRNA target sequence
aaagaacatattgaagtggaagta

SEQ ID NO: 153357 - DNA, 24 bp, Artificial sequence
  SiRNA target sequence
aagaacatattgaagtggaagtag

SEQ ID NO: 153358 - DNA, 24 bp, Artificial sequence
  SiRNA target sequence
agaacatattgaagtggaagtaga

SEQ ID NO: 153359 - DNA, 24 bp, Artificial sequence
  SiRNA target sequence
gaacatattgaagtggaagtagag

SEQ ID NO: 153360 - DNA, 24 bp, Artificial sequence
  SiRNA target sequence
aacatattgaagtggaagtagagc

SEQ ID NO: 153361 - DNA, 24 bp, Artificial sequence
  SiRNA target sequence
acatattgaagtggaagtagagcc

SEQ ID NO: 153362 - DNA, 24 bp, Artificial sequence
  SiRNA target sequence
catattgaagtggaagtagagcca

SEQ ID NO: 153363 - DNA, 24 bp, Artificial sequence
  SiRNA target sequence
atattgaagtggaagtagagccag

SEQ ID NO: 153364 - DNA, 24 bp, Artificial sequence
  SiRNA target sequence
tattgaagtggaagtagagccagg

SEQ ID NO: 153365 - DNA, 24 bp, Artificial sequence
  SiRNA target sequence
attgaagtggaagtagagccagga

SEQ ID NO: 153366 - DNA, 24 bp, Artificial sequence
  SiRNA target sequence
ttgaagtggaagtagagccaggag

SEQ ID NO: 153367 - DNA, 24 bp, Artificial sequence
  SiRNA target sequence
tgaagtggaagtagagccaggagt

SEQ ID NO: 153368 - DNA, 24 bp, Artificial sequence
  SiRNA target sequence
gaagtggaagtagagccaggagta

SEQ ID NO: 153369 - DNA, 24 bp, Artificial sequence
  SiRNA target sequence
aagtggaagtagagccaggagtac

SEQ ID NO: 153370 - DNA, 24 bp, Artificial sequence
  SiRNA target sequence
agtggaagtagagccaggagtaca

SEQ ID NO: 153371 - DNA, 24 bp, Artificial sequence
  SiRNA target sequence
gtggaagtagagccaggagtacag

SEQ ID NO: 153372 - DNA, 24 bp, Artificial sequence
  SiRNA target sequence
tggaagtagagccaggagtacaga

SEQ ID NO: 153373 - DNA, 24 bp, Artificial sequence
  SiRNA target sequence
ggaagtagagccaggagtacagaa

SEQ ID NO: 153374 - DNA, 24 bp, Artificial sequence
  SiRNA target sequence
gaagtagagccaggagtacagaac

SEQ ID NO: 153375 - DNA, 24 bp, Artificial sequence
  SiRNA target sequence
aagtagagccaggagtacagaacg

SEQ ID NO: 153376 - DNA, 24 bp, Artificial sequence
  SiRNA target sequence
agtagagccaggagtacagaacgg

SEQ ID NO: 153377 - DNA, 24 bp, Artificial sequence
  SiRNA target sequence
gtagagccaggagtacagaacggt

SEQ ID NO: 153378 - DNA, 24 bp, Artificial sequence
  SiRNA target sequence
tagagccaggagtacagaacggta

SEQ ID NO: 153379 - DNA, 24 bp, Artificial sequence
  SiRNA target sequence
agagccaggagtacagaacggtag

SEQ ID NO: 153380 - DNA, 24 bp, Artificial sequence
  SiRNA target sequence
gagccaggagtacagaacggtaga

SEQ ID NO: 153381 - DNA, 24 bp, Artificial sequence
  SiRNA target sequence
agccaggagtacagaacggtagaa

SEQ ID NO: 153382 - DNA, 24 bp, Artificial sequence
  SiRNA target sequence
gccaggagtacagaacggtagaaa

SEQ ID NO: 153383 - DNA, 24 bp, Artificial sequence
  SiRNA target sequence
ccaggagtacagaacggtagaaaa

SEQ ID NO: 153384 - DNA, 24 bp, Artificial sequence
  SiRNA target sequence
caggagtacagaacggtagaaaat

SEQ ID NO: 153385 - DNA, 24 bp, Artificial sequence
  SiRNA target sequence
aggagtacagaacggtagaaaata

SEQ ID NO: 153386 - DNA, 24 bp, Artificial sequence
  SiRNA target sequence
ggagtacagaacggtagaaaatat

SEQ ID NO: 153387 - DNA, 24 bp, Artificial sequence
  SiRNA target sequence
gagtacagaacggtagaaaatata

SEQ ID NO: 153388 - DNA, 24 bp, Artificial sequence
  SiRNA target sequence
agtacagaacggtagaaaatatac

SEQ ID NO: 153389 - DNA, 24 bp, Artificial sequence
  SiRNA target sequence
gtacagaacggtagaaaatataca

SEQ ID NO: 153390 - DNA, 24 bp, Artificial sequence
  SiRNA target sequence
tacagaacggtagaaaatatacat

SEQ ID NO: 153391 - DNA, 24 bp, Artificial sequence
  SiRNA target sequence
acagaacggtagaaaatatacatt

SEQ ID NO: 153392 - DNA, 24 bp, Artificial sequence
  SiRNA target sequence
cagaacggtagaaaatatacattt

SEQ ID NO: 153393 - DNA, 24 bp, Artificial sequence
  SiRNA target sequence
agaacggtagaaaatatacatttt

SEQ ID NO: 153394 - DNA, 24 bp, Artificial sequence
  SiRNA target sequence
gaacggtagaaaatatacattttc

SEQ ID NO: 153395 - DNA, 24 bp, Artificial sequence
  SiRNA target sequence
aacggtagaaaatatacattttct

SEQ ID NO: 153396 - DNA, 24 bp, Artificial sequence
  SiRNA target sequence
acggtagaaaatatacattttctg

SEQ ID NO: 153397 - DNA, 24 bp, Artificial sequence
  SiRNA target sequence
cggtagaaaatatacattttctgg

SEQ ID NO: 153398 - DNA, 24 bp, Artificial sequence
  SiRNA target sequence
ggtagaaaatatacattttctggc

SEQ ID NO: 153399 - DNA, 24 bp, Artificial sequence
  SiRNA target sequence
gtagaaaatatacattttctggca

SEQ ID NO: 153400 - DNA, 24 bp, Artificial sequence
  SiRNA target sequence
tagaaaatatacattttctggcaa

SEQ ID NO: 153401 - DNA, 24 bp, Artificial sequence
  SiRNA target sequence
agaaaatatacattttctggcaaa

SEQ ID NO: 153402 - DNA, 24 bp, Artificial sequence
  SiRNA target sequence
gaaaatatacattttctggcaaag

SEQ ID NO: 153403 - DNA, 24 bp, Artificial sequence
  SiRNA target sequence
aaaatatacattttctggcaaagg

SEQ ID NO: 153404 - DNA, 24 bp, Artificial sequence
  SiRNA target sequence
aaatatacattttctggcaaagga

SEQ ID NO: 153405 - DNA, 24 bp, Artificial sequence
  SiRNA target sequence
aatatacattttctggcaaaggaa

SEQ ID NO: 153406 - DNA, 24 bp, Artificial sequence
  SiRNA target sequence
atatacattttctggcaaaggaaa

SEQ ID NO: 153407 - DNA, 24 bp, Artificial sequence
  SiRNA target sequence
tatacattttctggcaaaggaaat

SEQ ID NO: 153408 - DNA, 24 bp, Artificial sequence
  SiRNA target sequence
atacattttctggcaaaggaaatc

SEQ ID NO: 153409 - DNA, 24 bp, Artificial sequence
  SiRNA target sequence
tacattttctggcaaaggaaatca

SEQ ID NO: 153410 - DNA, 24 bp, Artificial sequence
  SiRNA target sequence
acattttctggcaaaggaaatcat

SEQ ID NO: 153411 - DNA, 24 bp, Artificial sequence
  SiRNA target sequence
cattttctggcaaaggaaatcata

SEQ ID NO: 153412 - DNA, 24 bp, Artificial sequence
  SiRNA target sequence
attttctggcaaaggaaatcataa

SEQ ID NO: 153413 - DNA, 24 bp, Artificial sequence
  SiRNA target sequence
ttttctggcaaaggaaatcataaa

SEQ ID NO: 153414 - DNA, 24 bp, Artificial sequence
  SiRNA target sequence
tttctggcaaaggaaatcataaaa

SEQ ID NO: 153415 - DNA, 24 bp, Artificial sequence
  SiRNA target sequence
ttctggcaaaggaaatcataaaaa

SEQ ID NO: 153416 - DNA, 24 bp, Artificial sequence
  SiRNA target sequence
tctggcaaaggaaatcataaaaaa

SEQ ID NO: 153417 - DNA, 24 bp, Artificial sequence
  SiRNA target sequence
ctggcaaaggaaatcataaaaaaa

SEQ ID NO: 153418 - DNA, 24 bp, Artificial sequence
  SiRNA target sequence
tggcaaaggaaatcataaaaaaaa

SEQ ID NO: 153419 - DNA, 24 bp, Artificial sequence
  SiRNA target sequence
ggcaaaggaaatcataaaaaaaat

SEQ ID NO: 153420 - DNA, 24 bp, Artificial sequence
  SiRNA target sequence
gcaaaggaaatcataaaaaaaatt

SEQ ID NO: 153421 - DNA, 24 bp, Artificial sequence
  SiRNA target sequence
caaaggaaatcataaaaaaaattg

SEQ ID NO: 153422 - DNA, 24 bp, Artificial sequence
  SiRNA target sequence
aaaggaaatcataaaaaaaattgt

SEQ ID NO: 153423 - DNA, 24 bp, Artificial sequence
  SiRNA target sequence
aaggaaatcataaaaaaaattgtg

SEQ ID NO: 153424 - DNA, 24 bp, Artificial sequence
  SiRNA target sequence
aggaaatcataaaaaaaattgtgt

SEQ ID NO: 153425 - DNA, 24 bp, Artificial sequence
  SiRNA target sequence
ggaaatcataaaaaaaattgtgta

SEQ ID NO: 153426 - DNA, 24 bp, Artificial sequence
  SiRNA target sequence
gaaatcataaaaaaaattgtgtac

SEQ ID NO: 153427 - DNA, 24 bp, Artificial sequence
  SiRNA target sequence
aaatcataaaaaaaattgtgtacc

SEQ ID NO: 153428 - DNA, 24 bp, Artificial sequence
  SiRNA target sequence
aatcataaaaaaaattgtgtaccg

SEQ ID NO: 153429 - DNA, 24 bp, Artificial sequence
  SiRNA target sequence
atcataaaaaaaattgtgtaccgg

SEQ ID NO: 153430 - DNA, 24 bp, Artificial sequence
  SiRNA target sequence
tcataaaaaaaattgtgtaccggg

SEQ ID NO: 153431 - DNA, 24 bp, Artificial sequence
  SiRNA target sequence
cataaaaaaaattgtgtaccgggt

SEQ ID NO: 153432 - DNA, 24 bp, Artificial sequence
  SiRNA target sequence
ataaaaaaaattgtgtaccgggtg

SEQ ID NO: 153433 - DNA, 24 bp, Artificial sequence
  SiRNA target sequence
taaaaaaaattgtgtaccgggtga

SEQ ID NO: 153434 - DNA, 24 bp, Artificial sequence
  SiRNA target sequence
aaaaaaaattgtgtaccgggtgat

SEQ ID NO: 153435 - DNA, 24 bp, Artificial sequence
  SiRNA target sequence
aaaaaaattgtgtaccgggtgatg

SEQ ID NO: 153436 - DNA, 24 bp, Artificial sequence
  SiRNA target sequence
aaaaaattgtgtaccgggtgatgt

SEQ ID NO: 153437 - DNA, 24 bp, Artificial sequence
  SiRNA target sequence
aaaaattgtgtaccgggtgatgtg

SEQ ID NO: 153438 - DNA, 24 bp, Artificial sequence
  SiRNA target sequence
aaaattgtgtaccgggtgatgtga

SEQ ID NO: 153439 - DNA, 24 bp, Artificial sequence
  SiRNA target sequence
aaattgtgtaccgggtgatgtgat

SEQ ID NO: 153440 - DNA, 24 bp, Artificial sequence
  SiRNA target sequence
aattgtgtaccgggtgatgtgatt

SEQ ID NO: 153441 - DNA, 24 bp, Artificial sequence
  SiRNA target sequence
attgtgtaccgggtgatgtgattc

SEQ ID NO: 153442 - DNA, 24 bp, Artificial sequence
  SiRNA target sequence
ttgtgtaccgggtgatgtgattct

SEQ ID NO: 153443 - DNA, 24 bp, Artificial sequence
  SiRNA target sequence
tgtgtaccgggtgatgtgattctt

SEQ ID NO: 153444 - DNA, 24 bp, Artificial sequence
  SiRNA target sequence
gtgtaccgggtgatgtgattctta

SEQ ID NO: 153445 - DNA, 24 bp, Artificial sequence
  SiRNA target sequence
tgtaccgggtgatgtgattcttat

SEQ ID NO: 153446 - DNA, 24 bp, Artificial sequence
  SiRNA target sequence
gtaccgggtgatgtgattcttatt

SEQ ID NO: 153447 - DNA, 24 bp, Artificial sequence
  SiRNA target sequence
taccgggtgatgtgattcttattg

SEQ ID NO: 153448 - DNA, 24 bp, Artificial sequence
  SiRNA target sequence
accgggtgatgtgattcttattgt

SEQ ID NO: 153449 - DNA, 24 bp, Artificial sequence
  SiRNA target sequence
ccgggtgatgtgattcttattgta

SEQ ID NO: 153450 - DNA, 24 bp, Artificial sequence
  SiRNA target sequence
cgggtgatgtgattcttattgtaa

SEQ ID NO: 153451 - DNA, 24 bp, Artificial sequence
  SiRNA target sequence
gggtgatgtgattcttattgtaaa

SEQ ID NO: 153452 - DNA, 24 bp, Artificial sequence
  SiRNA target sequence
ggtgatgtgattcttattgtaaac

SEQ ID NO: 153453 - DNA, 24 bp, Artificial sequence
  SiRNA target sequence
gtgatgtgattcttattgtaaaca

SEQ ID NO: 153454 - DNA, 24 bp, Artificial sequence
  SiRNA target sequence
tgatgtgattcttattgtaaacat

SEQ ID NO: 153455 - DNA, 24 bp, Artificial sequence
  SiRNA target sequence
gatgtgattcttattgtaaacatt

SEQ ID NO: 153456 - DNA, 24 bp, Artificial sequence
  SiRNA target sequence
atgtgattcttattgtaaacatta

SEQ ID NO: 153457 - DNA, 24 bp, Artificial sequence
  SiRNA target sequence
tgtgattcttattgtaaacattac

SEQ ID NO: 153458 - DNA, 24 bp, Artificial sequence
  SiRNA target sequence
gtgattcttattgtaaacattaca

SEQ ID NO: 153459 - DNA, 24 bp, Artificial sequence
  SiRNA target sequence
tgattcttattgtaaacattacaa

SEQ ID NO: 153460 - DNA, 24 bp, Artificial sequence
  SiRNA target sequence
gattcttattgtaaacattacaaa

SEQ ID NO: 153461 - DNA, 24 bp, Artificial sequence
  SiRNA target sequence
attcttattgtaaacattacaaat

SEQ ID NO: 153462 - DNA, 24 bp, Artificial sequence
  SiRNA target sequence
ttcttattgtaaacattacaaatg

SEQ ID NO: 153463 - DNA, 24 bp, Artificial sequence
  SiRNA target sequence
tcttattgtaaacattacaaatga

SEQ ID NO: 153464 - DNA, 24 bp, Artificial sequence
  SiRNA target sequence
cttattgtaaacattacaaatgat

SEQ ID NO: 153465 - DNA, 24 bp, Artificial sequence
  SiRNA target sequence
ttattgtaaacattacaaatgatc

SEQ ID NO: 153466 - DNA, 24 bp, Artificial sequence
  SiRNA target sequence
tattgtaaacattacaaatgatcc

SEQ ID NO: 153467 - DNA, 24 bp, Artificial sequence
  SiRNA target sequence
attgtaaacattacaaatgatcca

SEQ ID NO: 153468 - DNA, 24 bp, Artificial sequence
  SiRNA target sequence
ttgtaaacattacaaatgatccaa

SEQ ID NO: 153469 - DNA, 24 bp, Artificial sequence
  SiRNA target sequence
tgtaaacattacaaatgatccaag

SEQ ID NO: 153470 - DNA, 24 bp, Artificial sequence
  SiRNA target sequence
gtaaacattacaaatgatccaaga

SEQ ID NO: 153471 - DNA, 24 bp, Artificial sequence
  SiRNA target sequence
taaacattacaaatgatccaagat

SEQ ID NO: 153472 - DNA, 24 bp, Artificial sequence
  SiRNA target sequence
aaacattacaaatgatccaagatt

SEQ ID NO: 153473 - DNA, 24 bp, Artificial sequence
  SiRNA target sequence
aacattacaaatgatccaagattt

SEQ ID NO: 153474 - DNA, 24 bp, Artificial sequence
  SiRNA target sequence
acattacaaatgatccaagattta

SEQ ID NO: 153475 - DNA, 24 bp, Artificial sequence
  SiRNA target sequence
cattacaaatgatccaagatttag

SEQ ID NO: 153476 - DNA, 24 bp, Artificial sequence
  SiRNA target sequence
attacaaatgatccaagatttaga

SEQ ID NO: 153477 - DNA, 24 bp, Artificial sequence
  SiRNA target sequence
ttacaaatgatccaagatttagaa

SEQ ID NO: 153478 - DNA, 24 bp, Artificial sequence
  SiRNA target sequence
tacaaatgatccaagatttagaaa

SEQ ID NO: 153479 - DNA, 24 bp, Artificial sequence
  SiRNA target sequence
acaaatgatccaagatttagaaaa

SEQ ID NO: 153480 - DNA, 24 bp, Artificial sequence
  SiRNA target sequence
caaatgatccaagatttagaaaaa

SEQ ID NO: 153481 - DNA, 24 bp, Artificial sequence
  SiRNA target sequence
aaatgatccaagatttagaaaaag

SEQ ID NO: 153482 - DNA, 24 bp, Artificial sequence
  SiRNA target sequence
aatgatccaagatttagaaaaagt

SEQ ID NO: 153483 - DNA, 24 bp, Artificial sequence
  SiRNA target sequence
atgatccaagatttagaaaaagtg

SEQ ID NO: 153484 - DNA, 24 bp, Artificial sequence
  SiRNA target sequence
tgatccaagatttagaaaaagtgg

SEQ ID NO: 153485 - DNA, 24 bp, Artificial sequence
  SiRNA target sequence
gatccaagatttagaaaaagtgga

SEQ ID NO: 153486 - DNA, 24 bp, Artificial sequence
  SiRNA target sequence
atccaagatttagaaaaagtggat

SEQ ID NO: 153487 - DNA, 24 bp, Artificial sequence
  SiRNA target sequence
tccaagatttagaaaaagtggata

SEQ ID NO: 153488 - DNA, 24 bp, Artificial sequence
  SiRNA target sequence
ccaagatttagaaaaagtggatat

SEQ ID NO: 153489 - DNA, 24 bp, Artificial sequence
  SiRNA target sequence
caagatttagaaaaagtggatata

SEQ ID NO: 153490 - DNA, 24 bp, Artificial sequence
  SiRNA target sequence
aagatttagaaaaagtggatataa

SEQ ID NO: 153491 - DNA, 24 bp, Artificial sequence
  SiRNA target sequence
agatttagaaaaagtggatataat

SEQ ID NO: 153492 - DNA, 24 bp, Artificial sequence
  SiRNA target sequence
gatttagaaaaagtggatataatt

SEQ ID NO: 153493 - DNA, 24 bp, Artificial sequence
  SiRNA target sequence
atttagaaaaagtggatataattt

SEQ ID NO: 153494 - DNA, 24 bp, Artificial sequence
  SiRNA target sequence
tttagaaaaagtggatataattta

SEQ ID NO: 153495 - DNA, 24 bp, Artificial sequence
  SiRNA target sequence
ttagaaaaagtggatataatttaa

SEQ ID NO: 153496 - DNA, 24 bp, Artificial sequence
  SiRNA target sequence
tagaaaaagtggatataatttaat

SEQ ID NO: 153497 - DNA, 24 bp, Artificial sequence
  SiRNA target sequence
agaaaaagtggatataatttaatt

SEQ ID NO: 153498 - DNA, 24 bp, Artificial sequence
  SiRNA target sequence
gaaaaagtggatataatttaatta

SEQ ID NO: 153499 - DNA, 24 bp, Artificial sequence
  SiRNA target sequence
aaaaagtggatataatttaattag

SEQ ID NO: 153500 - DNA, 24 bp, Artificial sequence
  SiRNA target sequence
aaaagtggatataatttaattagt

SEQ ID NO: 153501 - DNA, 24 bp, Artificial sequence
  SiRNA target sequence
aaagtggatataatttaattagta

SEQ ID NO: 153502 - DNA, 24 bp, Artificial sequence
  SiRNA target sequence
aagtggatataatttaattagtaa

SEQ ID NO: 153503 - DNA, 24 bp, Artificial sequence
  SiRNA target sequence
agtggatataatttaattagtaag

SEQ ID NO: 153504 - DNA, 24 bp, Artificial sequence
  SiRNA target sequence
gtggatataatttaattagtaagg

SEQ ID NO: 153505 - DNA, 24 bp, Artificial sequence
  SiRNA target sequence
tggatataatttaattagtaaggt

SEQ ID NO: 153506 - DNA, 24 bp, Artificial sequence
  SiRNA target sequence
ggatataatttaattagtaaggtt

SEQ ID NO: 153507 - DNA, 24 bp, Artificial sequence
  SiRNA target sequence
gatataatttaattagtaaggttg

SEQ ID NO: 153508 - DNA, 24 bp, Artificial sequence
  SiRNA target sequence
atataatttaattagtaaggttga

SEQ ID NO: 153509 - DNA, 24 bp, Artificial sequence
  SiRNA target sequence
tataatttaattagtaaggttgat

SEQ ID NO: 153510 - DNA, 24 bp, Artificial sequence
  SiRNA target sequence
ataatttaattagtaaggttgata

SEQ ID NO: 153511 - DNA, 24 bp, Artificial sequence
  SiRNA target sequence
taatttaattagtaaggttgatat

SEQ ID NO: 153512 - DNA, 24 bp, Artificial sequence
  SiRNA target sequence
aatttaattagtaaggttgatatt

SEQ ID NO: 153513 - DNA, 24 bp, Artificial sequence
  SiRNA target sequence
atttaattagtaaggttgatattc

SEQ ID NO: 153514 - DNA, 24 bp, Artificial sequence
  SiRNA target sequence
tttaattagtaaggttgatattcc

SEQ ID NO: 153515 - DNA, 24 bp, Artificial sequence
  SiRNA target sequence
ttaattagtaaggttgatattcca

SEQ ID NO: 153516 - DNA, 24 bp, Artificial sequence
  SiRNA target sequence
taattagtaaggttgatattccat

SEQ ID NO: 153517 - DNA, 24 bp, Artificial sequence
  SiRNA target sequence
aattagtaaggttgatattccatt

SEQ ID NO: 153518 - DNA, 24 bp, Artificial sequence
  SiRNA target sequence
attagtaaggttgatattccattg

SEQ ID NO: 153519 - DNA, 24 bp, Artificial sequence
  SiRNA target sequence
ttagtaaggttgatattccattgt

SEQ ID NO: 153520 - DNA, 24 bp, Artificial sequence
  SiRNA target sequence
tagtaaggttgatattccattgta

SEQ ID NO: 153521 - DNA, 24 bp, Artificial sequence
  SiRNA target sequence
agtaaggttgatattccattgtat

SEQ ID NO: 153522 - DNA, 24 bp, Artificial sequence
  SiRNA target sequence
gtaaggttgatattccattgtatg

SEQ ID NO: 153523 - DNA, 24 bp, Artificial sequence
  SiRNA target sequence
taaggttgatattccattgtatgt

SEQ ID NO: 153524 - DNA, 24 bp, Artificial sequence
  SiRNA target sequence
aaggttgatattccattgtatgtt

SEQ ID NO: 153525 - DNA, 24 bp, Artificial sequence
  SiRNA target sequence
aggttgatattccattgtatgttg

SEQ ID NO: 153526 - DNA, 24 bp, Artificial sequence
  SiRNA target sequence
ggttgatattccattgtatgttgc

SEQ ID NO: 153527 - DNA, 24 bp, Artificial sequence
  SiRNA target sequence
gttgatattccattgtatgttgct

SEQ ID NO: 153528 - DNA, 24 bp, Artificial sequence
  SiRNA target sequence
ttgatattccattgtatgttgctt

SEQ ID NO: 153529 - DNA, 24 bp, Artificial sequence
  SiRNA target sequence
tgatattccattgtatgttgcttt

SEQ ID NO: 153530 - DNA, 24 bp, Artificial sequence
  SiRNA target sequence
gatattccattgtatgttgctttg

SEQ ID NO: 153531 - DNA, 24 bp, Artificial sequence
  SiRNA target sequence
atattccattgtatgttgctttgg

SEQ ID NO: 153532 - DNA, 24 bp, Artificial sequence
  SiRNA target sequence
tattccattgtatgttgctttggc

SEQ ID NO: 153533 - DNA, 24 bp, Artificial sequence
  SiRNA target sequence
attccattgtatgttgctttggca

SEQ ID NO: 153534 - DNA, 24 bp, Artificial sequence
  SiRNA target sequence
ttccattgtatgttgctttggcag

SEQ ID NO: 153535 - DNA, 24 bp, Artificial sequence
  SiRNA target sequence
tccattgtatgttgctttggcagg

SEQ ID NO: 153536 - DNA, 24 bp, Artificial sequence
  SiRNA target sequence
ccattgtatgttgctttggcaggc

SEQ ID NO: 153537 - DNA, 24 bp, Artificial sequence
  SiRNA target sequence
cattgtatgttgctttggcaggcg

SEQ ID NO: 153538 - DNA, 24 bp, Artificial sequence
  SiRNA target sequence
attgtatgttgctttggcaggcgg

SEQ ID NO: 153539 - DNA, 24 bp, Artificial sequence
  SiRNA target sequence
ttgtatgttgctttggcaggcgga

SEQ ID NO: 153540 - DNA, 24 bp, Artificial sequence
  SiRNA target sequence
tgtatgttgctttggcaggcggac

SEQ ID NO: 153541 - DNA, 24 bp, Artificial sequence
  SiRNA target sequence
gtatgttgctttggcaggcggaca

SEQ ID NO: 153542 - DNA, 24 bp, Artificial sequence
  SiRNA target sequence
tatgttgctttggcaggcggacag

SEQ ID NO: 153543 - DNA, 24 bp, Artificial sequence
  SiRNA target sequence
atgttgctttggcaggcggacaga

SEQ ID NO: 153544 - DNA, 24 bp, Artificial sequence
  SiRNA target sequence
tgttgctttggcaggcggacagat

SEQ ID NO: 153545 - DNA, 24 bp, Artificial sequence
  SiRNA target sequence
gttgctttggcaggcggacagatt

SEQ ID NO: 153546 - DNA, 24 bp, Artificial sequence
  SiRNA target sequence
ttgctttggcaggcggacagatta

SEQ ID NO: 153547 - DNA, 24 bp, Artificial sequence
  SiRNA target sequence
tgctttggcaggcggacagattat

SEQ ID NO: 153548 - DNA, 24 bp, Artificial sequence
  SiRNA target sequence
gctttggcaggcggacagattata

SEQ ID NO: 153549 - DNA, 24 bp, Artificial sequence
  SiRNA target sequence
ctttggcaggcggacagattatat

SEQ ID NO: 153550 - DNA, 24 bp, Artificial sequence
  SiRNA target sequence
tttggcaggcggacagattatatt

SEQ ID NO: 153551 - DNA, 24 bp, Artificial sequence
  SiRNA target sequence
ttggcaggcggacagattatattt

SEQ ID NO: 153552 - DNA, 24 bp, Artificial sequence
  SiRNA target sequence
tggcaggcggacagattatatttg

SEQ ID NO: 153553 - DNA, 24 bp, Artificial sequence
  SiRNA target sequence
ggcaggcggacagattatatttga

SEQ ID NO: 153554 - DNA, 24 bp, Artificial sequence
  SiRNA target sequence
gcaggcggacagattatatttgaa

SEQ ID NO: 153555 - DNA, 24 bp, Artificial sequence
  SiRNA target sequence
caggcggacagattatatttgaac

SEQ ID NO: 153556 - DNA, 24 bp, Artificial sequence
  SiRNA target sequence
aggcggacagattatatttgaaca

SEQ ID NO: 153557 - DNA, 24 bp, Artificial sequence
  SiRNA target sequence
ggcggacagattatatttgaacat

SEQ ID NO: 153558 - DNA, 24 bp, Artificial sequence
  SiRNA target sequence
gcggacagattatatttgaacata

SEQ ID NO: 153559 - DNA, 24 bp, Artificial sequence
  SiRNA target sequence
cggacagattatatttgaacatat

SEQ ID NO: 153560 - DNA, 24 bp, Artificial sequence
  SiRNA target sequence
ggacagattatatttgaacatatc

SEQ ID NO: 153561 - DNA, 24 bp, Artificial sequence
  SiRNA target sequence
gacagattatatttgaacatatca

SEQ ID NO: 153562 - DNA, 24 bp, Artificial sequence
  SiRNA target sequence
acagattatatttgaacatatcac

SEQ ID NO: 153563 - DNA, 24 bp, Artificial sequence
  SiRNA target sequence
cagattatatttgaacatatcact

SEQ ID NO: 153564 - DNA, 24 bp, Artificial sequence
  SiRNA target sequence
agattatatttgaacatatcactg

SEQ ID NO: 153565 - DNA, 24 bp, Artificial sequence
  SiRNA target sequence
gattatatttgaacatatcactgg

SEQ ID NO: 153566 - DNA, 24 bp, Artificial sequence
  SiRNA target sequence
attatatttgaacatatcactggt

SEQ ID NO: 153567 - DNA, 24 bp, Artificial sequence
  SiRNA target sequence
ttatatttgaacatatcactggta

SEQ ID NO: 153568 - DNA, 24 bp, Artificial sequence
  SiRNA target sequence
tatatttgaacatatcactggtaa

SEQ ID NO: 153569 - DNA, 24 bp, Artificial sequence
  SiRNA target sequence
atatttgaacatatcactggtaag

SEQ ID NO: 153570 - DNA, 24 bp, Artificial sequence
  SiRNA target sequence
tatttgaacatatcactggtaaga

SEQ ID NO: 153571 - DNA, 24 bp, Artificial sequence
  SiRNA target sequence
atttgaacatatcactggtaagaa

SEQ ID NO: 153572 - DNA, 24 bp, Artificial sequence
  SiRNA target sequence
tttgaacatatcactggtaagaaa

SEQ ID NO: 153573 - DNA, 24 bp, Artificial sequence
  SiRNA target sequence
ttgaacatatcactggtaagaaat

SEQ ID NO: 153574 - DNA, 24 bp, Artificial sequence
  SiRNA target sequence
tgaacatatcactggtaagaaatt

SEQ ID NO: 153575 - DNA, 24 bp, Artificial sequence
  SiRNA target sequence
gaacatatcactggtaagaaattt

SEQ ID NO: 153576 - DNA, 24 bp, Artificial sequence
  SiRNA target sequence
aacatatcactggtaagaaatttg

SEQ ID NO: 153577 - DNA, 24 bp, Artificial sequence
  SiRNA target sequence
acatatcactggtaagaaatttga

SEQ ID NO: 153578 - DNA, 24 bp, Artificial sequence
  SiRNA target sequence
catatcactggtaagaaatttgaa

SEQ ID NO: 153579 - DNA, 24 bp, Artificial sequence
  SiRNA target sequence
atatcactggtaagaaatttgaaa

SEQ ID NO: 153580 - DNA, 24 bp, Artificial sequence
  SiRNA target sequence
tatcactggtaagaaatttgaaat

SEQ ID NO: 153581 - DNA, 24 bp, Artificial sequence
  SiRNA target sequence
atcactggtaagaaatttgaaatt

SEQ ID NO: 153582 - DNA, 24 bp, Artificial sequence
  SiRNA target sequence
tcactggtaagaaatttgaaatta

SEQ ID NO: 153583 - DNA, 24 bp, Artificial sequence
  SiRNA target sequence
cactggtaagaaatttgaaattac

SEQ ID NO: 153584 - DNA, 24 bp, Artificial sequence
  SiRNA target sequence
actggtaagaaatttgaaattact

SEQ ID NO: 153585 - DNA, 24 bp, Artificial sequence
  SiRNA target sequence
ctggtaagaaatttgaaattactt

SEQ ID NO: 153586 - DNA, 24 bp, Artificial sequence
  SiRNA target sequence
tggtaagaaatttgaaattacttt

SEQ ID NO: 153587 - DNA, 24 bp, Artificial sequence
  SiRNA target sequence
ggtaagaaatttgaaattacttta

SEQ ID NO: 153588 - DNA, 24 bp, Artificial sequence
  SiRNA target sequence
gtaagaaatttgaaattactttat

SEQ ID NO: 153589 - DNA, 24 bp, Artificial sequence
  SiRNA target sequence
taagaaatttgaaattactttata

SEQ ID NO: 153590 - DNA, 24 bp, Artificial sequence
  SiRNA target sequence
aagaaatttgaaattactttatat

SEQ ID NO: 153591 - DNA, 24 bp, Artificial sequence
  SiRNA target sequence
agaaatttgaaattactttatatc

SEQ ID NO: 153592 - DNA, 24 bp, Artificial sequence
  SiRNA target sequence
gaaatttgaaattactttatatcc

SEQ ID NO: 153593 - DNA, 24 bp, Artificial sequence
  SiRNA target sequence
aaatttgaaattactttatatcca

SEQ ID NO: 153594 - DNA, 24 bp, Artificial sequence
  SiRNA target sequence
aatttgaaattactttatatccat

SEQ ID NO: 153595 - DNA, 24 bp, Artificial sequence
  SiRNA target sequence
atttgaaattactttatatccatt

SEQ ID NO: 153596 - DNA, 24 bp, Artificial sequence
  SiRNA target sequence
tttgaaattactttatatccattt

SEQ ID NO: 153597 - DNA, 24 bp, Artificial sequence
  SiRNA target sequence
ttgaaattactttatatccattta

SEQ ID NO: 153598 - DNA, 24 bp, Artificial sequence
  SiRNA target sequence
tgaaattactttatatccatttaa

SEQ ID NO: 153599 - DNA, 24 bp, Artificial sequence
  SiRNA target sequence
gaaattactttatatccatttaaa

SEQ ID NO: 153600 - DNA, 24 bp, Artificial sequence
  SiRNA target sequence
aaattactttatatccatttaaag

SEQ ID NO: 153601 - DNA, 24 bp, Artificial sequence
  SiRNA target sequence
aattactttatatccatttaaaga

SEQ ID NO: 153602 - DNA, 24 bp, Artificial sequence
  SiRNA target sequence
attactttatatccatttaaagat

SEQ ID NO: 153603 - DNA, 24 bp, Artificial sequence
  SiRNA target sequence
ttactttatatccatttaaagatt

SEQ ID NO: 153604 - DNA, 24 bp, Artificial sequence
  SiRNA target sequence
tactttatatccatttaaagattt

SEQ ID NO: 153605 - DNA, 24 bp, Artificial sequence
  SiRNA target sequence
actttatatccatttaaagattta

SEQ ID NO: 153606 - DNA, 24 bp, Artificial sequence
  SiRNA target sequence
ctttatatccatttaaagatttaa

SEQ ID NO: 153607 - DNA, 24 bp, Artificial sequence
  SiRNA target sequence
tttatatccatttaaagatttaaa

SEQ ID NO: 153608 - DNA, 24 bp, Artificial sequence
  SiRNA target sequence
ttatatccatttaaagatttaaag

SEQ ID NO: 153609 - DNA, 24 bp, Artificial sequence
  SiRNA target sequence
tatatccatttaaagatttaaaga

SEQ ID NO: 153610 - DNA, 24 bp, Artificial sequence
  SiRNA target sequence
atatccatttaaagatttaaagaa

SEQ ID NO: 153611 - DNA, 24 bp, Artificial sequence
  SiRNA target sequence
tatccatttaaagatttaaagaaa

SEQ ID NO: 153612 - DNA, 24 bp, Artificial sequence
  SiRNA target sequence
atccatttaaagatttaaagaaat

SEQ ID NO: 153613 - DNA, 24 bp, Artificial sequence
  SiRNA target sequence
tccatttaaagatttaaagaaatg

SEQ ID NO: 153614 - DNA, 24 bp, Artificial sequence
  SiRNA target sequence
ccatttaaagatttaaagaaatgt

SEQ ID NO: 153615 - DNA, 24 bp, Artificial sequence
  SiRNA target sequence
catttaaagatttaaagaaatgta

SEQ ID NO: 153616 - DNA, 24 bp, Artificial sequence
  SiRNA target sequence
atttaaagatttaaagaaatgtat

SEQ ID NO: 153617 - DNA, 24 bp, Artificial sequence
  SiRNA target sequence
tttaaagatttaaagaaatgtatt

SEQ ID NO: 153618 - DNA, 24 bp, Artificial sequence
  SiRNA target sequence
ttaaagatttaaagaaatgtatta

SEQ ID NO: 153619 - DNA, 24 bp, Artificial sequence
  SiRNA target sequence
taaagatttaaagaaatgtattat

SEQ ID NO: 153620 - DNA, 24 bp, Artificial sequence
  SiRNA target sequence
aaagatttaaagaaatgtattatt

SEQ ID NO: 153621 - DNA, 24 bp, Artificial sequence
  SiRNA target sequence
aagatttaaagaaatgtattattt

SEQ ID NO: 153622 - DNA, 24 bp, Artificial sequence
  SiRNA target sequence
agatttaaagaaatgtattatttt

SEQ ID NO: 153623 - DNA, 24 bp, Artificial sequence
  SiRNA target sequence
gatttaaagaaatgtattatttta

SEQ ID NO: 153624 - DNA, 24 bp, Artificial sequence
  SiRNA target sequence
atttaaagaaatgtattattttaa

SEQ ID NO: 153625 - DNA, 24 bp, Artificial sequence
  SiRNA target sequence
tttaaagaaatgtattattttaaa

SEQ ID NO: 153626 - DNA, 24 bp, Artificial sequence
  SiRNA target sequence
ttaaagaaatgtattattttaaaa

SEQ ID NO: 153627 - DNA, 24 bp, Artificial sequence
  SiRNA target sequence
taaagaaatgtattattttaaaag

SEQ ID NO: 153628 - DNA, 24 bp, Artificial sequence
  SiRNA target sequence
aaagaaatgtattattttaaaagg

SEQ ID NO: 153629 - DNA, 24 bp, Artificial sequence
  SiRNA target sequence
aagaaatgtattattttaaaaggc

SEQ ID NO: 153630 - DNA, 24 bp, Artificial sequence
  SiRNA target sequence
agaaatgtattattttaaaaggcg

SEQ ID NO: 153631 - DNA, 24 bp, Artificial sequence
  SiRNA target sequence
gaaatgtattattttaaaaggcga

SEQ ID NO: 153632 - DNA, 24 bp, Artificial sequence
  SiRNA target sequence
aaatgtattattttaaaaggcgaa

SEQ ID NO: 153633 - DNA, 24 bp, Artificial sequence
  SiRNA target sequence
aatgtattattttaaaaggcgaag

SEQ ID NO: 153634 - DNA, 24 bp, Artificial sequence
  SiRNA target sequence
atgtattattttaaaaggcgaagg

SEQ ID NO: 153635 - DNA, 24 bp, Artificial sequence
  SiRNA target sequence
tgtattattttaaaaggcgaaggt

SEQ ID NO: 153636 - DNA, 24 bp, Artificial sequence
  SiRNA target sequence
gtattattttaaaaggcgaaggtt

SEQ ID NO: 153637 - DNA, 24 bp, Artificial sequence
  SiRNA target sequence
tattattttaaaaggcgaaggttt

SEQ ID NO: 153638 - DNA, 24 bp, Artificial sequence
  SiRNA target sequence
attattttaaaaggcgaaggtttt

SEQ ID NO: 153639 - DNA, 24 bp, Artificial sequence
  SiRNA target sequence
ttattttaaaaggcgaaggtttta

SEQ ID NO: 153640 - DNA, 24 bp, Artificial sequence
  SiRNA target sequence
tattttaaaaggcgaaggttttaa

SEQ ID NO: 153641 - DNA, 24 bp, Artificial sequence
  SiRNA target sequence
attttaaaaggcgaaggttttaaa

SEQ ID NO: 153642 - DNA, 24 bp, Artificial sequence
  SiRNA target sequence
ttttaaaaggcgaaggttttaaaa

SEQ ID NO: 153643 - DNA, 24 bp, Artificial sequence
  SiRNA target sequence
tttaaaaggcgaaggttttaaaat

SEQ ID NO: 153644 - DNA, 24 bp, Artificial sequence
  SiRNA target sequence
ttaaaaggcgaaggttttaaaata

SEQ ID NO: 153645 - DNA, 24 bp, Artificial sequence
  SiRNA target sequence
taaaaggcgaaggttttaaaataa

SEQ ID NO: 153646 - DNA, 24 bp, Artificial sequence
  SiRNA target sequence
aaaaggcgaaggttttaaaataaa

SEQ ID NO: 153647 - DNA, 24 bp, Artificial sequence
  SiRNA target sequence
aaaggcgaaggttttaaaataaaa

SEQ ID NO: 153648 - DNA, 24 bp, Artificial sequence
  SiRNA target sequence
aaggcgaaggttttaaaataaaaa

SEQ ID NO: 153649 - DNA, 24 bp, Artificial sequence
  SiRNA target sequence
aggcgaaggttttaaaataaaaaa

SEQ ID NO: 153650 - DNA, 24 bp, Artificial sequence
  SiRNA target sequence
ggcgaaggttttaaaataaaaaat

SEQ ID NO: 153651 - DNA, 24 bp, Artificial sequence
  SiRNA target sequence
gcgaaggttttaaaataaaaaata

SEQ ID NO: 153652 - DNA, 24 bp, Artificial sequence
  SiRNA target sequence
cgaaggttttaaaataaaaaatag

SEQ ID NO: 153653 - DNA, 24 bp, Artificial sequence
  SiRNA target sequence
gaaggttttaaaataaaaaatagt

SEQ ID NO: 153654 - DNA, 24 bp, Artificial sequence
  SiRNA target sequence
aaggttttaaaataaaaaatagtt

SEQ ID NO: 153655 - DNA, 24 bp, Artificial sequence
  SiRNA target sequence
aggttttaaaataaaaaatagtta

SEQ ID NO: 153656 - DNA, 24 bp, Artificial sequence
  SiRNA target sequence
ggttttaaaataaaaaatagttat

SEQ ID NO: 153657 - DNA, 24 bp, Artificial sequence
  SiRNA target sequence
gttttaaaataaaaaatagttatt

SEQ ID NO: 153658 - DNA, 24 bp, Artificial sequence
  SiRNA target sequence
ttttaaaataaaaaatagttattc

SEQ ID NO: 153659 - DNA, 24 bp, Artificial sequence
  SiRNA target sequence
tttaaaataaaaaatagttattcg

SEQ ID NO: 153660 - DNA, 24 bp, Artificial sequence
  SiRNA target sequence
ttaaaataaaaaatagttattcgg

SEQ ID NO: 153661 - DNA, 24 bp, Artificial sequence
  SiRNA target sequence
taaaataaaaaatagttattcggg

SEQ ID NO: 153662 - DNA, 24 bp, Artificial sequence
  SiRNA target sequence
aaaataaaaaatagttattcgggt

SEQ ID NO: 153663 - DNA, 24 bp, Artificial sequence
  SiRNA target sequence
aaataaaaaatagttattcgggtg

SEQ ID NO: 153664 - DNA, 24 bp, Artificial sequence
  SiRNA target sequence
aataaaaaatagttattcgggtgg

SEQ ID NO: 153665 - DNA, 24 bp, Artificial sequence
  SiRNA target sequence
ataaaaaatagttattcgggtggt

SEQ ID NO: 153666 - DNA, 24 bp, Artificial sequence
  SiRNA target sequence
taaaaaatagttattcgggtggtg

SEQ ID NO: 153667 - DNA, 24 bp, Artificial sequence
  SiRNA target sequence
aaaaaatagttattcgggtggtga

SEQ ID NO: 153668 - DNA, 24 bp, Artificial sequence
  SiRNA target sequence
aaaaatagttattcgggtggtgat

SEQ ID NO: 153669 - DNA, 24 bp, Artificial sequence
  SiRNA target sequence
aaaatagttattcgggtggtgatc

SEQ ID NO: 153670 - DNA, 24 bp, Artificial sequence
  SiRNA target sequence
aaatagttattcgggtggtgatct

SEQ ID NO: 153671 - DNA, 24 bp, Artificial sequence
  SiRNA target sequence
aatagttattcgggtggtgatctt

SEQ ID NO: 153672 - DNA, 24 bp, Artificial sequence
  SiRNA target sequence
atagttattcgggtggtgatctta

SEQ ID NO: 153673 - DNA, 24 bp, Artificial sequence
  SiRNA target sequence
tagttattcgggtggtgatcttat

SEQ ID NO: 153674 - DNA, 24 bp, Artificial sequence
  SiRNA target sequence
agttattcgggtggtgatcttatt

SEQ ID NO: 153675 - DNA, 24 bp, Artificial sequence
  SiRNA target sequence
gttattcgggtggtgatcttattc

SEQ ID NO: 153676 - DNA, 24 bp, Artificial sequence
  SiRNA target sequence
ttattcgggtggtgatcttattct

SEQ ID NO: 153677 - DNA, 24 bp, Artificial sequence
  SiRNA target sequence
tattcgggtggtgatcttattctc

SEQ ID NO: 153678 - DNA, 24 bp, Artificial sequence
  SiRNA target sequence
attcgggtggtgatcttattctcg

SEQ ID NO: 153679 - DNA, 24 bp, Artificial sequence
  SiRNA target sequence
ttcgggtggtgatcttattctcga

SEQ ID NO: 153680 - DNA, 24 bp, Artificial sequence
  SiRNA target sequence
tcgggtggtgatcttattctcgaa

SEQ ID NO: 153681 - DNA, 24 bp, Artificial sequence
  SiRNA target sequence
cgggtggtgatcttattctcgaac

SEQ ID NO: 153682 - DNA, 24 bp, Artificial sequence
  SiRNA target sequence
gggtggtgatcttattctcgaacc

SEQ ID NO: 153683 - DNA, 24 bp, Artificial sequence
  SiRNA target sequence
ggtggtgatcttattctcgaacct

SEQ ID NO: 153684 - DNA, 24 bp, Artificial sequence
  SiRNA target sequence
gtggtgatcttattctcgaaccta

SEQ ID NO: 153685 - DNA, 24 bp, Artificial sequence
  SiRNA target sequence
tggtgatcttattctcgaacctaa

SEQ ID NO: 153686 - DNA, 24 bp, Artificial sequence
  SiRNA target sequence
ggtgatcttattctcgaacctaat

SEQ ID NO: 153687 - DNA, 24 bp, Artificial sequence
  SiRNA target sequence
gtgatcttattctcgaacctaata

SEQ ID NO: 153688 - DNA, 24 bp, Artificial sequence
  SiRNA target sequence
tgatcttattctcgaacctaatat

SEQ ID NO: 153689 - DNA, 24 bp, Artificial sequence
  SiRNA target sequence
gatcttattctcgaacctaatata

SEQ ID NO: 153690 - DNA, 24 bp, Artificial sequence
  SiRNA target sequence
atcttattctcgaacctaatataa

SEQ ID NO: 153691 - DNA, 24 bp, Artificial sequence
  SiRNA target sequence
tcttattctcgaacctaatataat

SEQ ID NO: 153692 - DNA, 24 bp, Artificial sequence
  SiRNA target sequence
cttattctcgaacctaatataatt

SEQ ID NO: 153693 - DNA, 24 bp, Artificial sequence
  SiRNA target sequence
ttattctcgaacctaatataatta

SEQ ID NO: 153694 - DNA, 24 bp, Artificial sequence
  SiRNA target sequence
tattctcgaacctaatataattat

SEQ ID NO: 153695 - DNA, 24 bp, Artificial sequence
  SiRNA target sequence
attctcgaacctaatataattata

SEQ ID NO: 153696 - DNA, 24 bp, Artificial sequence
  SiRNA target sequence
ttctcgaacctaatataattatag

SEQ ID NO: 153697 - DNA, 24 bp, Artificial sequence
  SiRNA target sequence
tctcgaacctaatataattataga

SEQ ID NO: 153698 - DNA, 24 bp, Artificial sequence
  SiRNA target sequence
ctcgaacctaatataattatagat

SEQ ID NO: 153699 - DNA, 24 bp, Artificial sequence
  SiRNA target sequence
tcgaacctaatataattatagata

SEQ ID NO: 153700 - DNA, 24 bp, Artificial sequence
  SiRNA target sequence
cgaacctaatataattatagataa

SEQ ID NO: 153701 - DNA, 24 bp, Artificial sequence
  SiRNA target sequence
gaacctaatataattatagataag

SEQ ID NO: 153702 - DNA, 24 bp, Artificial sequence
  SiRNA target sequence
aacctaatataattatagataaga

SEQ ID NO: 153703 - DNA, 24 bp, Artificial sequence
  SiRNA target sequence
acctaatataattatagataagaa

SEQ ID NO: 153704 - DNA, 24 bp, Artificial sequence
  SiRNA target sequence
cctaatataattatagataagaat

SEQ ID NO: 153705 - DNA, 24 bp, Artificial sequence
  SiRNA target sequence
ctaatataattatagataagaata

SEQ ID NO: 153706 - DNA, 24 bp, Artificial sequence
  SiRNA target sequence
taatataattatagataagaatat

SEQ ID NO: 153707 - DNA, 24 bp, Artificial sequence
  SiRNA target sequence
aatataattatagataagaatatt

SEQ ID NO: 153708 - DNA, 24 bp, Artificial sequence
  SiRNA target sequence
atataattatagataagaatattg

SEQ ID NO: 153709 - DNA, 24 bp, Artificial sequence
  SiRNA target sequence
tataattatagataagaatattga

SEQ ID NO: 153710 - DNA, 24 bp, Artificial sequence
  SiRNA target sequence
ataattatagataagaatattgat

SEQ ID NO: 153711 - DNA, 24 bp, Artificial sequence
  SiRNA target sequence
taattatagataagaatattgata

SEQ ID NO: 153712 - DNA, 24 bp, Artificial sequence
  SiRNA target sequence
aattatagataagaatattgataa

SEQ ID NO: 153713 - DNA, 24 bp, Artificial sequence
  SiRNA target sequence
attatagataagaatattgataaa

SEQ ID NO: 153714 - DNA, 24 bp, Artificial sequence
  SiRNA target sequence
ttatagataagaatattgataaag

SEQ ID NO: 153715 - DNA, 24 bp, Artificial sequence
  SiRNA target sequence
tatagataagaatattgataaaga

SEQ ID NO: 153716 - DNA, 24 bp, Artificial sequence
  SiRNA target sequence
atagataagaatattgataaagat

SEQ ID NO: 153717 - DNA, 24 bp, Artificial sequence
  SiRNA target sequence
tagataagaatattgataaagatt

SEQ ID NO: 153718 - DNA, 24 bp, Artificial sequence
  SiRNA target sequence
agataagaatattgataaagattt

SEQ ID NO: 153719 - DNA, 24 bp, Artificial sequence
  SiRNA target sequence
gataagaatattgataaagattta

SEQ ID NO: 153720 - DNA, 24 bp, Artificial sequence
  SiRNA target sequence
ataagaatattgataaagatttat

SEQ ID NO: 153721 - DNA, 24 bp, Artificial sequence
  SiRNA target sequence
taagaatattgataaagatttatt

SEQ ID NO: 153722 - DNA, 24 bp, Artificial sequence
  SiRNA target sequence
aagaatattgataaagatttatta

SEQ ID NO: 153723 - DNA, 24 bp, Artificial sequence
  SiRNA target sequence
agaatattgataaagatttattag

SEQ ID NO: 153724 - DNA, 24 bp, Artificial sequence
  SiRNA target sequence
gaatattgataaagatttattagc

SEQ ID NO: 153725 - DNA, 24 bp, Artificial sequence
  SiRNA target sequence
aatattgataaagatttattagca

SEQ ID NO: 153726 - DNA, 24 bp, Artificial sequence
  SiRNA target sequence
atattgataaagatttattagcac

SEQ ID NO: 153727 - DNA, 24 bp, Artificial sequence
  SiRNA target sequence
tattgataaagatttattagcacg

SEQ ID NO: 153728 - DNA, 24 bp, Artificial sequence
  SiRNA target sequence
attgataaagatttattagcacgc

SEQ ID NO: 153729 - DNA, 24 bp, Artificial sequence
  SiRNA target sequence
ttgataaagatttattagcacgcg

SEQ ID NO: 153730 - DNA, 24 bp, Artificial sequence
  SiRNA target sequence
tgataaagatttattagcacgcgc

SEQ ID NO: 153731 - DNA, 24 bp, Artificial sequence
  SiRNA target sequence
gataaagatttattagcacgcgcc

SEQ ID NO: 153732 - DNA, 24 bp, Artificial sequence
  SiRNA target sequence
ataaagatttattagcacgcgcct

SEQ ID NO: 153733 - DNA, 24 bp, Artificial sequence
  SiRNA target sequence
taaagatttattagcacgcgcctt

SEQ ID NO: 153734 - DNA, 24 bp, Artificial sequence
  SiRNA target sequence
aaagatttattagcacgcgccttg

SEQ ID NO: 153735 - DNA, 24 bp, Artificial sequence
  SiRNA target sequence
aagatttattagcacgcgccttga

SEQ ID NO: 153736 - DNA, 24 bp, Artificial sequence
  SiRNA target sequence
agatttattagcacgcgccttgaa

SEQ ID NO: 153737 - DNA, 24 bp, Artificial sequence
  SiRNA target sequence
gatttattagcacgcgccttgaat

SEQ ID NO: 153738 - DNA, 24 bp, Artificial sequence
  SiRNA target sequence
atttattagcacgcgccttgaatt

SEQ ID NO: 153739 - DNA, 24 bp, Artificial sequence
  SiRNA target sequence
tttattagcacgcgccttgaatta

SEQ ID NO: 153740 - DNA, 24 bp, Artificial sequence
  SiRNA target sequence
ttattagcacgcgccttgaattat

SEQ ID NO: 153741 - DNA, 24 bp, Artificial sequence
  SiRNA target sequence
tattagcacgcgccttgaattatg

SEQ ID NO: 153742 - DNA, 24 bp, Artificial sequence
  SiRNA target sequence
attagcacgcgccttgaattatgt

SEQ ID NO: 153743 - DNA, 24 bp, Artificial sequence
  SiRNA target sequence
ttagcacgcgccttgaattatgtt

SEQ ID NO: 153744 - DNA, 24 bp, Artificial sequence
  SiRNA target sequence
tagcacgcgccttgaattatgttc

SEQ ID NO: 153745 - DNA, 24 bp, Artificial sequence
  SiRNA target sequence
agcacgcgccttgaattatgttcc

SEQ ID NO: 153746 - DNA, 24 bp, Artificial sequence
  SiRNA target sequence
gcacgcgccttgaattatgttcct

SEQ ID NO: 153747 - DNA, 24 bp, Artificial sequence
  SiRNA target sequence
cacgcgccttgaattatgttcctg

SEQ ID NO: 153748 - DNA, 24 bp, Artificial sequence
  SiRNA target sequence
acgcgccttgaattatgttcctgt

SEQ ID NO: 153749 - DNA, 24 bp, Artificial sequence
  SiRNA target sequence
cgcgccttgaattatgttcctgta

SEQ ID NO: 153750 - DNA, 24 bp, Artificial sequence
  SiRNA target sequence
gcgccttgaattatgttcctgtaa

SEQ ID NO: 153751 - DNA, 24 bp, Artificial sequence
  SiRNA target sequence
cgccttgaattatgttcctgtaag

SEQ ID NO: 153752 - DNA, 24 bp, Artificial sequence
  SiRNA target sequence
gccttgaattatgttcctgtaaga

SEQ ID NO: 153753 - DNA, 24 bp, Artificial sequence
  SiRNA target sequence
ccttgaattatgttcctgtaagaa

SEQ ID NO: 153754 - DNA, 24 bp, Artificial sequence
  SiRNA target sequence
cttgaattatgttcctgtaagaaa

SEQ ID NO: 153755 - DNA, 24 bp, Artificial sequence
  SiRNA target sequence
ttgaattatgttcctgtaagaaaa

SEQ ID NO: 153756 - DNA, 24 bp, Artificial sequence
  SiRNA target sequence
tgaattatgttcctgtaagaaaag

SEQ ID NO: 153757 - DNA, 24 bp, Artificial sequence
  SiRNA target sequence
gaattatgttcctgtaagaaaaga

SEQ ID NO: 153758 - DNA, 24 bp, Artificial sequence
  SiRNA target sequence
aattatgttcctgtaagaaaagat

SEQ ID NO: 153759 - DNA, 24 bp, Artificial sequence
  SiRNA target sequence
attatgttcctgtaagaaaagatt

SEQ ID NO: 153760 - DNA, 24 bp, Artificial sequence
  SiRNA target sequence
ttatgttcctgtaagaaaagattt

SEQ ID NO: 153761 - DNA, 24 bp, Artificial sequence
  SiRNA target sequence
tatgttcctgtaagaaaagatttt

SEQ ID NO: 153762 - DNA, 24 bp, Artificial sequence
  SiRNA target sequence
atgttcctgtaagaaaagatttta

SEQ ID NO: 153763 - DNA, 24 bp, Artificial sequence
  SiRNA target sequence
tgttcctgtaagaaaagattttac

SEQ ID NO: 153764 - DNA, 24 bp, Artificial sequence
  SiRNA target sequence
gttcctgtaagaaaagattttaca

SEQ ID NO: 153765 - DNA, 24 bp, Artificial sequence
  SiRNA target sequence
ttcctgtaagaaaagattttacag

SEQ ID NO: 153766 - DNA, 24 bp, Artificial sequence
  SiRNA target sequence
tcctgtaagaaaagattttacagg

SEQ ID NO: 153767 - DNA, 24 bp, Artificial sequence
  SiRNA target sequence
cctgtaagaaaagattttacagga

SEQ ID NO: 153768 - DNA, 24 bp, Artificial sequence
  SiRNA target sequence
ctgtaagaaaagattttacaggaa

SEQ ID NO: 153769 - DNA, 24 bp, Artificial sequence
  SiRNA target sequence
tgtaagaaaagattttacaggaac

SEQ ID NO: 153770 - DNA, 24 bp, Artificial sequence
  SiRNA target sequence
gtaagaaaagattttacaggaact

SEQ ID NO: 153771 - DNA, 24 bp, Artificial sequence
  SiRNA target sequence
taagaaaagattttacaggaactg

SEQ ID NO: 153772 - DNA, 24 bp, Artificial sequence
  SiRNA target sequence
aagaaaagattttacaggaactgc

SEQ ID NO: 153773 - DNA, 24 bp, Artificial sequence
  SiRNA target sequence
agaaaagattttacaggaactgct

SEQ ID NO: 153774 - DNA, 24 bp, Artificial sequence
  SiRNA target sequence
gaaaagattttacaggaactgctg

SEQ ID NO: 153775 - DNA, 24 bp, Artificial sequence
  SiRNA target sequence
aaaagattttacaggaactgctgt

SEQ ID NO: 153776 - DNA, 24 bp, Artificial sequence
  SiRNA target sequence
aaagattttacaggaactgctgtt

SEQ ID NO: 153777 - DNA, 24 bp, Artificial sequence
  SiRNA target sequence
aagattttacaggaactgctgttc

SEQ ID NO: 153778 - DNA, 24 bp, Artificial sequence
  SiRNA target sequence
agattttacaggaactgctgttcc

SEQ ID NO: 153779 - DNA, 24 bp, Artificial sequence
  SiRNA target sequence
gattttacaggaactgctgttcca

SEQ ID NO: 153780 - DNA, 24 bp, Artificial sequence
  SiRNA target sequence
attttacaggaactgctgttccaa

SEQ ID NO: 153781 - DNA, 24 bp, Artificial sequence
  SiRNA target sequence
ttttacaggaactgctgttccaaa

SEQ ID NO: 153782 - DNA, 24 bp, Artificial sequence
  SiRNA target sequence
tttacaggaactgctgttccaaaa

SEQ ID NO: 153783 - DNA, 24 bp, Artificial sequence
  SiRNA target sequence
ttacaggaactgctgttccaaaat

SEQ ID NO: 153784 - DNA, 24 bp, Artificial sequence
  SiRNA target sequence
tacaggaactgctgttccaaaata

SEQ ID NO: 153785 - DNA, 24 bp, Artificial sequence
  SiRNA target sequence
acaggaactgctgttccaaaatat

SEQ ID NO: 153786 - DNA, 24 bp, Artificial sequence
  SiRNA target sequence
caggaactgctgttccaaaatatg

SEQ ID NO: 153787 - DNA, 24 bp, Artificial sequence
  SiRNA target sequence
aggaactgctgttccaaaatatgc

SEQ ID NO: 153788 - DNA, 24 bp, Artificial sequence
  SiRNA target sequence
ggaactgctgttccaaaatatgca

SEQ ID NO: 153789 - DNA, 24 bp, Artificial sequence
  SiRNA target sequence
gaactgctgttccaaaatatgcag

SEQ ID NO: 153790 - DNA, 24 bp, Artificial sequence
  SiRNA target sequence
aactgctgttccaaaatatgcaga

SEQ ID NO: 153791 - DNA, 24 bp, Artificial sequence
  SiRNA target sequence
actgctgttccaaaatatgcagaa

SEQ ID NO: 153792 - DNA, 24 bp, Artificial sequence
  SiRNA target sequence
ctgctgttccaaaatatgcagaat

SEQ ID NO: 153793 - DNA, 24 bp, Artificial sequence
  SiRNA target sequence
tgctgttccaaaatatgcagaatt

SEQ ID NO: 153794 - DNA, 24 bp, Artificial sequence
  SiRNA target sequence
gctgttccaaaatatgcagaattt

SEQ ID NO: 153795 - DNA, 24 bp, Artificial sequence
  SiRNA target sequence
ctgttccaaaatatgcagaatttg

SEQ ID NO: 153796 - DNA, 24 bp, Artificial sequence
  SiRNA target sequence
tgttccaaaatatgcagaatttgg

SEQ ID NO: 153797 - DNA, 24 bp, Artificial sequence
  SiRNA target sequence
gttccaaaatatgcagaatttggt

SEQ ID NO: 153798 - DNA, 24 bp, Artificial sequence
  SiRNA target sequence
ttccaaaatatgcagaatttggtg

SEQ ID NO: 153799 - DNA, 24 bp, Artificial sequence
  SiRNA target sequence
tccaaaatatgcagaatttggtgt

SEQ ID NO: 153800 - DNA, 24 bp, Artificial sequence
  SiRNA target sequence
ccaaaatatgcagaatttggtgtt

SEQ ID NO: 153801 - DNA, 24 bp, Artificial sequence
  SiRNA target sequence
caaaatatgcagaatttggtgtta

SEQ ID NO: 153802 - DNA, 24 bp, Artificial sequence
  SiRNA target sequence
aaaatatgcagaatttggtgttat

SEQ ID NO: 153803 - DNA, 24 bp, Artificial sequence
  SiRNA target sequence
aaatatgcagaatttggtgttatg

SEQ ID NO: 153804 - DNA, 24 bp, Artificial sequence
  SiRNA target sequence
aatatgcagaatttggtgttatgc

SEQ ID NO: 153805 - DNA, 24 bp, Artificial sequence
  SiRNA target sequence
atatgcagaatttggtgttatgcc

SEQ ID NO: 153806 - DNA, 24 bp, Artificial sequence
  SiRNA target sequence
tatgcagaatttggtgttatgcct

SEQ ID NO: 153807 - DNA, 24 bp, Artificial sequence
  SiRNA target sequence
atgcagaatttggtgttatgccta

SEQ ID NO: 153808 - DNA, 24 bp, Artificial sequence
  SiRNA target sequence
tgcagaatttggtgttatgcctaa

SEQ ID NO: 153809 - DNA, 24 bp, Artificial sequence
  SiRNA target sequence
gcagaatttggtgttatgcctaaa

SEQ ID NO: 153810 - DNA, 24 bp, Artificial sequence
  SiRNA target sequence
cagaatttggtgttatgcctaaag

SEQ ID NO: 153811 - DNA, 24 bp, Artificial sequence
  SiRNA target sequence
agaatttggtgttatgcctaaaga

SEQ ID NO: 153812 - DNA, 24 bp, Artificial sequence
  SiRNA target sequence
gaatttggtgttatgcctaaagaa

SEQ ID NO: 153813 - DNA, 24 bp, Artificial sequence
  SiRNA target sequence
aatttggtgttatgcctaaagaac

SEQ ID NO: 153814 - DNA, 24 bp, Artificial sequence
  SiRNA target sequence
atttggtgttatgcctaaagaaca

SEQ ID NO: 153815 - DNA, 24 bp, Artificial sequence
  SiRNA target sequence
tttggtgttatgcctaaagaacag

SEQ ID NO: 153816 - DNA, 24 bp, Artificial sequence
  SiRNA target sequence
ttggtgttatgcctaaagaacagg

SEQ ID NO: 153817 - DNA, 24 bp, Artificial sequence
  SiRNA target sequence
tggtgttatgcctaaagaacagga

SEQ ID NO: 153818 - DNA, 24 bp, Artificial sequence
  SiRNA target sequence
ggtgttatgcctaaagaacaggaa

SEQ ID NO: 153819 - DNA, 24 bp, Artificial sequence
  SiRNA target sequence
gtgttatgcctaaagaacaggaag

SEQ ID NO: 153820 - DNA, 24 bp, Artificial sequence
  SiRNA target sequence
tgttatgcctaaagaacaggaaga

SEQ ID NO: 153821 - DNA, 24 bp, Artificial sequence
  SiRNA target sequence
gttatgcctaaagaacaggaagaa

SEQ ID NO: 153822 - DNA, 24 bp, Artificial sequence
  SiRNA target sequence
ttatgcctaaagaacaggaagaac

SEQ ID NO: 153823 - DNA, 24 bp, Artificial sequence
  SiRNA target sequence
tatgcctaaagaacaggaagaaca

SEQ ID NO: 153824 - DNA, 24 bp, Artificial sequence
  SiRNA target sequence
atgcctaaagaacaggaagaacaa

SEQ ID NO: 153825 - DNA, 24 bp, Artificial sequence
  SiRNA target sequence
tgcctaaagaacaggaagaacaaa

SEQ ID NO: 153826 - DNA, 24 bp, Artificial sequence
  SiRNA target sequence
gcctaaagaacaggaagaacaaaa

SEQ ID NO: 153827 - DNA, 24 bp, Artificial sequence
  SiRNA target sequence
cctaaagaacaggaagaacaaaac

SEQ ID NO: 153828 - DNA, 24 bp, Artificial sequence
  SiRNA target sequence
ctaaagaacaggaagaacaaaacg

SEQ ID NO: 153829 - DNA, 24 bp, Artificial sequence
  SiRNA target sequence
taaagaacaggaagaacaaaacga

SEQ ID NO: 153830 - DNA, 24 bp, Artificial sequence
  SiRNA target sequence
aaagaacaggaagaacaaaacgaa

SEQ ID NO: 153831 - DNA, 24 bp, Artificial sequence
  SiRNA target sequence
aagaacaggaagaacaaaacgaaa

SEQ ID NO: 153832 - DNA, 24 bp, Artificial sequence
  SiRNA target sequence
agaacaggaagaacaaaacgaaag

SEQ ID NO: 153833 - DNA, 24 bp, Artificial sequence
  SiRNA target sequence
gaacaggaagaacaaaacgaaaga

SEQ ID NO: 153834 - DNA, 24 bp, Artificial sequence
  SiRNA target sequence
aacaggaagaacaaaacgaaagag

SEQ ID NO: 153835 - DNA, 24 bp, Artificial sequence
  SiRNA target sequence
acaggaagaacaaaacgaaagaga

SEQ ID NO: 153836 - DNA, 24 bp, Artificial sequence
  SiRNA target sequence
caggaagaacaaaacgaaagagaa

SEQ ID NO: 153837 - DNA, 24 bp, Artificial sequence
  SiRNA target sequence
aggaagaacaaaacgaaagagaaa

SEQ ID NO: 153838 - DNA, 24 bp, Artificial sequence
  SiRNA target sequence
ggaagaacaaaacgaaagagaaag

SEQ ID NO: 153839 - DNA, 24 bp, Artificial sequence
  SiRNA target sequence
gaagaacaaaacgaaagagaaaga

SEQ ID NO: 153840 - DNA, 24 bp, Artificial sequence
  SiRNA target sequence
aagaacaaaacgaaagagaaagat

SEQ ID NO: 153841 - DNA, 24 bp, Artificial sequence
  SiRNA target sequence
agaacaaaacgaaagagaaagatt

SEQ ID NO: 153842 - DNA, 24 bp, Artificial sequence
  SiRNA target sequence
gaacaaaacgaaagagaaagattc

SEQ ID NO: 153843 - DNA, 24 bp, Artificial sequence
  SiRNA target sequence
aacaaaacgaaagagaaagattcg

SEQ ID NO: 153844 - DNA, 24 bp, Artificial sequence
  SiRNA target sequence
acaaaacgaaagagaaagattcga

SEQ ID NO: 153845 - DNA, 24 bp, Artificial sequence
  SiRNA target sequence
caaaacgaaagagaaagattcgaa

SEQ ID NO: 153846 - DNA, 24 bp, Artificial sequence
  SiRNA target sequence
aaaacgaaagagaaagattcgaag

SEQ ID NO: 153847 - DNA, 24 bp, Artificial sequence
  SiRNA target sequence
aaacgaaagagaaagattcgaagg

SEQ ID NO: 153848 - DNA, 24 bp, Artificial sequence
  SiRNA target sequence
aacgaaagagaaagattcgaaggt

SEQ ID NO: 153849 - DNA, 24 bp, Artificial sequence
  SiRNA target sequence
acgaaagagaaagattcgaaggtg

SEQ ID NO: 153850 - DNA, 24 bp, Artificial sequence
  SiRNA target sequence
cgaaagagaaagattcgaaggtgc

SEQ ID NO: 153851 - DNA, 24 bp, Artificial sequence
  SiRNA target sequence
gaaagagaaagattcgaaggtgca

SEQ ID NO: 153852 - DNA, 24 bp, Artificial sequence
  SiRNA target sequence
aaagagaaagattcgaaggtgcag

SEQ ID NO: 153853 - DNA, 24 bp, Artificial sequence
  SiRNA target sequence
aagagaaagattcgaaggtgcaga

SEQ ID NO: 153854 - DNA, 24 bp, Artificial sequence
  SiRNA target sequence
agagaaagattcgaaggtgcagaa

SEQ ID NO: 153855 - DNA, 24 bp, Artificial sequence
  SiRNA target sequence
gagaaagattcgaaggtgcagaag

SEQ ID NO: 153856 - DNA, 24 bp, Artificial sequence
  SiRNA target sequence
agaaagattcgaaggtgcagaaga

SEQ ID NO: 153857 - DNA, 24 bp, Artificial sequence
  SiRNA target sequence
gaaagattcgaaggtgcagaagag

SEQ ID NO: 153858 - DNA, 24 bp, Artificial sequence
  SiRNA target sequence
aaagattcgaaggtgcagaagagt

SEQ ID NO: 153859 - DNA, 24 bp, Artificial sequence
  SiRNA target sequence
aagattcgaaggtgcagaagagtt

SEQ ID NO: 153860 - DNA, 24 bp, Artificial sequence
  SiRNA target sequence
agattcgaaggtgcagaagagttt

SEQ ID NO: 153861 - DNA, 24 bp, Artificial sequence
  SiRNA target sequence
gattcgaaggtgcagaagagtttt

SEQ ID NO: 153862 - DNA, 24 bp, Artificial sequence
  SiRNA target sequence
attcgaaggtgcagaagagttttt

SEQ ID NO: 153863 - DNA, 24 bp, Artificial sequence
  SiRNA target sequence
ttcgaaggtgcagaagagtttttt

SEQ ID NO: 153864 - DNA, 24 bp, Artificial sequence
  SiRNA target sequence
tcgaaggtgcagaagagttttttg

SEQ ID NO: 153865 - DNA, 24 bp, Artificial sequence
  SiRNA target sequence
cgaaggtgcagaagagttttttgg

SEQ ID NO: 153866 - DNA, 24 bp, Artificial sequence
  SiRNA target sequence
gaaggtgcagaagagttttttgga

SEQ ID NO: 153867 - DNA, 24 bp, Artificial sequence
  SiRNA target sequence
aaggtgcagaagagttttttggag

SEQ ID NO: 153868 - DNA, 24 bp, Artificial sequence
  SiRNA target sequence
aggtgcagaagagttttttggagg

SEQ ID NO: 153869 - DNA, 24 bp, Artificial sequence
  SiRNA target sequence
ggtgcagaagagttttttggagga

SEQ ID NO: 153870 - DNA, 24 bp, Artificial sequence
  SiRNA target sequence
gtgcagaagagttttttggaggaa

SEQ ID NO: 153871 - DNA, 24 bp, Artificial sequence
  SiRNA target sequence
tgcagaagagttttttggaggaaa

SEQ ID NO: 153872 - DNA, 24 bp, Artificial sequence
  SiRNA target sequence
gcagaagagttttttggaggaaat

SEQ ID NO: 153873 - DNA, 24 bp, Artificial sequence
  SiRNA target sequence
cagaagagttttttggaggaaatg

SEQ ID NO: 153874 - DNA, 24 bp, Artificial sequence
  SiRNA target sequence
agaagagttttttggaggaaatgg

SEQ ID NO: 153875 - DNA, 24 bp, Artificial sequence
  SiRNA target sequence
gaagagttttttggaggaaatggt

SEQ ID NO: 153876 - DNA, 24 bp, Artificial sequence
  SiRNA target sequence
aagagttttttggaggaaatggta

SEQ ID NO: 153877 - DNA, 24 bp, Artificial sequence
  SiRNA target sequence
agagttttttggaggaaatggtag

SEQ ID NO: 153878 - DNA, 24 bp, Artificial sequence
  SiRNA target sequence
gagttttttggaggaaatggtaga

SEQ ID NO: 153879 - DNA, 24 bp, Artificial sequence
  SiRNA target sequence
agttttttggaggaaatggtagag

SEQ ID NO: 153880 - DNA, 24 bp, Artificial sequence
  SiRNA target sequence
gttttttggaggaaatggtagaga

SEQ ID NO: 153881 - DNA, 24 bp, Artificial sequence
  SiRNA target sequence
ttttttggaggaaatggtagagat

SEQ ID NO: 153882 - DNA, 24 bp, Artificial sequence
  SiRNA target sequence
tttttggaggaaatggtagagatt

SEQ ID NO: 153883 - DNA, 24 bp, Artificial sequence
  SiRNA target sequence
ttttggaggaaatggtagagattt

SEQ ID NO: 153884 - DNA, 24 bp, Artificial sequence
  SiRNA target sequence
tttggaggaaatggtagagatttt

SEQ ID NO: 153885 - DNA, 24 bp, Artificial sequence
  SiRNA target sequence
ttggaggaaatggtagagattttt

SEQ ID NO: 153886 - DNA, 24 bp, Artificial sequence
  SiRNA target sequence
tggaggaaatggtagagatttttt

SEQ ID NO: 153887 - DNA, 24 bp, Artificial sequence
  SiRNA target sequence
ggaggaaatggtagagattttttt

SEQ ID NO: 153888 - DNA, 24 bp, Artificial sequence
  SiRNA target sequence
gaggaaatggtagagattttttta

SEQ ID NO: 153889 - DNA, 24 bp, Artificial sequence
  SiRNA target sequence
aggaaatggtagagatttttttag

SEQ ID NO: 153890 - DNA, 24 bp, Artificial sequence
  SiRNA target sequence
ggaaatggtagagatttttttagc

SEQ ID NO: 153891 - DNA, 24 bp, Artificial sequence
  SiRNA target sequence
gaaatggtagagatttttttagca

SEQ ID NO: 153892 - DNA, 24 bp, Artificial sequence
  SiRNA target sequence
aaatggtagagatttttttagcaa

SEQ ID NO: 153893 - DNA, 24 bp, Artificial sequence
  SiRNA target sequence
aatggtagagatttttttagcaag

SEQ ID NO: 153894 - DNA, 24 bp, Artificial sequence
  SiRNA target sequence
atggtagagatttttttagcaagt

SEQ ID NO: 153895 - DNA, 24 bp, Artificial sequence
  SiRNA target sequence
tggtagagatttttttagcaagtt

SEQ ID NO: 153896 - DNA, 24 bp, Artificial sequence
  SiRNA target sequence
ggtagagatttttttagcaagttt

SEQ ID NO: 153897 - DNA, 24 bp, Artificial sequence
  SiRNA target sequence
gtagagatttttttagcaagtttg

SEQ ID NO: 153898 - DNA, 24 bp, Artificial sequence
  SiRNA target sequence
tagagatttttttagcaagtttgg

SEQ ID NO: 153899 - DNA, 24 bp, Artificial sequence
  SiRNA target sequence
agagatttttttagcaagtttgga

SEQ ID NO: 153900 - DNA, 24 bp, Artificial sequence
  SiRNA target sequence
gagatttttttagcaagtttggat

SEQ ID NO: 153901 - DNA, 24 bp, Artificial sequence
  SiRNA target sequence
agatttttttagcaagtttggatt

SEQ ID NO: 153902 - DNA, 24 bp, Artificial sequence
  SiRNA target sequence
gatttttttagcaagtttggattt

SEQ ID NO: 153903 - DNA, 24 bp, Artificial sequence
  SiRNA target sequence
atttttttagcaagtttggatttt

SEQ ID NO: 153904 - DNA, 24 bp, Artificial sequence
  SiRNA target sequence
tttttttagcaagtttggattttt

SEQ ID NO: 153905 - DNA, 24 bp, Artificial sequence
  SiRNA target sequence
ttttttagcaagtttggatttttc

SEQ ID NO: 153906 - DNA, 24 bp, Artificial sequence
  SiRNA target sequence
tttttagcaagtttggatttttct

SEQ ID NO: 153907 - DNA, 24 bp, Artificial sequence
  SiRNA target sequence
ttttagcaagtttggatttttcta

SEQ ID NO: 153908 - DNA, 24 bp, Artificial sequence
  SiRNA target sequence
tttagcaagtttggatttttctaa

SEQ ID NO: 153909 - DNA, 25 bp, Artificial sequence
  SiRNA target sequence
atggcacaagacccccaaggacttt

SEQ ID NO: 153910 - DNA, 25 bp, Artificial sequence
  SiRNA target sequence
tggcacaagacccccaaggacttta

SEQ ID NO: 153911 - DNA, 25 bp, Artificial sequence
  SiRNA target sequence
ggcacaagacccccaaggactttat

SEQ ID NO: 153912 - DNA, 25 bp, Artificial sequence
  SiRNA target sequence
gcacaagacccccaaggactttatg

SEQ ID NO: 153913 - DNA, 25 bp, Artificial sequence
  SiRNA target sequence
cacaagacccccaaggactttatga

SEQ ID NO: 153914 - DNA, 25 bp, Artificial sequence
  SiRNA target sequence
acaagacccccaaggactttatgaa

SEQ ID NO: 153915 - DNA, 25 bp, Artificial sequence
  SiRNA target sequence
caagacccccaaggactttatgaag

SEQ ID NO: 153916 - DNA, 25 bp, Artificial sequence
  SiRNA target sequence
aagacccccaaggactttatgaagt

SEQ ID NO: 153917 - DNA, 25 bp, Artificial sequence
  SiRNA target sequence
agacccccaaggactttatgaagta

SEQ ID NO: 153918 - DNA, 25 bp, Artificial sequence
  SiRNA target sequence
gacccccaaggactttatgaagtat

SEQ ID NO: 153919 - DNA, 25 bp, Artificial sequence
  SiRNA target sequence
acccccaaggactttatgaagtatt

SEQ ID NO: 153920 - DNA, 25 bp, Artificial sequence
  SiRNA target sequence
cccccaaggactttatgaagtatta

SEQ ID NO: 153921 - DNA, 25 bp, Artificial sequence
  SiRNA target sequence
ccccaaggactttatgaagtattag

SEQ ID NO: 153922 - DNA, 25 bp, Artificial sequence
  SiRNA target sequence
cccaaggactttatgaagtattagg

SEQ ID NO: 153923 - DNA, 25 bp, Artificial sequence
  SiRNA target sequence
ccaaggactttatgaagtattagga

SEQ ID NO: 153924 - DNA, 25 bp, Artificial sequence
  SiRNA target sequence
caaggactttatgaagtattaggac

SEQ ID NO: 153925 - DNA, 25 bp, Artificial sequence
  SiRNA target sequence
aaggactttatgaagtattaggact

SEQ ID NO: 153926 - DNA, 25 bp, Artificial sequence
  SiRNA target sequence
aggactttatgaagtattaggactt

SEQ ID NO: 153927 - DNA, 25 bp, Artificial sequence
  SiRNA target sequence
ggactttatgaagtattaggactta

SEQ ID NO: 153928 - DNA, 25 bp, Artificial sequence
  SiRNA target sequence
gactttatgaagtattaggacttaa

SEQ ID NO: 153929 - DNA, 25 bp, Artificial sequence
  SiRNA target sequence
actttatgaagtattaggacttaaa

SEQ ID NO: 153930 - DNA, 25 bp, Artificial sequence
  SiRNA target sequence
ctttatgaagtattaggacttaaag

SEQ ID NO: 153931 - DNA, 25 bp, Artificial sequence
  SiRNA target sequence
tttatgaagtattaggacttaaagc

SEQ ID NO: 153932 - DNA, 25 bp, Artificial sequence
  SiRNA target sequence
ttatgaagtattaggacttaaagct

SEQ ID NO: 153933 - DNA, 25 bp, Artificial sequence
  SiRNA target sequence
tatgaagtattaggacttaaagctg

SEQ ID NO: 153934 - DNA, 25 bp, Artificial sequence
  SiRNA target sequence
atgaagtattaggacttaaagctgg

SEQ ID NO: 153935 - DNA, 25 bp, Artificial sequence
  SiRNA target sequence
tgaagtattaggacttaaagctggt

SEQ ID NO: 153936 - DNA, 25 bp, Artificial sequence
  SiRNA target sequence
gaagtattaggacttaaagctggtg

SEQ ID NO: 153937 - DNA, 25 bp, Artificial sequence
  SiRNA target sequence
aagtattaggacttaaagctggtgc

SEQ ID NO: 153938 - DNA, 25 bp, Artificial sequence
  SiRNA target sequence
agtattaggacttaaagctggtgca

SEQ ID NO: 153939 - DNA, 25 bp, Artificial sequence
  SiRNA target sequence
gtattaggacttaaagctggtgcaa

SEQ ID NO: 153940 - DNA, 25 bp, Artificial sequence
  SiRNA target sequence
tattaggacttaaagctggtgcaag

SEQ ID NO: 153941 - DNA, 25 bp, Artificial sequence
  SiRNA target sequence
attaggacttaaagctggtgcaagc

SEQ ID NO: 153942 - DNA, 25 bp, Artificial sequence
  SiRNA target sequence
ttaggacttaaagctggtgcaagca

SEQ ID NO: 153943 - DNA, 25 bp, Artificial sequence
  SiRNA target sequence
taggacttaaagctggtgcaagcat

SEQ ID NO: 153944 - DNA, 25 bp, Artificial sequence
  SiRNA target sequence
aggacttaaagctggtgcaagcatt

SEQ ID NO: 153945 - DNA, 25 bp, Artificial sequence
  SiRNA target sequence
ggacttaaagctggtgcaagcattg

SEQ ID NO: 153946 - DNA, 25 bp, Artificial sequence
  SiRNA target sequence
gacttaaagctggtgcaagcattga

SEQ ID NO: 153947 - DNA, 25 bp, Artificial sequence
  SiRNA target sequence
acttaaagctggtgcaagcattgat

SEQ ID NO: 153948 - DNA, 25 bp, Artificial sequence
  SiRNA target sequence
cttaaagctggtgcaagcattgatg

SEQ ID NO: 153949 - DNA, 25 bp, Artificial sequence
  SiRNA target sequence
ttaaagctggtgcaagcattgatga

SEQ ID NO: 153950 - DNA, 25 bp, Artificial sequence
  SiRNA target sequence
taaagctggtgcaagcattgatgaa

SEQ ID NO: 153951 - DNA, 25 bp, Artificial sequence
  SiRNA target sequence
aaagctggtgcaagcattgatgaag

SEQ ID NO: 153952 - DNA, 25 bp, Artificial sequence
  SiRNA target sequence
aagctggtgcaagcattgatgaagt

SEQ ID NO: 153953 - DNA, 25 bp, Artificial sequence
  SiRNA target sequence
agctggtgcaagcattgatgaagtt

SEQ ID NO: 153954 - DNA, 25 bp, Artificial sequence
  SiRNA target sequence
gctggtgcaagcattgatgaagtta

SEQ ID NO: 153955 - DNA, 25 bp, Artificial sequence
  SiRNA target sequence
ctggtgcaagcattgatgaagttaa

SEQ ID NO: 153956 - DNA, 25 bp, Artificial sequence
  SiRNA target sequence
tggtgcaagcattgatgaagttaaa

SEQ ID NO: 153957 - DNA, 25 bp, Artificial sequence
  SiRNA target sequence
ggtgcaagcattgatgaagttaaaa

SEQ ID NO: 153958 - DNA, 25 bp, Artificial sequence
  SiRNA target sequence
gtgcaagcattgatgaagttaaaaa

SEQ ID NO: 153959 - DNA, 25 bp, Artificial sequence
  SiRNA target sequence
tgcaagcattgatgaagttaaaaaa

SEQ ID NO: 153960 - DNA, 25 bp, Artificial sequence
  SiRNA target sequence
gcaagcattgatgaagttaaaaaag

SEQ ID NO: 153961 - DNA, 25 bp, Artificial sequence
  SiRNA target sequence
caagcattgatgaagttaaaaaagc

SEQ ID NO: 153962 - DNA, 25 bp, Artificial sequence
  SiRNA target sequence
aagcattgatgaagttaaaaaagca

SEQ ID NO: 153963 - DNA, 25 bp, Artificial sequence
  SiRNA target sequence
agcattgatgaagttaaaaaagcat

SEQ ID NO: 153964 - DNA, 25 bp, Artificial sequence
  SiRNA target sequence
gcattgatgaagttaaaaaagcatt

SEQ ID NO: 153965 - DNA, 25 bp, Artificial sequence
  SiRNA target sequence
cattgatgaagttaaaaaagcattt

SEQ ID NO: 153966 - DNA, 25 bp, Artificial sequence
  SiRNA target sequence
attgatgaagttaaaaaagcattta

SEQ ID NO: 153967 - DNA, 25 bp, Artificial sequence
  SiRNA target sequence
ttgatgaagttaaaaaagcatttac

SEQ ID NO: 153968 - DNA, 25 bp, Artificial sequence
  SiRNA target sequence
tgatgaagttaaaaaagcatttaca

SEQ ID NO: 153969 - DNA, 25 bp, Artificial sequence
  SiRNA target sequence
gatgaagttaaaaaagcatttacaa

SEQ ID NO: 153970 - DNA, 25 bp, Artificial sequence
  SiRNA target sequence
atgaagttaaaaaagcatttacaaa

SEQ ID NO: 153971 - DNA, 25 bp, Artificial sequence
  SiRNA target sequence
tgaagttaaaaaagcatttacaaaa

SEQ ID NO: 153972 - DNA, 25 bp, Artificial sequence
  SiRNA target sequence
gaagttaaaaaagcatttacaaaaa

SEQ ID NO: 153973 - DNA, 25 bp, Artificial sequence
  SiRNA target sequence
aagttaaaaaagcatttacaaaaaa

SEQ ID NO: 153974 - DNA, 25 bp, Artificial sequence
  SiRNA target sequence
agttaaaaaagcatttacaaaaaaa

SEQ ID NO: 153975 - DNA, 25 bp, Artificial sequence
  SiRNA target sequence
gttaaaaaagcatttacaaaaaaac

SEQ ID NO: 153976 - DNA, 25 bp, Artificial sequence
  SiRNA target sequence
ttaaaaaagcatttacaaaaaaaca

SEQ ID NO: 153977 - DNA, 25 bp, Artificial sequence
  SiRNA target sequence
taaaaaagcatttacaaaaaaacaa

SEQ ID NO: 153978 - DNA, 25 bp, Artificial sequence
  SiRNA target sequence
aaaaaagcatttacaaaaaaacaaa

SEQ ID NO: 153979 - DNA, 25 bp, Artificial sequence
  SiRNA target sequence
aaaaagcatttacaaaaaaacaaag

SEQ ID NO: 153980 - DNA, 25 bp, Artificial sequence
  SiRNA target sequence
aaaagcatttacaaaaaaacaaagg

SEQ ID NO: 153981 - DNA, 25 bp, Artificial sequence
  SiRNA target sequence
aaagcatttacaaaaaaacaaaggg

SEQ ID NO: 153982 - DNA, 25 bp, Artificial sequence
  SiRNA target sequence
aagcatttacaaaaaaacaaaggga

SEQ ID NO: 153983 - DNA, 25 bp, Artificial sequence
  SiRNA target sequence
agcatttacaaaaaaacaaagggaa

SEQ ID NO: 153984 - DNA, 25 bp, Artificial sequence
  SiRNA target sequence
gcatttacaaaaaaacaaagggaat

SEQ ID NO: 153985 - DNA, 25 bp, Artificial sequence
  SiRNA target sequence
catttacaaaaaaacaaagggaatg

SEQ ID NO: 153986 - DNA, 25 bp, Artificial sequence
  SiRNA target sequence
atttacaaaaaaacaaagggaatgt

SEQ ID NO: 153987 - DNA, 25 bp, Artificial sequence
  SiRNA target sequence
tttacaaaaaaacaaagggaatgtc

SEQ ID NO: 153988 - DNA, 25 bp, Artificial sequence
  SiRNA target sequence
ttacaaaaaaacaaagggaatgtca

SEQ ID NO: 153989 - DNA, 25 bp, Artificial sequence
  SiRNA target sequence
tacaaaaaaacaaagggaatgtcat

SEQ ID NO: 153990 - DNA, 25 bp, Artificial sequence
  SiRNA target sequence
acaaaaaaacaaagggaatgtcatc

SEQ ID NO: 153991 - DNA, 25 bp, Artificial sequence
  SiRNA target sequence
caaaaaaacaaagggaatgtcatcc

SEQ ID NO: 153992 - DNA, 25 bp, Artificial sequence
  SiRNA target sequence
aaaaaaacaaagggaatgtcatccc

SEQ ID NO: 153993 - DNA, 25 bp, Artificial sequence
  SiRNA target sequence
aaaaaacaaagggaatgtcatcccg

SEQ ID NO: 153994 - DNA, 25 bp, Artificial sequence
  SiRNA target sequence
aaaaacaaagggaatgtcatcccga

SEQ ID NO: 153995 - DNA, 25 bp, Artificial sequence
  SiRNA target sequence
aaaacaaagggaatgtcatcccgat

SEQ ID NO: 153996 - DNA, 25 bp, Artificial sequence
  SiRNA target sequence
aaacaaagggaatgtcatcccgatg

SEQ ID NO: 153997 - DNA, 25 bp, Artificial sequence
  SiRNA target sequence
aacaaagggaatgtcatcccgatgg

SEQ ID NO: 153998 - DNA, 25 bp, Artificial sequence
  SiRNA target sequence
acaaagggaatgtcatcccgatggt

SEQ ID NO: 153999 - DNA, 25 bp, Artificial sequence
  SiRNA target sequence
caaagggaatgtcatcccgatggtg

SEQ ID NO: 154000 - DNA, 25 bp, Artificial sequence
  SiRNA target sequence
aaagggaatgtcatcccgatggtgc

SEQ ID NO: 154001 - DNA, 25 bp, Artificial sequence
  SiRNA target sequence
aagggaatgtcatcccgatggtgca

SEQ ID NO: 154002 - DNA, 25 bp, Artificial sequence
  SiRNA target sequence
agggaatgtcatcccgatggtgcat

SEQ ID NO: 154003 - DNA, 25 bp, Artificial sequence
  SiRNA target sequence
gggaatgtcatcccgatggtgcatt

SEQ ID NO: 154004 - DNA, 25 bp, Artificial sequence
  SiRNA target sequence
ggaatgtcatcccgatggtgcattt

SEQ ID NO: 154005 - DNA, 25 bp, Artificial sequence
  SiRNA target sequence
gaatgtcatcccgatggtgcatttt

SEQ ID NO: 154006 - DNA, 25 bp, Artificial sequence
  SiRNA target sequence
aatgtcatcccgatggtgcattttt

SEQ ID NO: 154007 - DNA, 25 bp, Artificial sequence
  SiRNA target sequence
atgtcatcccgatggtgcatttttt

SEQ ID NO: 154008 - DNA, 25 bp, Artificial sequence
  SiRNA target sequence
tgtcatcccgatggtgcatttttta

SEQ ID NO: 154009 - DNA, 25 bp, Artificial sequence
  SiRNA target sequence
gtcatcccgatggtgcattttttaa

SEQ ID NO: 154010 - DNA, 25 bp, Artificial sequence
  SiRNA target sequence
tcatcccgatggtgcattttttaaa

SEQ ID NO: 154011 - DNA, 25 bp, Artificial sequence
  SiRNA target sequence
catcccgatggtgcattttttaaag

SEQ ID NO: 154012 - DNA, 25 bp, Artificial sequence
  SiRNA target sequence
atcccgatggtgcattttttaaagc

SEQ ID NO: 154013 - DNA, 25 bp, Artificial sequence
  SiRNA target sequence
tcccgatggtgcattttttaaagct

SEQ ID NO: 154014 - DNA, 25 bp, Artificial sequence
  SiRNA target sequence
cccgatggtgcattttttaaagctg

SEQ ID NO: 154015 - DNA, 25 bp, Artificial sequence
  SiRNA target sequence
ccgatggtgcattttttaaagctgc

SEQ ID NO: 154016 - DNA, 25 bp, Artificial sequence
  SiRNA target sequence
cgatggtgcattttttaaagctgct

SEQ ID NO: 154017 - DNA, 25 bp, Artificial sequence
  SiRNA target sequence
gatggtgcattttttaaagctgctc

SEQ ID NO: 154018 - DNA, 25 bp, Artificial sequence
  SiRNA target sequence
atggtgcattttttaaagctgctct

SEQ ID NO: 154019 - DNA, 25 bp, Artificial sequence
  SiRNA target sequence
tggtgcattttttaaagctgctctt

SEQ ID NO: 154020 - DNA, 25 bp, Artificial sequence
  SiRNA target sequence
ggtgcattttttaaagctgctctta

SEQ ID NO: 154021 - DNA, 25 bp, Artificial sequence
  SiRNA target sequence
gtgcattttttaaagctgctcttag

SEQ ID NO: 154022 - DNA, 25 bp, Artificial sequence
  SiRNA target sequence
tgcattttttaaagctgctcttaga

SEQ ID NO: 154023 - DNA, 25 bp, Artificial sequence
  SiRNA target sequence
gcattttttaaagctgctcttagaa

SEQ ID NO: 154024 - DNA, 25 bp, Artificial sequence
  SiRNA target sequence
cattttttaaagctgctcttagaaa

SEQ ID NO: 154025 - DNA, 25 bp, Artificial sequence
  SiRNA target sequence
attttttaaagctgctcttagaaaa

SEQ ID NO: 154026 - DNA, 25 bp, Artificial sequence
  SiRNA target sequence
ttttttaaagctgctcttagaaaat

SEQ ID NO: 154027 - DNA, 25 bp, Artificial sequence
  SiRNA target sequence
tttttaaagctgctcttagaaaatg

SEQ ID NO: 154028 - DNA, 25 bp, Artificial sequence
  SiRNA target sequence
ttttaaagctgctcttagaaaatgt

SEQ ID NO: 154029 - DNA, 25 bp, Artificial sequence
  SiRNA target sequence
tttaaagctgctcttagaaaatgta

SEQ ID NO: 154030 - DNA, 25 bp, Artificial sequence
  SiRNA target sequence
ttaaagctgctcttagaaaatgtaa

SEQ ID NO: 154031 - DNA, 25 bp, Artificial sequence
  SiRNA target sequence
taaagctgctcttagaaaatgtaaa

SEQ ID NO: 154032 - DNA, 25 bp, Artificial sequence
  SiRNA target sequence
aaagctgctcttagaaaatgtaaaa

SEQ ID NO: 154033 - DNA, 25 bp, Artificial sequence
  SiRNA target sequence
aagctgctcttagaaaatgtaaaac

SEQ ID NO: 154034 - DNA, 25 bp, Artificial sequence
  SiRNA target sequence
agctgctcttagaaaatgtaaaaca

SEQ ID NO: 154035 - DNA, 25 bp, Artificial sequence
  SiRNA target sequence
gctgctcttagaaaatgtaaaacag

SEQ ID NO: 154036 - DNA, 25 bp, Artificial sequence
  SiRNA target sequence
ctgctcttagaaaatgtaaaacaga

SEQ ID NO: 154037 - DNA, 25 bp, Artificial sequence
  SiRNA target sequence
tgctcttagaaaatgtaaaacagat

SEQ ID NO: 154038 - DNA, 25 bp, Artificial sequence
  SiRNA target sequence
gctcttagaaaatgtaaaacagatg

SEQ ID NO: 154039 - DNA, 25 bp, Artificial sequence
  SiRNA target sequence
ctcttagaaaatgtaaaacagatga

SEQ ID NO: 154040 - DNA, 25 bp, Artificial sequence
  SiRNA target sequence
tcttagaaaatgtaaaacagatgaa

SEQ ID NO: 154041 - DNA, 25 bp, Artificial sequence
  SiRNA target sequence
cttagaaaatgtaaaacagatgaag

SEQ ID NO: 154042 - DNA, 25 bp, Artificial sequence
  SiRNA target sequence
ttagaaaatgtaaaacagatgaaga

SEQ ID NO: 154043 - DNA, 25 bp, Artificial sequence
  SiRNA target sequence
tagaaaatgtaaaacagatgaagaa

SEQ ID NO: 154044 - DNA, 25 bp, Artificial sequence
  SiRNA target sequence
agaaaatgtaaaacagatgaagaaa

SEQ ID NO: 154045 - DNA, 25 bp, Artificial sequence
  SiRNA target sequence
gaaaatgtaaaacagatgaagaaag

SEQ ID NO: 154046 - DNA, 25 bp, Artificial sequence
  SiRNA target sequence
aaaatgtaaaacagatgaagaaaga

SEQ ID NO: 154047 - DNA, 25 bp, Artificial sequence
  SiRNA target sequence
aaatgtaaaacagatgaagaaagag

SEQ ID NO: 154048 - DNA, 25 bp, Artificial sequence
  SiRNA target sequence
aatgtaaaacagatgaagaaagagc

SEQ ID NO: 154049 - DNA, 25 bp, Artificial sequence
  SiRNA target sequence
atgtaaaacagatgaagaaagagca

SEQ ID NO: 154050 - DNA, 25 bp, Artificial sequence
  SiRNA target sequence
tgtaaaacagatgaagaaagagcaa

SEQ ID NO: 154051 - DNA, 25 bp, Artificial sequence
  SiRNA target sequence
gtaaaacagatgaagaaagagcaaa

SEQ ID NO: 154052 - DNA, 25 bp, Artificial sequence
  SiRNA target sequence
taaaacagatgaagaaagagcaaaa

SEQ ID NO: 154053 - DNA, 25 bp, Artificial sequence
  SiRNA target sequence
aaaacagatgaagaaagagcaaaag

SEQ ID NO: 154054 - DNA, 25 bp, Artificial sequence
  SiRNA target sequence
aaacagatgaagaaagagcaaaagt

SEQ ID NO: 154055 - DNA, 25 bp, Artificial sequence
  SiRNA target sequence
aacagatgaagaaagagcaaaagtt

SEQ ID NO: 154056 - DNA, 25 bp, Artificial sequence
  SiRNA target sequence
acagatgaagaaagagcaaaagttg

SEQ ID NO: 154057 - DNA, 25 bp, Artificial sequence
  SiRNA target sequence
cagatgaagaaagagcaaaagttga

SEQ ID NO: 154058 - DNA, 25 bp, Artificial sequence
  SiRNA target sequence
agatgaagaaagagcaaaagttgaa

SEQ ID NO: 154059 - DNA, 25 bp, Artificial sequence
  SiRNA target sequence
gatgaagaaagagcaaaagttgaaa

SEQ ID NO: 154060 - DNA, 25 bp, Artificial sequence
  SiRNA target sequence
atgaagaaagagcaaaagttgaaaa

SEQ ID NO: 154061 - DNA, 25 bp, Artificial sequence
  SiRNA target sequence
tgaagaaagagcaaaagttgaaaaa

SEQ ID NO: 154062 - DNA, 25 bp, Artificial sequence
  SiRNA target sequence
gaagaaagagcaaaagttgaaaaag

SEQ ID NO: 154063 - DNA, 25 bp, Artificial sequence
  SiRNA target sequence
aagaaagagcaaaagttgaaaaaga

SEQ ID NO: 154064 - DNA, 25 bp, Artificial sequence
  SiRNA target sequence
agaaagagcaaaagttgaaaaagaa

SEQ ID NO: 154065 - DNA, 25 bp, Artificial sequence
  SiRNA target sequence
gaaagagcaaaagttgaaaaagaat

SEQ ID NO: 154066 - DNA, 25 bp, Artificial sequence
  SiRNA target sequence
aaagagcaaaagttgaaaaagaatt

SEQ ID NO: 154067 - DNA, 25 bp, Artificial sequence
  SiRNA target sequence
aagagcaaaagttgaaaaagaattt

SEQ ID NO: 154068 - DNA, 25 bp, Artificial sequence
  SiRNA target sequence
agagcaaaagttgaaaaagaattta

SEQ ID NO: 154069 - DNA, 25 bp, Artificial sequence
  SiRNA target sequence
gagcaaaagttgaaaaagaatttaa

SEQ ID NO: 154070 - DNA, 25 bp, Artificial sequence
  SiRNA target sequence
agcaaaagttgaaaaagaatttaaa

SEQ ID NO: 154071 - DNA, 25 bp, Artificial sequence
  SiRNA target sequence
gcaaaagttgaaaaagaatttaaag

SEQ ID NO: 154072 - DNA, 25 bp, Artificial sequence
  SiRNA target sequence
caaaagttgaaaaagaatttaaaga

SEQ ID NO: 154073 - DNA, 25 bp, Artificial sequence
  SiRNA target sequence
aaaagttgaaaaagaatttaaagaa

SEQ ID NO: 154074 - DNA, 25 bp, Artificial sequence
  SiRNA target sequence
aaagttgaaaaagaatttaaagaaa

SEQ ID NO: 154075 - DNA, 25 bp, Artificial sequence
  SiRNA target sequence
aagttgaaaaagaatttaaagaaaa

SEQ ID NO: 154076 - DNA, 25 bp, Artificial sequence
  SiRNA target sequence
agttgaaaaagaatttaaagaaaaa

SEQ ID NO: 154077 - DNA, 25 bp, Artificial sequence
  SiRNA target sequence
gttgaaaaagaatttaaagaaaaat

SEQ ID NO: 154078 - DNA, 25 bp, Artificial sequence
  SiRNA target sequence
ttgaaaaagaatttaaagaaaaatc

SEQ ID NO: 154079 - DNA, 25 bp, Artificial sequence
  SiRNA target sequence
tgaaaaagaatttaaagaaaaatca

SEQ ID NO: 154080 - DNA, 25 bp, Artificial sequence
  SiRNA target sequence
gaaaaagaatttaaagaaaaatcac

SEQ ID NO: 154081 - DNA, 25 bp, Artificial sequence
  SiRNA target sequence
aaaaagaatttaaagaaaaatcaca

SEQ ID NO: 154082 - DNA, 25 bp, Artificial sequence
  SiRNA target sequence
aaaagaatttaaagaaaaatcacaa

SEQ ID NO: 154083 - DNA, 25 bp, Artificial sequence
  SiRNA target sequence
aaagaatttaaagaaaaatcacaaa

SEQ ID NO: 154084 - DNA, 25 bp, Artificial sequence
  SiRNA target sequence
aagaatttaaagaaaaatcacaaaa

SEQ ID NO: 154085 - DNA, 25 bp, Artificial sequence
  SiRNA target sequence
agaatttaaagaaaaatcacaaaaa

SEQ ID NO: 154086 - DNA, 25 bp, Artificial sequence
  SiRNA target sequence
gaatttaaagaaaaatcacaaaaat

SEQ ID NO: 154087 - DNA, 25 bp, Artificial sequence
  SiRNA target sequence
aatttaaagaaaaatcacaaaaatg

SEQ ID NO: 154088 - DNA, 25 bp, Artificial sequence
  SiRNA target sequence
atttaaagaaaaatcacaaaaatgt

SEQ ID NO: 154089 - DNA, 25 bp, Artificial sequence
  SiRNA target sequence
tttaaagaaaaatcacaaaaatgta

SEQ ID NO: 154090 - DNA, 25 bp, Artificial sequence
  SiRNA target sequence
ttaaagaaaaatcacaaaaatgtaa

SEQ ID NO: 154091 - DNA, 25 bp, Artificial sequence
  SiRNA target sequence
taaagaaaaatcacaaaaatgtaat

SEQ ID NO: 154092 - DNA, 25 bp, Artificial sequence
  SiRNA target sequence
aaagaaaaatcacaaaaatgtaatc

SEQ ID NO: 154093 - DNA, 25 bp, Artificial sequence
  SiRNA target sequence
aagaaaaatcacaaaaatgtaatca

SEQ ID NO: 154094 - DNA, 25 bp, Artificial sequence
  SiRNA target sequence
agaaaaatcacaaaaatgtaatcaa

SEQ ID NO: 154095 - DNA, 25 bp, Artificial sequence
  SiRNA target sequence
gaaaaatcacaaaaatgtaatcaag

SEQ ID NO: 154096 - DNA, 25 bp, Artificial sequence
  SiRNA target sequence
aaaaatcacaaaaatgtaatcaagc

SEQ ID NO: 154097 - DNA, 25 bp, Artificial sequence
  SiRNA target sequence
aaaatcacaaaaatgtaatcaagct

SEQ ID NO: 154098 - DNA, 25 bp, Artificial sequence
  SiRNA target sequence
aaatcacaaaaatgtaatcaagcta

SEQ ID NO: 154099 - DNA, 25 bp, Artificial sequence
  SiRNA target sequence
aatcacaaaaatgtaatcaagctaa

SEQ ID NO: 154100 - DNA, 25 bp, Artificial sequence
  SiRNA target sequence
atcacaaaaatgtaatcaagctaaa

SEQ ID NO: 154101 - DNA, 25 bp, Artificial sequence
  SiRNA target sequence
tcacaaaaatgtaatcaagctaaag

SEQ ID NO: 154102 - DNA, 25 bp, Artificial sequence
  SiRNA target sequence
cacaaaaatgtaatcaagctaaagc

SEQ ID NO: 154103 - DNA, 25 bp, Artificial sequence
  SiRNA target sequence
acaaaaatgtaatcaagctaaagca

SEQ ID NO: 154104 - DNA, 25 bp, Artificial sequence
  SiRNA target sequence
caaaaatgtaatcaagctaaagcag

SEQ ID NO: 154105 - DNA, 25 bp, Artificial sequence
  SiRNA target sequence
aaaaatgtaatcaagctaaagcagt

SEQ ID NO: 154106 - DNA, 25 bp, Artificial sequence
  SiRNA target sequence
aaaatgtaatcaagctaaagcagtt

SEQ ID NO: 154107 - DNA, 25 bp, Artificial sequence
  SiRNA target sequence
aaatgtaatcaagctaaagcagttt

SEQ ID NO: 154108 - DNA, 25 bp, Artificial sequence
  SiRNA target sequence
aatgtaatcaagctaaagcagtttt

SEQ ID NO: 154109 - DNA, 25 bp, Artificial sequence
  SiRNA target sequence
atgtaatcaagctaaagcagtttta

SEQ ID NO: 154110 - DNA, 25 bp, Artificial sequence
  SiRNA target sequence
tgtaatcaagctaaagcagttttat

SEQ ID NO: 154111 - DNA, 25 bp, Artificial sequence
  SiRNA target sequence
gtaatcaagctaaagcagttttatt

SEQ ID NO: 154112 - DNA, 25 bp, Artificial sequence
  SiRNA target sequence
taatcaagctaaagcagttttattt

SEQ ID NO: 154113 - DNA, 25 bp, Artificial sequence
  SiRNA target sequence
aatcaagctaaagcagttttatttg

SEQ ID NO: 154114 - DNA, 25 bp, Artificial sequence
  SiRNA target sequence
atcaagctaaagcagttttatttga

SEQ ID NO: 154115 - DNA, 25 bp, Artificial sequence
  SiRNA target sequence
tcaagctaaagcagttttatttgat

SEQ ID NO: 154116 - DNA, 25 bp, Artificial sequence
  SiRNA target sequence
caagctaaagcagttttatttgatg

SEQ ID NO: 154117 - DNA, 25 bp, Artificial sequence
  SiRNA target sequence
aagctaaagcagttttatttgatga

SEQ ID NO: 154118 - DNA, 25 bp, Artificial sequence
  SiRNA target sequence
agctaaagcagttttatttgatgag

SEQ ID NO: 154119 - DNA, 25 bp, Artificial sequence
  SiRNA target sequence
gctaaagcagttttatttgatgaga

SEQ ID NO: 154120 - DNA, 25 bp, Artificial sequence
  SiRNA target sequence
ctaaagcagttttatttgatgagaa

SEQ ID NO: 154121 - DNA, 25 bp, Artificial sequence
  SiRNA target sequence
taaagcagttttatttgatgagaaa

SEQ ID NO: 154122 - DNA, 25 bp, Artificial sequence
  SiRNA target sequence
aaagcagttttatttgatgagaaaa

SEQ ID NO: 154123 - DNA, 25 bp, Artificial sequence
  SiRNA target sequence
aagcagttttatttgatgagaaaaa

SEQ ID NO: 154124 - DNA, 25 bp, Artificial sequence
  SiRNA target sequence
agcagttttatttgatgagaaaaaa

SEQ ID NO: 154125 - DNA, 25 bp, Artificial sequence
  SiRNA target sequence
gcagttttatttgatgagaaaaaaa

SEQ ID NO: 154126 - DNA, 25 bp, Artificial sequence
  SiRNA target sequence
cagttttatttgatgagaaaaaaaa

SEQ ID NO: 154127 - DNA, 25 bp, Artificial sequence
  SiRNA target sequence
agttttatttgatgagaaaaaaaag

SEQ ID NO: 154128 - DNA, 25 bp, Artificial sequence
  SiRNA target sequence
gttttatttgatgagaaaaaaaagc

SEQ ID NO: 154129 - DNA, 25 bp, Artificial sequence
  SiRNA target sequence
ttttatttgatgagaaaaaaaagca

SEQ ID NO: 154130 - DNA, 25 bp, Artificial sequence
  SiRNA target sequence
tttatttgatgagaaaaaaaagcaa

SEQ ID NO: 154131 - DNA, 25 bp, Artificial sequence
  SiRNA target sequence
ttatttgatgagaaaaaaaagcaag

SEQ ID NO: 154132 - DNA, 25 bp, Artificial sequence
  SiRNA target sequence
tatttgatgagaaaaaaaagcaaga

SEQ ID NO: 154133 - DNA, 25 bp, Artificial sequence
  SiRNA target sequence
atttgatgagaaaaaaaagcaagag

SEQ ID NO: 154134 - DNA, 25 bp, Artificial sequence
  SiRNA target sequence
tttgatgagaaaaaaaagcaagagt

SEQ ID NO: 154135 - DNA, 25 bp, Artificial sequence
  SiRNA target sequence
ttgatgagaaaaaaaagcaagagta

SEQ ID NO: 154136 - DNA, 25 bp, Artificial sequence
  SiRNA target sequence
tgatgagaaaaaaaagcaagagtat

SEQ ID NO: 154137 - DNA, 25 bp, Artificial sequence
  SiRNA target sequence
gatgagaaaaaaaagcaagagtatg

SEQ ID NO: 154138 - DNA, 25 bp, Artificial sequence
  SiRNA target sequence
atgagaaaaaaaagcaagagtatga

SEQ ID NO: 154139 - DNA, 25 bp, Artificial sequence
  SiRNA target sequence
tgagaaaaaaaagcaagagtatgat

SEQ ID NO: 154140 - DNA, 25 bp, Artificial sequence
  SiRNA target sequence
gagaaaaaaaagcaagagtatgata

SEQ ID NO: 154141 - DNA, 25 bp, Artificial sequence
  SiRNA target sequence
agaaaaaaaagcaagagtatgatat

SEQ ID NO: 154142 - DNA, 25 bp, Artificial sequence
  SiRNA target sequence
gaaaaaaaagcaagagtatgatatg

SEQ ID NO: 154143 - DNA, 25 bp, Artificial sequence
  SiRNA target sequence
aaaaaaaagcaagagtatgatatgg

SEQ ID NO: 154144 - DNA, 25 bp, Artificial sequence
  SiRNA target sequence
aaaaaaagcaagagtatgatatggg

SEQ ID NO: 154145 - DNA, 25 bp, Artificial sequence
  SiRNA target sequence
aaaaaagcaagagtatgatatggga

SEQ ID NO: 154146 - DNA, 25 bp, Artificial sequence
  SiRNA target sequence
aaaaagcaagagtatgatatgggaa

SEQ ID NO: 154147 - DNA, 25 bp, Artificial sequence
  SiRNA target sequence
aaaagcaagagtatgatatgggaat

SEQ ID NO: 154148 - DNA, 25 bp, Artificial sequence
  SiRNA target sequence
aaagcaagagtatgatatgggaatg

SEQ ID NO: 154149 - DNA, 25 bp, Artificial sequence
  SiRNA target sequence
aagcaagagtatgatatgggaatga

SEQ ID NO: 154150 - DNA, 25 bp, Artificial sequence
  SiRNA target sequence
agcaagagtatgatatgggaatgac

SEQ ID NO: 154151 - DNA, 25 bp, Artificial sequence
  SiRNA target sequence
gcaagagtatgatatgggaatgact

SEQ ID NO: 154152 - DNA, 25 bp, Artificial sequence
  SiRNA target sequence
caagagtatgatatgggaatgactg

SEQ ID NO: 154153 - DNA, 25 bp, Artificial sequence
  SiRNA target sequence
aagagtatgatatgggaatgactgg

SEQ ID NO: 154154 - DNA, 25 bp, Artificial sequence
  SiRNA target sequence
agagtatgatatgggaatgactggc

SEQ ID NO: 154155 - DNA, 25 bp, Artificial sequence
  SiRNA target sequence
gagtatgatatgggaatgactggcg

SEQ ID NO: 154156 - DNA, 25 bp, Artificial sequence
  SiRNA target sequence
agtatgatatgggaatgactggcga

SEQ ID NO: 154157 - DNA, 25 bp, Artificial sequence
  SiRNA target sequence
gtatgatatgggaatgactggcgat

SEQ ID NO: 154158 - DNA, 25 bp, Artificial sequence
  SiRNA target sequence
tatgatatgggaatgactggcgatt

SEQ ID NO: 154159 - DNA, 25 bp, Artificial sequence
  SiRNA target sequence
atgatatgggaatgactggcgattt

SEQ ID NO: 154160 - DNA, 25 bp, Artificial sequence
  SiRNA target sequence
tgatatgggaatgactggcgatttt

SEQ ID NO: 154161 - DNA, 25 bp, Artificial sequence
  SiRNA target sequence
gatatgggaatgactggcgattttg

SEQ ID NO: 154162 - DNA, 25 bp, Artificial sequence
  SiRNA target sequence
atatgggaatgactggcgattttgg

SEQ ID NO: 154163 - DNA, 25 bp, Artificial sequence
  SiRNA target sequence
tatgggaatgactggcgattttgga

SEQ ID NO: 154164 - DNA, 25 bp, Artificial sequence
  SiRNA target sequence
atgggaatgactggcgattttggat

SEQ ID NO: 154165 - DNA, 25 bp, Artificial sequence
  SiRNA target sequence
tgggaatgactggcgattttggatt

SEQ ID NO: 154166 - DNA, 25 bp, Artificial sequence
  SiRNA target sequence
gggaatgactggcgattttggattt

SEQ ID NO: 154167 - DNA, 25 bp, Artificial sequence
  SiRNA target sequence
ggaatgactggcgattttggatttt

SEQ ID NO: 154168 - DNA, 25 bp, Artificial sequence
  SiRNA target sequence
gaatgactggcgattttggattttc

SEQ ID NO: 154169 - DNA, 25 bp, Artificial sequence
  SiRNA target sequence
aatgactggcgattttggattttct

SEQ ID NO: 154170 - DNA, 25 bp, Artificial sequence
  SiRNA target sequence
atgactggcgattttggattttctg

SEQ ID NO: 154171 - DNA, 25 bp, Artificial sequence
  SiRNA target sequence
tgactggcgattttggattttctgc

SEQ ID NO: 154172 - DNA, 25 bp, Artificial sequence
  SiRNA target sequence
gactggcgattttggattttctgca

SEQ ID NO: 154173 - DNA, 25 bp, Artificial sequence
  SiRNA target sequence
actggcgattttggattttctgcag

SEQ ID NO: 154174 - DNA, 25 bp, Artificial sequence
  SiRNA target sequence
ctggcgattttggattttctgcagg

SEQ ID NO: 154175 - DNA, 25 bp, Artificial sequence
  SiRNA target sequence
tggcgattttggattttctgcaggt

SEQ ID NO: 154176 - DNA, 25 bp, Artificial sequence
  SiRNA target sequence
ggcgattttggattttctgcaggtg

SEQ ID NO: 154177 - DNA, 25 bp, Artificial sequence
  SiRNA target sequence
gcgattttggattttctgcaggtgg

SEQ ID NO: 154178 - DNA, 25 bp, Artificial sequence
  SiRNA target sequence
cgattttggattttctgcaggtggt

SEQ ID NO: 154179 - DNA, 25 bp, Artificial sequence
  SiRNA target sequence
gattttggattttctgcaggtggtg

SEQ ID NO: 154180 - DNA, 25 bp, Artificial sequence
  SiRNA target sequence
attttggattttctgcaggtggtgg

SEQ ID NO: 154181 - DNA, 25 bp, Artificial sequence
  SiRNA target sequence
ttttggattttctgcaggtggtgga

SEQ ID NO: 154182 - DNA, 25 bp, Artificial sequence
  SiRNA target sequence
tttggattttctgcaggtggtggag

SEQ ID NO: 154183 - DNA, 25 bp, Artificial sequence
  SiRNA target sequence
ttggattttctgcaggtggtggaga

SEQ ID NO: 154184 - DNA, 25 bp, Artificial sequence
  SiRNA target sequence
tggattttctgcaggtggtggagac

SEQ ID NO: 154185 - DNA, 25 bp, Artificial sequence
  SiRNA target sequence
ggattttctgcaggtggtggagact

SEQ ID NO: 154186 - DNA, 25 bp, Artificial sequence
  SiRNA target sequence
gattttctgcaggtggtggagactt

SEQ ID NO: 154187 - DNA, 25 bp, Artificial sequence
  SiRNA target sequence
attttctgcaggtggtggagacttt

SEQ ID NO: 154188 - DNA, 25 bp, Artificial sequence
  SiRNA target sequence
ttttctgcaggtggtggagactttt

SEQ ID NO: 154189 - DNA, 25 bp, Artificial sequence
  SiRNA target sequence
tttctgcaggtggtggagacttttt

SEQ ID NO: 154190 - DNA, 25 bp, Artificial sequence
  SiRNA target sequence
ttctgcaggtggtggagactttttc

SEQ ID NO: 154191 - DNA, 25 bp, Artificial sequence
  SiRNA target sequence
tctgcaggtggtggagactttttcg

SEQ ID NO: 154192 - DNA, 25 bp, Artificial sequence
  SiRNA target sequence
ctgcaggtggtggagactttttcga

SEQ ID NO: 154193 - DNA, 25 bp, Artificial sequence
  SiRNA target sequence
tgcaggtggtggagactttttcgat

SEQ ID NO: 154194 - DNA, 25 bp, Artificial sequence
  SiRNA target sequence
gcaggtggtggagactttttcgata

SEQ ID NO: 154195 - DNA, 25 bp, Artificial sequence
  SiRNA target sequence
caggtggtggagactttttcgatat

SEQ ID NO: 154196 - DNA, 25 bp, Artificial sequence
  SiRNA target sequence
aggtggtggagactttttcgatatt

SEQ ID NO: 154197 - DNA, 25 bp, Artificial sequence
  SiRNA target sequence
ggtggtggagactttttcgatattt

SEQ ID NO: 154198 - DNA, 25 bp, Artificial sequence
  SiRNA target sequence
gtggtggagactttttcgatatttt

SEQ ID NO: 154199 - DNA, 25 bp, Artificial sequence
  SiRNA target sequence
tggtggagactttttcgatattttt

SEQ ID NO: 154200 - DNA, 25 bp, Artificial sequence
  SiRNA target sequence
ggtggagactttttcgatatttttt

SEQ ID NO: 154201 - DNA, 25 bp, Artificial sequence
  SiRNA target sequence
gtggagactttttcgatattttttc

SEQ ID NO: 154202 - DNA, 25 bp, Artificial sequence
  SiRNA target sequence
tggagactttttcgatattttttca

SEQ ID NO: 154203 - DNA, 25 bp, Artificial sequence
  SiRNA target sequence
ggagactttttcgatattttttcaa

SEQ ID NO: 154204 - DNA, 25 bp, Artificial sequence
  SiRNA target sequence
gagactttttcgatattttttcaag

SEQ ID NO: 154205 - DNA, 25 bp, Artificial sequence
  SiRNA target sequence
agactttttcgatattttttcaagt

SEQ ID NO: 154206 - DNA, 25 bp, Artificial sequence
  SiRNA target sequence
gactttttcgatattttttcaagtt

SEQ ID NO: 154207 - DNA, 25 bp, Artificial sequence
  SiRNA target sequence
actttttcgatattttttcaagttt

SEQ ID NO: 154208 - DNA, 25 bp, Artificial sequence
  SiRNA target sequence
ctttttcgatattttttcaagtttt

SEQ ID NO: 154209 - DNA, 25 bp, Artificial sequence
  SiRNA target sequence
tttttcgatattttttcaagtttta

SEQ ID NO: 154210 - DNA, 25 bp, Artificial sequence
  SiRNA target sequence
ttttcgatattttttcaagttttac

SEQ ID NO: 154211 - DNA, 25 bp, Artificial sequence
  SiRNA target sequence
tttcgatattttttcaagttttact

SEQ ID NO: 154212 - DNA, 25 bp, Artificial sequence
  SiRNA target sequence
ttcgatattttttcaagttttactg

SEQ ID NO: 154213 - DNA, 25 bp, Artificial sequence
  SiRNA target sequence
tcgatattttttcaagttttactgg

SEQ ID NO: 154214 - DNA, 25 bp, Artificial sequence
  SiRNA target sequence
cgatattttttcaagttttactggt

SEQ ID NO: 154215 - DNA, 25 bp, Artificial sequence
  SiRNA target sequence
gatattttttcaagttttactggtg

SEQ ID NO: 154216 - DNA, 25 bp, Artificial sequence
  SiRNA target sequence
atattttttcaagttttactggtgg

SEQ ID NO: 154217 - DNA, 25 bp, Artificial sequence
  SiRNA target sequence
tattttttcaagttttactggtgga

SEQ ID NO: 154218 - DNA, 25 bp, Artificial sequence
  SiRNA target sequence
attttttcaagttttactggtggag

SEQ ID NO: 154219 - DNA, 25 bp, Artificial sequence
  SiRNA target sequence
ttttttcaagttttactggtggagg

SEQ ID NO: 154220 - DNA, 25 bp, Artificial sequence
  SiRNA target sequence
tttttcaagttttactggtggagga

SEQ ID NO: 154221 - DNA, 25 bp, Artificial sequence
  SiRNA target sequence
ttttcaagttttactggtggaggaa

SEQ ID NO: 154222 - DNA, 25 bp, Artificial sequence
  SiRNA target sequence
tttcaagttttactggtggaggaag

SEQ ID NO: 154223 - DNA, 25 bp, Artificial sequence
  SiRNA target sequence
ttcaagttttactggtggaggaaga

SEQ ID NO: 154224 - DNA, 25 bp, Artificial sequence
  SiRNA target sequence
tcaagttttactggtggaggaagaa

SEQ ID NO: 154225 - DNA, 25 bp, Artificial sequence
  SiRNA target sequence
caagttttactggtggaggaagaag

SEQ ID NO: 154226 - DNA, 25 bp, Artificial sequence
  SiRNA target sequence
aagttttactggtggaggaagaaga

SEQ ID NO: 154227 - DNA, 25 bp, Artificial sequence
  SiRNA target sequence
agttttactggtggaggaagaagaa

SEQ ID NO: 154228 - DNA, 25 bp, Artificial sequence
  SiRNA target sequence
gttttactggtggaggaagaagaaa

SEQ ID NO: 154229 - DNA, 25 bp, Artificial sequence
  SiRNA target sequence
ttttactggtggaggaagaagaaat

SEQ ID NO: 154230 - DNA, 25 bp, Artificial sequence
  SiRNA target sequence
tttactggtggaggaagaagaaatc

SEQ ID NO: 154231 - DNA, 25 bp, Artificial sequence
  SiRNA target sequence
ttactggtggaggaagaagaaatcg

SEQ ID NO: 154232 - DNA, 25 bp, Artificial sequence
  SiRNA target sequence
tactggtggaggaagaagaaatcga

SEQ ID NO: 154233 - DNA, 25 bp, Artificial sequence
  SiRNA target sequence
actggtggaggaagaagaaatcgag

SEQ ID NO: 154234 - DNA, 25 bp, Artificial sequence
  SiRNA target sequence
ctggtggaggaagaagaaatcgagt

SEQ ID NO: 154235 - DNA, 25 bp, Artificial sequence
  SiRNA target sequence
tggtggaggaagaagaaatcgagta

SEQ ID NO: 154236 - DNA, 25 bp, Artificial sequence
  SiRNA target sequence
ggtggaggaagaagaaatcgagtac

SEQ ID NO: 154237 - DNA, 25 bp, Artificial sequence
  SiRNA target sequence
gtggaggaagaagaaatcgagtaca

SEQ ID NO: 154238 - DNA, 25 bp, Artificial sequence
  SiRNA target sequence
tggaggaagaagaaatcgagtacaa

SEQ ID NO: 154239 - DNA, 25 bp, Artificial sequence
  SiRNA target sequence
ggaggaagaagaaatcgagtacaaa

SEQ ID NO: 154240 - DNA, 25 bp, Artificial sequence
  SiRNA target sequence
gaggaagaagaaatcgagtacaaaa

SEQ ID NO: 154241 - DNA, 25 bp, Artificial sequence
  SiRNA target sequence
aggaagaagaaatcgagtacaaaaa

SEQ ID NO: 154242 - DNA, 25 bp, Artificial sequence
  SiRNA target sequence
ggaagaagaaatcgagtacaaaaag

SEQ ID NO: 154243 - DNA, 25 bp, Artificial sequence
  SiRNA target sequence
gaagaagaaatcgagtacaaaaagt

SEQ ID NO: 154244 - DNA, 25 bp, Artificial sequence
  SiRNA target sequence
aagaagaaatcgagtacaaaaagtt

SEQ ID NO: 154245 - DNA, 25 bp, Artificial sequence
  SiRNA target sequence
agaagaaatcgagtacaaaaagttc

SEQ ID NO: 154246 - DNA, 25 bp, Artificial sequence
  SiRNA target sequence
gaagaaatcgagtacaaaaagttca

SEQ ID NO: 154247 - DNA, 25 bp, Artificial sequence
  SiRNA target sequence
aagaaatcgagtacaaaaagttcaa

SEQ ID NO: 154248 - DNA, 25 bp, Artificial sequence
  SiRNA target sequence
agaaatcgagtacaaaaagttcaag

SEQ ID NO: 154249 - DNA, 25 bp, Artificial sequence
  SiRNA target sequence
gaaatcgagtacaaaaagttcaaga

SEQ ID NO: 154250 - DNA, 25 bp, Artificial sequence
  SiRNA target sequence
aaatcgagtacaaaaagttcaagat

SEQ ID NO: 154251 - DNA, 25 bp, Artificial sequence
  SiRNA target sequence
aatcgagtacaaaaagttcaagata

SEQ ID NO: 154252 - DNA, 25 bp, Artificial sequence
  SiRNA target sequence
atcgagtacaaaaagttcaagatac

SEQ ID NO: 154253 - DNA, 25 bp, Artificial sequence
  SiRNA target sequence
tcgagtacaaaaagttcaagataca

SEQ ID NO: 154254 - DNA, 25 bp, Artificial sequence
  SiRNA target sequence
cgagtacaaaaagttcaagatacag

SEQ ID NO: 154255 - DNA, 25 bp, Artificial sequence
  SiRNA target sequence
gagtacaaaaagttcaagatacaga

SEQ ID NO: 154256 - DNA, 25 bp, Artificial sequence
  SiRNA target sequence
agtacaaaaagttcaagatacagaa

SEQ ID NO: 154257 - DNA, 25 bp, Artificial sequence
  SiRNA target sequence
gtacaaaaagttcaagatacagaat

SEQ ID NO: 154258 - DNA, 25 bp, Artificial sequence
  SiRNA target sequence
tacaaaaagttcaagatacagaata

SEQ ID NO: 154259 - DNA, 25 bp, Artificial sequence
  SiRNA target sequence
acaaaaagttcaagatacagaatac

SEQ ID NO: 154260 - DNA, 25 bp, Artificial sequence
  SiRNA target sequence
caaaaagttcaagatacagaatacg

SEQ ID NO: 154261 - DNA, 25 bp, Artificial sequence
  SiRNA target sequence
aaaaagttcaagatacagaatacga

SEQ ID NO: 154262 - DNA, 25 bp, Artificial sequence
  SiRNA target sequence
aaaagttcaagatacagaatacgag

SEQ ID NO: 154263 - DNA, 25 bp, Artificial sequence
  SiRNA target sequence
aaagttcaagatacagaatacgagt

SEQ ID NO: 154264 - DNA, 25 bp, Artificial sequence
  SiRNA target sequence
aagttcaagatacagaatacgagtt

SEQ ID NO: 154265 - DNA, 25 bp, Artificial sequence
  SiRNA target sequence
agttcaagatacagaatacgagttt

SEQ ID NO: 154266 - DNA, 25 bp, Artificial sequence
  SiRNA target sequence
gttcaagatacagaatacgagttta

SEQ ID NO: 154267 - DNA, 25 bp, Artificial sequence
  SiRNA target sequence
ttcaagatacagaatacgagtttaa

SEQ ID NO: 154268 - DNA, 25 bp, Artificial sequence
  SiRNA target sequence
tcaagatacagaatacgagtttaat

SEQ ID NO: 154269 - DNA, 25 bp, Artificial sequence
  SiRNA target sequence
caagatacagaatacgagtttaata

SEQ ID NO: 154270 - DNA, 25 bp, Artificial sequence
  SiRNA target sequence
aagatacagaatacgagtttaatat

SEQ ID NO: 154271 - DNA, 25 bp, Artificial sequence
  SiRNA target sequence
agatacagaatacgagtttaatatt

SEQ ID NO: 154272 - DNA, 25 bp, Artificial sequence
  SiRNA target sequence
gatacagaatacgagtttaatattt

SEQ ID NO: 154273 - DNA, 25 bp, Artificial sequence
  SiRNA target sequence
atacagaatacgagtttaatatttc

SEQ ID NO: 154274 - DNA, 25 bp, Artificial sequence
  SiRNA target sequence
tacagaatacgagtttaatatttcg

SEQ ID NO: 154275 - DNA, 25 bp, Artificial sequence
  SiRNA target sequence
acagaatacgagtttaatatttcgt

SEQ ID NO: 154276 - DNA, 25 bp, Artificial sequence
  SiRNA target sequence
cagaatacgagtttaatatttcgtt

SEQ ID NO: 154277 - DNA, 25 bp, Artificial sequence
  SiRNA target sequence
agaatacgagtttaatatttcgttg

SEQ ID NO: 154278 - DNA, 25 bp, Artificial sequence
  SiRNA target sequence
gaatacgagtttaatatttcgttga

SEQ ID NO: 154279 - DNA, 25 bp, Artificial sequence
  SiRNA target sequence
aatacgagtttaatatttcgttgaa

SEQ ID NO: 154280 - DNA, 25 bp, Artificial sequence
  SiRNA target sequence
atacgagtttaatatttcgttgaag

SEQ ID NO: 154281 - DNA, 25 bp, Artificial sequence
  SiRNA target sequence
tacgagtttaatatttcgttgaagg

SEQ ID NO: 154282 - DNA, 25 bp, Artificial sequence
  SiRNA target sequence
acgagtttaatatttcgttgaagga

SEQ ID NO: 154283 - DNA, 25 bp, Artificial sequence
  SiRNA target sequence
cgagtttaatatttcgttgaaggaa

SEQ ID NO: 154284 - DNA, 25 bp, Artificial sequence
  SiRNA target sequence
gagtttaatatttcgttgaaggaag

SEQ ID NO: 154285 - DNA, 25 bp, Artificial sequence
  SiRNA target sequence
agtttaatatttcgttgaaggaagc

SEQ ID NO: 154286 - DNA, 25 bp, Artificial sequence
  SiRNA target sequence
gtttaatatttcgttgaaggaagct

SEQ ID NO: 154287 - DNA, 25 bp, Artificial sequence
  SiRNA target sequence
tttaatatttcgttgaaggaagctt

SEQ ID NO: 154288 - DNA, 25 bp, Artificial sequence
  SiRNA target sequence
ttaatatttcgttgaaggaagctta

SEQ ID NO: 154289 - DNA, 25 bp, Artificial sequence
  SiRNA target sequence
taatatttcgttgaaggaagcttat

SEQ ID NO: 154290 - DNA, 25 bp, Artificial sequence
  SiRNA target sequence
aatatttcgttgaaggaagcttata

SEQ ID NO: 154291 - DNA, 25 bp, Artificial sequence
  SiRNA target sequence
atatttcgttgaaggaagcttatat

SEQ ID NO: 154292 - DNA, 25 bp, Artificial sequence
  SiRNA target sequence
tatttcgttgaaggaagcttatatg

SEQ ID NO: 154293 - DNA, 25 bp, Artificial sequence
  SiRNA target sequence
atttcgttgaaggaagcttatatgg

SEQ ID NO: 154294 - DNA, 25 bp, Artificial sequence
  SiRNA target sequence
tttcgttgaaggaagcttatatggg

SEQ ID NO: 154295 - DNA, 25 bp, Artificial sequence
  SiRNA target sequence
ttcgttgaaggaagcttatatggga

SEQ ID NO: 154296 - DNA, 25 bp, Artificial sequence
  SiRNA target sequence
tcgttgaaggaagcttatatgggaa

SEQ ID NO: 154297 - DNA, 25 bp, Artificial sequence
  SiRNA target sequence
cgttgaaggaagcttatatgggaaa

SEQ ID NO: 154298 - DNA, 25 bp, Artificial sequence
  SiRNA target sequence
gttgaaggaagcttatatgggaaag

SEQ ID NO: 154299 - DNA, 25 bp, Artificial sequence
  SiRNA target sequence
ttgaaggaagcttatatgggaaagc

SEQ ID NO: 154300 - DNA, 25 bp, Artificial sequence
  SiRNA target sequence
tgaaggaagcttatatgggaaagcg

SEQ ID NO: 154301 - DNA, 25 bp, Artificial sequence
  SiRNA target sequence
gaaggaagcttatatgggaaagcga

SEQ ID NO: 154302 - DNA, 25 bp, Artificial sequence
  SiRNA target sequence
aaggaagcttatatgggaaagcgag

SEQ ID NO: 154303 - DNA, 25 bp, Artificial sequence
  SiRNA target sequence
aggaagcttatatgggaaagcgagc

SEQ ID NO: 154304 - DNA, 25 bp, Artificial sequence
  SiRNA target sequence
ggaagcttatatgggaaagcgagct

SEQ ID NO: 154305 - DNA, 25 bp, Artificial sequence
  SiRNA target sequence
gaagcttatatgggaaagcgagcta

SEQ ID NO: 154306 - DNA, 25 bp, Artificial sequence
  SiRNA target sequence
aagcttatatgggaaagcgagctag

SEQ ID NO: 154307 - DNA, 25 bp, Artificial sequence
  SiRNA target sequence
agcttatatgggaaagcgagctagt

SEQ ID NO: 154308 - DNA, 25 bp, Artificial sequence
  SiRNA target sequence
gcttatatgggaaagcgagctagtt

SEQ ID NO: 154309 - DNA, 25 bp, Artificial sequence
  SiRNA target sequence
cttatatgggaaagcgagctagttt

SEQ ID NO: 154310 - DNA, 25 bp, Artificial sequence
  SiRNA target sequence
ttatatgggaaagcgagctagtttt

SEQ ID NO: 154311 - DNA, 25 bp, Artificial sequence
  SiRNA target sequence
tatatgggaaagcgagctagtttta

SEQ ID NO: 154312 - DNA, 25 bp, Artificial sequence
  SiRNA target sequence
atatgggaaagcgagctagttttaa

SEQ ID NO: 154313 - DNA, 25 bp, Artificial sequence
  SiRNA target sequence
tatgggaaagcgagctagttttaat

SEQ ID NO: 154314 - DNA, 25 bp, Artificial sequence
  SiRNA target sequence
atgggaaagcgagctagttttaatg

SEQ ID NO: 154315 - DNA, 25 bp, Artificial sequence
  SiRNA target sequence
tgggaaagcgagctagttttaatgt

SEQ ID NO: 154316 - DNA, 25 bp, Artificial sequence
  SiRNA target sequence
gggaaagcgagctagttttaatgta

SEQ ID NO: 154317 - DNA, 25 bp, Artificial sequence
  SiRNA target sequence
ggaaagcgagctagttttaatgtaa

SEQ ID NO: 154318 - DNA, 25 bp, Artificial sequence
  SiRNA target sequence
gaaagcgagctagttttaatgtaaa

SEQ ID NO: 154319 - DNA, 25 bp, Artificial sequence
  SiRNA target sequence
aaagcgagctagttttaatgtaaaa

SEQ ID NO: 154320 - DNA, 25 bp, Artificial sequence
  SiRNA target sequence
aagcgagctagttttaatgtaaaag

SEQ ID NO: 154321 - DNA, 25 bp, Artificial sequence
  SiRNA target sequence
agcgagctagttttaatgtaaaagt

SEQ ID NO: 154322 - DNA, 25 bp, Artificial sequence
  SiRNA target sequence
gcgagctagttttaatgtaaaagtg

SEQ ID NO: 154323 - DNA, 25 bp, Artificial sequence
  SiRNA target sequence
cgagctagttttaatgtaaaagtgc

SEQ ID NO: 154324 - DNA, 25 bp, Artificial sequence
  SiRNA target sequence
gagctagttttaatgtaaaagtgca

SEQ ID NO: 154325 - DNA, 25 bp, Artificial sequence
  SiRNA target sequence
agctagttttaatgtaaaagtgcaa

SEQ ID NO: 154326 - DNA, 25 bp, Artificial sequence
  SiRNA target sequence
gctagttttaatgtaaaagtgcaaa

SEQ ID NO: 154327 - DNA, 25 bp, Artificial sequence
  SiRNA target sequence
ctagttttaatgtaaaagtgcaaag

SEQ ID NO: 154328 - DNA, 25 bp, Artificial sequence
  SiRNA target sequence
tagttttaatgtaaaagtgcaaaga

SEQ ID NO: 154329 - DNA, 25 bp, Artificial sequence
  SiRNA target sequence
agttttaatgtaaaagtgcaaagag

SEQ ID NO: 154330 - DNA, 25 bp, Artificial sequence
  SiRNA target sequence
gttttaatgtaaaagtgcaaagaga

SEQ ID NO: 154331 - DNA, 25 bp, Artificial sequence
  SiRNA target sequence
ttttaatgtaaaagtgcaaagagaa

SEQ ID NO: 154332 - DNA, 25 bp, Artificial sequence
  SiRNA target sequence
tttaatgtaaaagtgcaaagagaat

SEQ ID NO: 154333 - DNA, 25 bp, Artificial sequence
  SiRNA target sequence
ttaatgtaaaagtgcaaagagaatg

SEQ ID NO: 154334 - DNA, 25 bp, Artificial sequence
  SiRNA target sequence
taatgtaaaagtgcaaagagaatgt

SEQ ID NO: 154335 - DNA, 25 bp, Artificial sequence
  SiRNA target sequence
aatgtaaaagtgcaaagagaatgtt

SEQ ID NO: 154336 - DNA, 25 bp, Artificial sequence
  SiRNA target sequence
atgtaaaagtgcaaagagaatgttc

SEQ ID NO: 154337 - DNA, 25 bp, Artificial sequence
  SiRNA target sequence
tgtaaaagtgcaaagagaatgttct

SEQ ID NO: 154338 - DNA, 25 bp, Artificial sequence
  SiRNA target sequence
gtaaaagtgcaaagagaatgttctg

SEQ ID NO: 154339 - DNA, 25 bp, Artificial sequence
  SiRNA target sequence
taaaagtgcaaagagaatgttctgc

SEQ ID NO: 154340 - DNA, 25 bp, Artificial sequence
  SiRNA target sequence
aaaagtgcaaagagaatgttctgcg

SEQ ID NO: 154341 - DNA, 25 bp, Artificial sequence
  SiRNA target sequence
aaagtgcaaagagaatgttctgcgt

SEQ ID NO: 154342 - DNA, 25 bp, Artificial sequence
  SiRNA target sequence
aagtgcaaagagaatgttctgcgtg

SEQ ID NO: 154343 - DNA, 25 bp, Artificial sequence
  SiRNA target sequence
agtgcaaagagaatgttctgcgtgt

SEQ ID NO: 154344 - DNA, 25 bp, Artificial sequence
  SiRNA target sequence
gtgcaaagagaatgttctgcgtgta

SEQ ID NO: 154345 - DNA, 25 bp, Artificial sequence
  SiRNA target sequence
tgcaaagagaatgttctgcgtgtaa

SEQ ID NO: 154346 - DNA, 25 bp, Artificial sequence
  SiRNA target sequence
gcaaagagaatgttctgcgtgtaac

SEQ ID NO: 154347 - DNA, 25 bp, Artificial sequence
  SiRNA target sequence
caaagagaatgttctgcgtgtaacg

SEQ ID NO: 154348 - DNA, 25 bp, Artificial sequence
  SiRNA target sequence
aaagagaatgttctgcgtgtaacgg

SEQ ID NO: 154349 - DNA, 25 bp, Artificial sequence
  SiRNA target sequence
aagagaatgttctgcgtgtaacggt

SEQ ID NO: 154350 - DNA, 25 bp, Artificial sequence
  SiRNA target sequence
agagaatgttctgcgtgtaacggta

SEQ ID NO: 154351 - DNA, 25 bp, Artificial sequence
  SiRNA target sequence
gagaatgttctgcgtgtaacggtaa

SEQ ID NO: 154352 - DNA, 25 bp, Artificial sequence
  SiRNA target sequence
agaatgttctgcgtgtaacggtaaa

SEQ ID NO: 154353 - DNA, 25 bp, Artificial sequence
  SiRNA target sequence
gaatgttctgcgtgtaacggtaaag

SEQ ID NO: 154354 - DNA, 25 bp, Artificial sequence
  SiRNA target sequence
aatgttctgcgtgtaacggtaaagg

SEQ ID NO: 154355 - DNA, 25 bp, Artificial sequence
  SiRNA target sequence
atgttctgcgtgtaacggtaaagga

SEQ ID NO: 154356 - DNA, 25 bp, Artificial sequence
  SiRNA target sequence
tgttctgcgtgtaacggtaaaggag

SEQ ID NO: 154357 - DNA, 25 bp, Artificial sequence
  SiRNA target sequence
gttctgcgtgtaacggtaaaggagg

SEQ ID NO: 154358 - DNA, 25 bp, Artificial sequence
  SiRNA target sequence
ttctgcgtgtaacggtaaaggagga

SEQ ID NO: 154359 - DNA, 25 bp, Artificial sequence
  SiRNA target sequence
tctgcgtgtaacggtaaaggaggag

SEQ ID NO: 154360 - DNA, 25 bp, Artificial sequence
  SiRNA target sequence
ctgcgtgtaacggtaaaggaggaga

SEQ ID NO: 154361 - DNA, 25 bp, Artificial sequence
  SiRNA target sequence
tgcgtgtaacggtaaaggaggagac

SEQ ID NO: 154362 - DNA, 25 bp, Artificial sequence
  SiRNA target sequence
gcgtgtaacggtaaaggaggagaca

SEQ ID NO: 154363 - DNA, 25 bp, Artificial sequence
  SiRNA target sequence
cgtgtaacggtaaaggaggagacag

SEQ ID NO: 154364 - DNA, 25 bp, Artificial sequence
  SiRNA target sequence
gtgtaacggtaaaggaggagacagt

SEQ ID NO: 154365 - DNA, 25 bp, Artificial sequence
  SiRNA target sequence
tgtaacggtaaaggaggagacagtg

SEQ ID NO: 154366 - DNA, 25 bp, Artificial sequence
  SiRNA target sequence
gtaacggtaaaggaggagacagtgt

SEQ ID NO: 154367 - DNA, 25 bp, Artificial sequence
  SiRNA target sequence
taacggtaaaggaggagacagtgtt

SEQ ID NO: 154368 - DNA, 25 bp, Artificial sequence
  SiRNA target sequence
aacggtaaaggaggagacagtgttg

SEQ ID NO: 154369 - DNA, 25 bp, Artificial sequence
  SiRNA target sequence
acggtaaaggaggagacagtgttga

SEQ ID NO: 154370 - DNA, 25 bp, Artificial sequence
  SiRNA target sequence
cggtaaaggaggagacagtgttgaa

SEQ ID NO: 154371 - DNA, 25 bp, Artificial sequence
  SiRNA target sequence
ggtaaaggaggagacagtgttgaaa

SEQ ID NO: 154372 - DNA, 25 bp, Artificial sequence
  SiRNA target sequence
gtaaaggaggagacagtgttgaaac

SEQ ID NO: 154373 - DNA, 25 bp, Artificial sequence
  SiRNA target sequence
taaaggaggagacagtgttgaaaca

SEQ ID NO: 154374 - DNA, 25 bp, Artificial sequence
  SiRNA target sequence
aaaggaggagacagtgttgaaacat

SEQ ID NO: 154375 - DNA, 25 bp, Artificial sequence
  SiRNA target sequence
aaggaggagacagtgttgaaacatg

SEQ ID NO: 154376 - DNA, 25 bp, Artificial sequence
  SiRNA target sequence
aggaggagacagtgttgaaacatgt

SEQ ID NO: 154377 - DNA, 25 bp, Artificial sequence
  SiRNA target sequence
ggaggagacagtgttgaaacatgtg

SEQ ID NO: 154378 - DNA, 25 bp, Artificial sequence
  SiRNA target sequence
gaggagacagtgttgaaacatgtga

SEQ ID NO: 154379 - DNA, 25 bp, Artificial sequence
  SiRNA target sequence
aggagacagtgttgaaacatgtgaa

SEQ ID NO: 154380 - DNA, 25 bp, Artificial sequence
  SiRNA target sequence
ggagacagtgttgaaacatgtgaac

SEQ ID NO: 154381 - DNA, 25 bp, Artificial sequence
  SiRNA target sequence
gagacagtgttgaaacatgtgaacc

SEQ ID NO: 154382 - DNA, 25 bp, Artificial sequence
  SiRNA target sequence
agacagtgttgaaacatgtgaacca

SEQ ID NO: 154383 - DNA, 25 bp, Artificial sequence
  SiRNA target sequence
gacagtgttgaaacatgtgaaccat

SEQ ID NO: 154384 - DNA, 25 bp, Artificial sequence
  SiRNA target sequence
acagtgttgaaacatgtgaaccatg

SEQ ID NO: 154385 - DNA, 25 bp, Artificial sequence
  SiRNA target sequence
cagtgttgaaacatgtgaaccatgt

SEQ ID NO: 154386 - DNA, 25 bp, Artificial sequence
  SiRNA target sequence
agtgttgaaacatgtgaaccatgta

SEQ ID NO: 154387 - DNA, 25 bp, Artificial sequence
  SiRNA target sequence
gtgttgaaacatgtgaaccatgtaa

SEQ ID NO: 154388 - DNA, 25 bp, Artificial sequence
  SiRNA target sequence
tgttgaaacatgtgaaccatgtaaa

SEQ ID NO: 154389 - DNA, 25 bp, Artificial sequence
  SiRNA target sequence
gttgaaacatgtgaaccatgtaaag

SEQ ID NO: 154390 - DNA, 25 bp, Artificial sequence
  SiRNA target sequence
ttgaaacatgtgaaccatgtaaagg

SEQ ID NO: 154391 - DNA, 25 bp, Artificial sequence
  SiRNA target sequence
tgaaacatgtgaaccatgtaaaggt

SEQ ID NO: 154392 - DNA, 25 bp, Artificial sequence
  SiRNA target sequence
gaaacatgtgaaccatgtaaaggta

SEQ ID NO: 154393 - DNA, 25 bp, Artificial sequence
  SiRNA target sequence
aaacatgtgaaccatgtaaaggtaa

SEQ ID NO: 154394 - DNA, 25 bp, Artificial sequence
  SiRNA target sequence
aacatgtgaaccatgtaaaggtaaa

SEQ ID NO: 154395 - DNA, 25 bp, Artificial sequence
  SiRNA target sequence
acatgtgaaccatgtaaaggtaaag

SEQ ID NO: 154396 - DNA, 25 bp, Artificial sequence
  SiRNA target sequence
catgtgaaccatgtaaaggtaaagg

SEQ ID NO: 154397 - DNA, 25 bp, Artificial sequence
  SiRNA target sequence
atgtgaaccatgtaaaggtaaaggt

SEQ ID NO: 154398 - DNA, 25 bp, Artificial sequence
  SiRNA target sequence
tgtgaaccatgtaaaggtaaaggta

SEQ ID NO: 154399 - DNA, 25 bp, Artificial sequence
  SiRNA target sequence
gtgaaccatgtaaaggtaaaggtaa

SEQ ID NO: 154400 - DNA, 25 bp, Artificial sequence
  SiRNA target sequence
tgaaccatgtaaaggtaaaggtaag

SEQ ID NO: 154401 - DNA, 25 bp, Artificial sequence
  SiRNA target sequence
gaaccatgtaaaggtaaaggtaagg

SEQ ID NO: 154402 - DNA, 25 bp, Artificial sequence
  SiRNA target sequence
aaccatgtaaaggtaaaggtaaggt

SEQ ID NO: 154403 - DNA, 25 bp, Artificial sequence
  SiRNA target sequence
accatgtaaaggtaaaggtaaggta

SEQ ID NO: 154404 - DNA, 25 bp, Artificial sequence
  SiRNA target sequence
ccatgtaaaggtaaaggtaaggtag

SEQ ID NO: 154405 - DNA, 25 bp, Artificial sequence
  SiRNA target sequence
catgtaaaggtaaaggtaaggtaga

SEQ ID NO: 154406 - DNA, 25 bp, Artificial sequence
  SiRNA target sequence
atgtaaaggtaaaggtaaggtagaa

SEQ ID NO: 154407 - DNA, 25 bp, Artificial sequence
  SiRNA target sequence
tgtaaaggtaaaggtaaggtagaac

SEQ ID NO: 154408 - DNA, 25 bp, Artificial sequence
  SiRNA target sequence
gtaaaggtaaaggtaaggtagaaca

SEQ ID NO: 154409 - DNA, 25 bp, Artificial sequence
  SiRNA target sequence
taaaggtaaaggtaaggtagaacat

SEQ ID NO: 154410 - DNA, 25 bp, Artificial sequence
  SiRNA target sequence
aaaggtaaaggtaaggtagaacatc

SEQ ID NO: 154411 - DNA, 25 bp, Artificial sequence
  SiRNA target sequence
aaggtaaaggtaaggtagaacatca

SEQ ID NO: 154412 - DNA, 25 bp, Artificial sequence
  SiRNA target sequence
aggtaaaggtaaggtagaacatcat

SEQ ID NO: 154413 - DNA, 25 bp, Artificial sequence
  SiRNA target sequence
ggtaaaggtaaggtagaacatcata

SEQ ID NO: 154414 - DNA, 25 bp, Artificial sequence
  SiRNA target sequence
gtaaaggtaaggtagaacatcatag

SEQ ID NO: 154415 - DNA, 25 bp, Artificial sequence
  SiRNA target sequence
taaaggtaaggtagaacatcatagg

SEQ ID NO: 154416 - DNA, 25 bp, Artificial sequence
  SiRNA target sequence
aaaggtaaggtagaacatcatagga

SEQ ID NO: 154417 - DNA, 25 bp, Artificial sequence
  SiRNA target sequence
aaggtaaggtagaacatcataggag

SEQ ID NO: 154418 - DNA, 25 bp, Artificial sequence
  SiRNA target sequence
aggtaaggtagaacatcataggaga

SEQ ID NO: 154419 - DNA, 25 bp, Artificial sequence
  SiRNA target sequence
ggtaaggtagaacatcataggagac

SEQ ID NO: 154420 - DNA, 25 bp, Artificial sequence
  SiRNA target sequence
gtaaggtagaacatcataggagact

SEQ ID NO: 154421 - DNA, 25 bp, Artificial sequence
  SiRNA target sequence
taaggtagaacatcataggagacta

SEQ ID NO: 154422 - DNA, 25 bp, Artificial sequence
  SiRNA target sequence
aaggtagaacatcataggagactag

SEQ ID NO: 154423 - DNA, 25 bp, Artificial sequence
  SiRNA target sequence
aggtagaacatcataggagactagg

SEQ ID NO: 154424 - DNA, 25 bp, Artificial sequence
  SiRNA target sequence
ggtagaacatcataggagactaggt

SEQ ID NO: 154425 - DNA, 25 bp, Artificial sequence
  SiRNA target sequence
gtagaacatcataggagactaggtc

SEQ ID NO: 154426 - DNA, 25 bp, Artificial sequence
  SiRNA target sequence
tagaacatcataggagactaggtcc

SEQ ID NO: 154427 - DNA, 25 bp, Artificial sequence
  SiRNA target sequence
agaacatcataggagactaggtcct

SEQ ID NO: 154428 - DNA, 25 bp, Artificial sequence
  SiRNA target sequence
gaacatcataggagactaggtcctt

SEQ ID NO: 154429 - DNA, 25 bp, Artificial sequence
  SiRNA target sequence
aacatcataggagactaggtccttt

SEQ ID NO: 154430 - DNA, 25 bp, Artificial sequence
  SiRNA target sequence
acatcataggagactaggtccttta

SEQ ID NO: 154431 - DNA, 25 bp, Artificial sequence
  SiRNA target sequence
catcataggagactaggtcctttaa

SEQ ID NO: 154432 - DNA, 25 bp, Artificial sequence
  SiRNA target sequence
atcataggagactaggtcctttaat

SEQ ID NO: 154433 - DNA, 25 bp, Artificial sequence
  SiRNA target sequence
tcataggagactaggtcctttaatt

SEQ ID NO: 154434 - DNA, 25 bp, Artificial sequence
  SiRNA target sequence
cataggagactaggtcctttaattt

SEQ ID NO: 154435 - DNA, 25 bp, Artificial sequence
  SiRNA target sequence
ataggagactaggtcctttaatttc

SEQ ID NO: 154436 - DNA, 25 bp, Artificial sequence
  SiRNA target sequence
taggagactaggtcctttaatttct

SEQ ID NO: 154437 - DNA, 25 bp, Artificial sequence
  SiRNA target sequence
aggagactaggtcctttaatttctg

SEQ ID NO: 154438 - DNA, 25 bp, Artificial sequence
  SiRNA target sequence
ggagactaggtcctttaatttctgt

SEQ ID NO: 154439 - DNA, 25 bp, Artificial sequence
  SiRNA target sequence
gagactaggtcctttaatttctgta

SEQ ID NO: 154440 - DNA, 25 bp, Artificial sequence
  SiRNA target sequence
agactaggtcctttaatttctgtac

SEQ ID NO: 154441 - DNA, 25 bp, Artificial sequence
  SiRNA target sequence
gactaggtcctttaatttctgtaca

SEQ ID NO: 154442 - DNA, 25 bp, Artificial sequence
  SiRNA target sequence
actaggtcctttaatttctgtacaa

SEQ ID NO: 154443 - DNA, 25 bp, Artificial sequence
  SiRNA target sequence
ctaggtcctttaatttctgtacaag

SEQ ID NO: 154444 - DNA, 25 bp, Artificial sequence
  SiRNA target sequence
taggtcctttaatttctgtacaaga

SEQ ID NO: 154445 - DNA, 25 bp, Artificial sequence
  SiRNA target sequence
aggtcctttaatttctgtacaagaa

SEQ ID NO: 154446 - DNA, 25 bp, Artificial sequence
  SiRNA target sequence
ggtcctttaatttctgtacaagaag

SEQ ID NO: 154447 - DNA, 25 bp, Artificial sequence
  SiRNA target sequence
gtcctttaatttctgtacaagaagc

SEQ ID NO: 154448 - DNA, 25 bp, Artificial sequence
  SiRNA target sequence
tcctttaatttctgtacaagaagca

SEQ ID NO: 154449 - DNA, 25 bp, Artificial sequence
  SiRNA target sequence
cctttaatttctgtacaagaagcac

SEQ ID NO: 154450 - DNA, 25 bp, Artificial sequence
  SiRNA target sequence
ctttaatttctgtacaagaagcacc

SEQ ID NO: 154451 - DNA, 25 bp, Artificial sequence
  SiRNA target sequence
tttaatttctgtacaagaagcacct

SEQ ID NO: 154452 - DNA, 25 bp, Artificial sequence
  SiRNA target sequence
ttaatttctgtacaagaagcacctt

SEQ ID NO: 154453 - DNA, 25 bp, Artificial sequence
  SiRNA target sequence
taatttctgtacaagaagcaccttg

SEQ ID NO: 154454 - DNA, 25 bp, Artificial sequence
  SiRNA target sequence
aatttctgtacaagaagcaccttgt

SEQ ID NO: 154455 - DNA, 25 bp, Artificial sequence
  SiRNA target sequence
atttctgtacaagaagcaccttgta

SEQ ID NO: 154456 - DNA, 25 bp, Artificial sequence
  SiRNA target sequence
tttctgtacaagaagcaccttgtaa

SEQ ID NO: 154457 - DNA, 25 bp, Artificial sequence
  SiRNA target sequence
ttctgtacaagaagcaccttgtaat

SEQ ID NO: 154458 - DNA, 25 bp, Artificial sequence
  SiRNA target sequence
tctgtacaagaagcaccttgtaata

SEQ ID NO: 154459 - DNA, 25 bp, Artificial sequence
  SiRNA target sequence
ctgtacaagaagcaccttgtaataa

SEQ ID NO: 154460 - DNA, 25 bp, Artificial sequence
  SiRNA target sequence
tgtacaagaagcaccttgtaataat

SEQ ID NO: 154461 - DNA, 25 bp, Artificial sequence
  SiRNA target sequence
gtacaagaagcaccttgtaataatt

SEQ ID NO: 154462 - DNA, 25 bp, Artificial sequence
  SiRNA target sequence
tacaagaagcaccttgtaataattg

SEQ ID NO: 154463 - DNA, 25 bp, Artificial sequence
  SiRNA target sequence
acaagaagcaccttgtaataattgt

SEQ ID NO: 154464 - DNA, 25 bp, Artificial sequence
  SiRNA target sequence
caagaagcaccttgtaataattgta

SEQ ID NO: 154465 - DNA, 25 bp, Artificial sequence
  SiRNA target sequence
aagaagcaccttgtaataattgtaa

SEQ ID NO: 154466 - DNA, 25 bp, Artificial sequence
  SiRNA target sequence
agaagcaccttgtaataattgtaat

SEQ ID NO: 154467 - DNA, 25 bp, Artificial sequence
  SiRNA target sequence
gaagcaccttgtaataattgtaatt

SEQ ID NO: 154468 - DNA, 25 bp, Artificial sequence
  SiRNA target sequence
aagcaccttgtaataattgtaattc

SEQ ID NO: 154469 - DNA, 25 bp, Artificial sequence
  SiRNA target sequence
agcaccttgtaataattgtaattct

SEQ ID NO: 154470 - DNA, 25 bp, Artificial sequence
  SiRNA target sequence
gcaccttgtaataattgtaattcta

SEQ ID NO: 154471 - DNA, 25 bp, Artificial sequence
  SiRNA target sequence
caccttgtaataattgtaattctac

SEQ ID NO: 154472 - DNA, 25 bp, Artificial sequence
  SiRNA target sequence
accttgtaataattgtaattctact

SEQ ID NO: 154473 - DNA, 25 bp, Artificial sequence
  SiRNA target sequence
ccttgtaataattgtaattctactg

SEQ ID NO: 154474 - DNA, 25 bp, Artificial sequence
  SiRNA target sequence
cttgtaataattgtaattctactgg

SEQ ID NO: 154475 - DNA, 25 bp, Artificial sequence
  SiRNA target sequence
ttgtaataattgtaattctactgga

SEQ ID NO: 154476 - DNA, 25 bp, Artificial sequence
  SiRNA target sequence
tgtaataattgtaattctactggat

SEQ ID NO: 154477 - DNA, 25 bp, Artificial sequence
  SiRNA target sequence
gtaataattgtaattctactggatt

SEQ ID NO: 154478 - DNA, 25 bp, Artificial sequence
  SiRNA target sequence
taataattgtaattctactggattt

SEQ ID NO: 154479 - DNA, 25 bp, Artificial sequence
  SiRNA target sequence
aataattgtaattctactggatttg

SEQ ID NO: 154480 - DNA, 25 bp, Artificial sequence
  SiRNA target sequence
ataattgtaattctactggatttgt

SEQ ID NO: 154481 - DNA, 25 bp, Artificial sequence
  SiRNA target sequence
taattgtaattctactggatttgtt

SEQ ID NO: 154482 - DNA, 25 bp, Artificial sequence
  SiRNA target sequence
aattgtaattctactggatttgttg

SEQ ID NO: 154483 - DNA, 25 bp, Artificial sequence
  SiRNA target sequence
attgtaattctactggatttgttgt

SEQ ID NO: 154484 - DNA, 25 bp, Artificial sequence
  SiRNA target sequence
ttgtaattctactggatttgttgtt

SEQ ID NO: 154485 - DNA, 25 bp, Artificial sequence
  SiRNA target sequence
tgtaattctactggatttgttgtta

SEQ ID NO: 154486 - DNA, 25 bp, Artificial sequence
  SiRNA target sequence
gtaattctactggatttgttgttaa

SEQ ID NO: 154487 - DNA, 25 bp, Artificial sequence
  SiRNA target sequence
taattctactggatttgttgttaaa

SEQ ID NO: 154488 - DNA, 25 bp, Artificial sequence
  SiRNA target sequence
aattctactggatttgttgttaaag

SEQ ID NO: 154489 - DNA, 25 bp, Artificial sequence
  SiRNA target sequence
attctactggatttgttgttaaagg

SEQ ID NO: 154490 - DNA, 25 bp, Artificial sequence
  SiRNA target sequence
ttctactggatttgttgttaaagga

SEQ ID NO: 154491 - DNA, 25 bp, Artificial sequence
  SiRNA target sequence
tctactggatttgttgttaaaggaa

SEQ ID NO: 154492 - DNA, 25 bp, Artificial sequence
  SiRNA target sequence
ctactggatttgttgttaaaggaaa

SEQ ID NO: 154493 - DNA, 25 bp, Artificial sequence
  SiRNA target sequence
tactggatttgttgttaaaggaaag

SEQ ID NO: 154494 - DNA, 25 bp, Artificial sequence
  SiRNA target sequence
actggatttgttgttaaaggaaagc

SEQ ID NO: 154495 - DNA, 25 bp, Artificial sequence
  SiRNA target sequence
ctggatttgttgttaaaggaaagct

SEQ ID NO: 154496 - DNA, 25 bp, Artificial sequence
  SiRNA target sequence
tggatttgttgttaaaggaaagctt

SEQ ID NO: 154497 - DNA, 25 bp, Artificial sequence
  SiRNA target sequence
ggatttgttgttaaaggaaagcttt

SEQ ID NO: 154498 - DNA, 25 bp, Artificial sequence
  SiRNA target sequence
gatttgttgttaaaggaaagctttg

SEQ ID NO: 154499 - DNA, 25 bp, Artificial sequence
  SiRNA target sequence
atttgttgttaaaggaaagctttgt

SEQ ID NO: 154500 - DNA, 25 bp, Artificial sequence
  SiRNA target sequence
tttgttgttaaaggaaagctttgtc

SEQ ID NO: 154501 - DNA, 25 bp, Artificial sequence
  SiRNA target sequence
ttgttgttaaaggaaagctttgtca

SEQ ID NO: 154502 - DNA, 25 bp, Artificial sequence
  SiRNA target sequence
tgttgttaaaggaaagctttgtcaa

SEQ ID NO: 154503 - DNA, 25 bp, Artificial sequence
  SiRNA target sequence
gttgttaaaggaaagctttgtcaaa

SEQ ID NO: 154504 - DNA, 25 bp, Artificial sequence
  SiRNA target sequence
ttgttaaaggaaagctttgtcaaag

SEQ ID NO: 154505 - DNA, 25 bp, Artificial sequence
  SiRNA target sequence
tgttaaaggaaagctttgtcaaagt

SEQ ID NO: 154506 - DNA, 25 bp, Artificial sequence
  SiRNA target sequence
gttaaaggaaagctttgtcaaagtt

SEQ ID NO: 154507 - DNA, 25 bp, Artificial sequence
  SiRNA target sequence
ttaaaggaaagctttgtcaaagttg

SEQ ID NO: 154508 - DNA, 25 bp, Artificial sequence
  SiRNA target sequence
taaaggaaagctttgtcaaagttgt

SEQ ID NO: 154509 - DNA, 25 bp, Artificial sequence
  SiRNA target sequence
aaaggaaagctttgtcaaagttgta

SEQ ID NO: 154510 - DNA, 25 bp, Artificial sequence
  SiRNA target sequence
aaggaaagctttgtcaaagttgtaa

SEQ ID NO: 154511 - DNA, 25 bp, Artificial sequence
  SiRNA target sequence
aggaaagctttgtcaaagttgtaaa

SEQ ID NO: 154512 - DNA, 25 bp, Artificial sequence
  SiRNA target sequence
ggaaagctttgtcaaagttgtaaag

SEQ ID NO: 154513 - DNA, 25 bp, Artificial sequence
  SiRNA target sequence
gaaagctttgtcaaagttgtaaagg

SEQ ID NO: 154514 - DNA, 25 bp, Artificial sequence
  SiRNA target sequence
aaagctttgtcaaagttgtaaaggt

SEQ ID NO: 154515 - DNA, 25 bp, Artificial sequence
  SiRNA target sequence
aagctttgtcaaagttgtaaaggta

SEQ ID NO: 154516 - DNA, 25 bp, Artificial sequence
  SiRNA target sequence
agctttgtcaaagttgtaaaggtaa

SEQ ID NO: 154517 - DNA, 25 bp, Artificial sequence
  SiRNA target sequence
gctttgtcaaagttgtaaaggtaaa

SEQ ID NO: 154518 - DNA, 25 bp, Artificial sequence
  SiRNA target sequence
ctttgtcaaagttgtaaaggtaaac

SEQ ID NO: 154519 - DNA, 25 bp, Artificial sequence
  SiRNA target sequence
tttgtcaaagttgtaaaggtaaaca

SEQ ID NO: 154520 - DNA, 25 bp, Artificial sequence
  SiRNA target sequence
ttgtcaaagttgtaaaggtaaacaa

SEQ ID NO: 154521 - DNA, 25 bp, Artificial sequence
  SiRNA target sequence
tgtcaaagttgtaaaggtaaacaat

SEQ ID NO: 154522 - DNA, 25 bp, Artificial sequence
  SiRNA target sequence
gtcaaagttgtaaaggtaaacaata

SEQ ID NO: 154523 - DNA, 25 bp, Artificial sequence
  SiRNA target sequence
tcaaagttgtaaaggtaaacaatac

SEQ ID NO: 154524 - DNA, 25 bp, Artificial sequence
  SiRNA target sequence
caaagttgtaaaggtaaacaatacg

SEQ ID NO: 154525 - DNA, 25 bp, Artificial sequence
  SiRNA target sequence
aaagttgtaaaggtaaacaatacgt

SEQ ID NO: 154526 - DNA, 25 bp, Artificial sequence
  SiRNA target sequence
aagttgtaaaggtaaacaatacgtt

SEQ ID NO: 154527 - DNA, 25 bp, Artificial sequence
  SiRNA target sequence
agttgtaaaggtaaacaatacgttg

SEQ ID NO: 154528 - DNA, 25 bp, Artificial sequence
  SiRNA target sequence
gttgtaaaggtaaacaatacgttga

SEQ ID NO: 154529 - DNA, 25 bp, Artificial sequence
  SiRNA target sequence
ttgtaaaggtaaacaatacgttgag

SEQ ID NO: 154530 - DNA, 25 bp, Artificial sequence
  SiRNA target sequence
tgtaaaggtaaacaatacgttgaga

SEQ ID NO: 154531 - DNA, 25 bp, Artificial sequence
  SiRNA target sequence
gtaaaggtaaacaatacgttgagac

SEQ ID NO: 154532 - DNA, 25 bp, Artificial sequence
  SiRNA target sequence
taaaggtaaacaatacgttgagact

SEQ ID NO: 154533 - DNA, 25 bp, Artificial sequence
  SiRNA target sequence
aaaggtaaacaatacgttgagacta

SEQ ID NO: 154534 - DNA, 25 bp, Artificial sequence
  SiRNA target sequence
aaggtaaacaatacgttgagactaa

SEQ ID NO: 154535 - DNA, 25 bp, Artificial sequence
  SiRNA target sequence
aggtaaacaatacgttgagactaaa

SEQ ID NO: 154536 - DNA, 25 bp, Artificial sequence
  SiRNA target sequence
ggtaaacaatacgttgagactaaag

SEQ ID NO: 154537 - DNA, 25 bp, Artificial sequence
  SiRNA target sequence
gtaaacaatacgttgagactaaaga

SEQ ID NO: 154538 - DNA, 25 bp, Artificial sequence
  SiRNA target sequence
taaacaatacgttgagactaaagaa

SEQ ID NO: 154539 - DNA, 25 bp, Artificial sequence
  SiRNA target sequence
aaacaatacgttgagactaaagaac

SEQ ID NO: 154540 - DNA, 25 bp, Artificial sequence
  SiRNA target sequence
aacaatacgttgagactaaagaaca

SEQ ID NO: 154541 - DNA, 25 bp, Artificial sequence
  SiRNA target sequence
acaatacgttgagactaaagaacat

SEQ ID NO: 154542 - DNA, 25 bp, Artificial sequence
  SiRNA target sequence
caatacgttgagactaaagaacata

SEQ ID NO: 154543 - DNA, 25 bp, Artificial sequence
  SiRNA target sequence
aatacgttgagactaaagaacatat

SEQ ID NO: 154544 - DNA, 25 bp, Artificial sequence
  SiRNA target sequence
atacgttgagactaaagaacatatt

SEQ ID NO: 154545 - DNA, 25 bp, Artificial sequence
  SiRNA target sequence
tacgttgagactaaagaacatattg

SEQ ID NO: 154546 - DNA, 25 bp, Artificial sequence
  SiRNA target sequence
acgttgagactaaagaacatattga

SEQ ID NO: 154547 - DNA, 25 bp, Artificial sequence
  SiRNA target sequence
cgttgagactaaagaacatattgaa

SEQ ID NO: 154548 - DNA, 25 bp, Artificial sequence
  SiRNA target sequence
gttgagactaaagaacatattgaag

SEQ ID NO: 154549 - DNA, 25 bp, Artificial sequence
  SiRNA target sequence
ttgagactaaagaacatattgaagt

SEQ ID NO: 154550 - DNA, 25 bp, Artificial sequence
  SiRNA target sequence
tgagactaaagaacatattgaagtg

SEQ ID NO: 154551 - DNA, 25 bp, Artificial sequence
  SiRNA target sequence
gagactaaagaacatattgaagtgg

SEQ ID NO: 154552 - DNA, 25 bp, Artificial sequence
  SiRNA target sequence
agactaaagaacatattgaagtgga

SEQ ID NO: 154553 - DNA, 25 bp, Artificial sequence
  SiRNA target sequence
gactaaagaacatattgaagtggaa

SEQ ID NO: 154554 - DNA, 25 bp, Artificial sequence
  SiRNA target sequence
actaaagaacatattgaagtggaag

SEQ ID NO: 154555 - DNA, 25 bp, Artificial sequence
  SiRNA target sequence
ctaaagaacatattgaagtggaagt

SEQ ID NO: 154556 - DNA, 25 bp, Artificial sequence
  SiRNA target sequence
taaagaacatattgaagtggaagta

SEQ ID NO: 154557 - DNA, 25 bp, Artificial sequence
  SiRNA target sequence
aaagaacatattgaagtggaagtag

SEQ ID NO: 154558 - DNA, 25 bp, Artificial sequence
  SiRNA target sequence
aagaacatattgaagtggaagtaga

SEQ ID NO: 154559 - DNA, 25 bp, Artificial sequence
  SiRNA target sequence
agaacatattgaagtggaagtagag

SEQ ID NO: 154560 - DNA, 25 bp, Artificial sequence
  SiRNA target sequence
gaacatattgaagtggaagtagagc

SEQ ID NO: 154561 - DNA, 25 bp, Artificial sequence
  SiRNA target sequence
aacatattgaagtggaagtagagcc

SEQ ID NO: 154562 - DNA, 25 bp, Artificial sequence
  SiRNA target sequence
acatattgaagtggaagtagagcca

SEQ ID NO: 154563 - DNA, 25 bp, Artificial sequence
  SiRNA target sequence
catattgaagtggaagtagagccag

SEQ ID NO: 154564 - DNA, 25 bp, Artificial sequence
  SiRNA target sequence
atattgaagtggaagtagagccagg

SEQ ID NO: 154565 - DNA, 25 bp, Artificial sequence
  SiRNA target sequence
tattgaagtggaagtagagccagga

SEQ ID NO: 154566 - DNA, 25 bp, Artificial sequence
  SiRNA target sequence
attgaagtggaagtagagccaggag

SEQ ID NO: 154567 - DNA, 25 bp, Artificial sequence
  SiRNA target sequence
ttgaagtggaagtagagccaggagt

SEQ ID NO: 154568 - DNA, 25 bp, Artificial sequence
  SiRNA target sequence
tgaagtggaagtagagccaggagta

SEQ ID NO: 154569 - DNA, 25 bp, Artificial sequence
  SiRNA target sequence
gaagtggaagtagagccaggagtac

SEQ ID NO: 154570 - DNA, 25 bp, Artificial sequence
  SiRNA target sequence
aagtggaagtagagccaggagtaca

SEQ ID NO: 154571 - DNA, 25 bp, Artificial sequence
  SiRNA target sequence
agtggaagtagagccaggagtacag

SEQ ID NO: 154572 - DNA, 25 bp, Artificial sequence
  SiRNA target sequence
gtggaagtagagccaggagtacaga

SEQ ID NO: 154573 - DNA, 25 bp, Artificial sequence
  SiRNA target sequence
tggaagtagagccaggagtacagaa

SEQ ID NO: 154574 - DNA, 25 bp, Artificial sequence
  SiRNA target sequence
ggaagtagagccaggagtacagaac

SEQ ID NO: 154575 - DNA, 25 bp, Artificial sequence
  SiRNA target sequence
gaagtagagccaggagtacagaacg

SEQ ID NO: 154576 - DNA, 25 bp, Artificial sequence
  SiRNA target sequence
aagtagagccaggagtacagaacgg

SEQ ID NO: 154577 - DNA, 25 bp, Artificial sequence
  SiRNA target sequence
agtagagccaggagtacagaacggt

SEQ ID NO: 154578 - DNA, 25 bp, Artificial sequence
  SiRNA target sequence
gtagagccaggagtacagaacggta

SEQ ID NO: 154579 - DNA, 25 bp, Artificial sequence
  SiRNA target sequence
tagagccaggagtacagaacggtag

SEQ ID NO: 154580 - DNA, 25 bp, Artificial sequence
  SiRNA target sequence
agagccaggagtacagaacggtaga

SEQ ID NO: 154581 - DNA, 25 bp, Artificial sequence
  SiRNA target sequence
gagccaggagtacagaacggtagaa

SEQ ID NO: 154582 - DNA, 25 bp, Artificial sequence
  SiRNA target sequence
agccaggagtacagaacggtagaaa

SEQ ID NO: 154583 - DNA, 25 bp, Artificial sequence
  SiRNA target sequence
gccaggagtacagaacggtagaaaa

SEQ ID NO: 154584 - DNA, 25 bp, Artificial sequence
  SiRNA target sequence
ccaggagtacagaacggtagaaaat

SEQ ID NO: 154585 - DNA, 25 bp, Artificial sequence
  SiRNA target sequence
caggagtacagaacggtagaaaata

SEQ ID NO: 154586 - DNA, 25 bp, Artificial sequence
  SiRNA target sequence
aggagtacagaacggtagaaaatat

SEQ ID NO: 154587 - DNA, 25 bp, Artificial sequence
  SiRNA target sequence
ggagtacagaacggtagaaaatata

SEQ ID NO: 154588 - DNA, 25 bp, Artificial sequence
  SiRNA target sequence
gagtacagaacggtagaaaatatac

SEQ ID NO: 154589 - DNA, 25 bp, Artificial sequence
  SiRNA target sequence
agtacagaacggtagaaaatataca

SEQ ID NO: 154590 - DNA, 25 bp, Artificial sequence
  SiRNA target sequence
gtacagaacggtagaaaatatacat

SEQ ID NO: 154591 - DNA, 25 bp, Artificial sequence
  SiRNA target sequence
tacagaacggtagaaaatatacatt

SEQ ID NO: 154592 - DNA, 25 bp, Artificial sequence
  SiRNA target sequence
acagaacggtagaaaatatacattt

SEQ ID NO: 154593 - DNA, 25 bp, Artificial sequence
  SiRNA target sequence
cagaacggtagaaaatatacatttt

SEQ ID NO: 154594 - DNA, 25 bp, Artificial sequence
  SiRNA target sequence
agaacggtagaaaatatacattttc

SEQ ID NO: 154595 - DNA, 25 bp, Artificial sequence
  SiRNA target sequence
gaacggtagaaaatatacattttct

SEQ ID NO: 154596 - DNA, 25 bp, Artificial sequence
  SiRNA target sequence
aacggtagaaaatatacattttctg

SEQ ID NO: 154597 - DNA, 25 bp, Artificial sequence
  SiRNA target sequence
acggtagaaaatatacattttctgg

SEQ ID NO: 154598 - DNA, 25 bp, Artificial sequence
  SiRNA target sequence
cggtagaaaatatacattttctggc

SEQ ID NO: 154599 - DNA, 25 bp, Artificial sequence
  SiRNA target sequence
ggtagaaaatatacattttctggca

SEQ ID NO: 154600 - DNA, 25 bp, Artificial sequence
  SiRNA target sequence
gtagaaaatatacattttctggcaa

SEQ ID NO: 154601 - DNA, 25 bp, Artificial sequence
  SiRNA target sequence
tagaaaatatacattttctggcaaa

SEQ ID NO: 154602 - DNA, 25 bp, Artificial sequence
  SiRNA target sequence
agaaaatatacattttctggcaaag

SEQ ID NO: 154603 - DNA, 25 bp, Artificial sequence
  SiRNA target sequence
gaaaatatacattttctggcaaagg

SEQ ID NO: 154604 - DNA, 25 bp, Artificial sequence
  SiRNA target sequence
aaaatatacattttctggcaaagga

SEQ ID NO: 154605 - DNA, 25 bp, Artificial sequence
  SiRNA target sequence
aaatatacattttctggcaaaggaa

SEQ ID NO: 154606 - DNA, 25 bp, Artificial sequence
  SiRNA target sequence
aatatacattttctggcaaaggaaa

SEQ ID NO: 154607 - DNA, 25 bp, Artificial sequence
  SiRNA target sequence
atatacattttctggcaaaggaaat

SEQ ID NO: 154608 - DNA, 25 bp, Artificial sequence
  SiRNA target sequence
tatacattttctggcaaaggaaatc

SEQ ID NO: 154609 - DNA, 25 bp, Artificial sequence
  SiRNA target sequence
atacattttctggcaaaggaaatca

SEQ ID NO: 154610 - DNA, 25 bp, Artificial sequence
  SiRNA target sequence
tacattttctggcaaaggaaatcat

SEQ ID NO: 154611 - DNA, 25 bp, Artificial sequence
  SiRNA target sequence
acattttctggcaaaggaaatcata

SEQ ID NO: 154612 - DNA, 25 bp, Artificial sequence
  SiRNA target sequence
cattttctggcaaaggaaatcataa

SEQ ID NO: 154613 - DNA, 25 bp, Artificial sequence
  SiRNA target sequence
attttctggcaaaggaaatcataaa

SEQ ID NO: 154614 - DNA, 25 bp, Artificial sequence
  SiRNA target sequence
ttttctggcaaaggaaatcataaaa

SEQ ID NO: 154615 - DNA, 25 bp, Artificial sequence
  SiRNA target sequence
tttctggcaaaggaaatcataaaaa

SEQ ID NO: 154616 - DNA, 25 bp, Artificial sequence
  SiRNA target sequence
ttctggcaaaggaaatcataaaaaa

SEQ ID NO: 154617 - DNA, 25 bp, Artificial sequence
  SiRNA target sequence
tctggcaaaggaaatcataaaaaaa

SEQ ID NO: 154618 - DNA, 25 bp, Artificial sequence
  SiRNA target sequence
ctggcaaaggaaatcataaaaaaaa

SEQ ID NO: 154619 - DNA, 25 bp, Artificial sequence
  SiRNA target sequence
tggcaaaggaaatcataaaaaaaat

SEQ ID NO: 154620 - DNA, 25 bp, Artificial sequence
  SiRNA target sequence
ggcaaaggaaatcataaaaaaaatt

SEQ ID NO: 154621 - DNA, 25 bp, Artificial sequence
  SiRNA target sequence
gcaaaggaaatcataaaaaaaattg

SEQ ID NO: 154622 - DNA, 25 bp, Artificial sequence
  SiRNA target sequence
caaaggaaatcataaaaaaaattgt

SEQ ID NO: 154623 - DNA, 25 bp, Artificial sequence
  SiRNA target sequence
aaaggaaatcataaaaaaaattgtg

SEQ ID NO: 154624 - DNA, 25 bp, Artificial sequence
  SiRNA target sequence
aaggaaatcataaaaaaaattgtgt

SEQ ID NO: 154625 - DNA, 25 bp, Artificial sequence
  SiRNA target sequence
aggaaatcataaaaaaaattgtgta

SEQ ID NO: 154626 - DNA, 25 bp, Artificial sequence
  SiRNA target sequence
ggaaatcataaaaaaaattgtgtac

SEQ ID NO: 154627 - DNA, 25 bp, Artificial sequence
  SiRNA target sequence
gaaatcataaaaaaaattgtgtacc

SEQ ID NO: 154628 - DNA, 25 bp, Artificial sequence
  SiRNA target sequence
aaatcataaaaaaaattgtgtaccg

SEQ ID NO: 154629 - DNA, 25 bp, Artificial sequence
  SiRNA target sequence
aatcataaaaaaaattgtgtaccgg

SEQ ID NO: 154630 - DNA, 25 bp, Artificial sequence
  SiRNA target sequence
atcataaaaaaaattgtgtaccggg

SEQ ID NO: 154631 - DNA, 25 bp, Artificial sequence
  SiRNA target sequence
tcataaaaaaaattgtgtaccgggt

SEQ ID NO: 154632 - DNA, 25 bp, Artificial sequence
  SiRNA target sequence
cataaaaaaaattgtgtaccgggtg

SEQ ID NO: 154633 - DNA, 25 bp, Artificial sequence
  SiRNA target sequence
ataaaaaaaattgtgtaccgggtga

SEQ ID NO: 154634 - DNA, 25 bp, Artificial sequence
  SiRNA target sequence
taaaaaaaattgtgtaccgggtgat

SEQ ID NO: 154635 - DNA, 25 bp, Artificial sequence
  SiRNA target sequence
aaaaaaaattgtgtaccgggtgatg

SEQ ID NO: 154636 - DNA, 25 bp, Artificial sequence
  SiRNA target sequence
aaaaaaattgtgtaccgggtgatgt

SEQ ID NO: 154637 - DNA, 25 bp, Artificial sequence
  SiRNA target sequence
aaaaaattgtgtaccgggtgatgtg

SEQ ID NO: 154638 - DNA, 25 bp, Artificial sequence
  SiRNA target sequence
aaaaattgtgtaccgggtgatgtga

SEQ ID NO: 154639 - DNA, 25 bp, Artificial sequence
  SiRNA target sequence
aaaattgtgtaccgggtgatgtgat

SEQ ID NO: 154640 - DNA, 25 bp, Artificial sequence
  SiRNA target sequence
aaattgtgtaccgggtgatgtgatt

SEQ ID NO: 154641 - DNA, 25 bp, Artificial sequence
  SiRNA target sequence
aattgtgtaccgggtgatgtgattc

SEQ ID NO: 154642 - DNA, 25 bp, Artificial sequence
  SiRNA target sequence
attgtgtaccgggtgatgtgattct

SEQ ID NO: 154643 - DNA, 25 bp, Artificial sequence
  SiRNA target sequence
ttgtgtaccgggtgatgtgattctt

SEQ ID NO: 154644 - DNA, 25 bp, Artificial sequence
  SiRNA target sequence
tgtgtaccgggtgatgtgattctta

SEQ ID NO: 154645 - DNA, 25 bp, Artificial sequence
  SiRNA target sequence
gtgtaccgggtgatgtgattcttat

SEQ ID NO: 154646 - DNA, 25 bp, Artificial sequence
  SiRNA target sequence
tgtaccgggtgatgtgattcttatt

SEQ ID NO: 154647 - DNA, 25 bp, Artificial sequence
  SiRNA target sequence
gtaccgggtgatgtgattcttattg

SEQ ID NO: 154648 - DNA, 25 bp, Artificial sequence
  SiRNA target sequence
taccgggtgatgtgattcttattgt

SEQ ID NO: 154649 - DNA, 25 bp, Artificial sequence
  SiRNA target sequence
accgggtgatgtgattcttattgta

SEQ ID NO: 154650 - DNA, 25 bp, Artificial sequence
  SiRNA target sequence
ccgggtgatgtgattcttattgtaa

SEQ ID NO: 154651 - DNA, 25 bp, Artificial sequence
  SiRNA target sequence
cgggtgatgtgattcttattgtaaa

SEQ ID NO: 154652 - DNA, 25 bp, Artificial sequence
  SiRNA target sequence
gggtgatgtgattcttattgtaaac

SEQ ID NO: 154653 - DNA, 25 bp, Artificial sequence
  SiRNA target sequence
ggtgatgtgattcttattgtaaaca

SEQ ID NO: 154654 - DNA, 25 bp, Artificial sequence
  SiRNA target sequence
gtgatgtgattcttattgtaaacat

SEQ ID NO: 154655 - DNA, 25 bp, Artificial sequence
  SiRNA target sequence
tgatgtgattcttattgtaaacatt

SEQ ID NO: 154656 - DNA, 25 bp, Artificial sequence
  SiRNA target sequence
gatgtgattcttattgtaaacatta

SEQ ID NO: 154657 - DNA, 25 bp, Artificial sequence
  SiRNA target sequence
atgtgattcttattgtaaacattac

SEQ ID NO: 154658 - DNA, 25 bp, Artificial sequence
  SiRNA target sequence
tgtgattcttattgtaaacattaca

SEQ ID NO: 154659 - DNA, 25 bp, Artificial sequence
  SiRNA target sequence
gtgattcttattgtaaacattacaa

SEQ ID NO: 154660 - DNA, 25 bp, Artificial sequence
  SiRNA target sequence
tgattcttattgtaaacattacaaa

SEQ ID NO: 154661 - DNA, 25 bp, Artificial sequence
  SiRNA target sequence
gattcttattgtaaacattacaaat

SEQ ID NO: 154662 - DNA, 25 bp, Artificial sequence
  SiRNA target sequence
attcttattgtaaacattacaaatg

SEQ ID NO: 154663 - DNA, 25 bp, Artificial sequence
  SiRNA target sequence
ttcttattgtaaacattacaaatga

SEQ ID NO: 154664 - DNA, 25 bp, Artificial sequence
  SiRNA target sequence
tcttattgtaaacattacaaatgat

SEQ ID NO: 154665 - DNA, 25 bp, Artificial sequence
  SiRNA target sequence
cttattgtaaacattacaaatgatc

SEQ ID NO: 154666 - DNA, 25 bp, Artificial sequence
  SiRNA target sequence
ttattgtaaacattacaaatgatcc

SEQ ID NO: 154667 - DNA, 25 bp, Artificial sequence
  SiRNA target sequence
tattgtaaacattacaaatgatcca

SEQ ID NO: 154668 - DNA, 25 bp, Artificial sequence
  SiRNA target sequence
attgtaaacattacaaatgatccaa

SEQ ID NO: 154669 - DNA, 25 bp, Artificial sequence
  SiRNA target sequence
ttgtaaacattacaaatgatccaag

SEQ ID NO: 154670 - DNA, 25 bp, Artificial sequence
  SiRNA target sequence
tgtaaacattacaaatgatccaaga

SEQ ID NO: 154671 - DNA, 25 bp, Artificial sequence
  SiRNA target sequence
gtaaacattacaaatgatccaagat

SEQ ID NO: 154672 - DNA, 25 bp, Artificial sequence
  SiRNA target sequence
taaacattacaaatgatccaagatt

SEQ ID NO: 154673 - DNA, 25 bp, Artificial sequence
  SiRNA target sequence
aaacattacaaatgatccaagattt

SEQ ID NO: 154674 - DNA, 25 bp, Artificial sequence
  SiRNA target sequence
aacattacaaatgatccaagattta

SEQ ID NO: 154675 - DNA, 25 bp, Artificial sequence
  SiRNA target sequence
acattacaaatgatccaagatttag

SEQ ID NO: 154676 - DNA, 25 bp, Artificial sequence
  SiRNA target sequence
cattacaaatgatccaagatttaga

SEQ ID NO: 154677 - DNA, 25 bp, Artificial sequence
  SiRNA target sequence
attacaaatgatccaagatttagaa

SEQ ID NO: 154678 - DNA, 25 bp, Artificial sequence
  SiRNA target sequence
ttacaaatgatccaagatttagaaa

SEQ ID NO: 154679 - DNA, 25 bp, Artificial sequence
  SiRNA target sequence
tacaaatgatccaagatttagaaaa

SEQ ID NO: 154680 - DNA, 25 bp, Artificial sequence
  SiRNA target sequence
acaaatgatccaagatttagaaaaa

SEQ ID NO: 154681 - DNA, 25 bp, Artificial sequence
  SiRNA target sequence
caaatgatccaagatttagaaaaag

SEQ ID NO: 154682 - DNA, 25 bp, Artificial sequence
  SiRNA target sequence
aaatgatccaagatttagaaaaagt

SEQ ID NO: 154683 - DNA, 25 bp, Artificial sequence
  SiRNA target sequence
aatgatccaagatttagaaaaagtg

SEQ ID NO: 154684 - DNA, 25 bp, Artificial sequence
  SiRNA target sequence
atgatccaagatttagaaaaagtgg

SEQ ID NO: 154685 - DNA, 25 bp, Artificial sequence
  SiRNA target sequence
tgatccaagatttagaaaaagtgga

SEQ ID NO: 154686 - DNA, 25 bp, Artificial sequence
  SiRNA target sequence
gatccaagatttagaaaaagtggat

SEQ ID NO: 154687 - DNA, 25 bp, Artificial sequence
  SiRNA target sequence
atccaagatttagaaaaagtggata

SEQ ID NO: 154688 - DNA, 25 bp, Artificial sequence
  SiRNA target sequence
tccaagatttagaaaaagtggatat

SEQ ID NO: 154689 - DNA, 25 bp, Artificial sequence
  SiRNA target sequence
ccaagatttagaaaaagtggatata

SEQ ID NO: 154690 - DNA, 25 bp, Artificial sequence
  SiRNA target sequence
caagatttagaaaaagtggatataa

SEQ ID NO: 154691 - DNA, 25 bp, Artificial sequence
  SiRNA target sequence
aagatttagaaaaagtggatataat

SEQ ID NO: 154692 - DNA, 25 bp, Artificial sequence
  SiRNA target sequence
agatttagaaaaagtggatataatt

SEQ ID NO: 154693 - DNA, 25 bp, Artificial sequence
  SiRNA target sequence
gatttagaaaaagtggatataattt

SEQ ID NO: 154694 - DNA, 25 bp, Artificial sequence
  SiRNA target sequence
atttagaaaaagtggatataattta

SEQ ID NO: 154695 - DNA, 25 bp, Artificial sequence
  SiRNA target sequence
tttagaaaaagtggatataatttaa

SEQ ID NO: 154696 - DNA, 25 bp, Artificial sequence
  SiRNA target sequence
ttagaaaaagtggatataatttaat

SEQ ID NO: 154697 - DNA, 25 bp, Artificial sequence
  SiRNA target sequence
tagaaaaagtggatataatttaatt

SEQ ID NO: 154698 - DNA, 25 bp, Artificial sequence
  SiRNA target sequence
agaaaaagtggatataatttaatta

SEQ ID NO: 154699 - DNA, 25 bp, Artificial sequence
  SiRNA target sequence
gaaaaagtggatataatttaattag

SEQ ID NO: 154700 - DNA, 25 bp, Artificial sequence
  SiRNA target sequence
aaaaagtggatataatttaattagt

SEQ ID NO: 154701 - DNA, 25 bp, Artificial sequence
  SiRNA target sequence
aaaagtggatataatttaattagta

SEQ ID NO: 154702 - DNA, 25 bp, Artificial sequence
  SiRNA target sequence
aaagtggatataatttaattagtaa

SEQ ID NO: 154703 - DNA, 25 bp, Artificial sequence
  SiRNA target sequence
aagtggatataatttaattagtaag

SEQ ID NO: 154704 - DNA, 25 bp, Artificial sequence
  SiRNA target sequence
agtggatataatttaattagtaagg

SEQ ID NO: 154705 - DNA, 25 bp, Artificial sequence
  SiRNA target sequence
gtggatataatttaattagtaaggt

SEQ ID NO: 154706 - DNA, 25 bp, Artificial sequence
  SiRNA target sequence
tggatataatttaattagtaaggtt

SEQ ID NO: 154707 - DNA, 25 bp, Artificial sequence
  SiRNA target sequence
ggatataatttaattagtaaggttg

SEQ ID NO: 154708 - DNA, 25 bp, Artificial sequence
  SiRNA target sequence
gatataatttaattagtaaggttga

SEQ ID NO: 154709 - DNA, 25 bp, Artificial sequence
  SiRNA target sequence
atataatttaattagtaaggttgat

SEQ ID NO: 154710 - DNA, 25 bp, Artificial sequence
  SiRNA target sequence
tataatttaattagtaaggttgata

SEQ ID NO: 154711 - DNA, 25 bp, Artificial sequence
  SiRNA target sequence
ataatttaattagtaaggttgatat

SEQ ID NO: 154712 - DNA, 25 bp, Artificial sequence
  SiRNA target sequence
taatttaattagtaaggttgatatt

SEQ ID NO: 154713 - DNA, 25 bp, Artificial sequence
  SiRNA target sequence
aatttaattagtaaggttgatattc

SEQ ID NO: 154714 - DNA, 25 bp, Artificial sequence
  SiRNA target sequence
atttaattagtaaggttgatattcc

SEQ ID NO: 154715 - DNA, 25 bp, Artificial sequence
  SiRNA target sequence
tttaattagtaaggttgatattcca

SEQ ID NO: 154716 - DNA, 25 bp, Artificial sequence
  SiRNA target sequence
ttaattagtaaggttgatattccat

SEQ ID NO: 154717 - DNA, 25 bp, Artificial sequence
  SiRNA target sequence
taattagtaaggttgatattccatt

SEQ ID NO: 154718 - DNA, 25 bp, Artificial sequence
  SiRNA target sequence
aattagtaaggttgatattccattg

SEQ ID NO: 154719 - DNA, 25 bp, Artificial sequence
  SiRNA target sequence
attagtaaggttgatattccattgt

SEQ ID NO: 154720 - DNA, 25 bp, Artificial sequence
  SiRNA target sequence
ttagtaaggttgatattccattgta

SEQ ID NO: 154721 - DNA, 25 bp, Artificial sequence
  SiRNA target sequence
tagtaaggttgatattccattgtat

SEQ ID NO: 154722 - DNA, 25 bp, Artificial sequence
  SiRNA target sequence
agtaaggttgatattccattgtatg

SEQ ID NO: 154723 - DNA, 25 bp, Artificial sequence
  SiRNA target sequence
gtaaggttgatattccattgtatgt

SEQ ID NO: 154724 - DNA, 25 bp, Artificial sequence
  SiRNA target sequence
taaggttgatattccattgtatgtt

SEQ ID NO: 154725 - DNA, 25 bp, Artificial sequence
  SiRNA target sequence
aaggttgatattccattgtatgttg

SEQ ID NO: 154726 - DNA, 25 bp, Artificial sequence
  SiRNA target sequence
aggttgatattccattgtatgttgc

SEQ ID NO: 154727 - DNA, 25 bp, Artificial sequence
  SiRNA target sequence
ggttgatattccattgtatgttgct

SEQ ID NO: 154728 - DNA, 25 bp, Artificial sequence
  SiRNA target sequence
gttgatattccattgtatgttgctt

SEQ ID NO: 154729 - DNA, 25 bp, Artificial sequence
  SiRNA target sequence
ttgatattccattgtatgttgcttt

SEQ ID NO: 154730 - DNA, 25 bp, Artificial sequence
  SiRNA target sequence
tgatattccattgtatgttgctttg

SEQ ID NO: 154731 - DNA, 25 bp, Artificial sequence
  SiRNA target sequence
gatattccattgtatgttgctttgg

SEQ ID NO: 154732 - DNA, 25 bp, Artificial sequence
  SiRNA target sequence
atattccattgtatgttgctttggc

SEQ ID NO: 154733 - DNA, 25 bp, Artificial sequence
  SiRNA target sequence
tattccattgtatgttgctttggca

SEQ ID NO: 154734 - DNA, 25 bp, Artificial sequence
  SiRNA target sequence
attccattgtatgttgctttggcag

SEQ ID NO: 154735 - DNA, 25 bp, Artificial sequence
  SiRNA target sequence
ttccattgtatgttgctttggcagg

SEQ ID NO: 154736 - DNA, 25 bp, Artificial sequence
  SiRNA target sequence
tccattgtatgttgctttggcaggc

SEQ ID NO: 154737 - DNA, 25 bp, Artificial sequence
  SiRNA target sequence
ccattgtatgttgctttggcaggcg

SEQ ID NO: 154738 - DNA, 25 bp, Artificial sequence
  SiRNA target sequence
cattgtatgttgctttggcaggcgg

SEQ ID NO: 154739 - DNA, 25 bp, Artificial sequence
  SiRNA target sequence
attgtatgttgctttggcaggcgga

SEQ ID NO: 154740 - DNA, 25 bp, Artificial sequence
  SiRNA target sequence
ttgtatgttgctttggcaggcggac

SEQ ID NO: 154741 - DNA, 25 bp, Artificial sequence
  SiRNA target sequence
tgtatgttgctttggcaggcggaca

SEQ ID NO: 154742 - DNA, 25 bp, Artificial sequence
  SiRNA target sequence
gtatgttgctttggcaggcggacag

SEQ ID NO: 154743 - DNA, 25 bp, Artificial sequence
  SiRNA target sequence
tatgttgctttggcaggcggacaga

SEQ ID NO: 154744 - DNA, 25 bp, Artificial sequence
  SiRNA target sequence
atgttgctttggcaggcggacagat

SEQ ID NO: 154745 - DNA, 25 bp, Artificial sequence
  SiRNA target sequence
tgttgctttggcaggcggacagatt

SEQ ID NO: 154746 - DNA, 25 bp, Artificial sequence
  SiRNA target sequence
gttgctttggcaggcggacagatta

SEQ ID NO: 154747 - DNA, 25 bp, Artificial sequence
  SiRNA target sequence
ttgctttggcaggcggacagattat

SEQ ID NO: 154748 - DNA, 25 bp, Artificial sequence
  SiRNA target sequence
tgctttggcaggcggacagattata

SEQ ID NO: 154749 - DNA, 25 bp, Artificial sequence
  SiRNA target sequence
gctttggcaggcggacagattatat

SEQ ID NO: 154750 - DNA, 25 bp, Artificial sequence
  SiRNA target sequence
ctttggcaggcggacagattatatt

SEQ ID NO: 154751 - DNA, 25 bp, Artificial sequence
  SiRNA target sequence
tttggcaggcggacagattatattt

SEQ ID NO: 154752 - DNA, 25 bp, Artificial sequence
  SiRNA target sequence
ttggcaggcggacagattatatttg

SEQ ID NO: 154753 - DNA, 25 bp, Artificial sequence
  SiRNA target sequence
tggcaggcggacagattatatttga

SEQ ID NO: 154754 - DNA, 25 bp, Artificial sequence
  SiRNA target sequence
ggcaggcggacagattatatttgaa

SEQ ID NO: 154755 - DNA, 25 bp, Artificial sequence
  SiRNA target sequence
gcaggcggacagattatatttgaac

SEQ ID NO: 154756 - DNA, 25 bp, Artificial sequence
  SiRNA target sequence
caggcggacagattatatttgaaca

SEQ ID NO: 154757 - DNA, 25 bp, Artificial sequence
  SiRNA target sequence
aggcggacagattatatttgaacat

SEQ ID NO: 154758 - DNA, 25 bp, Artificial sequence
  SiRNA target sequence
ggcggacagattatatttgaacata

SEQ ID NO: 154759 - DNA, 25 bp, Artificial sequence
  SiRNA target sequence
gcggacagattatatttgaacatat

SEQ ID NO: 154760 - DNA, 25 bp, Artificial sequence
  SiRNA target sequence
cggacagattatatttgaacatatc

SEQ ID NO: 154761 - DNA, 25 bp, Artificial sequence
  SiRNA target sequence
ggacagattatatttgaacatatca

SEQ ID NO: 154762 - DNA, 25 bp, Artificial sequence
  SiRNA target sequence
gacagattatatttgaacatatcac

SEQ ID NO: 154763 - DNA, 25 bp, Artificial sequence
  SiRNA target sequence
acagattatatttgaacatatcact

SEQ ID NO: 154764 - DNA, 25 bp, Artificial sequence
  SiRNA target sequence
cagattatatttgaacatatcactg

SEQ ID NO: 154765 - DNA, 25 bp, Artificial sequence
  SiRNA target sequence
agattatatttgaacatatcactgg

SEQ ID NO: 154766 - DNA, 25 bp, Artificial sequence
  SiRNA target sequence
gattatatttgaacatatcactggt

SEQ ID NO: 154767 - DNA, 25 bp, Artificial sequence
  SiRNA target sequence
attatatttgaacatatcactggta

SEQ ID NO: 154768 - DNA, 25 bp, Artificial sequence
  SiRNA target sequence
ttatatttgaacatatcactggtaa

SEQ ID NO: 154769 - DNA, 25 bp, Artificial sequence
  SiRNA target sequence
tatatttgaacatatcactggtaag

SEQ ID NO: 154770 - DNA, 25 bp, Artificial sequence
  SiRNA target sequence
atatttgaacatatcactggtaaga

SEQ ID NO: 154771 - DNA, 25 bp, Artificial sequence
  SiRNA target sequence
tatttgaacatatcactggtaagaa

SEQ ID NO: 154772 - DNA, 25 bp, Artificial sequence
  SiRNA target sequence
atttgaacatatcactggtaagaaa

SEQ ID NO: 154773 - DNA, 25 bp, Artificial sequence
  SiRNA target sequence
tttgaacatatcactggtaagaaat

SEQ ID NO: 154774 - DNA, 25 bp, Artificial sequence
  SiRNA target sequence
ttgaacatatcactggtaagaaatt

SEQ ID NO: 154775 - DNA, 25 bp, Artificial sequence
  SiRNA target sequence
tgaacatatcactggtaagaaattt

SEQ ID NO: 154776 - DNA, 25 bp, Artificial sequence
  SiRNA target sequence
gaacatatcactggtaagaaatttg

SEQ ID NO: 154777 - DNA, 25 bp, Artificial sequence
  SiRNA target sequence
aacatatcactggtaagaaatttga

SEQ ID NO: 154778 - DNA, 25 bp, Artificial sequence
  SiRNA target sequence
acatatcactggtaagaaatttgaa

SEQ ID NO: 154779 - DNA, 25 bp, Artificial sequence
  SiRNA target sequence
catatcactggtaagaaatttgaaa

SEQ ID NO: 154780 - DNA, 25 bp, Artificial sequence
  SiRNA target sequence
atatcactggtaagaaatttgaaat

SEQ ID NO: 154781 - DNA, 25 bp, Artificial sequence
  SiRNA target sequence
tatcactggtaagaaatttgaaatt

SEQ ID NO: 154782 - DNA, 25 bp, Artificial sequence
  SiRNA target sequence
atcactggtaagaaatttgaaatta

SEQ ID NO: 154783 - DNA, 25 bp, Artificial sequence
  SiRNA target sequence
tcactggtaagaaatttgaaattac

SEQ ID NO: 154784 - DNA, 25 bp, Artificial sequence
  SiRNA target sequence
cactggtaagaaatttgaaattact

SEQ ID NO: 154785 - DNA, 25 bp, Artificial sequence
  SiRNA target sequence
actggtaagaaatttgaaattactt

SEQ ID NO: 154786 - DNA, 25 bp, Artificial sequence
  SiRNA target sequence
ctggtaagaaatttgaaattacttt

SEQ ID NO: 154787 - DNA, 25 bp, Artificial sequence
  SiRNA target sequence
tggtaagaaatttgaaattacttta

SEQ ID NO: 154788 - DNA, 25 bp, Artificial sequence
  SiRNA target sequence
ggtaagaaatttgaaattactttat

SEQ ID NO: 154789 - DNA, 25 bp, Artificial sequence
  SiRNA target sequence
gtaagaaatttgaaattactttata

SEQ ID NO: 154790 - DNA, 25 bp, Artificial sequence
  SiRNA target sequence
taagaaatttgaaattactttatat

SEQ ID NO: 154791 - DNA, 25 bp, Artificial sequence
  SiRNA target sequence
aagaaatttgaaattactttatatc

SEQ ID NO: 154792 - DNA, 25 bp, Artificial sequence
  SiRNA target sequence
agaaatttgaaattactttatatcc

SEQ ID NO: 154793 - DNA, 25 bp, Artificial sequence
  SiRNA target sequence
gaaatttgaaattactttatatcca

SEQ ID NO: 154794 - DNA, 25 bp, Artificial sequence
  SiRNA target sequence
aaatttgaaattactttatatccat

SEQ ID NO: 154795 - DNA, 25 bp, Artificial sequence
  SiRNA target sequence
aatttgaaattactttatatccatt

SEQ ID NO: 154796 - DNA, 25 bp, Artificial sequence
  SiRNA target sequence
atttgaaattactttatatccattt

SEQ ID NO: 154797 - DNA, 25 bp, Artificial sequence
  SiRNA target sequence
tttgaaattactttatatccattta

SEQ ID NO: 154798 - DNA, 25 bp, Artificial sequence
  SiRNA target sequence
ttgaaattactttatatccatttaa

SEQ ID NO: 154799 - DNA, 25 bp, Artificial sequence
  SiRNA target sequence
tgaaattactttatatccatttaaa

SEQ ID NO: 154800 - DNA, 25 bp, Artificial sequence
  SiRNA target sequence
gaaattactttatatccatttaaag

SEQ ID NO: 154801 - DNA, 25 bp, Artificial sequence
  SiRNA target sequence
aaattactttatatccatttaaaga

SEQ ID NO: 154802 - DNA, 25 bp, Artificial sequence
  SiRNA target sequence
aattactttatatccatttaaagat

SEQ ID NO: 154803 - DNA, 25 bp, Artificial sequence
  SiRNA target sequence
attactttatatccatttaaagatt

SEQ ID NO: 154804 - DNA, 25 bp, Artificial sequence
  SiRNA target sequence
ttactttatatccatttaaagattt

SEQ ID NO: 154805 - DNA, 25 bp, Artificial sequence
  SiRNA target sequence
tactttatatccatttaaagattta

SEQ ID NO: 154806 - DNA, 25 bp, Artificial sequence
  SiRNA target sequence
actttatatccatttaaagatttaa

SEQ ID NO: 154807 - DNA, 25 bp, Artificial sequence
  SiRNA target sequence
ctttatatccatttaaagatttaaa

SEQ ID NO: 154808 - DNA, 25 bp, Artificial sequence
  SiRNA target sequence
tttatatccatttaaagatttaaag

SEQ ID NO: 154809 - DNA, 25 bp, Artificial sequence
  SiRNA target sequence
ttatatccatttaaagatttaaaga

SEQ ID NO: 154810 - DNA, 25 bp, Artificial sequence
  SiRNA target sequence
tatatccatttaaagatttaaagaa

SEQ ID NO: 154811 - DNA, 25 bp, Artificial sequence
  SiRNA target sequence
atatccatttaaagatttaaagaaa

SEQ ID NO: 154812 - DNA, 25 bp, Artificial sequence
  SiRNA target sequence
tatccatttaaagatttaaagaaat

SEQ ID NO: 154813 - DNA, 25 bp, Artificial sequence
  SiRNA target sequence
atccatttaaagatttaaagaaatg

SEQ ID NO: 154814 - DNA, 25 bp, Artificial sequence
  SiRNA target sequence
tccatttaaagatttaaagaaatgt

SEQ ID NO: 154815 - DNA, 25 bp, Artificial sequence
  SiRNA target sequence
ccatttaaagatttaaagaaatgta

SEQ ID NO: 154816 - DNA, 25 bp, Artificial sequence
  SiRNA target sequence
catttaaagatttaaagaaatgtat

SEQ ID NO: 154817 - DNA, 25 bp, Artificial sequence
  SiRNA target sequence
atttaaagatttaaagaaatgtatt

SEQ ID NO: 154818 - DNA, 25 bp, Artificial sequence
  SiRNA target sequence
tttaaagatttaaagaaatgtatta

SEQ ID NO: 154819 - DNA, 25 bp, Artificial sequence
  SiRNA target sequence
ttaaagatttaaagaaatgtattat

SEQ ID NO: 154820 - DNA, 25 bp, Artificial sequence
  SiRNA target sequence
taaagatttaaagaaatgtattatt

SEQ ID NO: 154821 - DNA, 25 bp, Artificial sequence
  SiRNA target sequence
aaagatttaaagaaatgtattattt

SEQ ID NO: 154822 - DNA, 25 bp, Artificial sequence
  SiRNA target sequence
aagatttaaagaaatgtattatttt

SEQ ID NO: 154823 - DNA, 25 bp, Artificial sequence
  SiRNA target sequence
agatttaaagaaatgtattatttta

SEQ ID NO: 154824 - DNA, 25 bp, Artificial sequence
  SiRNA target sequence
gatttaaagaaatgtattattttaa

SEQ ID NO: 154825 - DNA, 25 bp, Artificial sequence
  SiRNA target sequence
atttaaagaaatgtattattttaaa

SEQ ID NO: 154826 - DNA, 25 bp, Artificial sequence
  SiRNA target sequence
tttaaagaaatgtattattttaaaa

SEQ ID NO: 154827 - DNA, 25 bp, Artificial sequence
  SiRNA target sequence
ttaaagaaatgtattattttaaaag

SEQ ID NO: 154828 - DNA, 25 bp, Artificial sequence
  SiRNA target sequence
taaagaaatgtattattttaaaagg

SEQ ID NO: 154829 - DNA, 25 bp, Artificial sequence
  SiRNA target sequence
aaagaaatgtattattttaaaaggc

SEQ ID NO: 154830 - DNA, 25 bp, Artificial sequence
  SiRNA target sequence
aagaaatgtattattttaaaaggcg

SEQ ID NO: 154831 - DNA, 25 bp, Artificial sequence
  SiRNA target sequence
agaaatgtattattttaaaaggcga

SEQ ID NO: 154832 - DNA, 25 bp, Artificial sequence
  SiRNA target sequence
gaaatgtattattttaaaaggcgaa

SEQ ID NO: 154833 - DNA, 25 bp, Artificial sequence
  SiRNA target sequence
aaatgtattattttaaaaggcgaag

SEQ ID NO: 154834 - DNA, 25 bp, Artificial sequence
  SiRNA target sequence
aatgtattattttaaaaggcgaagg

SEQ ID NO: 154835 - DNA, 25 bp, Artificial sequence
  SiRNA target sequence
atgtattattttaaaaggcgaaggt

SEQ ID NO: 154836 - DNA, 25 bp, Artificial sequence
  SiRNA target sequence
tgtattattttaaaaggcgaaggtt

SEQ ID NO: 154837 - DNA, 25 bp, Artificial sequence
  SiRNA target sequence
gtattattttaaaaggcgaaggttt

SEQ ID NO: 154838 - DNA, 25 bp, Artificial sequence
  SiRNA target sequence
tattattttaaaaggcgaaggtttt

SEQ ID NO: 154839 - DNA, 25 bp, Artificial sequence
  SiRNA target sequence
attattttaaaaggcgaaggtttta

SEQ ID NO: 154840 - DNA, 25 bp, Artificial sequence
  SiRNA target sequence
ttattttaaaaggcgaaggttttaa

SEQ ID NO: 154841 - DNA, 25 bp, Artificial sequence
  SiRNA target sequence
tattttaaaaggcgaaggttttaaa

SEQ ID NO: 154842 - DNA, 25 bp, Artificial sequence
  SiRNA target sequence
attttaaaaggcgaaggttttaaaa

SEQ ID NO: 154843 - DNA, 25 bp, Artificial sequence
  SiRNA target sequence
ttttaaaaggcgaaggttttaaaat

SEQ ID NO: 154844 - DNA, 25 bp, Artificial sequence
  SiRNA target sequence
tttaaaaggcgaaggttttaaaata

SEQ ID NO: 154845 - DNA, 25 bp, Artificial sequence
  SiRNA target sequence
ttaaaaggcgaaggttttaaaataa

SEQ ID NO: 154846 - DNA, 25 bp, Artificial sequence
  SiRNA target sequence
taaaaggcgaaggttttaaaataaa

SEQ ID NO: 154847 - DNA, 25 bp, Artificial sequence
  SiRNA target sequence
aaaaggcgaaggttttaaaataaaa

SEQ ID NO: 154848 - DNA, 25 bp, Artificial sequence
  SiRNA target sequence
aaaggcgaaggttttaaaataaaaa

SEQ ID NO: 154849 - DNA, 25 bp, Artificial sequence
  SiRNA target sequence
aaggcgaaggttttaaaataaaaaa

SEQ ID NO: 154850 - DNA, 25 bp, Artificial sequence
  SiRNA target sequence
aggcgaaggttttaaaataaaaaat

SEQ ID NO: 154851 - DNA, 25 bp, Artificial sequence
  SiRNA target sequence
ggcgaaggttttaaaataaaaaata

SEQ ID NO: 154852 - DNA, 25 bp, Artificial sequence
  SiRNA target sequence
gcgaaggttttaaaataaaaaatag

SEQ ID NO: 154853 - DNA, 25 bp, Artificial sequence
  SiRNA target sequence
cgaaggttttaaaataaaaaatagt

SEQ ID NO: 154854 - DNA, 25 bp, Artificial sequence
  SiRNA target sequence
gaaggttttaaaataaaaaatagtt

SEQ ID NO: 154855 - DNA, 25 bp, Artificial sequence
  SiRNA target sequence
aaggttttaaaataaaaaatagtta

SEQ ID NO: 154856 - DNA, 25 bp, Artificial sequence
  SiRNA target sequence
aggttttaaaataaaaaatagttat

SEQ ID NO: 154857 - DNA, 25 bp, Artificial sequence
  SiRNA target sequence
ggttttaaaataaaaaatagttatt

SEQ ID NO: 154858 - DNA, 25 bp, Artificial sequence
  SiRNA target sequence
gttttaaaataaaaaatagttattc

SEQ ID NO: 154859 - DNA, 25 bp, Artificial sequence
  SiRNA target sequence
ttttaaaataaaaaatagttattcg

SEQ ID NO: 154860 - DNA, 25 bp, Artificial sequence
  SiRNA target sequence
tttaaaataaaaaatagttattcgg

SEQ ID NO: 154861 - DNA, 25 bp, Artificial sequence
  SiRNA target sequence
ttaaaataaaaaatagttattcggg

SEQ ID NO: 154862 - DNA, 25 bp, Artificial sequence
  SiRNA target sequence
taaaataaaaaatagttattcgggt

SEQ ID NO: 154863 - DNA, 25 bp, Artificial sequence
  SiRNA target sequence
aaaataaaaaatagttattcgggtg

SEQ ID NO: 154864 - DNA, 25 bp, Artificial sequence
  SiRNA target sequence
aaataaaaaatagttattcgggtgg

SEQ ID NO: 154865 - DNA, 25 bp, Artificial sequence
  SiRNA target sequence
aataaaaaatagttattcgggtggt

SEQ ID NO: 154866 - DNA, 25 bp, Artificial sequence
  SiRNA target sequence
ataaaaaatagttattcgggtggtg

SEQ ID NO: 154867 - DNA, 25 bp, Artificial sequence
  SiRNA target sequence
taaaaaatagttattcgggtggtga

SEQ ID NO: 154868 - DNA, 25 bp, Artificial sequence
  SiRNA target sequence
aaaaaatagttattcgggtggtgat

SEQ ID NO: 154869 - DNA, 25 bp, Artificial sequence
  SiRNA target sequence
aaaaatagttattcgggtggtgatc

SEQ ID NO: 154870 - DNA, 25 bp, Artificial sequence
  SiRNA target sequence
aaaatagttattcgggtggtgatct

SEQ ID NO: 154871 - DNA, 25 bp, Artificial sequence
  SiRNA target sequence
aaatagttattcgggtggtgatctt

SEQ ID NO: 154872 - DNA, 25 bp, Artificial sequence
  SiRNA target sequence
aatagttattcgggtggtgatctta

SEQ ID NO: 154873 - DNA, 25 bp, Artificial sequence
  SiRNA target sequence
atagttattcgggtggtgatcttat

SEQ ID NO: 154874 - DNA, 25 bp, Artificial sequence
  SiRNA target sequence
tagttattcgggtggtgatcttatt

SEQ ID NO: 154875 - DNA, 25 bp, Artificial sequence
  SiRNA target sequence
agttattcgggtggtgatcttattc

SEQ ID NO: 154876 - DNA, 25 bp, Artificial sequence
  SiRNA target sequence
gttattcgggtggtgatcttattct

SEQ ID NO: 154877 - DNA, 25 bp, Artificial sequence
  SiRNA target sequence
ttattcgggtggtgatcttattctc

SEQ ID NO: 154878 - DNA, 25 bp, Artificial sequence
  SiRNA target sequence
tattcgggtggtgatcttattctcg

SEQ ID NO: 154879 - DNA, 25 bp, Artificial sequence
  SiRNA target sequence
attcgggtggtgatcttattctcga

SEQ ID NO: 154880 - DNA, 25 bp, Artificial sequence
  SiRNA target sequence
ttcgggtggtgatcttattctcgaa

SEQ ID NO: 154881 - DNA, 25 bp, Artificial sequence
  SiRNA target sequence
tcgggtggtgatcttattctcgaac

SEQ ID NO: 154882 - DNA, 25 bp, Artificial sequence
  SiRNA target sequence
cgggtggtgatcttattctcgaacc

SEQ ID NO: 154883 - DNA, 25 bp, Artificial sequence
  SiRNA target sequence
gggtggtgatcttattctcgaacct

SEQ ID NO: 154884 - DNA, 25 bp, Artificial sequence
  SiRNA target sequence
ggtggtgatcttattctcgaaccta

SEQ ID NO: 154885 - DNA, 25 bp, Artificial sequence
  SiRNA target sequence
gtggtgatcttattctcgaacctaa

SEQ ID NO: 154886 - DNA, 25 bp, Artificial sequence
  SiRNA target sequence
tggtgatcttattctcgaacctaat

SEQ ID NO: 154887 - DNA, 25 bp, Artificial sequence
  SiRNA target sequence
ggtgatcttattctcgaacctaata

SEQ ID NO: 154888 - DNA, 25 bp, Artificial sequence
  SiRNA target sequence
gtgatcttattctcgaacctaatat

SEQ ID NO: 154889 - DNA, 25 bp, Artificial sequence
  SiRNA target sequence
tgatcttattctcgaacctaatata

SEQ ID NO: 154890 - DNA, 25 bp, Artificial sequence
  SiRNA target sequence
gatcttattctcgaacctaatataa

SEQ ID NO: 154891 - DNA, 25 bp, Artificial sequence
  SiRNA target sequence
atcttattctcgaacctaatataat

SEQ ID NO: 154892 - DNA, 25 bp, Artificial sequence
  SiRNA target sequence
tcttattctcgaacctaatataatt

SEQ ID NO: 154893 - DNA, 25 bp, Artificial sequence
  SiRNA target sequence
cttattctcgaacctaatataatta

SEQ ID NO: 154894 - DNA, 25 bp, Artificial sequence
  SiRNA target sequence
ttattctcgaacctaatataattat

SEQ ID NO: 154895 - DNA, 25 bp, Artificial sequence
  SiRNA target sequence
tattctcgaacctaatataattata

SEQ ID NO: 154896 - DNA, 25 bp, Artificial sequence
  SiRNA target sequence
attctcgaacctaatataattatag

SEQ ID NO: 154897 - DNA, 25 bp, Artificial sequence
  SiRNA target sequence
ttctcgaacctaatataattataga

SEQ ID NO: 154898 - DNA, 25 bp, Artificial sequence
  SiRNA target sequence
tctcgaacctaatataattatagat

SEQ ID NO: 154899 - DNA, 25 bp, Artificial sequence
  SiRNA target sequence
ctcgaacctaatataattatagata

SEQ ID NO: 154900 - DNA, 25 bp, Artificial sequence
  SiRNA target sequence
tcgaacctaatataattatagataa

SEQ ID NO: 154901 - DNA, 25 bp, Artificial sequence
  SiRNA target sequence
cgaacctaatataattatagataag

SEQ ID NO: 154902 - DNA, 25 bp, Artificial sequence
  SiRNA target sequence
gaacctaatataattatagataaga

SEQ ID NO: 154903 - DNA, 25 bp, Artificial sequence
  SiRNA target sequence
aacctaatataattatagataagaa

SEQ ID NO: 154904 - DNA, 25 bp, Artificial sequence
  SiRNA target sequence
acctaatataattatagataagaat

SEQ ID NO: 154905 - DNA, 25 bp, Artificial sequence
  SiRNA target sequence
cctaatataattatagataagaata

SEQ ID NO: 154906 - DNA, 25 bp, Artificial sequence
  SiRNA target sequence
ctaatataattatagataagaatat

SEQ ID NO: 154907 - DNA, 25 bp, Artificial sequence
  SiRNA target sequence
taatataattatagataagaatatt

SEQ ID NO: 154908 - DNA, 25 bp, Artificial sequence
  SiRNA target sequence
aatataattatagataagaatattg

SEQ ID NO: 154909 - DNA, 25 bp, Artificial sequence
  SiRNA target sequence
atataattatagataagaatattga

SEQ ID NO: 154910 - DNA, 25 bp, Artificial sequence
  SiRNA target sequence
tataattatagataagaatattgat

SEQ ID NO: 154911 - DNA, 25 bp, Artificial sequence
  SiRNA target sequence
ataattatagataagaatattgata

SEQ ID NO: 154912 - DNA, 25 bp, Artificial sequence
  SiRNA target sequence
taattatagataagaatattgataa

SEQ ID NO: 154913 - DNA, 25 bp, Artificial sequence
  SiRNA target sequence
aattatagataagaatattgataaa

SEQ ID NO: 154914 - DNA, 25 bp, Artificial sequence
  SiRNA target sequence
attatagataagaatattgataaag

SEQ ID NO: 154915 - DNA, 25 bp, Artificial sequence
  SiRNA target sequence
ttatagataagaatattgataaaga

SEQ ID NO: 154916 - DNA, 25 bp, Artificial sequence
  SiRNA target sequence
tatagataagaatattgataaagat

SEQ ID NO: 154917 - DNA, 25 bp, Artificial sequence
  SiRNA target sequence
atagataagaatattgataaagatt

SEQ ID NO: 154918 - DNA, 25 bp, Artificial sequence
  SiRNA target sequence
tagataagaatattgataaagattt

SEQ ID NO: 154919 - DNA, 25 bp, Artificial sequence
  SiRNA target sequence
agataagaatattgataaagattta

SEQ ID NO: 154920 - DNA, 25 bp, Artificial sequence
  SiRNA target sequence
gataagaatattgataaagatttat

SEQ ID NO: 154921 - DNA, 25 bp, Artificial sequence
  SiRNA target sequence
ataagaatattgataaagatttatt

SEQ ID NO: 154922 - DNA, 25 bp, Artificial sequence
  SiRNA target sequence
taagaatattgataaagatttatta

SEQ ID NO: 154923 - DNA, 25 bp, Artificial sequence
  SiRNA target sequence
aagaatattgataaagatttattag

SEQ ID NO: 154924 - DNA, 25 bp, Artificial sequence
  SiRNA target sequence
agaatattgataaagatttattagc

SEQ ID NO: 154925 - DNA, 25 bp, Artificial sequence
  SiRNA target sequence
gaatattgataaagatttattagca

SEQ ID NO: 154926 - DNA, 25 bp, Artificial sequence
  SiRNA target sequence
aatattgataaagatttattagcac

SEQ ID NO: 154927 - DNA, 25 bp, Artificial sequence
  SiRNA target sequence
atattgataaagatttattagcacg

SEQ ID NO: 154928 - DNA, 25 bp, Artificial sequence
  SiRNA target sequence
tattgataaagatttattagcacgc

SEQ ID NO: 154929 - DNA, 25 bp, Artificial sequence
  SiRNA target sequence
attgataaagatttattagcacgcg

SEQ ID NO: 154930 - DNA, 25 bp, Artificial sequence
  SiRNA target sequence
ttgataaagatttattagcacgcgc

SEQ ID NO: 154931 - DNA, 25 bp, Artificial sequence
  SiRNA target sequence
tgataaagatttattagcacgcgcc

SEQ ID NO: 154932 - DNA, 25 bp, Artificial sequence
  SiRNA target sequence
gataaagatttattagcacgcgcct

SEQ ID NO: 154933 - DNA, 25 bp, Artificial sequence
  SiRNA target sequence
ataaagatttattagcacgcgcctt

SEQ ID NO: 154934 - DNA, 25 bp, Artificial sequence
  SiRNA target sequence
taaagatttattagcacgcgccttg

SEQ ID NO: 154935 - DNA, 25 bp, Artificial sequence
  SiRNA target sequence
aaagatttattagcacgcgccttga

SEQ ID NO: 154936 - DNA, 25 bp, Artificial sequence
  SiRNA target sequence
aagatttattagcacgcgccttgaa

SEQ ID NO: 154937 - DNA, 25 bp, Artificial sequence
  SiRNA target sequence
agatttattagcacgcgccttgaat

SEQ ID NO: 154938 - DNA, 25 bp, Artificial sequence
  SiRNA target sequence
gatttattagcacgcgccttgaatt

SEQ ID NO: 154939 - DNA, 25 bp, Artificial sequence
  SiRNA target sequence
atttattagcacgcgccttgaatta

SEQ ID NO: 154940 - DNA, 25 bp, Artificial sequence
  SiRNA target sequence
tttattagcacgcgccttgaattat

SEQ ID NO: 154941 - DNA, 25 bp, Artificial sequence
  SiRNA target sequence
ttattagcacgcgccttgaattatg

SEQ ID NO: 154942 - DNA, 25 bp, Artificial sequence
  SiRNA target sequence
tattagcacgcgccttgaattatgt

SEQ ID NO: 154943 - DNA, 25 bp, Artificial sequence
  SiRNA target sequence
attagcacgcgccttgaattatgtt

SEQ ID NO: 154944 - DNA, 25 bp, Artificial sequence
  SiRNA target sequence
ttagcacgcgccttgaattatgttc

SEQ ID NO: 154945 - DNA, 25 bp, Artificial sequence
  SiRNA target sequence
tagcacgcgccttgaattatgttcc

SEQ ID NO: 154946 - DNA, 25 bp, Artificial sequence
  SiRNA target sequence
agcacgcgccttgaattatgttcct

SEQ ID NO: 154947 - DNA, 25 bp, Artificial sequence
  SiRNA target sequence
gcacgcgccttgaattatgttcctg

SEQ ID NO: 154948 - DNA, 25 bp, Artificial sequence
  SiRNA target sequence
cacgcgccttgaattatgttcctgt

SEQ ID NO: 154949 - DNA, 25 bp, Artificial sequence
  SiRNA target sequence
acgcgccttgaattatgttcctgta

SEQ ID NO: 154950 - DNA, 25 bp, Artificial sequence
  SiRNA target sequence
cgcgccttgaattatgttcctgtaa

SEQ ID NO: 154951 - DNA, 25 bp, Artificial sequence
  SiRNA target sequence
gcgccttgaattatgttcctgtaag

SEQ ID NO: 154952 - DNA, 25 bp, Artificial sequence
  SiRNA target sequence
cgccttgaattatgttcctgtaaga

SEQ ID NO: 154953 - DNA, 25 bp, Artificial sequence
  SiRNA target sequence
gccttgaattatgttcctgtaagaa

SEQ ID NO: 154954 - DNA, 25 bp, Artificial sequence
  SiRNA target sequence
ccttgaattatgttcctgtaagaaa

SEQ ID NO: 154955 - DNA, 25 bp, Artificial sequence
  SiRNA target sequence
cttgaattatgttcctgtaagaaaa

SEQ ID NO: 154956 - DNA, 25 bp, Artificial sequence
  SiRNA target sequence
ttgaattatgttcctgtaagaaaag

SEQ ID NO: 154957 - DNA, 25 bp, Artificial sequence
  SiRNA target sequence
tgaattatgttcctgtaagaaaaga

SEQ ID NO: 154958 - DNA, 25 bp, Artificial sequence
  SiRNA target sequence
gaattatgttcctgtaagaaaagat

SEQ ID NO: 154959 - DNA, 25 bp, Artificial sequence
  SiRNA target sequence
aattatgttcctgtaagaaaagatt

SEQ ID NO: 154960 - DNA, 25 bp, Artificial sequence
  SiRNA target sequence
attatgttcctgtaagaaaagattt

SEQ ID NO: 154961 - DNA, 25 bp, Artificial sequence
  SiRNA target sequence
ttatgttcctgtaagaaaagatttt

SEQ ID NO: 154962 - DNA, 25 bp, Artificial sequence
  SiRNA target sequence
tatgttcctgtaagaaaagatttta

SEQ ID NO: 154963 - DNA, 25 bp, Artificial sequence
  SiRNA target sequence
atgttcctgtaagaaaagattttac

SEQ ID NO: 154964 - DNA, 25 bp, Artificial sequence
  SiRNA target sequence
tgttcctgtaagaaaagattttaca

SEQ ID NO: 154965 - DNA, 25 bp, Artificial sequence
  SiRNA target sequence
gttcctgtaagaaaagattttacag

SEQ ID NO: 154966 - DNA, 25 bp, Artificial sequence
  SiRNA target sequence
ttcctgtaagaaaagattttacagg

SEQ ID NO: 154967 - DNA, 25 bp, Artificial sequence
  SiRNA target sequence
tcctgtaagaaaagattttacagga

SEQ ID NO: 154968 - DNA, 25 bp, Artificial sequence
  SiRNA target sequence
cctgtaagaaaagattttacaggaa

SEQ ID NO: 154969 - DNA, 25 bp, Artificial sequence
  SiRNA target sequence
ctgtaagaaaagattttacaggaac

SEQ ID NO: 154970 - DNA, 25 bp, Artificial sequence
  SiRNA target sequence
tgtaagaaaagattttacaggaact

SEQ ID NO: 154971 - DNA, 25 bp, Artificial sequence
  SiRNA target sequence
gtaagaaaagattttacaggaactg

SEQ ID NO: 154972 - DNA, 25 bp, Artificial sequence
  SiRNA target sequence
taagaaaagattttacaggaactgc

SEQ ID NO: 154973 - DNA, 25 bp, Artificial sequence
  SiRNA target sequence
aagaaaagattttacaggaactgct

SEQ ID NO: 154974 - DNA, 25 bp, Artificial sequence
  SiRNA target sequence
agaaaagattttacaggaactgctg

SEQ ID NO: 154975 - DNA, 25 bp, Artificial sequence
  SiRNA target sequence
gaaaagattttacaggaactgctgt

SEQ ID NO: 154976 - DNA, 25 bp, Artificial sequence
  SiRNA target sequence
aaaagattttacaggaactgctgtt

SEQ ID NO: 154977 - DNA, 25 bp, Artificial sequence
  SiRNA target sequence
aaagattttacaggaactgctgttc

SEQ ID NO: 154978 - DNA, 25 bp, Artificial sequence
  SiRNA target sequence
aagattttacaggaactgctgttcc

SEQ ID NO: 154979 - DNA, 25 bp, Artificial sequence
  SiRNA target sequence
agattttacaggaactgctgttcca

SEQ ID NO: 154980 - DNA, 25 bp, Artificial sequence
  SiRNA target sequence
gattttacaggaactgctgttccaa

SEQ ID NO: 154981 - DNA, 25 bp, Artificial sequence
  SiRNA target sequence
attttacaggaactgctgttccaaa

SEQ ID NO: 154982 - DNA, 25 bp, Artificial sequence
  SiRNA target sequence
ttttacaggaactgctgttccaaaa

SEQ ID NO: 154983 - DNA, 25 bp, Artificial sequence
  SiRNA target sequence
tttacaggaactgctgttccaaaat

SEQ ID NO: 154984 - DNA, 25 bp, Artificial sequence
  SiRNA target sequence
ttacaggaactgctgttccaaaata

SEQ ID NO: 154985 - DNA, 25 bp, Artificial sequence
  SiRNA target sequence
tacaggaactgctgttccaaaatat

SEQ ID NO: 154986 - DNA, 25 bp, Artificial sequence
  SiRNA target sequence
acaggaactgctgttccaaaatatg

SEQ ID NO: 154987 - DNA, 25 bp, Artificial sequence
  SiRNA target sequence
caggaactgctgttccaaaatatgc

SEQ ID NO: 154988 - DNA, 25 bp, Artificial sequence
  SiRNA target sequence
aggaactgctgttccaaaatatgca

SEQ ID NO: 154989 - DNA, 25 bp, Artificial sequence
  SiRNA target sequence
ggaactgctgttccaaaatatgcag

SEQ ID NO: 154990 - DNA, 25 bp, Artificial sequence
  SiRNA target sequence
gaactgctgttccaaaatatgcaga

SEQ ID NO: 154991 - DNA, 25 bp, Artificial sequence
  SiRNA target sequence
aactgctgttccaaaatatgcagaa

SEQ ID NO: 154992 - DNA, 25 bp, Artificial sequence
  SiRNA target sequence
actgctgttccaaaatatgcagaat

SEQ ID NO: 154993 - DNA, 25 bp, Artificial sequence
  SiRNA target sequence
ctgctgttccaaaatatgcagaatt

SEQ ID NO: 154994 - DNA, 25 bp, Artificial sequence
  SiRNA target sequence
tgctgttccaaaatatgcagaattt

SEQ ID NO: 154995 - DNA, 25 bp, Artificial sequence
  SiRNA target sequence
gctgttccaaaatatgcagaatttg

SEQ ID NO: 154996 - DNA, 25 bp, Artificial sequence
  SiRNA target sequence
ctgttccaaaatatgcagaatttgg

SEQ ID NO: 154997 - DNA, 25 bp, Artificial sequence
  SiRNA target sequence
tgttccaaaatatgcagaatttggt

SEQ ID NO: 154998 - DNA, 25 bp, Artificial sequence
  SiRNA target sequence
gttccaaaatatgcagaatttggtg

SEQ ID NO: 154999 - DNA, 25 bp, Artificial sequence
  SiRNA target sequence
ttccaaaatatgcagaatttggtgt

SEQ ID NO: 155000 - DNA, 25 bp, Artificial sequence
  SiRNA target sequence
tccaaaatatgcagaatttggtgtt

SEQ ID NO: 155001 - DNA, 25 bp, Artificial sequence
  SiRNA target sequence
ccaaaatatgcagaatttggtgtta

SEQ ID NO: 155002 - DNA, 25 bp, Artificial sequence
  SiRNA target sequence
caaaatatgcagaatttggtgttat

SEQ ID NO: 155003 - DNA, 25 bp, Artificial sequence
  SiRNA target sequence
aaaatatgcagaatttggtgttatg

SEQ ID NO: 155004 - DNA, 25 bp, Artificial sequence
  SiRNA target sequence
aaatatgcagaatttggtgttatgc

SEQ ID NO: 155005 - DNA, 25 bp, Artificial sequence
  SiRNA target sequence
aatatgcagaatttggtgttatgcc

SEQ ID NO: 155006 - DNA, 25 bp, Artificial sequence
  SiRNA target sequence
atatgcagaatttggtgttatgcct

SEQ ID NO: 155007 - DNA, 25 bp, Artificial sequence
  SiRNA target sequence
tatgcagaatttggtgttatgccta

SEQ ID NO: 155008 - DNA, 25 bp, Artificial sequence
  SiRNA target sequence
atgcagaatttggtgttatgcctaa

SEQ ID NO: 155009 - DNA, 25 bp, Artificial sequence
  SiRNA target sequence
tgcagaatttggtgttatgcctaaa

SEQ ID NO: 155010 - DNA, 25 bp, Artificial sequence
  SiRNA target sequence
gcagaatttggtgttatgcctaaag

SEQ ID NO: 155011 - DNA, 25 bp, Artificial sequence
  SiRNA target sequence
cagaatttggtgttatgcctaaaga

SEQ ID NO: 155012 - DNA, 25 bp, Artificial sequence
  SiRNA target sequence
agaatttggtgttatgcctaaagaa

SEQ ID NO: 155013 - DNA, 25 bp, Artificial sequence
  SiRNA target sequence
gaatttggtgttatgcctaaagaac

SEQ ID NO: 155014 - DNA, 25 bp, Artificial sequence
  SiRNA target sequence
aatttggtgttatgcctaaagaaca

SEQ ID NO: 155015 - DNA, 25 bp, Artificial sequence
  SiRNA target sequence
atttggtgttatgcctaaagaacag

SEQ ID NO: 155016 - DNA, 25 bp, Artificial sequence
  SiRNA target sequence
tttggtgttatgcctaaagaacagg

SEQ ID NO: 155017 - DNA, 25 bp, Artificial sequence
  SiRNA target sequence
ttggtgttatgcctaaagaacagga

SEQ ID NO: 155018 - DNA, 25 bp, Artificial sequence
  SiRNA target sequence
tggtgttatgcctaaagaacaggaa

SEQ ID NO: 155019 - DNA, 25 bp, Artificial sequence
  SiRNA target sequence
ggtgttatgcctaaagaacaggaag

SEQ ID NO: 155020 - DNA, 25 bp, Artificial sequence
  SiRNA target sequence
gtgttatgcctaaagaacaggaaga

SEQ ID NO: 155021 - DNA, 25 bp, Artificial sequence
  SiRNA target sequence
tgttatgcctaaagaacaggaagaa

SEQ ID NO: 155022 - DNA, 25 bp, Artificial sequence
  SiRNA target sequence
gttatgcctaaagaacaggaagaac

SEQ ID NO: 155023 - DNA, 25 bp, Artificial sequence
  SiRNA target sequence
ttatgcctaaagaacaggaagaaca

SEQ ID NO: 155024 - DNA, 25 bp, Artificial sequence
  SiRNA target sequence
tatgcctaaagaacaggaagaacaa

SEQ ID NO: 155025 - DNA, 25 bp, Artificial sequence
  SiRNA target sequence
atgcctaaagaacaggaagaacaaa

SEQ ID NO: 155026 - DNA, 25 bp, Artificial sequence
  SiRNA target sequence
tgcctaaagaacaggaagaacaaaa

SEQ ID NO: 155027 - DNA, 25 bp, Artificial sequence
  SiRNA target sequence
gcctaaagaacaggaagaacaaaac

SEQ ID NO: 155028 - DNA, 25 bp, Artificial sequence
  SiRNA target sequence
cctaaagaacaggaagaacaaaacg

SEQ ID NO: 155029 - DNA, 25 bp, Artificial sequence
  SiRNA target sequence
ctaaagaacaggaagaacaaaacga

SEQ ID NO: 155030 - DNA, 25 bp, Artificial sequence
  SiRNA target sequence
taaagaacaggaagaacaaaacgaa

SEQ ID NO: 155031 - DNA, 25 bp, Artificial sequence
  SiRNA target sequence
aaagaacaggaagaacaaaacgaaa

SEQ ID NO: 155032 - DNA, 25 bp, Artificial sequence
  SiRNA target sequence
aagaacaggaagaacaaaacgaaag

SEQ ID NO: 155033 - DNA, 25 bp, Artificial sequence
  SiRNA target sequence
agaacaggaagaacaaaacgaaaga

SEQ ID NO: 155034 - DNA, 25 bp, Artificial sequence
  SiRNA target sequence
gaacaggaagaacaaaacgaaagag

SEQ ID NO: 155035 - DNA, 25 bp, Artificial sequence
  SiRNA target sequence
aacaggaagaacaaaacgaaagaga

SEQ ID NO: 155036 - DNA, 25 bp, Artificial sequence
  SiRNA target sequence
acaggaagaacaaaacgaaagagaa

SEQ ID NO: 155037 - DNA, 25 bp, Artificial sequence
  SiRNA target sequence
caggaagaacaaaacgaaagagaaa

SEQ ID NO: 155038 - DNA, 25 bp, Artificial sequence
  SiRNA target sequence
aggaagaacaaaacgaaagagaaag

SEQ ID NO: 155039 - DNA, 25 bp, Artificial sequence
  SiRNA target sequence
ggaagaacaaaacgaaagagaaaga

SEQ ID NO: 155040 - DNA, 25 bp, Artificial sequence
  SiRNA target sequence
gaagaacaaaacgaaagagaaagat

SEQ ID NO: 155041 - DNA, 25 bp, Artificial sequence
  SiRNA target sequence
aagaacaaaacgaaagagaaagatt

SEQ ID NO: 155042 - DNA, 25 bp, Artificial sequence
  SiRNA target sequence
agaacaaaacgaaagagaaagattc

SEQ ID NO: 155043 - DNA, 25 bp, Artificial sequence
  SiRNA target sequence
gaacaaaacgaaagagaaagattcg

SEQ ID NO: 155044 - DNA, 25 bp, Artificial sequence
  SiRNA target sequence
aacaaaacgaaagagaaagattcga

SEQ ID NO: 155045 - DNA, 25 bp, Artificial sequence
  SiRNA target sequence
acaaaacgaaagagaaagattcgaa

SEQ ID NO: 155046 - DNA, 25 bp, Artificial sequence
  SiRNA target sequence
caaaacgaaagagaaagattcgaag

SEQ ID NO: 155047 - DNA, 25 bp, Artificial sequence
  SiRNA target sequence
aaaacgaaagagaaagattcgaagg

SEQ ID NO: 155048 - DNA, 25 bp, Artificial sequence
  SiRNA target sequence
aaacgaaagagaaagattcgaaggt

SEQ ID NO: 155049 - DNA, 25 bp, Artificial sequence
  SiRNA target sequence
aacgaaagagaaagattcgaaggtg

SEQ ID NO: 155050 - DNA, 25 bp, Artificial sequence
  SiRNA target sequence
acgaaagagaaagattcgaaggtgc

SEQ ID NO: 155051 - DNA, 25 bp, Artificial sequence
  SiRNA target sequence
cgaaagagaaagattcgaaggtgca

SEQ ID NO: 155052 - DNA, 25 bp, Artificial sequence
  SiRNA target sequence
gaaagagaaagattcgaaggtgcag

SEQ ID NO: 155053 - DNA, 25 bp, Artificial sequence
  SiRNA target sequence
aaagagaaagattcgaaggtgcaga

SEQ ID NO: 155054 - DNA, 25 bp, Artificial sequence
  SiRNA target sequence
aagagaaagattcgaaggtgcagaa

SEQ ID NO: 155055 - DNA, 25 bp, Artificial sequence
  SiRNA target sequence
agagaaagattcgaaggtgcagaag

SEQ ID NO: 155056 - DNA, 25 bp, Artificial sequence
  SiRNA target sequence
gagaaagattcgaaggtgcagaaga

SEQ ID NO: 155057 - DNA, 25 bp, Artificial sequence
  SiRNA target sequence
agaaagattcgaaggtgcagaagag

SEQ ID NO: 155058 - DNA, 25 bp, Artificial sequence
  SiRNA target sequence
gaaagattcgaaggtgcagaagagt

SEQ ID NO: 155059 - DNA, 25 bp, Artificial sequence
  SiRNA target sequence
aaagattcgaaggtgcagaagagtt

SEQ ID NO: 155060 - DNA, 25 bp, Artificial sequence
  SiRNA target sequence
aagattcgaaggtgcagaagagttt

SEQ ID NO: 155061 - DNA, 25 bp, Artificial sequence
  SiRNA target sequence
agattcgaaggtgcagaagagtttt

SEQ ID NO: 155062 - DNA, 25 bp, Artificial sequence
  SiRNA target sequence
gattcgaaggtgcagaagagttttt

SEQ ID NO: 155063 - DNA, 25 bp, Artificial sequence
  SiRNA target sequence
attcgaaggtgcagaagagtttttt

SEQ ID NO: 155064 - DNA, 25 bp, Artificial sequence
  SiRNA target sequence
ttcgaaggtgcagaagagttttttg

SEQ ID NO: 155065 - DNA, 25 bp, Artificial sequence
  SiRNA target sequence
tcgaaggtgcagaagagttttttgg

SEQ ID NO: 155066 - DNA, 25 bp, Artificial sequence
  SiRNA target sequence
cgaaggtgcagaagagttttttgga

SEQ ID NO: 155067 - DNA, 25 bp, Artificial sequence
  SiRNA target sequence
gaaggtgcagaagagttttttggag

SEQ ID NO: 155068 - DNA, 25 bp, Artificial sequence
  SiRNA target sequence
aaggtgcagaagagttttttggagg

SEQ ID NO: 155069 - DNA, 25 bp, Artificial sequence
  SiRNA target sequence
aggtgcagaagagttttttggagga

SEQ ID NO: 155070 - DNA, 25 bp, Artificial sequence
  SiRNA target sequence
ggtgcagaagagttttttggaggaa

SEQ ID NO: 155071 - DNA, 25 bp, Artificial sequence
  SiRNA target sequence
gtgcagaagagttttttggaggaaa

SEQ ID NO: 155072 - DNA, 25 bp, Artificial sequence
  SiRNA target sequence
tgcagaagagttttttggaggaaat

SEQ ID NO: 155073 - DNA, 25 bp, Artificial sequence
  SiRNA target sequence
gcagaagagttttttggaggaaatg

SEQ ID NO: 155074 - DNA, 25 bp, Artificial sequence
  SiRNA target sequence
cagaagagttttttggaggaaatgg

SEQ ID NO: 155075 - DNA, 25 bp, Artificial sequence
  SiRNA target sequence
agaagagttttttggaggaaatggt

SEQ ID NO: 155076 - DNA, 25 bp, Artificial sequence
  SiRNA target sequence
gaagagttttttggaggaaatggta

SEQ ID NO: 155077 - DNA, 25 bp, Artificial sequence
  SiRNA target sequence
aagagttttttggaggaaatggtag

SEQ ID NO: 155078 - DNA, 25 bp, Artificial sequence
  SiRNA target sequence
agagttttttggaggaaatggtaga

SEQ ID NO: 155079 - DNA, 25 bp, Artificial sequence
  SiRNA target sequence
gagttttttggaggaaatggtagag

SEQ ID NO: 155080 - DNA, 25 bp, Artificial sequence
  SiRNA target sequence
agttttttggaggaaatggtagaga

SEQ ID NO: 155081 - DNA, 25 bp, Artificial sequence
  SiRNA target sequence
gttttttggaggaaatggtagagat

SEQ ID NO: 155082 - DNA, 25 bp, Artificial sequence
  SiRNA target sequence
ttttttggaggaaatggtagagatt

SEQ ID NO: 155083 - DNA, 25 bp, Artificial sequence
  SiRNA target sequence
tttttggaggaaatggtagagattt

SEQ ID NO: 155084 - DNA, 25 bp, Artificial sequence
  SiRNA target sequence
ttttggaggaaatggtagagatttt

SEQ ID NO: 155085 - DNA, 25 bp, Artificial sequence
  SiRNA target sequence
tttggaggaaatggtagagattttt

SEQ ID NO: 155086 - DNA, 25 bp, Artificial sequence
  SiRNA target sequence
ttggaggaaatggtagagatttttt

SEQ ID NO: 155087 - DNA, 25 bp, Artificial sequence
  SiRNA target sequence
tggaggaaatggtagagattttttt

SEQ ID NO: 155088 - DNA, 25 bp, Artificial sequence
  SiRNA target sequence
ggaggaaatggtagagattttttta

SEQ ID NO: 155089 - DNA, 25 bp, Artificial sequence
  SiRNA target sequence
gaggaaatggtagagatttttttag

SEQ ID NO: 155090 - DNA, 25 bp, Artificial sequence
  SiRNA target sequence
aggaaatggtagagatttttttagc

SEQ ID NO: 155091 - DNA, 25 bp, Artificial sequence
  SiRNA target sequence
ggaaatggtagagatttttttagca

SEQ ID NO: 155092 - DNA, 25 bp, Artificial sequence
  SiRNA target sequence
gaaatggtagagatttttttagcaa

SEQ ID NO: 155093 - DNA, 25 bp, Artificial sequence
  SiRNA target sequence
aaatggtagagatttttttagcaag

SEQ ID NO: 155094 - DNA, 25 bp, Artificial sequence
  SiRNA target sequence
aatggtagagatttttttagcaagt

SEQ ID NO: 155095 - DNA, 25 bp, Artificial sequence
  SiRNA target sequence
atggtagagatttttttagcaagtt

SEQ ID NO: 155096 - DNA, 25 bp, Artificial sequence
  SiRNA target sequence
tggtagagatttttttagcaagttt

SEQ ID NO: 155097 - DNA, 25 bp, Artificial sequence
  SiRNA target sequence
ggtagagatttttttagcaagtttg

SEQ ID NO: 155098 - DNA, 25 bp, Artificial sequence
  SiRNA target sequence
gtagagatttttttagcaagtttgg

SEQ ID NO: 155099 - DNA, 25 bp, Artificial sequence
  SiRNA target sequence
tagagatttttttagcaagtttgga

SEQ ID NO: 155100 - DNA, 25 bp, Artificial sequence
  SiRNA target sequence
agagatttttttagcaagtttggat

SEQ ID NO: 155101 - DNA, 25 bp, Artificial sequence
  SiRNA target sequence
gagatttttttagcaagtttggatt

SEQ ID NO: 155102 - DNA, 25 bp, Artificial sequence
  SiRNA target sequence
agatttttttagcaagtttggattt

SEQ ID NO: 155103 - DNA, 25 bp, Artificial sequence
  SiRNA target sequence
gatttttttagcaagtttggatttt

SEQ ID NO: 155104 - DNA, 25 bp, Artificial sequence
  SiRNA target sequence
atttttttagcaagtttggattttt

SEQ ID NO: 155105 - DNA, 25 bp, Artificial sequence
  SiRNA target sequence
tttttttagcaagtttggatttttc

SEQ ID NO: 155106 - DNA, 25 bp, Artificial sequence
  SiRNA target sequence
ttttttagcaagtttggatttttct

SEQ ID NO: 155107 - DNA, 25 bp, Artificial sequence
  SiRNA target sequence
tttttagcaagtttggatttttcta

SEQ ID NO: 155108 - DNA, 25 bp, Artificial sequence
  SiRNA target sequence
ttttagcaagtttggatttttctaa

SEQ ID NO: 155109 - DNA, 26 bp, Artificial sequence
  SiRNA target sequence
atggcacaagacccccaaggacttta

SEQ ID NO: 155110 - DNA, 26 bp, Artificial sequence
  SiRNA target sequence
tggcacaagacccccaaggactttat

SEQ ID NO: 155111 - DNA, 26 bp, Artificial sequence
  SiRNA target sequence
ggcacaagacccccaaggactttatg

SEQ ID NO: 155112 - DNA, 26 bp, Artificial sequence
  SiRNA target sequence
gcacaagacccccaaggactttatga

SEQ ID NO: 155113 - DNA, 26 bp, Artificial sequence
  SiRNA target sequence
cacaagacccccaaggactttatgaa

SEQ ID NO: 155114 - DNA, 26 bp, Artificial sequence
  SiRNA target sequence
acaagacccccaaggactttatgaag

SEQ ID NO: 155115 - DNA, 26 bp, Artificial sequence
  SiRNA target sequence
caagacccccaaggactttatgaagt

SEQ ID NO: 155116 - DNA, 26 bp, Artificial sequence
  SiRNA target sequence
aagacccccaaggactttatgaagta

SEQ ID NO: 155117 - DNA, 26 bp, Artificial sequence
  SiRNA target sequence
agacccccaaggactttatgaagtat

SEQ ID NO: 155118 - DNA, 26 bp, Artificial sequence
  SiRNA target sequence
gacccccaaggactttatgaagtatt

SEQ ID NO: 155119 - DNA, 26 bp, Artificial sequence
  SiRNA target sequence
acccccaaggactttatgaagtatta

SEQ ID NO: 155120 - DNA, 26 bp, Artificial sequence
  SiRNA target sequence
cccccaaggactttatgaagtattag

SEQ ID NO: 155121 - DNA, 26 bp, Artificial sequence
  SiRNA target sequence
ccccaaggactttatgaagtattagg

SEQ ID NO: 155122 - DNA, 26 bp, Artificial sequence
  SiRNA target sequence
cccaaggactttatgaagtattagga

SEQ ID NO: 155123 - DNA, 26 bp, Artificial sequence
  SiRNA target sequence
ccaaggactttatgaagtattaggac

SEQ ID NO: 155124 - DNA, 26 bp, Artificial sequence
  SiRNA target sequence
caaggactttatgaagtattaggact

SEQ ID NO: 155125 - DNA, 26 bp, Artificial sequence
  SiRNA target sequence
aaggactttatgaagtattaggactt

SEQ ID NO: 155126 - DNA, 26 bp, Artificial sequence
  SiRNA target sequence
aggactttatgaagtattaggactta

SEQ ID NO: 155127 - DNA, 26 bp, Artificial sequence
  SiRNA target sequence
ggactttatgaagtattaggacttaa

SEQ ID NO: 155128 - DNA, 26 bp, Artificial sequence
  SiRNA target sequence
gactttatgaagtattaggacttaaa

SEQ ID NO: 155129 - DNA, 26 bp, Artificial sequence
  SiRNA target sequence
actttatgaagtattaggacttaaag

SEQ ID NO: 155130 - DNA, 26 bp, Artificial sequence
  SiRNA target sequence
ctttatgaagtattaggacttaaagc

SEQ ID NO: 155131 - DNA, 26 bp, Artificial sequence
  SiRNA target sequence
tttatgaagtattaggacttaaagct

SEQ ID NO: 155132 - DNA, 26 bp, Artificial sequence
  SiRNA target sequence
ttatgaagtattaggacttaaagctg

SEQ ID NO: 155133 - DNA, 26 bp, Artificial sequence
  SiRNA target sequence
tatgaagtattaggacttaaagctgg

SEQ ID NO: 155134 - DNA, 26 bp, Artificial sequence
  SiRNA target sequence
atgaagtattaggacttaaagctggt

SEQ ID NO: 155135 - DNA, 26 bp, Artificial sequence
  SiRNA target sequence
tgaagtattaggacttaaagctggtg

SEQ ID NO: 155136 - DNA, 26 bp, Artificial sequence
  SiRNA target sequence
gaagtattaggacttaaagctggtgc

SEQ ID NO: 155137 - DNA, 26 bp, Artificial sequence
  SiRNA target sequence
aagtattaggacttaaagctggtgca

SEQ ID NO: 155138 - DNA, 26 bp, Artificial sequence
  SiRNA target sequence
agtattaggacttaaagctggtgcaa

SEQ ID NO: 155139 - DNA, 26 bp, Artificial sequence
  SiRNA target sequence
gtattaggacttaaagctggtgcaag

SEQ ID NO: 155140 - DNA, 26 bp, Artificial sequence
  SiRNA target sequence
tattaggacttaaagctggtgcaagc

SEQ ID NO: 155141 - DNA, 26 bp, Artificial sequence
  SiRNA target sequence
attaggacttaaagctggtgcaagca

SEQ ID NO: 155142 - DNA, 26 bp, Artificial sequence
  SiRNA target sequence
ttaggacttaaagctggtgcaagcat

SEQ ID NO: 155143 - DNA, 26 bp, Artificial sequence
  SiRNA target sequence
taggacttaaagctggtgcaagcatt

SEQ ID NO: 155144 - DNA, 26 bp, Artificial sequence
  SiRNA target sequence
aggacttaaagctggtgcaagcattg

SEQ ID NO: 155145 - DNA, 26 bp, Artificial sequence
  SiRNA target sequence
ggacttaaagctggtgcaagcattga

SEQ ID NO: 155146 - DNA, 26 bp, Artificial sequence
  SiRNA target sequence
gacttaaagctggtgcaagcattgat

SEQ ID NO: 155147 - DNA, 26 bp, Artificial sequence
  SiRNA target sequence
acttaaagctggtgcaagcattgatg

SEQ ID NO: 155148 - DNA, 26 bp, Artificial sequence
  SiRNA target sequence
cttaaagctggtgcaagcattgatga

SEQ ID NO: 155149 - DNA, 26 bp, Artificial sequence
  SiRNA target sequence
ttaaagctggtgcaagcattgatgaa

SEQ ID NO: 155150 - DNA, 26 bp, Artificial sequence
  SiRNA target sequence
taaagctggtgcaagcattgatgaag

SEQ ID NO: 155151 - DNA, 26 bp, Artificial sequence
  SiRNA target sequence
aaagctggtgcaagcattgatgaagt

SEQ ID NO: 155152 - DNA, 26 bp, Artificial sequence
  SiRNA target sequence
aagctggtgcaagcattgatgaagtt

SEQ ID NO: 155153 - DNA, 26 bp, Artificial sequence
  SiRNA target sequence
agctggtgcaagcattgatgaagtta

SEQ ID NO: 155154 - DNA, 26 bp, Artificial sequence
  SiRNA target sequence
gctggtgcaagcattgatgaagttaa

SEQ ID NO: 155155 - DNA, 26 bp, Artificial sequence
  SiRNA target sequence
ctggtgcaagcattgatgaagttaaa

SEQ ID NO: 155156 - DNA, 26 bp, Artificial sequence
  SiRNA target sequence
tggtgcaagcattgatgaagttaaaa

SEQ ID NO: 155157 - DNA, 26 bp, Artificial sequence
  SiRNA target sequence
ggtgcaagcattgatgaagttaaaaa

SEQ ID NO: 155158 - DNA, 26 bp, Artificial sequence
  SiRNA target sequence
gtgcaagcattgatgaagttaaaaaa

SEQ ID NO: 155159 - DNA, 26 bp, Artificial sequence
  SiRNA target sequence
tgcaagcattgatgaagttaaaaaag

SEQ ID NO: 155160 - DNA, 26 bp, Artificial sequence
  SiRNA target sequence
gcaagcattgatgaagttaaaaaagc

SEQ ID NO: 155161 - DNA, 26 bp, Artificial sequence
  SiRNA target sequence
caagcattgatgaagttaaaaaagca

SEQ ID NO: 155162 - DNA, 26 bp, Artificial sequence
  SiRNA target sequence
aagcattgatgaagttaaaaaagcat

SEQ ID NO: 155163 - DNA, 26 bp, Artificial sequence
  SiRNA target sequence
agcattgatgaagttaaaaaagcatt

SEQ ID NO: 155164 - DNA, 26 bp, Artificial sequence
  SiRNA target sequence
gcattgatgaagttaaaaaagcattt

SEQ ID NO: 155165 - DNA, 26 bp, Artificial sequence
  SiRNA target sequence
cattgatgaagttaaaaaagcattta

SEQ ID NO: 155166 - DNA, 26 bp, Artificial sequence
  SiRNA target sequence
attgatgaagttaaaaaagcatttac

SEQ ID NO: 155167 - DNA, 26 bp, Artificial sequence
  SiRNA target sequence
ttgatgaagttaaaaaagcatttaca

SEQ ID NO: 155168 - DNA, 26 bp, Artificial sequence
  SiRNA target sequence
tgatgaagttaaaaaagcatttacaa

SEQ ID NO: 155169 - DNA, 26 bp, Artificial sequence
  SiRNA target sequence
gatgaagttaaaaaagcatttacaaa

SEQ ID NO: 155170 - DNA, 26 bp, Artificial sequence
  SiRNA target sequence
atgaagttaaaaaagcatttacaaaa

SEQ ID NO: 155171 - DNA, 26 bp, Artificial sequence
  SiRNA target sequence
tgaagttaaaaaagcatttacaaaaa

SEQ ID NO: 155172 - DNA, 26 bp, Artificial sequence
  SiRNA target sequence
gaagttaaaaaagcatttacaaaaaa

SEQ ID NO: 155173 - DNA, 26 bp, Artificial sequence
  SiRNA target sequence
aagttaaaaaagcatttacaaaaaaa

SEQ ID NO: 155174 - DNA, 26 bp, Artificial sequence
  SiRNA target sequence
agttaaaaaagcatttacaaaaaaac

SEQ ID NO: 155175 - DNA, 26 bp, Artificial sequence
  SiRNA target sequence
gttaaaaaagcatttacaaaaaaaca

SEQ ID NO: 155176 - DNA, 26 bp, Artificial sequence
  SiRNA target sequence
ttaaaaaagcatttacaaaaaaacaa

SEQ ID NO: 155177 - DNA, 26 bp, Artificial sequence
  SiRNA target sequence
taaaaaagcatttacaaaaaaacaaa

SEQ ID NO: 155178 - DNA, 26 bp, Artificial sequence
  SiRNA target sequence
aaaaaagcatttacaaaaaaacaaag

SEQ ID NO: 155179 - DNA, 26 bp, Artificial sequence
  SiRNA target sequence
aaaaagcatttacaaaaaaacaaagg

SEQ ID NO: 155180 - DNA, 26 bp, Artificial sequence
  SiRNA target sequence
aaaagcatttacaaaaaaacaaaggg

SEQ ID NO: 155181 - DNA, 26 bp, Artificial sequence
  SiRNA target sequence
aaagcatttacaaaaaaacaaaggga

SEQ ID NO: 155182 - DNA, 26 bp, Artificial sequence
  SiRNA target sequence
aagcatttacaaaaaaacaaagggaa

SEQ ID NO: 155183 - DNA, 26 bp, Artificial sequence
  SiRNA target sequence
agcatttacaaaaaaacaaagggaat

SEQ ID NO: 155184 - DNA, 26 bp, Artificial sequence
  SiRNA target sequence
gcatttacaaaaaaacaaagggaatg

SEQ ID NO: 155185 - DNA, 26 bp, Artificial sequence
  SiRNA target sequence
catttacaaaaaaacaaagggaatgt

SEQ ID NO: 155186 - DNA, 26 bp, Artificial sequence
  SiRNA target sequence
atttacaaaaaaacaaagggaatgtc

SEQ ID NO: 155187 - DNA, 26 bp, Artificial sequence
  SiRNA target sequence
tttacaaaaaaacaaagggaatgtca

SEQ ID NO: 155188 - DNA, 26 bp, Artificial sequence
  SiRNA target sequence
ttacaaaaaaacaaagggaatgtcat

SEQ ID NO: 155189 - DNA, 26 bp, Artificial sequence
  SiRNA target sequence
tacaaaaaaacaaagggaatgtcatc

SEQ ID NO: 155190 - DNA, 26 bp, Artificial sequence
  SiRNA target sequence
acaaaaaaacaaagggaatgtcatcc

SEQ ID NO: 155191 - DNA, 26 bp, Artificial sequence
  SiRNA target sequence
caaaaaaacaaagggaatgtcatccc

SEQ ID NO: 155192 - DNA, 26 bp, Artificial sequence
  SiRNA target sequence
aaaaaaacaaagggaatgtcatcccg

SEQ ID NO: 155193 - DNA, 26 bp, Artificial sequence
  SiRNA target sequence
aaaaaacaaagggaatgtcatcccga

SEQ ID NO: 155194 - DNA, 26 bp, Artificial sequence
  SiRNA target sequence
aaaaacaaagggaatgtcatcccgat

SEQ ID NO: 155195 - DNA, 26 bp, Artificial sequence
  SiRNA target sequence
aaaacaaagggaatgtcatcccgatg

SEQ ID NO: 155196 - DNA, 26 bp, Artificial sequence
  SiRNA target sequence
aaacaaagggaatgtcatcccgatgg

SEQ ID NO: 155197 - DNA, 26 bp, Artificial sequence
  SiRNA target sequence
aacaaagggaatgtcatcccgatggt

SEQ ID NO: 155198 - DNA, 26 bp, Artificial sequence
  SiRNA target sequence
acaaagggaatgtcatcccgatggtg

SEQ ID NO: 155199 - DNA, 26 bp, Artificial sequence
  SiRNA target sequence
caaagggaatgtcatcccgatggtgc

SEQ ID NO: 155200 - DNA, 26 bp, Artificial sequence
  SiRNA target sequence
aaagggaatgtcatcccgatggtgca

SEQ ID NO: 155201 - DNA, 26 bp, Artificial sequence
  SiRNA target sequence
aagggaatgtcatcccgatggtgcat

SEQ ID NO: 155202 - DNA, 26 bp, Artificial sequence
  SiRNA target sequence
agggaatgtcatcccgatggtgcatt

SEQ ID NO: 155203 - DNA, 26 bp, Artificial sequence
  SiRNA target sequence
gggaatgtcatcccgatggtgcattt

SEQ ID NO: 155204 - DNA, 26 bp, Artificial sequence
  SiRNA target sequence
ggaatgtcatcccgatggtgcatttt

SEQ ID NO: 155205 - DNA, 26 bp, Artificial sequence
  SiRNA target sequence
gaatgtcatcccgatggtgcattttt

SEQ ID NO: 155206 - DNA, 26 bp, Artificial sequence
  SiRNA target sequence
aatgtcatcccgatggtgcatttttt

SEQ ID NO: 155207 - DNA, 26 bp, Artificial sequence
  SiRNA target sequence
atgtcatcccgatggtgcatttttta

SEQ ID NO: 155208 - DNA, 26 bp, Artificial sequence
  SiRNA target sequence
tgtcatcccgatggtgcattttttaa

SEQ ID NO: 155209 - DNA, 26 bp, Artificial sequence
  SiRNA target sequence
gtcatcccgatggtgcattttttaaa

SEQ ID NO: 155210 - DNA, 26 bp, Artificial sequence
  SiRNA target sequence
tcatcccgatggtgcattttttaaag

SEQ ID NO: 155211 - DNA, 26 bp, Artificial sequence
  SiRNA target sequence
catcccgatggtgcattttttaaagc

SEQ ID NO: 155212 - DNA, 26 bp, Artificial sequence
  SiRNA target sequence
atcccgatggtgcattttttaaagct

SEQ ID NO: 155213 - DNA, 26 bp, Artificial sequence
  SiRNA target sequence
tcccgatggtgcattttttaaagctg

SEQ ID NO: 155214 - DNA, 26 bp, Artificial sequence
  SiRNA target sequence
cccgatggtgcattttttaaagctgc

SEQ ID NO: 155215 - DNA, 26 bp, Artificial sequence
  SiRNA target sequence
ccgatggtgcattttttaaagctgct

SEQ ID NO: 155216 - DNA, 26 bp, Artificial sequence
  SiRNA target sequence
cgatggtgcattttttaaagctgctc

SEQ ID NO: 155217 - DNA, 26 bp, Artificial sequence
  SiRNA target sequence
gatggtgcattttttaaagctgctct

SEQ ID NO: 155218 - DNA, 26 bp, Artificial sequence
  SiRNA target sequence
atggtgcattttttaaagctgctctt

SEQ ID NO: 155219 - DNA, 26 bp, Artificial sequence
  SiRNA target sequence
tggtgcattttttaaagctgctctta

SEQ ID NO: 155220 - DNA, 26 bp, Artificial sequence
  SiRNA target sequence
ggtgcattttttaaagctgctcttag

SEQ ID NO: 155221 - DNA, 26 bp, Artificial sequence
  SiRNA target sequence
gtgcattttttaaagctgctcttaga

SEQ ID NO: 155222 - DNA, 26 bp, Artificial sequence
  SiRNA target sequence
tgcattttttaaagctgctcttagaa

SEQ ID NO: 155223 - DNA, 26 bp, Artificial sequence
  SiRNA target sequence
gcattttttaaagctgctcttagaaa

SEQ ID NO: 155224 - DNA, 26 bp, Artificial sequence
  SiRNA target sequence
cattttttaaagctgctcttagaaaa

SEQ ID NO: 155225 - DNA, 26 bp, Artificial sequence
  SiRNA target sequence
attttttaaagctgctcttagaaaat

SEQ ID NO: 155226 - DNA, 26 bp, Artificial sequence
  SiRNA target sequence
ttttttaaagctgctcttagaaaatg

SEQ ID NO: 155227 - DNA, 26 bp, Artificial sequence
  SiRNA target sequence
tttttaaagctgctcttagaaaatgt

SEQ ID NO: 155228 - DNA, 26 bp, Artificial sequence
  SiRNA target sequence
ttttaaagctgctcttagaaaatgta

SEQ ID NO: 155229 - DNA, 26 bp, Artificial sequence
  SiRNA target sequence
tttaaagctgctcttagaaaatgtaa

SEQ ID NO: 155230 - DNA, 26 bp, Artificial sequence
  SiRNA target sequence
ttaaagctgctcttagaaaatgtaaa

SEQ ID NO: 155231 - DNA, 26 bp, Artificial sequence
  SiRNA target sequence
taaagctgctcttagaaaatgtaaaa

SEQ ID NO: 155232 - DNA, 26 bp, Artificial sequence
  SiRNA target sequence
aaagctgctcttagaaaatgtaaaac

SEQ ID NO: 155233 - DNA, 26 bp, Artificial sequence
  SiRNA target sequence
aagctgctcttagaaaatgtaaaaca

SEQ ID NO: 155234 - DNA, 26 bp, Artificial sequence
  SiRNA target sequence
agctgctcttagaaaatgtaaaacag

SEQ ID NO: 155235 - DNA, 26 bp, Artificial sequence
  SiRNA target sequence
gctgctcttagaaaatgtaaaacaga

SEQ ID NO: 155236 - DNA, 26 bp, Artificial sequence
  SiRNA target sequence
ctgctcttagaaaatgtaaaacagat

SEQ ID NO: 155237 - DNA, 26 bp, Artificial sequence
  SiRNA target sequence
tgctcttagaaaatgtaaaacagatg

SEQ ID NO: 155238 - DNA, 26 bp, Artificial sequence
  SiRNA target sequence
gctcttagaaaatgtaaaacagatga

SEQ ID NO: 155239 - DNA, 26 bp, Artificial sequence
  SiRNA target sequence
ctcttagaaaatgtaaaacagatgaa

SEQ ID NO: 155240 - DNA, 26 bp, Artificial sequence
  SiRNA target sequence
tcttagaaaatgtaaaacagatgaag

SEQ ID NO: 155241 - DNA, 26 bp, Artificial sequence
  SiRNA target sequence
cttagaaaatgtaaaacagatgaaga

SEQ ID NO: 155242 - DNA, 26 bp, Artificial sequence
  SiRNA target sequence
ttagaaaatgtaaaacagatgaagaa

SEQ ID NO: 155243 - DNA, 26 bp, Artificial sequence
  SiRNA target sequence
tagaaaatgtaaaacagatgaagaaa

SEQ ID NO: 155244 - DNA, 26 bp, Artificial sequence
  SiRNA target sequence
agaaaatgtaaaacagatgaagaaag

SEQ ID NO: 155245 - DNA, 26 bp, Artificial sequence
  SiRNA target sequence
gaaaatgtaaaacagatgaagaaaga

SEQ ID NO: 155246 - DNA, 26 bp, Artificial sequence
  SiRNA target sequence
aaaatgtaaaacagatgaagaaagag

SEQ ID NO: 155247 - DNA, 26 bp, Artificial sequence
  SiRNA target sequence
aaatgtaaaacagatgaagaaagagc

SEQ ID NO: 155248 - DNA, 26 bp, Artificial sequence
  SiRNA target sequence
aatgtaaaacagatgaagaaagagca

SEQ ID NO: 155249 - DNA, 26 bp, Artificial sequence
  SiRNA target sequence
atgtaaaacagatgaagaaagagcaa

SEQ ID NO: 155250 - DNA, 26 bp, Artificial sequence
  SiRNA target sequence
tgtaaaacagatgaagaaagagcaaa

SEQ ID NO: 155251 - DNA, 26 bp, Artificial sequence
  SiRNA target sequence
gtaaaacagatgaagaaagagcaaaa

SEQ ID NO: 155252 - DNA, 26 bp, Artificial sequence
  SiRNA target sequence
taaaacagatgaagaaagagcaaaag

SEQ ID NO: 155253 - DNA, 26 bp, Artificial sequence
  SiRNA target sequence
aaaacagatgaagaaagagcaaaagt

SEQ ID NO: 155254 - DNA, 26 bp, Artificial sequence
  SiRNA target sequence
aaacagatgaagaaagagcaaaagtt

SEQ ID NO: 155255 - DNA, 26 bp, Artificial sequence
  SiRNA target sequence
aacagatgaagaaagagcaaaagttg

SEQ ID NO: 155256 - DNA, 26 bp, Artificial sequence
  SiRNA target sequence
acagatgaagaaagagcaaaagttga

SEQ ID NO: 155257 - DNA, 26 bp, Artificial sequence
  SiRNA target sequence
cagatgaagaaagagcaaaagttgaa

SEQ ID NO: 155258 - DNA, 26 bp, Artificial sequence
  SiRNA target sequence
agatgaagaaagagcaaaagttgaaa

SEQ ID NO: 155259 - DNA, 26 bp, Artificial sequence
  SiRNA target sequence
gatgaagaaagagcaaaagttgaaaa

SEQ ID NO: 155260 - DNA, 26 bp, Artificial sequence
  SiRNA target sequence
atgaagaaagagcaaaagttgaaaaa

SEQ ID NO: 155261 - DNA, 26 bp, Artificial sequence
  SiRNA target sequence
tgaagaaagagcaaaagttgaaaaag

SEQ ID NO: 155262 - DNA, 26 bp, Artificial sequence
  SiRNA target sequence
gaagaaagagcaaaagttgaaaaaga

SEQ ID NO: 155263 - DNA, 26 bp, Artificial sequence
  SiRNA target sequence
aagaaagagcaaaagttgaaaaagaa

SEQ ID NO: 155264 - DNA, 26 bp, Artificial sequence
  SiRNA target sequence
agaaagagcaaaagttgaaaaagaat

SEQ ID NO: 155265 - DNA, 26 bp, Artificial sequence
  SiRNA target sequence
gaaagagcaaaagttgaaaaagaatt

SEQ ID NO: 155266 - DNA, 26 bp, Artificial sequence
  SiRNA target sequence
aaagagcaaaagttgaaaaagaattt

SEQ ID NO: 155267 - DNA, 26 bp, Artificial sequence
  SiRNA target sequence
aagagcaaaagttgaaaaagaattta

SEQ ID NO: 155268 - DNA, 26 bp, Artificial sequence
  SiRNA target sequence
agagcaaaagttgaaaaagaatttaa

SEQ ID NO: 155269 - DNA, 26 bp, Artificial sequence
  SiRNA target sequence
gagcaaaagttgaaaaagaatttaaa

SEQ ID NO: 155270 - DNA, 26 bp, Artificial sequence
  SiRNA target sequence
agcaaaagttgaaaaagaatttaaag

SEQ ID NO: 155271 - DNA, 26 bp, Artificial sequence
  SiRNA target sequence
gcaaaagttgaaaaagaatttaaaga

SEQ ID NO: 155272 - DNA, 26 bp, Artificial sequence
  SiRNA target sequence
caaaagttgaaaaagaatttaaagaa

SEQ ID NO: 155273 - DNA, 26 bp, Artificial sequence
  SiRNA target sequence
aaaagttgaaaaagaatttaaagaaa

SEQ ID NO: 155274 - DNA, 26 bp, Artificial sequence
  SiRNA target sequence
aaagttgaaaaagaatttaaagaaaa

SEQ ID NO: 155275 - DNA, 26 bp, Artificial sequence
  SiRNA target sequence
aagttgaaaaagaatttaaagaaaaa

SEQ ID NO: 155276 - DNA, 26 bp, Artificial sequence
  SiRNA target sequence
agttgaaaaagaatttaaagaaaaat

SEQ ID NO: 155277 - DNA, 26 bp, Artificial sequence
  SiRNA target sequence
gttgaaaaagaatttaaagaaaaatc

SEQ ID NO: 155278 - DNA, 26 bp, Artificial sequence
  SiRNA target sequence
ttgaaaaagaatttaaagaaaaatca

SEQ ID NO: 155279 - DNA, 26 bp, Artificial sequence
  SiRNA target sequence
tgaaaaagaatttaaagaaaaatcac

SEQ ID NO: 155280 - DNA, 26 bp, Artificial sequence
  SiRNA target sequence
gaaaaagaatttaaagaaaaatcaca

SEQ ID NO: 155281 - DNA, 26 bp, Artificial sequence
  SiRNA target sequence
aaaaagaatttaaagaaaaatcacaa

SEQ ID NO: 155282 - DNA, 26 bp, Artificial sequence
  SiRNA target sequence
aaaagaatttaaagaaaaatcacaaa

SEQ ID NO: 155283 - DNA, 26 bp, Artificial sequence
  SiRNA target sequence
aaagaatttaaagaaaaatcacaaaa

SEQ ID NO: 155284 - DNA, 26 bp, Artificial sequence
  SiRNA target sequence
aagaatttaaagaaaaatcacaaaaa

SEQ ID NO: 155285 - DNA, 26 bp, Artificial sequence
  SiRNA target sequence
agaatttaaagaaaaatcacaaaaat

SEQ ID NO: 155286 - DNA, 26 bp, Artificial sequence
  SiRNA target sequence
gaatttaaagaaaaatcacaaaaatg

SEQ ID NO: 155287 - DNA, 26 bp, Artificial sequence
  SiRNA target sequence
aatttaaagaaaaatcacaaaaatgt

SEQ ID NO: 155288 - DNA, 26 bp, Artificial sequence
  SiRNA target sequence
atttaaagaaaaatcacaaaaatgta

SEQ ID NO: 155289 - DNA, 26 bp, Artificial sequence
  SiRNA target sequence
tttaaagaaaaatcacaaaaatgtaa

SEQ ID NO: 155290 - DNA, 26 bp, Artificial sequence
  SiRNA target sequence
ttaaagaaaaatcacaaaaatgtaat

SEQ ID NO: 155291 - DNA, 26 bp, Artificial sequence
  SiRNA target sequence
taaagaaaaatcacaaaaatgtaatc

SEQ ID NO: 155292 - DNA, 26 bp, Artificial sequence
  SiRNA target sequence
aaagaaaaatcacaaaaatgtaatca

SEQ ID NO: 155293 - DNA, 26 bp, Artificial sequence
  SiRNA target sequence
aagaaaaatcacaaaaatgtaatcaa

SEQ ID NO: 155294 - DNA, 26 bp, Artificial sequence
  SiRNA target sequence
agaaaaatcacaaaaatgtaatcaag

SEQ ID NO: 155295 - DNA, 26 bp, Artificial sequence
  SiRNA target sequence
gaaaaatcacaaaaatgtaatcaagc

SEQ ID NO: 155296 - DNA, 26 bp, Artificial sequence
  SiRNA target sequence
aaaaatcacaaaaatgtaatcaagct

SEQ ID NO: 155297 - DNA, 26 bp, Artificial sequence
  SiRNA target sequence
aaaatcacaaaaatgtaatcaagcta

SEQ ID NO: 155298 - DNA, 26 bp, Artificial sequence
  SiRNA target sequence
aaatcacaaaaatgtaatcaagctaa

SEQ ID NO: 155299 - DNA, 26 bp, Artificial sequence
  SiRNA target sequence
aatcacaaaaatgtaatcaagctaaa

SEQ ID NO: 155300 - DNA, 26 bp, Artificial sequence
  SiRNA target sequence
atcacaaaaatgtaatcaagctaaag

SEQ ID NO: 155301 - DNA, 26 bp, Artificial sequence
  SiRNA target sequence
tcacaaaaatgtaatcaagctaaagc

SEQ ID NO: 155302 - DNA, 26 bp, Artificial sequence
  SiRNA target sequence
cacaaaaatgtaatcaagctaaagca

SEQ ID NO: 155303 - DNA, 26 bp, Artificial sequence
  SiRNA target sequence
acaaaaatgtaatcaagctaaagcag

SEQ ID NO: 155304 - DNA, 26 bp, Artificial sequence
  SiRNA target sequence
caaaaatgtaatcaagctaaagcagt

SEQ ID NO: 155305 - DNA, 26 bp, Artificial sequence
  SiRNA target sequence
aaaaatgtaatcaagctaaagcagtt

SEQ ID NO: 155306 - DNA, 26 bp, Artificial sequence
  SiRNA target sequence
aaaatgtaatcaagctaaagcagttt

SEQ ID NO: 155307 - DNA, 26 bp, Artificial sequence
  SiRNA target sequence
aaatgtaatcaagctaaagcagtttt

SEQ ID NO: 155308 - DNA, 26 bp, Artificial sequence
  SiRNA target sequence
aatgtaatcaagctaaagcagtttta

SEQ ID NO: 155309 - DNA, 26 bp, Artificial sequence
  SiRNA target sequence
atgtaatcaagctaaagcagttttat

SEQ ID NO: 155310 - DNA, 26 bp, Artificial sequence
  SiRNA target sequence
tgtaatcaagctaaagcagttttatt

SEQ ID NO: 155311 - DNA, 26 bp, Artificial sequence
  SiRNA target sequence
gtaatcaagctaaagcagttttattt

SEQ ID NO: 155312 - DNA, 26 bp, Artificial sequence
  SiRNA target sequence
taatcaagctaaagcagttttatttg

SEQ ID NO: 155313 - DNA, 26 bp, Artificial sequence
  SiRNA target sequence
aatcaagctaaagcagttttatttga

SEQ ID NO: 155314 - DNA, 26 bp, Artificial sequence
  SiRNA target sequence
atcaagctaaagcagttttatttgat

SEQ ID NO: 155315 - DNA, 26 bp, Artificial sequence
  SiRNA target sequence
tcaagctaaagcagttttatttgatg

SEQ ID NO: 155316 - DNA, 26 bp, Artificial sequence
  SiRNA target sequence
caagctaaagcagttttatttgatga

SEQ ID NO: 155317 - DNA, 26 bp, Artificial sequence
  SiRNA target sequence
aagctaaagcagttttatttgatgag

SEQ ID NO: 155318 - DNA, 26 bp, Artificial sequence
  SiRNA target sequence
agctaaagcagttttatttgatgaga

SEQ ID NO: 155319 - DNA, 26 bp, Artificial sequence
  SiRNA target sequence
gctaaagcagttttatttgatgagaa

SEQ ID NO: 155320 - DNA, 26 bp, Artificial sequence
  SiRNA target sequence
ctaaagcagttttatttgatgagaaa

SEQ ID NO: 155321 - DNA, 26 bp, Artificial sequence
  SiRNA target sequence
taaagcagttttatttgatgagaaaa

SEQ ID NO: 155322 - DNA, 26 bp, Artificial sequence
  SiRNA target sequence
aaagcagttttatttgatgagaaaaa

SEQ ID NO: 155323 - DNA, 26 bp, Artificial sequence
  SiRNA target sequence
aagcagttttatttgatgagaaaaaa

SEQ ID NO: 155324 - DNA, 26 bp, Artificial sequence
  SiRNA target sequence
agcagttttatttgatgagaaaaaaa

SEQ ID NO: 155325 - DNA, 26 bp, Artificial sequence
  SiRNA target sequence
gcagttttatttgatgagaaaaaaaa

SEQ ID NO: 155326 - DNA, 26 bp, Artificial sequence
  SiRNA target sequence
cagttttatttgatgagaaaaaaaag

SEQ ID NO: 155327 - DNA, 26 bp, Artificial sequence
  SiRNA target sequence
agttttatttgatgagaaaaaaaagc

SEQ ID NO: 155328 - DNA, 26 bp, Artificial sequence
  SiRNA target sequence
gttttatttgatgagaaaaaaaagca

SEQ ID NO: 155329 - DNA, 26 bp, Artificial sequence
  SiRNA target sequence
ttttatttgatgagaaaaaaaagcaa

SEQ ID NO: 155330 - DNA, 26 bp, Artificial sequence
  SiRNA target sequence
tttatttgatgagaaaaaaaagcaag

SEQ ID NO: 155331 - DNA, 26 bp, Artificial sequence
  SiRNA target sequence
ttatttgatgagaaaaaaaagcaaga

SEQ ID NO: 155332 - DNA, 26 bp, Artificial sequence
  SiRNA target sequence
tatttgatgagaaaaaaaagcaagag

SEQ ID NO: 155333 - DNA, 26 bp, Artificial sequence
  SiRNA target sequence
atttgatgagaaaaaaaagcaagagt

SEQ ID NO: 155334 - DNA, 26 bp, Artificial sequence
  SiRNA target sequence
tttgatgagaaaaaaaagcaagagta

SEQ ID NO: 155335 - DNA, 26 bp, Artificial sequence
  SiRNA target sequence
ttgatgagaaaaaaaagcaagagtat

SEQ ID NO: 155336 - DNA, 26 bp, Artificial sequence
  SiRNA target sequence
tgatgagaaaaaaaagcaagagtatg

SEQ ID NO: 155337 - DNA, 26 bp, Artificial sequence
  SiRNA target sequence
gatgagaaaaaaaagcaagagtatga

SEQ ID NO: 155338 - DNA, 26 bp, Artificial sequence
  SiRNA target sequence
atgagaaaaaaaagcaagagtatgat

SEQ ID NO: 155339 - DNA, 26 bp, Artificial sequence
  SiRNA target sequence
tgagaaaaaaaagcaagagtatgata

SEQ ID NO: 155340 - DNA, 26 bp, Artificial sequence
  SiRNA target sequence
gagaaaaaaaagcaagagtatgatat

SEQ ID NO: 155341 - DNA, 26 bp, Artificial sequence
  SiRNA target sequence
agaaaaaaaagcaagagtatgatatg

SEQ ID NO: 155342 - DNA, 26 bp, Artificial sequence
  SiRNA target sequence
gaaaaaaaagcaagagtatgatatgg

SEQ ID NO: 155343 - DNA, 26 bp, Artificial sequence
  SiRNA target sequence
aaaaaaaagcaagagtatgatatggg

SEQ ID NO: 155344 - DNA, 26 bp, Artificial sequence
  SiRNA target sequence
aaaaaaagcaagagtatgatatggga

SEQ ID NO: 155345 - DNA, 26 bp, Artificial sequence
  SiRNA target sequence
aaaaaagcaagagtatgatatgggaa

SEQ ID NO: 155346 - DNA, 26 bp, Artificial sequence
  SiRNA target sequence
aaaaagcaagagtatgatatgggaat

SEQ ID NO: 155347 - DNA, 26 bp, Artificial sequence
  SiRNA target sequence
aaaagcaagagtatgatatgggaatg

SEQ ID NO: 155348 - DNA, 26 bp, Artificial sequence
  SiRNA target sequence
aaagcaagagtatgatatgggaatga

SEQ ID NO: 155349 - DNA, 26 bp, Artificial sequence
  SiRNA target sequence
aagcaagagtatgatatgggaatgac

SEQ ID NO: 155350 - DNA, 26 bp, Artificial sequence
  SiRNA target sequence
agcaagagtatgatatgggaatgact

SEQ ID NO: 155351 - DNA, 26 bp, Artificial sequence
  SiRNA target sequence
gcaagagtatgatatgggaatgactg

SEQ ID NO: 155352 - DNA, 26 bp, Artificial sequence
  SiRNA target sequence
caagagtatgatatgggaatgactgg

SEQ ID NO: 155353 - DNA, 26 bp, Artificial sequence
  SiRNA target sequence
aagagtatgatatgggaatgactggc

SEQ ID NO: 155354 - DNA, 26 bp, Artificial sequence
  SiRNA target sequence
agagtatgatatgggaatgactggcg

SEQ ID NO: 155355 - DNA, 26 bp, Artificial sequence
  SiRNA target sequence
gagtatgatatgggaatgactggcga

SEQ ID NO: 155356 - DNA, 26 bp, Artificial sequence
  SiRNA target sequence
agtatgatatgggaatgactggcgat

SEQ ID NO: 155357 - DNA, 26 bp, Artificial sequence
  SiRNA target sequence
gtatgatatgggaatgactggcgatt

SEQ ID NO: 155358 - DNA, 26 bp, Artificial sequence
  SiRNA target sequence
tatgatatgggaatgactggcgattt

SEQ ID NO: 155359 - DNA, 26 bp, Artificial sequence
  SiRNA target sequence
atgatatgggaatgactggcgatttt

SEQ ID NO: 155360 - DNA, 26 bp, Artificial sequence
  SiRNA target sequence
tgatatgggaatgactggcgattttg

SEQ ID NO: 155361 - DNA, 26 bp, Artificial sequence
  SiRNA target sequence
gatatgggaatgactggcgattttgg

SEQ ID NO: 155362 - DNA, 26 bp, Artificial sequence
  SiRNA target sequence
atatgggaatgactggcgattttgga

SEQ ID NO: 155363 - DNA, 26 bp, Artificial sequence
  SiRNA target sequence
tatgggaatgactggcgattttggat

SEQ ID NO: 155364 - DNA, 26 bp, Artificial sequence
  SiRNA target sequence
atgggaatgactggcgattttggatt

SEQ ID NO: 155365 - DNA, 26 bp, Artificial sequence
  SiRNA target sequence
tgggaatgactggcgattttggattt

SEQ ID NO: 155366 - DNA, 26 bp, Artificial sequence
  SiRNA target sequence
gggaatgactggcgattttggatttt

SEQ ID NO: 155367 - DNA, 26 bp, Artificial sequence
  SiRNA target sequence
ggaatgactggcgattttggattttc

SEQ ID NO: 155368 - DNA, 26 bp, Artificial sequence
  SiRNA target sequence
gaatgactggcgattttggattttct

SEQ ID NO: 155369 - DNA, 26 bp, Artificial sequence
  SiRNA target sequence
aatgactggcgattttggattttctg

SEQ ID NO: 155370 - DNA, 26 bp, Artificial sequence
  SiRNA target sequence
atgactggcgattttggattttctgc

SEQ ID NO: 155371 - DNA, 26 bp, Artificial sequence
  SiRNA target sequence
tgactggcgattttggattttctgca

SEQ ID NO: 155372 - DNA, 26 bp, Artificial sequence
  SiRNA target sequence
gactggcgattttggattttctgcag

SEQ ID NO: 155373 - DNA, 26 bp, Artificial sequence
  SiRNA target sequence
actggcgattttggattttctgcagg

SEQ ID NO: 155374 - DNA, 26 bp, Artificial sequence
  SiRNA target sequence
ctggcgattttggattttctgcaggt

SEQ ID NO: 155375 - DNA, 26 bp, Artificial sequence
  SiRNA target sequence
tggcgattttggattttctgcaggtg

SEQ ID NO: 155376 - DNA, 26 bp, Artificial sequence
  SiRNA target sequence
ggcgattttggattttctgcaggtgg

SEQ ID NO: 155377 - DNA, 26 bp, Artificial sequence
  SiRNA target sequence
gcgattttggattttctgcaggtggt

SEQ ID NO: 155378 - DNA, 26 bp, Artificial sequence
  SiRNA target sequence
cgattttggattttctgcaggtggtg

SEQ ID NO: 155379 - DNA, 26 bp, Artificial sequence
  SiRNA target sequence
gattttggattttctgcaggtggtgg

SEQ ID NO: 155380 - DNA, 26 bp, Artificial sequence
  SiRNA target sequence
attttggattttctgcaggtggtgga

SEQ ID NO: 155381 - DNA, 26 bp, Artificial sequence
  SiRNA target sequence
ttttggattttctgcaggtggtggag

SEQ ID NO: 155382 - DNA, 26 bp, Artificial sequence
  SiRNA target sequence
tttggattttctgcaggtggtggaga

SEQ ID NO: 155383 - DNA, 26 bp, Artificial sequence
  SiRNA target sequence
ttggattttctgcaggtggtggagac

SEQ ID NO: 155384 - DNA, 26 bp, Artificial sequence
  SiRNA target sequence
tggattttctgcaggtggtggagact

SEQ ID NO: 155385 - DNA, 26 bp, Artificial sequence
  SiRNA target sequence
ggattttctgcaggtggtggagactt

SEQ ID NO: 155386 - DNA, 26 bp, Artificial sequence
  SiRNA target sequence
gattttctgcaggtggtggagacttt

SEQ ID NO: 155387 - DNA, 26 bp, Artificial sequence
  SiRNA target sequence
attttctgcaggtggtggagactttt

SEQ ID NO: 155388 - DNA, 26 bp, Artificial sequence
  SiRNA target sequence
ttttctgcaggtggtggagacttttt

SEQ ID NO: 155389 - DNA, 26 bp, Artificial sequence
  SiRNA target sequence
tttctgcaggtggtggagactttttc

SEQ ID NO: 155390 - DNA, 26 bp, Artificial sequence
  SiRNA target sequence
ttctgcaggtggtggagactttttcg

SEQ ID NO: 155391 - DNA, 26 bp, Artificial sequence
  SiRNA target sequence
tctgcaggtggtggagactttttcga

SEQ ID NO: 155392 - DNA, 26 bp, Artificial sequence
  SiRNA target sequence
ctgcaggtggtggagactttttcgat

SEQ ID NO: 155393 - DNA, 26 bp, Artificial sequence
  SiRNA target sequence
tgcaggtggtggagactttttcgata

SEQ ID NO: 155394 - DNA, 26 bp, Artificial sequence
  SiRNA target sequence
gcaggtggtggagactttttcgatat

SEQ ID NO: 155395 - DNA, 26 bp, Artificial sequence
  SiRNA target sequence
caggtggtggagactttttcgatatt

SEQ ID NO: 155396 - DNA, 26 bp, Artificial sequence
  SiRNA target sequence
aggtggtggagactttttcgatattt

SEQ ID NO: 155397 - DNA, 26 bp, Artificial sequence
  SiRNA target sequence
ggtggtggagactttttcgatatttt

SEQ ID NO: 155398 - DNA, 26 bp, Artificial sequence
  SiRNA target sequence
gtggtggagactttttcgatattttt

SEQ ID NO: 155399 - DNA, 26 bp, Artificial sequence
  SiRNA target sequence
tggtggagactttttcgatatttttt

SEQ ID NO: 155400 - DNA, 26 bp, Artificial sequence
  SiRNA target sequence
ggtggagactttttcgatattttttc

SEQ ID NO: 155401 - DNA, 26 bp, Artificial sequence
  SiRNA target sequence
gtggagactttttcgatattttttca

SEQ ID NO: 155402 - DNA, 26 bp, Artificial sequence
  SiRNA target sequence
tggagactttttcgatattttttcaa

SEQ ID NO: 155403 - DNA, 26 bp, Artificial sequence
  SiRNA target sequence
ggagactttttcgatattttttcaag

SEQ ID NO: 155404 - DNA, 26 bp, Artificial sequence
  SiRNA target sequence
gagactttttcgatattttttcaagt

SEQ ID NO: 155405 - DNA, 26 bp, Artificial sequence
  SiRNA target sequence
agactttttcgatattttttcaagtt

SEQ ID NO: 155406 - DNA, 26 bp, Artificial sequence
  SiRNA target sequence
gactttttcgatattttttcaagttt

SEQ ID NO: 155407 - DNA, 26 bp, Artificial sequence
  SiRNA target sequence
actttttcgatattttttcaagtttt

SEQ ID NO: 155408 - DNA, 26 bp, Artificial sequence
  SiRNA target sequence
ctttttcgatattttttcaagtttta

SEQ ID NO: 155409 - DNA, 26 bp, Artificial sequence
  SiRNA target sequence
tttttcgatattttttcaagttttac

SEQ ID NO: 155410 - DNA, 26 bp, Artificial sequence
  SiRNA target sequence
ttttcgatattttttcaagttttact

SEQ ID NO: 155411 - DNA, 26 bp, Artificial sequence
  SiRNA target sequence
tttcgatattttttcaagttttactg

SEQ ID NO: 155412 - DNA, 26 bp, Artificial sequence
  SiRNA target sequence
ttcgatattttttcaagttttactgg

SEQ ID NO: 155413 - DNA, 26 bp, Artificial sequence
  SiRNA target sequence
tcgatattttttcaagttttactggt

SEQ ID NO: 155414 - DNA, 26 bp, Artificial sequence
  SiRNA target sequence
cgatattttttcaagttttactggtg

SEQ ID NO: 155415 - DNA, 26 bp, Artificial sequence
  SiRNA target sequence
gatattttttcaagttttactggtgg

SEQ ID NO: 155416 - DNA, 26 bp, Artificial sequence
  SiRNA target sequence
atattttttcaagttttactggtgga

SEQ ID NO: 155417 - DNA, 26 bp, Artificial sequence
  SiRNA target sequence
tattttttcaagttttactggtggag

SEQ ID NO: 155418 - DNA, 26 bp, Artificial sequence
  SiRNA target sequence
attttttcaagttttactggtggagg

SEQ ID NO: 155419 - DNA, 26 bp, Artificial sequence
  SiRNA target sequence
ttttttcaagttttactggtggagga

SEQ ID NO: 155420 - DNA, 26 bp, Artificial sequence
  SiRNA target sequence
tttttcaagttttactggtggaggaa

SEQ ID NO: 155421 - DNA, 26 bp, Artificial sequence
  SiRNA target sequence
ttttcaagttttactggtggaggaag

SEQ ID NO: 155422 - DNA, 26 bp, Artificial sequence
  SiRNA target sequence
tttcaagttttactggtggaggaaga

SEQ ID NO: 155423 - DNA, 26 bp, Artificial sequence
  SiRNA target sequence
ttcaagttttactggtggaggaagaa

SEQ ID NO: 155424 - DNA, 26 bp, Artificial sequence
  SiRNA target sequence
tcaagttttactggtggaggaagaag

SEQ ID NO: 155425 - DNA, 26 bp, Artificial sequence
  SiRNA target sequence
caagttttactggtggaggaagaaga

SEQ ID NO: 155426 - DNA, 26 bp, Artificial sequence
  SiRNA target sequence
aagttttactggtggaggaagaagaa

SEQ ID NO: 155427 - DNA, 26 bp, Artificial sequence
  SiRNA target sequence
agttttactggtggaggaagaagaaa

SEQ ID NO: 155428 - DNA, 26 bp, Artificial sequence
  SiRNA target sequence
gttttactggtggaggaagaagaaat

SEQ ID NO: 155429 - DNA, 26 bp, Artificial sequence
  SiRNA target sequence
ttttactggtggaggaagaagaaatc

SEQ ID NO: 155430 - DNA, 26 bp, Artificial sequence
  SiRNA target sequence
tttactggtggaggaagaagaaatcg

SEQ ID NO: 155431 - DNA, 26 bp, Artificial sequence
  SiRNA target sequence
ttactggtggaggaagaagaaatcga

SEQ ID NO: 155432 - DNA, 26 bp, Artificial sequence
  SiRNA target sequence
tactggtggaggaagaagaaatcgag

SEQ ID NO: 155433 - DNA, 26 bp, Artificial sequence
  SiRNA target sequence
actggtggaggaagaagaaatcgagt

SEQ ID NO: 155434 - DNA, 26 bp, Artificial sequence
  SiRNA target sequence
ctggtggaggaagaagaaatcgagta

SEQ ID NO: 155435 - DNA, 26 bp, Artificial sequence
  SiRNA target sequence
tggtggaggaagaagaaatcgagtac

SEQ ID NO: 155436 - DNA, 26 bp, Artificial sequence
  SiRNA target sequence
ggtggaggaagaagaaatcgagtaca

SEQ ID NO: 155437 - DNA, 26 bp, Artificial sequence
  SiRNA target sequence
gtggaggaagaagaaatcgagtacaa

SEQ ID NO: 155438 - DNA, 26 bp, Artificial sequence
  SiRNA target sequence
tggaggaagaagaaatcgagtacaaa

SEQ ID NO: 155439 - DNA, 26 bp, Artificial sequence
  SiRNA target sequence
ggaggaagaagaaatcgagtacaaaa

SEQ ID NO: 155440 - DNA, 26 bp, Artificial sequence
  SiRNA target sequence
gaggaagaagaaatcgagtacaaaaa

SEQ ID NO: 155441 - DNA, 26 bp, Artificial sequence
  SiRNA target sequence
aggaagaagaaatcgagtacaaaaag

SEQ ID NO: 155442 - DNA, 26 bp, Artificial sequence
  SiRNA target sequence
ggaagaagaaatcgagtacaaaaagt

SEQ ID NO: 155443 - DNA, 26 bp, Artificial sequence
  SiRNA target sequence
gaagaagaaatcgagtacaaaaagtt

SEQ ID NO: 155444 - DNA, 26 bp, Artificial sequence
  SiRNA target sequence
aagaagaaatcgagtacaaaaagttc

SEQ ID NO: 155445 - DNA, 26 bp, Artificial sequence
  SiRNA target sequence
agaagaaatcgagtacaaaaagttca

SEQ ID NO: 155446 - DNA, 26 bp, Artificial sequence
  SiRNA target sequence
gaagaaatcgagtacaaaaagttcaa

SEQ ID NO: 155447 - DNA, 26 bp, Artificial sequence
  SiRNA target sequence
aagaaatcgagtacaaaaagttcaag

SEQ ID NO: 155448 - DNA, 26 bp, Artificial sequence
  SiRNA target sequence
agaaatcgagtacaaaaagttcaaga

SEQ ID NO: 155449 - DNA, 26 bp, Artificial sequence
  SiRNA target sequence
gaaatcgagtacaaaaagttcaagat

SEQ ID NO: 155450 - DNA, 26 bp, Artificial sequence
  SiRNA target sequence
aaatcgagtacaaaaagttcaagata

SEQ ID NO: 155451 - DNA, 26 bp, Artificial sequence
  SiRNA target sequence
aatcgagtacaaaaagttcaagatac

SEQ ID NO: 155452 - DNA, 26 bp, Artificial sequence
  SiRNA target sequence
atcgagtacaaaaagttcaagataca

SEQ ID NO: 155453 - DNA, 26 bp, Artificial sequence
  SiRNA target sequence
tcgagtacaaaaagttcaagatacag

SEQ ID NO: 155454 - DNA, 26 bp, Artificial sequence
  SiRNA target sequence
cgagtacaaaaagttcaagatacaga

SEQ ID NO: 155455 - DNA, 26 bp, Artificial sequence
  SiRNA target sequence
gagtacaaaaagttcaagatacagaa

SEQ ID NO: 155456 - DNA, 26 bp, Artificial sequence
  SiRNA target sequence
agtacaaaaagttcaagatacagaat

SEQ ID NO: 155457 - DNA, 26 bp, Artificial sequence
  SiRNA target sequence
gtacaaaaagttcaagatacagaata

SEQ ID NO: 155458 - DNA, 26 bp, Artificial sequence
  SiRNA target sequence
tacaaaaagttcaagatacagaatac

SEQ ID NO: 155459 - DNA, 26 bp, Artificial sequence
  SiRNA target sequence
acaaaaagttcaagatacagaatacg

SEQ ID NO: 155460 - DNA, 26 bp, Artificial sequence
  SiRNA target sequence
caaaaagttcaagatacagaatacga

SEQ ID NO: 155461 - DNA, 26 bp, Artificial sequence
  SiRNA target sequence
aaaaagttcaagatacagaatacgag

SEQ ID NO: 155462 - DNA, 26 bp, Artificial sequence
  SiRNA target sequence
aaaagttcaagatacagaatacgagt

SEQ ID NO: 155463 - DNA, 26 bp, Artificial sequence
  SiRNA target sequence
aaagttcaagatacagaatacgagtt

SEQ ID NO: 155464 - DNA, 26 bp, Artificial sequence
  SiRNA target sequence
aagttcaagatacagaatacgagttt

SEQ ID NO: 155465 - DNA, 26 bp, Artificial sequence
  SiRNA target sequence
agttcaagatacagaatacgagttta

SEQ ID NO: 155466 - DNA, 26 bp, Artificial sequence
  SiRNA target sequence
gttcaagatacagaatacgagtttaa

SEQ ID NO: 155467 - DNA, 26 bp, Artificial sequence
  SiRNA target sequence
ttcaagatacagaatacgagtttaat

SEQ ID NO: 155468 - DNA, 26 bp, Artificial sequence
  SiRNA target sequence
tcaagatacagaatacgagtttaata

SEQ ID NO: 155469 - DNA, 26 bp, Artificial sequence
  SiRNA target sequence
caagatacagaatacgagtttaatat

SEQ ID NO: 155470 - DNA, 26 bp, Artificial sequence
  SiRNA target sequence
aagatacagaatacgagtttaatatt

SEQ ID NO: 155471 - DNA, 26 bp, Artificial sequence
  SiRNA target sequence
agatacagaatacgagtttaatattt

SEQ ID NO: 155472 - DNA, 26 bp, Artificial sequence
  SiRNA target sequence
gatacagaatacgagtttaatatttc

SEQ ID NO: 155473 - DNA, 26 bp, Artificial sequence
  SiRNA target sequence
atacagaatacgagtttaatatttcg

SEQ ID NO: 155474 - DNA, 26 bp, Artificial sequence
  SiRNA target sequence
tacagaatacgagtttaatatttcgt

SEQ ID NO: 155475 - DNA, 26 bp, Artificial sequence
  SiRNA target sequence
acagaatacgagtttaatatttcgtt

SEQ ID NO: 155476 - DNA, 26 bp, Artificial sequence
  SiRNA target sequence
cagaatacgagtttaatatttcgttg

SEQ ID NO: 155477 - DNA, 26 bp, Artificial sequence
  SiRNA target sequence
agaatacgagtttaatatttcgttga

SEQ ID NO: 155478 - DNA, 26 bp, Artificial sequence
  SiRNA target sequence
gaatacgagtttaatatttcgttgaa

SEQ ID NO: 155479 - DNA, 26 bp, Artificial sequence
  SiRNA target sequence
aatacgagtttaatatttcgttgaag

SEQ ID NO: 155480 - DNA, 26 bp, Artificial sequence
  SiRNA target sequence
atacgagtttaatatttcgttgaagg

SEQ ID NO: 155481 - DNA, 26 bp, Artificial sequence
  SiRNA target sequence
tacgagtttaatatttcgttgaagga

SEQ ID NO: 155482 - DNA, 26 bp, Artificial sequence
  SiRNA target sequence
acgagtttaatatttcgttgaaggaa

SEQ ID NO: 155483 - DNA, 26 bp, Artificial sequence
  SiRNA target sequence
cgagtttaatatttcgttgaaggaag

SEQ ID NO: 155484 - DNA, 26 bp, Artificial sequence
  SiRNA target sequence
gagtttaatatttcgttgaaggaagc

SEQ ID NO: 155485 - DNA, 26 bp, Artificial sequence
  SiRNA target sequence
agtttaatatttcgttgaaggaagct

SEQ ID NO: 155486 - DNA, 26 bp, Artificial sequence
  SiRNA target sequence
gtttaatatttcgttgaaggaagctt

SEQ ID NO: 155487 - DNA, 26 bp, Artificial sequence
  SiRNA target sequence
tttaatatttcgttgaaggaagctta

SEQ ID NO: 155488 - DNA, 26 bp, Artificial sequence
  SiRNA target sequence
ttaatatttcgttgaaggaagcttat

SEQ ID NO: 155489 - DNA, 26 bp, Artificial sequence
  SiRNA target sequence
taatatttcgttgaaggaagcttata

SEQ ID NO: 155490 - DNA, 26 bp, Artificial sequence
  SiRNA target sequence
aatatttcgttgaaggaagcttatat

SEQ ID NO: 155491 - DNA, 26 bp, Artificial sequence
  SiRNA target sequence
atatttcgttgaaggaagcttatatg

SEQ ID NO: 155492 - DNA, 26 bp, Artificial sequence
  SiRNA target sequence
tatttcgttgaaggaagcttatatgg

SEQ ID NO: 155493 - DNA, 26 bp, Artificial sequence
  SiRNA target sequence
atttcgttgaaggaagcttatatggg

SEQ ID NO: 155494 - DNA, 26 bp, Artificial sequence
  SiRNA target sequence
tttcgttgaaggaagcttatatggga

SEQ ID NO: 155495 - DNA, 26 bp, Artificial sequence
  SiRNA target sequence
ttcgttgaaggaagcttatatgggaa

SEQ ID NO: 155496 - DNA, 26 bp, Artificial sequence
  SiRNA target sequence
tcgttgaaggaagcttatatgggaaa

SEQ ID NO: 155497 - DNA, 26 bp, Artificial sequence
  SiRNA target sequence
cgttgaaggaagcttatatgggaaag

SEQ ID NO: 155498 - DNA, 26 bp, Artificial sequence
  SiRNA target sequence
gttgaaggaagcttatatgggaaagc

SEQ ID NO: 155499 - DNA, 26 bp, Artificial sequence
  SiRNA target sequence
ttgaaggaagcttatatgggaaagcg

SEQ ID NO: 155500 - DNA, 26 bp, Artificial sequence
  SiRNA target sequence
tgaaggaagcttatatgggaaagcga

SEQ ID NO: 155501 - DNA, 26 bp, Artificial sequence
  SiRNA target sequence
gaaggaagcttatatgggaaagcgag

SEQ ID NO: 155502 - DNA, 26 bp, Artificial sequence
  SiRNA target sequence
aaggaagcttatatgggaaagcgagc

SEQ ID NO: 155503 - DNA, 26 bp, Artificial sequence
  SiRNA target sequence
aggaagcttatatgggaaagcgagct

SEQ ID NO: 155504 - DNA, 26 bp, Artificial sequence
  SiRNA target sequence
ggaagcttatatgggaaagcgagcta

SEQ ID NO: 155505 - DNA, 26 bp, Artificial sequence
  SiRNA target sequence
gaagcttatatgggaaagcgagctag

SEQ ID NO: 155506 - DNA, 26 bp, Artificial sequence
  SiRNA target sequence
aagcttatatgggaaagcgagctagt

SEQ ID NO: 155507 - DNA, 26 bp, Artificial sequence
  SiRNA target sequence
agcttatatgggaaagcgagctagtt

SEQ ID NO: 155508 - DNA, 26 bp, Artificial sequence
  SiRNA target sequence
gcttatatgggaaagcgagctagttt

SEQ ID NO: 155509 - DNA, 26 bp, Artificial sequence
  SiRNA target sequence
cttatatgggaaagcgagctagtttt

SEQ ID NO: 155510 - DNA, 26 bp, Artificial sequence
  SiRNA target sequence
ttatatgggaaagcgagctagtttta

SEQ ID NO: 155511 - DNA, 26 bp, Artificial sequence
  SiRNA target sequence
tatatgggaaagcgagctagttttaa

SEQ ID NO: 155512 - DNA, 26 bp, Artificial sequence
  SiRNA target sequence
atatgggaaagcgagctagttttaat

SEQ ID NO: 155513 - DNA, 26 bp, Artificial sequence
  SiRNA target sequence
tatgggaaagcgagctagttttaatg

SEQ ID NO: 155514 - DNA, 26 bp, Artificial sequence
  SiRNA target sequence
atgggaaagcgagctagttttaatgt

SEQ ID NO: 155515 - DNA, 26 bp, Artificial sequence
  SiRNA target sequence
tgggaaagcgagctagttttaatgta

SEQ ID NO: 155516 - DNA, 26 bp, Artificial sequence
  SiRNA target sequence
gggaaagcgagctagttttaatgtaa

SEQ ID NO: 155517 - DNA, 26 bp, Artificial sequence
  SiRNA target sequence
ggaaagcgagctagttttaatgtaaa

SEQ ID NO: 155518 - DNA, 26 bp, Artificial sequence
  SiRNA target sequence
gaaagcgagctagttttaatgtaaaa

SEQ ID NO: 155519 - DNA, 26 bp, Artificial sequence
  SiRNA target sequence
aaagcgagctagttttaatgtaaaag

SEQ ID NO: 155520 - DNA, 26 bp, Artificial sequence
  SiRNA target sequence
aagcgagctagttttaatgtaaaagt

SEQ ID NO: 155521 - DNA, 26 bp, Artificial sequence
  SiRNA target sequence
agcgagctagttttaatgtaaaagtg

SEQ ID NO: 155522 - DNA, 26 bp, Artificial sequence
  SiRNA target sequence
gcgagctagttttaatgtaaaagtgc

SEQ ID NO: 155523 - DNA, 26 bp, Artificial sequence
  SiRNA target sequence
cgagctagttttaatgtaaaagtgca

SEQ ID NO: 155524 - DNA, 26 bp, Artificial sequence
  SiRNA target sequence
gagctagttttaatgtaaaagtgcaa

SEQ ID NO: 155525 - DNA, 26 bp, Artificial sequence
  SiRNA target sequence
agctagttttaatgtaaaagtgcaaa

SEQ ID NO: 155526 - DNA, 26 bp, Artificial sequence
  SiRNA target sequence
gctagttttaatgtaaaagtgcaaag

SEQ ID NO: 155527 - DNA, 26 bp, Artificial sequence
  SiRNA target sequence
ctagttttaatgtaaaagtgcaaaga

SEQ ID NO: 155528 - DNA, 26 bp, Artificial sequence
  SiRNA target sequence
tagttttaatgtaaaagtgcaaagag

SEQ ID NO: 155529 - DNA, 26 bp, Artificial sequence
  SiRNA target sequence
agttttaatgtaaaagtgcaaagaga

SEQ ID NO: 155530 - DNA, 26 bp, Artificial sequence
  SiRNA target sequence
gttttaatgtaaaagtgcaaagagaa

SEQ ID NO: 155531 - DNA, 26 bp, Artificial sequence
  SiRNA target sequence
ttttaatgtaaaagtgcaaagagaat

SEQ ID NO: 155532 - DNA, 26 bp, Artificial sequence
  SiRNA target sequence
tttaatgtaaaagtgcaaagagaatg

SEQ ID NO: 155533 - DNA, 26 bp, Artificial sequence
  SiRNA target sequence
ttaatgtaaaagtgcaaagagaatgt

SEQ ID NO: 155534 - DNA, 26 bp, Artificial sequence
  SiRNA target sequence
taatgtaaaagtgcaaagagaatgtt

SEQ ID NO: 155535 - DNA, 26 bp, Artificial sequence
  SiRNA target sequence
aatgtaaaagtgcaaagagaatgttc

SEQ ID NO: 155536 - DNA, 26 bp, Artificial sequence
  SiRNA target sequence
atgtaaaagtgcaaagagaatgttct

SEQ ID NO: 155537 - DNA, 26 bp, Artificial sequence
  SiRNA target sequence
tgtaaaagtgcaaagagaatgttctg

SEQ ID NO: 155538 - DNA, 26 bp, Artificial sequence
  SiRNA target sequence
gtaaaagtgcaaagagaatgttctgc

SEQ ID NO: 155539 - DNA, 26 bp, Artificial sequence
  SiRNA target sequence
taaaagtgcaaagagaatgttctgcg

SEQ ID NO: 155540 - DNA, 26 bp, Artificial sequence
  SiRNA target sequence
aaaagtgcaaagagaatgttctgcgt

SEQ ID NO: 155541 - DNA, 26 bp, Artificial sequence
  SiRNA target sequence
aaagtgcaaagagaatgttctgcgtg

SEQ ID NO: 155542 - DNA, 26 bp, Artificial sequence
  SiRNA target sequence
aagtgcaaagagaatgttctgcgtgt

SEQ ID NO: 155543 - DNA, 26 bp, Artificial sequence
  SiRNA target sequence
agtgcaaagagaatgttctgcgtgta

SEQ ID NO: 155544 - DNA, 26 bp, Artificial sequence
  SiRNA target sequence
gtgcaaagagaatgttctgcgtgtaa

SEQ ID NO: 155545 - DNA, 26 bp, Artificial sequence
  SiRNA target sequence
tgcaaagagaatgttctgcgtgtaac

SEQ ID NO: 155546 - DNA, 26 bp, Artificial sequence
  SiRNA target sequence
gcaaagagaatgttctgcgtgtaacg

SEQ ID NO: 155547 - DNA, 26 bp, Artificial sequence
  SiRNA target sequence
caaagagaatgttctgcgtgtaacgg

SEQ ID NO: 155548 - DNA, 26 bp, Artificial sequence
  SiRNA target sequence
aaagagaatgttctgcgtgtaacggt

SEQ ID NO: 155549 - DNA, 26 bp, Artificial sequence
  SiRNA target sequence
aagagaatgttctgcgtgtaacggta

SEQ ID NO: 155550 - DNA, 26 bp, Artificial sequence
  SiRNA target sequence
agagaatgttctgcgtgtaacggtaa

SEQ ID NO: 155551 - DNA, 26 bp, Artificial sequence
  SiRNA target sequence
gagaatgttctgcgtgtaacggtaaa

SEQ ID NO: 155552 - DNA, 26 bp, Artificial sequence
  SiRNA target sequence
agaatgttctgcgtgtaacggtaaag

SEQ ID NO: 155553 - DNA, 26 bp, Artificial sequence
  SiRNA target sequence
gaatgttctgcgtgtaacggtaaagg

SEQ ID NO: 155554 - DNA, 26 bp, Artificial sequence
  SiRNA target sequence
aatgttctgcgtgtaacggtaaagga

SEQ ID NO: 155555 - DNA, 26 bp, Artificial sequence
  SiRNA target sequence
atgttctgcgtgtaacggtaaaggag

SEQ ID NO: 155556 - DNA, 26 bp, Artificial sequence
  SiRNA target sequence
tgttctgcgtgtaacggtaaaggagg

SEQ ID NO: 155557 - DNA, 26 bp, Artificial sequence
  SiRNA target sequence
gttctgcgtgtaacggtaaaggagga

SEQ ID NO: 155558 - DNA, 26 bp, Artificial sequence
  SiRNA target sequence
ttctgcgtgtaacggtaaaggaggag

SEQ ID NO: 155559 - DNA, 26 bp, Artificial sequence
  SiRNA target sequence
tctgcgtgtaacggtaaaggaggaga

SEQ ID NO: 155560 - DNA, 26 bp, Artificial sequence
  SiRNA target sequence
ctgcgtgtaacggtaaaggaggagac

SEQ ID NO: 155561 - DNA, 26 bp, Artificial sequence
  SiRNA target sequence
tgcgtgtaacggtaaaggaggagaca

SEQ ID NO: 155562 - DNA, 26 bp, Artificial sequence
  SiRNA target sequence
gcgtgtaacggtaaaggaggagacag

SEQ ID NO: 155563 - DNA, 26 bp, Artificial sequence
  SiRNA target sequence
cgtgtaacggtaaaggaggagacagt

SEQ ID NO: 155564 - DNA, 26 bp, Artificial sequence
  SiRNA target sequence
gtgtaacggtaaaggaggagacagtg

SEQ ID NO: 155565 - DNA, 26 bp, Artificial sequence
  SiRNA target sequence
tgtaacggtaaaggaggagacagtgt

SEQ ID NO: 155566 - DNA, 26 bp, Artificial sequence
  SiRNA target sequence
gtaacggtaaaggaggagacagtgtt

SEQ ID NO: 155567 - DNA, 26 bp, Artificial sequence
  SiRNA target sequence
taacggtaaaggaggagacagtgttg

SEQ ID NO: 155568 - DNA, 26 bp, Artificial sequence
  SiRNA target sequence
aacggtaaaggaggagacagtgttga

SEQ ID NO: 155569 - DNA, 26 bp, Artificial sequence
  SiRNA target sequence
acggtaaaggaggagacagtgttgaa

SEQ ID NO: 155570 - DNA, 26 bp, Artificial sequence
  SiRNA target sequence
cggtaaaggaggagacagtgttgaaa

SEQ ID NO: 155571 - DNA, 26 bp, Artificial sequence
  SiRNA target sequence
ggtaaaggaggagacagtgttgaaac

SEQ ID NO: 155572 - DNA, 26 bp, Artificial sequence
  SiRNA target sequence
gtaaaggaggagacagtgttgaaaca

SEQ ID NO: 155573 - DNA, 26 bp, Artificial sequence
  SiRNA target sequence
taaaggaggagacagtgttgaaacat

SEQ ID NO: 155574 - DNA, 26 bp, Artificial sequence
  SiRNA target sequence
aaaggaggagacagtgttgaaacatg

SEQ ID NO: 155575 - DNA, 26 bp, Artificial sequence
  SiRNA target sequence
aaggaggagacagtgttgaaacatgt

SEQ ID NO: 155576 - DNA, 26 bp, Artificial sequence
  SiRNA target sequence
aggaggagacagtgttgaaacatgtg

SEQ ID NO: 155577 - DNA, 26 bp, Artificial sequence
  SiRNA target sequence
ggaggagacagtgttgaaacatgtga

SEQ ID NO: 155578 - DNA, 26 bp, Artificial sequence
  SiRNA target sequence
gaggagacagtgttgaaacatgtgaa

SEQ ID NO: 155579 - DNA, 26 bp, Artificial sequence
  SiRNA target sequence
aggagacagtgttgaaacatgtgaac

SEQ ID NO: 155580 - DNA, 26 bp, Artificial sequence
  SiRNA target sequence
ggagacagtgttgaaacatgtgaacc

SEQ ID NO: 155581 - DNA, 26 bp, Artificial sequence
  SiRNA target sequence
gagacagtgttgaaacatgtgaacca

SEQ ID NO: 155582 - DNA, 26 bp, Artificial sequence
  SiRNA target sequence
agacagtgttgaaacatgtgaaccat

SEQ ID NO: 155583 - DNA, 26 bp, Artificial sequence
  SiRNA target sequence
gacagtgttgaaacatgtgaaccatg

SEQ ID NO: 155584 - DNA, 26 bp, Artificial sequence
  SiRNA target sequence
acagtgttgaaacatgtgaaccatgt

SEQ ID NO: 155585 - DNA, 26 bp, Artificial sequence
  SiRNA target sequence
cagtgttgaaacatgtgaaccatgta

SEQ ID NO: 155586 - DNA, 26 bp, Artificial sequence
  SiRNA target sequence
agtgttgaaacatgtgaaccatgtaa

SEQ ID NO: 155587 - DNA, 26 bp, Artificial sequence
  SiRNA target sequence
gtgttgaaacatgtgaaccatgtaaa

SEQ ID NO: 155588 - DNA, 26 bp, Artificial sequence
  SiRNA target sequence
tgttgaaacatgtgaaccatgtaaag

SEQ ID NO: 155589 - DNA, 26 bp, Artificial sequence
  SiRNA target sequence
gttgaaacatgtgaaccatgtaaagg

SEQ ID NO: 155590 - DNA, 26 bp, Artificial sequence
  SiRNA target sequence
ttgaaacatgtgaaccatgtaaaggt

SEQ ID NO: 155591 - DNA, 26 bp, Artificial sequence
  SiRNA target sequence
tgaaacatgtgaaccatgtaaaggta

SEQ ID NO: 155592 - DNA, 26 bp, Artificial sequence
  SiRNA target sequence
gaaacatgtgaaccatgtaaaggtaa

SEQ ID NO: 155593 - DNA, 26 bp, Artificial sequence
  SiRNA target sequence
aaacatgtgaaccatgtaaaggtaaa

SEQ ID NO: 155594 - DNA, 26 bp, Artificial sequence
  SiRNA target sequence
aacatgtgaaccatgtaaaggtaaag

SEQ ID NO: 155595 - DNA, 26 bp, Artificial sequence
  SiRNA target sequence
acatgtgaaccatgtaaaggtaaagg

SEQ ID NO: 155596 - DNA, 26 bp, Artificial sequence
  SiRNA target sequence
catgtgaaccatgtaaaggtaaaggt

SEQ ID NO: 155597 - DNA, 26 bp, Artificial sequence
  SiRNA target sequence
atgtgaaccatgtaaaggtaaaggta

SEQ ID NO: 155598 - DNA, 26 bp, Artificial sequence
  SiRNA target sequence
tgtgaaccatgtaaaggtaaaggtaa

SEQ ID NO: 155599 - DNA, 26 bp, Artificial sequence
  SiRNA target sequence
gtgaaccatgtaaaggtaaaggtaag

SEQ ID NO: 155600 - DNA, 26 bp, Artificial sequence
  SiRNA target sequence
tgaaccatgtaaaggtaaaggtaagg

SEQ ID NO: 155601 - DNA, 26 bp, Artificial sequence
  SiRNA target sequence
gaaccatgtaaaggtaaaggtaaggt

SEQ ID NO: 155602 - DNA, 26 bp, Artificial sequence
  SiRNA target sequence
aaccatgtaaaggtaaaggtaaggta

SEQ ID NO: 155603 - DNA, 26 bp, Artificial sequence
  SiRNA target sequence
accatgtaaaggtaaaggtaaggtag

SEQ ID NO: 155604 - DNA, 26 bp, Artificial sequence
  SiRNA target sequence
ccatgtaaaggtaaaggtaaggtaga

SEQ ID NO: 155605 - DNA, 26 bp, Artificial sequence
  SiRNA target sequence
catgtaaaggtaaaggtaaggtagaa

SEQ ID NO: 155606 - DNA, 26 bp, Artificial sequence
  SiRNA target sequence
atgtaaaggtaaaggtaaggtagaac

SEQ ID NO: 155607 - DNA, 26 bp, Artificial sequence
  SiRNA target sequence
tgtaaaggtaaaggtaaggtagaaca

SEQ ID NO: 155608 - DNA, 26 bp, Artificial sequence
  SiRNA target sequence
gtaaaggtaaaggtaaggtagaacat

SEQ ID NO: 155609 - DNA, 26 bp, Artificial sequence
  SiRNA target sequence
taaaggtaaaggtaaggtagaacatc

SEQ ID NO: 155610 - DNA, 26 bp, Artificial sequence
  SiRNA target sequence
aaaggtaaaggtaaggtagaacatca

SEQ ID NO: 155611 - DNA, 26 bp, Artificial sequence
  SiRNA target sequence
aaggtaaaggtaaggtagaacatcat

SEQ ID NO: 155612 - DNA, 26 bp, Artificial sequence
  SiRNA target sequence
aggtaaaggtaaggtagaacatcata

SEQ ID NO: 155613 - DNA, 26 bp, Artificial sequence
  SiRNA target sequence
ggtaaaggtaaggtagaacatcatag

SEQ ID NO: 155614 - DNA, 26 bp, Artificial sequence
  SiRNA target sequence
gtaaaggtaaggtagaacatcatagg

SEQ ID NO: 155615 - DNA, 26 bp, Artificial sequence
  SiRNA target sequence
taaaggtaaggtagaacatcatagga

SEQ ID NO: 155616 - DNA, 26 bp, Artificial sequence
  SiRNA target sequence
aaaggtaaggtagaacatcataggag

SEQ ID NO: 155617 - DNA, 26 bp, Artificial sequence
  SiRNA target sequence
aaggtaaggtagaacatcataggaga

SEQ ID NO: 155618 - DNA, 26 bp, Artificial sequence
  SiRNA target sequence
aggtaaggtagaacatcataggagac

SEQ ID NO: 155619 - DNA, 26 bp, Artificial sequence
  SiRNA target sequence
ggtaaggtagaacatcataggagact

SEQ ID NO: 155620 - DNA, 26 bp, Artificial sequence
  SiRNA target sequence
gtaaggtagaacatcataggagacta

SEQ ID NO: 155621 - DNA, 26 bp, Artificial sequence
  SiRNA target sequence
taaggtagaacatcataggagactag

SEQ ID NO: 155622 - DNA, 26 bp, Artificial sequence
  SiRNA target sequence
aaggtagaacatcataggagactagg

SEQ ID NO: 155623 - DNA, 26 bp, Artificial sequence
  SiRNA target sequence
aggtagaacatcataggagactaggt

SEQ ID NO: 155624 - DNA, 26 bp, Artificial sequence
  SiRNA target sequence
ggtagaacatcataggagactaggtc

SEQ ID NO: 155625 - DNA, 26 bp, Artificial sequence
  SiRNA target sequence
gtagaacatcataggagactaggtcc

SEQ ID NO: 155626 - DNA, 26 bp, Artificial sequence
  SiRNA target sequence
tagaacatcataggagactaggtcct

SEQ ID NO: 155627 - DNA, 26 bp, Artificial sequence
  SiRNA target sequence
agaacatcataggagactaggtcctt

SEQ ID NO: 155628 - DNA, 26 bp, Artificial sequence
  SiRNA target sequence
gaacatcataggagactaggtccttt

SEQ ID NO: 155629 - DNA, 26 bp, Artificial sequence
  SiRNA target sequence
aacatcataggagactaggtccttta

SEQ ID NO: 155630 - DNA, 26 bp, Artificial sequence
  SiRNA target sequence
acatcataggagactaggtcctttaa

SEQ ID NO: 155631 - DNA, 26 bp, Artificial sequence
  SiRNA target sequence
catcataggagactaggtcctttaat

SEQ ID NO: 155632 - DNA, 26 bp, Artificial sequence
  SiRNA target sequence
atcataggagactaggtcctttaatt

SEQ ID NO: 155633 - DNA, 26 bp, Artificial sequence
  SiRNA target sequence
tcataggagactaggtcctttaattt

SEQ ID NO: 155634 - DNA, 26 bp, Artificial sequence
  SiRNA target sequence
cataggagactaggtcctttaatttc

SEQ ID NO: 155635 - DNA, 26 bp, Artificial sequence
  SiRNA target sequence
ataggagactaggtcctttaatttct

SEQ ID NO: 155636 - DNA, 26 bp, Artificial sequence
  SiRNA target sequence
taggagactaggtcctttaatttctg

SEQ ID NO: 155637 - DNA, 26 bp, Artificial sequence
  SiRNA target sequence
aggagactaggtcctttaatttctgt

SEQ ID NO: 155638 - DNA, 26 bp, Artificial sequence
  SiRNA target sequence
ggagactaggtcctttaatttctgta

SEQ ID NO: 155639 - DNA, 26 bp, Artificial sequence
  SiRNA target sequence
gagactaggtcctttaatttctgtac

SEQ ID NO: 155640 - DNA, 26 bp, Artificial sequence
  SiRNA target sequence
agactaggtcctttaatttctgtaca

SEQ ID NO: 155641 - DNA, 26 bp, Artificial sequence
  SiRNA target sequence
gactaggtcctttaatttctgtacaa

SEQ ID NO: 155642 - DNA, 26 bp, Artificial sequence
  SiRNA target sequence
actaggtcctttaatttctgtacaag

SEQ ID NO: 155643 - DNA, 26 bp, Artificial sequence
  SiRNA target sequence
ctaggtcctttaatttctgtacaaga

SEQ ID NO: 155644 - DNA, 26 bp, Artificial sequence
  SiRNA target sequence
taggtcctttaatttctgtacaagaa

SEQ ID NO: 155645 - DNA, 26 bp, Artificial sequence
  SiRNA target sequence
aggtcctttaatttctgtacaagaag

SEQ ID NO: 155646 - DNA, 26 bp, Artificial sequence
  SiRNA target sequence
ggtcctttaatttctgtacaagaagc

SEQ ID NO: 155647 - DNA, 26 bp, Artificial sequence
  SiRNA target sequence
gtcctttaatttctgtacaagaagca

SEQ ID NO: 155648 - DNA, 26 bp, Artificial sequence
  SiRNA target sequence
tcctttaatttctgtacaagaagcac

SEQ ID NO: 155649 - DNA, 26 bp, Artificial sequence
  SiRNA target sequence
cctttaatttctgtacaagaagcacc

SEQ ID NO: 155650 - DNA, 26 bp, Artificial sequence
  SiRNA target sequence
ctttaatttctgtacaagaagcacct

SEQ ID NO: 155651 - DNA, 26 bp, Artificial sequence
  SiRNA target sequence
tttaatttctgtacaagaagcacctt

SEQ ID NO: 155652 - DNA, 26 bp, Artificial sequence
  SiRNA target sequence
ttaatttctgtacaagaagcaccttg

SEQ ID NO: 155653 - DNA, 26 bp, Artificial sequence
  SiRNA target sequence
taatttctgtacaagaagcaccttgt

SEQ ID NO: 155654 - DNA, 26 bp, Artificial sequence
  SiRNA target sequence
aatttctgtacaagaagcaccttgta

SEQ ID NO: 155655 - DNA, 26 bp, Artificial sequence
  SiRNA target sequence
atttctgtacaagaagcaccttgtaa

SEQ ID NO: 155656 - DNA, 26 bp, Artificial sequence
  SiRNA target sequence
tttctgtacaagaagcaccttgtaat

SEQ ID NO: 155657 - DNA, 26 bp, Artificial sequence
  SiRNA target sequence
ttctgtacaagaagcaccttgtaata

SEQ ID NO: 155658 - DNA, 26 bp, Artificial sequence
  SiRNA target sequence
tctgtacaagaagcaccttgtaataa

SEQ ID NO: 155659 - DNA, 26 bp, Artificial sequence
  SiRNA target sequence
ctgtacaagaagcaccttgtaataat

SEQ ID NO: 155660 - DNA, 26 bp, Artificial sequence
  SiRNA target sequence
tgtacaagaagcaccttgtaataatt

SEQ ID NO: 155661 - DNA, 26 bp, Artificial sequence
  SiRNA target sequence
gtacaagaagcaccttgtaataattg

SEQ ID NO: 155662 - DNA, 26 bp, Artificial sequence
  SiRNA target sequence
tacaagaagcaccttgtaataattgt

SEQ ID NO: 155663 - DNA, 26 bp, Artificial sequence
  SiRNA target sequence
acaagaagcaccttgtaataattgta

SEQ ID NO: 155664 - DNA, 26 bp, Artificial sequence
  SiRNA target sequence
caagaagcaccttgtaataattgtaa

SEQ ID NO: 155665 - DNA, 26 bp, Artificial sequence
  SiRNA target sequence
aagaagcaccttgtaataattgtaat

SEQ ID NO: 155666 - DNA, 26 bp, Artificial sequence
  SiRNA target sequence
agaagcaccttgtaataattgtaatt

SEQ ID NO: 155667 - DNA, 26 bp, Artificial sequence
  SiRNA target sequence
gaagcaccttgtaataattgtaattc

SEQ ID NO: 155668 - DNA, 26 bp, Artificial sequence
  SiRNA target sequence
aagcaccttgtaataattgtaattct

SEQ ID NO: 155669 - DNA, 26 bp, Artificial sequence
  SiRNA target sequence
agcaccttgtaataattgtaattcta

SEQ ID NO: 155670 - DNA, 26 bp, Artificial sequence
  SiRNA target sequence
gcaccttgtaataattgtaattctac

SEQ ID NO: 155671 - DNA, 26 bp, Artificial sequence
  SiRNA target sequence
caccttgtaataattgtaattctact

SEQ ID NO: 155672 - DNA, 26 bp, Artificial sequence
  SiRNA target sequence
accttgtaataattgtaattctactg

SEQ ID NO: 155673 - DNA, 26 bp, Artificial sequence
  SiRNA target sequence
ccttgtaataattgtaattctactgg

SEQ ID NO: 155674 - DNA, 26 bp, Artificial sequence
  SiRNA target sequence
cttgtaataattgtaattctactgga

SEQ ID NO: 155675 - DNA, 26 bp, Artificial sequence
  SiRNA target sequence
ttgtaataattgtaattctactggat

SEQ ID NO: 155676 - DNA, 26 bp, Artificial sequence
  SiRNA target sequence
tgtaataattgtaattctactggatt

SEQ ID NO: 155677 - DNA, 26 bp, Artificial sequence
  SiRNA target sequence
gtaataattgtaattctactggattt

SEQ ID NO: 155678 - DNA, 26 bp, Artificial sequence
  SiRNA target sequence
taataattgtaattctactggatttg

SEQ ID NO: 155679 - DNA, 26 bp, Artificial sequence
  SiRNA target sequence
aataattgtaattctactggatttgt

SEQ ID NO: 155680 - DNA, 26 bp, Artificial sequence
  SiRNA target sequence
ataattgtaattctactggatttgtt

SEQ ID NO: 155681 - DNA, 26 bp, Artificial sequence
  SiRNA target sequence
taattgtaattctactggatttgttg

SEQ ID NO: 155682 - DNA, 26 bp, Artificial sequence
  SiRNA target sequence
aattgtaattctactggatttgttgt

SEQ ID NO: 155683 - DNA, 26 bp, Artificial sequence
  SiRNA target sequence
attgtaattctactggatttgttgtt

SEQ ID NO: 155684 - DNA, 26 bp, Artificial sequence
  SiRNA target sequence
ttgtaattctactggatttgttgtta

SEQ ID NO: 155685 - DNA, 26 bp, Artificial sequence
  SiRNA target sequence
tgtaattctactggatttgttgttaa

SEQ ID NO: 155686 - DNA, 26 bp, Artificial sequence
  SiRNA target sequence
gtaattctactggatttgttgttaaa

SEQ ID NO: 155687 - DNA, 26 bp, Artificial sequence
  SiRNA target sequence
taattctactggatttgttgttaaag

SEQ ID NO: 155688 - DNA, 26 bp, Artificial sequence
  SiRNA target sequence
aattctactggatttgttgttaaagg

SEQ ID NO: 155689 - DNA, 26 bp, Artificial sequence
  SiRNA target sequence
attctactggatttgttgttaaagga

SEQ ID NO: 155690 - DNA, 26 bp, Artificial sequence
  SiRNA target sequence
ttctactggatttgttgttaaaggaa

SEQ ID NO: 155691 - DNA, 26 bp, Artificial sequence
  SiRNA target sequence
tctactggatttgttgttaaaggaaa

SEQ ID NO: 155692 - DNA, 26 bp, Artificial sequence
  SiRNA target sequence
ctactggatttgttgttaaaggaaag

SEQ ID NO: 155693 - DNA, 26 bp, Artificial sequence
  SiRNA target sequence
tactggatttgttgttaaaggaaagc

SEQ ID NO: 155694 - DNA, 26 bp, Artificial sequence
  SiRNA target sequence
actggatttgttgttaaaggaaagct

SEQ ID NO: 155695 - DNA, 26 bp, Artificial sequence
  SiRNA target sequence
ctggatttgttgttaaaggaaagctt

SEQ ID NO: 155696 - DNA, 26 bp, Artificial sequence
  SiRNA target sequence
tggatttgttgttaaaggaaagcttt

SEQ ID NO: 155697 - DNA, 26 bp, Artificial sequence
  SiRNA target sequence
ggatttgttgttaaaggaaagctttg

SEQ ID NO: 155698 - DNA, 26 bp, Artificial sequence
  SiRNA target sequence
gatttgttgttaaaggaaagctttgt

SEQ ID NO: 155699 - DNA, 26 bp, Artificial sequence
  SiRNA target sequence
atttgttgttaaaggaaagctttgtc

SEQ ID NO: 155700 - DNA, 26 bp, Artificial sequence
  SiRNA target sequence
tttgttgttaaaggaaagctttgtca

SEQ ID NO: 155701 - DNA, 26 bp, Artificial sequence
  SiRNA target sequence
ttgttgttaaaggaaagctttgtcaa

SEQ ID NO: 155702 - DNA, 26 bp, Artificial sequence
  SiRNA target sequence
tgttgttaaaggaaagctttgtcaaa

SEQ ID NO: 155703 - DNA, 26 bp, Artificial sequence
  SiRNA target sequence
gttgttaaaggaaagctttgtcaaag

SEQ ID NO: 155704 - DNA, 26 bp, Artificial sequence
  SiRNA target sequence
ttgttaaaggaaagctttgtcaaagt

SEQ ID NO: 155705 - DNA, 26 bp, Artificial sequence
  SiRNA target sequence
tgttaaaggaaagctttgtcaaagtt

SEQ ID NO: 155706 - DNA, 26 bp, Artificial sequence
  SiRNA target sequence
gttaaaggaaagctttgtcaaagttg

SEQ ID NO: 155707 - DNA, 26 bp, Artificial sequence
  SiRNA target sequence
ttaaaggaaagctttgtcaaagttgt

SEQ ID NO: 155708 - DNA, 26 bp, Artificial sequence
  SiRNA target sequence
taaaggaaagctttgtcaaagttgta

SEQ ID NO: 155709 - DNA, 26 bp, Artificial sequence
  SiRNA target sequence
aaaggaaagctttgtcaaagttgtaa

SEQ ID NO: 155710 - DNA, 26 bp, Artificial sequence
  SiRNA target sequence
aaggaaagctttgtcaaagttgtaaa

SEQ ID NO: 155711 - DNA, 26 bp, Artificial sequence
  SiRNA target sequence
aggaaagctttgtcaaagttgtaaag

SEQ ID NO: 155712 - DNA, 26 bp, Artificial sequence
  SiRNA target sequence
ggaaagctttgtcaaagttgtaaagg

SEQ ID NO: 155713 - DNA, 26 bp, Artificial sequence
  SiRNA target sequence
gaaagctttgtcaaagttgtaaaggt

SEQ ID NO: 155714 - DNA, 26 bp, Artificial sequence
  SiRNA target sequence
aaagctttgtcaaagttgtaaaggta

SEQ ID NO: 155715 - DNA, 26 bp, Artificial sequence
  SiRNA target sequence
aagctttgtcaaagttgtaaaggtaa

SEQ ID NO: 155716 - DNA, 26 bp, Artificial sequence
  SiRNA target sequence
agctttgtcaaagttgtaaaggtaaa

SEQ ID NO: 155717 - DNA, 26 bp, Artificial sequence
  SiRNA target sequence
gctttgtcaaagttgtaaaggtaaac

SEQ ID NO: 155718 - DNA, 26 bp, Artificial sequence
  SiRNA target sequence
ctttgtcaaagttgtaaaggtaaaca

SEQ ID NO: 155719 - DNA, 26 bp, Artificial sequence
  SiRNA target sequence
tttgtcaaagttgtaaaggtaaacaa

SEQ ID NO: 155720 - DNA, 26 bp, Artificial sequence
  SiRNA target sequence
ttgtcaaagttgtaaaggtaaacaat

SEQ ID NO: 155721 - DNA, 26 bp, Artificial sequence
  SiRNA target sequence
tgtcaaagttgtaaaggtaaacaata

SEQ ID NO: 155722 - DNA, 26 bp, Artificial sequence
  SiRNA target sequence
gtcaaagttgtaaaggtaaacaatac

SEQ ID NO: 155723 - DNA, 26 bp, Artificial sequence
  SiRNA target sequence
tcaaagttgtaaaggtaaacaatacg

SEQ ID NO: 155724 - DNA, 26 bp, Artificial sequence
  SiRNA target sequence
caaagttgtaaaggtaaacaatacgt

SEQ ID NO: 155725 - DNA, 26 bp, Artificial sequence
  SiRNA target sequence
aaagttgtaaaggtaaacaatacgtt

SEQ ID NO: 155726 - DNA, 26 bp, Artificial sequence
  SiRNA target sequence
aagttgtaaaggtaaacaatacgttg

SEQ ID NO: 155727 - DNA, 26 bp, Artificial sequence
  SiRNA target sequence
agttgtaaaggtaaacaatacgttga

SEQ ID NO: 155728 - DNA, 26 bp, Artificial sequence
  SiRNA target sequence
gttgtaaaggtaaacaatacgttgag

SEQ ID NO: 155729 - DNA, 26 bp, Artificial sequence
  SiRNA target sequence
ttgtaaaggtaaacaatacgttgaga

SEQ ID NO: 155730 - DNA, 26 bp, Artificial sequence
  SiRNA target sequence
tgtaaaggtaaacaatacgttgagac

SEQ ID NO: 155731 - DNA, 26 bp, Artificial sequence
  SiRNA target sequence
gtaaaggtaaacaatacgttgagact

SEQ ID NO: 155732 - DNA, 26 bp, Artificial sequence
  SiRNA target sequence
taaaggtaaacaatacgttgagacta

SEQ ID NO: 155733 - DNA, 26 bp, Artificial sequence
  SiRNA target sequence
aaaggtaaacaatacgttgagactaa

SEQ ID NO: 155734 - DNA, 26 bp, Artificial sequence
  SiRNA target sequence
aaggtaaacaatacgttgagactaaa

SEQ ID NO: 155735 - DNA, 26 bp, Artificial sequence
  SiRNA target sequence
aggtaaacaatacgttgagactaaag

SEQ ID NO: 155736 - DNA, 26 bp, Artificial sequence
  SiRNA target sequence
ggtaaacaatacgttgagactaaaga

SEQ ID NO: 155737 - DNA, 26 bp, Artificial sequence
  SiRNA target sequence
gtaaacaatacgttgagactaaagaa

SEQ ID NO: 155738 - DNA, 26 bp, Artificial sequence
  SiRNA target sequence
taaacaatacgttgagactaaagaac

SEQ ID NO: 155739 - DNA, 26 bp, Artificial sequence
  SiRNA target sequence
aaacaatacgttgagactaaagaaca

SEQ ID NO: 155740 - DNA, 26 bp, Artificial sequence
  SiRNA target sequence
aacaatacgttgagactaaagaacat

SEQ ID NO: 155741 - DNA, 26 bp, Artificial sequence
  SiRNA target sequence
acaatacgttgagactaaagaacata

SEQ ID NO: 155742 - DNA, 26 bp, Artificial sequence
  SiRNA target sequence
caatacgttgagactaaagaacatat

SEQ ID NO: 155743 - DNA, 26 bp, Artificial sequence
  SiRNA target sequence
aatacgttgagactaaagaacatatt

SEQ ID NO: 155744 - DNA, 26 bp, Artificial sequence
  SiRNA target sequence
atacgttgagactaaagaacatattg

SEQ ID NO: 155745 - DNA, 26 bp, Artificial sequence
  SiRNA target sequence
tacgttgagactaaagaacatattga

SEQ ID NO: 155746 - DNA, 26 bp, Artificial sequence
  SiRNA target sequence
acgttgagactaaagaacatattgaa

SEQ ID NO: 155747 - DNA, 26 bp, Artificial sequence
  SiRNA target sequence
cgttgagactaaagaacatattgaag

SEQ ID NO: 155748 - DNA, 26 bp, Artificial sequence
  SiRNA target sequence
gttgagactaaagaacatattgaagt

SEQ ID NO: 155749 - DNA, 26 bp, Artificial sequence
  SiRNA target sequence
ttgagactaaagaacatattgaagtg

SEQ ID NO: 155750 - DNA, 26 bp, Artificial sequence
  SiRNA target sequence
tgagactaaagaacatattgaagtgg

SEQ ID NO: 155751 - DNA, 26 bp, Artificial sequence
  SiRNA target sequence
gagactaaagaacatattgaagtgga

SEQ ID NO: 155752 - DNA, 26 bp, Artificial sequence
  SiRNA target sequence
agactaaagaacatattgaagtggaa

SEQ ID NO: 155753 - DNA, 26 bp, Artificial sequence
  SiRNA target sequence
gactaaagaacatattgaagtggaag

SEQ ID NO: 155754 - DNA, 26 bp, Artificial sequence
  SiRNA target sequence
actaaagaacatattgaagtggaagt

SEQ ID NO: 155755 - DNA, 26 bp, Artificial sequence
  SiRNA target sequence
ctaaagaacatattgaagtggaagta

SEQ ID NO: 155756 - DNA, 26 bp, Artificial sequence
  SiRNA target sequence
taaagaacatattgaagtggaagtag

SEQ ID NO: 155757 - DNA, 26 bp, Artificial sequence
  SiRNA target sequence
aaagaacatattgaagtggaagtaga

SEQ ID NO: 155758 - DNA, 26 bp, Artificial sequence
  SiRNA target sequence
aagaacatattgaagtggaagtagag

SEQ ID NO: 155759 - DNA, 26 bp, Artificial sequence
  SiRNA target sequence
agaacatattgaagtggaagtagagc

SEQ ID NO: 155760 - DNA, 26 bp, Artificial sequence
  SiRNA target sequence
gaacatattgaagtggaagtagagcc

SEQ ID NO: 155761 - DNA, 26 bp, Artificial sequence
  SiRNA target sequence
aacatattgaagtggaagtagagcca

SEQ ID NO: 155762 - DNA, 26 bp, Artificial sequence
  SiRNA target sequence
acatattgaagtggaagtagagccag

SEQ ID NO: 155763 - DNA, 26 bp, Artificial sequence
  SiRNA target sequence
catattgaagtggaagtagagccagg

SEQ ID NO: 155764 - DNA, 26 bp, Artificial sequence
  SiRNA target sequence
atattgaagtggaagtagagccagga

SEQ ID NO: 155765 - DNA, 26 bp, Artificial sequence
  SiRNA target sequence
tattgaagtggaagtagagccaggag

SEQ ID NO: 155766 - DNA, 26 bp, Artificial sequence
  SiRNA target sequence
attgaagtggaagtagagccaggagt

SEQ ID NO: 155767 - DNA, 26 bp, Artificial sequence
  SiRNA target sequence
ttgaagtggaagtagagccaggagta

SEQ ID NO: 155768 - DNA, 26 bp, Artificial sequence
  SiRNA target sequence
tgaagtggaagtagagccaggagtac

SEQ ID NO: 155769 - DNA, 26 bp, Artificial sequence
  SiRNA target sequence
gaagtggaagtagagccaggagtaca

SEQ ID NO: 155770 - DNA, 26 bp, Artificial sequence
  SiRNA target sequence
aagtggaagtagagccaggagtacag

SEQ ID NO: 155771 - DNA, 26 bp, Artificial sequence
  SiRNA target sequence
agtggaagtagagccaggagtacaga

SEQ ID NO: 155772 - DNA, 26 bp, Artificial sequence
  SiRNA target sequence
gtggaagtagagccaggagtacagaa

SEQ ID NO: 155773 - DNA, 26 bp, Artificial sequence
  SiRNA target sequence
tggaagtagagccaggagtacagaac

SEQ ID NO: 155774 - DNA, 26 bp, Artificial sequence
  SiRNA target sequence
ggaagtagagccaggagtacagaacg

SEQ ID NO: 155775 - DNA, 26 bp, Artificial sequence
  SiRNA target sequence
gaagtagagccaggagtacagaacgg

SEQ ID NO: 155776 - DNA, 26 bp, Artificial sequence
  SiRNA target sequence
aagtagagccaggagtacagaacggt

SEQ ID NO: 155777 - DNA, 26 bp, Artificial sequence
  SiRNA target sequence
agtagagccaggagtacagaacggta

SEQ ID NO: 155778 - DNA, 26 bp, Artificial sequence
  SiRNA target sequence
gtagagccaggagtacagaacggtag

SEQ ID NO: 155779 - DNA, 26 bp, Artificial sequence
  SiRNA target sequence
tagagccaggagtacagaacggtaga

SEQ ID NO: 155780 - DNA, 26 bp, Artificial sequence
  SiRNA target sequence
agagccaggagtacagaacggtagaa

SEQ ID NO: 155781 - DNA, 26 bp, Artificial sequence
  SiRNA target sequence
gagccaggagtacagaacggtagaaa

SEQ ID NO: 155782 - DNA, 26 bp, Artificial sequence
  SiRNA target sequence
agccaggagtacagaacggtagaaaa

SEQ ID NO: 155783 - DNA, 26 bp, Artificial sequence
  SiRNA target sequence
gccaggagtacagaacggtagaaaat

SEQ ID NO: 155784 - DNA, 26 bp, Artificial sequence
  SiRNA target sequence
ccaggagtacagaacggtagaaaata

SEQ ID NO: 155785 - DNA, 26 bp, Artificial sequence
  SiRNA target sequence
caggagtacagaacggtagaaaatat

SEQ ID NO: 155786 - DNA, 26 bp, Artificial sequence
  SiRNA target sequence
aggagtacagaacggtagaaaatata

SEQ ID NO: 155787 - DNA, 26 bp, Artificial sequence
  SiRNA target sequence
ggagtacagaacggtagaaaatatac

SEQ ID NO: 155788 - DNA, 26 bp, Artificial sequence
  SiRNA target sequence
gagtacagaacggtagaaaatataca

SEQ ID NO: 155789 - DNA, 26 bp, Artificial sequence
  SiRNA target sequence
agtacagaacggtagaaaatatacat

SEQ ID NO: 155790 - DNA, 26 bp, Artificial sequence
  SiRNA target sequence
gtacagaacggtagaaaatatacatt

SEQ ID NO: 155791 - DNA, 26 bp, Artificial sequence
  SiRNA target sequence
tacagaacggtagaaaatatacattt

SEQ ID NO: 155792 - DNA, 26 bp, Artificial sequence
  SiRNA target sequence
acagaacggtagaaaatatacatttt

SEQ ID NO: 155793 - DNA, 26 bp, Artificial sequence
  SiRNA target sequence
cagaacggtagaaaatatacattttc

SEQ ID NO: 155794 - DNA, 26 bp, Artificial sequence
  SiRNA target sequence
agaacggtagaaaatatacattttct

SEQ ID NO: 155795 - DNA, 26 bp, Artificial sequence
  SiRNA target sequence
gaacggtagaaaatatacattttctg

SEQ ID NO: 155796 - DNA, 26 bp, Artificial sequence
  SiRNA target sequence
aacggtagaaaatatacattttctgg

SEQ ID NO: 155797 - DNA, 26 bp, Artificial sequence
  SiRNA target sequence
acggtagaaaatatacattttctggc

SEQ ID NO: 155798 - DNA, 26 bp, Artificial sequence
  SiRNA target sequence
cggtagaaaatatacattttctggca

SEQ ID NO: 155799 - DNA, 26 bp, Artificial sequence
  SiRNA target sequence
ggtagaaaatatacattttctggcaa

SEQ ID NO: 155800 - DNA, 26 bp, Artificial sequence
  SiRNA target sequence
gtagaaaatatacattttctggcaaa

SEQ ID NO: 155801 - DNA, 26 bp, Artificial sequence
  SiRNA target sequence
tagaaaatatacattttctggcaaag

SEQ ID NO: 155802 - DNA, 26 bp, Artificial sequence
  SiRNA target sequence
agaaaatatacattttctggcaaagg

SEQ ID NO: 155803 - DNA, 26 bp, Artificial sequence
  SiRNA target sequence
gaaaatatacattttctggcaaagga

SEQ ID NO: 155804 - DNA, 26 bp, Artificial sequence
  SiRNA target sequence
aaaatatacattttctggcaaaggaa

SEQ ID NO: 155805 - DNA, 26 bp, Artificial sequence
  SiRNA target sequence
aaatatacattttctggcaaaggaaa

SEQ ID NO: 155806 - DNA, 26 bp, Artificial sequence
  SiRNA target sequence
aatatacattttctggcaaaggaaat

SEQ ID NO: 155807 - DNA, 26 bp, Artificial sequence
  SiRNA target sequence
atatacattttctggcaaaggaaatc

SEQ ID NO: 155808 - DNA, 26 bp, Artificial sequence
  SiRNA target sequence
tatacattttctggcaaaggaaatca

SEQ ID NO: 155809 - DNA, 26 bp, Artificial sequence
  SiRNA target sequence
atacattttctggcaaaggaaatcat

SEQ ID NO: 155810 - DNA, 26 bp, Artificial sequence
  SiRNA target sequence
tacattttctggcaaaggaaatcata

SEQ ID NO: 155811 - DNA, 26 bp, Artificial sequence
  SiRNA target sequence
acattttctggcaaaggaaatcataa

SEQ ID NO: 155812 - DNA, 26 bp, Artificial sequence
  SiRNA target sequence
cattttctggcaaaggaaatcataaa

SEQ ID NO: 155813 - DNA, 26 bp, Artificial sequence
  SiRNA target sequence
attttctggcaaaggaaatcataaaa

SEQ ID NO: 155814 - DNA, 26 bp, Artificial sequence
  SiRNA target sequence
ttttctggcaaaggaaatcataaaaa

SEQ ID NO: 155815 - DNA, 26 bp, Artificial sequence
  SiRNA target sequence
tttctggcaaaggaaatcataaaaaa

SEQ ID NO: 155816 - DNA, 26 bp, Artificial sequence
  SiRNA target sequence
ttctggcaaaggaaatcataaaaaaa

SEQ ID NO: 155817 - DNA, 26 bp, Artificial sequence
  SiRNA target sequence
tctggcaaaggaaatcataaaaaaaa

SEQ ID NO: 155818 - DNA, 26 bp, Artificial sequence
  SiRNA target sequence
ctggcaaaggaaatcataaaaaaaat

SEQ ID NO: 155819 - DNA, 26 bp, Artificial sequence
  SiRNA target sequence
tggcaaaggaaatcataaaaaaaatt

SEQ ID NO: 155820 - DNA, 26 bp, Artificial sequence
  SiRNA target sequence
ggcaaaggaaatcataaaaaaaattg

SEQ ID NO: 155821 - DNA, 26 bp, Artificial sequence
  SiRNA target sequence
gcaaaggaaatcataaaaaaaattgt

SEQ ID NO: 155822 - DNA, 26 bp, Artificial sequence
  SiRNA target sequence
caaaggaaatcataaaaaaaattgtg

SEQ ID NO: 155823 - DNA, 26 bp, Artificial sequence
  SiRNA target sequence
aaaggaaatcataaaaaaaattgtgt

SEQ ID NO: 155824 - DNA, 26 bp, Artificial sequence
  SiRNA target sequence
aaggaaatcataaaaaaaattgtgta

SEQ ID NO: 155825 - DNA, 26 bp, Artificial sequence
  SiRNA target sequence
aggaaatcataaaaaaaattgtgtac

SEQ ID NO: 155826 - DNA, 26 bp, Artificial sequence
  SiRNA target sequence
ggaaatcataaaaaaaattgtgtacc

SEQ ID NO: 155827 - DNA, 26 bp, Artificial sequence
  SiRNA target sequence
gaaatcataaaaaaaattgtgtaccg

SEQ ID NO: 155828 - DNA, 26 bp, Artificial sequence
  SiRNA target sequence
aaatcataaaaaaaattgtgtaccgg

SEQ ID NO: 155829 - DNA, 26 bp, Artificial sequence
  SiRNA target sequence
aatcataaaaaaaattgtgtaccggg

SEQ ID NO: 155830 - DNA, 26 bp, Artificial sequence
  SiRNA target sequence
atcataaaaaaaattgtgtaccgggt

SEQ ID NO: 155831 - DNA, 26 bp, Artificial sequence
  SiRNA target sequence
tcataaaaaaaattgtgtaccgggtg

SEQ ID NO: 155832 - DNA, 26 bp, Artificial sequence
  SiRNA target sequence
cataaaaaaaattgtgtaccgggtga

SEQ ID NO: 155833 - DNA, 26 bp, Artificial sequence
  SiRNA target sequence
ataaaaaaaattgtgtaccgggtgat

SEQ ID NO: 155834 - DNA, 26 bp, Artificial sequence
  SiRNA target sequence
taaaaaaaattgtgtaccgggtgatg

SEQ ID NO: 155835 - DNA, 26 bp, Artificial sequence
  SiRNA target sequence
aaaaaaaattgtgtaccgggtgatgt

SEQ ID NO: 155836 - DNA, 26 bp, Artificial sequence
  SiRNA target sequence
aaaaaaattgtgtaccgggtgatgtg

SEQ ID NO: 155837 - DNA, 26 bp, Artificial sequence
  SiRNA target sequence
aaaaaattgtgtaccgggtgatgtga

SEQ ID NO: 155838 - DNA, 26 bp, Artificial sequence
  SiRNA target sequence
aaaaattgtgtaccgggtgatgtgat

SEQ ID NO: 155839 - DNA, 26 bp, Artificial sequence
  SiRNA target sequence
aaaattgtgtaccgggtgatgtgatt

SEQ ID NO: 155840 - DNA, 26 bp, Artificial sequence
  SiRNA target sequence
aaattgtgtaccgggtgatgtgattc

SEQ ID NO: 155841 - DNA, 26 bp, Artificial sequence
  SiRNA target sequence
aattgtgtaccgggtgatgtgattct

SEQ ID NO: 155842 - DNA, 26 bp, Artificial sequence
  SiRNA target sequence
attgtgtaccgggtgatgtgattctt

SEQ ID NO: 155843 - DNA, 26 bp, Artificial sequence
  SiRNA target sequence
ttgtgtaccgggtgatgtgattctta

SEQ ID NO: 155844 - DNA, 26 bp, Artificial sequence
  SiRNA target sequence
tgtgtaccgggtgatgtgattcttat

SEQ ID NO: 155845 - DNA, 26 bp, Artificial sequence
  SiRNA target sequence
gtgtaccgggtgatgtgattcttatt

SEQ ID NO: 155846 - DNA, 26 bp, Artificial sequence
  SiRNA target sequence
tgtaccgggtgatgtgattcttattg

SEQ ID NO: 155847 - DNA, 26 bp, Artificial sequence
  SiRNA target sequence
gtaccgggtgatgtgattcttattgt

SEQ ID NO: 155848 - DNA, 26 bp, Artificial sequence
  SiRNA target sequence
taccgggtgatgtgattcttattgta

SEQ ID NO: 155849 - DNA, 26 bp, Artificial sequence
  SiRNA target sequence
accgggtgatgtgattcttattgtaa

SEQ ID NO: 155850 - DNA, 26 bp, Artificial sequence
  SiRNA target sequence
ccgggtgatgtgattcttattgtaaa

SEQ ID NO: 155851 - DNA, 26 bp, Artificial sequence
  SiRNA target sequence
cgggtgatgtgattcttattgtaaac

SEQ ID NO: 155852 - DNA, 26 bp, Artificial sequence
  SiRNA target sequence
gggtgatgtgattcttattgtaaaca

SEQ ID NO: 155853 - DNA, 26 bp, Artificial sequence
  SiRNA target sequence
ggtgatgtgattcttattgtaaacat

SEQ ID NO: 155854 - DNA, 26 bp, Artificial sequence
  SiRNA target sequence
gtgatgtgattcttattgtaaacatt

SEQ ID NO: 155855 - DNA, 26 bp, Artificial sequence
  SiRNA target sequence
tgatgtgattcttattgtaaacatta

SEQ ID NO: 155856 - DNA, 26 bp, Artificial sequence
  SiRNA target sequence
gatgtgattcttattgtaaacattac

SEQ ID NO: 155857 - DNA, 26 bp, Artificial sequence
  SiRNA target sequence
atgtgattcttattgtaaacattaca

SEQ ID NO: 155858 - DNA, 26 bp, Artificial sequence
  SiRNA target sequence
tgtgattcttattgtaaacattacaa

SEQ ID NO: 155859 - DNA, 26 bp, Artificial sequence
  SiRNA target sequence
gtgattcttattgtaaacattacaaa

SEQ ID NO: 155860 - DNA, 26 bp, Artificial sequence
  SiRNA target sequence
tgattcttattgtaaacattacaaat

SEQ ID NO: 155861 - DNA, 26 bp, Artificial sequence
  SiRNA target sequence
gattcttattgtaaacattacaaatg

SEQ ID NO: 155862 - DNA, 26 bp, Artificial sequence
  SiRNA target sequence
attcttattgtaaacattacaaatga

SEQ ID NO: 155863 - DNA, 26 bp, Artificial sequence
  SiRNA target sequence
ttcttattgtaaacattacaaatgat

SEQ ID NO: 155864 - DNA, 26 bp, Artificial sequence
  SiRNA target sequence
tcttattgtaaacattacaaatgatc

SEQ ID NO: 155865 - DNA, 26 bp, Artificial sequence
  SiRNA target sequence
cttattgtaaacattacaaatgatcc

SEQ ID NO: 155866 - DNA, 26 bp, Artificial sequence
  SiRNA target sequence
ttattgtaaacattacaaatgatcca

SEQ ID NO: 155867 - DNA, 26 bp, Artificial sequence
  SiRNA target sequence
tattgtaaacattacaaatgatccaa

SEQ ID NO: 155868 - DNA, 26 bp, Artificial sequence
  SiRNA target sequence
attgtaaacattacaaatgatccaag

SEQ ID NO: 155869 - DNA, 26 bp, Artificial sequence
  SiRNA target sequence
ttgtaaacattacaaatgatccaaga

SEQ ID NO: 155870 - DNA, 26 bp, Artificial sequence
  SiRNA target sequence
tgtaaacattacaaatgatccaagat

SEQ ID NO: 155871 - DNA, 26 bp, Artificial sequence
  SiRNA target sequence
gtaaacattacaaatgatccaagatt

SEQ ID NO: 155872 - DNA, 26 bp, Artificial sequence
  SiRNA target sequence
taaacattacaaatgatccaagattt

SEQ ID NO: 155873 - DNA, 26 bp, Artificial sequence
  SiRNA target sequence
aaacattacaaatgatccaagattta

SEQ ID NO: 155874 - DNA, 26 bp, Artificial sequence
  SiRNA target sequence
aacattacaaatgatccaagatttag

SEQ ID NO: 155875 - DNA, 26 bp, Artificial sequence
  SiRNA target sequence
acattacaaatgatccaagatttaga

SEQ ID NO: 155876 - DNA, 26 bp, Artificial sequence
  SiRNA target sequence
cattacaaatgatccaagatttagaa

SEQ ID NO: 155877 - DNA, 26 bp, Artificial sequence
  SiRNA target sequence
attacaaatgatccaagatttagaaa

SEQ ID NO: 155878 - DNA, 26 bp, Artificial sequence
  SiRNA target sequence
ttacaaatgatccaagatttagaaaa

SEQ ID NO: 155879 - DNA, 26 bp, Artificial sequence
  SiRNA target sequence
tacaaatgatccaagatttagaaaaa

SEQ ID NO: 155880 - DNA, 26 bp, Artificial sequence
  SiRNA target sequence
acaaatgatccaagatttagaaaaag

SEQ ID NO: 155881 - DNA, 26 bp, Artificial sequence
  SiRNA target sequence
caaatgatccaagatttagaaaaagt

SEQ ID NO: 155882 - DNA, 26 bp, Artificial sequence
  SiRNA target sequence
aaatgatccaagatttagaaaaagtg

SEQ ID NO: 155883 - DNA, 26 bp, Artificial sequence
  SiRNA target sequence
aatgatccaagatttagaaaaagtgg

SEQ ID NO: 155884 - DNA, 26 bp, Artificial sequence
  SiRNA target sequence
atgatccaagatttagaaaaagtgga

SEQ ID NO: 155885 - DNA, 26 bp, Artificial sequence
  SiRNA target sequence
tgatccaagatttagaaaaagtggat

SEQ ID NO: 155886 - DNA, 26 bp, Artificial sequence
  SiRNA target sequence
gatccaagatttagaaaaagtggata

SEQ ID NO: 155887 - DNA, 26 bp, Artificial sequence
  SiRNA target sequence
atccaagatttagaaaaagtggatat

SEQ ID NO: 155888 - DNA, 26 bp, Artificial sequence
  SiRNA target sequence
tccaagatttagaaaaagtggatata

SEQ ID NO: 155889 - DNA, 26 bp, Artificial sequence
  SiRNA target sequence
ccaagatttagaaaaagtggatataa

SEQ ID NO: 155890 - DNA, 26 bp, Artificial sequence
  SiRNA target sequence
caagatttagaaaaagtggatataat

SEQ ID NO: 155891 - DNA, 26 bp, Artificial sequence
  SiRNA target sequence
aagatttagaaaaagtggatataatt

SEQ ID NO: 155892 - DNA, 26 bp, Artificial sequence
  SiRNA target sequence
agatttagaaaaagtggatataattt

SEQ ID NO: 155893 - DNA, 26 bp, Artificial sequence
  SiRNA target sequence
gatttagaaaaagtggatataattta

SEQ ID NO: 155894 - DNA, 26 bp, Artificial sequence
  SiRNA target sequence
atttagaaaaagtggatataatttaa

SEQ ID NO: 155895 - DNA, 26 bp, Artificial sequence
  SiRNA target sequence
tttagaaaaagtggatataatttaat

SEQ ID NO: 155896 - DNA, 26 bp, Artificial sequence
  SiRNA target sequence
ttagaaaaagtggatataatttaatt

SEQ ID NO: 155897 - DNA, 26 bp, Artificial sequence
  SiRNA target sequence
tagaaaaagtggatataatttaatta

SEQ ID NO: 155898 - DNA, 26 bp, Artificial sequence
  SiRNA target sequence
agaaaaagtggatataatttaattag

SEQ ID NO: 155899 - DNA, 26 bp, Artificial sequence
  SiRNA target sequence
gaaaaagtggatataatttaattagt

SEQ ID NO: 155900 - DNA, 26 bp, Artificial sequence
  SiRNA target sequence
aaaaagtggatataatttaattagta

SEQ ID NO: 155901 - DNA, 26 bp, Artificial sequence
  SiRNA target sequence
aaaagtggatataatttaattagtaa

SEQ ID NO: 155902 - DNA, 26 bp, Artificial sequence
  SiRNA target sequence
aaagtggatataatttaattagtaag

SEQ ID NO: 155903 - DNA, 26 bp, Artificial sequence
  SiRNA target sequence
aagtggatataatttaattagtaagg

SEQ ID NO: 155904 - DNA, 26 bp, Artificial sequence
  SiRNA target sequence
agtggatataatttaattagtaaggt

SEQ ID NO: 155905 - DNA, 26 bp, Artificial sequence
  SiRNA target sequence
gtggatataatttaattagtaaggtt

SEQ ID NO: 155906 - DNA, 26 bp, Artificial sequence
  SiRNA target sequence
tggatataatttaattagtaaggttg

SEQ ID NO: 155907 - DNA, 26 bp, Artificial sequence
  SiRNA target sequence
ggatataatttaattagtaaggttga

SEQ ID NO: 155908 - DNA, 26 bp, Artificial sequence
  SiRNA target sequence
gatataatttaattagtaaggttgat

SEQ ID NO: 155909 - DNA, 26 bp, Artificial sequence
  SiRNA target sequence
atataatttaattagtaaggttgata

SEQ ID NO: 155910 - DNA, 26 bp, Artificial sequence
  SiRNA target sequence
tataatttaattagtaaggttgatat

SEQ ID NO: 155911 - DNA, 26 bp, Artificial sequence
  SiRNA target sequence
ataatttaattagtaaggttgatatt

SEQ ID NO: 155912 - DNA, 26 bp, Artificial sequence
  SiRNA target sequence
taatttaattagtaaggttgatattc

SEQ ID NO: 155913 - DNA, 26 bp, Artificial sequence
  SiRNA target sequence
aatttaattagtaaggttgatattcc

SEQ ID NO: 155914 - DNA, 26 bp, Artificial sequence
  SiRNA target sequence
atttaattagtaaggttgatattcca

SEQ ID NO: 155915 - DNA, 26 bp, Artificial sequence
  SiRNA target sequence
tttaattagtaaggttgatattccat

SEQ ID NO: 155916 - DNA, 26 bp, Artificial sequence
  SiRNA target sequence
ttaattagtaaggttgatattccatt

SEQ ID NO: 155917 - DNA, 26 bp, Artificial sequence
  SiRNA target sequence
taattagtaaggttgatattccattg

SEQ ID NO: 155918 - DNA, 26 bp, Artificial sequence
  SiRNA target sequence
aattagtaaggttgatattccattgt

SEQ ID NO: 155919 - DNA, 26 bp, Artificial sequence
  SiRNA target sequence
attagtaaggttgatattccattgta

SEQ ID NO: 155920 - DNA, 26 bp, Artificial sequence
  SiRNA target sequence
ttagtaaggttgatattccattgtat

SEQ ID NO: 155921 - DNA, 26 bp, Artificial sequence
  SiRNA target sequence
tagtaaggttgatattccattgtatg

SEQ ID NO: 155922 - DNA, 26 bp, Artificial sequence
  SiRNA target sequence
agtaaggttgatattccattgtatgt

SEQ ID NO: 155923 - DNA, 26 bp, Artificial sequence
  SiRNA target sequence
gtaaggttgatattccattgtatgtt

SEQ ID NO: 155924 - DNA, 26 bp, Artificial sequence
  SiRNA target sequence
taaggttgatattccattgtatgttg

SEQ ID NO: 155925 - DNA, 26 bp, Artificial sequence
  SiRNA target sequence
aaggttgatattccattgtatgttgc

SEQ ID NO: 155926 - DNA, 26 bp, Artificial sequence
  SiRNA target sequence
aggttgatattccattgtatgttgct

SEQ ID NO: 155927 - DNA, 26 bp, Artificial sequence
  SiRNA target sequence
ggttgatattccattgtatgttgctt

SEQ ID NO: 155928 - DNA, 26 bp, Artificial sequence
  SiRNA target sequence
gttgatattccattgtatgttgcttt

SEQ ID NO: 155929 - DNA, 26 bp, Artificial sequence
  SiRNA target sequence
ttgatattccattgtatgttgctttg

SEQ ID NO: 155930 - DNA, 26 bp, Artificial sequence
  SiRNA target sequence
tgatattccattgtatgttgctttgg

SEQ ID NO: 155931 - DNA, 26 bp, Artificial sequence
  SiRNA target sequence
gatattccattgtatgttgctttggc

SEQ ID NO: 155932 - DNA, 26 bp, Artificial sequence
  SiRNA target sequence
atattccattgtatgttgctttggca

SEQ ID NO: 155933 - DNA, 26 bp, Artificial sequence
  SiRNA target sequence
tattccattgtatgttgctttggcag

SEQ ID NO: 155934 - DNA, 26 bp, Artificial sequence
  SiRNA target sequence
attccattgtatgttgctttggcagg

SEQ ID NO: 155935 - DNA, 26 bp, Artificial sequence
  SiRNA target sequence
ttccattgtatgttgctttggcaggc

SEQ ID NO: 155936 - DNA, 26 bp, Artificial sequence
  SiRNA target sequence
tccattgtatgttgctttggcaggcg

SEQ ID NO: 155937 - DNA, 26 bp, Artificial sequence
  SiRNA target sequence
ccattgtatgttgctttggcaggcgg

SEQ ID NO: 155938 - DNA, 26 bp, Artificial sequence
  SiRNA target sequence
cattgtatgttgctttggcaggcgga

SEQ ID NO: 155939 - DNA, 26 bp, Artificial sequence
  SiRNA target sequence
attgtatgttgctttggcaggcggac

SEQ ID NO: 155940 - DNA, 26 bp, Artificial sequence
  SiRNA target sequence
ttgtatgttgctttggcaggcggaca

SEQ ID NO: 155941 - DNA, 26 bp, Artificial sequence
  SiRNA target sequence
tgtatgttgctttggcaggcggacag

SEQ ID NO: 155942 - DNA, 26 bp, Artificial sequence
  SiRNA target sequence
gtatgttgctttggcaggcggacaga

SEQ ID NO: 155943 - DNA, 26 bp, Artificial sequence
  SiRNA target sequence
tatgttgctttggcaggcggacagat

SEQ ID NO: 155944 - DNA, 26 bp, Artificial sequence
  SiRNA target sequence
atgttgctttggcaggcggacagatt

SEQ ID NO: 155945 - DNA, 26 bp, Artificial sequence
  SiRNA target sequence
tgttgctttggcaggcggacagatta

SEQ ID NO: 155946 - DNA, 26 bp, Artificial sequence
  SiRNA target sequence
gttgctttggcaggcggacagattat

SEQ ID NO: 155947 - DNA, 26 bp, Artificial sequence
  SiRNA target sequence
ttgctttggcaggcggacagattata

SEQ ID NO: 155948 - DNA, 26 bp, Artificial sequence
  SiRNA target sequence
tgctttggcaggcggacagattatat

SEQ ID NO: 155949 - DNA, 26 bp, Artificial sequence
  SiRNA target sequence
gctttggcaggcggacagattatatt

SEQ ID NO: 155950 - DNA, 26 bp, Artificial sequence
  SiRNA target sequence
ctttggcaggcggacagattatattt

SEQ ID NO: 155951 - DNA, 26 bp, Artificial sequence
  SiRNA target sequence
tttggcaggcggacagattatatttg

SEQ ID NO: 155952 - DNA, 26 bp, Artificial sequence
  SiRNA target sequence
ttggcaggcggacagattatatttga

SEQ ID NO: 155953 - DNA, 26 bp, Artificial sequence
  SiRNA target sequence
tggcaggcggacagattatatttgaa

SEQ ID NO: 155954 - DNA, 26 bp, Artificial sequence
  SiRNA target sequence
ggcaggcggacagattatatttgaac

SEQ ID NO: 155955 - DNA, 26 bp, Artificial sequence
  SiRNA target sequence
gcaggcggacagattatatttgaaca

SEQ ID NO: 155956 - DNA, 26 bp, Artificial sequence
  SiRNA target sequence
caggcggacagattatatttgaacat

SEQ ID NO: 155957 - DNA, 26 bp, Artificial sequence
  SiRNA target sequence
aggcggacagattatatttgaacata

SEQ ID NO: 155958 - DNA, 26 bp, Artificial sequence
  SiRNA target sequence
ggcggacagattatatttgaacatat

SEQ ID NO: 155959 - DNA, 26 bp, Artificial sequence
  SiRNA target sequence
gcggacagattatatttgaacatatc

SEQ ID NO: 155960 - DNA, 26 bp, Artificial sequence
  SiRNA target sequence
cggacagattatatttgaacatatca

SEQ ID NO: 155961 - DNA, 26 bp, Artificial sequence
  SiRNA target sequence
ggacagattatatttgaacatatcac

SEQ ID NO: 155962 - DNA, 26 bp, Artificial sequence
  SiRNA target sequence
gacagattatatttgaacatatcact

SEQ ID NO: 155963 - DNA, 26 bp, Artificial sequence
  SiRNA target sequence
acagattatatttgaacatatcactg

SEQ ID NO: 155964 - DNA, 26 bp, Artificial sequence
  SiRNA target sequence
cagattatatttgaacatatcactgg

SEQ ID NO: 155965 - DNA, 26 bp, Artificial sequence
  SiRNA target sequence
agattatatttgaacatatcactggt

SEQ ID NO: 155966 - DNA, 26 bp, Artificial sequence
  SiRNA target sequence
gattatatttgaacatatcactggta

SEQ ID NO: 155967 - DNA, 26 bp, Artificial sequence
  SiRNA target sequence
attatatttgaacatatcactggtaa

SEQ ID NO: 155968 - DNA, 26 bp, Artificial sequence
  SiRNA target sequence
ttatatttgaacatatcactggtaag

SEQ ID NO: 155969 - DNA, 26 bp, Artificial sequence
  SiRNA target sequence
tatatttgaacatatcactggtaaga

SEQ ID NO: 155970 - DNA, 26 bp, Artificial sequence
  SiRNA target sequence
atatttgaacatatcactggtaagaa

SEQ ID NO: 155971 - DNA, 26 bp, Artificial sequence
  SiRNA target sequence
tatttgaacatatcactggtaagaaa

SEQ ID NO: 155972 - DNA, 26 bp, Artificial sequence
  SiRNA target sequence
atttgaacatatcactggtaagaaat

SEQ ID NO: 155973 - DNA, 26 bp, Artificial sequence
  SiRNA target sequence
tttgaacatatcactggtaagaaatt

SEQ ID NO: 155974 - DNA, 26 bp, Artificial sequence
  SiRNA target sequence
ttgaacatatcactggtaagaaattt

SEQ ID NO: 155975 - DNA, 26 bp, Artificial sequence
  SiRNA target sequence
tgaacatatcactggtaagaaatttg

SEQ ID NO: 155976 - DNA, 26 bp, Artificial sequence
  SiRNA target sequence
gaacatatcactggtaagaaatttga

SEQ ID NO: 155977 - DNA, 26 bp, Artificial sequence
  SiRNA target sequence
aacatatcactggtaagaaatttgaa

SEQ ID NO: 155978 - DNA, 26 bp, Artificial sequence
  SiRNA target sequence
acatatcactggtaagaaatttgaaa

SEQ ID NO: 155979 - DNA, 26 bp, Artificial sequence
  SiRNA target sequence
catatcactggtaagaaatttgaaat

SEQ ID NO: 155980 - DNA, 26 bp, Artificial sequence
  SiRNA target sequence
atatcactggtaagaaatttgaaatt

SEQ ID NO: 155981 - DNA, 26 bp, Artificial sequence
  SiRNA target sequence
tatcactggtaagaaatttgaaatta

SEQ ID NO: 155982 - DNA, 26 bp, Artificial sequence
  SiRNA target sequence
atcactggtaagaaatttgaaattac

SEQ ID NO: 155983 - DNA, 26 bp, Artificial sequence
  SiRNA target sequence
tcactggtaagaaatttgaaattact

SEQ ID NO: 155984 - DNA, 26 bp, Artificial sequence
  SiRNA target sequence
cactggtaagaaatttgaaattactt

SEQ ID NO: 155985 - DNA, 26 bp, Artificial sequence
  SiRNA target sequence
actggtaagaaatttgaaattacttt

SEQ ID NO: 155986 - DNA, 26 bp, Artificial sequence
  SiRNA target sequence
ctggtaagaaatttgaaattacttta

SEQ ID NO: 155987 - DNA, 26 bp, Artificial sequence
  SiRNA target sequence
tggtaagaaatttgaaattactttat

SEQ ID NO: 155988 - DNA, 26 bp, Artificial sequence
  SiRNA target sequence
ggtaagaaatttgaaattactttata

SEQ ID NO: 155989 - DNA, 26 bp, Artificial sequence
  SiRNA target sequence
gtaagaaatttgaaattactttatat

SEQ ID NO: 155990 - DNA, 26 bp, Artificial sequence
  SiRNA target sequence
taagaaatttgaaattactttatatc

SEQ ID NO: 155991 - DNA, 26 bp, Artificial sequence
  SiRNA target sequence
aagaaatttgaaattactttatatcc

SEQ ID NO: 155992 - DNA, 26 bp, Artificial sequence
  SiRNA target sequence
agaaatttgaaattactttatatcca

SEQ ID NO: 155993 - DNA, 26 bp, Artificial sequence
  SiRNA target sequence
gaaatttgaaattactttatatccat

SEQ ID NO: 155994 - DNA, 26 bp, Artificial sequence
  SiRNA target sequence
aaatttgaaattactttatatccatt

SEQ ID NO: 155995 - DNA, 26 bp, Artificial sequence
  SiRNA target sequence
aatttgaaattactttatatccattt

SEQ ID NO: 155996 - DNA, 26 bp, Artificial sequence
  SiRNA target sequence
atttgaaattactttatatccattta

SEQ ID NO: 155997 - DNA, 26 bp, Artificial sequence
  SiRNA target sequence
tttgaaattactttatatccatttaa

SEQ ID NO: 155998 - DNA, 26 bp, Artificial sequence
  SiRNA target sequence
ttgaaattactttatatccatttaaa

SEQ ID NO: 155999 - DNA, 26 bp, Artificial sequence
  SiRNA target sequence
tgaaattactttatatccatttaaag

SEQ ID NO: 156000 - DNA, 26 bp, Artificial sequence
  SiRNA target sequence
gaaattactttatatccatttaaaga

SEQ ID NO: 156001 - DNA, 26 bp, Artificial sequence
  SiRNA target sequence
aaattactttatatccatttaaagat

SEQ ID NO: 156002 - DNA, 26 bp, Artificial sequence
  SiRNA target sequence
aattactttatatccatttaaagatt

SEQ ID NO: 156003 - DNA, 26 bp, Artificial sequence
  SiRNA target sequence
attactttatatccatttaaagattt

SEQ ID NO: 156004 - DNA, 26 bp, Artificial sequence
  SiRNA target sequence
ttactttatatccatttaaagattta

SEQ ID NO: 156005 - DNA, 26 bp, Artificial sequence
  SiRNA target sequence
tactttatatccatttaaagatttaa

SEQ ID NO: 156006 - DNA, 26 bp, Artificial sequence
  SiRNA target sequence
actttatatccatttaaagatttaaa

SEQ ID NO: 156007 - DNA, 26 bp, Artificial sequence
  SiRNA target sequence
ctttatatccatttaaagatttaaag

SEQ ID NO: 156008 - DNA, 26 bp, Artificial sequence
  SiRNA target sequence
tttatatccatttaaagatttaaaga

SEQ ID NO: 156009 - DNA, 26 bp, Artificial sequence
  SiRNA target sequence
ttatatccatttaaagatttaaagaa

SEQ ID NO: 156010 - DNA, 26 bp, Artificial sequence
  SiRNA target sequence
tatatccatttaaagatttaaagaaa

SEQ ID NO: 156011 - DNA, 26 bp, Artificial sequence
  SiRNA target sequence
atatccatttaaagatttaaagaaat

SEQ ID NO: 156012 - DNA, 26 bp, Artificial sequence
  SiRNA target sequence
tatccatttaaagatttaaagaaatg

SEQ ID NO: 156013 - DNA, 26 bp, Artificial sequence
  SiRNA target sequence
atccatttaaagatttaaagaaatgt

SEQ ID NO: 156014 - DNA, 26 bp, Artificial sequence
  SiRNA target sequence
tccatttaaagatttaaagaaatgta

SEQ ID NO: 156015 - DNA, 26 bp, Artificial sequence
  SiRNA target sequence
ccatttaaagatttaaagaaatgtat

SEQ ID NO: 156016 - DNA, 26 bp, Artificial sequence
  SiRNA target sequence
catttaaagatttaaagaaatgtatt

SEQ ID NO: 156017 - DNA, 26 bp, Artificial sequence
  SiRNA target sequence
atttaaagatttaaagaaatgtatta

SEQ ID NO: 156018 - DNA, 26 bp, Artificial sequence
  SiRNA target sequence
tttaaagatttaaagaaatgtattat

SEQ ID NO: 156019 - DNA, 26 bp, Artificial sequence
  SiRNA target sequence
ttaaagatttaaagaaatgtattatt

SEQ ID NO: 156020 - DNA, 26 bp, Artificial sequence
  SiRNA target sequence
taaagatttaaagaaatgtattattt

SEQ ID NO: 156021 - DNA, 26 bp, Artificial sequence
  SiRNA target sequence
aaagatttaaagaaatgtattatttt

SEQ ID NO: 156022 - DNA, 26 bp, Artificial sequence
  SiRNA target sequence
aagatttaaagaaatgtattatttta

SEQ ID NO: 156023 - DNA, 26 bp, Artificial sequence
  SiRNA target sequence
agatttaaagaaatgtattattttaa

SEQ ID NO: 156024 - DNA, 26 bp, Artificial sequence
  SiRNA target sequence
gatttaaagaaatgtattattttaaa

SEQ ID NO: 156025 - DNA, 26 bp, Artificial sequence
  SiRNA target sequence
atttaaagaaatgtattattttaaaa

SEQ ID NO: 156026 - DNA, 26 bp, Artificial sequence
  SiRNA target sequence
tttaaagaaatgtattattttaaaag

SEQ ID NO: 156027 - DNA, 26 bp, Artificial sequence
  SiRNA target sequence
ttaaagaaatgtattattttaaaagg

SEQ ID NO: 156028 - DNA, 26 bp, Artificial sequence
  SiRNA target sequence
taaagaaatgtattattttaaaaggc

SEQ ID NO: 156029 - DNA, 26 bp, Artificial sequence
  SiRNA target sequence
aaagaaatgtattattttaaaaggcg

SEQ ID NO: 156030 - DNA, 26 bp, Artificial sequence
  SiRNA target sequence
aagaaatgtattattttaaaaggcga

SEQ ID NO: 156031 - DNA, 26 bp, Artificial sequence
  SiRNA target sequence
agaaatgtattattttaaaaggcgaa

SEQ ID NO: 156032 - DNA, 26 bp, Artificial sequence
  SiRNA target sequence
gaaatgtattattttaaaaggcgaag

SEQ ID NO: 156033 - DNA, 26 bp, Artificial sequence
  SiRNA target sequence
aaatgtattattttaaaaggcgaagg

SEQ ID NO: 156034 - DNA, 26 bp, Artificial sequence
  SiRNA target sequence
aatgtattattttaaaaggcgaaggt

SEQ ID NO: 156035 - DNA, 26 bp, Artificial sequence
  SiRNA target sequence
atgtattattttaaaaggcgaaggtt

SEQ ID NO: 156036 - DNA, 26 bp, Artificial sequence
  SiRNA target sequence
tgtattattttaaaaggcgaaggttt

SEQ ID NO: 156037 - DNA, 26 bp, Artificial sequence
  SiRNA target sequence
gtattattttaaaaggcgaaggtttt

SEQ ID NO: 156038 - DNA, 26 bp, Artificial sequence
  SiRNA target sequence
tattattttaaaaggcgaaggtttta

SEQ ID NO: 156039 - DNA, 26 bp, Artificial sequence
  SiRNA target sequence
attattttaaaaggcgaaggttttaa

SEQ ID NO: 156040 - DNA, 26 bp, Artificial sequence
  SiRNA target sequence
ttattttaaaaggcgaaggttttaaa

SEQ ID NO: 156041 - DNA, 26 bp, Artificial sequence
  SiRNA target sequence
tattttaaaaggcgaaggttttaaaa

SEQ ID NO: 156042 - DNA, 26 bp, Artificial sequence
  SiRNA target sequence
attttaaaaggcgaaggttttaaaat

SEQ ID NO: 156043 - DNA, 26 bp, Artificial sequence
  SiRNA target sequence
ttttaaaaggcgaaggttttaaaata

SEQ ID NO: 156044 - DNA, 26 bp, Artificial sequence
  SiRNA target sequence
tttaaaaggcgaaggttttaaaataa

SEQ ID NO: 156045 - DNA, 26 bp, Artificial sequence
  SiRNA target sequence
ttaaaaggcgaaggttttaaaataaa

SEQ ID NO: 156046 - DNA, 26 bp, Artificial sequence
  SiRNA target sequence
taaaaggcgaaggttttaaaataaaa

SEQ ID NO: 156047 - DNA, 26 bp, Artificial sequence
  SiRNA target sequence
aaaaggcgaaggttttaaaataaaaa

SEQ ID NO: 156048 - DNA, 26 bp, Artificial sequence
  SiRNA target sequence
aaaggcgaaggttttaaaataaaaaa

SEQ ID NO: 156049 - DNA, 26 bp, Artificial sequence
  SiRNA target sequence
aaggcgaaggttttaaaataaaaaat

SEQ ID NO: 156050 - DNA, 26 bp, Artificial sequence
  SiRNA target sequence
aggcgaaggttttaaaataaaaaata

SEQ ID NO: 156051 - DNA, 26 bp, Artificial sequence
  SiRNA target sequence
ggcgaaggttttaaaataaaaaatag

SEQ ID NO: 156052 - DNA, 26 bp, Artificial sequence
  SiRNA target sequence
gcgaaggttttaaaataaaaaatagt

SEQ ID NO: 156053 - DNA, 26 bp, Artificial sequence
  SiRNA target sequence
cgaaggttttaaaataaaaaatagtt

SEQ ID NO: 156054 - DNA, 26 bp, Artificial sequence
  SiRNA target sequence
gaaggttttaaaataaaaaatagtta

SEQ ID NO: 156055 - DNA, 26 bp, Artificial sequence
  SiRNA target sequence
aaggttttaaaataaaaaatagttat

SEQ ID NO: 156056 - DNA, 26 bp, Artificial sequence
  SiRNA target sequence
aggttttaaaataaaaaatagttatt

SEQ ID NO: 156057 - DNA, 26 bp, Artificial sequence
  SiRNA target sequence
ggttttaaaataaaaaatagttattc

SEQ ID NO: 156058 - DNA, 26 bp, Artificial sequence
  SiRNA target sequence
gttttaaaataaaaaatagttattcg

SEQ ID NO: 156059 - DNA, 26 bp, Artificial sequence
  SiRNA target sequence
ttttaaaataaaaaatagttattcgg

SEQ ID NO: 156060 - DNA, 26 bp, Artificial sequence
  SiRNA target sequence
tttaaaataaaaaatagttattcggg

SEQ ID NO: 156061 - DNA, 26 bp, Artificial sequence
  SiRNA target sequence
ttaaaataaaaaatagttattcgggt

SEQ ID NO: 156062 - DNA, 26 bp, Artificial sequence
  SiRNA target sequence
taaaataaaaaatagttattcgggtg

SEQ ID NO: 156063 - DNA, 26 bp, Artificial sequence
  SiRNA target sequence
aaaataaaaaatagttattcgggtgg

SEQ ID NO: 156064 - DNA, 26 bp, Artificial sequence
  SiRNA target sequence
aaataaaaaatagttattcgggtggt

SEQ ID NO: 156065 - DNA, 26 bp, Artificial sequence
  SiRNA target sequence
aataaaaaatagttattcgggtggtg

SEQ ID NO: 156066 - DNA, 26 bp, Artificial sequence
  SiRNA target sequence
ataaaaaatagttattcgggtggtga

SEQ ID NO: 156067 - DNA, 26 bp, Artificial sequence
  SiRNA target sequence
taaaaaatagttattcgggtggtgat

SEQ ID NO: 156068 - DNA, 26 bp, Artificial sequence
  SiRNA target sequence
aaaaaatagttattcgggtggtgatc

SEQ ID NO: 156069 - DNA, 26 bp, Artificial sequence
  SiRNA target sequence
aaaaatagttattcgggtggtgatct

SEQ ID NO: 156070 - DNA, 26 bp, Artificial sequence
  SiRNA target sequence
aaaatagttattcgggtggtgatctt

SEQ ID NO: 156071 - DNA, 26 bp, Artificial sequence
  SiRNA target sequence
aaatagttattcgggtggtgatctta

SEQ ID NO: 156072 - DNA, 26 bp, Artificial sequence
  SiRNA target sequence
aatagttattcgggtggtgatcttat

SEQ ID NO: 156073 - DNA, 26 bp, Artificial sequence
  SiRNA target sequence
atagttattcgggtggtgatcttatt

SEQ ID NO: 156074 - DNA, 26 bp, Artificial sequence
  SiRNA target sequence
tagttattcgggtggtgatcttattc

SEQ ID NO: 156075 - DNA, 26 bp, Artificial sequence
  SiRNA target sequence
agttattcgggtggtgatcttattct

SEQ ID NO: 156076 - DNA, 26 bp, Artificial sequence
  SiRNA target sequence
gttattcgggtggtgatcttattctc

SEQ ID NO: 156077 - DNA, 26 bp, Artificial sequence
  SiRNA target sequence
ttattcgggtggtgatcttattctcg

SEQ ID NO: 156078 - DNA, 26 bp, Artificial sequence
  SiRNA target sequence
tattcgggtggtgatcttattctcga

SEQ ID NO: 156079 - DNA, 26 bp, Artificial sequence
  SiRNA target sequence
attcgggtggtgatcttattctcgaa

SEQ ID NO: 156080 - DNA, 26 bp, Artificial sequence
  SiRNA target sequence
ttcgggtggtgatcttattctcgaac

SEQ ID NO: 156081 - DNA, 26 bp, Artificial sequence
  SiRNA target sequence
tcgggtggtgatcttattctcgaacc

SEQ ID NO: 156082 - DNA, 26 bp, Artificial sequence
  SiRNA target sequence
cgggtggtgatcttattctcgaacct

SEQ ID NO: 156083 - DNA, 26 bp, Artificial sequence
  SiRNA target sequence
gggtggtgatcttattctcgaaccta

SEQ ID NO: 156084 - DNA, 26 bp, Artificial sequence
  SiRNA target sequence
ggtggtgatcttattctcgaacctaa

SEQ ID NO: 156085 - DNA, 26 bp, Artificial sequence
  SiRNA target sequence
gtggtgatcttattctcgaacctaat

SEQ ID NO: 156086 - DNA, 26 bp, Artificial sequence
  SiRNA target sequence
tggtgatcttattctcgaacctaata

SEQ ID NO: 156087 - DNA, 26 bp, Artificial sequence
  SiRNA target sequence
ggtgatcttattctcgaacctaatat

SEQ ID NO: 156088 - DNA, 26 bp, Artificial sequence
  SiRNA target sequence
gtgatcttattctcgaacctaatata

SEQ ID NO: 156089 - DNA, 26 bp, Artificial sequence
  SiRNA target sequence
tgatcttattctcgaacctaatataa

SEQ ID NO: 156090 - DNA, 26 bp, Artificial sequence
  SiRNA target sequence
gatcttattctcgaacctaatataat

SEQ ID NO: 156091 - DNA, 26 bp, Artificial sequence
  SiRNA target sequence
atcttattctcgaacctaatataatt

SEQ ID NO: 156092 - DNA, 26 bp, Artificial sequence
  SiRNA target sequence
tcttattctcgaacctaatataatta

SEQ ID NO: 156093 - DNA, 26 bp, Artificial sequence
  SiRNA target sequence
cttattctcgaacctaatataattat

SEQ ID NO: 156094 - DNA, 26 bp, Artificial sequence
  SiRNA target sequence
ttattctcgaacctaatataattata

SEQ ID NO: 156095 - DNA, 26 bp, Artificial sequence
  SiRNA target sequence
tattctcgaacctaatataattatag

SEQ ID NO: 156096 - DNA, 26 bp, Artificial sequence
  SiRNA target sequence
attctcgaacctaatataattataga

SEQ ID NO: 156097 - DNA, 26 bp, Artificial sequence
  SiRNA target sequence
ttctcgaacctaatataattatagat

SEQ ID NO: 156098 - DNA, 26 bp, Artificial sequence
  SiRNA target sequence
tctcgaacctaatataattatagata

SEQ ID NO: 156099 - DNA, 26 bp, Artificial sequence
  SiRNA target sequence
ctcgaacctaatataattatagataa

SEQ ID NO: 156100 - DNA, 26 bp, Artificial sequence
  SiRNA target sequence
tcgaacctaatataattatagataag

SEQ ID NO: 156101 - DNA, 26 bp, Artificial sequence
  SiRNA target sequence
cgaacctaatataattatagataaga

SEQ ID NO: 156102 - DNA, 26 bp, Artificial sequence
  SiRNA target sequence
gaacctaatataattatagataagaa

SEQ ID NO: 156103 - DNA, 26 bp, Artificial sequence
  SiRNA target sequence
aacctaatataattatagataagaat

SEQ ID NO: 156104 - DNA, 26 bp, Artificial sequence
  SiRNA target sequence
acctaatataattatagataagaata

SEQ ID NO: 156105 - DNA, 26 bp, Artificial sequence
  SiRNA target sequence
cctaatataattatagataagaatat

SEQ ID NO: 156106 - DNA, 26 bp, Artificial sequence
  SiRNA target sequence
ctaatataattatagataagaatatt

SEQ ID NO: 156107 - DNA, 26 bp, Artificial sequence
  SiRNA target sequence
taatataattatagataagaatattg

SEQ ID NO: 156108 - DNA, 26 bp, Artificial sequence
  SiRNA target sequence
aatataattatagataagaatattga

SEQ ID NO: 156109 - DNA, 26 bp, Artificial sequence
  SiRNA target sequence
atataattatagataagaatattgat

SEQ ID NO: 156110 - DNA, 26 bp, Artificial sequence
  SiRNA target sequence
tataattatagataagaatattgata

SEQ ID NO: 156111 - DNA, 26 bp, Artificial sequence
  SiRNA target sequence
ataattatagataagaatattgataa

SEQ ID NO: 156112 - DNA, 26 bp, Artificial sequence
  SiRNA target sequence
taattatagataagaatattgataaa

SEQ ID NO: 156113 - DNA, 26 bp, Artificial sequence
  SiRNA target sequence
aattatagataagaatattgataaag

SEQ ID NO: 156114 - DNA, 26 bp, Artificial sequence
  SiRNA target sequence
attatagataagaatattgataaaga

SEQ ID NO: 156115 - DNA, 26 bp, Artificial sequence
  SiRNA target sequence
ttatagataagaatattgataaagat

SEQ ID NO: 156116 - DNA, 26 bp, Artificial sequence
  SiRNA target sequence
tatagataagaatattgataaagatt

SEQ ID NO: 156117 - DNA, 26 bp, Artificial sequence
  SiRNA target sequence
atagataagaatattgataaagattt

SEQ ID NO: 156118 - DNA, 26 bp, Artificial sequence
  SiRNA target sequence
tagataagaatattgataaagattta

SEQ ID NO: 156119 - DNA, 26 bp, Artificial sequence
  SiRNA target sequence
agataagaatattgataaagatttat

SEQ ID NO: 156120 - DNA, 26 bp, Artificial sequence
  SiRNA target sequence
gataagaatattgataaagatttatt

SEQ ID NO: 156121 - DNA, 26 bp, Artificial sequence
  SiRNA target sequence
ataagaatattgataaagatttatta

SEQ ID NO: 156122 - DNA, 26 bp, Artificial sequence
  SiRNA target sequence
taagaatattgataaagatttattag

SEQ ID NO: 156123 - DNA, 26 bp, Artificial sequence
  SiRNA target sequence
aagaatattgataaagatttattagc

SEQ ID NO: 156124 - DNA, 26 bp, Artificial sequence
  SiRNA target sequence
agaatattgataaagatttattagca

SEQ ID NO: 156125 - DNA, 26 bp, Artificial sequence
  SiRNA target sequence
gaatattgataaagatttattagcac

SEQ ID NO: 156126 - DNA, 26 bp, Artificial sequence
  SiRNA target sequence
aatattgataaagatttattagcacg

SEQ ID NO: 156127 - DNA, 26 bp, Artificial sequence
  SiRNA target sequence
atattgataaagatttattagcacgc

SEQ ID NO: 156128 - DNA, 26 bp, Artificial sequence
  SiRNA target sequence
tattgataaagatttattagcacgcg

SEQ ID NO: 156129 - DNA, 26 bp, Artificial sequence
  SiRNA target sequence
attgataaagatttattagcacgcgc

SEQ ID NO: 156130 - DNA, 26 bp, Artificial sequence
  SiRNA target sequence
ttgataaagatttattagcacgcgcc

SEQ ID NO: 156131 - DNA, 26 bp, Artificial sequence
  SiRNA target sequence
tgataaagatttattagcacgcgcct

SEQ ID NO: 156132 - DNA, 26 bp, Artificial sequence
  SiRNA target sequence
gataaagatttattagcacgcgcctt

SEQ ID NO: 156133 - DNA, 26 bp, Artificial sequence
  SiRNA target sequence
ataaagatttattagcacgcgccttg

SEQ ID NO: 156134 - DNA, 26 bp, Artificial sequence
  SiRNA target sequence
taaagatttattagcacgcgccttga

SEQ ID NO: 156135 - DNA, 26 bp, Artificial sequence
  SiRNA target sequence
aaagatttattagcacgcgccttgaa

SEQ ID NO: 156136 - DNA, 26 bp, Artificial sequence
  SiRNA target sequence
aagatttattagcacgcgccttgaat

SEQ ID NO: 156137 - DNA, 26 bp, Artificial sequence
  SiRNA target sequence
agatttattagcacgcgccttgaatt

SEQ ID NO: 156138 - DNA, 26 bp, Artificial sequence
  SiRNA target sequence
gatttattagcacgcgccttgaatta

SEQ ID NO: 156139 - DNA, 26 bp, Artificial sequence
  SiRNA target sequence
atttattagcacgcgccttgaattat

SEQ ID NO: 156140 - DNA, 26 bp, Artificial sequence
  SiRNA target sequence
tttattagcacgcgccttgaattatg

SEQ ID NO: 156141 - DNA, 26 bp, Artificial sequence
  SiRNA target sequence
ttattagcacgcgccttgaattatgt

SEQ ID NO: 156142 - DNA, 26 bp, Artificial sequence
  SiRNA target sequence
tattagcacgcgccttgaattatgtt

SEQ ID NO: 156143 - DNA, 26 bp, Artificial sequence
  SiRNA target sequence
attagcacgcgccttgaattatgttc

SEQ ID NO: 156144 - DNA, 26 bp, Artificial sequence
  SiRNA target sequence
ttagcacgcgccttgaattatgttcc

SEQ ID NO: 156145 - DNA, 26 bp, Artificial sequence
  SiRNA target sequence
tagcacgcgccttgaattatgttcct

SEQ ID NO: 156146 - DNA, 26 bp, Artificial sequence
  SiRNA target sequence
agcacgcgccttgaattatgttcctg

SEQ ID NO: 156147 - DNA, 26 bp, Artificial sequence
  SiRNA target sequence
gcacgcgccttgaattatgttcctgt

SEQ ID NO: 156148 - DNA, 26 bp, Artificial sequence
  SiRNA target sequence
cacgcgccttgaattatgttcctgta

SEQ ID NO: 156149 - DNA, 26 bp, Artificial sequence
  SiRNA target sequence
acgcgccttgaattatgttcctgtaa

SEQ ID NO: 156150 - DNA, 26 bp, Artificial sequence
  SiRNA target sequence
cgcgccttgaattatgttcctgtaag

SEQ ID NO: 156151 - DNA, 26 bp, Artificial sequence
  SiRNA target sequence
gcgccttgaattatgttcctgtaaga

SEQ ID NO: 156152 - DNA, 26 bp, Artificial sequence
  SiRNA target sequence
cgccttgaattatgttcctgtaagaa

SEQ ID NO: 156153 - DNA, 26 bp, Artificial sequence
  SiRNA target sequence
gccttgaattatgttcctgtaagaaa

SEQ ID NO: 156154 - DNA, 26 bp, Artificial sequence
  SiRNA target sequence
ccttgaattatgttcctgtaagaaaa

SEQ ID NO: 156155 - DNA, 26 bp, Artificial sequence
  SiRNA target sequence
cttgaattatgttcctgtaagaaaag

SEQ ID NO: 156156 - DNA, 26 bp, Artificial sequence
  SiRNA target sequence
ttgaattatgttcctgtaagaaaaga

SEQ ID NO: 156157 - DNA, 26 bp, Artificial sequence
  SiRNA target sequence
tgaattatgttcctgtaagaaaagat

SEQ ID NO: 156158 - DNA, 26 bp, Artificial sequence
  SiRNA target sequence
gaattatgttcctgtaagaaaagatt

SEQ ID NO: 156159 - DNA, 26 bp, Artificial sequence
  SiRNA target sequence
aattatgttcctgtaagaaaagattt

SEQ ID NO: 156160 - DNA, 26 bp, Artificial sequence
  SiRNA target sequence
attatgttcctgtaagaaaagatttt

SEQ ID NO: 156161 - DNA, 26 bp, Artificial sequence
  SiRNA target sequence
ttatgttcctgtaagaaaagatttta

SEQ ID NO: 156162 - DNA, 26 bp, Artificial sequence
  SiRNA target sequence
tatgttcctgtaagaaaagattttac

SEQ ID NO: 156163 - DNA, 26 bp, Artificial sequence
  SiRNA target sequence
atgttcctgtaagaaaagattttaca

SEQ ID NO: 156164 - DNA, 26 bp, Artificial sequence
  SiRNA target sequence
tgttcctgtaagaaaagattttacag

SEQ ID NO: 156165 - DNA, 26 bp, Artificial sequence
  SiRNA target sequence
gttcctgtaagaaaagattttacagg

SEQ ID NO: 156166 - DNA, 26 bp, Artificial sequence
  SiRNA target sequence
ttcctgtaagaaaagattttacagga

SEQ ID NO: 156167 - DNA, 26 bp, Artificial sequence
  SiRNA target sequence
tcctgtaagaaaagattttacaggaa

SEQ ID NO: 156168 - DNA, 26 bp, Artificial sequence
  SiRNA target sequence
cctgtaagaaaagattttacaggaac

SEQ ID NO: 156169 - DNA, 26 bp, Artificial sequence
  SiRNA target sequence
ctgtaagaaaagattttacaggaact

SEQ ID NO: 156170 - DNA, 26 bp, Artificial sequence
  SiRNA target sequence
tgtaagaaaagattttacaggaactg

SEQ ID NO: 156171 - DNA, 26 bp, Artificial sequence
  SiRNA target sequence
gtaagaaaagattttacaggaactgc

SEQ ID NO: 156172 - DNA, 26 bp, Artificial sequence
  SiRNA target sequence
taagaaaagattttacaggaactgct

SEQ ID NO: 156173 - DNA, 26 bp, Artificial sequence
  SiRNA target sequence
aagaaaagattttacaggaactgctg

SEQ ID NO: 156174 - DNA, 26 bp, Artificial sequence
  SiRNA target sequence
agaaaagattttacaggaactgctgt

SEQ ID NO: 156175 - DNA, 26 bp, Artificial sequence
  SiRNA target sequence
gaaaagattttacaggaactgctgtt

SEQ ID NO: 156176 - DNA, 26 bp, Artificial sequence
  SiRNA target sequence
aaaagattttacaggaactgctgttc

SEQ ID NO: 156177 - DNA, 26 bp, Artificial sequence
  SiRNA target sequence
aaagattttacaggaactgctgttcc

SEQ ID NO: 156178 - DNA, 26 bp, Artificial sequence
  SiRNA target sequence
aagattttacaggaactgctgttcca

SEQ ID NO: 156179 - DNA, 26 bp, Artificial sequence
  SiRNA target sequence
agattttacaggaactgctgttccaa

SEQ ID NO: 156180 - DNA, 26 bp, Artificial sequence
  SiRNA target sequence
gattttacaggaactgctgttccaaa

SEQ ID NO: 156181 - DNA, 26 bp, Artificial sequence
  SiRNA target sequence
attttacaggaactgctgttccaaaa

SEQ ID NO: 156182 - DNA, 26 bp, Artificial sequence
  SiRNA target sequence
ttttacaggaactgctgttccaaaat

SEQ ID NO: 156183 - DNA, 26 bp, Artificial sequence
  SiRNA target sequence
tttacaggaactgctgttccaaaata

SEQ ID NO: 156184 - DNA, 26 bp, Artificial sequence
  SiRNA target sequence
ttacaggaactgctgttccaaaatat

SEQ ID NO: 156185 - DNA, 26 bp, Artificial sequence
  SiRNA target sequence
tacaggaactgctgttccaaaatatg

SEQ ID NO: 156186 - DNA, 26 bp, Artificial sequence
  SiRNA target sequence
acaggaactgctgttccaaaatatgc

SEQ ID NO: 156187 - DNA, 26 bp, Artificial sequence
  SiRNA target sequence
caggaactgctgttccaaaatatgca

SEQ ID NO: 156188 - DNA, 26 bp, Artificial sequence
  SiRNA target sequence
aggaactgctgttccaaaatatgcag

SEQ ID NO: 156189 - DNA, 26 bp, Artificial sequence
  SiRNA target sequence
ggaactgctgttccaaaatatgcaga

SEQ ID NO: 156190 - DNA, 26 bp, Artificial sequence
  SiRNA target sequence
gaactgctgttccaaaatatgcagaa

SEQ ID NO: 156191 - DNA, 26 bp, Artificial sequence
  SiRNA target sequence
aactgctgttccaaaatatgcagaat

SEQ ID NO: 156192 - DNA, 26 bp, Artificial sequence
  SiRNA target sequence
actgctgttccaaaatatgcagaatt

SEQ ID NO: 156193 - DNA, 26 bp, Artificial sequence
  SiRNA target sequence
ctgctgttccaaaatatgcagaattt

SEQ ID NO: 156194 - DNA, 26 bp, Artificial sequence
  SiRNA target sequence
tgctgttccaaaatatgcagaatttg

SEQ ID NO: 156195 - DNA, 26 bp, Artificial sequence
  SiRNA target sequence
gctgttccaaaatatgcagaatttgg

SEQ ID NO: 156196 - DNA, 26 bp, Artificial sequence
  SiRNA target sequence
ctgttccaaaatatgcagaatttggt

SEQ ID NO: 156197 - DNA, 26 bp, Artificial sequence
  SiRNA target sequence
tgttccaaaatatgcagaatttggtg

SEQ ID NO: 156198 - DNA, 26 bp, Artificial sequence
  SiRNA target sequence
gttccaaaatatgcagaatttggtgt

SEQ ID NO: 156199 - DNA, 26 bp, Artificial sequence
  SiRNA target sequence
ttccaaaatatgcagaatttggtgtt

SEQ ID NO: 156200 - DNA, 26 bp, Artificial sequence
  SiRNA target sequence
tccaaaatatgcagaatttggtgtta

SEQ ID NO: 156201 - DNA, 26 bp, Artificial sequence
  SiRNA target sequence
ccaaaatatgcagaatttggtgttat

SEQ ID NO: 156202 - DNA, 26 bp, Artificial sequence
  SiRNA target sequence
caaaatatgcagaatttggtgttatg

SEQ ID NO: 156203 - DNA, 26 bp, Artificial sequence
  SiRNA target sequence
aaaatatgcagaatttggtgttatgc

SEQ ID NO: 156204 - DNA, 26 bp, Artificial sequence
  SiRNA target sequence
aaatatgcagaatttggtgttatgcc

SEQ ID NO: 156205 - DNA, 26 bp, Artificial sequence
  SiRNA target sequence
aatatgcagaatttggtgttatgcct

SEQ ID NO: 156206 - DNA, 26 bp, Artificial sequence
  SiRNA target sequence
atatgcagaatttggtgttatgccta

SEQ ID NO: 156207 - DNA, 26 bp, Artificial sequence
  SiRNA target sequence
tatgcagaatttggtgttatgcctaa

SEQ ID NO: 156208 - DNA, 26 bp, Artificial sequence
  SiRNA target sequence
atgcagaatttggtgttatgcctaaa

SEQ ID NO: 156209 - DNA, 26 bp, Artificial sequence
  SiRNA target sequence
tgcagaatttggtgttatgcctaaag

SEQ ID NO: 156210 - DNA, 26 bp, Artificial sequence
  SiRNA target sequence
gcagaatttggtgttatgcctaaaga

SEQ ID NO: 156211 - DNA, 26 bp, Artificial sequence
  SiRNA target sequence
cagaatttggtgttatgcctaaagaa

SEQ ID NO: 156212 - DNA, 26 bp, Artificial sequence
  SiRNA target sequence
agaatttggtgttatgcctaaagaac

SEQ ID NO: 156213 - DNA, 26 bp, Artificial sequence
  SiRNA target sequence
gaatttggtgttatgcctaaagaaca

SEQ ID NO: 156214 - DNA, 26 bp, Artificial sequence
  SiRNA target sequence
aatttggtgttatgcctaaagaacag

SEQ ID NO: 156215 - DNA, 26 bp, Artificial sequence
  SiRNA target sequence
atttggtgttatgcctaaagaacagg

SEQ ID NO: 156216 - DNA, 26 bp, Artificial sequence
  SiRNA target sequence
tttggtgttatgcctaaagaacagga

SEQ ID NO: 156217 - DNA, 26 bp, Artificial sequence
  SiRNA target sequence
ttggtgttatgcctaaagaacaggaa

SEQ ID NO: 156218 - DNA, 26 bp, Artificial sequence
  SiRNA target sequence
tggtgttatgcctaaagaacaggaag

SEQ ID NO: 156219 - DNA, 26 bp, Artificial sequence
  SiRNA target sequence
ggtgttatgcctaaagaacaggaaga

SEQ ID NO: 156220 - DNA, 26 bp, Artificial sequence
  SiRNA target sequence
gtgttatgcctaaagaacaggaagaa

SEQ ID NO: 156221 - DNA, 26 bp, Artificial sequence
  SiRNA target sequence
tgttatgcctaaagaacaggaagaac

SEQ ID NO: 156222 - DNA, 26 bp, Artificial sequence
  SiRNA target sequence
gttatgcctaaagaacaggaagaaca

SEQ ID NO: 156223 - DNA, 26 bp, Artificial sequence
  SiRNA target sequence
ttatgcctaaagaacaggaagaacaa

SEQ ID NO: 156224 - DNA, 26 bp, Artificial sequence
  SiRNA target sequence
tatgcctaaagaacaggaagaacaaa

SEQ ID NO: 156225 - DNA, 26 bp, Artificial sequence
  SiRNA target sequence
atgcctaaagaacaggaagaacaaaa

SEQ ID NO: 156226 - DNA, 26 bp, Artificial sequence
  SiRNA target sequence
tgcctaaagaacaggaagaacaaaac

SEQ ID NO: 156227 - DNA, 26 bp, Artificial sequence
  SiRNA target sequence
gcctaaagaacaggaagaacaaaacg

SEQ ID NO: 156228 - DNA, 26 bp, Artificial sequence
  SiRNA target sequence
cctaaagaacaggaagaacaaaacga

SEQ ID NO: 156229 - DNA, 26 bp, Artificial sequence
  SiRNA target sequence
ctaaagaacaggaagaacaaaacgaa

SEQ ID NO: 156230 - DNA, 26 bp, Artificial sequence
  SiRNA target sequence
taaagaacaggaagaacaaaacgaaa

SEQ ID NO: 156231 - DNA, 26 bp, Artificial sequence
  SiRNA target sequence
aaagaacaggaagaacaaaacgaaag

SEQ ID NO: 156232 - DNA, 26 bp, Artificial sequence
  SiRNA target sequence
aagaacaggaagaacaaaacgaaaga

SEQ ID NO: 156233 - DNA, 26 bp, Artificial sequence
  SiRNA target sequence
agaacaggaagaacaaaacgaaagag

SEQ ID NO: 156234 - DNA, 26 bp, Artificial sequence
  SiRNA target sequence
gaacaggaagaacaaaacgaaagaga

SEQ ID NO: 156235 - DNA, 26 bp, Artificial sequence
  SiRNA target sequence
aacaggaagaacaaaacgaaagagaa

SEQ ID NO: 156236 - DNA, 26 bp, Artificial sequence
  SiRNA target sequence
acaggaagaacaaaacgaaagagaaa

SEQ ID NO: 156237 - DNA, 26 bp, Artificial sequence
  SiRNA target sequence
caggaagaacaaaacgaaagagaaag

SEQ ID NO: 156238 - DNA, 26 bp, Artificial sequence
  SiRNA target sequence
aggaagaacaaaacgaaagagaaaga

SEQ ID NO: 156239 - DNA, 26 bp, Artificial sequence
  SiRNA target sequence
ggaagaacaaaacgaaagagaaagat

SEQ ID NO: 156240 - DNA, 26 bp, Artificial sequence
  SiRNA target sequence
gaagaacaaaacgaaagagaaagatt

SEQ ID NO: 156241 - DNA, 26 bp, Artificial sequence
  SiRNA target sequence
aagaacaaaacgaaagagaaagattc

SEQ ID NO: 156242 - DNA, 26 bp, Artificial sequence
  SiRNA target sequence
agaacaaaacgaaagagaaagattcg

SEQ ID NO: 156243 - DNA, 26 bp, Artificial sequence
  SiRNA target sequence
gaacaaaacgaaagagaaagattcga

SEQ ID NO: 156244 - DNA, 26 bp, Artificial sequence
  SiRNA target sequence
aacaaaacgaaagagaaagattcgaa

SEQ ID NO: 156245 - DNA, 26 bp, Artificial sequence
  SiRNA target sequence
acaaaacgaaagagaaagattcgaag

SEQ ID NO: 156246 - DNA, 26 bp, Artificial sequence
  SiRNA target sequence
caaaacgaaagagaaagattcgaagg

SEQ ID NO: 156247 - DNA, 26 bp, Artificial sequence
  SiRNA target sequence
aaaacgaaagagaaagattcgaaggt

SEQ ID NO: 156248 - DNA, 26 bp, Artificial sequence
  SiRNA target sequence
aaacgaaagagaaagattcgaaggtg

SEQ ID NO: 156249 - DNA, 26 bp, Artificial sequence
  SiRNA target sequence
aacgaaagagaaagattcgaaggtgc

SEQ ID NO: 156250 - DNA, 26 bp, Artificial sequence
  SiRNA target sequence
acgaaagagaaagattcgaaggtgca

SEQ ID NO: 156251 - DNA, 26 bp, Artificial sequence
  SiRNA target sequence
cgaaagagaaagattcgaaggtgcag

SEQ ID NO: 156252 - DNA, 26 bp, Artificial sequence
  SiRNA target sequence
gaaagagaaagattcgaaggtgcaga

SEQ ID NO: 156253 - DNA, 26 bp, Artificial sequence
  SiRNA target sequence
aaagagaaagattcgaaggtgcagaa

SEQ ID NO: 156254 - DNA, 26 bp, Artificial sequence
  SiRNA target sequence
aagagaaagattcgaaggtgcagaag

SEQ ID NO: 156255 - DNA, 26 bp, Artificial sequence
  SiRNA target sequence
agagaaagattcgaaggtgcagaaga

SEQ ID NO: 156256 - DNA, 26 bp, Artificial sequence
  SiRNA target sequence
gagaaagattcgaaggtgcagaagag

SEQ ID NO: 156257 - DNA, 26 bp, Artificial sequence
  SiRNA target sequence
agaaagattcgaaggtgcagaagagt

SEQ ID NO: 156258 - DNA, 26 bp, Artificial sequence
  SiRNA target sequence
gaaagattcgaaggtgcagaagagtt

SEQ ID NO: 156259 - DNA, 26 bp, Artificial sequence
  SiRNA target sequence
aaagattcgaaggtgcagaagagttt

SEQ ID NO: 156260 - DNA, 26 bp, Artificial sequence
  SiRNA target sequence
aagattcgaaggtgcagaagagtttt

SEQ ID NO: 156261 - DNA, 26 bp, Artificial sequence
  SiRNA target sequence
agattcgaaggtgcagaagagttttt

SEQ ID NO: 156262 - DNA, 26 bp, Artificial sequence
  SiRNA target sequence
gattcgaaggtgcagaagagtttttt

SEQ ID NO: 156263 - DNA, 26 bp, Artificial sequence
  SiRNA target sequence
attcgaaggtgcagaagagttttttg

SEQ ID NO: 156264 - DNA, 26 bp, Artificial sequence
  SiRNA target sequence
ttcgaaggtgcagaagagttttttgg

SEQ ID NO: 156265 - DNA, 26 bp, Artificial sequence
  SiRNA target sequence
tcgaaggtgcagaagagttttttgga

SEQ ID NO: 156266 - DNA, 26 bp, Artificial sequence
  SiRNA target sequence
cgaaggtgcagaagagttttttggag

SEQ ID NO: 156267 - DNA, 26 bp, Artificial sequence
  SiRNA target sequence
gaaggtgcagaagagttttttggagg

SEQ ID NO: 156268 - DNA, 26 bp, Artificial sequence
  SiRNA target sequence
aaggtgcagaagagttttttggagga

SEQ ID NO: 156269 - DNA, 26 bp, Artificial sequence
  SiRNA target sequence
aggtgcagaagagttttttggaggaa

SEQ ID NO: 156270 - DNA, 26 bp, Artificial sequence
  SiRNA target sequence
ggtgcagaagagttttttggaggaaa

SEQ ID NO: 156271 - DNA, 26 bp, Artificial sequence
  SiRNA target sequence
gtgcagaagagttttttggaggaaat

SEQ ID NO: 156272 - DNA, 26 bp, Artificial sequence
  SiRNA target sequence
tgcagaagagttttttggaggaaatg

SEQ ID NO: 156273 - DNA, 26 bp, Artificial sequence
  SiRNA target sequence
gcagaagagttttttggaggaaatgg

SEQ ID NO: 156274 - DNA, 26 bp, Artificial sequence
  SiRNA target sequence
cagaagagttttttggaggaaatggt

SEQ ID NO: 156275 - DNA, 26 bp, Artificial sequence
  SiRNA target sequence
agaagagttttttggaggaaatggta

SEQ ID NO: 156276 - DNA, 26 bp, Artificial sequence
  SiRNA target sequence
gaagagttttttggaggaaatggtag

SEQ ID NO: 156277 - DNA, 26 bp, Artificial sequence
  SiRNA target sequence
aagagttttttggaggaaatggtaga

SEQ ID NO: 156278 - DNA, 26 bp, Artificial sequence
  SiRNA target sequence
agagttttttggaggaaatggtagag

SEQ ID NO: 156279 - DNA, 26 bp, Artificial sequence
  SiRNA target sequence
gagttttttggaggaaatggtagaga

SEQ ID NO: 156280 - DNA, 26 bp, Artificial sequence
  SiRNA target sequence
agttttttggaggaaatggtagagat

SEQ ID NO: 156281 - DNA, 26 bp, Artificial sequence
  SiRNA target sequence
gttttttggaggaaatggtagagatt

SEQ ID NO: 156282 - DNA, 26 bp, Artificial sequence
  SiRNA target sequence
ttttttggaggaaatggtagagattt

SEQ ID NO: 156283 - DNA, 26 bp, Artificial sequence
  SiRNA target sequence
tttttggaggaaatggtagagatttt

SEQ ID NO: 156284 - DNA, 26 bp, Artificial sequence
  SiRNA target sequence
ttttggaggaaatggtagagattttt

SEQ ID NO: 156285 - DNA, 26 bp, Artificial sequence
  SiRNA target sequence
tttggaggaaatggtagagatttttt

SEQ ID NO: 156286 - DNA, 26 bp, Artificial sequence
  SiRNA target sequence
ttggaggaaatggtagagattttttt

SEQ ID NO: 156287 - DNA, 26 bp, Artificial sequence
  SiRNA target sequence
tggaggaaatggtagagattttttta

SEQ ID NO: 156288 - DNA, 26 bp, Artificial sequence
  SiRNA target sequence
ggaggaaatggtagagatttttttag

SEQ ID NO: 156289 - DNA, 26 bp, Artificial sequence
  SiRNA target sequence
gaggaaatggtagagatttttttagc

SEQ ID NO: 156290 - DNA, 26 bp, Artificial sequence
  SiRNA target sequence
aggaaatggtagagatttttttagca

SEQ ID NO: 156291 - DNA, 26 bp, Artificial sequence
  SiRNA target sequence
ggaaatggtagagatttttttagcaa

SEQ ID NO: 156292 - DNA, 26 bp, Artificial sequence
  SiRNA target sequence
gaaatggtagagatttttttagcaag

SEQ ID NO: 156293 - DNA, 26 bp, Artificial sequence
  SiRNA target sequence
aaatggtagagatttttttagcaagt

SEQ ID NO: 156294 - DNA, 26 bp, Artificial sequence
  SiRNA target sequence
aatggtagagatttttttagcaagtt

SEQ ID NO: 156295 - DNA, 26 bp, Artificial sequence
  SiRNA target sequence
atggtagagatttttttagcaagttt

SEQ ID NO: 156296 - DNA, 26 bp, Artificial sequence
  SiRNA target sequence
tggtagagatttttttagcaagtttg

SEQ ID NO: 156297 - DNA, 26 bp, Artificial sequence
  SiRNA target sequence
ggtagagatttttttagcaagtttgg

SEQ ID NO: 156298 - DNA, 26 bp, Artificial sequence
  SiRNA target sequence
gtagagatttttttagcaagtttgga

SEQ ID NO: 156299 - DNA, 26 bp, Artificial sequence
  SiRNA target sequence
tagagatttttttagcaagtttggat

SEQ ID NO: 156300 - DNA, 26 bp, Artificial sequence
  SiRNA target sequence
agagatttttttagcaagtttggatt

SEQ ID NO: 156301 - DNA, 26 bp, Artificial sequence
  SiRNA target sequence
gagatttttttagcaagtttggattt

SEQ ID NO: 156302 - DNA, 26 bp, Artificial sequence
  SiRNA target sequence
agatttttttagcaagtttggatttt

SEQ ID NO: 156303 - DNA, 26 bp, Artificial sequence
  SiRNA target sequence
gatttttttagcaagtttggattttt

SEQ ID NO: 156304 - DNA, 26 bp, Artificial sequence
  SiRNA target sequence
atttttttagcaagtttggatttttc

SEQ ID NO: 156305 - DNA, 26 bp, Artificial sequence
  SiRNA target sequence
tttttttagcaagtttggatttttct

SEQ ID NO: 156306 - DNA, 26 bp, Artificial sequence
  SiRNA target sequence
ttttttagcaagtttggatttttcta

SEQ ID NO: 156307 - DNA, 26 bp, Artificial sequence
  SiRNA target sequence
tttttagcaagtttggatttttctaa

SEQ ID NO: 156308 - DNA, 27 bp, Artificial sequence
  SiRNA target sequence
atggcacaagacccccaaggactttat

SEQ ID NO: 156309 - DNA, 27 bp, Artificial sequence
  SiRNA target sequence
tggcacaagacccccaaggactttatg

SEQ ID NO: 156310 - DNA, 27 bp, Artificial sequence
  SiRNA target sequence
ggcacaagacccccaaggactttatga

SEQ ID NO: 156311 - DNA, 27 bp, Artificial sequence
  SiRNA target sequence
gcacaagacccccaaggactttatgaa

SEQ ID NO: 156312 - DNA, 27 bp, Artificial sequence
  SiRNA target sequence
cacaagacccccaaggactttatgaag

SEQ ID NO: 156313 - DNA, 27 bp, Artificial sequence
  SiRNA target sequence
acaagacccccaaggactttatgaagt

SEQ ID NO: 156314 - DNA, 27 bp, Artificial sequence
  SiRNA target sequence
caagacccccaaggactttatgaagta

SEQ ID NO: 156315 - DNA, 27 bp, Artificial sequence
  SiRNA target sequence
aagacccccaaggactttatgaagtat

SEQ ID NO: 156316 - DNA, 27 bp, Artificial sequence
  SiRNA target sequence
agacccccaaggactttatgaagtatt

SEQ ID NO: 156317 - DNA, 27 bp, Artificial sequence
  SiRNA target sequence
gacccccaaggactttatgaagtatta

SEQ ID NO: 156318 - DNA, 27 bp, Artificial sequence
  SiRNA target sequence
acccccaaggactttatgaagtattag

SEQ ID NO: 156319 - DNA, 27 bp, Artificial sequence
  SiRNA target sequence
cccccaaggactttatgaagtattagg

SEQ ID NO: 156320 - DNA, 27 bp, Artificial sequence
  SiRNA target sequence
ccccaaggactttatgaagtattagga

SEQ ID NO: 156321 - DNA, 27 bp, Artificial sequence
  SiRNA target sequence
cccaaggactttatgaagtattaggac

SEQ ID NO: 156322 - DNA, 27 bp, Artificial sequence
  SiRNA target sequence
ccaaggactttatgaagtattaggact

SEQ ID NO: 156323 - DNA, 27 bp, Artificial sequence
  SiRNA target sequence
caaggactttatgaagtattaggactt

SEQ ID NO: 156324 - DNA, 27 bp, Artificial sequence
  SiRNA target sequence
aaggactttatgaagtattaggactta

SEQ ID NO: 156325 - DNA, 27 bp, Artificial sequence
  SiRNA target sequence
aggactttatgaagtattaggacttaa

SEQ ID NO: 156326 - DNA, 27 bp, Artificial sequence
  SiRNA target sequence
ggactttatgaagtattaggacttaaa

SEQ ID NO: 156327 - DNA, 27 bp, Artificial sequence
  SiRNA target sequence
gactttatgaagtattaggacttaaag

SEQ ID NO: 156328 - DNA, 27 bp, Artificial sequence
  SiRNA target sequence
actttatgaagtattaggacttaaagc

SEQ ID NO: 156329 - DNA, 27 bp, Artificial sequence
  SiRNA target sequence
ctttatgaagtattaggacttaaagct

SEQ ID NO: 156330 - DNA, 27 bp, Artificial sequence
  SiRNA target sequence
tttatgaagtattaggacttaaagctg

SEQ ID NO: 156331 - DNA, 27 bp, Artificial sequence
  SiRNA target sequence
ttatgaagtattaggacttaaagctgg

SEQ ID NO: 156332 - DNA, 27 bp, Artificial sequence
  SiRNA target sequence
tatgaagtattaggacttaaagctggt

SEQ ID NO: 156333 - DNA, 27 bp, Artificial sequence
  SiRNA target sequence
atgaagtattaggacttaaagctggtg

SEQ ID NO: 156334 - DNA, 27 bp, Artificial sequence
  SiRNA target sequence
tgaagtattaggacttaaagctggtgc

SEQ ID NO: 156335 - DNA, 27 bp, Artificial sequence
  SiRNA target sequence
gaagtattaggacttaaagctggtgca

SEQ ID NO: 156336 - DNA, 27 bp, Artificial sequence
  SiRNA target sequence
aagtattaggacttaaagctggtgcaa

SEQ ID NO: 156337 - DNA, 27 bp, Artificial sequence
  SiRNA target sequence
agtattaggacttaaagctggtgcaag

SEQ ID NO: 156338 - DNA, 27 bp, Artificial sequence
  SiRNA target sequence
gtattaggacttaaagctggtgcaagc

SEQ ID NO: 156339 - DNA, 27 bp, Artificial sequence
  SiRNA target sequence
tattaggacttaaagctggtgcaagca

SEQ ID NO: 156340 - DNA, 27 bp, Artificial sequence
  SiRNA target sequence
attaggacttaaagctggtgcaagcat

SEQ ID NO: 156341 - DNA, 27 bp, Artificial sequence
  SiRNA target sequence
ttaggacttaaagctggtgcaagcatt

SEQ ID NO: 156342 - DNA, 27 bp, Artificial sequence
  SiRNA target sequence
taggacttaaagctggtgcaagcattg

SEQ ID NO: 156343 - DNA, 27 bp, Artificial sequence
  SiRNA target sequence
aggacttaaagctggtgcaagcattga

SEQ ID NO: 156344 - DNA, 27 bp, Artificial sequence
  SiRNA target sequence
ggacttaaagctggtgcaagcattgat

SEQ ID NO: 156345 - DNA, 27 bp, Artificial sequence
  SiRNA target sequence
gacttaaagctggtgcaagcattgatg

SEQ ID NO: 156346 - DNA, 27 bp, Artificial sequence
  SiRNA target sequence
acttaaagctggtgcaagcattgatga

SEQ ID NO: 156347 - DNA, 27 bp, Artificial sequence
  SiRNA target sequence
cttaaagctggtgcaagcattgatgaa

SEQ ID NO: 156348 - DNA, 27 bp, Artificial sequence
  SiRNA target sequence
ttaaagctggtgcaagcattgatgaag

SEQ ID NO: 156349 - DNA, 27 bp, Artificial sequence
  SiRNA target sequence
taaagctggtgcaagcattgatgaagt

SEQ ID NO: 156350 - DNA, 27 bp, Artificial sequence
  SiRNA target sequence
aaagctggtgcaagcattgatgaagtt

SEQ ID NO: 156351 - DNA, 27 bp, Artificial sequence
  SiRNA target sequence
aagctggtgcaagcattgatgaagtta

SEQ ID NO: 156352 - DNA, 27 bp, Artificial sequence
  SiRNA target sequence
agctggtgcaagcattgatgaagttaa

SEQ ID NO: 156353 - DNA, 27 bp, Artificial sequence
  SiRNA target sequence
gctggtgcaagcattgatgaagttaaa

SEQ ID NO: 156354 - DNA, 27 bp, Artificial sequence
  SiRNA target sequence
ctggtgcaagcattgatgaagttaaaa

SEQ ID NO: 156355 - DNA, 27 bp, Artificial sequence
  SiRNA target sequence
tggtgcaagcattgatgaagttaaaaa

SEQ ID NO: 156356 - DNA, 27 bp, Artificial sequence
  SiRNA target sequence
ggtgcaagcattgatgaagttaaaaaa

SEQ ID NO: 156357 - DNA, 27 bp, Artificial sequence
  SiRNA target sequence
gtgcaagcattgatgaagttaaaaaag

SEQ ID NO: 156358 - DNA, 27 bp, Artificial sequence
  SiRNA target sequence
tgcaagcattgatgaagttaaaaaagc

SEQ ID NO: 156359 - DNA, 27 bp, Artificial sequence
  SiRNA target sequence
gcaagcattgatgaagttaaaaaagca

SEQ ID NO: 156360 - DNA, 27 bp, Artificial sequence
  SiRNA target sequence
caagcattgatgaagttaaaaaagcat

SEQ ID NO: 156361 - DNA, 27 bp, Artificial sequence
  SiRNA target sequence
aagcattgatgaagttaaaaaagcatt

SEQ ID NO: 156362 - DNA, 27 bp, Artificial sequence
  SiRNA target sequence
agcattgatgaagttaaaaaagcattt

SEQ ID NO: 156363 - DNA, 27 bp, Artificial sequence
  SiRNA target sequence
gcattgatgaagttaaaaaagcattta

SEQ ID NO: 156364 - DNA, 27 bp, Artificial sequence
  SiRNA target sequence
cattgatgaagttaaaaaagcatttac

SEQ ID NO: 156365 - DNA, 27 bp, Artificial sequence
  SiRNA target sequence
attgatgaagttaaaaaagcatttaca

SEQ ID NO: 156366 - DNA, 27 bp, Artificial sequence
  SiRNA target sequence
ttgatgaagttaaaaaagcatttacaa

SEQ ID NO: 156367 - DNA, 27 bp, Artificial sequence
  SiRNA target sequence
tgatgaagttaaaaaagcatttacaaa

SEQ ID NO: 156368 - DNA, 27 bp, Artificial sequence
  SiRNA target sequence
gatgaagttaaaaaagcatttacaaaa

SEQ ID NO: 156369 - DNA, 27 bp, Artificial sequence
  SiRNA target sequence
atgaagttaaaaaagcatttacaaaaa

SEQ ID NO: 156370 - DNA, 27 bp, Artificial sequence
  SiRNA target sequence
tgaagttaaaaaagcatttacaaaaaa

SEQ ID NO: 156371 - DNA, 27 bp, Artificial sequence
  SiRNA target sequence
gaagttaaaaaagcatttacaaaaaaa

SEQ ID NO: 156372 - DNA, 27 bp, Artificial sequence
  SiRNA target sequence
aagttaaaaaagcatttacaaaaaaac

SEQ ID NO: 156373 - DNA, 27 bp, Artificial sequence
  SiRNA target sequence
agttaaaaaagcatttacaaaaaaaca

SEQ ID NO: 156374 - DNA, 27 bp, Artificial sequence
  SiRNA target sequence
gttaaaaaagcatttacaaaaaaacaa

SEQ ID NO: 156375 - DNA, 27 bp, Artificial sequence
  SiRNA target sequence
ttaaaaaagcatttacaaaaaaacaaa

SEQ ID NO: 156376 - DNA, 27 bp, Artificial sequence
  SiRNA target sequence
taaaaaagcatttacaaaaaaacaaag

SEQ ID NO: 156377 - DNA, 27 bp, Artificial sequence
  SiRNA target sequence
aaaaaagcatttacaaaaaaacaaagg

SEQ ID NO: 156378 - DNA, 27 bp, Artificial sequence
  SiRNA target sequence
aaaaagcatttacaaaaaaacaaaggg

SEQ ID NO: 156379 - DNA, 27 bp, Artificial sequence
  SiRNA target sequence
aaaagcatttacaaaaaaacaaaggga

SEQ ID NO: 156380 - DNA, 27 bp, Artificial sequence
  SiRNA target sequence
aaagcatttacaaaaaaacaaagggaa

SEQ ID NO: 156381 - DNA, 27 bp, Artificial sequence
  SiRNA target sequence
aagcatttacaaaaaaacaaagggaat

SEQ ID NO: 156382 - DNA, 27 bp, Artificial sequence
  SiRNA target sequence
agcatttacaaaaaaacaaagggaatg

SEQ ID NO: 156383 - DNA, 27 bp, Artificial sequence
  SiRNA target sequence
gcatttacaaaaaaacaaagggaatgt

SEQ ID NO: 156384 - DNA, 27 bp, Artificial sequence
  SiRNA target sequence
catttacaaaaaaacaaagggaatgtc

SEQ ID NO: 156385 - DNA, 27 bp, Artificial sequence
  SiRNA target sequence
atttacaaaaaaacaaagggaatgtca

SEQ ID NO: 156386 - DNA, 27 bp, Artificial sequence
  SiRNA target sequence
tttacaaaaaaacaaagggaatgtcat

SEQ ID NO: 156387 - DNA, 27 bp, Artificial sequence
  SiRNA target sequence
ttacaaaaaaacaaagggaatgtcatc

SEQ ID NO: 156388 - DNA, 27 bp, Artificial sequence
  SiRNA target sequence
tacaaaaaaacaaagggaatgtcatcc

SEQ ID NO: 156389 - DNA, 27 bp, Artificial sequence
  SiRNA target sequence
acaaaaaaacaaagggaatgtcatccc

SEQ ID NO: 156390 - DNA, 27 bp, Artificial sequence
  SiRNA target sequence
caaaaaaacaaagggaatgtcatcccg

SEQ ID NO: 156391 - DNA, 27 bp, Artificial sequence
  SiRNA target sequence
aaaaaaacaaagggaatgtcatcccga

SEQ ID NO: 156392 - DNA, 27 bp, Artificial sequence
  SiRNA target sequence
aaaaaacaaagggaatgtcatcccgat

SEQ ID NO: 156393 - DNA, 27 bp, Artificial sequence
  SiRNA target sequence
aaaaacaaagggaatgtcatcccgatg

SEQ ID NO: 156394 - DNA, 27 bp, Artificial sequence
  SiRNA target sequence
aaaacaaagggaatgtcatcccgatgg

SEQ ID NO: 156395 - DNA, 27 bp, Artificial sequence
  SiRNA target sequence
aaacaaagggaatgtcatcccgatggt

SEQ ID NO: 156396 - DNA, 27 bp, Artificial sequence
  SiRNA target sequence
aacaaagggaatgtcatcccgatggtg

SEQ ID NO: 156397 - DNA, 27 bp, Artificial sequence
  SiRNA target sequence
acaaagggaatgtcatcccgatggtgc

SEQ ID NO: 156398 - DNA, 27 bp, Artificial sequence
  SiRNA target sequence
caaagggaatgtcatcccgatggtgca

SEQ ID NO: 156399 - DNA, 27 bp, Artificial sequence
  SiRNA target sequence
aaagggaatgtcatcccgatggtgcat

SEQ ID NO: 156400 - DNA, 27 bp, Artificial sequence
  SiRNA target sequence
aagggaatgtcatcccgatggtgcatt

SEQ ID NO: 156401 - DNA, 27 bp, Artificial sequence
  SiRNA target sequence
agggaatgtcatcccgatggtgcattt

SEQ ID NO: 156402 - DNA, 27 bp, Artificial sequence
  SiRNA target sequence
gggaatgtcatcccgatggtgcatttt

SEQ ID NO: 156403 - DNA, 27 bp, Artificial sequence
  SiRNA target sequence
ggaatgtcatcccgatggtgcattttt

SEQ ID NO: 156404 - DNA, 27 bp, Artificial sequence
  SiRNA target sequence
gaatgtcatcccgatggtgcatttttt

SEQ ID NO: 156405 - DNA, 27 bp, Artificial sequence
  SiRNA target sequence
aatgtcatcccgatggtgcatttttta

SEQ ID NO: 156406 - DNA, 27 bp, Artificial sequence
  SiRNA target sequence
atgtcatcccgatggtgcattttttaa

SEQ ID NO: 156407 - DNA, 27 bp, Artificial sequence
  SiRNA target sequence
tgtcatcccgatggtgcattttttaaa

SEQ ID NO: 156408 - DNA, 27 bp, Artificial sequence
  SiRNA target sequence
gtcatcccgatggtgcattttttaaag

SEQ ID NO: 156409 - DNA, 27 bp, Artificial sequence
  SiRNA target sequence
tcatcccgatggtgcattttttaaagc

SEQ ID NO: 156410 - DNA, 27 bp, Artificial sequence
  SiRNA target sequence
catcccgatggtgcattttttaaagct

SEQ ID NO: 156411 - DNA, 27 bp, Artificial sequence
  SiRNA target sequence
atcccgatggtgcattttttaaagctg

SEQ ID NO: 156412 - DNA, 27 bp, Artificial sequence
  SiRNA target sequence
tcccgatggtgcattttttaaagctgc

SEQ ID NO: 156413 - DNA, 27 bp, Artificial sequence
  SiRNA target sequence
cccgatggtgcattttttaaagctgct

SEQ ID NO: 156414 - DNA, 27 bp, Artificial sequence
  SiRNA target sequence
ccgatggtgcattttttaaagctgctc

SEQ ID NO: 156415 - DNA, 27 bp, Artificial sequence
  SiRNA target sequence
cgatggtgcattttttaaagctgctct

SEQ ID NO: 156416 - DNA, 27 bp, Artificial sequence
  SiRNA target sequence
gatggtgcattttttaaagctgctctt

SEQ ID NO: 156417 - DNA, 27 bp, Artificial sequence
  SiRNA target sequence
atggtgcattttttaaagctgctctta

SEQ ID NO: 156418 - DNA, 27 bp, Artificial sequence
  SiRNA target sequence
tggtgcattttttaaagctgctcttag

SEQ ID NO: 156419 - DNA, 27 bp, Artificial sequence
  SiRNA target sequence
ggtgcattttttaaagctgctcttaga

SEQ ID NO: 156420 - DNA, 27 bp, Artificial sequence
  SiRNA target sequence
gtgcattttttaaagctgctcttagaa

SEQ ID NO: 156421 - DNA, 27 bp, Artificial sequence
  SiRNA target sequence
tgcattttttaaagctgctcttagaaa

SEQ ID NO: 156422 - DNA, 27 bp, Artificial sequence
  SiRNA target sequence
gcattttttaaagctgctcttagaaaa

SEQ ID NO: 156423 - DNA, 27 bp, Artificial sequence
  SiRNA target sequence
cattttttaaagctgctcttagaaaat

SEQ ID NO: 156424 - DNA, 27 bp, Artificial sequence
  SiRNA target sequence
attttttaaagctgctcttagaaaatg

SEQ ID NO: 156425 - DNA, 27 bp, Artificial sequence
  SiRNA target sequence
ttttttaaagctgctcttagaaaatgt

SEQ ID NO: 156426 - DNA, 27 bp, Artificial sequence
  SiRNA target sequence
tttttaaagctgctcttagaaaatgta

SEQ ID NO: 156427 - DNA, 27 bp, Artificial sequence
  SiRNA target sequence
ttttaaagctgctcttagaaaatgtaa

SEQ ID NO: 156428 - DNA, 27 bp, Artificial sequence
  SiRNA target sequence
tttaaagctgctcttagaaaatgtaaa

SEQ ID NO: 156429 - DNA, 27 bp, Artificial sequence
  SiRNA target sequence
ttaaagctgctcttagaaaatgtaaaa

SEQ ID NO: 156430 - DNA, 27 bp, Artificial sequence
  SiRNA target sequence
taaagctgctcttagaaaatgtaaaac

SEQ ID NO: 156431 - DNA, 27 bp, Artificial sequence
  SiRNA target sequence
aaagctgctcttagaaaatgtaaaaca

SEQ ID NO: 156432 - DNA, 27 bp, Artificial sequence
  SiRNA target sequence
aagctgctcttagaaaatgtaaaacag

SEQ ID NO: 156433 - DNA, 27 bp, Artificial sequence
  SiRNA target sequence
agctgctcttagaaaatgtaaaacaga

SEQ ID NO: 156434 - DNA, 27 bp, Artificial sequence
  SiRNA target sequence
gctgctcttagaaaatgtaaaacagat

SEQ ID NO: 156435 - DNA, 27 bp, Artificial sequence
  SiRNA target sequence
ctgctcttagaaaatgtaaaacagatg

SEQ ID NO: 156436 - DNA, 27 bp, Artificial sequence
  SiRNA target sequence
tgctcttagaaaatgtaaaacagatga

SEQ ID NO: 156437 - DNA, 27 bp, Artificial sequence
  SiRNA target sequence
gctcttagaaaatgtaaaacagatgaa

SEQ ID NO: 156438 - DNA, 27 bp, Artificial sequence
  SiRNA target sequence
ctcttagaaaatgtaaaacagatgaag

SEQ ID NO: 156439 - DNA, 27 bp, Artificial sequence
  SiRNA target sequence
tcttagaaaatgtaaaacagatgaaga

SEQ ID NO: 156440 - DNA, 27 bp, Artificial sequence
  SiRNA target sequence
cttagaaaatgtaaaacagatgaagaa

SEQ ID NO: 156441 - DNA, 27 bp, Artificial sequence
  SiRNA target sequence
ttagaaaatgtaaaacagatgaagaaa

SEQ ID NO: 156442 - DNA, 27 bp, Artificial sequence
  SiRNA target sequence
tagaaaatgtaaaacagatgaagaaag

SEQ ID NO: 156443 - DNA, 27 bp, Artificial sequence
  SiRNA target sequence
agaaaatgtaaaacagatgaagaaaga

SEQ ID NO: 156444 - DNA, 27 bp, Artificial sequence
  SiRNA target sequence
gaaaatgtaaaacagatgaagaaagag

SEQ ID NO: 156445 - DNA, 27 bp, Artificial sequence
  SiRNA target sequence
aaaatgtaaaacagatgaagaaagagc

SEQ ID NO: 156446 - DNA, 27 bp, Artificial sequence
  SiRNA target sequence
aaatgtaaaacagatgaagaaagagca

SEQ ID NO: 156447 - DNA, 27 bp, Artificial sequence
  SiRNA target sequence
aatgtaaaacagatgaagaaagagcaa

SEQ ID NO: 156448 - DNA, 27 bp, Artificial sequence
  SiRNA target sequence
atgtaaaacagatgaagaaagagcaaa

SEQ ID NO: 156449 - DNA, 27 bp, Artificial sequence
  SiRNA target sequence
tgtaaaacagatgaagaaagagcaaaa

SEQ ID NO: 156450 - DNA, 27 bp, Artificial sequence
  SiRNA target sequence
gtaaaacagatgaagaaagagcaaaag

SEQ ID NO: 156451 - DNA, 27 bp, Artificial sequence
  SiRNA target sequence
taaaacagatgaagaaagagcaaaagt

SEQ ID NO: 156452 - DNA, 27 bp, Artificial sequence
  SiRNA target sequence
aaaacagatgaagaaagagcaaaagtt

SEQ ID NO: 156453 - DNA, 27 bp, Artificial sequence
  SiRNA target sequence
aaacagatgaagaaagagcaaaagttg

SEQ ID NO: 156454 - DNA, 27 bp, Artificial sequence
  SiRNA target sequence
aacagatgaagaaagagcaaaagttga

SEQ ID NO: 156455 - DNA, 27 bp, Artificial sequence
  SiRNA target sequence
acagatgaagaaagagcaaaagttgaa

SEQ ID NO: 156456 - DNA, 27 bp, Artificial sequence
  SiRNA target sequence
cagatgaagaaagagcaaaagttgaaa

SEQ ID NO: 156457 - DNA, 27 bp, Artificial sequence
  SiRNA target sequence
agatgaagaaagagcaaaagttgaaaa

SEQ ID NO: 156458 - DNA, 27 bp, Artificial sequence
  SiRNA target sequence
gatgaagaaagagcaaaagttgaaaaa

SEQ ID NO: 156459 - DNA, 27 bp, Artificial sequence
  SiRNA target sequence
atgaagaaagagcaaaagttgaaaaag

SEQ ID NO: 156460 - DNA, 27 bp, Artificial sequence
  SiRNA target sequence
tgaagaaagagcaaaagttgaaaaaga

SEQ ID NO: 156461 - DNA, 27 bp, Artificial sequence
  SiRNA target sequence
gaagaaagagcaaaagttgaaaaagaa

SEQ ID NO: 156462 - DNA, 27 bp, Artificial sequence
  SiRNA target sequence
aagaaagagcaaaagttgaaaaagaat

SEQ ID NO: 156463 - DNA, 27 bp, Artificial sequence
  SiRNA target sequence
agaaagagcaaaagttgaaaaagaatt

SEQ ID NO: 156464 - DNA, 27 bp, Artificial sequence
  SiRNA target sequence
gaaagagcaaaagttgaaaaagaattt

SEQ ID NO: 156465 - DNA, 27 bp, Artificial sequence
  SiRNA target sequence
aaagagcaaaagttgaaaaagaattta

SEQ ID NO: 156466 - DNA, 27 bp, Artificial sequence
  SiRNA target sequence
aagagcaaaagttgaaaaagaatttaa

SEQ ID NO: 156467 - DNA, 27 bp, Artificial sequence
  SiRNA target sequence
agagcaaaagttgaaaaagaatttaaa

SEQ ID NO: 156468 - DNA, 27 bp, Artificial sequence
  SiRNA target sequence
gagcaaaagttgaaaaagaatttaaag

SEQ ID NO: 156469 - DNA, 27 bp, Artificial sequence
  SiRNA target sequence
agcaaaagttgaaaaagaatttaaaga

SEQ ID NO: 156470 - DNA, 27 bp, Artificial sequence
  SiRNA target sequence
gcaaaagttgaaaaagaatttaaagaa

SEQ ID NO: 156471 - DNA, 27 bp, Artificial sequence
  SiRNA target sequence
caaaagttgaaaaagaatttaaagaaa

SEQ ID NO: 156472 - DNA, 27 bp, Artificial sequence
  SiRNA target sequence
aaaagttgaaaaagaatttaaagaaaa

SEQ ID NO: 156473 - DNA, 27 bp, Artificial sequence
  SiRNA target sequence
aaagttgaaaaagaatttaaagaaaaa

SEQ ID NO: 156474 - DNA, 27 bp, Artificial sequence
  SiRNA target sequence
aagttgaaaaagaatttaaagaaaaat

SEQ ID NO: 156475 - DNA, 27 bp, Artificial sequence
  SiRNA target sequence
agttgaaaaagaatttaaagaaaaatc

SEQ ID NO: 156476 - DNA, 27 bp, Artificial sequence
  SiRNA target sequence
gttgaaaaagaatttaaagaaaaatca

SEQ ID NO: 156477 - DNA, 27 bp, Artificial sequence
  SiRNA target sequence
ttgaaaaagaatttaaagaaaaatcac

SEQ ID NO: 156478 - DNA, 27 bp, Artificial sequence
  SiRNA target sequence
tgaaaaagaatttaaagaaaaatcaca

SEQ ID NO: 156479 - DNA, 27 bp, Artificial sequence
  SiRNA target sequence
gaaaaagaatttaaagaaaaatcacaa

SEQ ID NO: 156480 - DNA, 27 bp, Artificial sequence
  SiRNA target sequence
aaaaagaatttaaagaaaaatcacaaa

SEQ ID NO: 156481 - DNA, 27 bp, Artificial sequence
  SiRNA target sequence
aaaagaatttaaagaaaaatcacaaaa

SEQ ID NO: 156482 - DNA, 27 bp, Artificial sequence
  SiRNA target sequence
aaagaatttaaagaaaaatcacaaaaa

SEQ ID NO: 156483 - DNA, 27 bp, Artificial sequence
  SiRNA target sequence
aagaatttaaagaaaaatcacaaaaat

SEQ ID NO: 156484 - DNA, 27 bp, Artificial sequence
  SiRNA target sequence
agaatttaaagaaaaatcacaaaaatg

SEQ ID NO: 156485 - DNA, 27 bp, Artificial sequence
  SiRNA target sequence
gaatttaaagaaaaatcacaaaaatgt

SEQ ID NO: 156486 - DNA, 27 bp, Artificial sequence
  SiRNA target sequence
aatttaaagaaaaatcacaaaaatgta

SEQ ID NO: 156487 - DNA, 27 bp, Artificial sequence
  SiRNA target sequence
atttaaagaaaaatcacaaaaatgtaa

SEQ ID NO: 156488 - DNA, 27 bp, Artificial sequence
  SiRNA target sequence
tttaaagaaaaatcacaaaaatgtaat

SEQ ID NO: 156489 - DNA, 27 bp, Artificial sequence
  SiRNA target sequence
ttaaagaaaaatcacaaaaatgtaatc

SEQ ID NO: 156490 - DNA, 27 bp, Artificial sequence
  SiRNA target sequence
taaagaaaaatcacaaaaatgtaatca

SEQ ID NO: 156491 - DNA, 27 bp, Artificial sequence
  SiRNA target sequence
aaagaaaaatcacaaaaatgtaatcaa

SEQ ID NO: 156492 - DNA, 27 bp, Artificial sequence
  SiRNA target sequence
aagaaaaatcacaaaaatgtaatcaag

SEQ ID NO: 156493 - DNA, 27 bp, Artificial sequence
  SiRNA target sequence
agaaaaatcacaaaaatgtaatcaagc

SEQ ID NO: 156494 - DNA, 27 bp, Artificial sequence
  SiRNA target sequence
gaaaaatcacaaaaatgtaatcaagct

SEQ ID NO: 156495 - DNA, 27 bp, Artificial sequence
  SiRNA target sequence
aaaaatcacaaaaatgtaatcaagcta

SEQ ID NO: 156496 - DNA, 27 bp, Artificial sequence
  SiRNA target sequence
aaaatcacaaaaatgtaatcaagctaa

SEQ ID NO: 156497 - DNA, 27 bp, Artificial sequence
  SiRNA target sequence
aaatcacaaaaatgtaatcaagctaaa

SEQ ID NO: 156498 - DNA, 27 bp, Artificial sequence
  SiRNA target sequence
aatcacaaaaatgtaatcaagctaaag

SEQ ID NO: 156499 - DNA, 27 bp, Artificial sequence
  SiRNA target sequence
atcacaaaaatgtaatcaagctaaagc

SEQ ID NO: 156500 - DNA, 27 bp, Artificial sequence
  SiRNA target sequence
tcacaaaaatgtaatcaagctaaagca

SEQ ID NO: 156501 - DNA, 27 bp, Artificial sequence
  SiRNA target sequence
cacaaaaatgtaatcaagctaaagcag

SEQ ID NO: 156502 - DNA, 27 bp, Artificial sequence
  SiRNA target sequence
acaaaaatgtaatcaagctaaagcagt

SEQ ID NO: 156503 - DNA, 27 bp, Artificial sequence
  SiRNA target sequence
caaaaatgtaatcaagctaaagcagtt

SEQ ID NO: 156504 - DNA, 27 bp, Artificial sequence
  SiRNA target sequence
aaaaatgtaatcaagctaaagcagttt

SEQ ID NO: 156505 - DNA, 27 bp, Artificial sequence
  SiRNA target sequence
aaaatgtaatcaagctaaagcagtttt

SEQ ID NO: 156506 - DNA, 27 bp, Artificial sequence
  SiRNA target sequence
aaatgtaatcaagctaaagcagtttta

SEQ ID NO: 156507 - DNA, 27 bp, Artificial sequence
  SiRNA target sequence
aatgtaatcaagctaaagcagttttat

SEQ ID NO: 156508 - DNA, 27 bp, Artificial sequence
  SiRNA target sequence
atgtaatcaagctaaagcagttttatt

SEQ ID NO: 156509 - DNA, 27 bp, Artificial sequence
  SiRNA target sequence
tgtaatcaagctaaagcagttttattt

SEQ ID NO: 156510 - DNA, 27 bp, Artificial sequence
  SiRNA target sequence
gtaatcaagctaaagcagttttatttg

SEQ ID NO: 156511 - DNA, 27 bp, Artificial sequence
  SiRNA target sequence
taatcaagctaaagcagttttatttga

SEQ ID NO: 156512 - DNA, 27 bp, Artificial sequence
  SiRNA target sequence
aatcaagctaaagcagttttatttgat

SEQ ID NO: 156513 - DNA, 27 bp, Artificial sequence
  SiRNA target sequence
atcaagctaaagcagttttatttgatg

SEQ ID NO: 156514 - DNA, 27 bp, Artificial sequence
  SiRNA target sequence
tcaagctaaagcagttttatttgatga

SEQ ID NO: 156515 - DNA, 27 bp, Artificial sequence
  SiRNA target sequence
caagctaaagcagttttatttgatgag

SEQ ID NO: 156516 - DNA, 27 bp, Artificial sequence
  SiRNA target sequence
aagctaaagcagttttatttgatgaga

SEQ ID NO: 156517 - DNA, 27 bp, Artificial sequence
  SiRNA target sequence
agctaaagcagttttatttgatgagaa

SEQ ID NO: 156518 - DNA, 27 bp, Artificial sequence
  SiRNA target sequence
gctaaagcagttttatttgatgagaaa

SEQ ID NO: 156519 - DNA, 27 bp, Artificial sequence
  SiRNA target sequence
ctaaagcagttttatttgatgagaaaa

SEQ ID NO: 156520 - DNA, 27 bp, Artificial sequence
  SiRNA target sequence
taaagcagttttatttgatgagaaaaa

SEQ ID NO: 156521 - DNA, 27 bp, Artificial sequence
  SiRNA target sequence
aaagcagttttatttgatgagaaaaaa

SEQ ID NO: 156522 - DNA, 27 bp, Artificial sequence
  SiRNA target sequence
aagcagttttatttgatgagaaaaaaa

SEQ ID NO: 156523 - DNA, 27 bp, Artificial sequence
  SiRNA target sequence
agcagttttatttgatgagaaaaaaaa

SEQ ID NO: 156524 - DNA, 27 bp, Artificial sequence
  SiRNA target sequence
gcagttttatttgatgagaaaaaaaag

SEQ ID NO: 156525 - DNA, 27 bp, Artificial sequence
  SiRNA target sequence
cagttttatttgatgagaaaaaaaagc

SEQ ID NO: 156526 - DNA, 27 bp, Artificial sequence
  SiRNA target sequence
agttttatttgatgagaaaaaaaagca

SEQ ID NO: 156527 - DNA, 27 bp, Artificial sequence
  SiRNA target sequence
gttttatttgatgagaaaaaaaagcaa

SEQ ID NO: 156528 - DNA, 27 bp, Artificial sequence
  SiRNA target sequence
ttttatttgatgagaaaaaaaagcaag

SEQ ID NO: 156529 - DNA, 27 bp, Artificial sequence
  SiRNA target sequence
tttatttgatgagaaaaaaaagcaaga

SEQ ID NO: 156530 - DNA, 27 bp, Artificial sequence
  SiRNA target sequence
ttatttgatgagaaaaaaaagcaagag

SEQ ID NO: 156531 - DNA, 27 bp, Artificial sequence
  SiRNA target sequence
tatttgatgagaaaaaaaagcaagagt

SEQ ID NO: 156532 - DNA, 27 bp, Artificial sequence
  SiRNA target sequence
atttgatgagaaaaaaaagcaagagta

SEQ ID NO: 156533 - DNA, 27 bp, Artificial sequence
  SiRNA target sequence
tttgatgagaaaaaaaagcaagagtat

SEQ ID NO: 156534 - DNA, 27 bp, Artificial sequence
  SiRNA target sequence
ttgatgagaaaaaaaagcaagagtatg

SEQ ID NO: 156535 - DNA, 27 bp, Artificial sequence
  SiRNA target sequence
tgatgagaaaaaaaagcaagagtatga

SEQ ID NO: 156536 - DNA, 27 bp, Artificial sequence
  SiRNA target sequence
gatgagaaaaaaaagcaagagtatgat

SEQ ID NO: 156537 - DNA, 27 bp, Artificial sequence
  SiRNA target sequence
atgagaaaaaaaagcaagagtatgata

SEQ ID NO: 156538 - DNA, 27 bp, Artificial sequence
  SiRNA target sequence
tgagaaaaaaaagcaagagtatgatat

SEQ ID NO: 156539 - DNA, 27 bp, Artificial sequence
  SiRNA target sequence
gagaaaaaaaagcaagagtatgatatg

SEQ ID NO: 156540 - DNA, 27 bp, Artificial sequence
  SiRNA target sequence
agaaaaaaaagcaagagtatgatatgg

SEQ ID NO: 156541 - DNA, 27 bp, Artificial sequence
  SiRNA target sequence
gaaaaaaaagcaagagtatgatatggg

SEQ ID NO: 156542 - DNA, 27 bp, Artificial sequence
  SiRNA target sequence
aaaaaaaagcaagagtatgatatggga

SEQ ID NO: 156543 - DNA, 27 bp, Artificial sequence
  SiRNA target sequence
aaaaaaagcaagagtatgatatgggaa

SEQ ID NO: 156544 - DNA, 27 bp, Artificial sequence
  SiRNA target sequence
aaaaaagcaagagtatgatatgggaat

SEQ ID NO: 156545 - DNA, 27 bp, Artificial sequence
  SiRNA target sequence
aaaaagcaagagtatgatatgggaatg

SEQ ID NO: 156546 - DNA, 27 bp, Artificial sequence
  SiRNA target sequence
aaaagcaagagtatgatatgggaatga

SEQ ID NO: 156547 - DNA, 27 bp, Artificial sequence
  SiRNA target sequence
aaagcaagagtatgatatgggaatgac

SEQ ID NO: 156548 - DNA, 27 bp, Artificial sequence
  SiRNA target sequence
aagcaagagtatgatatgggaatgact

SEQ ID NO: 156549 - DNA, 27 bp, Artificial sequence
  SiRNA target sequence
agcaagagtatgatatgggaatgactg

SEQ ID NO: 156550 - DNA, 27 bp, Artificial sequence
  SiRNA target sequence
gcaagagtatgatatgggaatgactgg

SEQ ID NO: 156551 - DNA, 27 bp, Artificial sequence
  SiRNA target sequence
caagagtatgatatgggaatgactggc

SEQ ID NO: 156552 - DNA, 27 bp, Artificial sequence
  SiRNA target sequence
aagagtatgatatgggaatgactggcg

SEQ ID NO: 156553 - DNA, 27 bp, Artificial sequence
  SiRNA target sequence
agagtatgatatgggaatgactggcga

SEQ ID NO: 156554 - DNA, 27 bp, Artificial sequence
  SiRNA target sequence
gagtatgatatgggaatgactggcgat

SEQ ID NO: 156555 - DNA, 27 bp, Artificial sequence
  SiRNA target sequence
agtatgatatgggaatgactggcgatt

SEQ ID NO: 156556 - DNA, 27 bp, Artificial sequence
  SiRNA target sequence
gtatgatatgggaatgactggcgattt

SEQ ID NO: 156557 - DNA, 27 bp, Artificial sequence
  SiRNA target sequence
tatgatatgggaatgactggcgatttt

SEQ ID NO: 156558 - DNA, 27 bp, Artificial sequence
  SiRNA target sequence
atgatatgggaatgactggcgattttg

SEQ ID NO: 156559 - DNA, 27 bp, Artificial sequence
  SiRNA target sequence
tgatatgggaatgactggcgattttgg

SEQ ID NO: 156560 - DNA, 27 bp, Artificial sequence
  SiRNA target sequence
gatatgggaatgactggcgattttgga

SEQ ID NO: 156561 - DNA, 27 bp, Artificial sequence
  SiRNA target sequence
atatgggaatgactggcgattttggat

SEQ ID NO: 156562 - DNA, 27 bp, Artificial sequence
  SiRNA target sequence
tatgggaatgactggcgattttggatt

SEQ ID NO: 156563 - DNA, 27 bp, Artificial sequence
  SiRNA target sequence
atgggaatgactggcgattttggattt

SEQ ID NO: 156564 - DNA, 27 bp, Artificial sequence
  SiRNA target sequence
tgggaatgactggcgattttggatttt

SEQ ID NO: 156565 - DNA, 27 bp, Artificial sequence
  SiRNA target sequence
gggaatgactggcgattttggattttc

SEQ ID NO: 156566 - DNA, 27 bp, Artificial sequence
  SiRNA target sequence
ggaatgactggcgattttggattttct

SEQ ID NO: 156567 - DNA, 27 bp, Artificial sequence
  SiRNA target sequence
gaatgactggcgattttggattttctg

SEQ ID NO: 156568 - DNA, 27 bp, Artificial sequence
  SiRNA target sequence
aatgactggcgattttggattttctgc

SEQ ID NO: 156569 - DNA, 27 bp, Artificial sequence
  SiRNA target sequence
atgactggcgattttggattttctgca

SEQ ID NO: 156570 - DNA, 27 bp, Artificial sequence
  SiRNA target sequence
tgactggcgattttggattttctgcag

SEQ ID NO: 156571 - DNA, 27 bp, Artificial sequence
  SiRNA target sequence
gactggcgattttggattttctgcagg

SEQ ID NO: 156572 - DNA, 27 bp, Artificial sequence
  SiRNA target sequence
actggcgattttggattttctgcaggt

SEQ ID NO: 156573 - DNA, 27 bp, Artificial sequence
  SiRNA target sequence
ctggcgattttggattttctgcaggtg

SEQ ID NO: 156574 - DNA, 27 bp, Artificial sequence
  SiRNA target sequence
tggcgattttggattttctgcaggtgg

SEQ ID NO: 156575 - DNA, 27 bp, Artificial sequence
  SiRNA target sequence
ggcgattttggattttctgcaggtggt

SEQ ID NO: 156576 - DNA, 27 bp, Artificial sequence
  SiRNA target sequence
gcgattttggattttctgcaggtggtg

SEQ ID NO: 156577 - DNA, 27 bp, Artificial sequence
  SiRNA target sequence
cgattttggattttctgcaggtggtgg

SEQ ID NO: 156578 - DNA, 27 bp, Artificial sequence
  SiRNA target sequence
gattttggattttctgcaggtggtgga

SEQ ID NO: 156579 - DNA, 27 bp, Artificial sequence
  SiRNA target sequence
attttggattttctgcaggtggtggag

SEQ ID NO: 156580 - DNA, 27 bp, Artificial sequence
  SiRNA target sequence
ttttggattttctgcaggtggtggaga

SEQ ID NO: 156581 - DNA, 27 bp, Artificial sequence
  SiRNA target sequence
tttggattttctgcaggtggtggagac

SEQ ID NO: 156582 - DNA, 27 bp, Artificial sequence
  SiRNA target sequence
ttggattttctgcaggtggtggagact

SEQ ID NO: 156583 - DNA, 27 bp, Artificial sequence
  SiRNA target sequence
tggattttctgcaggtggtggagactt

SEQ ID NO: 156584 - DNA, 27 bp, Artificial sequence
  SiRNA target sequence
ggattttctgcaggtggtggagacttt

SEQ ID NO: 156585 - DNA, 27 bp, Artificial sequence
  SiRNA target sequence
gattttctgcaggtggtggagactttt

SEQ ID NO: 156586 - DNA, 27 bp, Artificial sequence
  SiRNA target sequence
attttctgcaggtggtggagacttttt

SEQ ID NO: 156587 - DNA, 27 bp, Artificial sequence
  SiRNA target sequence
ttttctgcaggtggtggagactttttc

SEQ ID NO: 156588 - DNA, 27 bp, Artificial sequence
  SiRNA target sequence
tttctgcaggtggtggagactttttcg

SEQ ID NO: 156589 - DNA, 27 bp, Artificial sequence
  SiRNA target sequence
ttctgcaggtggtggagactttttcga

SEQ ID NO: 156590 - DNA, 27 bp, Artificial sequence
  SiRNA target sequence
tctgcaggtggtggagactttttcgat

SEQ ID NO: 156591 - DNA, 27 bp, Artificial sequence
  SiRNA target sequence
ctgcaggtggtggagactttttcgata

SEQ ID NO: 156592 - DNA, 27 bp, Artificial sequence
  SiRNA target sequence
tgcaggtggtggagactttttcgatat

SEQ ID NO: 156593 - DNA, 27 bp, Artificial sequence
  SiRNA target sequence
gcaggtggtggagactttttcgatatt

SEQ ID NO: 156594 - DNA, 27 bp, Artificial sequence
  SiRNA target sequence
caggtggtggagactttttcgatattt

SEQ ID NO: 156595 - DNA, 27 bp, Artificial sequence
  SiRNA target sequence
aggtggtggagactttttcgatatttt

SEQ ID NO: 156596 - DNA, 27 bp, Artificial sequence
  SiRNA target sequence
ggtggtggagactttttcgatattttt

SEQ ID NO: 156597 - DNA, 27 bp, Artificial sequence
  SiRNA target sequence
gtggtggagactttttcgatatttttt

SEQ ID NO: 156598 - DNA, 27 bp, Artificial sequence
  SiRNA target sequence
tggtggagactttttcgatattttttc

SEQ ID NO: 156599 - DNA, 27 bp, Artificial sequence
  SiRNA target sequence
ggtggagactttttcgatattttttca

SEQ ID NO: 156600 - DNA, 27 bp, Artificial sequence
  SiRNA target sequence
gtggagactttttcgatattttttcaa

SEQ ID NO: 156601 - DNA, 27 bp, Artificial sequence
  SiRNA target sequence
tggagactttttcgatattttttcaag

SEQ ID NO: 156602 - DNA, 27 bp, Artificial sequence
  SiRNA target sequence
ggagactttttcgatattttttcaagt

SEQ ID NO: 156603 - DNA, 27 bp, Artificial sequence
  SiRNA target sequence
gagactttttcgatattttttcaagtt

SEQ ID NO: 156604 - DNA, 27 bp, Artificial sequence
  SiRNA target sequence
agactttttcgatattttttcaagttt

SEQ ID NO: 156605 - DNA, 27 bp, Artificial sequence
  SiRNA target sequence
gactttttcgatattttttcaagtttt

SEQ ID NO: 156606 - DNA, 27 bp, Artificial sequence
  SiRNA target sequence
actttttcgatattttttcaagtttta

SEQ ID NO: 156607 - DNA, 27 bp, Artificial sequence
  SiRNA target sequence
ctttttcgatattttttcaagttttac

SEQ ID NO: 156608 - DNA, 27 bp, Artificial sequence
  SiRNA target sequence
tttttcgatattttttcaagttttact

SEQ ID NO: 156609 - DNA, 27 bp, Artificial sequence
  SiRNA target sequence
ttttcgatattttttcaagttttactg

SEQ ID NO: 156610 - DNA, 27 bp, Artificial sequence
  SiRNA target sequence
tttcgatattttttcaagttttactgg

SEQ ID NO: 156611 - DNA, 27 bp, Artificial sequence
  SiRNA target sequence
ttcgatattttttcaagttttactggt

SEQ ID NO: 156612 - DNA, 27 bp, Artificial sequence
  SiRNA target sequence
tcgatattttttcaagttttactggtg

SEQ ID NO: 156613 - DNA, 27 bp, Artificial sequence
  SiRNA target sequence
cgatattttttcaagttttactggtgg

SEQ ID NO: 156614 - DNA, 27 bp, Artificial sequence
  SiRNA target sequence
gatattttttcaagttttactggtgga

SEQ ID NO: 156615 - DNA, 27 bp, Artificial sequence
  SiRNA target sequence
atattttttcaagttttactggtggag

SEQ ID NO: 156616 - DNA, 27 bp, Artificial sequence
  SiRNA target sequence
tattttttcaagttttactggtggagg

SEQ ID NO: 156617 - DNA, 27 bp, Artificial sequence
  SiRNA target sequence
attttttcaagttttactggtggagga

SEQ ID NO: 156618 - DNA, 27 bp, Artificial sequence
  SiRNA target sequence
ttttttcaagttttactggtggaggaa

SEQ ID NO: 156619 - DNA, 27 bp, Artificial sequence
  SiRNA target sequence
tttttcaagttttactggtggaggaag

SEQ ID NO: 156620 - DNA, 27 bp, Artificial sequence
  SiRNA target sequence
ttttcaagttttactggtggaggaaga

SEQ ID NO: 156621 - DNA, 27 bp, Artificial sequence
  SiRNA target sequence
tttcaagttttactggtggaggaagaa

SEQ ID NO: 156622 - DNA, 27 bp, Artificial sequence
  SiRNA target sequence
ttcaagttttactggtggaggaagaag

SEQ ID NO: 156623 - DNA, 27 bp, Artificial sequence
  SiRNA target sequence
tcaagttttactggtggaggaagaaga

SEQ ID NO: 156624 - DNA, 27 bp, Artificial sequence
  SiRNA target sequence
caagttttactggtggaggaagaagaa

SEQ ID NO: 156625 - DNA, 27 bp, Artificial sequence
  SiRNA target sequence
aagttttactggtggaggaagaagaaa

SEQ ID NO: 156626 - DNA, 27 bp, Artificial sequence
  SiRNA target sequence
agttttactggtggaggaagaagaaat

SEQ ID NO: 156627 - DNA, 27 bp, Artificial sequence
  SiRNA target sequence
gttttactggtggaggaagaagaaatc

SEQ ID NO: 156628 - DNA, 27 bp, Artificial sequence
  SiRNA target sequence
ttttactggtggaggaagaagaaatcg

SEQ ID NO: 156629 - DNA, 27 bp, Artificial sequence
  SiRNA target sequence
tttactggtggaggaagaagaaatcga

SEQ ID NO: 156630 - DNA, 27 bp, Artificial sequence
  SiRNA target sequence
ttactggtggaggaagaagaaatcgag

SEQ ID NO: 156631 - DNA, 27 bp, Artificial sequence
  SiRNA target sequence
tactggtggaggaagaagaaatcgagt

SEQ ID NO: 156632 - DNA, 27 bp, Artificial sequence
  SiRNA target sequence
actggtggaggaagaagaaatcgagta

SEQ ID NO: 156633 - DNA, 27 bp, Artificial sequence
  SiRNA target sequence
ctggtggaggaagaagaaatcgagtac

SEQ ID NO: 156634 - DNA, 27 bp, Artificial sequence
  SiRNA target sequence
tggtggaggaagaagaaatcgagtaca

SEQ ID NO: 156635 - DNA, 27 bp, Artificial sequence
  SiRNA target sequence
ggtggaggaagaagaaatcgagtacaa

SEQ ID NO: 156636 - DNA, 27 bp, Artificial sequence
  SiRNA target sequence
gtggaggaagaagaaatcgagtacaaa

SEQ ID NO: 156637 - DNA, 27 bp, Artificial sequence
  SiRNA target sequence
tggaggaagaagaaatcgagtacaaaa

SEQ ID NO: 156638 - DNA, 27 bp, Artificial sequence
  SiRNA target sequence
ggaggaagaagaaatcgagtacaaaaa

SEQ ID NO: 156639 - DNA, 27 bp, Artificial sequence
  SiRNA target sequence
gaggaagaagaaatcgagtacaaaaag

SEQ ID NO: 156640 - DNA, 27 bp, Artificial sequence
  SiRNA target sequence
aggaagaagaaatcgagtacaaaaagt

SEQ ID NO: 156641 - DNA, 27 bp, Artificial sequence
  SiRNA target sequence
ggaagaagaaatcgagtacaaaaagtt

SEQ ID NO: 156642 - DNA, 27 bp, Artificial sequence
  SiRNA target sequence
gaagaagaaatcgagtacaaaaagttc

SEQ ID NO: 156643 - DNA, 27 bp, Artificial sequence
  SiRNA target sequence
aagaagaaatcgagtacaaaaagttca

SEQ ID NO: 156644 - DNA, 27 bp, Artificial sequence
  SiRNA target sequence
agaagaaatcgagtacaaaaagttcaa

SEQ ID NO: 156645 - DNA, 27 bp, Artificial sequence
  SiRNA target sequence
gaagaaatcgagtacaaaaagttcaag

SEQ ID NO: 156646 - DNA, 27 bp, Artificial sequence
  SiRNA target sequence
aagaaatcgagtacaaaaagttcaaga

SEQ ID NO: 156647 - DNA, 27 bp, Artificial sequence
  SiRNA target sequence
agaaatcgagtacaaaaagttcaagat

SEQ ID NO: 156648 - DNA, 27 bp, Artificial sequence
  SiRNA target sequence
gaaatcgagtacaaaaagttcaagata

SEQ ID NO: 156649 - DNA, 27 bp, Artificial sequence
  SiRNA target sequence
aaatcgagtacaaaaagttcaagatac

SEQ ID NO: 156650 - DNA, 27 bp, Artificial sequence
  SiRNA target sequence
aatcgagtacaaaaagttcaagataca

SEQ ID NO: 156651 - DNA, 27 bp, Artificial sequence
  SiRNA target sequence
atcgagtacaaaaagttcaagatacag

SEQ ID NO: 156652 - DNA, 27 bp, Artificial sequence
  SiRNA target sequence
tcgagtacaaaaagttcaagatacaga

SEQ ID NO: 156653 - DNA, 27 bp, Artificial sequence
  SiRNA target sequence
cgagtacaaaaagttcaagatacagaa

SEQ ID NO: 156654 - DNA, 27 bp, Artificial sequence
  SiRNA target sequence
gagtacaaaaagttcaagatacagaat

SEQ ID NO: 156655 - DNA, 27 bp, Artificial sequence
  SiRNA target sequence
agtacaaaaagttcaagatacagaata

SEQ ID NO: 156656 - DNA, 27 bp, Artificial sequence
  SiRNA target sequence
gtacaaaaagttcaagatacagaatac

SEQ ID NO: 156657 - DNA, 27 bp, Artificial sequence
  SiRNA target sequence
tacaaaaagttcaagatacagaatacg

SEQ ID NO: 156658 - DNA, 27 bp, Artificial sequence
  SiRNA target sequence
acaaaaagttcaagatacagaatacga

SEQ ID NO: 156659 - DNA, 27 bp, Artificial sequence
  SiRNA target sequence
caaaaagttcaagatacagaatacgag

SEQ ID NO: 156660 - DNA, 27 bp, Artificial sequence
  SiRNA target sequence
aaaaagttcaagatacagaatacgagt

SEQ ID NO: 156661 - DNA, 27 bp, Artificial sequence
  SiRNA target sequence
aaaagttcaagatacagaatacgagtt

SEQ ID NO: 156662 - DNA, 27 bp, Artificial sequence
  SiRNA target sequence
aaagttcaagatacagaatacgagttt

SEQ ID NO: 156663 - DNA, 27 bp, Artificial sequence
  SiRNA target sequence
aagttcaagatacagaatacgagttta

SEQ ID NO: 156664 - DNA, 27 bp, Artificial sequence
  SiRNA target sequence
agttcaagatacagaatacgagtttaa

SEQ ID NO: 156665 - DNA, 27 bp, Artificial sequence
  SiRNA target sequence
gttcaagatacagaatacgagtttaat

SEQ ID NO: 156666 - DNA, 27 bp, Artificial sequence
  SiRNA target sequence
ttcaagatacagaatacgagtttaata

SEQ ID NO: 156667 - DNA, 27 bp, Artificial sequence
  SiRNA target sequence
tcaagatacagaatacgagtttaatat

SEQ ID NO: 156668 - DNA, 27 bp, Artificial sequence
  SiRNA target sequence
caagatacagaatacgagtttaatatt

SEQ ID NO: 156669 - DNA, 27 bp, Artificial sequence
  SiRNA target sequence
aagatacagaatacgagtttaatattt

SEQ ID NO: 156670 - DNA, 27 bp, Artificial sequence
  SiRNA target sequence
agatacagaatacgagtttaatatttc

SEQ ID NO: 156671 - DNA, 27 bp, Artificial sequence
  SiRNA target sequence
gatacagaatacgagtttaatatttcg

SEQ ID NO: 156672 - DNA, 27 bp, Artificial sequence
  SiRNA target sequence
atacagaatacgagtttaatatttcgt

SEQ ID NO: 156673 - DNA, 27 bp, Artificial sequence
  SiRNA target sequence
tacagaatacgagtttaatatttcgtt

SEQ ID NO: 156674 - DNA, 27 bp, Artificial sequence
  SiRNA target sequence
acagaatacgagtttaatatttcgttg

SEQ ID NO: 156675 - DNA, 27 bp, Artificial sequence
  SiRNA target sequence
cagaatacgagtttaatatttcgttga

SEQ ID NO: 156676 - DNA, 27 bp, Artificial sequence
  SiRNA target sequence
agaatacgagtttaatatttcgttgaa

SEQ ID NO: 156677 - DNA, 27 bp, Artificial sequence
  SiRNA target sequence
gaatacgagtttaatatttcgttgaag

SEQ ID NO: 156678 - DNA, 27 bp, Artificial sequence
  SiRNA target sequence
aatacgagtttaatatttcgttgaagg

SEQ ID NO: 156679 - DNA, 27 bp, Artificial sequence
  SiRNA target sequence
atacgagtttaatatttcgttgaagga

SEQ ID NO: 156680 - DNA, 27 bp, Artificial sequence
  SiRNA target sequence
tacgagtttaatatttcgttgaaggaa

SEQ ID NO: 156681 - DNA, 27 bp, Artificial sequence
  SiRNA target sequence
acgagtttaatatttcgttgaaggaag

SEQ ID NO: 156682 - DNA, 27 bp, Artificial sequence
  SiRNA target sequence
cgagtttaatatttcgttgaaggaagc

SEQ ID NO: 156683 - DNA, 27 bp, Artificial sequence
  SiRNA target sequence
gagtttaatatttcgttgaaggaagct

SEQ ID NO: 156684 - DNA, 27 bp, Artificial sequence
  SiRNA target sequence
agtttaatatttcgttgaaggaagctt

SEQ ID NO: 156685 - DNA, 27 bp, Artificial sequence
  SiRNA target sequence
gtttaatatttcgttgaaggaagctta

SEQ ID NO: 156686 - DNA, 27 bp, Artificial sequence
  SiRNA target sequence
tttaatatttcgttgaaggaagcttat

SEQ ID NO: 156687 - DNA, 27 bp, Artificial sequence
  SiRNA target sequence
ttaatatttcgttgaaggaagcttata

SEQ ID NO: 156688 - DNA, 27 bp, Artificial sequence
  SiRNA target sequence
taatatttcgttgaaggaagcttatat

SEQ ID NO: 156689 - DNA, 27 bp, Artificial sequence
  SiRNA target sequence
aatatttcgttgaaggaagcttatatg

SEQ ID NO: 156690 - DNA, 27 bp, Artificial sequence
  SiRNA target sequence
atatttcgttgaaggaagcttatatgg

SEQ ID NO: 156691 - DNA, 27 bp, Artificial sequence
  SiRNA target sequence
tatttcgttgaaggaagcttatatggg

SEQ ID NO: 156692 - DNA, 27 bp, Artificial sequence
  SiRNA target sequence
atttcgttgaaggaagcttatatggga

SEQ ID NO: 156693 - DNA, 27 bp, Artificial sequence
  SiRNA target sequence
tttcgttgaaggaagcttatatgggaa

SEQ ID NO: 156694 - DNA, 27 bp, Artificial sequence
  SiRNA target sequence
ttcgttgaaggaagcttatatgggaaa

SEQ ID NO: 156695 - DNA, 27 bp, Artificial sequence
  SiRNA target sequence
tcgttgaaggaagcttatatgggaaag

SEQ ID NO: 156696 - DNA, 27 bp, Artificial sequence
  SiRNA target sequence
cgttgaaggaagcttatatgggaaagc

SEQ ID NO: 156697 - DNA, 27 bp, Artificial sequence
  SiRNA target sequence
gttgaaggaagcttatatgggaaagcg

SEQ ID NO: 156698 - DNA, 27 bp, Artificial sequence
  SiRNA target sequence
ttgaaggaagcttatatgggaaagcga

SEQ ID NO: 156699 - DNA, 27 bp, Artificial sequence
  SiRNA target sequence
tgaaggaagcttatatgggaaagcgag

SEQ ID NO: 156700 - DNA, 27 bp, Artificial sequence
  SiRNA target sequence
gaaggaagcttatatgggaaagcgagc

SEQ ID NO: 156701 - DNA, 27 bp, Artificial sequence
  SiRNA target sequence
aaggaagcttatatgggaaagcgagct

SEQ ID NO: 156702 - DNA, 27 bp, Artificial sequence
  SiRNA target sequence
aggaagcttatatgggaaagcgagcta

SEQ ID NO: 156703 - DNA, 27 bp, Artificial sequence
  SiRNA target sequence
ggaagcttatatgggaaagcgagctag

SEQ ID NO: 156704 - DNA, 27 bp, Artificial sequence
  SiRNA target sequence
gaagcttatatgggaaagcgagctagt

SEQ ID NO: 156705 - DNA, 27 bp, Artificial sequence
  SiRNA target sequence
aagcttatatgggaaagcgagctagtt

SEQ ID NO: 156706 - DNA, 27 bp, Artificial sequence
  SiRNA target sequence
agcttatatgggaaagcgagctagttt

SEQ ID NO: 156707 - DNA, 27 bp, Artificial sequence
  SiRNA target sequence
gcttatatgggaaagcgagctagtttt

SEQ ID NO: 156708 - DNA, 27 bp, Artificial sequence
  SiRNA target sequence
cttatatgggaaagcgagctagtttta

SEQ ID NO: 156709 - DNA, 27 bp, Artificial sequence
  SiRNA target sequence
ttatatgggaaagcgagctagttttaa

SEQ ID NO: 156710 - DNA, 27 bp, Artificial sequence
  SiRNA target sequence
tatatgggaaagcgagctagttttaat

SEQ ID NO: 156711 - DNA, 27 bp, Artificial sequence
  SiRNA target sequence
atatgggaaagcgagctagttttaatg

SEQ ID NO: 156712 - DNA, 27 bp, Artificial sequence
  SiRNA target sequence
tatgggaaagcgagctagttttaatgt

SEQ ID NO: 156713 - DNA, 27 bp, Artificial sequence
  SiRNA target sequence
atgggaaagcgagctagttttaatgta

SEQ ID NO: 156714 - DNA, 27 bp, Artificial sequence
  SiRNA target sequence
tgggaaagcgagctagttttaatgtaa

SEQ ID NO: 156715 - DNA, 27 bp, Artificial sequence
  SiRNA target sequence
gggaaagcgagctagttttaatgtaaa

SEQ ID NO: 156716 - DNA, 27 bp, Artificial sequence
  SiRNA target sequence
ggaaagcgagctagttttaatgtaaaa

SEQ ID NO: 156717 - DNA, 27 bp, Artificial sequence
  SiRNA target sequence
gaaagcgagctagttttaatgtaaaag

SEQ ID NO: 156718 - DNA, 27 bp, Artificial sequence
  SiRNA target sequence
aaagcgagctagttttaatgtaaaagt

SEQ ID NO: 156719 - DNA, 27 bp, Artificial sequence
  SiRNA target sequence
aagcgagctagttttaatgtaaaagtg

SEQ ID NO: 156720 - DNA, 27 bp, Artificial sequence
  SiRNA target sequence
agcgagctagttttaatgtaaaagtgc

SEQ ID NO: 156721 - DNA, 27 bp, Artificial sequence
  SiRNA target sequence
gcgagctagttttaatgtaaaagtgca

SEQ ID NO: 156722 - DNA, 27 bp, Artificial sequence
  SiRNA target sequence
cgagctagttttaatgtaaaagtgcaa

SEQ ID NO: 156723 - DNA, 27 bp, Artificial sequence
  SiRNA target sequence
gagctagttttaatgtaaaagtgcaaa

SEQ ID NO: 156724 - DNA, 27 bp, Artificial sequence
  SiRNA target sequence
agctagttttaatgtaaaagtgcaaag

SEQ ID NO: 156725 - DNA, 27 bp, Artificial sequence
  SiRNA target sequence
gctagttttaatgtaaaagtgcaaaga

SEQ ID NO: 156726 - DNA, 27 bp, Artificial sequence
  SiRNA target sequence
ctagttttaatgtaaaagtgcaaagag

SEQ ID NO: 156727 - DNA, 27 bp, Artificial sequence
  SiRNA target sequence
tagttttaatgtaaaagtgcaaagaga

SEQ ID NO: 156728 - DNA, 27 bp, Artificial sequence
  SiRNA target sequence
agttttaatgtaaaagtgcaaagagaa

SEQ ID NO: 156729 - DNA, 27 bp, Artificial sequence
  SiRNA target sequence
gttttaatgtaaaagtgcaaagagaat

SEQ ID NO: 156730 - DNA, 27 bp, Artificial sequence
  SiRNA target sequence
ttttaatgtaaaagtgcaaagagaatg

SEQ ID NO: 156731 - DNA, 27 bp, Artificial sequence
  SiRNA target sequence
tttaatgtaaaagtgcaaagagaatgt

SEQ ID NO: 156732 - DNA, 27 bp, Artificial sequence
  SiRNA target sequence
ttaatgtaaaagtgcaaagagaatgtt

SEQ ID NO: 156733 - DNA, 27 bp, Artificial sequence
  SiRNA target sequence
taatgtaaaagtgcaaagagaatgttc

SEQ ID NO: 156734 - DNA, 27 bp, Artificial sequence
  SiRNA target sequence
aatgtaaaagtgcaaagagaatgttct

SEQ ID NO: 156735 - DNA, 27 bp, Artificial sequence
  SiRNA target sequence
atgtaaaagtgcaaagagaatgttctg

SEQ ID NO: 156736 - DNA, 27 bp, Artificial sequence
  SiRNA target sequence
tgtaaaagtgcaaagagaatgttctgc

SEQ ID NO: 156737 - DNA, 27 bp, Artificial sequence
  SiRNA target sequence
gtaaaagtgcaaagagaatgttctgcg

SEQ ID NO: 156738 - DNA, 27 bp, Artificial sequence
  SiRNA target sequence
taaaagtgcaaagagaatgttctgcgt

SEQ ID NO: 156739 - DNA, 27 bp, Artificial sequence
  SiRNA target sequence
aaaagtgcaaagagaatgttctgcgtg

SEQ ID NO: 156740 - DNA, 27 bp, Artificial sequence
  SiRNA target sequence
aaagtgcaaagagaatgttctgcgtgt

SEQ ID NO: 156741 - DNA, 27 bp, Artificial sequence
  SiRNA target sequence
aagtgcaaagagaatgttctgcgtgta

SEQ ID NO: 156742 - DNA, 27 bp, Artificial sequence
  SiRNA target sequence
agtgcaaagagaatgttctgcgtgtaa

SEQ ID NO: 156743 - DNA, 27 bp, Artificial sequence
  SiRNA target sequence
gtgcaaagagaatgttctgcgtgtaac

SEQ ID NO: 156744 - DNA, 27 bp, Artificial sequence
  SiRNA target sequence
tgcaaagagaatgttctgcgtgtaacg

SEQ ID NO: 156745 - DNA, 27 bp, Artificial sequence
  SiRNA target sequence
gcaaagagaatgttctgcgtgtaacgg

SEQ ID NO: 156746 - DNA, 27 bp, Artificial sequence
  SiRNA target sequence
caaagagaatgttctgcgtgtaacggt

SEQ ID NO: 156747 - DNA, 27 bp, Artificial sequence
  SiRNA target sequence
aaagagaatgttctgcgtgtaacggta

SEQ ID NO: 156748 - DNA, 27 bp, Artificial sequence
  SiRNA target sequence
aagagaatgttctgcgtgtaacggtaa

SEQ ID NO: 156749 - DNA, 27 bp, Artificial sequence
  SiRNA target sequence
agagaatgttctgcgtgtaacggtaaa

SEQ ID NO: 156750 - DNA, 27 bp, Artificial sequence
  SiRNA target sequence
gagaatgttctgcgtgtaacggtaaag

SEQ ID NO: 156751 - DNA, 27 bp, Artificial sequence
  SiRNA target sequence
agaatgttctgcgtgtaacggtaaagg

SEQ ID NO: 156752 - DNA, 27 bp, Artificial sequence
  SiRNA target sequence
gaatgttctgcgtgtaacggtaaagga

SEQ ID NO: 156753 - DNA, 27 bp, Artificial sequence
  SiRNA target sequence
aatgttctgcgtgtaacggtaaaggag

SEQ ID NO: 156754 - DNA, 27 bp, Artificial sequence
  SiRNA target sequence
atgttctgcgtgtaacggtaaaggagg

SEQ ID NO: 156755 - DNA, 27 bp, Artificial sequence
  SiRNA target sequence
tgttctgcgtgtaacggtaaaggagga

SEQ ID NO: 156756 - DNA, 27 bp, Artificial sequence
  SiRNA target sequence
gttctgcgtgtaacggtaaaggaggag

SEQ ID NO: 156757 - DNA, 27 bp, Artificial sequence
  SiRNA target sequence
ttctgcgtgtaacggtaaaggaggaga

SEQ ID NO: 156758 - DNA, 27 bp, Artificial sequence
  SiRNA target sequence
tctgcgtgtaacggtaaaggaggagac

SEQ ID NO: 156759 - DNA, 27 bp, Artificial sequence
  SiRNA target sequence
ctgcgtgtaacggtaaaggaggagaca

SEQ ID NO: 156760 - DNA, 27 bp, Artificial sequence
  SiRNA target sequence
tgcgtgtaacggtaaaggaggagacag

SEQ ID NO: 156761 - DNA, 27 bp, Artificial sequence
  SiRNA target sequence
gcgtgtaacggtaaaggaggagacagt

SEQ ID NO: 156762 - DNA, 27 bp, Artificial sequence
  SiRNA target sequence
cgtgtaacggtaaaggaggagacagtg

SEQ ID NO: 156763 - DNA, 27 bp, Artificial sequence
  SiRNA target sequence
gtgtaacggtaaaggaggagacagtgt

SEQ ID NO: 156764 - DNA, 27 bp, Artificial sequence
  SiRNA target sequence
tgtaacggtaaaggaggagacagtgtt

SEQ ID NO: 156765 - DNA, 27 bp, Artificial sequence
  SiRNA target sequence
gtaacggtaaaggaggagacagtgttg

SEQ ID NO: 156766 - DNA, 27 bp, Artificial sequence
  SiRNA target sequence
taacggtaaaggaggagacagtgttga

SEQ ID NO: 156767 - DNA, 27 bp, Artificial sequence
  SiRNA target sequence
aacggtaaaggaggagacagtgttgaa

SEQ ID NO: 156768 - DNA, 27 bp, Artificial sequence
  SiRNA target sequence
acggtaaaggaggagacagtgttgaaa

SEQ ID NO: 156769 - DNA, 27 bp, Artificial sequence
  SiRNA target sequence
cggtaaaggaggagacagtgttgaaac

SEQ ID NO: 156770 - DNA, 27 bp, Artificial sequence
  SiRNA target sequence
ggtaaaggaggagacagtgttgaaaca

SEQ ID NO: 156771 - DNA, 27 bp, Artificial sequence
  SiRNA target sequence
gtaaaggaggagacagtgttgaaacat

SEQ ID NO: 156772 - DNA, 27 bp, Artificial sequence
  SiRNA target sequence
taaaggaggagacagtgttgaaacatg

SEQ ID NO: 156773 - DNA, 27 bp, Artificial sequence
  SiRNA target sequence
aaaggaggagacagtgttgaaacatgt

SEQ ID NO: 156774 - DNA, 27 bp, Artificial sequence
  SiRNA target sequence
aaggaggagacagtgttgaaacatgtg

SEQ ID NO: 156775 - DNA, 27 bp, Artificial sequence
  SiRNA target sequence
aggaggagacagtgttgaaacatgtga

SEQ ID NO: 156776 - DNA, 27 bp, Artificial sequence
  SiRNA target sequence
ggaggagacagtgttgaaacatgtgaa

SEQ ID NO: 156777 - DNA, 27 bp, Artificial sequence
  SiRNA target sequence
gaggagacagtgttgaaacatgtgaac

SEQ ID NO: 156778 - DNA, 27 bp, Artificial sequence
  SiRNA target sequence
aggagacagtgttgaaacatgtgaacc

SEQ ID NO: 156779 - DNA, 27 bp, Artificial sequence
  SiRNA target sequence
ggagacagtgttgaaacatgtgaacca

SEQ ID NO: 156780 - DNA, 27 bp, Artificial sequence
  SiRNA target sequence
gagacagtgttgaaacatgtgaaccat

SEQ ID NO: 156781 - DNA, 27 bp, Artificial sequence
  SiRNA target sequence
agacagtgttgaaacatgtgaaccatg

SEQ ID NO: 156782 - DNA, 27 bp, Artificial sequence
  SiRNA target sequence
gacagtgttgaaacatgtgaaccatgt

SEQ ID NO: 156783 - DNA, 27 bp, Artificial sequence
  SiRNA target sequence
acagtgttgaaacatgtgaaccatgta

SEQ ID NO: 156784 - DNA, 27 bp, Artificial sequence
  SiRNA target sequence
cagtgttgaaacatgtgaaccatgtaa

SEQ ID NO: 156785 - DNA, 27 bp, Artificial sequence
  SiRNA target sequence
agtgttgaaacatgtgaaccatgtaaa

SEQ ID NO: 156786 - DNA, 27 bp, Artificial sequence
  SiRNA target sequence
gtgttgaaacatgtgaaccatgtaaag

SEQ ID NO: 156787 - DNA, 27 bp, Artificial sequence
  SiRNA target sequence
tgttgaaacatgtgaaccatgtaaagg

SEQ ID NO: 156788 - DNA, 27 bp, Artificial sequence
  SiRNA target sequence
gttgaaacatgtgaaccatgtaaaggt

SEQ ID NO: 156789 - DNA, 27 bp, Artificial sequence
  SiRNA target sequence
ttgaaacatgtgaaccatgtaaaggta

SEQ ID NO: 156790 - DNA, 27 bp, Artificial sequence
  SiRNA target sequence
tgaaacatgtgaaccatgtaaaggtaa

SEQ ID NO: 156791 - DNA, 27 bp, Artificial sequence
  SiRNA target sequence
gaaacatgtgaaccatgtaaaggtaaa

SEQ ID NO: 156792 - DNA, 27 bp, Artificial sequence
  SiRNA target sequence
aaacatgtgaaccatgtaaaggtaaag

SEQ ID NO: 156793 - DNA, 27 bp, Artificial sequence
  SiRNA target sequence
aacatgtgaaccatgtaaaggtaaagg

SEQ ID NO: 156794 - DNA, 27 bp, Artificial sequence
  SiRNA target sequence
acatgtgaaccatgtaaaggtaaaggt

SEQ ID NO: 156795 - DNA, 27 bp, Artificial sequence
  SiRNA target sequence
catgtgaaccatgtaaaggtaaaggta

SEQ ID NO: 156796 - DNA, 27 bp, Artificial sequence
  SiRNA target sequence
atgtgaaccatgtaaaggtaaaggtaa

SEQ ID NO: 156797 - DNA, 27 bp, Artificial sequence
  SiRNA target sequence
tgtgaaccatgtaaaggtaaaggtaag

SEQ ID NO: 156798 - DNA, 27 bp, Artificial sequence
  SiRNA target sequence
gtgaaccatgtaaaggtaaaggtaagg

SEQ ID NO: 156799 - DNA, 27 bp, Artificial sequence
  SiRNA target sequence
tgaaccatgtaaaggtaaaggtaaggt

SEQ ID NO: 156800 - DNA, 27 bp, Artificial sequence
  SiRNA target sequence
gaaccatgtaaaggtaaaggtaaggta

SEQ ID NO: 156801 - DNA, 27 bp, Artificial sequence
  SiRNA target sequence
aaccatgtaaaggtaaaggtaaggtag

SEQ ID NO: 156802 - DNA, 27 bp, Artificial sequence
  SiRNA target sequence
accatgtaaaggtaaaggtaaggtaga

SEQ ID NO: 156803 - DNA, 27 bp, Artificial sequence
  SiRNA target sequence
ccatgtaaaggtaaaggtaaggtagaa

SEQ ID NO: 156804 - DNA, 27 bp, Artificial sequence
  SiRNA target sequence
catgtaaaggtaaaggtaaggtagaac

SEQ ID NO: 156805 - DNA, 27 bp, Artificial sequence
  SiRNA target sequence
atgtaaaggtaaaggtaaggtagaaca

SEQ ID NO: 156806 - DNA, 27 bp, Artificial sequence
  SiRNA target sequence
tgtaaaggtaaaggtaaggtagaacat

SEQ ID NO: 156807 - DNA, 27 bp, Artificial sequence
  SiRNA target sequence
gtaaaggtaaaggtaaggtagaacatc

SEQ ID NO: 156808 - DNA, 27 bp, Artificial sequence
  SiRNA target sequence
taaaggtaaaggtaaggtagaacatca

SEQ ID NO: 156809 - DNA, 27 bp, Artificial sequence
  SiRNA target sequence
aaaggtaaaggtaaggtagaacatcat

SEQ ID NO: 156810 - DNA, 27 bp, Artificial sequence
  SiRNA target sequence
aaggtaaaggtaaggtagaacatcata

SEQ ID NO: 156811 - DNA, 27 bp, Artificial sequence
  SiRNA target sequence
aggtaaaggtaaggtagaacatcatag

SEQ ID NO: 156812 - DNA, 27 bp, Artificial sequence
  SiRNA target sequence
ggtaaaggtaaggtagaacatcatagg

SEQ ID NO: 156813 - DNA, 27 bp, Artificial sequence
  SiRNA target sequence
gtaaaggtaaggtagaacatcatagga

SEQ ID NO: 156814 - DNA, 27 bp, Artificial sequence
  SiRNA target sequence
taaaggtaaggtagaacatcataggag

SEQ ID NO: 156815 - DNA, 27 bp, Artificial sequence
  SiRNA target sequence
aaaggtaaggtagaacatcataggaga

SEQ ID NO: 156816 - DNA, 27 bp, Artificial sequence
  SiRNA target sequence
aaggtaaggtagaacatcataggagac

SEQ ID NO: 156817 - DNA, 27 bp, Artificial sequence
  SiRNA target sequence
aggtaaggtagaacatcataggagact

SEQ ID NO: 156818 - DNA, 27 bp, Artificial sequence
  SiRNA target sequence
ggtaaggtagaacatcataggagacta

SEQ ID NO: 156819 - DNA, 27 bp, Artificial sequence
  SiRNA target sequence
gtaaggtagaacatcataggagactag

SEQ ID NO: 156820 - DNA, 27 bp, Artificial sequence
  SiRNA target sequence
taaggtagaacatcataggagactagg

SEQ ID NO: 156821 - DNA, 27 bp, Artificial sequence
  SiRNA target sequence
aaggtagaacatcataggagactaggt

SEQ ID NO: 156822 - DNA, 27 bp, Artificial sequence
  SiRNA target sequence
aggtagaacatcataggagactaggtc

SEQ ID NO: 156823 - DNA, 27 bp, Artificial sequence
  SiRNA target sequence
ggtagaacatcataggagactaggtcc

SEQ ID NO: 156824 - DNA, 27 bp, Artificial sequence
  SiRNA target sequence
gtagaacatcataggagactaggtcct

SEQ ID NO: 156825 - DNA, 27 bp, Artificial sequence
  SiRNA target sequence
tagaacatcataggagactaggtcctt

SEQ ID NO: 156826 - DNA, 27 bp, Artificial sequence
  SiRNA target sequence
agaacatcataggagactaggtccttt

SEQ ID NO: 156827 - DNA, 27 bp, Artificial sequence
  SiRNA target sequence
gaacatcataggagactaggtccttta

SEQ ID NO: 156828 - DNA, 27 bp, Artificial sequence
  SiRNA target sequence
aacatcataggagactaggtcctttaa

SEQ ID NO: 156829 - DNA, 27 bp, Artificial sequence
  SiRNA target sequence
acatcataggagactaggtcctttaat

SEQ ID NO: 156830 - DNA, 27 bp, Artificial sequence
  SiRNA target sequence
catcataggagactaggtcctttaatt

SEQ ID NO: 156831 - DNA, 27 bp, Artificial sequence
  SiRNA target sequence
atcataggagactaggtcctttaattt

SEQ ID NO: 156832 - DNA, 27 bp, Artificial sequence
  SiRNA target sequence
tcataggagactaggtcctttaatttc

SEQ ID NO: 156833 - DNA, 27 bp, Artificial sequence
  SiRNA target sequence
cataggagactaggtcctttaatttct

SEQ ID NO: 156834 - DNA, 27 bp, Artificial sequence
  SiRNA target sequence
ataggagactaggtcctttaatttctg

SEQ ID NO: 156835 - DNA, 27 bp, Artificial sequence
  SiRNA target sequence
taggagactaggtcctttaatttctgt

SEQ ID NO: 156836 - DNA, 27 bp, Artificial sequence
  SiRNA target sequence
aggagactaggtcctttaatttctgta

SEQ ID NO: 156837 - DNA, 27 bp, Artificial sequence
  SiRNA target sequence
ggagactaggtcctttaatttctgtac

SEQ ID NO: 156838 - DNA, 27 bp, Artificial sequence
  SiRNA target sequence
gagactaggtcctttaatttctgtaca

SEQ ID NO: 156839 - DNA, 27 bp, Artificial sequence
  SiRNA target sequence
agactaggtcctttaatttctgtacaa

SEQ ID NO: 156840 - DNA, 27 bp, Artificial sequence
  SiRNA target sequence
gactaggtcctttaatttctgtacaag

SEQ ID NO: 156841 - DNA, 27 bp, Artificial sequence
  SiRNA target sequence
actaggtcctttaatttctgtacaaga

SEQ ID NO: 156842 - DNA, 27 bp, Artificial sequence
  SiRNA target sequence
ctaggtcctttaatttctgtacaagaa

SEQ ID NO: 156843 - DNA, 27 bp, Artificial sequence
  SiRNA target sequence
taggtcctttaatttctgtacaagaag

SEQ ID NO: 156844 - DNA, 27 bp, Artificial sequence
  SiRNA target sequence
aggtcctttaatttctgtacaagaagc

SEQ ID NO: 156845 - DNA, 27 bp, Artificial sequence
  SiRNA target sequence
ggtcctttaatttctgtacaagaagca

SEQ ID NO: 156846 - DNA, 27 bp, Artificial sequence
  SiRNA target sequence
gtcctttaatttctgtacaagaagcac

SEQ ID NO: 156847 - DNA, 27 bp, Artificial sequence
  SiRNA target sequence
tcctttaatttctgtacaagaagcacc

SEQ ID NO: 156848 - DNA, 27 bp, Artificial sequence
  SiRNA target sequence
cctttaatttctgtacaagaagcacct

SEQ ID NO: 156849 - DNA, 27 bp, Artificial sequence
  SiRNA target sequence
ctttaatttctgtacaagaagcacctt

SEQ ID NO: 156850 - DNA, 27 bp, Artificial sequence
  SiRNA target sequence
tttaatttctgtacaagaagcaccttg

SEQ ID NO: 156851 - DNA, 27 bp, Artificial sequence
  SiRNA target sequence
ttaatttctgtacaagaagcaccttgt

SEQ ID NO: 156852 - DNA, 27 bp, Artificial sequence
  SiRNA target sequence
taatttctgtacaagaagcaccttgta

SEQ ID NO: 156853 - DNA, 27 bp, Artificial sequence
  SiRNA target sequence
aatttctgtacaagaagcaccttgtaa

SEQ ID NO: 156854 - DNA, 27 bp, Artificial sequence
  SiRNA target sequence
atttctgtacaagaagcaccttgtaat

SEQ ID NO: 156855 - DNA, 27 bp, Artificial sequence
  SiRNA target sequence
tttctgtacaagaagcaccttgtaata

SEQ ID NO: 156856 - DNA, 27 bp, Artificial sequence
  SiRNA target sequence
ttctgtacaagaagcaccttgtaataa

SEQ ID NO: 156857 - DNA, 27 bp, Artificial sequence
  SiRNA target sequence
tctgtacaagaagcaccttgtaataat

SEQ ID NO: 156858 - DNA, 27 bp, Artificial sequence
  SiRNA target sequence
ctgtacaagaagcaccttgtaataatt

SEQ ID NO: 156859 - DNA, 27 bp, Artificial sequence
  SiRNA target sequence
tgtacaagaagcaccttgtaataattg

SEQ ID NO: 156860 - DNA, 27 bp, Artificial sequence
  SiRNA target sequence
gtacaagaagcaccttgtaataattgt

SEQ ID NO: 156861 - DNA, 27 bp, Artificial sequence
  SiRNA target sequence
tacaagaagcaccttgtaataattgta

SEQ ID NO: 156862 - DNA, 27 bp, Artificial sequence
  SiRNA target sequence
acaagaagcaccttgtaataattgtaa

SEQ ID NO: 156863 - DNA, 27 bp, Artificial sequence
  SiRNA target sequence
caagaagcaccttgtaataattgtaat

SEQ ID NO: 156864 - DNA, 27 bp, Artificial sequence
  SiRNA target sequence
aagaagcaccttgtaataattgtaatt

SEQ ID NO: 156865 - DNA, 27 bp, Artificial sequence
  SiRNA target sequence
agaagcaccttgtaataattgtaattc

SEQ ID NO: 156866 - DNA, 27 bp, Artificial sequence
  SiRNA target sequence
gaagcaccttgtaataattgtaattct

SEQ ID NO: 156867 - DNA, 27 bp, Artificial sequence
  SiRNA target sequence
aagcaccttgtaataattgtaattcta

SEQ ID NO: 156868 - DNA, 27 bp, Artificial sequence
  SiRNA target sequence
agcaccttgtaataattgtaattctac

SEQ ID NO: 156869 - DNA, 27 bp, Artificial sequence
  SiRNA target sequence
gcaccttgtaataattgtaattctact

SEQ ID NO: 156870 - DNA, 27 bp, Artificial sequence
  SiRNA target sequence
caccttgtaataattgtaattctactg

SEQ ID NO: 156871 - DNA, 27 bp, Artificial sequence
  SiRNA target sequence
accttgtaataattgtaattctactgg

SEQ ID NO: 156872 - DNA, 27 bp, Artificial sequence
  SiRNA target sequence
ccttgtaataattgtaattctactgga

SEQ ID NO: 156873 - DNA, 27 bp, Artificial sequence
  SiRNA target sequence
cttgtaataattgtaattctactggat

SEQ ID NO: 156874 - DNA, 27 bp, Artificial sequence
  SiRNA target sequence
ttgtaataattgtaattctactggatt

SEQ ID NO: 156875 - DNA, 27 bp, Artificial sequence
  SiRNA target sequence
tgtaataattgtaattctactggattt

SEQ ID NO: 156876 - DNA, 27 bp, Artificial sequence
  SiRNA target sequence
gtaataattgtaattctactggatttg

SEQ ID NO: 156877 - DNA, 27 bp, Artificial sequence
  SiRNA target sequence
taataattgtaattctactggatttgt

SEQ ID NO: 156878 - DNA, 27 bp, Artificial sequence
  SiRNA target sequence
aataattgtaattctactggatttgtt

SEQ ID NO: 156879 - DNA, 27 bp, Artificial sequence
  SiRNA target sequence
ataattgtaattctactggatttgttg

SEQ ID NO: 156880 - DNA, 27 bp, Artificial sequence
  SiRNA target sequence
taattgtaattctactggatttgttgt

SEQ ID NO: 156881 - DNA, 27 bp, Artificial sequence
  SiRNA target sequence
aattgtaattctactggatttgttgtt

SEQ ID NO: 156882 - DNA, 27 bp, Artificial sequence
  SiRNA target sequence
attgtaattctactggatttgttgtta

SEQ ID NO: 156883 - DNA, 27 bp, Artificial sequence
  SiRNA target sequence
ttgtaattctactggatttgttgttaa

SEQ ID NO: 156884 - DNA, 27 bp, Artificial sequence
  SiRNA target sequence
tgtaattctactggatttgttgttaaa

SEQ ID NO: 156885 - DNA, 27 bp, Artificial sequence
  SiRNA target sequence
gtaattctactggatttgttgttaaag

SEQ ID NO: 156886 - DNA, 27 bp, Artificial sequence
  SiRNA target sequence
taattctactggatttgttgttaaagg

SEQ ID NO: 156887 - DNA, 27 bp, Artificial sequence
  SiRNA target sequence
aattctactggatttgttgttaaagga

SEQ ID NO: 156888 - DNA, 27 bp, Artificial sequence
  SiRNA target sequence
attctactggatttgttgttaaaggaa

SEQ ID NO: 156889 - DNA, 27 bp, Artificial sequence
  SiRNA target sequence
ttctactggatttgttgttaaaggaaa

SEQ ID NO: 156890 - DNA, 27 bp, Artificial sequence
  SiRNA target sequence
tctactggatttgttgttaaaggaaag

SEQ ID NO: 156891 - DNA, 27 bp, Artificial sequence
  SiRNA target sequence
ctactggatttgttgttaaaggaaagc

SEQ ID NO: 156892 - DNA, 27 bp, Artificial sequence
  SiRNA target sequence
tactggatttgttgttaaaggaaagct

SEQ ID NO: 156893 - DNA, 27 bp, Artificial sequence
  SiRNA target sequence
actggatttgttgttaaaggaaagctt

SEQ ID NO: 156894 - DNA, 27 bp, Artificial sequence
  SiRNA target sequence
ctggatttgttgttaaaggaaagcttt

SEQ ID NO: 156895 - DNA, 27 bp, Artificial sequence
  SiRNA target sequence
tggatttgttgttaaaggaaagctttg

SEQ ID NO: 156896 - DNA, 27 bp, Artificial sequence
  SiRNA target sequence
ggatttgttgttaaaggaaagctttgt

SEQ ID NO: 156897 - DNA, 27 bp, Artificial sequence
  SiRNA target sequence
gatttgttgttaaaggaaagctttgtc

SEQ ID NO: 156898 - DNA, 27 bp, Artificial sequence
  SiRNA target sequence
atttgttgttaaaggaaagctttgtca

SEQ ID NO: 156899 - DNA, 27 bp, Artificial sequence
  SiRNA target sequence
tttgttgttaaaggaaagctttgtcaa

SEQ ID NO: 156900 - DNA, 27 bp, Artificial sequence
  SiRNA target sequence
ttgttgttaaaggaaagctttgtcaaa

SEQ ID NO: 156901 - DNA, 27 bp, Artificial sequence
  SiRNA target sequence
tgttgttaaaggaaagctttgtcaaag

SEQ ID NO: 156902 - DNA, 27 bp, Artificial sequence
  SiRNA target sequence
gttgttaaaggaaagctttgtcaaagt

SEQ ID NO: 156903 - DNA, 27 bp, Artificial sequence
  SiRNA target sequence
ttgttaaaggaaagctttgtcaaagtt

SEQ ID NO: 156904 - DNA, 27 bp, Artificial sequence
  SiRNA target sequence
tgttaaaggaaagctttgtcaaagttg

SEQ ID NO: 156905 - DNA, 27 bp, Artificial sequence
  SiRNA target sequence
gttaaaggaaagctttgtcaaagttgt

SEQ ID NO: 156906 - DNA, 27 bp, Artificial sequence
  SiRNA target sequence
ttaaaggaaagctttgtcaaagttgta

SEQ ID NO: 156907 - DNA, 27 bp, Artificial sequence
  SiRNA target sequence
taaaggaaagctttgtcaaagttgtaa

SEQ ID NO: 156908 - DNA, 27 bp, Artificial sequence
  SiRNA target sequence
aaaggaaagctttgtcaaagttgtaaa

SEQ ID NO: 156909 - DNA, 27 bp, Artificial sequence
  SiRNA target sequence
aaggaaagctttgtcaaagttgtaaag

SEQ ID NO: 156910 - DNA, 27 bp, Artificial sequence
  SiRNA target sequence
aggaaagctttgtcaaagttgtaaagg

SEQ ID NO: 156911 - DNA, 27 bp, Artificial sequence
  SiRNA target sequence
ggaaagctttgtcaaagttgtaaaggt

SEQ ID NO: 156912 - DNA, 27 bp, Artificial sequence
  SiRNA target sequence
gaaagctttgtcaaagttgtaaaggta

SEQ ID NO: 156913 - DNA, 27 bp, Artificial sequence
  SiRNA target sequence
aaagctttgtcaaagttgtaaaggtaa

SEQ ID NO: 156914 - DNA, 27 bp, Artificial sequence
  SiRNA target sequence
aagctttgtcaaagttgtaaaggtaaa

SEQ ID NO: 156915 - DNA, 27 bp, Artificial sequence
  SiRNA target sequence
agctttgtcaaagttgtaaaggtaaac

SEQ ID NO: 156916 - DNA, 27 bp, Artificial sequence
  SiRNA target sequence
gctttgtcaaagttgtaaaggtaaaca

SEQ ID NO: 156917 - DNA, 27 bp, Artificial sequence
  SiRNA target sequence
ctttgtcaaagttgtaaaggtaaacaa

SEQ ID NO: 156918 - DNA, 27 bp, Artificial sequence
  SiRNA target sequence
tttgtcaaagttgtaaaggtaaacaat

SEQ ID NO: 156919 - DNA, 27 bp, Artificial sequence
  SiRNA target sequence
ttgtcaaagttgtaaaggtaaacaata

SEQ ID NO: 156920 - DNA, 27 bp, Artificial sequence
  SiRNA target sequence
tgtcaaagttgtaaaggtaaacaatac

SEQ ID NO: 156921 - DNA, 27 bp, Artificial sequence
  SiRNA target sequence
gtcaaagttgtaaaggtaaacaatacg

SEQ ID NO: 156922 - DNA, 27 bp, Artificial sequence
  SiRNA target sequence
tcaaagttgtaaaggtaaacaatacgt

SEQ ID NO: 156923 - DNA, 27 bp, Artificial sequence
  SiRNA target sequence
caaagttgtaaaggtaaacaatacgtt

SEQ ID NO: 156924 - DNA, 27 bp, Artificial sequence
  SiRNA target sequence
aaagttgtaaaggtaaacaatacgttg

SEQ ID NO: 156925 - DNA, 27 bp, Artificial sequence
  SiRNA target sequence
aagttgtaaaggtaaacaatacgttga

SEQ ID NO: 156926 - DNA, 27 bp, Artificial sequence
  SiRNA target sequence
agttgtaaaggtaaacaatacgttgag

SEQ ID NO: 156927 - DNA, 27 bp, Artificial sequence
  SiRNA target sequence
gttgtaaaggtaaacaatacgttgaga

SEQ ID NO: 156928 - DNA, 27 bp, Artificial sequence
  SiRNA target sequence
ttgtaaaggtaaacaatacgttgagac

SEQ ID NO: 156929 - DNA, 27 bp, Artificial sequence
  SiRNA target sequence
tgtaaaggtaaacaatacgttgagact

SEQ ID NO: 156930 - DNA, 27 bp, Artificial sequence
  SiRNA target sequence
gtaaaggtaaacaatacgttgagacta

SEQ ID NO: 156931 - DNA, 27 bp, Artificial sequence
  SiRNA target sequence
taaaggtaaacaatacgttgagactaa

SEQ ID NO: 156932 - DNA, 27 bp, Artificial sequence
  SiRNA target sequence
aaaggtaaacaatacgttgagactaaa

SEQ ID NO: 156933 - DNA, 27 bp, Artificial sequence
  SiRNA target sequence
aaggtaaacaatacgttgagactaaag

SEQ ID NO: 156934 - DNA, 27 bp, Artificial sequence
  SiRNA target sequence
aggtaaacaatacgttgagactaaaga

SEQ ID NO: 156935 - DNA, 27 bp, Artificial sequence
  SiRNA target sequence
ggtaaacaatacgttgagactaaagaa

SEQ ID NO: 156936 - DNA, 27 bp, Artificial sequence
  SiRNA target sequence
gtaaacaatacgttgagactaaagaac

SEQ ID NO: 156937 - DNA, 27 bp, Artificial sequence
  SiRNA target sequence
taaacaatacgttgagactaaagaaca

SEQ ID NO: 156938 - DNA, 27 bp, Artificial sequence
  SiRNA target sequence
aaacaatacgttgagactaaagaacat

SEQ ID NO: 156939 - DNA, 27 bp, Artificial sequence
  SiRNA target sequence
aacaatacgttgagactaaagaacata

SEQ ID NO: 156940 - DNA, 27 bp, Artificial sequence
  SiRNA target sequence
acaatacgttgagactaaagaacatat

SEQ ID NO: 156941 - DNA, 27 bp, Artificial sequence
  SiRNA target sequence
caatacgttgagactaaagaacatatt

SEQ ID NO: 156942 - DNA, 27 bp, Artificial sequence
  SiRNA target sequence
aatacgttgagactaaagaacatattg

SEQ ID NO: 156943 - DNA, 27 bp, Artificial sequence
  SiRNA target sequence
atacgttgagactaaagaacatattga

SEQ ID NO: 156944 - DNA, 27 bp, Artificial sequence
  SiRNA target sequence
tacgttgagactaaagaacatattgaa

SEQ ID NO: 156945 - DNA, 27 bp, Artificial sequence
  SiRNA target sequence
acgttgagactaaagaacatattgaag

SEQ ID NO: 156946 - DNA, 27 bp, Artificial sequence
  SiRNA target sequence
cgttgagactaaagaacatattgaagt

SEQ ID NO: 156947 - DNA, 27 bp, Artificial sequence
  SiRNA target sequence
gttgagactaaagaacatattgaagtg

SEQ ID NO: 156948 - DNA, 27 bp, Artificial sequence
  SiRNA target sequence
ttgagactaaagaacatattgaagtgg

SEQ ID NO: 156949 - DNA, 27 bp, Artificial sequence
  SiRNA target sequence
tgagactaaagaacatattgaagtgga

SEQ ID NO: 156950 - DNA, 27 bp, Artificial sequence
  SiRNA target sequence
gagactaaagaacatattgaagtggaa

SEQ ID NO: 156951 - DNA, 27 bp, Artificial sequence
  SiRNA target sequence
agactaaagaacatattgaagtggaag

SEQ ID NO: 156952 - DNA, 27 bp, Artificial sequence
  SiRNA target sequence
gactaaagaacatattgaagtggaagt

SEQ ID NO: 156953 - DNA, 27 bp, Artificial sequence
  SiRNA target sequence
actaaagaacatattgaagtggaagta

SEQ ID NO: 156954 - DNA, 27 bp, Artificial sequence
  SiRNA target sequence
ctaaagaacatattgaagtggaagtag

SEQ ID NO: 156955 - DNA, 27 bp, Artificial sequence
  SiRNA target sequence
taaagaacatattgaagtggaagtaga

SEQ ID NO: 156956 - DNA, 27 bp, Artificial sequence
  SiRNA target sequence
aaagaacatattgaagtggaagtagag

SEQ ID NO: 156957 - DNA, 27 bp, Artificial sequence
  SiRNA target sequence
aagaacatattgaagtggaagtagagc

SEQ ID NO: 156958 - DNA, 27 bp, Artificial sequence
  SiRNA target sequence
agaacatattgaagtggaagtagagcc

SEQ ID NO: 156959 - DNA, 27 bp, Artificial sequence
  SiRNA target sequence
gaacatattgaagtggaagtagagcca

SEQ ID NO: 156960 - DNA, 27 bp, Artificial sequence
  SiRNA target sequence
aacatattgaagtggaagtagagccag

SEQ ID NO: 156961 - DNA, 27 bp, Artificial sequence
  SiRNA target sequence
acatattgaagtggaagtagagccagg

SEQ ID NO: 156962 - DNA, 27 bp, Artificial sequence
  SiRNA target sequence
catattgaagtggaagtagagccagga

SEQ ID NO: 156963 - DNA, 27 bp, Artificial sequence
  SiRNA target sequence
atattgaagtggaagtagagccaggag

SEQ ID NO: 156964 - DNA, 27 bp, Artificial sequence
  SiRNA target sequence
tattgaagtggaagtagagccaggagt

SEQ ID NO: 156965 - DNA, 27 bp, Artificial sequence
  SiRNA target sequence
attgaagtggaagtagagccaggagta

SEQ ID NO: 156966 - DNA, 27 bp, Artificial sequence
  SiRNA target sequence
ttgaagtggaagtagagccaggagtac

SEQ ID NO: 156967 - DNA, 27 bp, Artificial sequence
  SiRNA target sequence
tgaagtggaagtagagccaggagtaca

SEQ ID NO: 156968 - DNA, 27 bp, Artificial sequence
  SiRNA target sequence
gaagtggaagtagagccaggagtacag

SEQ ID NO: 156969 - DNA, 27 bp, Artificial sequence
  SiRNA target sequence
aagtggaagtagagccaggagtacaga

SEQ ID NO: 156970 - DNA, 27 bp, Artificial sequence
  SiRNA target sequence
agtggaagtagagccaggagtacagaa

SEQ ID NO: 156971 - DNA, 27 bp, Artificial sequence
  SiRNA target sequence
gtggaagtagagccaggagtacagaac

SEQ ID NO: 156972 - DNA, 27 bp, Artificial sequence
  SiRNA target sequence
tggaagtagagccaggagtacagaacg

SEQ ID NO: 156973 - DNA, 27 bp, Artificial sequence
  SiRNA target sequence
ggaagtagagccaggagtacagaacgg

SEQ ID NO: 156974 - DNA, 27 bp, Artificial sequence
  SiRNA target sequence
gaagtagagccaggagtacagaacggt

SEQ ID NO: 156975 - DNA, 27 bp, Artificial sequence
  SiRNA target sequence
aagtagagccaggagtacagaacggta

SEQ ID NO: 156976 - DNA, 27 bp, Artificial sequence
  SiRNA target sequence
agtagagccaggagtacagaacggtag

SEQ ID NO: 156977 - DNA, 27 bp, Artificial sequence
  SiRNA target sequence
gtagagccaggagtacagaacggtaga

SEQ ID NO: 156978 - DNA, 27 bp, Artificial sequence
  SiRNA target sequence
tagagccaggagtacagaacggtagaa

SEQ ID NO: 156979 - DNA, 27 bp, Artificial sequence
  SiRNA target sequence
agagccaggagtacagaacggtagaaa

SEQ ID NO: 156980 - DNA, 27 bp, Artificial sequence
  SiRNA target sequence
gagccaggagtacagaacggtagaaaa

SEQ ID NO: 156981 - DNA, 27 bp, Artificial sequence
  SiRNA target sequence
agccaggagtacagaacggtagaaaat

SEQ ID NO: 156982 - DNA, 27 bp, Artificial sequence
  SiRNA target sequence
gccaggagtacagaacggtagaaaata

SEQ ID NO: 156983 - DNA, 27 bp, Artificial sequence
  SiRNA target sequence
ccaggagtacagaacggtagaaaatat

SEQ ID NO: 156984 - DNA, 27 bp, Artificial sequence
  SiRNA target sequence
caggagtacagaacggtagaaaatata

SEQ ID NO: 156985 - DNA, 27 bp, Artificial sequence
  SiRNA target sequence
aggagtacagaacggtagaaaatatac

SEQ ID NO: 156986 - DNA, 27 bp, Artificial sequence
  SiRNA target sequence
ggagtacagaacggtagaaaatataca

SEQ ID NO: 156987 - DNA, 27 bp, Artificial sequence
  SiRNA target sequence
gagtacagaacggtagaaaatatacat

SEQ ID NO: 156988 - DNA, 27 bp, Artificial sequence
  SiRNA target sequence
agtacagaacggtagaaaatatacatt

SEQ ID NO: 156989 - DNA, 27 bp, Artificial sequence
  SiRNA target sequence
gtacagaacggtagaaaatatacattt

SEQ ID NO: 156990 - DNA, 27 bp, Artificial sequence
  SiRNA target sequence
tacagaacggtagaaaatatacatttt

SEQ ID NO: 156991 - DNA, 27 bp, Artificial sequence
  SiRNA target sequence
acagaacggtagaaaatatacattttc

SEQ ID NO: 156992 - DNA, 27 bp, Artificial sequence
  SiRNA target sequence
cagaacggtagaaaatatacattttct

SEQ ID NO: 156993 - DNA, 27 bp, Artificial sequence
  SiRNA target sequence
agaacggtagaaaatatacattttctg

SEQ ID NO: 156994 - DNA, 27 bp, Artificial sequence
  SiRNA target sequence
gaacggtagaaaatatacattttctgg

SEQ ID NO: 156995 - DNA, 27 bp, Artificial sequence
  SiRNA target sequence
aacggtagaaaatatacattttctggc

SEQ ID NO: 156996 - DNA, 27 bp, Artificial sequence
  SiRNA target sequence
acggtagaaaatatacattttctggca

SEQ ID NO: 156997 - DNA, 27 bp, Artificial sequence
  SiRNA target sequence
cggtagaaaatatacattttctggcaa

SEQ ID NO: 156998 - DNA, 27 bp, Artificial sequence
  SiRNA target sequence
ggtagaaaatatacattttctggcaaa

SEQ ID NO: 156999 - DNA, 27 bp, Artificial sequence
  SiRNA target sequence
gtagaaaatatacattttctggcaaag

SEQ ID NO: 157000 - DNA, 27 bp, Artificial sequence
  SiRNA target sequence
tagaaaatatacattttctggcaaagg

SEQ ID NO: 157001 - DNA, 27 bp, Artificial sequence
  SiRNA target sequence
agaaaatatacattttctggcaaagga

SEQ ID NO: 157002 - DNA, 27 bp, Artificial sequence
  SiRNA target sequence
gaaaatatacattttctggcaaaggaa

SEQ ID NO: 157003 - DNA, 27 bp, Artificial sequence
  SiRNA target sequence
aaaatatacattttctggcaaaggaaa

SEQ ID NO: 157004 - DNA, 27 bp, Artificial sequence
  SiRNA target sequence
aaatatacattttctggcaaaggaaat

SEQ ID NO: 157005 - DNA, 27 bp, Artificial sequence
  SiRNA target sequence
aatatacattttctggcaaaggaaatc

SEQ ID NO: 157006 - DNA, 27 bp, Artificial sequence
  SiRNA target sequence
atatacattttctggcaaaggaaatca

SEQ ID NO: 157007 - DNA, 27 bp, Artificial sequence
  SiRNA target sequence
tatacattttctggcaaaggaaatcat

SEQ ID NO: 157008 - DNA, 27 bp, Artificial sequence
  SiRNA target sequence
atacattttctggcaaaggaaatcata

SEQ ID NO: 157009 - DNA, 27 bp, Artificial sequence
  SiRNA target sequence
tacattttctggcaaaggaaatcataa

SEQ ID NO: 157010 - DNA, 27 bp, Artificial sequence
  SiRNA target sequence
acattttctggcaaaggaaatcataaa

SEQ ID NO: 157011 - DNA, 27 bp, Artificial sequence
  SiRNA target sequence
cattttctggcaaaggaaatcataaaa

SEQ ID NO: 157012 - DNA, 27 bp, Artificial sequence
  SiRNA target sequence
attttctggcaaaggaaatcataaaaa

SEQ ID NO: 157013 - DNA, 27 bp, Artificial sequence
  SiRNA target sequence
ttttctggcaaaggaaatcataaaaaa

SEQ ID NO: 157014 - DNA, 27 bp, Artificial sequence
  SiRNA target sequence
tttctggcaaaggaaatcataaaaaaa

SEQ ID NO: 157015 - DNA, 27 bp, Artificial sequence
  SiRNA target sequence
ttctggcaaaggaaatcataaaaaaaa

SEQ ID NO: 157016 - DNA, 27 bp, Artificial sequence
  SiRNA target sequence
tctggcaaaggaaatcataaaaaaaat

SEQ ID NO: 157017 - DNA, 27 bp, Artificial sequence
  SiRNA target sequence
ctggcaaaggaaatcataaaaaaaatt

SEQ ID NO: 157018 - DNA, 27 bp, Artificial sequence
  SiRNA target sequence
tggcaaaggaaatcataaaaaaaattg

SEQ ID NO: 157019 - DNA, 27 bp, Artificial sequence
  SiRNA target sequence
ggcaaaggaaatcataaaaaaaattgt

SEQ ID NO: 157020 - DNA, 27 bp, Artificial sequence
  SiRNA target sequence
gcaaaggaaatcataaaaaaaattgtg

SEQ ID NO: 157021 - DNA, 27 bp, Artificial sequence
  SiRNA target sequence
caaaggaaatcataaaaaaaattgtgt

SEQ ID NO: 157022 - DNA, 27 bp, Artificial sequence
  SiRNA target sequence
aaaggaaatcataaaaaaaattgtgta

SEQ ID NO: 157023 - DNA, 27 bp, Artificial sequence
  SiRNA target sequence
aaggaaatcataaaaaaaattgtgtac

SEQ ID NO: 157024 - DNA, 27 bp, Artificial sequence
  SiRNA target sequence
aggaaatcataaaaaaaattgtgtacc

SEQ ID NO: 157025 - DNA, 27 bp, Artificial sequence
  SiRNA target sequence
ggaaatcataaaaaaaattgtgtaccg

SEQ ID NO: 157026 - DNA, 27 bp, Artificial sequence
  SiRNA target sequence
gaaatcataaaaaaaattgtgtaccgg

SEQ ID NO: 157027 - DNA, 27 bp, Artificial sequence
  SiRNA target sequence
aaatcataaaaaaaattgtgtaccggg

SEQ ID NO: 157028 - DNA, 27 bp, Artificial sequence
  SiRNA target sequence
aatcataaaaaaaattgtgtaccgggt

SEQ ID NO: 157029 - DNA, 27 bp, Artificial sequence
  SiRNA target sequence
atcataaaaaaaattgtgtaccgggtg

SEQ ID NO: 157030 - DNA, 27 bp, Artificial sequence
  SiRNA target sequence
tcataaaaaaaattgtgtaccgggtga

SEQ ID NO: 157031 - DNA, 27 bp, Artificial sequence
  SiRNA target sequence
cataaaaaaaattgtgtaccgggtgat

SEQ ID NO: 157032 - DNA, 27 bp, Artificial sequence
  SiRNA target sequence
ataaaaaaaattgtgtaccgggtgatg

SEQ ID NO: 157033 - DNA, 27 bp, Artificial sequence
  SiRNA target sequence
taaaaaaaattgtgtaccgggtgatgt

SEQ ID NO: 157034 - DNA, 27 bp, Artificial sequence
  SiRNA target sequence
aaaaaaaattgtgtaccgggtgatgtg

SEQ ID NO: 157035 - DNA, 27 bp, Artificial sequence
  SiRNA target sequence
aaaaaaattgtgtaccgggtgatgtga

SEQ ID NO: 157036 - DNA, 27 bp, Artificial sequence
  SiRNA target sequence
aaaaaattgtgtaccgggtgatgtgat

SEQ ID NO: 157037 - DNA, 27 bp, Artificial sequence
  SiRNA target sequence
aaaaattgtgtaccgggtgatgtgatt

SEQ ID NO: 157038 - DNA, 27 bp, Artificial sequence
  SiRNA target sequence
aaaattgtgtaccgggtgatgtgattc

SEQ ID NO: 157039 - DNA, 27 bp, Artificial sequence
  SiRNA target sequence
aaattgtgtaccgggtgatgtgattct

SEQ ID NO: 157040 - DNA, 27 bp, Artificial sequence
  SiRNA target sequence
aattgtgtaccgggtgatgtgattctt

SEQ ID NO: 157041 - DNA, 27 bp, Artificial sequence
  SiRNA target sequence
attgtgtaccgggtgatgtgattctta

SEQ ID NO: 157042 - DNA, 27 bp, Artificial sequence
  SiRNA target sequence
ttgtgtaccgggtgatgtgattcttat

SEQ ID NO: 157043 - DNA, 27 bp, Artificial sequence
  SiRNA target sequence
tgtgtaccgggtgatgtgattcttatt

SEQ ID NO: 157044 - DNA, 27 bp, Artificial sequence
  SiRNA target sequence
gtgtaccgggtgatgtgattcttattg

SEQ ID NO: 157045 - DNA, 27 bp, Artificial sequence
  SiRNA target sequence
tgtaccgggtgatgtgattcttattgt

SEQ ID NO: 157046 - DNA, 27 bp, Artificial sequence
  SiRNA target sequence
gtaccgggtgatgtgattcttattgta

SEQ ID NO: 157047 - DNA, 27 bp, Artificial sequence
  SiRNA target sequence
taccgggtgatgtgattcttattgtaa

SEQ ID NO: 157048 - DNA, 27 bp, Artificial sequence
  SiRNA target sequence
accgggtgatgtgattcttattgtaaa

SEQ ID NO: 157049 - DNA, 27 bp, Artificial sequence
  SiRNA target sequence
ccgggtgatgtgattcttattgtaaac

SEQ ID NO: 157050 - DNA, 27 bp, Artificial sequence
  SiRNA target sequence
cgggtgatgtgattcttattgtaaaca

SEQ ID NO: 157051 - DNA, 27 bp, Artificial sequence
  SiRNA target sequence
gggtgatgtgattcttattgtaaacat

SEQ ID NO: 157052 - DNA, 27 bp, Artificial sequence
  SiRNA target sequence
ggtgatgtgattcttattgtaaacatt

SEQ ID NO: 157053 - DNA, 27 bp, Artificial sequence
  SiRNA target sequence
gtgatgtgattcttattgtaaacatta

SEQ ID NO: 157054 - DNA, 27 bp, Artificial sequence
  SiRNA target sequence
tgatgtgattcttattgtaaacattac

SEQ ID NO: 157055 - DNA, 27 bp, Artificial sequence
  SiRNA target sequence
gatgtgattcttattgtaaacattaca

SEQ ID NO: 157056 - DNA, 27 bp, Artificial sequence
  SiRNA target sequence
atgtgattcttattgtaaacattacaa

SEQ ID NO: 157057 - DNA, 27 bp, Artificial sequence
  SiRNA target sequence
tgtgattcttattgtaaacattacaaa

SEQ ID NO: 157058 - DNA, 27 bp, Artificial sequence
  SiRNA target sequence
gtgattcttattgtaaacattacaaat

SEQ ID NO: 157059 - DNA, 27 bp, Artificial sequence
  SiRNA target sequence
tgattcttattgtaaacattacaaatg

SEQ ID NO: 157060 - DNA, 27 bp, Artificial sequence
  SiRNA target sequence
gattcttattgtaaacattacaaatga

SEQ ID NO: 157061 - DNA, 27 bp, Artificial sequence
  SiRNA target sequence
attcttattgtaaacattacaaatgat

SEQ ID NO: 157062 - DNA, 27 bp, Artificial sequence
  SiRNA target sequence
ttcttattgtaaacattacaaatgatc

SEQ ID NO: 157063 - DNA, 27 bp, Artificial sequence
  SiRNA target sequence
tcttattgtaaacattacaaatgatcc

SEQ ID NO: 157064 - DNA, 27 bp, Artificial sequence
  SiRNA target sequence
cttattgtaaacattacaaatgatcca

SEQ ID NO: 157065 - DNA, 27 bp, Artificial sequence
  SiRNA target sequence
ttattgtaaacattacaaatgatccaa

SEQ ID NO: 157066 - DNA, 27 bp, Artificial sequence
  SiRNA target sequence
tattgtaaacattacaaatgatccaag

SEQ ID NO: 157067 - DNA, 27 bp, Artificial sequence
  SiRNA target sequence
attgtaaacattacaaatgatccaaga

SEQ ID NO: 157068 - DNA, 27 bp, Artificial sequence
  SiRNA target sequence
ttgtaaacattacaaatgatccaagat

SEQ ID NO: 157069 - DNA, 27 bp, Artificial sequence
  SiRNA target sequence
tgtaaacattacaaatgatccaagatt

SEQ ID NO: 157070 - DNA, 27 bp, Artificial sequence
  SiRNA target sequence
gtaaacattacaaatgatccaagattt

SEQ ID NO: 157071 - DNA, 27 bp, Artificial sequence
  SiRNA target sequence
taaacattacaaatgatccaagattta

SEQ ID NO: 157072 - DNA, 27 bp, Artificial sequence
  SiRNA target sequence
aaacattacaaatgatccaagatttag

SEQ ID NO: 157073 - DNA, 27 bp, Artificial sequence
  SiRNA target sequence
aacattacaaatgatccaagatttaga

SEQ ID NO: 157074 - DNA, 27 bp, Artificial sequence
  SiRNA target sequence
acattacaaatgatccaagatttagaa

SEQ ID NO: 157075 - DNA, 27 bp, Artificial sequence
  SiRNA target sequence
cattacaaatgatccaagatttagaaa

SEQ ID NO: 157076 - DNA, 27 bp, Artificial sequence
  SiRNA target sequence
attacaaatgatccaagatttagaaaa

SEQ ID NO: 157077 - DNA, 27 bp, Artificial sequence
  SiRNA target sequence
ttacaaatgatccaagatttagaaaaa

SEQ ID NO: 157078 - DNA, 27 bp, Artificial sequence
  SiRNA target sequence
tacaaatgatccaagatttagaaaaag

SEQ ID NO: 157079 - DNA, 27 bp, Artificial sequence
  SiRNA target sequence
acaaatgatccaagatttagaaaaagt

SEQ ID NO: 157080 - DNA, 27 bp, Artificial sequence
  SiRNA target sequence
caaatgatccaagatttagaaaaagtg

SEQ ID NO: 157081 - DNA, 27 bp, Artificial sequence
  SiRNA target sequence
aaatgatccaagatttagaaaaagtgg

SEQ ID NO: 157082 - DNA, 27 bp, Artificial sequence
  SiRNA target sequence
aatgatccaagatttagaaaaagtgga

SEQ ID NO: 157083 - DNA, 27 bp, Artificial sequence
  SiRNA target sequence
atgatccaagatttagaaaaagtggat

SEQ ID NO: 157084 - DNA, 27 bp, Artificial sequence
  SiRNA target sequence
tgatccaagatttagaaaaagtggata

SEQ ID NO: 157085 - DNA, 27 bp, Artificial sequence
  SiRNA target sequence
gatccaagatttagaaaaagtggatat

SEQ ID NO: 157086 - DNA, 27 bp, Artificial sequence
  SiRNA target sequence
atccaagatttagaaaaagtggatata

SEQ ID NO: 157087 - DNA, 27 bp, Artificial sequence
  SiRNA target sequence
tccaagatttagaaaaagtggatataa

SEQ ID NO: 157088 - DNA, 27 bp, Artificial sequence
  SiRNA target sequence
ccaagatttagaaaaagtggatataat

SEQ ID NO: 157089 - DNA, 27 bp, Artificial sequence
  SiRNA target sequence
caagatttagaaaaagtggatataatt

SEQ ID NO: 157090 - DNA, 27 bp, Artificial sequence
  SiRNA target sequence
aagatttagaaaaagtggatataattt

SEQ ID NO: 157091 - DNA, 27 bp, Artificial sequence
  SiRNA target sequence
agatttagaaaaagtggatataattta

SEQ ID NO: 157092 - DNA, 27 bp, Artificial sequence
  SiRNA target sequence
gatttagaaaaagtggatataatttaa

SEQ ID NO: 157093 - DNA, 27 bp, Artificial sequence
  SiRNA target sequence
atttagaaaaagtggatataatttaat

SEQ ID NO: 157094 - DNA, 27 bp, Artificial sequence
  SiRNA target sequence
tttagaaaaagtggatataatttaatt

SEQ ID NO: 157095 - DNA, 27 bp, Artificial sequence
  SiRNA target sequence
ttagaaaaagtggatataatttaatta

SEQ ID NO: 157096 - DNA, 27 bp, Artificial sequence
  SiRNA target sequence
tagaaaaagtggatataatttaattag

SEQ ID NO: 157097 - DNA, 27 bp, Artificial sequence
  SiRNA target sequence
agaaaaagtggatataatttaattagt

SEQ ID NO: 157098 - DNA, 27 bp, Artificial sequence
  SiRNA target sequence
gaaaaagtggatataatttaattagta

SEQ ID NO: 157099 - DNA, 27 bp, Artificial sequence
  SiRNA target sequence
aaaaagtggatataatttaattagtaa

SEQ ID NO: 157100 - DNA, 27 bp, Artificial sequence
  SiRNA target sequence
aaaagtggatataatttaattagtaag

SEQ ID NO: 157101 - DNA, 27 bp, Artificial sequence
  SiRNA target sequence
aaagtggatataatttaattagtaagg

SEQ ID NO: 157102 - DNA, 27 bp, Artificial sequence
  SiRNA target sequence
aagtggatataatttaattagtaaggt

SEQ ID NO: 157103 - DNA, 27 bp, Artificial sequence
  SiRNA target sequence
agtggatataatttaattagtaaggtt

SEQ ID NO: 157104 - DNA, 27 bp, Artificial sequence
  SiRNA target sequence
gtggatataatttaattagtaaggttg

SEQ ID NO: 157105 - DNA, 27 bp, Artificial sequence
  SiRNA target sequence
tggatataatttaattagtaaggttga

SEQ ID NO: 157106 - DNA, 27 bp, Artificial sequence
  SiRNA target sequence
ggatataatttaattagtaaggttgat

SEQ ID NO: 157107 - DNA, 27 bp, Artificial sequence
  SiRNA target sequence
gatataatttaattagtaaggttgata

SEQ ID NO: 157108 - DNA, 27 bp, Artificial sequence
  SiRNA target sequence
atataatttaattagtaaggttgatat

SEQ ID NO: 157109 - DNA, 27 bp, Artificial sequence
  SiRNA target sequence
tataatttaattagtaaggttgatatt

SEQ ID NO: 157110 - DNA, 27 bp, Artificial sequence
  SiRNA target sequence
ataatttaattagtaaggttgatattc

SEQ ID NO: 157111 - DNA, 27 bp, Artificial sequence
  SiRNA target sequence
taatttaattagtaaggttgatattcc

SEQ ID NO: 157112 - DNA, 27 bp, Artificial sequence
  SiRNA target sequence
aatttaattagtaaggttgatattcca

SEQ ID NO: 157113 - DNA, 27 bp, Artificial sequence
  SiRNA target sequence
atttaattagtaaggttgatattccat

SEQ ID NO: 157114 - DNA, 27 bp, Artificial sequence
  SiRNA target sequence
tttaattagtaaggttgatattccatt

SEQ ID NO: 157115 - DNA, 27 bp, Artificial sequence
  SiRNA target sequence
ttaattagtaaggttgatattccattg

SEQ ID NO: 157116 - DNA, 27 bp, Artificial sequence
  SiRNA target sequence
taattagtaaggttgatattccattgt

SEQ ID NO: 157117 - DNA, 27 bp, Artificial sequence
  SiRNA target sequence
aattagtaaggttgatattccattgta

SEQ ID NO: 157118 - DNA, 27 bp, Artificial sequence
  SiRNA target sequence
attagtaaggttgatattccattgtat

SEQ ID NO: 157119 - DNA, 27 bp, Artificial sequence
  SiRNA target sequence
ttagtaaggttgatattccattgtatg

SEQ ID NO: 157120 - DNA, 27 bp, Artificial sequence
  SiRNA target sequence
tagtaaggttgatattccattgtatgt

SEQ ID NO: 157121 - DNA, 27 bp, Artificial sequence
  SiRNA target sequence
agtaaggttgatattccattgtatgtt

SEQ ID NO: 157122 - DNA, 27 bp, Artificial sequence
  SiRNA target sequence
gtaaggttgatattccattgtatgttg

SEQ ID NO: 157123 - DNA, 27 bp, Artificial sequence
  SiRNA target sequence
taaggttgatattccattgtatgttgc

SEQ ID NO: 157124 - DNA, 27 bp, Artificial sequence
  SiRNA target sequence
aaggttgatattccattgtatgttgct

SEQ ID NO: 157125 - DNA, 27 bp, Artificial sequence
  SiRNA target sequence
aggttgatattccattgtatgttgctt

SEQ ID NO: 157126 - DNA, 27 bp, Artificial sequence
  SiRNA target sequence
ggttgatattccattgtatgttgcttt

SEQ ID NO: 157127 - DNA, 27 bp, Artificial sequence
  SiRNA target sequence
gttgatattccattgtatgttgctttg

SEQ ID NO: 157128 - DNA, 27 bp, Artificial sequence
  SiRNA target sequence
ttgatattccattgtatgttgctttgg

SEQ ID NO: 157129 - DNA, 27 bp, Artificial sequence
  SiRNA target sequence
tgatattccattgtatgttgctttggc

SEQ ID NO: 157130 - DNA, 27 bp, Artificial sequence
  SiRNA target sequence
gatattccattgtatgttgctttggca

SEQ ID NO: 157131 - DNA, 27 bp, Artificial sequence
  SiRNA target sequence
atattccattgtatgttgctttggcag

SEQ ID NO: 157132 - DNA, 27 bp, Artificial sequence
  SiRNA target sequence
tattccattgtatgttgctttggcagg

SEQ ID NO: 157133 - DNA, 27 bp, Artificial sequence
  SiRNA target sequence
attccattgtatgttgctttggcaggc

SEQ ID NO: 157134 - DNA, 27 bp, Artificial sequence
  SiRNA target sequence
ttccattgtatgttgctttggcaggcg

SEQ ID NO: 157135 - DNA, 27 bp, Artificial sequence
  SiRNA target sequence
tccattgtatgttgctttggcaggcgg

SEQ ID NO: 157136 - DNA, 27 bp, Artificial sequence
  SiRNA target sequence
ccattgtatgttgctttggcaggcgga

SEQ ID NO: 157137 - DNA, 27 bp, Artificial sequence
  SiRNA target sequence
cattgtatgttgctttggcaggcggac

SEQ ID NO: 157138 - DNA, 27 bp, Artificial sequence
  SiRNA target sequence
attgtatgttgctttggcaggcggaca

SEQ ID NO: 157139 - DNA, 27 bp, Artificial sequence
  SiRNA target sequence
ttgtatgttgctttggcaggcggacag

SEQ ID NO: 157140 - DNA, 27 bp, Artificial sequence
  SiRNA target sequence
tgtatgttgctttggcaggcggacaga

SEQ ID NO: 157141 - DNA, 27 bp, Artificial sequence
  SiRNA target sequence
gtatgttgctttggcaggcggacagat

SEQ ID NO: 157142 - DNA, 27 bp, Artificial sequence
  SiRNA target sequence
tatgttgctttggcaggcggacagatt

SEQ ID NO: 157143 - DNA, 27 bp, Artificial sequence
  SiRNA target sequence
atgttgctttggcaggcggacagatta

SEQ ID NO: 157144 - DNA, 27 bp, Artificial sequence
  SiRNA target sequence
tgttgctttggcaggcggacagattat

SEQ ID NO: 157145 - DNA, 27 bp, Artificial sequence
  SiRNA target sequence
gttgctttggcaggcggacagattata

SEQ ID NO: 157146 - DNA, 27 bp, Artificial sequence
  SiRNA target sequence
ttgctttggcaggcggacagattatat

SEQ ID NO: 157147 - DNA, 27 bp, Artificial sequence
  SiRNA target sequence
tgctttggcaggcggacagattatatt

SEQ ID NO: 157148 - DNA, 27 bp, Artificial sequence
  SiRNA target sequence
gctttggcaggcggacagattatattt

SEQ ID NO: 157149 - DNA, 27 bp, Artificial sequence
  SiRNA target sequence
ctttggcaggcggacagattatatttg

SEQ ID NO: 157150 - DNA, 27 bp, Artificial sequence
  SiRNA target sequence
tttggcaggcggacagattatatttga

SEQ ID NO: 157151 - DNA, 27 bp, Artificial sequence
  SiRNA target sequence
ttggcaggcggacagattatatttgaa

SEQ ID NO: 157152 - DNA, 27 bp, Artificial sequence
  SiRNA target sequence
tggcaggcggacagattatatttgaac

SEQ ID NO: 157153 - DNA, 27 bp, Artificial sequence
  SiRNA target sequence
ggcaggcggacagattatatttgaaca

SEQ ID NO: 157154 - DNA, 27 bp, Artificial sequence
  SiRNA target sequence
gcaggcggacagattatatttgaacat

SEQ ID NO: 157155 - DNA, 27 bp, Artificial sequence
  SiRNA target sequence
caggcggacagattatatttgaacata

SEQ ID NO: 157156 - DNA, 27 bp, Artificial sequence
  SiRNA target sequence
aggcggacagattatatttgaacatat

SEQ ID NO: 157157 - DNA, 27 bp, Artificial sequence
  SiRNA target sequence
ggcggacagattatatttgaacatatc

SEQ ID NO: 157158 - DNA, 27 bp, Artificial sequence
  SiRNA target sequence
gcggacagattatatttgaacatatca

SEQ ID NO: 157159 - DNA, 27 bp, Artificial sequence
  SiRNA target sequence
cggacagattatatttgaacatatcac

SEQ ID NO: 157160 - DNA, 27 bp, Artificial sequence
  SiRNA target sequence
ggacagattatatttgaacatatcact

SEQ ID NO: 157161 - DNA, 27 bp, Artificial sequence
  SiRNA target sequence
gacagattatatttgaacatatcactg

SEQ ID NO: 157162 - DNA, 27 bp, Artificial sequence
  SiRNA target sequence
acagattatatttgaacatatcactgg

SEQ ID NO: 157163 - DNA, 27 bp, Artificial sequence
  SiRNA target sequence
cagattatatttgaacatatcactggt

SEQ ID NO: 157164 - DNA, 27 bp, Artificial sequence
  SiRNA target sequence
agattatatttgaacatatcactggta

SEQ ID NO: 157165 - DNA, 27 bp, Artificial sequence
  SiRNA target sequence
gattatatttgaacatatcactggtaa

SEQ ID NO: 157166 - DNA, 27 bp, Artificial sequence
  SiRNA target sequence
attatatttgaacatatcactggtaag

SEQ ID NO: 157167 - DNA, 27 bp, Artificial sequence
  SiRNA target sequence
ttatatttgaacatatcactggtaaga

SEQ ID NO: 157168 - DNA, 27 bp, Artificial sequence
  SiRNA target sequence
tatatttgaacatatcactggtaagaa

SEQ ID NO: 157169 - DNA, 27 bp, Artificial sequence
  SiRNA target sequence
atatttgaacatatcactggtaagaaa

SEQ ID NO: 157170 - DNA, 27 bp, Artificial sequence
  SiRNA target sequence
tatttgaacatatcactggtaagaaat

SEQ ID NO: 157171 - DNA, 27 bp, Artificial sequence
  SiRNA target sequence
atttgaacatatcactggtaagaaatt

SEQ ID NO: 157172 - DNA, 27 bp, Artificial sequence
  SiRNA target sequence
tttgaacatatcactggtaagaaattt

SEQ ID NO: 157173 - DNA, 27 bp, Artificial sequence
  SiRNA target sequence
ttgaacatatcactggtaagaaatttg

SEQ ID NO: 157174 - DNA, 27 bp, Artificial sequence
  SiRNA target sequence
tgaacatatcactggtaagaaatttga

SEQ ID NO: 157175 - DNA, 27 bp, Artificial sequence
  SiRNA target sequence
gaacatatcactggtaagaaatttgaa

SEQ ID NO: 157176 - DNA, 27 bp, Artificial sequence
  SiRNA target sequence
aacatatcactggtaagaaatttgaaa

SEQ ID NO: 157177 - DNA, 27 bp, Artificial sequence
  SiRNA target sequence
acatatcactggtaagaaatttgaaat

SEQ ID NO: 157178 - DNA, 27 bp, Artificial sequence
  SiRNA target sequence
catatcactggtaagaaatttgaaatt

SEQ ID NO: 157179 - DNA, 27 bp, Artificial sequence
  SiRNA target sequence
atatcactggtaagaaatttgaaatta

SEQ ID NO: 157180 - DNA, 27 bp, Artificial sequence
  SiRNA target sequence
tatcactggtaagaaatttgaaattac

SEQ ID NO: 157181 - DNA, 27 bp, Artificial sequence
  SiRNA target sequence
atcactggtaagaaatttgaaattact

SEQ ID NO: 157182 - DNA, 27 bp, Artificial sequence
  SiRNA target sequence
tcactggtaagaaatttgaaattactt

SEQ ID NO: 157183 - DNA, 27 bp, Artificial sequence
  SiRNA target sequence
cactggtaagaaatttgaaattacttt

SEQ ID NO: 157184 - DNA, 27 bp, Artificial sequence
  SiRNA target sequence
actggtaagaaatttgaaattacttta

SEQ ID NO: 157185 - DNA, 27 bp, Artificial sequence
  SiRNA target sequence
ctggtaagaaatttgaaattactttat

SEQ ID NO: 157186 - DNA, 27 bp, Artificial sequence
  SiRNA target sequence
tggtaagaaatttgaaattactttata

SEQ ID NO: 157187 - DNA, 27 bp, Artificial sequence
  SiRNA target sequence
ggtaagaaatttgaaattactttatat

SEQ ID NO: 157188 - DNA, 27 bp, Artificial sequence
  SiRNA target sequence
gtaagaaatttgaaattactttatatc

SEQ ID NO: 157189 - DNA, 27 bp, Artificial sequence
  SiRNA target sequence
taagaaatttgaaattactttatatcc

SEQ ID NO: 157190 - DNA, 27 bp, Artificial sequence
  SiRNA target sequence
aagaaatttgaaattactttatatcca

SEQ ID NO: 157191 - DNA, 27 bp, Artificial sequence
  SiRNA target sequence
agaaatttgaaattactttatatccat

SEQ ID NO: 157192 - DNA, 27 bp, Artificial sequence
  SiRNA target sequence
gaaatttgaaattactttatatccatt

SEQ ID NO: 157193 - DNA, 27 bp, Artificial sequence
  SiRNA target sequence
aaatttgaaattactttatatccattt

SEQ ID NO: 157194 - DNA, 27 bp, Artificial sequence
  SiRNA target sequence
aatttgaaattactttatatccattta

SEQ ID NO: 157195 - DNA, 27 bp, Artificial sequence
  SiRNA target sequence
atttgaaattactttatatccatttaa

SEQ ID NO: 157196 - DNA, 27 bp, Artificial sequence
  SiRNA target sequence
tttgaaattactttatatccatttaaa

SEQ ID NO: 157197 - DNA, 27 bp, Artificial sequence
  SiRNA target sequence
ttgaaattactttatatccatttaaag

SEQ ID NO: 157198 - DNA, 27 bp, Artificial sequence
  SiRNA target sequence
tgaaattactttatatccatttaaaga

SEQ ID NO: 157199 - DNA, 27 bp, Artificial sequence
  SiRNA target sequence
gaaattactttatatccatttaaagat

SEQ ID NO: 157200 - DNA, 27 bp, Artificial sequence
  SiRNA target sequence
aaattactttatatccatttaaagatt

SEQ ID NO: 157201 - DNA, 27 bp, Artificial sequence
  SiRNA target sequence
aattactttatatccatttaaagattt

SEQ ID NO: 157202 - DNA, 27 bp, Artificial sequence
  SiRNA target sequence
attactttatatccatttaaagattta

SEQ ID NO: 157203 - DNA, 27 bp, Artificial sequence
  SiRNA target sequence
ttactttatatccatttaaagatttaa

SEQ ID NO: 157204 - DNA, 27 bp, Artificial sequence
  SiRNA target sequence
tactttatatccatttaaagatttaaa

SEQ ID NO: 157205 - DNA, 27 bp, Artificial sequence
  SiRNA target sequence
actttatatccatttaaagatttaaag

SEQ ID NO: 157206 - DNA, 27 bp, Artificial sequence
  SiRNA target sequence
ctttatatccatttaaagatttaaaga

SEQ ID NO: 157207 - DNA, 27 bp, Artificial sequence
  SiRNA target sequence
tttatatccatttaaagatttaaagaa

SEQ ID NO: 157208 - DNA, 27 bp, Artificial sequence
  SiRNA target sequence
ttatatccatttaaagatttaaagaaa

SEQ ID NO: 157209 - DNA, 27 bp, Artificial sequence
  SiRNA target sequence
tatatccatttaaagatttaaagaaat

SEQ ID NO: 157210 - DNA, 27 bp, Artificial sequence
  SiRNA target sequence
atatccatttaaagatttaaagaaatg

SEQ ID NO: 157211 - DNA, 27 bp, Artificial sequence
  SiRNA target sequence
tatccatttaaagatttaaagaaatgt

SEQ ID NO: 157212 - DNA, 27 bp, Artificial sequence
  SiRNA target sequence
atccatttaaagatttaaagaaatgta

SEQ ID NO: 157213 - DNA, 27 bp, Artificial sequence
  SiRNA target sequence
tccatttaaagatttaaagaaatgtat

SEQ ID NO: 157214 - DNA, 27 bp, Artificial sequence
  SiRNA target sequence
ccatttaaagatttaaagaaatgtatt

SEQ ID NO: 157215 - DNA, 27 bp, Artificial sequence
  SiRNA target sequence
catttaaagatttaaagaaatgtatta

SEQ ID NO: 157216 - DNA, 27 bp, Artificial sequence
  SiRNA target sequence
atttaaagatttaaagaaatgtattat

SEQ ID NO: 157217 - DNA, 27 bp, Artificial sequence
  SiRNA target sequence
tttaaagatttaaagaaatgtattatt

SEQ ID NO: 157218 - DNA, 27 bp, Artificial sequence
  SiRNA target sequence
ttaaagatttaaagaaatgtattattt

SEQ ID NO: 157219 - DNA, 27 bp, Artificial sequence
  SiRNA target sequence
taaagatttaaagaaatgtattatttt

SEQ ID NO: 157220 - DNA, 27 bp, Artificial sequence
  SiRNA target sequence
aaagatttaaagaaatgtattatttta

SEQ ID NO: 157221 - DNA, 27 bp, Artificial sequence
  SiRNA target sequence
aagatttaaagaaatgtattattttaa

SEQ ID NO: 157222 - DNA, 27 bp, Artificial sequence
  SiRNA target sequence
agatttaaagaaatgtattattttaaa

SEQ ID NO: 157223 - DNA, 27 bp, Artificial sequence
  SiRNA target sequence
gatttaaagaaatgtattattttaaaa

SEQ ID NO: 157224 - DNA, 27 bp, Artificial sequence
  SiRNA target sequence
atttaaagaaatgtattattttaaaag

SEQ ID NO: 157225 - DNA, 27 bp, Artificial sequence
  SiRNA target sequence
tttaaagaaatgtattattttaaaagg

SEQ ID NO: 157226 - DNA, 27 bp, Artificial sequence
  SiRNA target sequence
ttaaagaaatgtattattttaaaaggc

SEQ ID NO: 157227 - DNA, 27 bp, Artificial sequence
  SiRNA target sequence
taaagaaatgtattattttaaaaggcg

SEQ ID NO: 157228 - DNA, 27 bp, Artificial sequence
  SiRNA target sequence
aaagaaatgtattattttaaaaggcga

SEQ ID NO: 157229 - DNA, 27 bp, Artificial sequence
  SiRNA target sequence
aagaaatgtattattttaaaaggcgaa

SEQ ID NO: 157230 - DNA, 27 bp, Artificial sequence
  SiRNA target sequence
agaaatgtattattttaaaaggcgaag

SEQ ID NO: 157231 - DNA, 27 bp, Artificial sequence
  SiRNA target sequence
gaaatgtattattttaaaaggcgaagg

SEQ ID NO: 157232 - DNA, 27 bp, Artificial sequence
  SiRNA target sequence
aaatgtattattttaaaaggcgaaggt

SEQ ID NO: 157233 - DNA, 27 bp, Artificial sequence
  SiRNA target sequence
aatgtattattttaaaaggcgaaggtt

SEQ ID NO: 157234 - DNA, 27 bp, Artificial sequence
  SiRNA target sequence
atgtattattttaaaaggcgaaggttt

SEQ ID NO: 157235 - DNA, 27 bp, Artificial sequence
  SiRNA target sequence
tgtattattttaaaaggcgaaggtttt

SEQ ID NO: 157236 - DNA, 27 bp, Artificial sequence
  SiRNA target sequence
gtattattttaaaaggcgaaggtttta

SEQ ID NO: 157237 - DNA, 27 bp, Artificial sequence
  SiRNA target sequence
tattattttaaaaggcgaaggttttaa

SEQ ID NO: 157238 - DNA, 27 bp, Artificial sequence
  SiRNA target sequence
attattttaaaaggcgaaggttttaaa

SEQ ID NO: 157239 - DNA, 27 bp, Artificial sequence
  SiRNA target sequence
ttattttaaaaggcgaaggttttaaaa

SEQ ID NO: 157240 - DNA, 27 bp, Artificial sequence
  SiRNA target sequence
tattttaaaaggcgaaggttttaaaat

SEQ ID NO: 157241 - DNA, 27 bp, Artificial sequence
  SiRNA target sequence
attttaaaaggcgaaggttttaaaata

SEQ ID NO: 157242 - DNA, 27 bp, Artificial sequence
  SiRNA target sequence
ttttaaaaggcgaaggttttaaaataa

SEQ ID NO: 157243 - DNA, 27 bp, Artificial sequence
  SiRNA target sequence
tttaaaaggcgaaggttttaaaataaa

SEQ ID NO: 157244 - DNA, 27 bp, Artificial sequence
  SiRNA target sequence
ttaaaaggcgaaggttttaaaataaaa

SEQ ID NO: 157245 - DNA, 27 bp, Artificial sequence
  SiRNA target sequence
taaaaggcgaaggttttaaaataaaaa

SEQ ID NO: 157246 - DNA, 27 bp, Artificial sequence
  SiRNA target sequence
aaaaggcgaaggttttaaaataaaaaa

SEQ ID NO: 157247 - DNA, 27 bp, Artificial sequence
  SiRNA target sequence
aaaggcgaaggttttaaaataaaaaat

SEQ ID NO: 157248 - DNA, 27 bp, Artificial sequence
  SiRNA target sequence
aaggcgaaggttttaaaataaaaaata

SEQ ID NO: 157249 - DNA, 27 bp, Artificial sequence
  SiRNA target sequence
aggcgaaggttttaaaataaaaaatag

SEQ ID NO: 157250 - DNA, 27 bp, Artificial sequence
  SiRNA target sequence
ggcgaaggttttaaaataaaaaatagt

SEQ ID NO: 157251 - DNA, 27 bp, Artificial sequence
  SiRNA target sequence
gcgaaggttttaaaataaaaaatagtt

SEQ ID NO: 157252 - DNA, 27 bp, Artificial sequence
  SiRNA target sequence
cgaaggttttaaaataaaaaatagtta

SEQ ID NO: 157253 - DNA, 27 bp, Artificial sequence
  SiRNA target sequence
gaaggttttaaaataaaaaatagttat

SEQ ID NO: 157254 - DNA, 27 bp, Artificial sequence
  SiRNA target sequence
aaggttttaaaataaaaaatagttatt

SEQ ID NO: 157255 - DNA, 27 bp, Artificial sequence
  SiRNA target sequence
aggttttaaaataaaaaatagttattc

SEQ ID NO: 157256 - DNA, 27 bp, Artificial sequence
  SiRNA target sequence
ggttttaaaataaaaaatagttattcg

SEQ ID NO: 157257 - DNA, 27 bp, Artificial sequence
  SiRNA target sequence
gttttaaaataaaaaatagttattcgg

SEQ ID NO: 157258 - DNA, 27 bp, Artificial sequence
  SiRNA target sequence
ttttaaaataaaaaatagttattcggg

SEQ ID NO: 157259 - DNA, 27 bp, Artificial sequence
  SiRNA target sequence
tttaaaataaaaaatagttattcgggt

SEQ ID NO: 157260 - DNA, 27 bp, Artificial sequence
  SiRNA target sequence
ttaaaataaaaaatagttattcgggtg

SEQ ID NO: 157261 - DNA, 27 bp, Artificial sequence
  SiRNA target sequence
taaaataaaaaatagttattcgggtgg

SEQ ID NO: 157262 - DNA, 27 bp, Artificial sequence
  SiRNA target sequence
aaaataaaaaatagttattcgggtggt

SEQ ID NO: 157263 - DNA, 27 bp, Artificial sequence
  SiRNA target sequence
aaataaaaaatagttattcgggtggtg

SEQ ID NO: 157264 - DNA, 27 bp, Artificial sequence
  SiRNA target sequence
aataaaaaatagttattcgggtggtga

SEQ ID NO: 157265 - DNA, 27 bp, Artificial sequence
  SiRNA target sequence
ataaaaaatagttattcgggtggtgat

SEQ ID NO: 157266 - DNA, 27 bp, Artificial sequence
  SiRNA target sequence
taaaaaatagttattcgggtggtgatc

SEQ ID NO: 157267 - DNA, 27 bp, Artificial sequence
  SiRNA target sequence
aaaaaatagttattcgggtggtgatct

SEQ ID NO: 157268 - DNA, 27 bp, Artificial sequence
  SiRNA target sequence
aaaaatagttattcgggtggtgatctt

SEQ ID NO: 157269 - DNA, 27 bp, Artificial sequence
  SiRNA target sequence
aaaatagttattcgggtggtgatctta

SEQ ID NO: 157270 - DNA, 27 bp, Artificial sequence
  SiRNA target sequence
aaatagttattcgggtggtgatcttat

SEQ ID NO: 157271 - DNA, 27 bp, Artificial sequence
  SiRNA target sequence
aatagttattcgggtggtgatcttatt

SEQ ID NO: 157272 - DNA, 27 bp, Artificial sequence
  SiRNA target sequence
atagttattcgggtggtgatcttattc

SEQ ID NO: 157273 - DNA, 27 bp, Artificial sequence
  SiRNA target sequence
tagttattcgggtggtgatcttattct

SEQ ID NO: 157274 - DNA, 27 bp, Artificial sequence
  SiRNA target sequence
agttattcgggtggtgatcttattctc

SEQ ID NO: 157275 - DNA, 27 bp, Artificial sequence
  SiRNA target sequence
gttattcgggtggtgatcttattctcg

SEQ ID NO: 157276 - DNA, 27 bp, Artificial sequence
  SiRNA target sequence
ttattcgggtggtgatcttattctcga

SEQ ID NO: 157277 - DNA, 27 bp, Artificial sequence
  SiRNA target sequence
tattcgggtggtgatcttattctcgaa

SEQ ID NO: 157278 - DNA, 27 bp, Artificial sequence
  SiRNA target sequence
attcgggtggtgatcttattctcgaac

SEQ ID NO: 157279 - DNA, 27 bp, Artificial sequence
  SiRNA target sequence
ttcgggtggtgatcttattctcgaacc

SEQ ID NO: 157280 - DNA, 27 bp, Artificial sequence
  SiRNA target sequence
tcgggtggtgatcttattctcgaacct

SEQ ID NO: 157281 - DNA, 27 bp, Artificial sequence
  SiRNA target sequence
cgggtggtgatcttattctcgaaccta

SEQ ID NO: 157282 - DNA, 27 bp, Artificial sequence
  SiRNA target sequence
gggtggtgatcttattctcgaacctaa

SEQ ID NO: 157283 - DNA, 27 bp, Artificial sequence
  SiRNA target sequence
ggtggtgatcttattctcgaacctaat

SEQ ID NO: 157284 - DNA, 27 bp, Artificial sequence
  SiRNA target sequence
gtggtgatcttattctcgaacctaata

SEQ ID NO: 157285 - DNA, 27 bp, Artificial sequence
  SiRNA target sequence
tggtgatcttattctcgaacctaatat

SEQ ID NO: 157286 - DNA, 27 bp, Artificial sequence
  SiRNA target sequence
ggtgatcttattctcgaacctaatata

SEQ ID NO: 157287 - DNA, 27 bp, Artificial sequence
  SiRNA target sequence
gtgatcttattctcgaacctaatataa

SEQ ID NO: 157288 - DNA, 27 bp, Artificial sequence
  SiRNA target sequence
tgatcttattctcgaacctaatataat

SEQ ID NO: 157289 - DNA, 27 bp, Artificial sequence
  SiRNA target sequence
gatcttattctcgaacctaatataatt

SEQ ID NO: 157290 - DNA, 27 bp, Artificial sequence
  SiRNA target sequence
atcttattctcgaacctaatataatta

SEQ ID NO: 157291 - DNA, 27 bp, Artificial sequence
  SiRNA target sequence
tcttattctcgaacctaatataattat

SEQ ID NO: 157292 - DNA, 27 bp, Artificial sequence
  SiRNA target sequence
cttattctcgaacctaatataattata

SEQ ID NO: 157293 - DNA, 27 bp, Artificial sequence
  SiRNA target sequence
ttattctcgaacctaatataattatag

SEQ ID NO: 157294 - DNA, 27 bp, Artificial sequence
  SiRNA target sequence
tattctcgaacctaatataattataga

SEQ ID NO: 157295 - DNA, 27 bp, Artificial sequence
  SiRNA target sequence
attctcgaacctaatataattatagat

SEQ ID NO: 157296 - DNA, 27 bp, Artificial sequence
  SiRNA target sequence
ttctcgaacctaatataattatagata

SEQ ID NO: 157297 - DNA, 27 bp, Artificial sequence
  SiRNA target sequence
tctcgaacctaatataattatagataa

SEQ ID NO: 157298 - DNA, 27 bp, Artificial sequence
  SiRNA target sequence
ctcgaacctaatataattatagataag

SEQ ID NO: 157299 - DNA, 27 bp, Artificial sequence
  SiRNA target sequence
tcgaacctaatataattatagataaga

SEQ ID NO: 157300 - DNA, 27 bp, Artificial sequence
  SiRNA target sequence
cgaacctaatataattatagataagaa

SEQ ID NO: 157301 - DNA, 27 bp, Artificial sequence
  SiRNA target sequence
gaacctaatataattatagataagaat

SEQ ID NO: 157302 - DNA, 27 bp, Artificial sequence
  SiRNA target sequence
aacctaatataattatagataagaata

SEQ ID NO: 157303 - DNA, 27 bp, Artificial sequence
  SiRNA target sequence
acctaatataattatagataagaatat

SEQ ID NO: 157304 - DNA, 27 bp, Artificial sequence
  SiRNA target sequence
cctaatataattatagataagaatatt

SEQ ID NO: 157305 - DNA, 27 bp, Artificial sequence
  SiRNA target sequence
ctaatataattatagataagaatattg

SEQ ID NO: 157306 - DNA, 27 bp, Artificial sequence
  SiRNA target sequence
taatataattatagataagaatattga

SEQ ID NO: 157307 - DNA, 27 bp, Artificial sequence
  SiRNA target sequence
aatataattatagataagaatattgat

SEQ ID NO: 157308 - DNA, 27 bp, Artificial sequence
  SiRNA target sequence
atataattatagataagaatattgata

SEQ ID NO: 157309 - DNA, 27 bp, Artificial sequence
  SiRNA target sequence
tataattatagataagaatattgataa

SEQ ID NO: 157310 - DNA, 27 bp, Artificial sequence
  SiRNA target sequence
ataattatagataagaatattgataaa

SEQ ID NO: 157311 - DNA, 27 bp, Artificial sequence
  SiRNA target sequence
taattatagataagaatattgataaag

SEQ ID NO: 157312 - DNA, 27 bp, Artificial sequence
  SiRNA target sequence
aattatagataagaatattgataaaga

SEQ ID NO: 157313 - DNA, 27 bp, Artificial sequence
  SiRNA target sequence
attatagataagaatattgataaagat

SEQ ID NO: 157314 - DNA, 27 bp, Artificial sequence
  SiRNA target sequence
ttatagataagaatattgataaagatt

SEQ ID NO: 157315 - DNA, 27 bp, Artificial sequence
  SiRNA target sequence
tatagataagaatattgataaagattt

SEQ ID NO: 157316 - DNA, 27 bp, Artificial sequence
  SiRNA target sequence
atagataagaatattgataaagattta

SEQ ID NO: 157317 - DNA, 27 bp, Artificial sequence
  SiRNA target sequence
tagataagaatattgataaagatttat

SEQ ID NO: 157318 - DNA, 27 bp, Artificial sequence
  SiRNA target sequence
agataagaatattgataaagatttatt

SEQ ID NO: 157319 - DNA, 27 bp, Artificial sequence
  SiRNA target sequence
gataagaatattgataaagatttatta

SEQ ID NO: 157320 - DNA, 27 bp, Artificial sequence
  SiRNA target sequence
ataagaatattgataaagatttattag

SEQ ID NO: 157321 - DNA, 27 bp, Artificial sequence
  SiRNA target sequence
taagaatattgataaagatttattagc

SEQ ID NO: 157322 - DNA, 27 bp, Artificial sequence
  SiRNA target sequence
aagaatattgataaagatttattagca

SEQ ID NO: 157323 - DNA, 27 bp, Artificial sequence
  SiRNA target sequence
agaatattgataaagatttattagcac

SEQ ID NO: 157324 - DNA, 27 bp, Artificial sequence
  SiRNA target sequence
gaatattgataaagatttattagcacg

SEQ ID NO: 157325 - DNA, 27 bp, Artificial sequence
  SiRNA target sequence
aatattgataaagatttattagcacgc

SEQ ID NO: 157326 - DNA, 27 bp, Artificial sequence
  SiRNA target sequence
atattgataaagatttattagcacgcg

SEQ ID NO: 157327 - DNA, 27 bp, Artificial sequence
  SiRNA target sequence
tattgataaagatttattagcacgcgc

SEQ ID NO: 157328 - DNA, 27 bp, Artificial sequence
  SiRNA target sequence
attgataaagatttattagcacgcgcc

SEQ ID NO: 157329 - DNA, 27 bp, Artificial sequence
  SiRNA target sequence
ttgataaagatttattagcacgcgcct

SEQ ID NO: 157330 - DNA, 27 bp, Artificial sequence
  SiRNA target sequence
tgataaagatttattagcacgcgcctt

SEQ ID NO: 157331 - DNA, 27 bp, Artificial sequence
  SiRNA target sequence
gataaagatttattagcacgcgccttg

SEQ ID NO: 157332 - DNA, 27 bp, Artificial sequence
  SiRNA target sequence
ataaagatttattagcacgcgccttga

SEQ ID NO: 157333 - DNA, 27 bp, Artificial sequence
  SiRNA target sequence
taaagatttattagcacgcgccttgaa

SEQ ID NO: 157334 - DNA, 27 bp, Artificial sequence
  SiRNA target sequence
aaagatttattagcacgcgccttgaat

SEQ ID NO: 157335 - DNA, 27 bp, Artificial sequence
  SiRNA target sequence
aagatttattagcacgcgccttgaatt

SEQ ID NO: 157336 - DNA, 27 bp, Artificial sequence
  SiRNA target sequence
agatttattagcacgcgccttgaatta

SEQ ID NO: 157337 - DNA, 27 bp, Artificial sequence
  SiRNA target sequence
gatttattagcacgcgccttgaattat

SEQ ID NO: 157338 - DNA, 27 bp, Artificial sequence
  SiRNA target sequence
atttattagcacgcgccttgaattatg

SEQ ID NO: 157339 - DNA, 27 bp, Artificial sequence
  SiRNA target sequence
tttattagcacgcgccttgaattatgt

SEQ ID NO: 157340 - DNA, 27 bp, Artificial sequence
  SiRNA target sequence
ttattagcacgcgccttgaattatgtt

SEQ ID NO: 157341 - DNA, 27 bp, Artificial sequence
  SiRNA target sequence
tattagcacgcgccttgaattatgttc

SEQ ID NO: 157342 - DNA, 27 bp, Artificial sequence
  SiRNA target sequence
attagcacgcgccttgaattatgttcc

SEQ ID NO: 157343 - DNA, 27 bp, Artificial sequence
  SiRNA target sequence
ttagcacgcgccttgaattatgttcct

SEQ ID NO: 157344 - DNA, 27 bp, Artificial sequence
  SiRNA target sequence
tagcacgcgccttgaattatgttcctg

SEQ ID NO: 157345 - DNA, 27 bp, Artificial sequence
  SiRNA target sequence
agcacgcgccttgaattatgttcctgt

SEQ ID NO: 157346 - DNA, 27 bp, Artificial sequence
  SiRNA target sequence
gcacgcgccttgaattatgttcctgta

SEQ ID NO: 157347 - DNA, 27 bp, Artificial sequence
  SiRNA target sequence
cacgcgccttgaattatgttcctgtaa

SEQ ID NO: 157348 - DNA, 27 bp, Artificial sequence
  SiRNA target sequence
acgcgccttgaattatgttcctgtaag

SEQ ID NO: 157349 - DNA, 27 bp, Artificial sequence
  SiRNA target sequence
cgcgccttgaattatgttcctgtaaga

SEQ ID NO: 157350 - DNA, 27 bp, Artificial sequence
  SiRNA target sequence
gcgccttgaattatgttcctgtaagaa

SEQ ID NO: 157351 - DNA, 27 bp, Artificial sequence
  SiRNA target sequence
cgccttgaattatgttcctgtaagaaa

SEQ ID NO: 157352 - DNA, 27 bp, Artificial sequence
  SiRNA target sequence
gccttgaattatgttcctgtaagaaaa

SEQ ID NO: 157353 - DNA, 27 bp, Artificial sequence
  SiRNA target sequence
ccttgaattatgttcctgtaagaaaag

SEQ ID NO: 157354 - DNA, 27 bp, Artificial sequence
  SiRNA target sequence
cttgaattatgttcctgtaagaaaaga

SEQ ID NO: 157355 - DNA, 27 bp, Artificial sequence
  SiRNA target sequence
ttgaattatgttcctgtaagaaaagat

SEQ ID NO: 157356 - DNA, 27 bp, Artificial sequence
  SiRNA target sequence
tgaattatgttcctgtaagaaaagatt

SEQ ID NO: 157357 - DNA, 27 bp, Artificial sequence
  SiRNA target sequence
gaattatgttcctgtaagaaaagattt

SEQ ID NO: 157358 - DNA, 27 bp, Artificial sequence
  SiRNA target sequence
aattatgttcctgtaagaaaagatttt

SEQ ID NO: 157359 - DNA, 27 bp, Artificial sequence
  SiRNA target sequence
attatgttcctgtaagaaaagatttta

SEQ ID NO: 157360 - DNA, 27 bp, Artificial sequence
  SiRNA target sequence
ttatgttcctgtaagaaaagattttac

SEQ ID NO: 157361 - DNA, 27 bp, Artificial sequence
  SiRNA target sequence
tatgttcctgtaagaaaagattttaca

SEQ ID NO: 157362 - DNA, 27 bp, Artificial sequence
  SiRNA target sequence
atgttcctgtaagaaaagattttacag

SEQ ID NO: 157363 - DNA, 27 bp, Artificial sequence
  SiRNA target sequence
tgttcctgtaagaaaagattttacagg

SEQ ID NO: 157364 - DNA, 27 bp, Artificial sequence
  SiRNA target sequence
gttcctgtaagaaaagattttacagga

SEQ ID NO: 157365 - DNA, 27 bp, Artificial sequence
  SiRNA target sequence
ttcctgtaagaaaagattttacaggaa

SEQ ID NO: 157366 - DNA, 27 bp, Artificial sequence
  SiRNA target sequence
tcctgtaagaaaagattttacaggaac

SEQ ID NO: 157367 - DNA, 27 bp, Artificial sequence
  SiRNA target sequence
cctgtaagaaaagattttacaggaact

SEQ ID NO: 157368 - DNA, 27 bp, Artificial sequence
  SiRNA target sequence
ctgtaagaaaagattttacaggaactg

SEQ ID NO: 157369 - DNA, 27 bp, Artificial sequence
  SiRNA target sequence
tgtaagaaaagattttacaggaactgc

SEQ ID NO: 157370 - DNA, 27 bp, Artificial sequence
  SiRNA target sequence
gtaagaaaagattttacaggaactgct

SEQ ID NO: 157371 - DNA, 27 bp, Artificial sequence
  SiRNA target sequence
taagaaaagattttacaggaactgctg

SEQ ID NO: 157372 - DNA, 27 bp, Artificial sequence
  SiRNA target sequence
aagaaaagattttacaggaactgctgt

SEQ ID NO: 157373 - DNA, 27 bp, Artificial sequence
  SiRNA target sequence
agaaaagattttacaggaactgctgtt

SEQ ID NO: 157374 - DNA, 27 bp, Artificial sequence
  SiRNA target sequence
gaaaagattttacaggaactgctgttc

SEQ ID NO: 157375 - DNA, 27 bp, Artificial sequence
  SiRNA target sequence
aaaagattttacaggaactgctgttcc

SEQ ID NO: 157376 - DNA, 27 bp, Artificial sequence
  SiRNA target sequence
aaagattttacaggaactgctgttcca

SEQ ID NO: 157377 - DNA, 27 bp, Artificial sequence
  SiRNA target sequence
aagattttacaggaactgctgttccaa

SEQ ID NO: 157378 - DNA, 27 bp, Artificial sequence
  SiRNA target sequence
agattttacaggaactgctgttccaaa

SEQ ID NO: 157379 - DNA, 27 bp, Artificial sequence
  SiRNA target sequence
gattttacaggaactgctgttccaaaa

SEQ ID NO: 157380 - DNA, 27 bp, Artificial sequence
  SiRNA target sequence
attttacaggaactgctgttccaaaat

SEQ ID NO: 157381 - DNA, 27 bp, Artificial sequence
  SiRNA target sequence
ttttacaggaactgctgttccaaaata

SEQ ID NO: 157382 - DNA, 27 bp, Artificial sequence
  SiRNA target sequence
tttacaggaactgctgttccaaaatat

SEQ ID NO: 157383 - DNA, 27 bp, Artificial sequence
  SiRNA target sequence
ttacaggaactgctgttccaaaatatg

SEQ ID NO: 157384 - DNA, 27 bp, Artificial sequence
  SiRNA target sequence
tacaggaactgctgttccaaaatatgc

SEQ ID NO: 157385 - DNA, 27 bp, Artificial sequence
  SiRNA target sequence
acaggaactgctgttccaaaatatgca

SEQ ID NO: 157386 - DNA, 27 bp, Artificial sequence
  SiRNA target sequence
caggaactgctgttccaaaatatgcag

SEQ ID NO: 157387 - DNA, 27 bp, Artificial sequence
  SiRNA target sequence
aggaactgctgttccaaaatatgcaga

SEQ ID NO: 157388 - DNA, 27 bp, Artificial sequence
  SiRNA target sequence
ggaactgctgttccaaaatatgcagaa

SEQ ID NO: 157389 - DNA, 27 bp, Artificial sequence
  SiRNA target sequence
gaactgctgttccaaaatatgcagaat

SEQ ID NO: 157390 - DNA, 27 bp, Artificial sequence
  SiRNA target sequence
aactgctgttccaaaatatgcagaatt

SEQ ID NO: 157391 - DNA, 27 bp, Artificial sequence
  SiRNA target sequence
actgctgttccaaaatatgcagaattt

SEQ ID NO: 157392 - DNA, 27 bp, Artificial sequence
  SiRNA target sequence
ctgctgttccaaaatatgcagaatttg

SEQ ID NO: 157393 - DNA, 27 bp, Artificial sequence
  SiRNA target sequence
tgctgttccaaaatatgcagaatttgg

SEQ ID NO: 157394 - DNA, 27 bp, Artificial sequence
  SiRNA target sequence
gctgttccaaaatatgcagaatttggt

SEQ ID NO: 157395 - DNA, 27 bp, Artificial sequence
  SiRNA target sequence
ctgttccaaaatatgcagaatttggtg

SEQ ID NO: 157396 - DNA, 27 bp, Artificial sequence
  SiRNA target sequence
tgttccaaaatatgcagaatttggtgt

SEQ ID NO: 157397 - DNA, 27 bp, Artificial sequence
  SiRNA target sequence
gttccaaaatatgcagaatttggtgtt

SEQ ID NO: 157398 - DNA, 27 bp, Artificial sequence
  SiRNA target sequence
ttccaaaatatgcagaatttggtgtta

SEQ ID NO: 157399 - DNA, 27 bp, Artificial sequence
  SiRNA target sequence
tccaaaatatgcagaatttggtgttat

SEQ ID NO: 157400 - DNA, 27 bp, Artificial sequence
  SiRNA target sequence
ccaaaatatgcagaatttggtgttatg

SEQ ID NO: 157401 - DNA, 27 bp, Artificial sequence
  SiRNA target sequence
caaaatatgcagaatttggtgttatgc

SEQ ID NO: 157402 - DNA, 27 bp, Artificial sequence
  SiRNA target sequence
aaaatatgcagaatttggtgttatgcc

SEQ ID NO: 157403 - DNA, 27 bp, Artificial sequence
  SiRNA target sequence
aaatatgcagaatttggtgttatgcct

SEQ ID NO: 157404 - DNA, 27 bp, Artificial sequence
  SiRNA target sequence
aatatgcagaatttggtgttatgccta

SEQ ID NO: 157405 - DNA, 27 bp, Artificial sequence
  SiRNA target sequence
atatgcagaatttggtgttatgcctaa

SEQ ID NO: 157406 - DNA, 27 bp, Artificial sequence
  SiRNA target sequence
tatgcagaatttggtgttatgcctaaa

SEQ ID NO: 157407 - DNA, 27 bp, Artificial sequence
  SiRNA target sequence
atgcagaatttggtgttatgcctaaag

SEQ ID NO: 157408 - DNA, 27 bp, Artificial sequence
  SiRNA target sequence
tgcagaatttggtgttatgcctaaaga

SEQ ID NO: 157409 - DNA, 27 bp, Artificial sequence
  SiRNA target sequence
gcagaatttggtgttatgcctaaagaa

SEQ ID NO: 157410 - DNA, 27 bp, Artificial sequence
  SiRNA target sequence
cagaatttggtgttatgcctaaagaac

SEQ ID NO: 157411 - DNA, 27 bp, Artificial sequence
  SiRNA target sequence
agaatttggtgttatgcctaaagaaca

SEQ ID NO: 157412 - DNA, 27 bp, Artificial sequence
  SiRNA target sequence
gaatttggtgttatgcctaaagaacag

SEQ ID NO: 157413 - DNA, 27 bp, Artificial sequence
  SiRNA target sequence
aatttggtgttatgcctaaagaacagg

SEQ ID NO: 157414 - DNA, 27 bp, Artificial sequence
  SiRNA target sequence
atttggtgttatgcctaaagaacagga

SEQ ID NO: 157415 - DNA, 27 bp, Artificial sequence
  SiRNA target sequence
tttggtgttatgcctaaagaacaggaa

SEQ ID NO: 157416 - DNA, 27 bp, Artificial sequence
  SiRNA target sequence
ttggtgttatgcctaaagaacaggaag

SEQ ID NO: 157417 - DNA, 27 bp, Artificial sequence
  SiRNA target sequence
tggtgttatgcctaaagaacaggaaga

SEQ ID NO: 157418 - DNA, 27 bp, Artificial sequence
  SiRNA target sequence
ggtgttatgcctaaagaacaggaagaa

SEQ ID NO: 157419 - DNA, 27 bp, Artificial sequence
  SiRNA target sequence
gtgttatgcctaaagaacaggaagaac

SEQ ID NO: 157420 - DNA, 27 bp, Artificial sequence
  SiRNA target sequence
tgttatgcctaaagaacaggaagaaca

SEQ ID NO: 157421 - DNA, 27 bp, Artificial sequence
  SiRNA target sequence
gttatgcctaaagaacaggaagaacaa

SEQ ID NO: 157422 - DNA, 27 bp, Artificial sequence
  SiRNA target sequence
ttatgcctaaagaacaggaagaacaaa

SEQ ID NO: 157423 - DNA, 27 bp, Artificial sequence
  SiRNA target sequence
tatgcctaaagaacaggaagaacaaaa

SEQ ID NO: 157424 - DNA, 27 bp, Artificial sequence
  SiRNA target sequence
atgcctaaagaacaggaagaacaaaac

SEQ ID NO: 157425 - DNA, 27 bp, Artificial sequence
  SiRNA target sequence
tgcctaaagaacaggaagaacaaaacg

SEQ ID NO: 157426 - DNA, 27 bp, Artificial sequence
  SiRNA target sequence
gcctaaagaacaggaagaacaaaacga

SEQ ID NO: 157427 - DNA, 27 bp, Artificial sequence
  SiRNA target sequence
cctaaagaacaggaagaacaaaacgaa

SEQ ID NO: 157428 - DNA, 27 bp, Artificial sequence
  SiRNA target sequence
ctaaagaacaggaagaacaaaacgaaa

SEQ ID NO: 157429 - DNA, 27 bp, Artificial sequence
  SiRNA target sequence
taaagaacaggaagaacaaaacgaaag

SEQ ID NO: 157430 - DNA, 27 bp, Artificial sequence
  SiRNA target sequence
aaagaacaggaagaacaaaacgaaaga

SEQ ID NO: 157431 - DNA, 27 bp, Artificial sequence
  SiRNA target sequence
aagaacaggaagaacaaaacgaaagag

SEQ ID NO: 157432 - DNA, 27 bp, Artificial sequence
  SiRNA target sequence
agaacaggaagaacaaaacgaaagaga

SEQ ID NO: 157433 - DNA, 27 bp, Artificial sequence
  SiRNA target sequence
gaacaggaagaacaaaacgaaagagaa

SEQ ID NO: 157434 - DNA, 27 bp, Artificial sequence
  SiRNA target sequence
aacaggaagaacaaaacgaaagagaaa

SEQ ID NO: 157435 - DNA, 27 bp, Artificial sequence
  SiRNA target sequence
acaggaagaacaaaacgaaagagaaag

SEQ ID NO: 157436 - DNA, 27 bp, Artificial sequence
  SiRNA target sequence
caggaagaacaaaacgaaagagaaaga

SEQ ID NO: 157437 - DNA, 27 bp, Artificial sequence
  SiRNA target sequence
aggaagaacaaaacgaaagagaaagat

SEQ ID NO: 157438 - DNA, 27 bp, Artificial sequence
  SiRNA target sequence
ggaagaacaaaacgaaagagaaagatt

SEQ ID NO: 157439 - DNA, 27 bp, Artificial sequence
  SiRNA target sequence
gaagaacaaaacgaaagagaaagattc

SEQ ID NO: 157440 - DNA, 27 bp, Artificial sequence
  SiRNA target sequence
aagaacaaaacgaaagagaaagattcg

SEQ ID NO: 157441 - DNA, 27 bp, Artificial sequence
  SiRNA target sequence
agaacaaaacgaaagagaaagattcga

SEQ ID NO: 157442 - DNA, 27 bp, Artificial sequence
  SiRNA target sequence
gaacaaaacgaaagagaaagattcgaa

SEQ ID NO: 157443 - DNA, 27 bp, Artificial sequence
  SiRNA target sequence
aacaaaacgaaagagaaagattcgaag

SEQ ID NO: 157444 - DNA, 27 bp, Artificial sequence
  SiRNA target sequence
acaaaacgaaagagaaagattcgaagg

SEQ ID NO: 157445 - DNA, 27 bp, Artificial sequence
  SiRNA target sequence
caaaacgaaagagaaagattcgaaggt

SEQ ID NO: 157446 - DNA, 27 bp, Artificial sequence
  SiRNA target sequence
aaaacgaaagagaaagattcgaaggtg

SEQ ID NO: 157447 - DNA, 27 bp, Artificial sequence
  SiRNA target sequence
aaacgaaagagaaagattcgaaggtgc

SEQ ID NO: 157448 - DNA, 27 bp, Artificial sequence
  SiRNA target sequence
aacgaaagagaaagattcgaaggtgca

SEQ ID NO: 157449 - DNA, 27 bp, Artificial sequence
  SiRNA target sequence
acgaaagagaaagattcgaaggtgcag

SEQ ID NO: 157450 - DNA, 27 bp, Artificial sequence
  SiRNA target sequence
cgaaagagaaagattcgaaggtgcaga

SEQ ID NO: 157451 - DNA, 27 bp, Artificial sequence
  SiRNA target sequence
gaaagagaaagattcgaaggtgcagaa

SEQ ID NO: 157452 - DNA, 27 bp, Artificial sequence
  SiRNA target sequence
aaagagaaagattcgaaggtgcagaag

SEQ ID NO: 157453 - DNA, 27 bp, Artificial sequence
  SiRNA target sequence
aagagaaagattcgaaggtgcagaaga

SEQ ID NO: 157454 - DNA, 27 bp, Artificial sequence
  SiRNA target sequence
agagaaagattcgaaggtgcagaagag

SEQ ID NO: 157455 - DNA, 27 bp, Artificial sequence
  SiRNA target sequence
gagaaagattcgaaggtgcagaagagt

SEQ ID NO: 157456 - DNA, 27 bp, Artificial sequence
  SiRNA target sequence
agaaagattcgaaggtgcagaagagtt

SEQ ID NO: 157457 - DNA, 27 bp, Artificial sequence
  SiRNA target sequence
gaaagattcgaaggtgcagaagagttt

SEQ ID NO: 157458 - DNA, 27 bp, Artificial sequence
  SiRNA target sequence
aaagattcgaaggtgcagaagagtttt

SEQ ID NO: 157459 - DNA, 27 bp, Artificial sequence
  SiRNA target sequence
aagattcgaaggtgcagaagagttttt

SEQ ID NO: 157460 - DNA, 27 bp, Artificial sequence
  SiRNA target sequence
agattcgaaggtgcagaagagtttttt

SEQ ID NO: 157461 - DNA, 27 bp, Artificial sequence
  SiRNA target sequence
gattcgaaggtgcagaagagttttttg

SEQ ID NO: 157462 - DNA, 27 bp, Artificial sequence
  SiRNA target sequence
attcgaaggtgcagaagagttttttgg

SEQ ID NO: 157463 - DNA, 27 bp, Artificial sequence
  SiRNA target sequence
ttcgaaggtgcagaagagttttttgga

SEQ ID NO: 157464 - DNA, 27 bp, Artificial sequence
  SiRNA target sequence
tcgaaggtgcagaagagttttttggag

SEQ ID NO: 157465 - DNA, 27 bp, Artificial sequence
  SiRNA target sequence
cgaaggtgcagaagagttttttggagg

SEQ ID NO: 157466 - DNA, 27 bp, Artificial sequence
  SiRNA target sequence
gaaggtgcagaagagttttttggagga

SEQ ID NO: 157467 - DNA, 27 bp, Artificial sequence
  SiRNA target sequence
aaggtgcagaagagttttttggaggaa

SEQ ID NO: 157468 - DNA, 27 bp, Artificial sequence
  SiRNA target sequence
aggtgcagaagagttttttggaggaaa

SEQ ID NO: 157469 - DNA, 27 bp, Artificial sequence
  SiRNA target sequence
ggtgcagaagagttttttggaggaaat

SEQ ID NO: 157470 - DNA, 27 bp, Artificial sequence
  SiRNA target sequence
gtgcagaagagttttttggaggaaatg

SEQ ID NO: 157471 - DNA, 27 bp, Artificial sequence
  SiRNA target sequence
tgcagaagagttttttggaggaaatgg

SEQ ID NO: 157472 - DNA, 27 bp, Artificial sequence
  SiRNA target sequence
gcagaagagttttttggaggaaatggt

SEQ ID NO: 157473 - DNA, 27 bp, Artificial sequence
  SiRNA target sequence
cagaagagttttttggaggaaatggta

SEQ ID NO: 157474 - DNA, 27 bp, Artificial sequence
  SiRNA target sequence
agaagagttttttggaggaaatggtag

SEQ ID NO: 157475 - DNA, 27 bp, Artificial sequence
  SiRNA target sequence
gaagagttttttggaggaaatggtaga

SEQ ID NO: 157476 - DNA, 27 bp, Artificial sequence
  SiRNA target sequence
aagagttttttggaggaaatggtagag

SEQ ID NO: 157477 - DNA, 27 bp, Artificial sequence
  SiRNA target sequence
agagttttttggaggaaatggtagaga

SEQ ID NO: 157478 - DNA, 27 bp, Artificial sequence
  SiRNA target sequence
gagttttttggaggaaatggtagagat

SEQ ID NO: 157479 - DNA, 27 bp, Artificial sequence
  SiRNA target sequence
agttttttggaggaaatggtagagatt

SEQ ID NO: 157480 - DNA, 27 bp, Artificial sequence
  SiRNA target sequence
gttttttggaggaaatggtagagattt

SEQ ID NO: 157481 - DNA, 27 bp, Artificial sequence
  SiRNA target sequence
ttttttggaggaaatggtagagatttt

SEQ ID NO: 157482 - DNA, 27 bp, Artificial sequence
  SiRNA target sequence
tttttggaggaaatggtagagattttt

SEQ ID NO: 157483 - DNA, 27 bp, Artificial sequence
  SiRNA target sequence
ttttggaggaaatggtagagatttttt

SEQ ID NO: 157484 - DNA, 27 bp, Artificial sequence
  SiRNA target sequence
tttggaggaaatggtagagattttttt

SEQ ID NO: 157485 - DNA, 27 bp, Artificial sequence
  SiRNA target sequence
ttggaggaaatggtagagattttttta

SEQ ID NO: 157486 - DNA, 27 bp, Artificial sequence
  SiRNA target sequence
tggaggaaatggtagagatttttttag

SEQ ID NO: 157487 - DNA, 27 bp, Artificial sequence
  SiRNA target sequence
ggaggaaatggtagagatttttttagc

SEQ ID NO: 157488 - DNA, 27 bp, Artificial sequence
  SiRNA target sequence
gaggaaatggtagagatttttttagca

SEQ ID NO: 157489 - DNA, 27 bp, Artificial sequence
  SiRNA target sequence
aggaaatggtagagatttttttagcaa

SEQ ID NO: 157490 - DNA, 27 bp, Artificial sequence
  SiRNA target sequence
ggaaatggtagagatttttttagcaag

SEQ ID NO: 157491 - DNA, 27 bp, Artificial sequence
  SiRNA target sequence
gaaatggtagagatttttttagcaagt

SEQ ID NO: 157492 - DNA, 27 bp, Artificial sequence
  SiRNA target sequence
aaatggtagagatttttttagcaagtt

SEQ ID NO: 157493 - DNA, 27 bp, Artificial sequence
  SiRNA target sequence
aatggtagagatttttttagcaagttt

SEQ ID NO: 157494 - DNA, 27 bp, Artificial sequence
  SiRNA target sequence
atggtagagatttttttagcaagtttg

SEQ ID NO: 157495 - DNA, 27 bp, Artificial sequence
  SiRNA target sequence
tggtagagatttttttagcaagtttgg

SEQ ID NO: 157496 - DNA, 27 bp, Artificial sequence
  SiRNA target sequence
ggtagagatttttttagcaagtttgga

SEQ ID NO: 157497 - DNA, 27 bp, Artificial sequence
  SiRNA target sequence
gtagagatttttttagcaagtttggat

SEQ ID NO: 157498 - DNA, 27 bp, Artificial sequence
  SiRNA target sequence
tagagatttttttagcaagtttggatt

SEQ ID NO: 157499 - DNA, 27 bp, Artificial sequence
  SiRNA target sequence
agagatttttttagcaagtttggattt

SEQ ID NO: 157500 - DNA, 27 bp, Artificial sequence
  SiRNA target sequence
gagatttttttagcaagtttggatttt

SEQ ID NO: 157501 - DNA, 27 bp, Artificial sequence
  SiRNA target sequence
agatttttttagcaagtttggattttt

SEQ ID NO: 157502 - DNA, 27 bp, Artificial sequence
  SiRNA target sequence
gatttttttagcaagtttggatttttc

SEQ ID NO: 157503 - DNA, 27 bp, Artificial sequence
  SiRNA target sequence
atttttttagcaagtttggatttttct

SEQ ID NO: 157504 - DNA, 27 bp, Artificial sequence
  SiRNA target sequence
tttttttagcaagtttggatttttcta

SEQ ID NO: 157505 - DNA, 27 bp, Artificial sequence
  SiRNA target sequence
ttttttagcaagtttggatttttctaa

SEQ ID NO: 157506 - DNA, 19 bp, Artificial sequence
  SiRNA target sequence
atgttatttttttatagcc

SEQ ID NO: 157507 - DNA, 19 bp, Artificial sequence
  SiRNA target sequence
tgttatttttttatagccc

SEQ ID NO: 157508 - DNA, 19 bp, Artificial sequence
  SiRNA target sequence
gttatttttttatagcccc

SEQ ID NO: 157509 - DNA, 19 bp, Artificial sequence
  SiRNA target sequence
ttatttttttatagcccca

SEQ ID NO: 157510 - DNA, 19 bp, Artificial sequence
  SiRNA target sequence
tatttttttatagccccat

SEQ ID NO: 157511 - DNA, 19 bp, Artificial sequence
  SiRNA target sequence
atttttttatagccccatt

SEQ ID NO: 157512 - DNA, 19 bp, Artificial sequence
  SiRNA target sequence
tttttttatagccccattt

SEQ ID NO: 157513 - DNA, 19 bp, Artificial sequence
  SiRNA target sequence
ttttttatagccccatttt

SEQ ID NO: 157514 - DNA, 19 bp, Artificial sequence
  SiRNA target sequence
tttttatagccccattttt

SEQ ID NO: 157515 - DNA, 19 bp, Artificial sequence
  SiRNA target sequence
ttttatagccccattttta

SEQ ID NO: 157516 - DNA, 19 bp, Artificial sequence
  SiRNA target sequence
tttatagccccatttttat

SEQ ID NO: 157517 - DNA, 19 bp, Artificial sequence
  SiRNA target sequence
ttatagccccatttttatg

SEQ ID NO: 157518 - DNA, 19 bp, Artificial sequence
  SiRNA target sequence
tatagccccatttttatga

SEQ ID NO: 157519 - DNA, 19 bp, Artificial sequence
  SiRNA target sequence
atagccccatttttatgac

SEQ ID NO: 157520 - DNA, 19 bp, Artificial sequence
  SiRNA target sequence
tagccccatttttatgact

SEQ ID NO: 157521 - DNA, 19 bp, Artificial sequence
  SiRNA target sequence
agccccatttttatgacta

SEQ ID NO: 157522 - DNA, 19 bp, Artificial sequence
  SiRNA target sequence
gccccatttttatgactaa

SEQ ID NO: 157523 - DNA, 19 bp, Artificial sequence
  SiRNA target sequence
ccccatttttatgactaaa

SEQ ID NO: 157524 - DNA, 19 bp, Artificial sequence
  SiRNA target sequence
cccatttttatgactaaaa

SEQ ID NO: 157525 - DNA, 19 bp, Artificial sequence
  SiRNA target sequence
ccatttttatgactaaaag

SEQ ID NO: 157526 - DNA, 19 bp, Artificial sequence
  SiRNA target sequence
catttttatgactaaaagt

SEQ ID NO: 157527 - DNA, 19 bp, Artificial sequence
  SiRNA target sequence
atttttatgactaaaagtt

SEQ ID NO: 157528 - DNA, 19 bp, Artificial sequence
  SiRNA target sequence
tttttatgactaaaagttt

SEQ ID NO: 157529 - DNA, 19 bp, Artificial sequence
  SiRNA target sequence
ttttatgactaaaagttta

SEQ ID NO: 157530 - DNA, 19 bp, Artificial sequence
  SiRNA target sequence
tttatgactaaaagtttaa

SEQ ID NO: 157531 - DNA, 19 bp, Artificial sequence
  SiRNA target sequence
ttatgactaaaagtttaac

SEQ ID NO: 157532 - DNA, 19 bp, Artificial sequence
  SiRNA target sequence
tatgactaaaagtttaacg

SEQ ID NO: 157533 - DNA, 19 bp, Artificial sequence
  SiRNA target sequence
atgactaaaagtttaacga

SEQ ID NO: 157534 - DNA, 19 bp, Artificial sequence
  SiRNA target sequence
tgactaaaagtttaacgaa

SEQ ID NO: 157535 - DNA, 19 bp, Artificial sequence
  SiRNA target sequence
gactaaaagtttaacgaat

SEQ ID NO: 157536 - DNA, 19 bp, Artificial sequence
  SiRNA target sequence
actaaaagtttaacgaatt

SEQ ID NO: 157537 - DNA, 19 bp, Artificial sequence
  SiRNA target sequence
ctaaaagtttaacgaattc

SEQ ID NO: 157538 - DNA, 19 bp, Artificial sequence
  SiRNA target sequence
taaaagtttaacgaattct

SEQ ID NO: 157539 - DNA, 19 bp, Artificial sequence
  SiRNA target sequence
aaaagtttaacgaattcta

SEQ ID NO: 157540 - DNA, 19 bp, Artificial sequence
  SiRNA target sequence
aaagtttaacgaattctaa

SEQ ID NO: 157541 - DNA, 19 bp, Artificial sequence
  SiRNA target sequence
aagtttaacgaattctaaa

SEQ ID NO: 157542 - DNA, 19 bp, Artificial sequence
  SiRNA target sequence
agtttaacgaattctaaaa

SEQ ID NO: 157543 - DNA, 19 bp, Artificial sequence
  SiRNA target sequence
gtttaacgaattctaaaac

SEQ ID NO: 157544 - DNA, 19 bp, Artificial sequence
  SiRNA target sequence
tttaacgaattctaaaact

SEQ ID NO: 157545 - DNA, 19 bp, Artificial sequence
  SiRNA target sequence
ttaacgaattctaaaactt

SEQ ID NO: 157546 - DNA, 19 bp, Artificial sequence
  SiRNA target sequence
taacgaattctaaaacttt

SEQ ID NO: 157547 - DNA, 19 bp, Artificial sequence
  SiRNA target sequence
aacgaattctaaaacttta

SEQ ID NO: 157548 - DNA, 19 bp, Artificial sequence
  SiRNA target sequence
acgaattctaaaactttaa

SEQ ID NO: 157549 - DNA, 19 bp, Artificial sequence
  SiRNA target sequence
cgaattctaaaactttaaa

SEQ ID NO: 157550 - DNA, 19 bp, Artificial sequence
  SiRNA target sequence
gaattctaaaactttaaat

SEQ ID NO: 157551 - DNA, 19 bp, Artificial sequence
  SiRNA target sequence
aattctaaaactttaaatt

SEQ ID NO: 157552 - DNA, 19 bp, Artificial sequence
  SiRNA target sequence
attctaaaactttaaattt

SEQ ID NO: 157553 - DNA, 19 bp, Artificial sequence
  SiRNA target sequence
ttctaaaactttaaattta

SEQ ID NO: 157554 - DNA, 19 bp, Artificial sequence
  SiRNA target sequence
tctaaaactttaaatttaa

SEQ ID NO: 157555 - DNA, 19 bp, Artificial sequence
  SiRNA target sequence
ctaaaactttaaatttaat

SEQ ID NO: 157556 - DNA, 19 bp, Artificial sequence
  SiRNA target sequence
taaaactttaaatttaatg

SEQ ID NO: 157557 - DNA, 19 bp, Artificial sequence
  SiRNA target sequence
aaaactttaaatttaatgt

SEQ ID NO: 157558 - DNA, 19 bp, Artificial sequence
  SiRNA target sequence
aaactttaaatttaatgtc

SEQ ID NO: 157559 - DNA, 19 bp, Artificial sequence
  SiRNA target sequence
aactttaaatttaatgtca

SEQ ID NO: 157560 - DNA, 19 bp, Artificial sequence
  SiRNA target sequence
actttaaatttaatgtcaa

SEQ ID NO: 157561 - DNA, 19 bp, Artificial sequence
  SiRNA target sequence
ctttaaatttaatgtcaag

SEQ ID NO: 157562 - DNA, 19 bp, Artificial sequence
  SiRNA target sequence
tttaaatttaatgtcaagt

SEQ ID NO: 157563 - DNA, 19 bp, Artificial sequence
  SiRNA target sequence
ttaaatttaatgtcaagtg

SEQ ID NO: 157564 - DNA, 19 bp, Artificial sequence
  SiRNA target sequence
taaatttaatgtcaagtgt

SEQ ID NO: 157565 - DNA, 19 bp, Artificial sequence
  SiRNA target sequence
aaatttaatgtcaagtgta

SEQ ID NO: 157566 - DNA, 19 bp, Artificial sequence
  SiRNA target sequence
aatttaatgtcaagtgtac

SEQ ID NO: 157567 - DNA, 19 bp, Artificial sequence
  SiRNA target sequence
atttaatgtcaagtgtaca

SEQ ID NO: 157568 - DNA, 19 bp, Artificial sequence
  SiRNA target sequence
tttaatgtcaagtgtacaa

SEQ ID NO: 157569 - DNA, 19 bp, Artificial sequence
  SiRNA target sequence
ttaatgtcaagtgtacaat

SEQ ID NO: 157570 - DNA, 19 bp, Artificial sequence
  SiRNA target sequence
taatgtcaagtgtacaatc

SEQ ID NO: 157571 - DNA, 19 bp, Artificial sequence
  SiRNA target sequence
aatgtcaagtgtacaatca

SEQ ID NO: 157572 - DNA, 19 bp, Artificial sequence
  SiRNA target sequence
atgtcaagtgtacaatcac

SEQ ID NO: 157573 - DNA, 19 bp, Artificial sequence
  SiRNA target sequence
tgtcaagtgtacaatcacc

SEQ ID NO: 157574 - DNA, 19 bp, Artificial sequence
  SiRNA target sequence
gtcaagtgtacaatcacca

SEQ ID NO: 157575 - DNA, 19 bp, Artificial sequence
  SiRNA target sequence
tcaagtgtacaatcaccag

SEQ ID NO: 157576 - DNA, 19 bp, Artificial sequence
  SiRNA target sequence
caagtgtacaatcaccagt

SEQ ID NO: 157577 - DNA, 19 bp, Artificial sequence
  SiRNA target sequence
aagtgtacaatcaccagtt

SEQ ID NO: 157578 - DNA, 19 bp, Artificial sequence
  SiRNA target sequence
agtgtacaatcaccagtta

SEQ ID NO: 157579 - DNA, 19 bp, Artificial sequence
  SiRNA target sequence
gtgtacaatcaccagttat

SEQ ID NO: 157580 - DNA, 19 bp, Artificial sequence
  SiRNA target sequence
tgtacaatcaccagttata

SEQ ID NO: 157581 - DNA, 19 bp, Artificial sequence
  SiRNA target sequence
gtacaatcaccagttataa

SEQ ID NO: 157582 - DNA, 19 bp, Artificial sequence
  SiRNA target sequence
tacaatcaccagttataaa

SEQ ID NO: 157583 - DNA, 19 bp, Artificial sequence
  SiRNA target sequence
acaatcaccagttataaat

SEQ ID NO: 157584 - DNA, 19 bp, Artificial sequence
  SiRNA target sequence
caatcaccagttataaata

SEQ ID NO: 157585 - DNA, 19 bp, Artificial sequence
  SiRNA target sequence
aatcaccagttataaatac

SEQ ID NO: 157586 - DNA, 19 bp, Artificial sequence
  SiRNA target sequence
atcaccagttataaataca

SEQ ID NO: 157587 - DNA, 19 bp, Artificial sequence
  SiRNA target sequence
tcaccagttataaatacaa

SEQ ID NO: 157588 - DNA, 19 bp, Artificial sequence
  SiRNA target sequence
caccagttataaatacaaa

SEQ ID NO: 157589 - DNA, 19 bp, Artificial sequence
  SiRNA target sequence
accagttataaatacaaaa

SEQ ID NO: 157590 - DNA, 19 bp, Artificial sequence
  SiRNA target sequence
ccagttataaatacaaaaa

SEQ ID NO: 157591 - DNA, 19 bp, Artificial sequence
  SiRNA target sequence
cagttataaatacaaaaaa

SEQ ID NO: 157592 - DNA, 19 bp, Artificial sequence
  SiRNA target sequence
agttataaatacaaaaaaa

SEQ ID NO: 157593 - DNA, 19 bp, Artificial sequence
  SiRNA target sequence
gttataaatacaaaaaaaa

SEQ ID NO: 157594 - DNA, 19 bp, Artificial sequence
  SiRNA target sequence
ttataaatacaaaaaaaat

SEQ ID NO: 157595 - DNA, 19 bp, Artificial sequence
  SiRNA target sequence
tataaatacaaaaaaaata

SEQ ID NO: 157596 - DNA, 19 bp, Artificial sequence
  SiRNA target sequence
ataaatacaaaaaaaatat

SEQ ID NO: 157597 - DNA, 19 bp, Artificial sequence
  SiRNA target sequence
taaatacaaaaaaaatata

SEQ ID NO: 157598 - DNA, 19 bp, Artificial sequence
  SiRNA target sequence
aaatacaaaaaaaatatat

SEQ ID NO: 157599 - DNA, 19 bp, Artificial sequence
  SiRNA target sequence
aatacaaaaaaaatatatc

SEQ ID NO: 157600 - DNA, 19 bp, Artificial sequence
  SiRNA target sequence
atacaaaaaaaatatatct

SEQ ID NO: 157601 - DNA, 19 bp, Artificial sequence
  SiRNA target sequence
tacaaaaaaaatatatctt

SEQ ID NO: 157602 - DNA, 19 bp, Artificial sequence
  SiRNA target sequence
acaaaaaaaatatatcttg

SEQ ID NO: 157603 - DNA, 19 bp, Artificial sequence
  SiRNA target sequence
caaaaaaaatatatcttga

SEQ ID NO: 157604 - DNA, 19 bp, Artificial sequence
  SiRNA target sequence
aaaaaaaatatatcttgat

SEQ ID NO: 157605 - DNA, 19 bp, Artificial sequence
  SiRNA target sequence
aaaaaaatatatcttgatg

SEQ ID NO: 157606 - DNA, 19 bp, Artificial sequence
  SiRNA target sequence
aaaaaatatatcttgatgc

SEQ ID NO: 157607 - DNA, 19 bp, Artificial sequence
  SiRNA target sequence
aaaaatatatcttgatgca

SEQ ID NO: 157608 - DNA, 19 bp, Artificial sequence
  SiRNA target sequence
aaaatatatcttgatgcac

SEQ ID NO: 157609 - DNA, 19 bp, Artificial sequence
  SiRNA target sequence
aaatatatcttgatgcaca

SEQ ID NO: 157610 - DNA, 19 bp, Artificial sequence
  SiRNA target sequence
aatatatcttgatgcacaa

SEQ ID NO: 157611 - DNA, 19 bp, Artificial sequence
  SiRNA target sequence
atatatcttgatgcacaag

SEQ ID NO: 157612 - DNA, 19 bp, Artificial sequence
  SiRNA target sequence
tatatcttgatgcacaagc

SEQ ID NO: 157613 - DNA, 19 bp, Artificial sequence
  SiRNA target sequence
atatcttgatgcacaagcg

SEQ ID NO: 157614 - DNA, 19 bp, Artificial sequence
  SiRNA target sequence
tatcttgatgcacaagcga

SEQ ID NO: 157615 - DNA, 19 bp, Artificial sequence
  SiRNA target sequence
atcttgatgcacaagcgac

SEQ ID NO: 157616 - DNA, 19 bp, Artificial sequence
  SiRNA target sequence
tcttgatgcacaagcgacc

SEQ ID NO: 157617 - DNA, 19 bp, Artificial sequence
  SiRNA target sequence
cttgatgcacaagcgacca

SEQ ID NO: 157618 - DNA, 19 bp, Artificial sequence
  SiRNA target sequence
ttgatgcacaagcgaccaa

SEQ ID NO: 157619 - DNA, 19 bp, Artificial sequence
  SiRNA target sequence
tgatgcacaagcgaccaag

SEQ ID NO: 157620 - DNA, 19 bp, Artificial sequence
  SiRNA target sequence
gatgcacaagcgaccaagc

SEQ ID NO: 157621 - DNA, 19 bp, Artificial sequence
  SiRNA target sequence
atgcacaagcgaccaagcc

SEQ ID NO: 157622 - DNA, 19 bp, Artificial sequence
  SiRNA target sequence
tgcacaagcgaccaagcct

SEQ ID NO: 157623 - DNA, 19 bp, Artificial sequence
  SiRNA target sequence
gcacaagcgaccaagcctt

SEQ ID NO: 157624 - DNA, 19 bp, Artificial sequence
  SiRNA target sequence
cacaagcgaccaagccttt

SEQ ID NO: 157625 - DNA, 19 bp, Artificial sequence
  SiRNA target sequence
acaagcgaccaagccttta

SEQ ID NO: 157626 - DNA, 19 bp, Artificial sequence
  SiRNA target sequence
caagcgaccaagcctttag

SEQ ID NO: 157627 - DNA, 19 bp, Artificial sequence
  SiRNA target sequence
aagcgaccaagcctttaga

SEQ ID NO: 157628 - DNA, 19 bp, Artificial sequence
  SiRNA target sequence
agcgaccaagcctttagac

SEQ ID NO: 157629 - DNA, 19 bp, Artificial sequence
  SiRNA target sequence
gcgaccaagcctttagacc

SEQ ID NO: 157630 - DNA, 19 bp, Artificial sequence
  SiRNA target sequence
cgaccaagcctttagaccc

SEQ ID NO: 157631 - DNA, 19 bp, Artificial sequence
  SiRNA target sequence
gaccaagcctttagacccg

SEQ ID NO: 157632 - DNA, 19 bp, Artificial sequence
  SiRNA target sequence
accaagcctttagacccgc

SEQ ID NO: 157633 - DNA, 19 bp, Artificial sequence
  SiRNA target sequence
ccaagcctttagacccgcg

SEQ ID NO: 157634 - DNA, 19 bp, Artificial sequence
  SiRNA target sequence
caagcctttagacccgcgt

SEQ ID NO: 157635 - DNA, 19 bp, Artificial sequence
  SiRNA target sequence
aagcctttagacccgcgtg

SEQ ID NO: 157636 - DNA, 19 bp, Artificial sequence
  SiRNA target sequence
agcctttagacccgcgtgt

SEQ ID NO: 157637 - DNA, 19 bp, Artificial sequence
  SiRNA target sequence
gcctttagacccgcgtgtg

SEQ ID NO: 157638 - DNA, 19 bp, Artificial sequence
  SiRNA target sequence
cctttagacccgcgtgtgc

SEQ ID NO: 157639 - DNA, 19 bp, Artificial sequence
  SiRNA target sequence
ctttagacccgcgtgtgct

SEQ ID NO: 157640 - DNA, 19 bp, Artificial sequence
  SiRNA target sequence
tttagacccgcgtgtgctt

SEQ ID NO: 157641 - DNA, 19 bp, Artificial sequence
  SiRNA target sequence
ttagacccgcgtgtgcttg

SEQ ID NO: 157642 - DNA, 19 bp, Artificial sequence
  SiRNA target sequence
tagacccgcgtgtgcttga

SEQ ID NO: 157643 - DNA, 19 bp, Artificial sequence
  SiRNA target sequence
agacccgcgtgtgcttgat

SEQ ID NO: 157644 - DNA, 19 bp, Artificial sequence
  SiRNA target sequence
gacccgcgtgtgcttgatg

SEQ ID NO: 157645 - DNA, 19 bp, Artificial sequence
  SiRNA target sequence
acccgcgtgtgcttgatgc

SEQ ID NO: 157646 - DNA, 19 bp, Artificial sequence
  SiRNA target sequence
cccgcgtgtgcttgatgca

SEQ ID NO: 157647 - DNA, 19 bp, Artificial sequence
  SiRNA target sequence
ccgcgtgtgcttgatgcaa

SEQ ID NO: 157648 - DNA, 19 bp, Artificial sequence
  SiRNA target sequence
cgcgtgtgcttgatgcaat

SEQ ID NO: 157649 - DNA, 19 bp, Artificial sequence
  SiRNA target sequence
gcgtgtgcttgatgcaatg

SEQ ID NO: 157650 - DNA, 19 bp, Artificial sequence
  SiRNA target sequence
cgtgtgcttgatgcaatgc

SEQ ID NO: 157651 - DNA, 19 bp, Artificial sequence
  SiRNA target sequence
gtgtgcttgatgcaatgct

SEQ ID NO: 157652 - DNA, 19 bp, Artificial sequence
  SiRNA target sequence
tgtgcttgatgcaatgctt

SEQ ID NO: 157653 - DNA, 19 bp, Artificial sequence
  SiRNA target sequence
gtgcttgatgcaatgcttc

SEQ ID NO: 157654 - DNA, 19 bp, Artificial sequence
  SiRNA target sequence
tgcttgatgcaatgcttcc

SEQ ID NO: 157655 - DNA, 19 bp, Artificial sequence
  SiRNA target sequence
gcttgatgcaatgcttcca

SEQ ID NO: 157656 - DNA, 19 bp, Artificial sequence
  SiRNA target sequence
cttgatgcaatgcttccat

SEQ ID NO: 157657 - DNA, 19 bp, Artificial sequence
  SiRNA target sequence
ttgatgcaatgcttccata

SEQ ID NO: 157658 - DNA, 19 bp, Artificial sequence
  SiRNA target sequence
tgatgcaatgcttccatac

SEQ ID NO: 157659 - DNA, 19 bp, Artificial sequence
  SiRNA target sequence
gatgcaatgcttccatact

SEQ ID NO: 157660 - DNA, 19 bp, Artificial sequence
  SiRNA target sequence
atgcaatgcttccatacta

SEQ ID NO: 157661 - DNA, 19 bp, Artificial sequence
  SiRNA target sequence
tgcaatgcttccatactat

SEQ ID NO: 157662 - DNA, 19 bp, Artificial sequence
  SiRNA target sequence
gcaatgcttccatactata

SEQ ID NO: 157663 - DNA, 19 bp, Artificial sequence
  SiRNA target sequence
caatgcttccatactatac

SEQ ID NO: 157664 - DNA, 19 bp, Artificial sequence
  SiRNA target sequence
aatgcttccatactataca

SEQ ID NO: 157665 - DNA, 19 bp, Artificial sequence
  SiRNA target sequence
atgcttccatactatacat

SEQ ID NO: 157666 - DNA, 19 bp, Artificial sequence
  SiRNA target sequence
tgcttccatactatacatc

SEQ ID NO: 157667 - DNA, 19 bp, Artificial sequence
  SiRNA target sequence
gcttccatactatacatcc

SEQ ID NO: 157668 - DNA, 19 bp, Artificial sequence
  SiRNA target sequence
cttccatactatacatcca

SEQ ID NO: 157669 - DNA, 19 bp, Artificial sequence
  SiRNA target sequence
ttccatactatacatccat

SEQ ID NO: 157670 - DNA, 19 bp, Artificial sequence
  SiRNA target sequence
tccatactatacatccatt

SEQ ID NO: 157671 - DNA, 19 bp, Artificial sequence
  SiRNA target sequence
ccatactatacatccattt

SEQ ID NO: 157672 - DNA, 19 bp, Artificial sequence
  SiRNA target sequence
catactatacatccatttt

SEQ ID NO: 157673 - DNA, 19 bp, Artificial sequence
  SiRNA target sequence
atactatacatccattttt

SEQ ID NO: 157674 - DNA, 19 bp, Artificial sequence
  SiRNA target sequence
tactatacatccatttttg

SEQ ID NO: 157675 - DNA, 19 bp, Artificial sequence
  SiRNA target sequence
actatacatccatttttgg

SEQ ID NO: 157676 - DNA, 19 bp, Artificial sequence
  SiRNA target sequence
ctatacatccatttttgga

SEQ ID NO: 157677 - DNA, 19 bp, Artificial sequence
  SiRNA target sequence
tatacatccatttttggaa

SEQ ID NO: 157678 - DNA, 19 bp, Artificial sequence
  SiRNA target sequence
atacatccatttttggaaa

SEQ ID NO: 157679 - DNA, 19 bp, Artificial sequence
  SiRNA target sequence
tacatccatttttggaaat

SEQ ID NO: 157680 - DNA, 19 bp, Artificial sequence
  SiRNA target sequence
acatccatttttggaaatc

SEQ ID NO: 157681 - DNA, 19 bp, Artificial sequence
  SiRNA target sequence
catccatttttggaaatcc

SEQ ID NO: 157682 - DNA, 19 bp, Artificial sequence
  SiRNA target sequence
atccatttttggaaatcca

SEQ ID NO: 157683 - DNA, 19 bp, Artificial sequence
  SiRNA target sequence
tccatttttggaaatccac

SEQ ID NO: 157684 - DNA, 19 bp, Artificial sequence
  SiRNA target sequence
ccatttttggaaatccaca

SEQ ID NO: 157685 - DNA, 19 bp, Artificial sequence
  SiRNA target sequence
catttttggaaatccacat

SEQ ID NO: 157686 - DNA, 19 bp, Artificial sequence
  SiRNA target sequence
atttttggaaatccacatt

SEQ ID NO: 157687 - DNA, 19 bp, Artificial sequence
  SiRNA target sequence
tttttggaaatccacattc

SEQ ID NO: 157688 - DNA, 19 bp, Artificial sequence
  SiRNA target sequence
ttttggaaatccacattct

SEQ ID NO: 157689 - DNA, 19 bp, Artificial sequence
  SiRNA target sequence
tttggaaatccacattctc

SEQ ID NO: 157690 - DNA, 19 bp, Artificial sequence
  SiRNA target sequence
ttggaaatccacattctcg

SEQ ID NO: 157691 - DNA, 19 bp, Artificial sequence
  SiRNA target sequence
tggaaatccacattctcgc

SEQ ID NO: 157692 - DNA, 19 bp, Artificial sequence
  SiRNA target sequence
ggaaatccacattctcgca

SEQ ID NO: 157693 - DNA, 19 bp, Artificial sequence
  SiRNA target sequence
gaaatccacattctcgcac

SEQ ID NO: 157694 - DNA, 19 bp, Artificial sequence
  SiRNA target sequence
aaatccacattctcgcacg

SEQ ID NO: 157695 - DNA, 19 bp, Artificial sequence
  SiRNA target sequence
aatccacattctcgcacgc

SEQ ID NO: 157696 - DNA, 19 bp, Artificial sequence
  SiRNA target sequence
atccacattctcgcacgca

SEQ ID NO: 157697 - DNA, 19 bp, Artificial sequence
  SiRNA target sequence
tccacattctcgcacgcat

SEQ ID NO: 157698 - DNA, 19 bp, Artificial sequence
  SiRNA target sequence
ccacattctcgcacgcata

SEQ ID NO: 157699 - DNA, 19 bp, Artificial sequence
  SiRNA target sequence
cacattctcgcacgcatac

SEQ ID NO: 157700 - DNA, 19 bp, Artificial sequence
  SiRNA target sequence
acattctcgcacgcatacg

SEQ ID NO: 157701 - DNA, 19 bp, Artificial sequence
  SiRNA target sequence
cattctcgcacgcatacgt

SEQ ID NO: 157702 - DNA, 19 bp, Artificial sequence
  SiRNA target sequence
attctcgcacgcatacgtt

SEQ ID NO: 157703 - DNA, 19 bp, Artificial sequence
  SiRNA target sequence
ttctcgcacgcatacgttt

SEQ ID NO: 157704 - DNA, 19 bp, Artificial sequence
  SiRNA target sequence
tctcgcacgcatacgtttg

SEQ ID NO: 157705 - DNA, 19 bp, Artificial sequence
  SiRNA target sequence
ctcgcacgcatacgtttgg

SEQ ID NO: 157706 - DNA, 19 bp, Artificial sequence
  SiRNA target sequence
tcgcacgcatacgtttgga

SEQ ID NO: 157707 - DNA, 19 bp, Artificial sequence
  SiRNA target sequence
cgcacgcatacgtttggat

SEQ ID NO: 157708 - DNA, 19 bp, Artificial sequence
  SiRNA target sequence
gcacgcatacgtttggatg

SEQ ID NO: 157709 - DNA, 19 bp, Artificial sequence
  SiRNA target sequence
cacgcatacgtttggatgg

SEQ ID NO: 157710 - DNA, 19 bp, Artificial sequence
  SiRNA target sequence
acgcatacgtttggatgga

SEQ ID NO: 157711 - DNA, 19 bp, Artificial sequence
  SiRNA target sequence
cgcatacgtttggatggaa

SEQ ID NO: 157712 - DNA, 19 bp, Artificial sequence
  SiRNA target sequence
gcatacgtttggatggaat

SEQ ID NO: 157713 - DNA, 19 bp, Artificial sequence
  SiRNA target sequence
catacgtttggatggaatg

SEQ ID NO: 157714 - DNA, 19 bp, Artificial sequence
  SiRNA target sequence
atacgtttggatggaatgc

SEQ ID NO: 157715 - DNA, 19 bp, Artificial sequence
  SiRNA target sequence
tacgtttggatggaatgca

SEQ ID NO: 157716 - DNA, 19 bp, Artificial sequence
  SiRNA target sequence
acgtttggatggaatgcag

SEQ ID NO: 157717 - DNA, 19 bp, Artificial sequence
  SiRNA target sequence
cgtttggatggaatgcaga

SEQ ID NO: 157718 - DNA, 19 bp, Artificial sequence
  SiRNA target sequence
gtttggatggaatgcagaa

SEQ ID NO: 157719 - DNA, 19 bp, Artificial sequence
  SiRNA target sequence
tttggatggaatgcagaaa

SEQ ID NO: 157720 - DNA, 19 bp, Artificial sequence
  SiRNA target sequence
ttggatggaatgcagaaaa

SEQ ID NO: 157721 - DNA, 19 bp, Artificial sequence
  SiRNA target sequence
tggatggaatgcagaaaaa

SEQ ID NO: 157722 - DNA, 19 bp, Artificial sequence
  SiRNA target sequence
ggatggaatgcagaaaaag

SEQ ID NO: 157723 - DNA, 19 bp, Artificial sequence
  SiRNA target sequence
gatggaatgcagaaaaagg

SEQ ID NO: 157724 - DNA, 19 bp, Artificial sequence
  SiRNA target sequence
atggaatgcagaaaaaggc

SEQ ID NO: 157725 - DNA, 19 bp, Artificial sequence
  SiRNA target sequence
tggaatgcagaaaaaggcg

SEQ ID NO: 157726 - DNA, 19 bp, Artificial sequence
  SiRNA target sequence
ggaatgcagaaaaaggcgt

SEQ ID NO: 157727 - DNA, 19 bp, Artificial sequence
  SiRNA target sequence
gaatgcagaaaaaggcgta

SEQ ID NO: 157728 - DNA, 19 bp, Artificial sequence
  SiRNA target sequence
aatgcagaaaaaggcgtag

SEQ ID NO: 157729 - DNA, 19 bp, Artificial sequence
  SiRNA target sequence
atgcagaaaaaggcgtaga

SEQ ID NO: 157730 - DNA, 19 bp, Artificial sequence
  SiRNA target sequence
tgcagaaaaaggcgtagaa

SEQ ID NO: 157731 - DNA, 19 bp, Artificial sequence
  SiRNA target sequence
gcagaaaaaggcgtagaaa

SEQ ID NO: 157732 - DNA, 19 bp, Artificial sequence
  SiRNA target sequence
cagaaaaaggcgtagaaat

SEQ ID NO: 157733 - DNA, 19 bp, Artificial sequence
  SiRNA target sequence
agaaaaaggcgtagaaatg

SEQ ID NO: 157734 - DNA, 19 bp, Artificial sequence
  SiRNA target sequence
gaaaaaggcgtagaaatgg

SEQ ID NO: 157735 - DNA, 19 bp, Artificial sequence
  SiRNA target sequence
aaaaaggcgtagaaatggc

SEQ ID NO: 157736 - DNA, 19 bp, Artificial sequence
  SiRNA target sequence
aaaaggcgtagaaatggct

SEQ ID NO: 157737 - DNA, 19 bp, Artificial sequence
  SiRNA target sequence
aaaggcgtagaaatggctc

SEQ ID NO: 157738 - DNA, 19 bp, Artificial sequence
  SiRNA target sequence
aaggcgtagaaatggctcg

SEQ ID NO: 157739 - DNA, 19 bp, Artificial sequence
  SiRNA target sequence
aggcgtagaaatggctcga

SEQ ID NO: 157740 - DNA, 19 bp, Artificial sequence
  SiRNA target sequence
ggcgtagaaatggctcgaa

SEQ ID NO: 157741 - DNA, 19 bp, Artificial sequence
  SiRNA target sequence
gcgtagaaatggctcgaaa

SEQ ID NO: 157742 - DNA, 19 bp, Artificial sequence
  SiRNA target sequence
cgtagaaatggctcgaaag

SEQ ID NO: 157743 - DNA, 19 bp, Artificial sequence
  SiRNA target sequence
gtagaaatggctcgaaagc

SEQ ID NO: 157744 - DNA, 19 bp, Artificial sequence
  SiRNA target sequence
tagaaatggctcgaaagca

SEQ ID NO: 157745 - DNA, 19 bp, Artificial sequence
  SiRNA target sequence
agaaatggctcgaaagcaa

SEQ ID NO: 157746 - DNA, 19 bp, Artificial sequence
  SiRNA target sequence
gaaatggctcgaaagcaag

SEQ ID NO: 157747 - DNA, 19 bp, Artificial sequence
  SiRNA target sequence
aaatggctcgaaagcaagt

SEQ ID NO: 157748 - DNA, 19 bp, Artificial sequence
  SiRNA target sequence
aatggctcgaaagcaagta

SEQ ID NO: 157749 - DNA, 19 bp, Artificial sequence
  SiRNA target sequence
atggctcgaaagcaagtag

SEQ ID NO: 157750 - DNA, 19 bp, Artificial sequence
  SiRNA target sequence
tggctcgaaagcaagtagc

SEQ ID NO: 157751 - DNA, 19 bp, Artificial sequence
  SiRNA target sequence
ggctcgaaagcaagtagca

SEQ ID NO: 157752 - DNA, 19 bp, Artificial sequence
  SiRNA target sequence
gctcgaaagcaagtagcag

SEQ ID NO: 157753 - DNA, 19 bp, Artificial sequence
  SiRNA target sequence
ctcgaaagcaagtagcaga

SEQ ID NO: 157754 - DNA, 19 bp, Artificial sequence
  SiRNA target sequence
tcgaaagcaagtagcagat

SEQ ID NO: 157755 - DNA, 19 bp, Artificial sequence
  SiRNA target sequence
cgaaagcaagtagcagatt

SEQ ID NO: 157756 - DNA, 19 bp, Artificial sequence
  SiRNA target sequence
gaaagcaagtagcagattt

SEQ ID NO: 157757 - DNA, 19 bp, Artificial sequence
  SiRNA target sequence
aaagcaagtagcagattta

SEQ ID NO: 157758 - DNA, 19 bp, Artificial sequence
  SiRNA target sequence
aagcaagtagcagatttac

SEQ ID NO: 157759 - DNA, 19 bp, Artificial sequence
  SiRNA target sequence
agcaagtagcagatttact

SEQ ID NO: 157760 - DNA, 19 bp, Artificial sequence
  SiRNA target sequence
gcaagtagcagatttactg

SEQ ID NO: 157761 - DNA, 19 bp, Artificial sequence
  SiRNA target sequence
caagtagcagatttactga

SEQ ID NO: 157762 - DNA, 19 bp, Artificial sequence
  SiRNA target sequence
aagtagcagatttactgaa

SEQ ID NO: 157763 - DNA, 19 bp, Artificial sequence
  SiRNA target sequence
agtagcagatttactgaat

SEQ ID NO: 157764 - DNA, 19 bp, Artificial sequence
  SiRNA target sequence
gtagcagatttactgaatg

SEQ ID NO: 157765 - DNA, 19 bp, Artificial sequence
  SiRNA target sequence
tagcagatttactgaatgc

SEQ ID NO: 157766 - DNA, 19 bp, Artificial sequence
  SiRNA target sequence
agcagatttactgaatgcc

SEQ ID NO: 157767 - DNA, 19 bp, Artificial sequence
  SiRNA target sequence
gcagatttactgaatgcca

SEQ ID NO: 157768 - DNA, 19 bp, Artificial sequence
  SiRNA target sequence
cagatttactgaatgccaa

SEQ ID NO: 157769 - DNA, 19 bp, Artificial sequence
  SiRNA target sequence
agatttactgaatgccaat

SEQ ID NO: 157770 - DNA, 19 bp, Artificial sequence
  SiRNA target sequence
gatttactgaatgccaatg

SEQ ID NO: 157771 - DNA, 19 bp, Artificial sequence
  SiRNA target sequence
atttactgaatgccaatga

SEQ ID NO: 157772 - DNA, 19 bp, Artificial sequence
  SiRNA target sequence
tttactgaatgccaatgaa

SEQ ID NO: 157773 - DNA, 19 bp, Artificial sequence
  SiRNA target sequence
ttactgaatgccaatgaaa

SEQ ID NO: 157774 - DNA, 19 bp, Artificial sequence
  SiRNA target sequence
tactgaatgccaatgaaaa

SEQ ID NO: 157775 - DNA, 19 bp, Artificial sequence
  SiRNA target sequence
actgaatgccaatgaaaaa

SEQ ID NO: 157776 - DNA, 19 bp, Artificial sequence
  SiRNA target sequence
ctgaatgccaatgaaaaag

SEQ ID NO: 157777 - DNA, 19 bp, Artificial sequence
  SiRNA target sequence
tgaatgccaatgaaaaaga

SEQ ID NO: 157778 - DNA, 19 bp, Artificial sequence
  SiRNA target sequence
gaatgccaatgaaaaagaa

SEQ ID NO: 157779 - DNA, 19 bp, Artificial sequence
  SiRNA target sequence
aatgccaatgaaaaagaaa

SEQ ID NO: 157780 - DNA, 19 bp, Artificial sequence
  SiRNA target sequence
atgccaatgaaaaagaaat

SEQ ID NO: 157781 - DNA, 19 bp, Artificial sequence
  SiRNA target sequence
tgccaatgaaaaagaaatt

SEQ ID NO: 157782 - DNA, 19 bp, Artificial sequence
  SiRNA target sequence
gccaatgaaaaagaaatta

SEQ ID NO: 157783 - DNA, 19 bp, Artificial sequence
  SiRNA target sequence
ccaatgaaaaagaaattat

SEQ ID NO: 157784 - DNA, 19 bp, Artificial sequence
  SiRNA target sequence
caatgaaaaagaaattatt

SEQ ID NO: 157785 - DNA, 19 bp, Artificial sequence
  SiRNA target sequence
aatgaaaaagaaattattt

SEQ ID NO: 157786 - DNA, 19 bp, Artificial sequence
  SiRNA target sequence
atgaaaaagaaattatttt

SEQ ID NO: 157787 - DNA, 19 bp, Artificial sequence
  SiRNA target sequence
tgaaaaagaaattattttt

SEQ ID NO: 157788 - DNA, 19 bp, Artificial sequence
  SiRNA target sequence
gaaaaagaaattattttta

SEQ ID NO: 157789 - DNA, 19 bp, Artificial sequence
  SiRNA target sequence
aaaaagaaattatttttac

SEQ ID NO: 157790 - DNA, 19 bp, Artificial sequence
  SiRNA target sequence
aaaagaaattatttttact

SEQ ID NO: 157791 - DNA, 19 bp, Artificial sequence
  SiRNA target sequence
aaagaaattatttttacta

SEQ ID NO: 157792 - DNA, 19 bp, Artificial sequence
  SiRNA target sequence
aagaaattatttttactag

SEQ ID NO: 157793 - DNA, 19 bp, Artificial sequence
  SiRNA target sequence
agaaattatttttactagc

SEQ ID NO: 157794 - DNA, 19 bp, Artificial sequence
  SiRNA target sequence
gaaattatttttactagcg

SEQ ID NO: 157795 - DNA, 19 bp, Artificial sequence
  SiRNA target sequence
aaattatttttactagcgg

SEQ ID NO: 157796 - DNA, 19 bp, Artificial sequence
  SiRNA target sequence
aattatttttactagcggt

SEQ ID NO: 157797 - DNA, 19 bp, Artificial sequence
  SiRNA target sequence
attatttttactagcggtg

SEQ ID NO: 157798 - DNA, 19 bp, Artificial sequence
  SiRNA target sequence
ttatttttactagcggtgc

SEQ ID NO: 157799 - DNA, 19 bp, Artificial sequence
  SiRNA target sequence
tatttttactagcggtgct

SEQ ID NO: 157800 - DNA, 19 bp, Artificial sequence
  SiRNA target sequence
atttttactagcggtgcta

SEQ ID NO: 157801 - DNA, 19 bp, Artificial sequence
  SiRNA target sequence
tttttactagcggtgctac

SEQ ID NO: 157802 - DNA, 19 bp, Artificial sequence
  SiRNA target sequence
ttttactagcggtgctact

SEQ ID NO: 157803 - DNA, 19 bp, Artificial sequence
  SiRNA target sequence
tttactagcggtgctactg

SEQ ID NO: 157804 - DNA, 19 bp, Artificial sequence
  SiRNA target sequence
ttactagcggtgctactga

SEQ ID NO: 157805 - DNA, 19 bp, Artificial sequence
  SiRNA target sequence
tactagcggtgctactgag

SEQ ID NO: 157806 - DNA, 19 bp, Artificial sequence
  SiRNA target sequence
actagcggtgctactgaga

SEQ ID NO: 157807 - DNA, 19 bp, Artificial sequence
  SiRNA target sequence
ctagcggtgctactgagag

SEQ ID NO: 157808 - DNA, 19 bp, Artificial sequence
  SiRNA target sequence
tagcggtgctactgagagt

SEQ ID NO: 157809 - DNA, 19 bp, Artificial sequence
  SiRNA target sequence
agcggtgctactgagagta

SEQ ID NO: 157810 - DNA, 19 bp, Artificial sequence
  SiRNA target sequence
gcggtgctactgagagtaa

SEQ ID NO: 157811 - DNA, 19 bp, Artificial sequence
  SiRNA target sequence
cggtgctactgagagtaac

SEQ ID NO: 157812 - DNA, 19 bp, Artificial sequence
  SiRNA target sequence
ggtgctactgagagtaaca

SEQ ID NO: 157813 - DNA, 19 bp, Artificial sequence
  SiRNA target sequence
gtgctactgagagtaacaa

SEQ ID NO: 157814 - DNA, 19 bp, Artificial sequence
  SiRNA target sequence
tgctactgagagtaacaac

SEQ ID NO: 157815 - DNA, 19 bp, Artificial sequence
  SiRNA target sequence
gctactgagagtaacaacc

SEQ ID NO: 157816 - DNA, 19 bp, Artificial sequence
  SiRNA target sequence
ctactgagagtaacaacct

SEQ ID NO: 157817 - DNA, 19 bp, Artificial sequence
  SiRNA target sequence
tactgagagtaacaacctt

SEQ ID NO: 157818 - DNA, 19 bp, Artificial sequence
  SiRNA target sequence
actgagagtaacaaccttg

SEQ ID NO: 157819 - DNA, 19 bp, Artificial sequence
  SiRNA target sequence
ctgagagtaacaaccttgc

SEQ ID NO: 157820 - DNA, 19 bp, Artificial sequence
  SiRNA target sequence
tgagagtaacaaccttgca

SEQ ID NO: 157821 - DNA, 19 bp, Artificial sequence
  SiRNA target sequence
gagagtaacaaccttgcac

SEQ ID NO: 157822 - DNA, 19 bp, Artificial sequence
  SiRNA target sequence
agagtaacaaccttgcact

SEQ ID NO: 157823 - DNA, 19 bp, Artificial sequence
  SiRNA target sequence
gagtaacaaccttgcacta

SEQ ID NO: 157824 - DNA, 19 bp, Artificial sequence
  SiRNA target sequence
agtaacaaccttgcactaa

SEQ ID NO: 157825 - DNA, 19 bp, Artificial sequence
  SiRNA target sequence
gtaacaaccttgcactaaa

SEQ ID NO: 157826 - DNA, 19 bp, Artificial sequence
  SiRNA target sequence
taacaaccttgcactaaag

SEQ ID NO: 157827 - DNA, 19 bp, Artificial sequence
  SiRNA target sequence
aacaaccttgcactaaagg

SEQ ID NO: 157828 - DNA, 19 bp, Artificial sequence
  SiRNA target sequence
acaaccttgcactaaaggg

SEQ ID NO: 157829 - DNA, 19 bp, Artificial sequence
  SiRNA target sequence
caaccttgcactaaagggt

SEQ ID NO: 157830 - DNA, 19 bp, Artificial sequence
  SiRNA target sequence
aaccttgcactaaagggtg

SEQ ID NO: 157831 - DNA, 19 bp, Artificial sequence
  SiRNA target sequence
accttgcactaaagggtgt

SEQ ID NO: 157832 - DNA, 19 bp, Artificial sequence
  SiRNA target sequence
ccttgcactaaagggtgtc

SEQ ID NO: 157833 - DNA, 19 bp, Artificial sequence
  SiRNA target sequence
cttgcactaaagggtgtct

SEQ ID NO: 157834 - DNA, 19 bp, Artificial sequence
  SiRNA target sequence
ttgcactaaagggtgtctt

SEQ ID NO: 157835 - DNA, 19 bp, Artificial sequence
  SiRNA target sequence
tgcactaaagggtgtcttt

SEQ ID NO: 157836 - DNA, 19 bp, Artificial sequence
  SiRNA target sequence
gcactaaagggtgtctttg

SEQ ID NO: 157837 - DNA, 19 bp, Artificial sequence
  SiRNA target sequence
cactaaagggtgtctttgc

SEQ ID NO: 157838 - DNA, 19 bp, Artificial sequence
  SiRNA target sequence
actaaagggtgtctttgca

SEQ ID NO: 157839 - DNA, 19 bp, Artificial sequence
  SiRNA target sequence
ctaaagggtgtctttgcat

SEQ ID NO: 157840 - DNA, 19 bp, Artificial sequence
  SiRNA target sequence
taaagggtgtctttgcatt

SEQ ID NO: 157841 - DNA, 19 bp, Artificial sequence
  SiRNA target sequence
aaagggtgtctttgcattt

SEQ ID NO: 157842 - DNA, 19 bp, Artificial sequence
  SiRNA target sequence
aagggtgtctttgcatttt

SEQ ID NO: 157843 - DNA, 19 bp, Artificial sequence
  SiRNA target sequence
agggtgtctttgcattttt

SEQ ID NO: 157844 - DNA, 19 bp, Artificial sequence
  SiRNA target sequence
gggtgtctttgcattttta

SEQ ID NO: 157845 - DNA, 19 bp, Artificial sequence
  SiRNA target sequence
ggtgtctttgcatttttaa

SEQ ID NO: 157846 - DNA, 19 bp, Artificial sequence
  SiRNA target sequence
gtgtctttgcatttttaaa

SEQ ID NO: 157847 - DNA, 19 bp, Artificial sequence
  SiRNA target sequence
tgtctttgcatttttaaaa

SEQ ID NO: 157848 - DNA, 19 bp, Artificial sequence
  SiRNA target sequence
gtctttgcatttttaaaaa

SEQ ID NO: 157849 - DNA, 19 bp, Artificial sequence
  SiRNA target sequence
tctttgcatttttaaaaaa

SEQ ID NO: 157850 - DNA, 19 bp, Artificial sequence
  SiRNA target sequence
ctttgcatttttaaaaaaa

SEQ ID NO: 157851 - DNA, 19 bp, Artificial sequence
  SiRNA target sequence
tttgcatttttaaaaaaag

SEQ ID NO: 157852 - DNA, 19 bp, Artificial sequence
  SiRNA target sequence
ttgcatttttaaaaaaaga

SEQ ID NO: 157853 - DNA, 19 bp, Artificial sequence
  SiRNA target sequence
tgcatttttaaaaaaagac

SEQ ID NO: 157854 - DNA, 19 bp, Artificial sequence
  SiRNA target sequence
gcatttttaaaaaaagaca

SEQ ID NO: 157855 - DNA, 19 bp, Artificial sequence
  SiRNA target sequence
catttttaaaaaaagacaa

SEQ ID NO: 157856 - DNA, 19 bp, Artificial sequence
  SiRNA target sequence
atttttaaaaaaagacaat

SEQ ID NO: 157857 - DNA, 19 bp, Artificial sequence
  SiRNA target sequence
tttttaaaaaaagacaata

SEQ ID NO: 157858 - DNA, 19 bp, Artificial sequence
  SiRNA target sequence
ttttaaaaaaagacaatag

SEQ ID NO: 157859 - DNA, 19 bp, Artificial sequence
  SiRNA target sequence
tttaaaaaaagacaatagg

SEQ ID NO: 157860 - DNA, 19 bp, Artificial sequence
  SiRNA target sequence
ttaaaaaaagacaataggc

SEQ ID NO: 157861 - DNA, 19 bp, Artificial sequence
  SiRNA target sequence
taaaaaaagacaataggcc

SEQ ID NO: 157862 - DNA, 19 bp, Artificial sequence
  SiRNA target sequence
aaaaaaagacaataggcct

SEQ ID NO: 157863 - DNA, 19 bp, Artificial sequence
  SiRNA target sequence
aaaaaagacaataggcctg

SEQ ID NO: 157864 - DNA, 19 bp, Artificial sequence
  SiRNA target sequence
aaaaagacaataggcctgt

SEQ ID NO: 157865 - DNA, 19 bp, Artificial sequence
  SiRNA target sequence
aaaagacaataggcctgtt

SEQ ID NO: 157866 - DNA, 19 bp, Artificial sequence
  SiRNA target sequence
aaagacaataggcctgttc

SEQ ID NO: 157867 - DNA, 19 bp, Artificial sequence
  SiRNA target sequence
aagacaataggcctgttca

SEQ ID NO: 157868 - DNA, 19 bp, Artificial sequence
  SiRNA target sequence
agacaataggcctgttcat

SEQ ID NO: 157869 - DNA, 19 bp, Artificial sequence
  SiRNA target sequence
gacaataggcctgttcata

SEQ ID NO: 157870 - DNA, 19 bp, Artificial sequence
  SiRNA target sequence
acaataggcctgttcatat

SEQ ID NO: 157871 - DNA, 19 bp, Artificial sequence
  SiRNA target sequence
caataggcctgttcatatc

SEQ ID NO: 157872 - DNA, 19 bp, Artificial sequence
  SiRNA target sequence
aataggcctgttcatatca

SEQ ID NO: 157873 - DNA, 19 bp, Artificial sequence
  SiRNA target sequence
ataggcctgttcatatcat

SEQ ID NO: 157874 - DNA, 19 bp, Artificial sequence
  SiRNA target sequence
taggcctgttcatatcatt

SEQ ID NO: 157875 - DNA, 19 bp, Artificial sequence
  SiRNA target sequence
aggcctgttcatatcatta

SEQ ID NO: 157876 - DNA, 19 bp, Artificial sequence
  SiRNA target sequence
ggcctgttcatatcattac

SEQ ID NO: 157877 - DNA, 19 bp, Artificial sequence
  SiRNA target sequence
gcctgttcatatcattacc

SEQ ID NO: 157878 - DNA, 19 bp, Artificial sequence
  SiRNA target sequence
cctgttcatatcattacca

SEQ ID NO: 157879 - DNA, 19 bp, Artificial sequence
  SiRNA target sequence
ctgttcatatcattaccac

SEQ ID NO: 157880 - DNA, 19 bp, Artificial sequence
  SiRNA target sequence
tgttcatatcattaccaca

SEQ ID NO: 157881 - DNA, 19 bp, Artificial sequence
  SiRNA target sequence
gttcatatcattaccacac

SEQ ID NO: 157882 - DNA, 19 bp, Artificial sequence
  SiRNA target sequence
ttcatatcattaccacaca

SEQ ID NO: 157883 - DNA, 19 bp, Artificial sequence
  SiRNA target sequence
tcatatcattaccacacaa

SEQ ID NO: 157884 - DNA, 19 bp, Artificial sequence
  SiRNA target sequence
catatcattaccacacaaa

SEQ ID NO: 157885 - DNA, 19 bp, Artificial sequence
  SiRNA target sequence
atatcattaccacacaaat

SEQ ID NO: 157886 - DNA, 19 bp, Artificial sequence
  SiRNA target sequence
tatcattaccacacaaatt

SEQ ID NO: 157887 - DNA, 19 bp, Artificial sequence
  SiRNA target sequence
atcattaccacacaaattg

SEQ ID NO: 157888 - DNA, 19 bp, Artificial sequence
  SiRNA target sequence
tcattaccacacaaattga

SEQ ID NO: 157889 - DNA, 19 bp, Artificial sequence
  SiRNA target sequence
cattaccacacaaattgaa

SEQ ID NO: 157890 - DNA, 19 bp, Artificial sequence
  SiRNA target sequence
attaccacacaaattgaac

SEQ ID NO: 157891 - DNA, 19 bp, Artificial sequence
  SiRNA target sequence
ttaccacacaaattgaaca

SEQ ID NO: 157892 - DNA, 19 bp, Artificial sequence
  SiRNA target sequence
taccacacaaattgaacat

SEQ ID NO: 157893 - DNA, 19 bp, Artificial sequence
  SiRNA target sequence
accacacaaattgaacata

SEQ ID NO: 157894 - DNA, 19 bp, Artificial sequence
  SiRNA target sequence
ccacacaaattgaacataa

SEQ ID NO: 157895 - DNA, 19 bp, Artificial sequence
  SiRNA target sequence
cacacaaattgaacataaa

SEQ ID NO: 157896 - DNA, 19 bp, Artificial sequence
  SiRNA target sequence
acacaaattgaacataaat

SEQ ID NO: 157897 - DNA, 19 bp, Artificial sequence
  SiRNA target sequence
cacaaattgaacataaatg

SEQ ID NO: 157898 - DNA, 19 bp, Artificial sequence
  SiRNA target sequence
acaaattgaacataaatgt

SEQ ID NO: 157899 - DNA, 19 bp, Artificial sequence
  SiRNA target sequence
caaattgaacataaatgtg

SEQ ID NO: 157900 - DNA, 19 bp, Artificial sequence
  SiRNA target sequence
aaattgaacataaatgtgt

SEQ ID NO: 157901 - DNA, 19 bp, Artificial sequence
  SiRNA target sequence
aattgaacataaatgtgta

SEQ ID NO: 157902 - DNA, 19 bp, Artificial sequence
  SiRNA target sequence
attgaacataaatgtgtat

SEQ ID NO: 157903 - DNA, 19 bp, Artificial sequence
  SiRNA target sequence
ttgaacataaatgtgtatt

SEQ ID NO: 157904 - DNA, 19 bp, Artificial sequence
  SiRNA target sequence
tgaacataaatgtgtattg

SEQ ID NO: 157905 - DNA, 19 bp, Artificial sequence
  SiRNA target sequence
gaacataaatgtgtattgg

SEQ ID NO: 157906 - DNA, 19 bp, Artificial sequence
  SiRNA target sequence
aacataaatgtgtattgga

SEQ ID NO: 157907 - DNA, 19 bp, Artificial sequence
  SiRNA target sequence
acataaatgtgtattggac

SEQ ID NO: 157908 - DNA, 19 bp, Artificial sequence
  SiRNA target sequence
cataaatgtgtattggaca

SEQ ID NO: 157909 - DNA, 19 bp, Artificial sequence
  SiRNA target sequence
ataaatgtgtattggacac

SEQ ID NO: 157910 - DNA, 19 bp, Artificial sequence
  SiRNA target sequence
taaatgtgtattggacaca

SEQ ID NO: 157911 - DNA, 19 bp, Artificial sequence
  SiRNA target sequence
aaatgtgtattggacacat

SEQ ID NO: 157912 - DNA, 19 bp, Artificial sequence
  SiRNA target sequence
aatgtgtattggacacatg

SEQ ID NO: 157913 - DNA, 19 bp, Artificial sequence
  SiRNA target sequence
atgtgtattggacacatgt

SEQ ID NO: 157914 - DNA, 19 bp, Artificial sequence
  SiRNA target sequence
tgtgtattggacacatgta

SEQ ID NO: 157915 - DNA, 19 bp, Artificial sequence
  SiRNA target sequence
gtgtattggacacatgtag

SEQ ID NO: 157916 - DNA, 19 bp, Artificial sequence
  SiRNA target sequence
tgtattggacacatgtaga

SEQ ID NO: 157917 - DNA, 19 bp, Artificial sequence
  SiRNA target sequence
gtattggacacatgtagaa

SEQ ID NO: 157918 - DNA, 19 bp, Artificial sequence
  SiRNA target sequence
tattggacacatgtagaag

SEQ ID NO: 157919 - DNA, 19 bp, Artificial sequence
  SiRNA target sequence
attggacacatgtagaaga

SEQ ID NO: 157920 - DNA, 19 bp, Artificial sequence
  SiRNA target sequence
ttggacacatgtagaagat

SEQ ID NO: 157921 - DNA, 19 bp, Artificial sequence
  SiRNA target sequence
tggacacatgtagaagatt

SEQ ID NO: 157922 - DNA, 19 bp, Artificial sequence
  SiRNA target sequence
ggacacatgtagaagatta

SEQ ID NO: 157923 - DNA, 19 bp, Artificial sequence
  SiRNA target sequence
gacacatgtagaagattag

SEQ ID NO: 157924 - DNA, 19 bp, Artificial sequence
  SiRNA target sequence
acacatgtagaagattaga

SEQ ID NO: 157925 - DNA, 19 bp, Artificial sequence
  SiRNA target sequence
cacatgtagaagattagaa

SEQ ID NO: 157926 - DNA, 19 bp, Artificial sequence
  SiRNA target sequence
acatgtagaagattagaag

SEQ ID NO: 157927 - DNA, 19 bp, Artificial sequence
  SiRNA target sequence
catgtagaagattagaaga

SEQ ID NO: 157928 - DNA, 19 bp, Artificial sequence
  SiRNA target sequence
atgtagaagattagaagaa

SEQ ID NO: 157929 - DNA, 19 bp, Artificial sequence
  SiRNA target sequence
tgtagaagattagaagaag

SEQ ID NO: 157930 - DNA, 19 bp, Artificial sequence
  SiRNA target sequence
gtagaagattagaagaaga

SEQ ID NO: 157931 - DNA, 19 bp, Artificial sequence
  SiRNA target sequence
tagaagattagaagaagaa

SEQ ID NO: 157932 - DNA, 19 bp, Artificial sequence
  SiRNA target sequence
agaagattagaagaagaag

SEQ ID NO: 157933 - DNA, 19 bp, Artificial sequence
  SiRNA target sequence
gaagattagaagaagaagg

SEQ ID NO: 157934 - DNA, 19 bp, Artificial sequence
  SiRNA target sequence
aagattagaagaagaagga

SEQ ID NO: 157935 - DNA, 19 bp, Artificial sequence
  SiRNA target sequence
agattagaagaagaaggag

SEQ ID NO: 157936 - DNA, 19 bp, Artificial sequence
  SiRNA target sequence
gattagaagaagaaggagc

SEQ ID NO: 157937 - DNA, 19 bp, Artificial sequence
  SiRNA target sequence
attagaagaagaaggagct

SEQ ID NO: 157938 - DNA, 19 bp, Artificial sequence
  SiRNA target sequence
ttagaagaagaaggagcta

SEQ ID NO: 157939 - DNA, 19 bp, Artificial sequence
  SiRNA target sequence
tagaagaagaaggagctac

SEQ ID NO: 157940 - DNA, 19 bp, Artificial sequence
  SiRNA target sequence
agaagaagaaggagctaca

SEQ ID NO: 157941 - DNA, 19 bp, Artificial sequence
  SiRNA target sequence
gaagaagaaggagctacag

SEQ ID NO: 157942 - DNA, 19 bp, Artificial sequence
  SiRNA target sequence
aagaagaaggagctacagt

SEQ ID NO: 157943 - DNA, 19 bp, Artificial sequence
  SiRNA target sequence
agaagaaggagctacagtg

SEQ ID NO: 157944 - DNA, 19 bp, Artificial sequence
  SiRNA target sequence
gaagaaggagctacagtga

SEQ ID NO: 157945 - DNA, 19 bp, Artificial sequence
  SiRNA target sequence
aagaaggagctacagtgac

SEQ ID NO: 157946 - DNA, 19 bp, Artificial sequence
  SiRNA target sequence
agaaggagctacagtgact

SEQ ID NO: 157947 - DNA, 19 bp, Artificial sequence
  SiRNA target sequence
gaaggagctacagtgactt

SEQ ID NO: 157948 - DNA, 19 bp, Artificial sequence
  SiRNA target sequence
aaggagctacagtgactta

SEQ ID NO: 157949 - DNA, 19 bp, Artificial sequence
  SiRNA target sequence
aggagctacagtgacttat

SEQ ID NO: 157950 - DNA, 19 bp, Artificial sequence
  SiRNA target sequence
ggagctacagtgacttatt

SEQ ID NO: 157951 - DNA, 19 bp, Artificial sequence
  SiRNA target sequence
gagctacagtgacttattt

SEQ ID NO: 157952 - DNA, 19 bp, Artificial sequence
  SiRNA target sequence
agctacagtgacttatttg

SEQ ID NO: 157953 - DNA, 19 bp, Artificial sequence
  SiRNA target sequence
gctacagtgacttatttgc

SEQ ID NO: 157954 - DNA, 19 bp, Artificial sequence
  SiRNA target sequence
ctacagtgacttatttgcc

SEQ ID NO: 157955 - DNA, 19 bp, Artificial sequence
  SiRNA target sequence
tacagtgacttatttgcct

SEQ ID NO: 157956 - DNA, 19 bp, Artificial sequence
  SiRNA target sequence
acagtgacttatttgcctg

SEQ ID NO: 157957 - DNA, 19 bp, Artificial sequence
  SiRNA target sequence
cagtgacttatttgcctgt

SEQ ID NO: 157958 - DNA, 19 bp, Artificial sequence
  SiRNA target sequence
agtgacttatttgcctgta

SEQ ID NO: 157959 - DNA, 19 bp, Artificial sequence
  SiRNA target sequence
gtgacttatttgcctgtag

SEQ ID NO: 157960 - DNA, 19 bp, Artificial sequence
  SiRNA target sequence
tgacttatttgcctgtaga

SEQ ID NO: 157961 - DNA, 19 bp, Artificial sequence
  SiRNA target sequence
gacttatttgcctgtagat

SEQ ID NO: 157962 - DNA, 19 bp, Artificial sequence
  SiRNA target sequence
acttatttgcctgtagata

SEQ ID NO: 157963 - DNA, 19 bp, Artificial sequence
  SiRNA target sequence
cttatttgcctgtagataa

SEQ ID NO: 157964 - DNA, 19 bp, Artificial sequence
  SiRNA target sequence
ttatttgcctgtagataaa

SEQ ID NO: 157965 - DNA, 19 bp, Artificial sequence
  SiRNA target sequence
tatttgcctgtagataaaa

SEQ ID NO: 157966 - DNA, 19 bp, Artificial sequence
  SiRNA target sequence
atttgcctgtagataaaaa

SEQ ID NO: 157967 - DNA, 19 bp, Artificial sequence
  SiRNA target sequence
tttgcctgtagataaaaat

SEQ ID NO: 157968 - DNA, 19 bp, Artificial sequence
  SiRNA target sequence
ttgcctgtagataaaaatg

SEQ ID NO: 157969 - DNA, 19 bp, Artificial sequence
  SiRNA target sequence
tgcctgtagataaaaatgg

SEQ ID NO: 157970 - DNA, 19 bp, Artificial sequence
  SiRNA target sequence
gcctgtagataaaaatgga

SEQ ID NO: 157971 - DNA, 19 bp, Artificial sequence
  SiRNA target sequence
cctgtagataaaaatggaa

SEQ ID NO: 157972 - DNA, 19 bp, Artificial sequence
  SiRNA target sequence
ctgtagataaaaatggaat

SEQ ID NO: 157973 - DNA, 19 bp, Artificial sequence
  SiRNA target sequence
tgtagataaaaatggaata

SEQ ID NO: 157974 - DNA, 19 bp, Artificial sequence
  SiRNA target sequence
gtagataaaaatggaatag

SEQ ID NO: 157975 - DNA, 19 bp, Artificial sequence
  SiRNA target sequence
tagataaaaatggaatagt

SEQ ID NO: 157976 - DNA, 19 bp, Artificial sequence
  SiRNA target sequence
agataaaaatggaatagta

SEQ ID NO: 157977 - DNA, 19 bp, Artificial sequence
  SiRNA target sequence
gataaaaatggaatagtag

SEQ ID NO: 157978 - DNA, 19 bp, Artificial sequence
  SiRNA target sequence
ataaaaatggaatagtaga

SEQ ID NO: 157979 - DNA, 19 bp, Artificial sequence
  SiRNA target sequence
taaaaatggaatagtagat

SEQ ID NO: 157980 - DNA, 19 bp, Artificial sequence
  SiRNA target sequence
aaaaatggaatagtagatc

SEQ ID NO: 157981 - DNA, 19 bp, Artificial sequence
  SiRNA target sequence
aaaatggaatagtagatcc

SEQ ID NO: 157982 - DNA, 19 bp, Artificial sequence
  SiRNA target sequence
aaatggaatagtagatccg

SEQ ID NO: 157983 - DNA, 19 bp, Artificial sequence
  SiRNA target sequence
aatggaatagtagatccgc

SEQ ID NO: 157984 - DNA, 19 bp, Artificial sequence
  SiRNA target sequence
atggaatagtagatccgca

SEQ ID NO: 157985 - DNA, 19 bp, Artificial sequence
  SiRNA target sequence
tggaatagtagatccgcaa

SEQ ID NO: 157986 - DNA, 19 bp, Artificial sequence
  SiRNA target sequence
ggaatagtagatccgcaat

SEQ ID NO: 157987 - DNA, 19 bp, Artificial sequence
  SiRNA target sequence
gaatagtagatccgcaatt

SEQ ID NO: 157988 - DNA, 19 bp, Artificial sequence
  SiRNA target sequence
aatagtagatccgcaatta

SEQ ID NO: 157989 - DNA, 19 bp, Artificial sequence
  SiRNA target sequence
atagtagatccgcaattaa

SEQ ID NO: 157990 - DNA, 19 bp, Artificial sequence
  SiRNA target sequence
tagtagatccgcaattaat

SEQ ID NO: 157991 - DNA, 19 bp, Artificial sequence
  SiRNA target sequence
agtagatccgcaattaata

SEQ ID NO: 157992 - DNA, 19 bp, Artificial sequence
  SiRNA target sequence
gtagatccgcaattaataa

SEQ ID NO: 157993 - DNA, 19 bp, Artificial sequence
  SiRNA target sequence
tagatccgcaattaataaa

SEQ ID NO: 157994 - DNA, 19 bp, Artificial sequence
  SiRNA target sequence
agatccgcaattaataaaa

SEQ ID NO: 157995 - DNA, 19 bp, Artificial sequence
  SiRNA target sequence
gatccgcaattaataaaaa

SEQ ID NO: 157996 - DNA, 19 bp, Artificial sequence
  SiRNA target sequence
atccgcaattaataaaaaa

SEQ ID NO: 157997 - DNA, 19 bp, Artificial sequence
  SiRNA target sequence
tccgcaattaataaaaaac

SEQ ID NO: 157998 - DNA, 19 bp, Artificial sequence
  SiRNA target sequence
ccgcaattaataaaaaaca

SEQ ID NO: 157999 - DNA, 19 bp, Artificial sequence
  SiRNA target sequence
cgcaattaataaaaaacag

SEQ ID NO: 158000 - DNA, 19 bp, Artificial sequence
  SiRNA target sequence
gcaattaataaaaaacagt

SEQ ID NO: 158001 - DNA, 19 bp, Artificial sequence
  SiRNA target sequence
caattaataaaaaacagta

SEQ ID NO: 158002 - DNA, 19 bp, Artificial sequence
  SiRNA target sequence
aattaataaaaaacagtat

SEQ ID NO: 158003 - DNA, 19 bp, Artificial sequence
  SiRNA target sequence
attaataaaaaacagtatt

SEQ ID NO: 158004 - DNA, 19 bp, Artificial sequence
  SiRNA target sequence
ttaataaaaaacagtatta

SEQ ID NO: 158005 - DNA, 19 bp, Artificial sequence
  SiRNA target sequence
taataaaaaacagtattac

SEQ ID NO: 158006 - DNA, 19 bp, Artificial sequence
  SiRNA target sequence
aataaaaaacagtattact

SEQ ID NO: 158007 - DNA, 19 bp, Artificial sequence
  SiRNA target sequence
ataaaaaacagtattacta

SEQ ID NO: 158008 - DNA, 19 bp, Artificial sequence
  SiRNA target sequence
taaaaaacagtattactaa

SEQ ID NO: 158009 - DNA, 19 bp, Artificial sequence
  SiRNA target sequence
aaaaaacagtattactaaa

SEQ ID NO: 158010 - DNA, 19 bp, Artificial sequence
  SiRNA target sequence
aaaaacagtattactaaag

SEQ ID NO: 158011 - DNA, 19 bp, Artificial sequence
  SiRNA target sequence
aaaacagtattactaaaga

SEQ ID NO: 158012 - DNA, 19 bp, Artificial sequence
  SiRNA target sequence
aaacagtattactaaagat

SEQ ID NO: 158013 - DNA, 19 bp, Artificial sequence
  SiRNA target sequence
aacagtattactaaagata

SEQ ID NO: 158014 - DNA, 19 bp, Artificial sequence
  SiRNA target sequence
acagtattactaaagatac

SEQ ID NO: 158015 - DNA, 19 bp, Artificial sequence
  SiRNA target sequence
cagtattactaaagatacc

SEQ ID NO: 158016 - DNA, 19 bp, Artificial sequence
  SiRNA target sequence
agtattactaaagataccg

SEQ ID NO: 158017 - DNA, 19 bp, Artificial sequence
  SiRNA target sequence
gtattactaaagataccgc

SEQ ID NO: 158018 - DNA, 19 bp, Artificial sequence
  SiRNA target sequence
tattactaaagataccgct

SEQ ID NO: 158019 - DNA, 19 bp, Artificial sequence
  SiRNA target sequence
attactaaagataccgctt

SEQ ID NO: 158020 - DNA, 19 bp, Artificial sequence
  SiRNA target sequence
ttactaaagataccgcttt

SEQ ID NO: 158021 - DNA, 19 bp, Artificial sequence
  SiRNA target sequence
tactaaagataccgctttg

SEQ ID NO: 158022 - DNA, 19 bp, Artificial sequence
  SiRNA target sequence
actaaagataccgctttgg

SEQ ID NO: 158023 - DNA, 19 bp, Artificial sequence
  SiRNA target sequence
ctaaagataccgctttggt

SEQ ID NO: 158024 - DNA, 19 bp, Artificial sequence
  SiRNA target sequence
taaagataccgctttggtg

SEQ ID NO: 158025 - DNA, 19 bp, Artificial sequence
  SiRNA target sequence
aaagataccgctttggtgt

SEQ ID NO: 158026 - DNA, 19 bp, Artificial sequence
  SiRNA target sequence
aagataccgctttggtgtc

SEQ ID NO: 158027 - DNA, 19 bp, Artificial sequence
  SiRNA target sequence
agataccgctttggtgtct

SEQ ID NO: 158028 - DNA, 19 bp, Artificial sequence
  SiRNA target sequence
gataccgctttggtgtctg

SEQ ID NO: 158029 - DNA, 19 bp, Artificial sequence
  SiRNA target sequence
ataccgctttggtgtctgt

SEQ ID NO: 158030 - DNA, 19 bp, Artificial sequence
  SiRNA target sequence
taccgctttggtgtctgtt

SEQ ID NO: 158031 - DNA, 19 bp, Artificial sequence
  SiRNA target sequence
accgctttggtgtctgtta

SEQ ID NO: 158032 - DNA, 19 bp, Artificial sequence
  SiRNA target sequence
ccgctttggtgtctgttat

SEQ ID NO: 158033 - DNA, 19 bp, Artificial sequence
  SiRNA target sequence
cgctttggtgtctgttatg

SEQ ID NO: 158034 - DNA, 19 bp, Artificial sequence
  SiRNA target sequence
gctttggtgtctgttatgg

SEQ ID NO: 158035 - DNA, 19 bp, Artificial sequence
  SiRNA target sequence
ctttggtgtctgttatggc

SEQ ID NO: 158036 - DNA, 19 bp, Artificial sequence
  SiRNA target sequence
tttggtgtctgttatggct

SEQ ID NO: 158037 - DNA, 19 bp, Artificial sequence
  SiRNA target sequence
ttggtgtctgttatggctg

SEQ ID NO: 158038 - DNA, 19 bp, Artificial sequence
  SiRNA target sequence
tggtgtctgttatggctgt

SEQ ID NO: 158039 - DNA, 19 bp, Artificial sequence
  SiRNA target sequence
ggtgtctgttatggctgtt

SEQ ID NO: 158040 - DNA, 19 bp, Artificial sequence
  SiRNA target sequence
gtgtctgttatggctgtta

SEQ ID NO: 158041 - DNA, 19 bp, Artificial sequence
  SiRNA target sequence
tgtctgttatggctgttaa

SEQ ID NO: 158042 - DNA, 19 bp, Artificial sequence
  SiRNA target sequence
gtctgttatggctgttaac

SEQ ID NO: 158043 - DNA, 19 bp, Artificial sequence
  SiRNA target sequence
tctgttatggctgttaaca

SEQ ID NO: 158044 - DNA, 19 bp, Artificial sequence
  SiRNA target sequence
ctgttatggctgttaacaa

SEQ ID NO: 158045 - DNA, 19 bp, Artificial sequence
  SiRNA target sequence
tgttatggctgttaacaac

SEQ ID NO: 158046 - DNA, 19 bp, Artificial sequence
  SiRNA target sequence
gttatggctgttaacaacg

SEQ ID NO: 158047 - DNA, 19 bp, Artificial sequence
  SiRNA target sequence
ttatggctgttaacaacga

SEQ ID NO: 158048 - DNA, 19 bp, Artificial sequence
  SiRNA target sequence
tatggctgttaacaacgaa

SEQ ID NO: 158049 - DNA, 19 bp, Artificial sequence
  SiRNA target sequence
atggctgttaacaacgaaa

SEQ ID NO: 158050 - DNA, 19 bp, Artificial sequence
  SiRNA target sequence
tggctgttaacaacgaaat

SEQ ID NO: 158051 - DNA, 19 bp, Artificial sequence
  SiRNA target sequence
ggctgttaacaacgaaatg

SEQ ID NO: 158052 - DNA, 19 bp, Artificial sequence
  SiRNA target sequence
gctgttaacaacgaaatgg

SEQ ID NO: 158053 - DNA, 19 bp, Artificial sequence
  SiRNA target sequence
ctgttaacaacgaaatggg

SEQ ID NO: 158054 - DNA, 19 bp, Artificial sequence
  SiRNA target sequence
tgttaacaacgaaatggga

SEQ ID NO: 158055 - DNA, 19 bp, Artificial sequence
  SiRNA target sequence
gttaacaacgaaatgggag

SEQ ID NO: 158056 - DNA, 19 bp, Artificial sequence
  SiRNA target sequence
ttaacaacgaaatgggagc

SEQ ID NO: 158057 - DNA, 19 bp, Artificial sequence
  SiRNA target sequence
taacaacgaaatgggagca

SEQ ID NO: 158058 - DNA, 19 bp, Artificial sequence
  SiRNA target sequence
aacaacgaaatgggagcaa

SEQ ID NO: 158059 - DNA, 19 bp, Artificial sequence
  SiRNA target sequence
acaacgaaatgggagcaat

SEQ ID NO: 158060 - DNA, 19 bp, Artificial sequence
  SiRNA target sequence
caacgaaatgggagcaata

SEQ ID NO: 158061 - DNA, 19 bp, Artificial sequence
  SiRNA target sequence
aacgaaatgggagcaatac

SEQ ID NO: 158062 - DNA, 19 bp, Artificial sequence
  SiRNA target sequence
acgaaatgggagcaataca

SEQ ID NO: 158063 - DNA, 19 bp, Artificial sequence
  SiRNA target sequence
cgaaatgggagcaatacaa

SEQ ID NO: 158064 - DNA, 19 bp, Artificial sequence
  SiRNA target sequence
gaaatgggagcaatacaac

SEQ ID NO: 158065 - DNA, 19 bp, Artificial sequence
  SiRNA target sequence
aaatgggagcaatacaacc

SEQ ID NO: 158066 - DNA, 19 bp, Artificial sequence
  SiRNA target sequence
aatgggagcaatacaaccg

SEQ ID NO: 158067 - DNA, 19 bp, Artificial sequence
  SiRNA target sequence
atgggagcaatacaaccgc

SEQ ID NO: 158068 - DNA, 19 bp, Artificial sequence
  SiRNA target sequence
tgggagcaatacaaccgct

SEQ ID NO: 158069 - DNA, 19 bp, Artificial sequence
  SiRNA target sequence
gggagcaatacaaccgctt

SEQ ID NO: 158070 - DNA, 19 bp, Artificial sequence
  SiRNA target sequence
ggagcaatacaaccgctta

SEQ ID NO: 158071 - DNA, 19 bp, Artificial sequence
  SiRNA target sequence
gagcaatacaaccgcttaa

SEQ ID NO: 158072 - DNA, 19 bp, Artificial sequence
  SiRNA target sequence
agcaatacaaccgcttaaa

SEQ ID NO: 158073 - DNA, 19 bp, Artificial sequence
  SiRNA target sequence
gcaatacaaccgcttaaag

SEQ ID NO: 158074 - DNA, 19 bp, Artificial sequence
  SiRNA target sequence
caatacaaccgcttaaaga

SEQ ID NO: 158075 - DNA, 19 bp, Artificial sequence
  SiRNA target sequence
aatacaaccgcttaaagaa

SEQ ID NO: 158076 - DNA, 19 bp, Artificial sequence
  SiRNA target sequence
atacaaccgcttaaagaaa

SEQ ID NO: 158077 - DNA, 19 bp, Artificial sequence
  SiRNA target sequence
tacaaccgcttaaagaaat

SEQ ID NO: 158078 - DNA, 19 bp, Artificial sequence
  SiRNA target sequence
acaaccgcttaaagaaata

SEQ ID NO: 158079 - DNA, 19 bp, Artificial sequence
  SiRNA target sequence
caaccgcttaaagaaatag

SEQ ID NO: 158080 - DNA, 19 bp, Artificial sequence
  SiRNA target sequence
aaccgcttaaagaaatagg

SEQ ID NO: 158081 - DNA, 19 bp, Artificial sequence
  SiRNA target sequence
accgcttaaagaaatagga

SEQ ID NO: 158082 - DNA, 19 bp, Artificial sequence
  SiRNA target sequence
ccgcttaaagaaataggaa

SEQ ID NO: 158083 - DNA, 19 bp, Artificial sequence
  SiRNA target sequence
cgcttaaagaaataggaag

SEQ ID NO: 158084 - DNA, 19 bp, Artificial sequence
  SiRNA target sequence
gcttaaagaaataggaaga

SEQ ID NO: 158085 - DNA, 19 bp, Artificial sequence
  SiRNA target sequence
cttaaagaaataggaagaa

SEQ ID NO: 158086 - DNA, 19 bp, Artificial sequence
  SiRNA target sequence
ttaaagaaataggaagaat

SEQ ID NO: 158087 - DNA, 19 bp, Artificial sequence
  SiRNA target sequence
taaagaaataggaagaata

SEQ ID NO: 158088 - DNA, 19 bp, Artificial sequence
  SiRNA target sequence
aaagaaataggaagaatat

SEQ ID NO: 158089 - DNA, 19 bp, Artificial sequence
  SiRNA target sequence
aagaaataggaagaatatg

SEQ ID NO: 158090 - DNA, 19 bp, Artificial sequence
  SiRNA target sequence
agaaataggaagaatatgt

SEQ ID NO: 158091 - DNA, 19 bp, Artificial sequence
  SiRNA target sequence
gaaataggaagaatatgta

SEQ ID NO: 158092 - DNA, 19 bp, Artificial sequence
  SiRNA target sequence
aaataggaagaatatgtaa

SEQ ID NO: 158093 - DNA, 19 bp, Artificial sequence
  SiRNA target sequence
aataggaagaatatgtaaa

SEQ ID NO: 158094 - DNA, 19 bp, Artificial sequence
  SiRNA target sequence
ataggaagaatatgtaaag

SEQ ID NO: 158095 - DNA, 19 bp, Artificial sequence
  SiRNA target sequence
taggaagaatatgtaaaga

SEQ ID NO: 158096 - DNA, 19 bp, Artificial sequence
  SiRNA target sequence
aggaagaatatgtaaagaa

SEQ ID NO: 158097 - DNA, 19 bp, Artificial sequence
  SiRNA target sequence
ggaagaatatgtaaagaaa

SEQ ID NO: 158098 - DNA, 19 bp, Artificial sequence
  SiRNA target sequence
gaagaatatgtaaagaaaa

SEQ ID NO: 158099 - DNA, 19 bp, Artificial sequence
  SiRNA target sequence
aagaatatgtaaagaaaat

SEQ ID NO: 158100 - DNA, 19 bp, Artificial sequence
  SiRNA target sequence
agaatatgtaaagaaaata

SEQ ID NO: 158101 - DNA, 19 bp, Artificial sequence
  SiRNA target sequence
gaatatgtaaagaaaataa

SEQ ID NO: 158102 - DNA, 19 bp, Artificial sequence
  SiRNA target sequence
aatatgtaaagaaaataat

SEQ ID NO: 158103 - DNA, 19 bp, Artificial sequence
  SiRNA target sequence
atatgtaaagaaaataata

SEQ ID NO: 158104 - DNA, 19 bp, Artificial sequence
  SiRNA target sequence
tatgtaaagaaaataatat

SEQ ID NO: 158105 - DNA, 19 bp, Artificial sequence
  SiRNA target sequence
atgtaaagaaaataatatt

SEQ ID NO: 158106 - DNA, 19 bp, Artificial sequence
  SiRNA target sequence
tgtaaagaaaataatattt

SEQ ID NO: 158107 - DNA, 19 bp, Artificial sequence
  SiRNA target sequence
gtaaagaaaataatatttt

SEQ ID NO: 158108 - DNA, 19 bp, Artificial sequence
  SiRNA target sequence
taaagaaaataatatttta

SEQ ID NO: 158109 - DNA, 19 bp, Artificial sequence
  SiRNA target sequence
aaagaaaataatattttat

SEQ ID NO: 158110 - DNA, 19 bp, Artificial sequence
  SiRNA target sequence
aagaaaataatattttatt

SEQ ID NO: 158111 - DNA, 19 bp, Artificial sequence
  SiRNA target sequence
agaaaataatattttattt

SEQ ID NO: 158112 - DNA, 19 bp, Artificial sequence
  SiRNA target sequence
gaaaataatattttatttc

SEQ ID NO: 158113 - DNA, 19 bp, Artificial sequence
  SiRNA target sequence
aaaataatattttatttca

SEQ ID NO: 158114 - DNA, 19 bp, Artificial sequence
  SiRNA target sequence
aaataatattttatttcac

SEQ ID NO: 158115 - DNA, 19 bp, Artificial sequence
  SiRNA target sequence
aataatattttatttcaca

SEQ ID NO: 158116 - DNA, 19 bp, Artificial sequence
  SiRNA target sequence
ataatattttatttcacac

SEQ ID NO: 158117 - DNA, 19 bp, Artificial sequence
  SiRNA target sequence
taatattttatttcacact

SEQ ID NO: 158118 - DNA, 19 bp, Artificial sequence
  SiRNA target sequence
aatattttatttcacactg

SEQ ID NO: 158119 - DNA, 19 bp, Artificial sequence
  SiRNA target sequence
atattttatttcacactga

SEQ ID NO: 158120 - DNA, 19 bp, Artificial sequence
  SiRNA target sequence
tattttatttcacactgat

SEQ ID NO: 158121 - DNA, 19 bp, Artificial sequence
  SiRNA target sequence
attttatttcacactgatg

SEQ ID NO: 158122 - DNA, 19 bp, Artificial sequence
  SiRNA target sequence
ttttatttcacactgatgc

SEQ ID NO: 158123 - DNA, 19 bp, Artificial sequence
  SiRNA target sequence
tttatttcacactgatgca

SEQ ID NO: 158124 - DNA, 19 bp, Artificial sequence
  SiRNA target sequence
ttatttcacactgatgcag

SEQ ID NO: 158125 - DNA, 19 bp, Artificial sequence
  SiRNA target sequence
tatttcacactgatgcagc

SEQ ID NO: 158126 - DNA, 19 bp, Artificial sequence
  SiRNA target sequence
atttcacactgatgcagca

SEQ ID NO: 158127 - DNA, 19 bp, Artificial sequence
  SiRNA target sequence
tttcacactgatgcagcac

SEQ ID NO: 158128 - DNA, 19 bp, Artificial sequence
  SiRNA target sequence
ttcacactgatgcagcaca

SEQ ID NO: 158129 - DNA, 19 bp, Artificial sequence
  SiRNA target sequence
tcacactgatgcagcacaa

SEQ ID NO: 158130 - DNA, 19 bp, Artificial sequence
  SiRNA target sequence
cacactgatgcagcacaag

SEQ ID NO: 158131 - DNA, 19 bp, Artificial sequence
  SiRNA target sequence
acactgatgcagcacaagc

SEQ ID NO: 158132 - DNA, 19 bp, Artificial sequence
  SiRNA target sequence
cactgatgcagcacaagca

SEQ ID NO: 158133 - DNA, 19 bp, Artificial sequence
  SiRNA target sequence
actgatgcagcacaagcag

SEQ ID NO: 158134 - DNA, 19 bp, Artificial sequence
  SiRNA target sequence
ctgatgcagcacaagcagt

SEQ ID NO: 158135 - DNA, 19 bp, Artificial sequence
  SiRNA target sequence
tgatgcagcacaagcagtt

SEQ ID NO: 158136 - DNA, 19 bp, Artificial sequence
  SiRNA target sequence
gatgcagcacaagcagttg

SEQ ID NO: 158137 - DNA, 19 bp, Artificial sequence
  SiRNA target sequence
atgcagcacaagcagttgg

SEQ ID NO: 158138 - DNA, 19 bp, Artificial sequence
  SiRNA target sequence
tgcagcacaagcagttggt

SEQ ID NO: 158139 - DNA, 19 bp, Artificial sequence
  SiRNA target sequence
gcagcacaagcagttggta

SEQ ID NO: 158140 - DNA, 19 bp, Artificial sequence
  SiRNA target sequence
cagcacaagcagttggtaa

SEQ ID NO: 158141 - DNA, 19 bp, Artificial sequence
  SiRNA target sequence
agcacaagcagttggtaat

SEQ ID NO: 158142 - DNA, 19 bp, Artificial sequence
  SiRNA target sequence
gcacaagcagttggtaata

SEQ ID NO: 158143 - DNA, 19 bp, Artificial sequence
  SiRNA target sequence
cacaagcagttggtaatat

SEQ ID NO: 158144 - DNA, 19 bp, Artificial sequence
  SiRNA target sequence
acaagcagttggtaatata

SEQ ID NO: 158145 - DNA, 19 bp, Artificial sequence
  SiRNA target sequence
caagcagttggtaatatag

SEQ ID NO: 158146 - DNA, 19 bp, Artificial sequence
  SiRNA target sequence
aagcagttggtaatataga

SEQ ID NO: 158147 - DNA, 19 bp, Artificial sequence
  SiRNA target sequence
agcagttggtaatatagat

SEQ ID NO: 158148 - DNA, 19 bp, Artificial sequence
  SiRNA target sequence
gcagttggtaatatagata

SEQ ID NO: 158149 - DNA, 19 bp, Artificial sequence
  SiRNA target sequence
cagttggtaatatagatat

SEQ ID NO: 158150 - DNA, 19 bp, Artificial sequence
  SiRNA target sequence
agttggtaatatagatatt

SEQ ID NO: 158151 - DNA, 19 bp, Artificial sequence
  SiRNA target sequence
gttggtaatatagatattg

SEQ ID NO: 158152 - DNA, 19 bp, Artificial sequence
  SiRNA target sequence
ttggtaatatagatattga

SEQ ID NO: 158153 - DNA, 19 bp, Artificial sequence
  SiRNA target sequence
tggtaatatagatattgat

SEQ ID NO: 158154 - DNA, 19 bp, Artificial sequence
  SiRNA target sequence
ggtaatatagatattgatg

SEQ ID NO: 158155 - DNA, 19 bp, Artificial sequence
  SiRNA target sequence
gtaatatagatattgatgt

SEQ ID NO: 158156 - DNA, 19 bp, Artificial sequence
  SiRNA target sequence
taatatagatattgatgtc

SEQ ID NO: 158157 - DNA, 19 bp, Artificial sequence
  SiRNA target sequence
aatatagatattgatgtca

SEQ ID NO: 158158 - DNA, 19 bp, Artificial sequence
  SiRNA target sequence
atatagatattgatgtcaa

SEQ ID NO: 158159 - DNA, 19 bp, Artificial sequence
  SiRNA target sequence
tatagatattgatgtcaat

SEQ ID NO: 158160 - DNA, 19 bp, Artificial sequence
  SiRNA target sequence
atagatattgatgtcaatg

SEQ ID NO: 158161 - DNA, 19 bp, Artificial sequence
  SiRNA target sequence
tagatattgatgtcaatga

SEQ ID NO: 158162 - DNA, 19 bp, Artificial sequence
  SiRNA target sequence
agatattgatgtcaatgat

SEQ ID NO: 158163 - DNA, 19 bp, Artificial sequence
  SiRNA target sequence
gatattgatgtcaatgata

SEQ ID NO: 158164 - DNA, 19 bp, Artificial sequence
  SiRNA target sequence
atattgatgtcaatgatat

SEQ ID NO: 158165 - DNA, 19 bp, Artificial sequence
  SiRNA target sequence
tattgatgtcaatgatatg

SEQ ID NO: 158166 - DNA, 19 bp, Artificial sequence
  SiRNA target sequence
attgatgtcaatgatatga

SEQ ID NO: 158167 - DNA, 19 bp, Artificial sequence
  SiRNA target sequence
ttgatgtcaatgatatgaa

SEQ ID NO: 158168 - DNA, 19 bp, Artificial sequence
  SiRNA target sequence
tgatgtcaatgatatgaat

SEQ ID NO: 158169 - DNA, 19 bp, Artificial sequence
  SiRNA target sequence
gatgtcaatgatatgaata

SEQ ID NO: 158170 - DNA, 19 bp, Artificial sequence
  SiRNA target sequence
atgtcaatgatatgaatat

SEQ ID NO: 158171 - DNA, 19 bp, Artificial sequence
  SiRNA target sequence
tgtcaatgatatgaatatt

SEQ ID NO: 158172 - DNA, 19 bp, Artificial sequence
  SiRNA target sequence
gtcaatgatatgaatattg

SEQ ID NO: 158173 - DNA, 19 bp, Artificial sequence
  SiRNA target sequence
tcaatgatatgaatattga

SEQ ID NO: 158174 - DNA, 19 bp, Artificial sequence
  SiRNA target sequence
caatgatatgaatattgat

SEQ ID NO: 158175 - DNA, 19 bp, Artificial sequence
  SiRNA target sequence
aatgatatgaatattgatt

SEQ ID NO: 158176 - DNA, 19 bp, Artificial sequence
  SiRNA target sequence
atgatatgaatattgattt

SEQ ID NO: 158177 - DNA, 19 bp, Artificial sequence
  SiRNA target sequence
tgatatgaatattgattta

SEQ ID NO: 158178 - DNA, 19 bp, Artificial sequence
  SiRNA target sequence
gatatgaatattgatttac

SEQ ID NO: 158179 - DNA, 19 bp, Artificial sequence
  SiRNA target sequence
atatgaatattgatttact

SEQ ID NO: 158180 - DNA, 19 bp, Artificial sequence
  SiRNA target sequence
tatgaatattgatttacta

SEQ ID NO: 158181 - DNA, 19 bp, Artificial sequence
  SiRNA target sequence
atgaatattgatttactaa

SEQ ID NO: 158182 - DNA, 19 bp, Artificial sequence
  SiRNA target sequence
tgaatattgatttactaag

SEQ ID NO: 158183 - DNA, 19 bp, Artificial sequence
  SiRNA target sequence
gaatattgatttactaagt

SEQ ID NO: 158184 - DNA, 19 bp, Artificial sequence
  SiRNA target sequence
aatattgatttactaagtt

SEQ ID NO: 158185 - DNA, 19 bp, Artificial sequence
  SiRNA target sequence
atattgatttactaagttt

SEQ ID NO: 158186 - DNA, 19 bp, Artificial sequence
  SiRNA target sequence
tattgatttactaagttta

SEQ ID NO: 158187 - DNA, 19 bp, Artificial sequence
  SiRNA target sequence
attgatttactaagtttat

SEQ ID NO: 158188 - DNA, 19 bp, Artificial sequence
  SiRNA target sequence
ttgatttactaagtttatc

SEQ ID NO: 158189 - DNA, 19 bp, Artificial sequence
  SiRNA target sequence
tgatttactaagtttatca

SEQ ID NO: 158190 - DNA, 19 bp, Artificial sequence
  SiRNA target sequence
gatttactaagtttatcaa

SEQ ID NO: 158191 - DNA, 19 bp, Artificial sequence
  SiRNA target sequence
atttactaagtttatcaag

SEQ ID NO: 158192 - DNA, 19 bp, Artificial sequence
  SiRNA target sequence
tttactaagtttatcaagt

SEQ ID NO: 158193 - DNA, 19 bp, Artificial sequence
  SiRNA target sequence
ttactaagtttatcaagtc

SEQ ID NO: 158194 - DNA, 19 bp, Artificial sequence
  SiRNA target sequence
tactaagtttatcaagtca

SEQ ID NO: 158195 - DNA, 19 bp, Artificial sequence
  SiRNA target sequence
actaagtttatcaagtcat

SEQ ID NO: 158196 - DNA, 19 bp, Artificial sequence
  SiRNA target sequence
ctaagtttatcaagtcata

SEQ ID NO: 158197 - DNA, 19 bp, Artificial sequence
  SiRNA target sequence
taagtttatcaagtcataa

SEQ ID NO: 158198 - DNA, 19 bp, Artificial sequence
  SiRNA target sequence
aagtttatcaagtcataaa

SEQ ID NO: 158199 - DNA, 19 bp, Artificial sequence
  SiRNA target sequence
agtttatcaagtcataaaa

SEQ ID NO: 158200 - DNA, 19 bp, Artificial sequence
  SiRNA target sequence
gtttatcaagtcataaaat

SEQ ID NO: 158201 - DNA, 19 bp, Artificial sequence
  SiRNA target sequence
tttatcaagtcataaaatt

SEQ ID NO: 158202 - DNA, 19 bp, Artificial sequence
  SiRNA target sequence
ttatcaagtcataaaattt

SEQ ID NO: 158203 - DNA, 19 bp, Artificial sequence
  SiRNA target sequence
tatcaagtcataaaattta

SEQ ID NO: 158204 - DNA, 19 bp, Artificial sequence
  SiRNA target sequence
atcaagtcataaaatttat

SEQ ID NO: 158205 - DNA, 19 bp, Artificial sequence
  SiRNA target sequence
tcaagtcataaaatttatg

SEQ ID NO: 158206 - DNA, 19 bp, Artificial sequence
  SiRNA target sequence
caagtcataaaatttatgg

SEQ ID NO: 158207 - DNA, 19 bp, Artificial sequence
  SiRNA target sequence
aagtcataaaatttatggt

SEQ ID NO: 158208 - DNA, 19 bp, Artificial sequence
  SiRNA target sequence
agtcataaaatttatggtc

SEQ ID NO: 158209 - DNA, 19 bp, Artificial sequence
  SiRNA target sequence
gtcataaaatttatggtcc

SEQ ID NO: 158210 - DNA, 19 bp, Artificial sequence
  SiRNA target sequence
tcataaaatttatggtcca

SEQ ID NO: 158211 - DNA, 19 bp, Artificial sequence
  SiRNA target sequence
cataaaatttatggtccaa

SEQ ID NO: 158212 - DNA, 19 bp, Artificial sequence
  SiRNA target sequence
ataaaatttatggtccaaa

SEQ ID NO: 158213 - DNA, 19 bp, Artificial sequence
  SiRNA target sequence
taaaatttatggtccaaaa

SEQ ID NO: 158214 - DNA, 19 bp, Artificial sequence
  SiRNA target sequence
aaaatttatggtccaaaag

SEQ ID NO: 158215 - DNA, 19 bp, Artificial sequence
  SiRNA target sequence
aaatttatggtccaaaagg

SEQ ID NO: 158216 - DNA, 19 bp, Artificial sequence
  SiRNA target sequence
aatttatggtccaaaaggt

SEQ ID NO: 158217 - DNA, 19 bp, Artificial sequence
  SiRNA target sequence
atttatggtccaaaaggtg

SEQ ID NO: 158218 - DNA, 19 bp, Artificial sequence
  SiRNA target sequence
tttatggtccaaaaggtgt

SEQ ID NO: 158219 - DNA, 19 bp, Artificial sequence
  SiRNA target sequence
ttatggtccaaaaggtgtt

SEQ ID NO: 158220 - DNA, 19 bp, Artificial sequence
  SiRNA target sequence
tatggtccaaaaggtgttg

SEQ ID NO: 158221 - DNA, 19 bp, Artificial sequence
  SiRNA target sequence
atggtccaaaaggtgttgg

SEQ ID NO: 158222 - DNA, 19 bp, Artificial sequence
  SiRNA target sequence
tggtccaaaaggtgttggt

SEQ ID NO: 158223 - DNA, 19 bp, Artificial sequence
  SiRNA target sequence
ggtccaaaaggtgttggtg

SEQ ID NO: 158224 - DNA, 19 bp, Artificial sequence
  SiRNA target sequence
gtccaaaaggtgttggtgc

SEQ ID NO: 158225 - DNA, 19 bp, Artificial sequence
  SiRNA target sequence
tccaaaaggtgttggtgcc

SEQ ID NO: 158226 - DNA, 19 bp, Artificial sequence
  SiRNA target sequence
ccaaaaggtgttggtgcct

SEQ ID NO: 158227 - DNA, 19 bp, Artificial sequence
  SiRNA target sequence
caaaaggtgttggtgcctt

SEQ ID NO: 158228 - DNA, 19 bp, Artificial sequence
  SiRNA target sequence
aaaaggtgttggtgcctta

SEQ ID NO: 158229 - DNA, 19 bp, Artificial sequence
  SiRNA target sequence
aaaggtgttggtgccttat

SEQ ID NO: 158230 - DNA, 19 bp, Artificial sequence
  SiRNA target sequence
aaggtgttggtgccttata

SEQ ID NO: 158231 - DNA, 19 bp, Artificial sequence
  SiRNA target sequence
aggtgttggtgccttatac

SEQ ID NO: 158232 - DNA, 19 bp, Artificial sequence
  SiRNA target sequence
ggtgttggtgccttatacg

SEQ ID NO: 158233 - DNA, 19 bp, Artificial sequence
  SiRNA target sequence
gtgttggtgccttatacgt

SEQ ID NO: 158234 - DNA, 19 bp, Artificial sequence
  SiRNA target sequence
tgttggtgccttatacgtc

SEQ ID NO: 158235 - DNA, 19 bp, Artificial sequence
  SiRNA target sequence
gttggtgccttatacgtca

SEQ ID NO: 158236 - DNA, 19 bp, Artificial sequence
  SiRNA target sequence
ttggtgccttatacgtcag

SEQ ID NO: 158237 - DNA, 19 bp, Artificial sequence
  SiRNA target sequence
tggtgccttatacgtcaga

SEQ ID NO: 158238 - DNA, 19 bp, Artificial sequence
  SiRNA target sequence
ggtgccttatacgtcagaa

SEQ ID NO: 158239 - DNA, 19 bp, Artificial sequence
  SiRNA target sequence
gtgccttatacgtcagaag

SEQ ID NO: 158240 - DNA, 19 bp, Artificial sequence
  SiRNA target sequence
tgccttatacgtcagaaga

SEQ ID NO: 158241 - DNA, 19 bp, Artificial sequence
  SiRNA target sequence
gccttatacgtcagaagaa

SEQ ID NO: 158242 - DNA, 19 bp, Artificial sequence
  SiRNA target sequence
ccttatacgtcagaagaag

SEQ ID NO: 158243 - DNA, 19 bp, Artificial sequence
  SiRNA target sequence
cttatacgtcagaagaagg

SEQ ID NO: 158244 - DNA, 19 bp, Artificial sequence
  SiRNA target sequence
ttatacgtcagaagaaggc

SEQ ID NO: 158245 - DNA, 19 bp, Artificial sequence
  SiRNA target sequence
tatacgtcagaagaaggcc

SEQ ID NO: 158246 - DNA, 19 bp, Artificial sequence
  SiRNA target sequence
atacgtcagaagaaggcct

SEQ ID NO: 158247 - DNA, 19 bp, Artificial sequence
  SiRNA target sequence
tacgtcagaagaaggccta

SEQ ID NO: 158248 - DNA, 19 bp, Artificial sequence
  SiRNA target sequence
acgtcagaagaaggcctag

SEQ ID NO: 158249 - DNA, 19 bp, Artificial sequence
  SiRNA target sequence
cgtcagaagaaggcctagg

SEQ ID NO: 158250 - DNA, 19 bp, Artificial sequence
  SiRNA target sequence
gtcagaagaaggcctaggg

SEQ ID NO: 158251 - DNA, 19 bp, Artificial sequence
  SiRNA target sequence
tcagaagaaggcctagggt

SEQ ID NO: 158252 - DNA, 19 bp, Artificial sequence
  SiRNA target sequence
cagaagaaggcctagggtg

SEQ ID NO: 158253 - DNA, 19 bp, Artificial sequence
  SiRNA target sequence
agaagaaggcctagggtga

SEQ ID NO: 158254 - DNA, 19 bp, Artificial sequence
  SiRNA target sequence
gaagaaggcctagggtgag

SEQ ID NO: 158255 - DNA, 19 bp, Artificial sequence
  SiRNA target sequence
aagaaggcctagggtgaga

SEQ ID NO: 158256 - DNA, 19 bp, Artificial sequence
  SiRNA target sequence
agaaggcctagggtgagaa

SEQ ID NO: 158257 - DNA, 19 bp, Artificial sequence
  SiRNA target sequence
gaaggcctagggtgagaat

SEQ ID NO: 158258 - DNA, 19 bp, Artificial sequence
  SiRNA target sequence
aaggcctagggtgagaatg

SEQ ID NO: 158259 - DNA, 19 bp, Artificial sequence
  SiRNA target sequence
aggcctagggtgagaatgt

SEQ ID NO: 158260 - DNA, 19 bp, Artificial sequence
  SiRNA target sequence
ggcctagggtgagaatgtt

SEQ ID NO: 158261 - DNA, 19 bp, Artificial sequence
  SiRNA target sequence
gcctagggtgagaatgtta

SEQ ID NO: 158262 - DNA, 19 bp, Artificial sequence
  SiRNA target sequence
cctagggtgagaatgttac

SEQ ID NO: 158263 - DNA, 19 bp, Artificial sequence
  SiRNA target sequence
ctagggtgagaatgttacc

SEQ ID NO: 158264 - DNA, 19 bp, Artificial sequence
  SiRNA target sequence
tagggtgagaatgttacca

SEQ ID NO: 158265 - DNA, 19 bp, Artificial sequence
  SiRNA target sequence
agggtgagaatgttaccac

SEQ ID NO: 158266 - DNA, 19 bp, Artificial sequence
  SiRNA target sequence
gggtgagaatgttaccact

SEQ ID NO: 158267 - DNA, 19 bp, Artificial sequence
  SiRNA target sequence
ggtgagaatgttaccactt

SEQ ID NO: 158268 - DNA, 19 bp, Artificial sequence
  SiRNA target sequence
gtgagaatgttaccacttt

SEQ ID NO: 158269 - DNA, 19 bp, Artificial sequence
  SiRNA target sequence
tgagaatgttaccactttt

SEQ ID NO: 158270 - DNA, 19 bp, Artificial sequence
  SiRNA target sequence
gagaatgttaccacttttt

SEQ ID NO: 158271 - DNA, 19 bp, Artificial sequence
  SiRNA target sequence
agaatgttaccacttttta

SEQ ID NO: 158272 - DNA, 19 bp, Artificial sequence
  SiRNA target sequence
gaatgttaccactttttaa

SEQ ID NO: 158273 - DNA, 19 bp, Artificial sequence
  SiRNA target sequence
aatgttaccactttttaat

SEQ ID NO: 158274 - DNA, 19 bp, Artificial sequence
  SiRNA target sequence
atgttaccactttttaatg

SEQ ID NO: 158275 - DNA, 19 bp, Artificial sequence
  SiRNA target sequence
tgttaccactttttaatgg

SEQ ID NO: 158276 - DNA, 19 bp, Artificial sequence
  SiRNA target sequence
gttaccactttttaatggt

SEQ ID NO: 158277 - DNA, 19 bp, Artificial sequence
  SiRNA target sequence
ttaccactttttaatggtg

SEQ ID NO: 158278 - DNA, 19 bp, Artificial sequence
  SiRNA target sequence
taccactttttaatggtgg

SEQ ID NO: 158279 - DNA, 19 bp, Artificial sequence
  SiRNA target sequence
accactttttaatggtggt

SEQ ID NO: 158280 - DNA, 19 bp, Artificial sequence
  SiRNA target sequence
ccactttttaatggtggtg

SEQ ID NO: 158281 - DNA, 19 bp, Artificial sequence
  SiRNA target sequence
cactttttaatggtggtgg

SEQ ID NO: 158282 - DNA, 19 bp, Artificial sequence
  SiRNA target sequence
actttttaatggtggtgga

SEQ ID NO: 158283 - DNA, 19 bp, Artificial sequence
  SiRNA target sequence
ctttttaatggtggtggac

SEQ ID NO: 158284 - DNA, 19 bp, Artificial sequence
  SiRNA target sequence
tttttaatggtggtggaca

SEQ ID NO: 158285 - DNA, 19 bp, Artificial sequence
  SiRNA target sequence
ttttaatggtggtggacaa

SEQ ID NO: 158286 - DNA, 19 bp, Artificial sequence
  SiRNA target sequence
tttaatggtggtggacaag

SEQ ID NO: 158287 - DNA, 19 bp, Artificial sequence
  SiRNA target sequence
ttaatggtggtggacaaga

SEQ ID NO: 158288 - DNA, 19 bp, Artificial sequence
  SiRNA target sequence
taatggtggtggacaagaa

SEQ ID NO: 158289 - DNA, 19 bp, Artificial sequence
  SiRNA target sequence
aatggtggtggacaagaaa

SEQ ID NO: 158290 - DNA, 19 bp, Artificial sequence
  SiRNA target sequence
atggtggtggacaagaaag

SEQ ID NO: 158291 - DNA, 19 bp, Artificial sequence
  SiRNA target sequence
tggtggtggacaagaaaga

SEQ ID NO: 158292 - DNA, 19 bp, Artificial sequence
  SiRNA target sequence
ggtggtggacaagaaagag

SEQ ID NO: 158293 - DNA, 19 bp, Artificial sequence
  SiRNA target sequence
gtggtggacaagaaagagg

SEQ ID NO: 158294 - DNA, 19 bp, Artificial sequence
  SiRNA target sequence
tggtggacaagaaagagga

SEQ ID NO: 158295 - DNA, 19 bp, Artificial sequence
  SiRNA target sequence
ggtggacaagaaagaggat

SEQ ID NO: 158296 - DNA, 19 bp, Artificial sequence
  SiRNA target sequence
gtggacaagaaagaggatt

SEQ ID NO: 158297 - DNA, 19 bp, Artificial sequence
  SiRNA target sequence
tggacaagaaagaggatta

SEQ ID NO: 158298 - DNA, 19 bp, Artificial sequence
  SiRNA target sequence
ggacaagaaagaggattaa

SEQ ID NO: 158299 - DNA, 19 bp, Artificial sequence
  SiRNA target sequence
gacaagaaagaggattaag

SEQ ID NO: 158300 - DNA, 19 bp, Artificial sequence
  SiRNA target sequence
acaagaaagaggattaaga

SEQ ID NO: 158301 - DNA, 19 bp, Artificial sequence
  SiRNA target sequence
caagaaagaggattaagaa

SEQ ID NO: 158302 - DNA, 19 bp, Artificial sequence
  SiRNA target sequence
aagaaagaggattaagaag

SEQ ID NO: 158303 - DNA, 19 bp, Artificial sequence
  SiRNA target sequence
agaaagaggattaagaagt

SEQ ID NO: 158304 - DNA, 19 bp, Artificial sequence
  SiRNA target sequence
gaaagaggattaagaagtg

SEQ ID NO: 158305 - DNA, 19 bp, Artificial sequence
  SiRNA target sequence
aaagaggattaagaagtgg

SEQ ID NO: 158306 - DNA, 19 bp, Artificial sequence
  SiRNA target sequence
aagaggattaagaagtggg

SEQ ID NO: 158307 - DNA, 19 bp, Artificial sequence
  SiRNA target sequence
agaggattaagaagtggga

SEQ ID NO: 158308 - DNA, 19 bp, Artificial sequence
  SiRNA target sequence
gaggattaagaagtgggac

SEQ ID NO: 158309 - DNA, 19 bp, Artificial sequence
  SiRNA target sequence
aggattaagaagtgggaca

SEQ ID NO: 158310 - DNA, 19 bp, Artificial sequence
  SiRNA target sequence
ggattaagaagtgggacaa

SEQ ID NO: 158311 - DNA, 19 bp, Artificial sequence
  SiRNA target sequence
gattaagaagtgggacaac

SEQ ID NO: 158312 - DNA, 19 bp, Artificial sequence
  SiRNA target sequence
attaagaagtgggacaact

SEQ ID NO: 158313 - DNA, 19 bp, Artificial sequence
  SiRNA target sequence
ttaagaagtgggacaactt

SEQ ID NO: 158314 - DNA, 19 bp, Artificial sequence
  SiRNA target sequence
taagaagtgggacaacttc

SEQ ID NO: 158315 - DNA, 19 bp, Artificial sequence
  SiRNA target sequence
aagaagtgggacaacttct

SEQ ID NO: 158316 - DNA, 19 bp, Artificial sequence
  SiRNA target sequence
agaagtgggacaacttctc

SEQ ID NO: 158317 - DNA, 19 bp, Artificial sequence
  SiRNA target sequence
gaagtgggacaacttctcc

SEQ ID NO: 158318 - DNA, 19 bp, Artificial sequence
  SiRNA target sequence
aagtgggacaacttctcca

SEQ ID NO: 158319 - DNA, 19 bp, Artificial sequence
  SiRNA target sequence
agtgggacaacttctccac

SEQ ID NO: 158320 - DNA, 19 bp, Artificial sequence
  SiRNA target sequence
gtgggacaacttctccacc

SEQ ID NO: 158321 - DNA, 19 bp, Artificial sequence
  SiRNA target sequence
tgggacaacttctccacct

SEQ ID NO: 158322 - DNA, 19 bp, Artificial sequence
  SiRNA target sequence
gggacaacttctccacctt

SEQ ID NO: 158323 - DNA, 19 bp, Artificial sequence
  SiRNA target sequence
ggacaacttctccaccttt

SEQ ID NO: 158324 - DNA, 19 bp, Artificial sequence
  SiRNA target sequence
gacaacttctccaccttta

SEQ ID NO: 158325 - DNA, 19 bp, Artificial sequence
  SiRNA target sequence
acaacttctccacctttag

SEQ ID NO: 158326 - DNA, 19 bp, Artificial sequence
  SiRNA target sequence
caacttctccacctttagt

SEQ ID NO: 158327 - DNA, 19 bp, Artificial sequence
  SiRNA target sequence
aacttctccacctttagtt

SEQ ID NO: 158328 - DNA, 19 bp, Artificial sequence
  SiRNA target sequence
acttctccacctttagttg

SEQ ID NO: 158329 - DNA, 19 bp, Artificial sequence
  SiRNA target sequence
cttctccacctttagttgt

SEQ ID NO: 158330 - DNA, 19 bp, Artificial sequence
  SiRNA target sequence
ttctccacctttagttgtt

SEQ ID NO: 158331 - DNA, 19 bp, Artificial sequence
  SiRNA target sequence
tctccacctttagttgttg

SEQ ID NO: 158332 - DNA, 19 bp, Artificial sequence
  SiRNA target sequence
ctccacctttagttgttgg

SEQ ID NO: 158333 - DNA, 19 bp, Artificial sequence
  SiRNA target sequence
tccacctttagttgttgga

SEQ ID NO: 158334 - DNA, 19 bp, Artificial sequence
  SiRNA target sequence
ccacctttagttgttggat

SEQ ID NO: 158335 - DNA, 19 bp, Artificial sequence
  SiRNA target sequence
cacctttagttgttggatt

SEQ ID NO: 158336 - DNA, 19 bp, Artificial sequence
  SiRNA target sequence
acctttagttgttggatta

SEQ ID NO: 158337 - DNA, 19 bp, Artificial sequence
  SiRNA target sequence
cctttagttgttggattag

SEQ ID NO: 158338 - DNA, 19 bp, Artificial sequence
  SiRNA target sequence
ctttagttgttggattagg

SEQ ID NO: 158339 - DNA, 19 bp, Artificial sequence
  SiRNA target sequence
tttagttgttggattaggc

SEQ ID NO: 158340 - DNA, 19 bp, Artificial sequence
  SiRNA target sequence
ttagttgttggattaggca

SEQ ID NO: 158341 - DNA, 19 bp, Artificial sequence
  SiRNA target sequence
tagttgttggattaggcaa

SEQ ID NO: 158342 - DNA, 19 bp, Artificial sequence
  SiRNA target sequence
agttgttggattaggcaaa

SEQ ID NO: 158343 - DNA, 19 bp, Artificial sequence
  SiRNA target sequence
gttgttggattaggcaaag

SEQ ID NO: 158344 - DNA, 19 bp, Artificial sequence
  SiRNA target sequence
ttgttggattaggcaaagc

SEQ ID NO: 158345 - DNA, 19 bp, Artificial sequence
  SiRNA target sequence
tgttggattaggcaaagct

SEQ ID NO: 158346 - DNA, 19 bp, Artificial sequence
  SiRNA target sequence
gttggattaggcaaagctg

SEQ ID NO: 158347 - DNA, 19 bp, Artificial sequence
  SiRNA target sequence
ttggattaggcaaagctgc

SEQ ID NO: 158348 - DNA, 19 bp, Artificial sequence
  SiRNA target sequence
tggattaggcaaagctgct

SEQ ID NO: 158349 - DNA, 19 bp, Artificial sequence
  SiRNA target sequence
ggattaggcaaagctgctg

SEQ ID NO: 158350 - DNA, 19 bp, Artificial sequence
  SiRNA target sequence
gattaggcaaagctgctga

SEQ ID NO: 158351 - DNA, 19 bp, Artificial sequence
  SiRNA target sequence
attaggcaaagctgctgag

SEQ ID NO: 158352 - DNA, 19 bp, Artificial sequence
  SiRNA target sequence
ttaggcaaagctgctgaga

SEQ ID NO: 158353 - DNA, 19 bp, Artificial sequence
  SiRNA target sequence
taggcaaagctgctgagat

SEQ ID NO: 158354 - DNA, 19 bp, Artificial sequence
  SiRNA target sequence
aggcaaagctgctgagata

SEQ ID NO: 158355 - DNA, 19 bp, Artificial sequence
  SiRNA target sequence
ggcaaagctgctgagatat

SEQ ID NO: 158356 - DNA, 19 bp, Artificial sequence
  SiRNA target sequence
gcaaagctgctgagatatg

SEQ ID NO: 158357 - DNA, 19 bp, Artificial sequence
  SiRNA target sequence
caaagctgctgagatatgc

SEQ ID NO: 158358 - DNA, 19 bp, Artificial sequence
  SiRNA target sequence
aaagctgctgagatatgct

SEQ ID NO: 158359 - DNA, 19 bp, Artificial sequence
  SiRNA target sequence
aagctgctgagatatgctc

SEQ ID NO: 158360 - DNA, 19 bp, Artificial sequence
  SiRNA target sequence
agctgctgagatatgctct

SEQ ID NO: 158361 - DNA, 19 bp, Artificial sequence
  SiRNA target sequence
gctgctgagatatgctctc

SEQ ID NO: 158362 - DNA, 19 bp, Artificial sequence
  SiRNA target sequence
ctgctgagatatgctctca

SEQ ID NO: 158363 - DNA, 19 bp, Artificial sequence
  SiRNA target sequence
tgctgagatatgctctcag

SEQ ID NO: 158364 - DNA, 19 bp, Artificial sequence
  SiRNA target sequence
gctgagatatgctctcagg

SEQ ID NO: 158365 - DNA, 19 bp, Artificial sequence
  SiRNA target sequence
ctgagatatgctctcagga

SEQ ID NO: 158366 - DNA, 19 bp, Artificial sequence
  SiRNA target sequence
tgagatatgctctcaggag

SEQ ID NO: 158367 - DNA, 19 bp, Artificial sequence
  SiRNA target sequence
gagatatgctctcaggaga

SEQ ID NO: 158368 - DNA, 19 bp, Artificial sequence
  SiRNA target sequence
agatatgctctcaggagat

SEQ ID NO: 158369 - DNA, 19 bp, Artificial sequence
  SiRNA target sequence
gatatgctctcaggagatg

SEQ ID NO: 158370 - DNA, 19 bp, Artificial sequence
  SiRNA target sequence
atatgctctcaggagatgc

SEQ ID NO: 158371 - DNA, 19 bp, Artificial sequence
  SiRNA target sequence
tatgctctcaggagatgcg

SEQ ID NO: 158372 - DNA, 19 bp, Artificial sequence
  SiRNA target sequence
atgctctcaggagatgcgt

SEQ ID NO: 158373 - DNA, 19 bp, Artificial sequence
  SiRNA target sequence
tgctctcaggagatgcgta

SEQ ID NO: 158374 - DNA, 19 bp, Artificial sequence
  SiRNA target sequence
gctctcaggagatgcgtaa

SEQ ID NO: 158375 - DNA, 19 bp, Artificial sequence
  SiRNA target sequence
ctctcaggagatgcgtaag

SEQ ID NO: 158376 - DNA, 19 bp, Artificial sequence
  SiRNA target sequence
tctcaggagatgcgtaagg

SEQ ID NO: 158377 - DNA, 19 bp, Artificial sequence
  SiRNA target sequence
ctcaggagatgcgtaagga

SEQ ID NO: 158378 - DNA, 19 bp, Artificial sequence
  SiRNA target sequence
tcaggagatgcgtaaggac

SEQ ID NO: 158379 - DNA, 19 bp, Artificial sequence
  SiRNA target sequence
caggagatgcgtaaggact

SEQ ID NO: 158380 - DNA, 19 bp, Artificial sequence
  SiRNA target sequence
aggagatgcgtaaggacta

SEQ ID NO: 158381 - DNA, 19 bp, Artificial sequence
  SiRNA target sequence
ggagatgcgtaaggactat

SEQ ID NO: 158382 - DNA, 19 bp, Artificial sequence
  SiRNA target sequence
gagatgcgtaaggactatg

SEQ ID NO: 158383 - DNA, 19 bp, Artificial sequence
  SiRNA target sequence
agatgcgtaaggactatga

SEQ ID NO: 158384 - DNA, 19 bp, Artificial sequence
  SiRNA target sequence
gatgcgtaaggactatgaa

SEQ ID NO: 158385 - DNA, 19 bp, Artificial sequence
  SiRNA target sequence
atgcgtaaggactatgaat

SEQ ID NO: 158386 - DNA, 19 bp, Artificial sequence
  SiRNA target sequence
tgcgtaaggactatgaata

SEQ ID NO: 158387 - DNA, 19 bp, Artificial sequence
  SiRNA target sequence
gcgtaaggactatgaatat

SEQ ID NO: 158388 - DNA, 19 bp, Artificial sequence
  SiRNA target sequence
cgtaaggactatgaatata

SEQ ID NO: 158389 - DNA, 19 bp, Artificial sequence
  SiRNA target sequence
gtaaggactatgaatatat

SEQ ID NO: 158390 - DNA, 19 bp, Artificial sequence
  SiRNA target sequence
taaggactatgaatatata

SEQ ID NO: 158391 - DNA, 19 bp, Artificial sequence
  SiRNA target sequence
aaggactatgaatatatac

SEQ ID NO: 158392 - DNA, 19 bp, Artificial sequence
  SiRNA target sequence
aggactatgaatatataca

SEQ ID NO: 158393 - DNA, 19 bp, Artificial sequence
  SiRNA target sequence
ggactatgaatatatacaa

SEQ ID NO: 158394 - DNA, 19 bp, Artificial sequence
  SiRNA target sequence
gactatgaatatatacaaa

SEQ ID NO: 158395 - DNA, 19 bp, Artificial sequence
  SiRNA target sequence
actatgaatatatacaaaa

SEQ ID NO: 158396 - DNA, 19 bp, Artificial sequence
  SiRNA target sequence
ctatgaatatatacaaaaa

SEQ ID NO: 158397 - DNA, 19 bp, Artificial sequence
  SiRNA target sequence
tatgaatatatacaaaaat

SEQ ID NO: 158398 - DNA, 19 bp, Artificial sequence
  SiRNA target sequence
atgaatatatacaaaaatt

SEQ ID NO: 158399 - DNA, 19 bp, Artificial sequence
  SiRNA target sequence
tgaatatatacaaaaatta

SEQ ID NO: 158400 - DNA, 19 bp, Artificial sequence
  SiRNA target sequence
gaatatatacaaaaattat

SEQ ID NO: 158401 - DNA, 19 bp, Artificial sequence
  SiRNA target sequence
aatatatacaaaaattatc

SEQ ID NO: 158402 - DNA, 19 bp, Artificial sequence
  SiRNA target sequence
atatatacaaaaattatcg

SEQ ID NO: 158403 - DNA, 19 bp, Artificial sequence
  SiRNA target sequence
tatatacaaaaattatcgg

SEQ ID NO: 158404 - DNA, 19 bp, Artificial sequence
  SiRNA target sequence
atatacaaaaattatcgga

SEQ ID NO: 158405 - DNA, 19 bp, Artificial sequence
  SiRNA target sequence
tatacaaaaattatcggat

SEQ ID NO: 158406 - DNA, 19 bp, Artificial sequence
  SiRNA target sequence
atacaaaaattatcggata

SEQ ID NO: 158407 - DNA, 19 bp, Artificial sequence
  SiRNA target sequence
tacaaaaattatcggataa

SEQ ID NO: 158408 - DNA, 19 bp, Artificial sequence
  SiRNA target sequence
acaaaaattatcggataaa

SEQ ID NO: 158409 - DNA, 19 bp, Artificial sequence
  SiRNA target sequence
caaaaattatcggataaac

SEQ ID NO: 158410 - DNA, 19 bp, Artificial sequence
  SiRNA target sequence
aaaaattatcggataaact

SEQ ID NO: 158411 - DNA, 19 bp, Artificial sequence
  SiRNA target sequence
aaaattatcggataaacta

SEQ ID NO: 158412 - DNA, 19 bp, Artificial sequence
  SiRNA target sequence
aaattatcggataaactaa

SEQ ID NO: 158413 - DNA, 19 bp, Artificial sequence
  SiRNA target sequence
aattatcggataaactaaa

SEQ ID NO: 158414 - DNA, 19 bp, Artificial sequence
  SiRNA target sequence
attatcggataaactaaaa

SEQ ID NO: 158415 - DNA, 19 bp, Artificial sequence
  SiRNA target sequence
ttatcggataaactaaaaa

SEQ ID NO: 158416 - DNA, 19 bp, Artificial sequence
  SiRNA target sequence
tatcggataaactaaaaaa

SEQ ID NO: 158417 - DNA, 19 bp, Artificial sequence
  SiRNA target sequence
atcggataaactaaaaaat

SEQ ID NO: 158418 - DNA, 19 bp, Artificial sequence
  SiRNA target sequence
tcggataaactaaaaaatc

SEQ ID NO: 158419 - DNA, 19 bp, Artificial sequence
  SiRNA target sequence
cggataaactaaaaaatcg

SEQ ID NO: 158420 - DNA, 19 bp, Artificial sequence
  SiRNA target sequence
ggataaactaaaaaatcgc

SEQ ID NO: 158421 - DNA, 19 bp, Artificial sequence
  SiRNA target sequence
gataaactaaaaaatcgca

SEQ ID NO: 158422 - DNA, 19 bp, Artificial sequence
  SiRNA target sequence
ataaactaaaaaatcgcat

SEQ ID NO: 158423 - DNA, 19 bp, Artificial sequence
  SiRNA target sequence
taaactaaaaaatcgcatc

SEQ ID NO: 158424 - DNA, 19 bp, Artificial sequence
  SiRNA target sequence
aaactaaaaaatcgcatca

SEQ ID NO: 158425 - DNA, 19 bp, Artificial sequence
  SiRNA target sequence
aactaaaaaatcgcatcaa

SEQ ID NO: 158426 - DNA, 19 bp, Artificial sequence
  SiRNA target sequence
actaaaaaatcgcatcaaa

SEQ ID NO: 158427 - DNA, 19 bp, Artificial sequence
  SiRNA target sequence
ctaaaaaatcgcatcaaaa

SEQ ID NO: 158428 - DNA, 19 bp, Artificial sequence
  SiRNA target sequence
taaaaaatcgcatcaaaac

SEQ ID NO: 158429 - DNA, 19 bp, Artificial sequence
  SiRNA target sequence
aaaaaatcgcatcaaaacg

SEQ ID NO: 158430 - DNA, 19 bp, Artificial sequence
  SiRNA target sequence
aaaaatcgcatcaaaacga

SEQ ID NO: 158431 - DNA, 19 bp, Artificial sequence
  SiRNA target sequence
aaaatcgcatcaaaacgaa

SEQ ID NO: 158432 - DNA, 19 bp, Artificial sequence
  SiRNA target sequence
aaatcgcatcaaaacgaat

SEQ ID NO: 158433 - DNA, 19 bp, Artificial sequence
  SiRNA target sequence
aatcgcatcaaaacgaatg

SEQ ID NO: 158434 - DNA, 19 bp, Artificial sequence
  SiRNA target sequence
atcgcatcaaaacgaatgt

SEQ ID NO: 158435 - DNA, 19 bp, Artificial sequence
  SiRNA target sequence
tcgcatcaaaacgaatgta

SEQ ID NO: 158436 - DNA, 19 bp, Artificial sequence
  SiRNA target sequence
cgcatcaaaacgaatgtag

SEQ ID NO: 158437 - DNA, 19 bp, Artificial sequence
  SiRNA target sequence
gcatcaaaacgaatgtaga

SEQ ID NO: 158438 - DNA, 19 bp, Artificial sequence
  SiRNA target sequence
catcaaaacgaatgtagaa

SEQ ID NO: 158439 - DNA, 19 bp, Artificial sequence
  SiRNA target sequence
atcaaaacgaatgtagaaa

SEQ ID NO: 158440 - DNA, 19 bp, Artificial sequence
  SiRNA target sequence
tcaaaacgaatgtagaaaa

SEQ ID NO: 158441 - DNA, 19 bp, Artificial sequence
  SiRNA target sequence
caaaacgaatgtagaaaat

SEQ ID NO: 158442 - DNA, 19 bp, Artificial sequence
  SiRNA target sequence
aaaacgaatgtagaaaatg

SEQ ID NO: 158443 - DNA, 19 bp, Artificial sequence
  SiRNA target sequence
aaacgaatgtagaaaatgt

SEQ ID NO: 158444 - DNA, 19 bp, Artificial sequence
  SiRNA target sequence
aacgaatgtagaaaatgtt

SEQ ID NO: 158445 - DNA, 19 bp, Artificial sequence
  SiRNA target sequence
acgaatgtagaaaatgttg

SEQ ID NO: 158446 - DNA, 19 bp, Artificial sequence
  SiRNA target sequence
cgaatgtagaaaatgttgt

SEQ ID NO: 158447 - DNA, 19 bp, Artificial sequence
  SiRNA target sequence
gaatgtagaaaatgttgtt

SEQ ID NO: 158448 - DNA, 19 bp, Artificial sequence
  SiRNA target sequence
aatgtagaaaatgttgtta

SEQ ID NO: 158449 - DNA, 19 bp, Artificial sequence
  SiRNA target sequence
atgtagaaaatgttgttat

SEQ ID NO: 158450 - DNA, 19 bp, Artificial sequence
  SiRNA target sequence
tgtagaaaatgttgttatt

SEQ ID NO: 158451 - DNA, 19 bp, Artificial sequence
  SiRNA target sequence
gtagaaaatgttgttatta

SEQ ID NO: 158452 - DNA, 19 bp, Artificial sequence
  SiRNA target sequence
tagaaaatgttgttattaa

SEQ ID NO: 158453 - DNA, 19 bp, Artificial sequence
  SiRNA target sequence
agaaaatgttgttattaac

SEQ ID NO: 158454 - DNA, 19 bp, Artificial sequence
  SiRNA target sequence
gaaaatgttgttattaacg

SEQ ID NO: 158455 - DNA, 19 bp, Artificial sequence
  SiRNA target sequence
aaaatgttgttattaacgg

SEQ ID NO: 158456 - DNA, 19 bp, Artificial sequence
  SiRNA target sequence
aaatgttgttattaacggc

SEQ ID NO: 158457 - DNA, 19 bp, Artificial sequence
  SiRNA target sequence
aatgttgttattaacggcg

SEQ ID NO: 158458 - DNA, 19 bp, Artificial sequence
  SiRNA target sequence
atgttgttattaacggcga

SEQ ID NO: 158459 - DNA, 19 bp, Artificial sequence
  SiRNA target sequence
tgttgttattaacggcgat

SEQ ID NO: 158460 - DNA, 19 bp, Artificial sequence
  SiRNA target sequence
gttgttattaacggcgatg

SEQ ID NO: 158461 - DNA, 19 bp, Artificial sequence
  SiRNA target sequence
ttgttattaacggcgatga

SEQ ID NO: 158462 - DNA, 19 bp, Artificial sequence
  SiRNA target sequence
tgttattaacggcgatgat

SEQ ID NO: 158463 - DNA, 19 bp, Artificial sequence
  SiRNA target sequence
gttattaacggcgatgatt

SEQ ID NO: 158464 - DNA, 19 bp, Artificial sequence
  SiRNA target sequence
ttattaacggcgatgattc

SEQ ID NO: 158465 - DNA, 19 bp, Artificial sequence
  SiRNA target sequence
tattaacggcgatgattct

SEQ ID NO: 158466 - DNA, 19 bp, Artificial sequence
  SiRNA target sequence
attaacggcgatgattcta

SEQ ID NO: 158467 - DNA, 19 bp, Artificial sequence
  SiRNA target sequence
ttaacggcgatgattctaa

SEQ ID NO: 158468 - DNA, 19 bp, Artificial sequence
  SiRNA target sequence
taacggcgatgattctaag

SEQ ID NO: 158469 - DNA, 19 bp, Artificial sequence
  SiRNA target sequence
aacggcgatgattctaaga

SEQ ID NO: 158470 - DNA, 19 bp, Artificial sequence
  SiRNA target sequence
acggcgatgattctaagac

SEQ ID NO: 158471 - DNA, 19 bp, Artificial sequence
  SiRNA target sequence
cggcgatgattctaagact

SEQ ID NO: 158472 - DNA, 19 bp, Artificial sequence
  SiRNA target sequence
ggcgatgattctaagactt

SEQ ID NO: 158473 - DNA, 19 bp, Artificial sequence
  SiRNA target sequence
gcgatgattctaagacttt

SEQ ID NO: 158474 - DNA, 19 bp, Artificial sequence
  SiRNA target sequence
cgatgattctaagactttt

SEQ ID NO: 158475 - DNA, 19 bp, Artificial sequence
  SiRNA target sequence
gatgattctaagacttttc

SEQ ID NO: 158476 - DNA, 19 bp, Artificial sequence
  SiRNA target sequence
atgattctaagacttttcc

SEQ ID NO: 158477 - DNA, 19 bp, Artificial sequence
  SiRNA target sequence
tgattctaagacttttcct

SEQ ID NO: 158478 - DNA, 19 bp, Artificial sequence
  SiRNA target sequence
gattctaagacttttcctg

SEQ ID NO: 158479 - DNA, 19 bp, Artificial sequence
  SiRNA target sequence
attctaagacttttcctgg

SEQ ID NO: 158480 - DNA, 19 bp, Artificial sequence
  SiRNA target sequence
ttctaagacttttcctggc

SEQ ID NO: 158481 - DNA, 19 bp, Artificial sequence
  SiRNA target sequence
tctaagacttttcctggct

SEQ ID NO: 158482 - DNA, 19 bp, Artificial sequence
  SiRNA target sequence
ctaagacttttcctggctg

SEQ ID NO: 158483 - DNA, 19 bp, Artificial sequence
  SiRNA target sequence
taagacttttcctggctgt

SEQ ID NO: 158484 - DNA, 19 bp, Artificial sequence
  SiRNA target sequence
aagacttttcctggctgtc

SEQ ID NO: 158485 - DNA, 19 bp, Artificial sequence
  SiRNA target sequence
agacttttcctggctgtct

SEQ ID NO: 158486 - DNA, 19 bp, Artificial sequence
  SiRNA target sequence
gacttttcctggctgtctc

SEQ ID NO: 158487 - DNA, 19 bp, Artificial sequence
  SiRNA target sequence
acttttcctggctgtctca

SEQ ID NO: 158488 - DNA, 19 bp, Artificial sequence
  SiRNA target sequence
cttttcctggctgtctcaa

SEQ ID NO: 158489 - DNA, 19 bp, Artificial sequence
  SiRNA target sequence
ttttcctggctgtctcaat

SEQ ID NO: 158490 - DNA, 19 bp, Artificial sequence
  SiRNA target sequence
tttcctggctgtctcaata

SEQ ID NO: 158491 - DNA, 19 bp, Artificial sequence
  SiRNA target sequence
ttcctggctgtctcaatat

SEQ ID NO: 158492 - DNA, 19 bp, Artificial sequence
  SiRNA target sequence
tcctggctgtctcaatatt

SEQ ID NO: 158493 - DNA, 19 bp, Artificial sequence
  SiRNA target sequence
cctggctgtctcaatattt

SEQ ID NO: 158494 - DNA, 19 bp, Artificial sequence
  SiRNA target sequence
ctggctgtctcaatatttc

SEQ ID NO: 158495 - DNA, 19 bp, Artificial sequence
  SiRNA target sequence
tggctgtctcaatatttct

SEQ ID NO: 158496 - DNA, 19 bp, Artificial sequence
  SiRNA target sequence
ggctgtctcaatatttctt

SEQ ID NO: 158497 - DNA, 19 bp, Artificial sequence
  SiRNA target sequence
gctgtctcaatatttcttt

SEQ ID NO: 158498 - DNA, 19 bp, Artificial sequence
  SiRNA target sequence
ctgtctcaatatttctttt

SEQ ID NO: 158499 - DNA, 19 bp, Artificial sequence
  SiRNA target sequence
tgtctcaatatttcttttc

SEQ ID NO: 158500 - DNA, 19 bp, Artificial sequence
  SiRNA target sequence
gtctcaatatttcttttcc

SEQ ID NO: 158501 - DNA, 19 bp, Artificial sequence
  SiRNA target sequence
tctcaatatttcttttcca

SEQ ID NO: 158502 - DNA, 19 bp, Artificial sequence
  SiRNA target sequence
ctcaatatttcttttccat

SEQ ID NO: 158503 - DNA, 19 bp, Artificial sequence
  SiRNA target sequence
tcaatatttcttttccata

SEQ ID NO: 158504 - DNA, 19 bp, Artificial sequence
  SiRNA target sequence
caatatttcttttccatat

SEQ ID NO: 158505 - DNA, 19 bp, Artificial sequence
  SiRNA target sequence
aatatttcttttccatatg

SEQ ID NO: 158506 - DNA, 19 bp, Artificial sequence
  SiRNA target sequence
atatttcttttccatatgt

SEQ ID NO: 158507 - DNA, 19 bp, Artificial sequence
  SiRNA target sequence
tatttcttttccatatgta

SEQ ID NO: 158508 - DNA, 19 bp, Artificial sequence
  SiRNA target sequence
atttcttttccatatgtag

SEQ ID NO: 158509 - DNA, 19 bp, Artificial sequence
  SiRNA target sequence
tttcttttccatatgtaga

SEQ ID NO: 158510 - DNA, 19 bp, Artificial sequence
  SiRNA target sequence
ttcttttccatatgtagaa

SEQ ID NO: 158511 - DNA, 19 bp, Artificial sequence
  SiRNA target sequence
tcttttccatatgtagaag

SEQ ID NO: 158512 - DNA, 19 bp, Artificial sequence
  SiRNA target sequence
cttttccatatgtagaagg

SEQ ID NO: 158513 - DNA, 19 bp, Artificial sequence
  SiRNA target sequence
ttttccatatgtagaaggt

SEQ ID NO: 158514 - DNA, 19 bp, Artificial sequence
  SiRNA target sequence
tttccatatgtagaaggtg

SEQ ID NO: 158515 - DNA, 19 bp, Artificial sequence
  SiRNA target sequence
ttccatatgtagaaggtga

SEQ ID NO: 158516 - DNA, 19 bp, Artificial sequence
  SiRNA target sequence
tccatatgtagaaggtgaa

SEQ ID NO: 158517 - DNA, 19 bp, Artificial sequence
  SiRNA target sequence
ccatatgtagaaggtgaag

SEQ ID NO: 158518 - DNA, 19 bp, Artificial sequence
  SiRNA target sequence
catatgtagaaggtgaagg

SEQ ID NO: 158519 - DNA, 19 bp, Artificial sequence
  SiRNA target sequence
atatgtagaaggtgaaggg

SEQ ID NO: 158520 - DNA, 19 bp, Artificial sequence
  SiRNA target sequence
tatgtagaaggtgaagggc

SEQ ID NO: 158521 - DNA, 19 bp, Artificial sequence
  SiRNA target sequence
atgtagaaggtgaagggct

SEQ ID NO: 158522 - DNA, 19 bp, Artificial sequence
  SiRNA target sequence
tgtagaaggtgaagggctt

SEQ ID NO: 158523 - DNA, 19 bp, Artificial sequence
  SiRNA target sequence
gtagaaggtgaagggctta

SEQ ID NO: 158524 - DNA, 19 bp, Artificial sequence
  SiRNA target sequence
tagaaggtgaagggcttat

SEQ ID NO: 158525 - DNA, 19 bp, Artificial sequence
  SiRNA target sequence
agaaggtgaagggcttatg

SEQ ID NO: 158526 - DNA, 19 bp, Artificial sequence
  SiRNA target sequence
gaaggtgaagggcttatga

SEQ ID NO: 158527 - DNA, 19 bp, Artificial sequence
  SiRNA target sequence
aaggtgaagggcttatgat

SEQ ID NO: 158528 - DNA, 19 bp, Artificial sequence
  SiRNA target sequence
aggtgaagggcttatgatg

SEQ ID NO: 158529 - DNA, 19 bp, Artificial sequence
  SiRNA target sequence
ggtgaagggcttatgatga

SEQ ID NO: 158530 - DNA, 19 bp, Artificial sequence
  SiRNA target sequence
gtgaagggcttatgatgaa

SEQ ID NO: 158531 - DNA, 19 bp, Artificial sequence
  SiRNA target sequence
tgaagggcttatgatgaat

SEQ ID NO: 158532 - DNA, 19 bp, Artificial sequence
  SiRNA target sequence
gaagggcttatgatgaata

SEQ ID NO: 158533 - DNA, 19 bp, Artificial sequence
  SiRNA target sequence
aagggcttatgatgaatat

SEQ ID NO: 158534 - DNA, 19 bp, Artificial sequence
  SiRNA target sequence
agggcttatgatgaatatt

SEQ ID NO: 158535 - DNA, 19 bp, Artificial sequence
  SiRNA target sequence
gggcttatgatgaatatta

SEQ ID NO: 158536 - DNA, 19 bp, Artificial sequence
  SiRNA target sequence
ggcttatgatgaatattaa

SEQ ID NO: 158537 - DNA, 19 bp, Artificial sequence
  SiRNA target sequence
gcttatgatgaatattaag

SEQ ID NO: 158538 - DNA, 19 bp, Artificial sequence
  SiRNA target sequence
cttatgatgaatattaagg

SEQ ID NO: 158539 - DNA, 19 bp, Artificial sequence
  SiRNA target sequence
ttatgatgaatattaagga

SEQ ID NO: 158540 - DNA, 19 bp, Artificial sequence
  SiRNA target sequence
tatgatgaatattaaggat

SEQ ID NO: 158541 - DNA, 19 bp, Artificial sequence
  SiRNA target sequence
atgatgaatattaaggata

SEQ ID NO: 158542 - DNA, 19 bp, Artificial sequence
  SiRNA target sequence
tgatgaatattaaggatat

SEQ ID NO: 158543 - DNA, 19 bp, Artificial sequence
  SiRNA target sequence
gatgaatattaaggatatt

SEQ ID NO: 158544 - DNA, 19 bp, Artificial sequence
  SiRNA target sequence
atgaatattaaggatattg

SEQ ID NO: 158545 - DNA, 19 bp, Artificial sequence
  SiRNA target sequence
tgaatattaaggatattgc

SEQ ID NO: 158546 - DNA, 19 bp, Artificial sequence
  SiRNA target sequence
gaatattaaggatattgct

SEQ ID NO: 158547 - DNA, 19 bp, Artificial sequence
  SiRNA target sequence
aatattaaggatattgctg

SEQ ID NO: 158548 - DNA, 19 bp, Artificial sequence
  SiRNA target sequence
atattaaggatattgctgt

SEQ ID NO: 158549 - DNA, 19 bp, Artificial sequence
  SiRNA target sequence
tattaaggatattgctgtt

SEQ ID NO: 158550 - DNA, 19 bp, Artificial sequence
  SiRNA target sequence
attaaggatattgctgtta

SEQ ID NO: 158551 - DNA, 19 bp, Artificial sequence
  SiRNA target sequence
ttaaggatattgctgttag

SEQ ID NO: 158552 - DNA, 19 bp, Artificial sequence
  SiRNA target sequence
taaggatattgctgttagt

SEQ ID NO: 158553 - DNA, 19 bp, Artificial sequence
  SiRNA target sequence
aaggatattgctgttagta

SEQ ID NO: 158554 - DNA, 19 bp, Artificial sequence
  SiRNA target sequence
aggatattgctgttagtag

SEQ ID NO: 158555 - DNA, 19 bp, Artificial sequence
  SiRNA target sequence
ggatattgctgttagtagt

SEQ ID NO: 158556 - DNA, 19 bp, Artificial sequence
  SiRNA target sequence
gatattgctgttagtagtg

SEQ ID NO: 158557 - DNA, 19 bp, Artificial sequence
  SiRNA target sequence
atattgctgttagtagtgg

SEQ ID NO: 158558 - DNA, 19 bp, Artificial sequence
  SiRNA target sequence
tattgctgttagtagtgga

SEQ ID NO: 158559 - DNA, 19 bp, Artificial sequence
  SiRNA target sequence
attgctgttagtagtggaa

SEQ ID NO: 158560 - DNA, 19 bp, Artificial sequence
  SiRNA target sequence
ttgctgttagtagtggaag

SEQ ID NO: 158561 - DNA, 19 bp, Artificial sequence
  SiRNA target sequence
tgctgttagtagtggaagt

SEQ ID NO: 158562 - DNA, 19 bp, Artificial sequence
  SiRNA target sequence
gctgttagtagtggaagtg

SEQ ID NO: 158563 - DNA, 19 bp, Artificial sequence
  SiRNA target sequence
ctgttagtagtggaagtgc

SEQ ID NO: 158564 - DNA, 19 bp, Artificial sequence
  SiRNA target sequence
tgttagtagtggaagtgct

SEQ ID NO: 158565 - DNA, 19 bp, Artificial sequence
  SiRNA target sequence
gttagtagtggaagtgctt

SEQ ID NO: 158566 - DNA, 19 bp, Artificial sequence
  SiRNA target sequence
ttagtagtggaagtgcttg

SEQ ID NO: 158567 - DNA, 19 bp, Artificial sequence
  SiRNA target sequence
tagtagtggaagtgcttgc

SEQ ID NO: 158568 - DNA, 19 bp, Artificial sequence
  SiRNA target sequence
agtagtggaagtgcttgca

SEQ ID NO: 158569 - DNA, 19 bp, Artificial sequence
  SiRNA target sequence
gtagtggaagtgcttgcac

SEQ ID NO: 158570 - DNA, 19 bp, Artificial sequence
  SiRNA target sequence
tagtggaagtgcttgcact

SEQ ID NO: 158571 - DNA, 19 bp, Artificial sequence
  SiRNA target sequence
agtggaagtgcttgcactt

SEQ ID NO: 158572 - DNA, 19 bp, Artificial sequence
  SiRNA target sequence
gtggaagtgcttgcacttc

SEQ ID NO: 158573 - DNA, 19 bp, Artificial sequence
  SiRNA target sequence
tggaagtgcttgcacttca

SEQ ID NO: 158574 - DNA, 19 bp, Artificial sequence
  SiRNA target sequence
ggaagtgcttgcacttcat

SEQ ID NO: 158575 - DNA, 19 bp, Artificial sequence
  SiRNA target sequence
gaagtgcttgcacttcatc

SEQ ID NO: 158576 - DNA, 19 bp, Artificial sequence
  SiRNA target sequence
aagtgcttgcacttcatca

SEQ ID NO: 158577 - DNA, 19 bp, Artificial sequence
  SiRNA target sequence
agtgcttgcacttcatcat

SEQ ID NO: 158578 - DNA, 19 bp, Artificial sequence
  SiRNA target sequence
gtgcttgcacttcatcatc

SEQ ID NO: 158579 - DNA, 19 bp, Artificial sequence
  SiRNA target sequence
tgcttgcacttcatcatct

SEQ ID NO: 158580 - DNA, 19 bp, Artificial sequence
  SiRNA target sequence
gcttgcacttcatcatctt

SEQ ID NO: 158581 - DNA, 19 bp, Artificial sequence
  SiRNA target sequence
cttgcacttcatcatcttt

SEQ ID NO: 158582 - DNA, 19 bp, Artificial sequence
  SiRNA target sequence
ttgcacttcatcatcttta

SEQ ID NO: 158583 - DNA, 19 bp, Artificial sequence
  SiRNA target sequence
tgcacttcatcatctttag

SEQ ID NO: 158584 - DNA, 19 bp, Artificial sequence
  SiRNA target sequence
gcacttcatcatctttaga

SEQ ID NO: 158585 - DNA, 19 bp, Artificial sequence
  SiRNA target sequence
cacttcatcatctttagaa

SEQ ID NO: 158586 - DNA, 19 bp, Artificial sequence
  SiRNA target sequence
acttcatcatctttagaac

SEQ ID NO: 158587 - DNA, 19 bp, Artificial sequence
  SiRNA target sequence
cttcatcatctttagaacc

SEQ ID NO: 158588 - DNA, 19 bp, Artificial sequence
  SiRNA target sequence
ttcatcatctttagaaccc

SEQ ID NO: 158589 - DNA, 19 bp, Artificial sequence
  SiRNA target sequence
tcatcatctttagaaccct

SEQ ID NO: 158590 - DNA, 19 bp, Artificial sequence
  SiRNA target sequence
catcatctttagaaccctc

SEQ ID NO: 158591 - DNA, 19 bp, Artificial sequence
  SiRNA target sequence
atcatctttagaaccctct

SEQ ID NO: 158592 - DNA, 19 bp, Artificial sequence
  SiRNA target sequence
tcatctttagaaccctctt

SEQ ID NO: 158593 - DNA, 19 bp, Artificial sequence
  SiRNA target sequence
catctttagaaccctctta

SEQ ID NO: 158594 - DNA, 19 bp, Artificial sequence
  SiRNA target sequence
atctttagaaccctcttat

SEQ ID NO: 158595 - DNA, 19 bp, Artificial sequence
  SiRNA target sequence
tctttagaaccctcttatg

SEQ ID NO: 158596 - DNA, 19 bp, Artificial sequence
  SiRNA target sequence
ctttagaaccctcttatgt

SEQ ID NO: 158597 - DNA, 19 bp, Artificial sequence
  SiRNA target sequence
tttagaaccctcttatgtt

SEQ ID NO: 158598 - DNA, 19 bp, Artificial sequence
  SiRNA target sequence
ttagaaccctcttatgttt

SEQ ID NO: 158599 - DNA, 19 bp, Artificial sequence
  SiRNA target sequence
tagaaccctcttatgtttt

SEQ ID NO: 158600 - DNA, 19 bp, Artificial sequence
  SiRNA target sequence
agaaccctcttatgttttg

SEQ ID NO: 158601 - DNA, 19 bp, Artificial sequence
  SiRNA target sequence
gaaccctcttatgttttgc

SEQ ID NO: 158602 - DNA, 19 bp, Artificial sequence
  SiRNA target sequence
aaccctcttatgttttgcg

SEQ ID NO: 158603 - DNA, 19 bp, Artificial sequence
  SiRNA target sequence
accctcttatgttttgcga

SEQ ID NO: 158604 - DNA, 19 bp, Artificial sequence
  SiRNA target sequence
ccctcttatgttttgcgag

SEQ ID NO: 158605 - DNA, 19 bp, Artificial sequence
  SiRNA target sequence
cctcttatgttttgcgagc

SEQ ID NO: 158606 - DNA, 19 bp, Artificial sequence
  SiRNA target sequence
ctcttatgttttgcgagct

SEQ ID NO: 158607 - DNA, 19 bp, Artificial sequence
  SiRNA target sequence
tcttatgttttgcgagctt

SEQ ID NO: 158608 - DNA, 19 bp, Artificial sequence
  SiRNA target sequence
cttatgttttgcgagcttt

SEQ ID NO: 158609 - DNA, 19 bp, Artificial sequence
  SiRNA target sequence
ttatgttttgcgagcttta

SEQ ID NO: 158610 - DNA, 19 bp, Artificial sequence
  SiRNA target sequence
tatgttttgcgagctttag

SEQ ID NO: 158611 - DNA, 19 bp, Artificial sequence
  SiRNA target sequence
atgttttgcgagctttagg

SEQ ID NO: 158612 - DNA, 19 bp, Artificial sequence
  SiRNA target sequence
tgttttgcgagctttaggc

SEQ ID NO: 158613 - DNA, 19 bp, Artificial sequence
  SiRNA target sequence
gttttgcgagctttaggca

SEQ ID NO: 158614 - DNA, 19 bp, Artificial sequence
  SiRNA target sequence
ttttgcgagctttaggcaa

SEQ ID NO: 158615 - DNA, 19 bp, Artificial sequence
  SiRNA target sequence
tttgcgagctttaggcaaa

SEQ ID NO: 158616 - DNA, 19 bp, Artificial sequence
  SiRNA target sequence
ttgcgagctttaggcaaaa

SEQ ID NO: 158617 - DNA, 19 bp, Artificial sequence
  SiRNA target sequence
tgcgagctttaggcaaaaa

SEQ ID NO: 158618 - DNA, 19 bp, Artificial sequence
  SiRNA target sequence
gcgagctttaggcaaaaat

SEQ ID NO: 158619 - DNA, 19 bp, Artificial sequence
  SiRNA target sequence
cgagctttaggcaaaaatg

SEQ ID NO: 158620 - DNA, 19 bp, Artificial sequence
  SiRNA target sequence
gagctttaggcaaaaatga

SEQ ID NO: 158621 - DNA, 19 bp, Artificial sequence
  SiRNA target sequence
agctttaggcaaaaatgat

SEQ ID NO: 158622 - DNA, 19 bp, Artificial sequence
  SiRNA target sequence
gctttaggcaaaaatgatg

SEQ ID NO: 158623 - DNA, 19 bp, Artificial sequence
  SiRNA target sequence
ctttaggcaaaaatgatga

SEQ ID NO: 158624 - DNA, 19 bp, Artificial sequence
  SiRNA target sequence
tttaggcaaaaatgatgat

SEQ ID NO: 158625 - DNA, 19 bp, Artificial sequence
  SiRNA target sequence
ttaggcaaaaatgatgatc

SEQ ID NO: 158626 - DNA, 19 bp, Artificial sequence
  SiRNA target sequence
taggcaaaaatgatgatct

SEQ ID NO: 158627 - DNA, 19 bp, Artificial sequence
  SiRNA target sequence
aggcaaaaatgatgatctt

SEQ ID NO: 158628 - DNA, 19 bp, Artificial sequence
  SiRNA target sequence
ggcaaaaatgatgatcttg

SEQ ID NO: 158629 - DNA, 19 bp, Artificial sequence
  SiRNA target sequence
gcaaaaatgatgatcttgc

SEQ ID NO: 158630 - DNA, 19 bp, Artificial sequence
  SiRNA target sequence
caaaaatgatgatcttgcg

SEQ ID NO: 158631 - DNA, 19 bp, Artificial sequence
  SiRNA target sequence
aaaaatgatgatcttgcgc

SEQ ID NO: 158632 - DNA, 19 bp, Artificial sequence
  SiRNA target sequence
aaaatgatgatcttgcgca

SEQ ID NO: 158633 - DNA, 19 bp, Artificial sequence
  SiRNA target sequence
aaatgatgatcttgcgcat

SEQ ID NO: 158634 - DNA, 19 bp, Artificial sequence
  SiRNA target sequence
aatgatgatcttgcgcatt

SEQ ID NO: 158635 - DNA, 19 bp, Artificial sequence
  SiRNA target sequence
atgatgatcttgcgcattc

SEQ ID NO: 158636 - DNA, 19 bp, Artificial sequence
  SiRNA target sequence
tgatgatcttgcgcattct

SEQ ID NO: 158637 - DNA, 19 bp, Artificial sequence
  SiRNA target sequence
gatgatcttgcgcattctt

SEQ ID NO: 158638 - DNA, 19 bp, Artificial sequence
  SiRNA target sequence
atgatcttgcgcattcttc

SEQ ID NO: 158639 - DNA, 19 bp, Artificial sequence
  SiRNA target sequence
tgatcttgcgcattcttct

SEQ ID NO: 158640 - DNA, 19 bp, Artificial sequence
  SiRNA target sequence
gatcttgcgcattcttcta

SEQ ID NO: 158641 - DNA, 19 bp, Artificial sequence
  SiRNA target sequence
atcttgcgcattcttctat

SEQ ID NO: 158642 - DNA, 19 bp, Artificial sequence
  SiRNA target sequence
tcttgcgcattcttctata

SEQ ID NO: 158643 - DNA, 19 bp, Artificial sequence
  SiRNA target sequence
cttgcgcattcttctataa

SEQ ID NO: 158644 - DNA, 19 bp, Artificial sequence
  SiRNA target sequence
ttgcgcattcttctataag

SEQ ID NO: 158645 - DNA, 19 bp, Artificial sequence
  SiRNA target sequence
tgcgcattcttctataaga

SEQ ID NO: 158646 - DNA, 19 bp, Artificial sequence
  SiRNA target sequence
gcgcattcttctataagat

SEQ ID NO: 158647 - DNA, 19 bp, Artificial sequence
  SiRNA target sequence
cgcattcttctataagatt

SEQ ID NO: 158648 - DNA, 19 bp, Artificial sequence
  SiRNA target sequence
gcattcttctataagattt

SEQ ID NO: 158649 - DNA, 19 bp, Artificial sequence
  SiRNA target sequence
cattcttctataagatttg

SEQ ID NO: 158650 - DNA, 19 bp, Artificial sequence
  SiRNA target sequence
attcttctataagatttgg

SEQ ID NO: 158651 - DNA, 19 bp, Artificial sequence
  SiRNA target sequence
ttcttctataagatttgga

SEQ ID NO: 158652 - DNA, 19 bp, Artificial sequence
  SiRNA target sequence
tcttctataagatttggaa

SEQ ID NO: 158653 - DNA, 19 bp, Artificial sequence
  SiRNA target sequence
cttctataagatttggaat

SEQ ID NO: 158654 - DNA, 19 bp, Artificial sequence
  SiRNA target sequence
ttctataagatttggaata

SEQ ID NO: 158655 - DNA, 19 bp, Artificial sequence
  SiRNA target sequence
tctataagatttggaataa

SEQ ID NO: 158656 - DNA, 19 bp, Artificial sequence
  SiRNA target sequence
ctataagatttggaataaa

SEQ ID NO: 158657 - DNA, 19 bp, Artificial sequence
  SiRNA target sequence
tataagatttggaataaat

SEQ ID NO: 158658 - DNA, 19 bp, Artificial sequence
  SiRNA target sequence
ataagatttggaataaata

SEQ ID NO: 158659 - DNA, 19 bp, Artificial sequence
  SiRNA target sequence
taagatttggaataaataa

SEQ ID NO: 158660 - DNA, 19 bp, Artificial sequence
  SiRNA target sequence
aagatttggaataaataag

SEQ ID NO: 158661 - DNA, 19 bp, Artificial sequence
  SiRNA target sequence
agatttggaataaataagt

SEQ ID NO: 158662 - DNA, 19 bp, Artificial sequence
  SiRNA target sequence
gatttggaataaataagtt

SEQ ID NO: 158663 - DNA, 19 bp, Artificial sequence
  SiRNA target sequence
atttggaataaataagttt

SEQ ID NO: 158664 - DNA, 19 bp, Artificial sequence
  SiRNA target sequence
tttggaataaataagttta

SEQ ID NO: 158665 - DNA, 19 bp, Artificial sequence
  SiRNA target sequence
ttggaataaataagtttac

SEQ ID NO: 158666 - DNA, 19 bp, Artificial sequence
  SiRNA target sequence
tggaataaataagtttaca

SEQ ID NO: 158667 - DNA, 19 bp, Artificial sequence
  SiRNA target sequence
ggaataaataagtttacaa

SEQ ID NO: 158668 - DNA, 19 bp, Artificial sequence
  SiRNA target sequence
gaataaataagtttacaac

SEQ ID NO: 158669 - DNA, 19 bp, Artificial sequence
  SiRNA target sequence
aataaataagtttacaact

SEQ ID NO: 158670 - DNA, 19 bp, Artificial sequence
  SiRNA target sequence
ataaataagtttacaactg

SEQ ID NO: 158671 - DNA, 19 bp, Artificial sequence
  SiRNA target sequence
taaataagtttacaactga

SEQ ID NO: 158672 - DNA, 19 bp, Artificial sequence
  SiRNA target sequence
aaataagtttacaactgaa

SEQ ID NO: 158673 - DNA, 19 bp, Artificial sequence
  SiRNA target sequence
aataagtttacaactgaag

SEQ ID NO: 158674 - DNA, 19 bp, Artificial sequence
  SiRNA target sequence
ataagtttacaactgaaga

SEQ ID NO: 158675 - DNA, 19 bp, Artificial sequence
  SiRNA target sequence
taagtttacaactgaagaa

SEQ ID NO: 158676 - DNA, 19 bp, Artificial sequence
  SiRNA target sequence
aagtttacaactgaagaag

SEQ ID NO: 158677 - DNA, 19 bp, Artificial sequence
  SiRNA target sequence
agtttacaactgaagaaga

SEQ ID NO: 158678 - DNA, 19 bp, Artificial sequence
  SiRNA target sequence
gtttacaactgaagaagaa

SEQ ID NO: 158679 - DNA, 19 bp, Artificial sequence
  SiRNA target sequence
tttacaactgaagaagaaa

SEQ ID NO: 158680 - DNA, 19 bp, Artificial sequence
  SiRNA target sequence
ttacaactgaagaagaaat

SEQ ID NO: 158681 - DNA, 19 bp, Artificial sequence
  SiRNA target sequence
tacaactgaagaagaaatc

SEQ ID NO: 158682 - DNA, 19 bp, Artificial sequence
  SiRNA target sequence
acaactgaagaagaaatca

SEQ ID NO: 158683 - DNA, 19 bp, Artificial sequence
  SiRNA target sequence
caactgaagaagaaatcaa

SEQ ID NO: 158684 - DNA, 19 bp, Artificial sequence
  SiRNA target sequence
aactgaagaagaaatcaat

SEQ ID NO: 158685 - DNA, 19 bp, Artificial sequence
  SiRNA target sequence
actgaagaagaaatcaata

SEQ ID NO: 158686 - DNA, 19 bp, Artificial sequence
  SiRNA target sequence
ctgaagaagaaatcaataa

SEQ ID NO: 158687 - DNA, 19 bp, Artificial sequence
  SiRNA target sequence
tgaagaagaaatcaataaa

SEQ ID NO: 158688 - DNA, 19 bp, Artificial sequence
  SiRNA target sequence
gaagaagaaatcaataaag

SEQ ID NO: 158689 - DNA, 19 bp, Artificial sequence
  SiRNA target sequence
aagaagaaatcaataaagt

SEQ ID NO: 158690 - DNA, 19 bp, Artificial sequence
  SiRNA target sequence
agaagaaatcaataaagta

SEQ ID NO: 158691 - DNA, 19 bp, Artificial sequence
  SiRNA target sequence
gaagaaatcaataaagtat

SEQ ID NO: 158692 - DNA, 19 bp, Artificial sequence
  SiRNA target sequence
aagaaatcaataaagtatc

SEQ ID NO: 158693 - DNA, 19 bp, Artificial sequence
  SiRNA target sequence
agaaatcaataaagtatct

SEQ ID NO: 158694 - DNA, 19 bp, Artificial sequence
  SiRNA target sequence
gaaatcaataaagtatcta

SEQ ID NO: 158695 - DNA, 19 bp, Artificial sequence
  SiRNA target sequence
aaatcaataaagtatctag

SEQ ID NO: 158696 - DNA, 19 bp, Artificial sequence
  SiRNA target sequence
aatcaataaagtatctagt

SEQ ID NO: 158697 - DNA, 19 bp, Artificial sequence
  SiRNA target sequence
atcaataaagtatctagtg

SEQ ID NO: 158698 - DNA, 19 bp, Artificial sequence
  SiRNA target sequence
tcaataaagtatctagtga

SEQ ID NO: 158699 - DNA, 19 bp, Artificial sequence
  SiRNA target sequence
caataaagtatctagtgat

SEQ ID NO: 158700 - DNA, 19 bp, Artificial sequence
  SiRNA target sequence
aataaagtatctagtgata

SEQ ID NO: 158701 - DNA, 19 bp, Artificial sequence
  SiRNA target sequence
ataaagtatctagtgatac

SEQ ID NO: 158702 - DNA, 19 bp, Artificial sequence
  SiRNA target sequence
taaagtatctagtgataca

SEQ ID NO: 158703 - DNA, 19 bp, Artificial sequence
  SiRNA target sequence
aaagtatctagtgatacaa

SEQ ID NO: 158704 - DNA, 19 bp, Artificial sequence
  SiRNA target sequence
aagtatctagtgatacaat

SEQ ID NO: 158705 - DNA, 19 bp, Artificial sequence
  SiRNA target sequence
agtatctagtgatacaatt

SEQ ID NO: 158706 - DNA, 19 bp, Artificial sequence
  SiRNA target sequence
gtatctagtgatacaatta

SEQ ID NO: 158707 - DNA, 19 bp, Artificial sequence
  SiRNA target sequence
tatctagtgatacaattaa

SEQ ID NO: 158708 - DNA, 19 bp, Artificial sequence
  SiRNA target sequence
atctagtgatacaattaaa

SEQ ID NO: 158709 - DNA, 19 bp, Artificial sequence
  SiRNA target sequence
tctagtgatacaattaaag

SEQ ID NO: 158710 - DNA, 19 bp, Artificial sequence
  SiRNA target sequence
ctagtgatacaattaaagc

SEQ ID NO: 158711 - DNA, 19 bp, Artificial sequence
  SiRNA target sequence
tagtgatacaattaaagct

SEQ ID NO: 158712 - DNA, 19 bp, Artificial sequence
  SiRNA target sequence
agtgatacaattaaagctg

SEQ ID NO: 158713 - DNA, 19 bp, Artificial sequence
  SiRNA target sequence
gtgatacaattaaagctgt

SEQ ID NO: 158714 - DNA, 19 bp, Artificial sequence
  SiRNA target sequence
tgatacaattaaagctgtt

SEQ ID NO: 158715 - DNA, 19 bp, Artificial sequence
  SiRNA target sequence
gatacaattaaagctgtta

SEQ ID NO: 158716 - DNA, 19 bp, Artificial sequence
  SiRNA target sequence
atacaattaaagctgttaa

SEQ ID NO: 158717 - DNA, 19 bp, Artificial sequence
  SiRNA target sequence
tacaattaaagctgttaat

SEQ ID NO: 158718 - DNA, 19 bp, Artificial sequence
  SiRNA target sequence
acaattaaagctgttaata

SEQ ID NO: 158719 - DNA, 19 bp, Artificial sequence
  SiRNA target sequence
caattaaagctgttaataa

SEQ ID NO: 158720 - DNA, 19 bp, Artificial sequence
  SiRNA target sequence
aattaaagctgttaataag

SEQ ID NO: 158721 - DNA, 19 bp, Artificial sequence
  SiRNA target sequence
attaaagctgttaataagt

SEQ ID NO: 158722 - DNA, 19 bp, Artificial sequence
  SiRNA target sequence
ttaaagctgttaataagtt

SEQ ID NO: 158723 - DNA, 19 bp, Artificial sequence
  SiRNA target sequence
taaagctgttaataagtta

SEQ ID NO: 158724 - DNA, 19 bp, Artificial sequence
  SiRNA target sequence
aaagctgttaataagttaa

SEQ ID NO: 158725 - DNA, 19 bp, Artificial sequence
  SiRNA target sequence
aagctgttaataagttaag

SEQ ID NO: 158726 - DNA, 19 bp, Artificial sequence
  SiRNA target sequence
agctgttaataagttaaga

SEQ ID NO: 158727 - DNA, 19 bp, Artificial sequence
  SiRNA target sequence
gctgttaataagttaagag

SEQ ID NO: 158728 - DNA, 19 bp, Artificial sequence
  SiRNA target sequence
ctgttaataagttaagaga

SEQ ID NO: 158729 - DNA, 19 bp, Artificial sequence
  SiRNA target sequence
tgttaataagttaagagat

SEQ ID NO: 158730 - DNA, 19 bp, Artificial sequence
  SiRNA target sequence
gttaataagttaagagata

SEQ ID NO: 158731 - DNA, 19 bp, Artificial sequence
  SiRNA target sequence
ttaataagttaagagatat

SEQ ID NO: 158732 - DNA, 19 bp, Artificial sequence
  SiRNA target sequence
taataagttaagagatatg

SEQ ID NO: 158733 - DNA, 19 bp, Artificial sequence
  SiRNA target sequence
aataagttaagagatatgt

SEQ ID NO: 158734 - DNA, 19 bp, Artificial sequence
  SiRNA target sequence
ataagttaagagatatgtc

SEQ ID NO: 158735 - DNA, 19 bp, Artificial sequence
  SiRNA target sequence
taagttaagagatatgtct

SEQ ID NO: 158736 - DNA, 19 bp, Artificial sequence
  SiRNA target sequence
aagttaagagatatgtctc

SEQ ID NO: 158737 - DNA, 19 bp, Artificial sequence
  SiRNA target sequence
agttaagagatatgtctcc

SEQ ID NO: 158738 - DNA, 19 bp, Artificial sequence
  SiRNA target sequence
gttaagagatatgtctcct

SEQ ID NO: 158739 - DNA, 19 bp, Artificial sequence
  SiRNA target sequence
ttaagagatatgtctcctt

SEQ ID NO: 158740 - DNA, 19 bp, Artificial sequence
  SiRNA target sequence
taagagatatgtctccttt

SEQ ID NO: 158741 - DNA, 19 bp, Artificial sequence
  SiRNA target sequence
aagagatatgtctccttta

SEQ ID NO: 158742 - DNA, 19 bp, Artificial sequence
  SiRNA target sequence
agagatatgtctcctttat

SEQ ID NO: 158743 - DNA, 19 bp, Artificial sequence
  SiRNA target sequence
gagatatgtctcctttata

SEQ ID NO: 158744 - DNA, 19 bp, Artificial sequence
  SiRNA target sequence
agatatgtctcctttatat

SEQ ID NO: 158745 - DNA, 19 bp, Artificial sequence
  SiRNA target sequence
gatatgtctcctttatatg

SEQ ID NO: 158746 - DNA, 19 bp, Artificial sequence
  SiRNA target sequence
atatgtctcctttatatga

SEQ ID NO: 158747 - DNA, 19 bp, Artificial sequence
  SiRNA target sequence
tatgtctcctttatatgaa

SEQ ID NO: 158748 - DNA, 19 bp, Artificial sequence
  SiRNA target sequence
atgtctcctttatatgaaa

SEQ ID NO: 158749 - DNA, 19 bp, Artificial sequence
  SiRNA target sequence
tgtctcctttatatgaaat

SEQ ID NO: 158750 - DNA, 19 bp, Artificial sequence
  SiRNA target sequence
gtctcctttatatgaaatg

SEQ ID NO: 158751 - DNA, 19 bp, Artificial sequence
  SiRNA target sequence
tctcctttatatgaaatgg

SEQ ID NO: 158752 - DNA, 19 bp, Artificial sequence
  SiRNA target sequence
ctcctttatatgaaatggt

SEQ ID NO: 158753 - DNA, 19 bp, Artificial sequence
  SiRNA target sequence
tcctttatatgaaatggtc

SEQ ID NO: 158754 - DNA, 19 bp, Artificial sequence
  SiRNA target sequence
cctttatatgaaatggtca

SEQ ID NO: 158755 - DNA, 19 bp, Artificial sequence
  SiRNA target sequence
ctttatatgaaatggtcaa

SEQ ID NO: 158756 - DNA, 19 bp, Artificial sequence
  SiRNA target sequence
tttatatgaaatggtcaaa

SEQ ID NO: 158757 - DNA, 19 bp, Artificial sequence
  SiRNA target sequence
ttatatgaaatggtcaaag

SEQ ID NO: 158758 - DNA, 19 bp, Artificial sequence
  SiRNA target sequence
tatatgaaatggtcaaaga

SEQ ID NO: 158759 - DNA, 19 bp, Artificial sequence
  SiRNA target sequence
atatgaaatggtcaaagaa

SEQ ID NO: 158760 - DNA, 19 bp, Artificial sequence
  SiRNA target sequence
tatgaaatggtcaaagaag

SEQ ID NO: 158761 - DNA, 19 bp, Artificial sequence
  SiRNA target sequence
atgaaatggtcaaagaagg

SEQ ID NO: 158762 - DNA, 19 bp, Artificial sequence
  SiRNA target sequence
tgaaatggtcaaagaaggg

SEQ ID NO: 158763 - DNA, 19 bp, Artificial sequence
  SiRNA target sequence
gaaatggtcaaagaaggga

SEQ ID NO: 158764 - DNA, 19 bp, Artificial sequence
  SiRNA target sequence
aaatggtcaaagaagggat

SEQ ID NO: 158765 - DNA, 19 bp, Artificial sequence
  SiRNA target sequence
aatggtcaaagaagggata

SEQ ID NO: 158766 - DNA, 19 bp, Artificial sequence
  SiRNA target sequence
atggtcaaagaagggatag

SEQ ID NO: 158767 - DNA, 19 bp, Artificial sequence
  SiRNA target sequence
tggtcaaagaagggataga

SEQ ID NO: 158768 - DNA, 19 bp, Artificial sequence
  SiRNA target sequence
ggtcaaagaagggatagat

SEQ ID NO: 158769 - DNA, 19 bp, Artificial sequence
  SiRNA target sequence
gtcaaagaagggatagatt

SEQ ID NO: 158770 - DNA, 19 bp, Artificial sequence
  SiRNA target sequence
tcaaagaagggatagattt

SEQ ID NO: 158771 - DNA, 19 bp, Artificial sequence
  SiRNA target sequence
caaagaagggatagattta

SEQ ID NO: 158772 - DNA, 19 bp, Artificial sequence
  SiRNA target sequence
aaagaagggatagatttag

SEQ ID NO: 158773 - DNA, 19 bp, Artificial sequence
  SiRNA target sequence
aagaagggatagatttaga

SEQ ID NO: 158774 - DNA, 19 bp, Artificial sequence
  SiRNA target sequence
agaagggatagatttagat

SEQ ID NO: 158775 - DNA, 19 bp, Artificial sequence
  SiRNA target sequence
gaagggatagatttagata

SEQ ID NO: 158776 - DNA, 19 bp, Artificial sequence
  SiRNA target sequence
aagggatagatttagataa

SEQ ID NO: 158777 - DNA, 19 bp, Artificial sequence
  SiRNA target sequence
agggatagatttagataaa

SEQ ID NO: 158778 - DNA, 19 bp, Artificial sequence
  SiRNA target sequence
gggatagatttagataaaa

SEQ ID NO: 158779 - DNA, 19 bp, Artificial sequence
  SiRNA target sequence
ggatagatttagataaaat

SEQ ID NO: 158780 - DNA, 19 bp, Artificial sequence
  SiRNA target sequence
gatagatttagataaaatt

SEQ ID NO: 158781 - DNA, 19 bp, Artificial sequence
  SiRNA target sequence
atagatttagataaaatta

SEQ ID NO: 158782 - DNA, 19 bp, Artificial sequence
  SiRNA target sequence
tagatttagataaaattaa

SEQ ID NO: 158783 - DNA, 19 bp, Artificial sequence
  SiRNA target sequence
agatttagataaaattaat

SEQ ID NO: 158784 - DNA, 19 bp, Artificial sequence
  SiRNA target sequence
gatttagataaaattaatt

SEQ ID NO: 158785 - DNA, 19 bp, Artificial sequence
  SiRNA target sequence
atttagataaaattaattg

SEQ ID NO: 158786 - DNA, 19 bp, Artificial sequence
  SiRNA target sequence
tttagataaaattaattgg

SEQ ID NO: 158787 - DNA, 19 bp, Artificial sequence
  SiRNA target sequence
ttagataaaattaattggt

SEQ ID NO: 158788 - DNA, 19 bp, Artificial sequence
  SiRNA target sequence
tagataaaattaattggtc

SEQ ID NO: 158789 - DNA, 19 bp, Artificial sequence
  SiRNA target sequence
agataaaattaattggtct

SEQ ID NO: 158790 - DNA, 19 bp, Artificial sequence
  SiRNA target sequence
gataaaattaattggtctg

SEQ ID NO: 158791 - DNA, 19 bp, Artificial sequence
  SiRNA target sequence
ataaaattaattggtctgc

SEQ ID NO: 158792 - DNA, 19 bp, Artificial sequence
  SiRNA target sequence
taaaattaattggtctgct

SEQ ID NO: 158793 - DNA, 19 bp, Artificial sequence
  SiRNA target sequence
aaaattaattggtctgctt

SEQ ID NO: 158794 - DNA, 19 bp, Artificial sequence
  SiRNA target sequence
aaattaattggtctgctta

SEQ ID NO: 158795 - DNA, 19 bp, Artificial sequence
  SiRNA target sequence
aattaattggtctgcttaa

SEQ ID NO: 158796 - DNA, 20 bp, Artificial sequence
  SiRNA target sequence
atgttatttttttatagccc

SEQ ID NO: 158797 - DNA, 20 bp, Artificial sequence
  SiRNA target sequence
tgttatttttttatagcccc

SEQ ID NO: 158798 - DNA, 20 bp, Artificial sequence
  SiRNA target sequence
gttatttttttatagcccca

SEQ ID NO: 158799 - DNA, 20 bp, Artificial sequence
  SiRNA target sequence
ttatttttttatagccccat

SEQ ID NO: 158800 - DNA, 20 bp, Artificial sequence
  SiRNA target sequence
tatttttttatagccccatt

SEQ ID NO: 158801 - DNA, 20 bp, Artificial sequence
  SiRNA target sequence
atttttttatagccccattt

SEQ ID NO: 158802 - DNA, 20 bp, Artificial sequence
  SiRNA target sequence
tttttttatagccccatttt

SEQ ID NO: 158803 - DNA, 20 bp, Artificial sequence
  SiRNA target sequence
ttttttatagccccattttt

SEQ ID NO: 158804 - DNA, 20 bp, Artificial sequence
  SiRNA target sequence
tttttatagccccattttta

SEQ ID NO: 158805 - DNA, 20 bp, Artificial sequence
  SiRNA target sequence
ttttatagccccatttttat

SEQ ID NO: 158806 - DNA, 20 bp, Artificial sequence
  SiRNA target sequence
tttatagccccatttttatg

SEQ ID NO: 158807 - DNA, 20 bp, Artificial sequence
  SiRNA target sequence
ttatagccccatttttatga

SEQ ID NO: 158808 - DNA, 20 bp, Artificial sequence
  SiRNA target sequence
tatagccccatttttatgac

SEQ ID NO: 158809 - DNA, 20 bp, Artificial sequence
  SiRNA target sequence
atagccccatttttatgact

SEQ ID NO: 158810 - DNA, 20 bp, Artificial sequence
  SiRNA target sequence
tagccccatttttatgacta

SEQ ID NO: 158811 - DNA, 20 bp, Artificial sequence
  SiRNA target sequence
agccccatttttatgactaa

SEQ ID NO: 158812 - DNA, 20 bp, Artificial sequence
  SiRNA target sequence
gccccatttttatgactaaa

SEQ ID NO: 158813 - DNA, 20 bp, Artificial sequence
  SiRNA target sequence
ccccatttttatgactaaaa

SEQ ID NO: 158814 - DNA, 20 bp, Artificial sequence
  SiRNA target sequence
cccatttttatgactaaaag

SEQ ID NO: 158815 - DNA, 20 bp, Artificial sequence
  SiRNA target sequence
ccatttttatgactaaaagt

SEQ ID NO: 158816 - DNA, 20 bp, Artificial sequence
  SiRNA target sequence
catttttatgactaaaagtt

SEQ ID NO: 158817 - DNA, 20 bp, Artificial sequence
  SiRNA target sequence
atttttatgactaaaagttt

SEQ ID NO: 158818 - DNA, 20 bp, Artificial sequence
  SiRNA target sequence
tttttatgactaaaagttta

SEQ ID NO: 158819 - DNA, 20 bp, Artificial sequence
  SiRNA target sequence
ttttatgactaaaagtttaa

SEQ ID NO: 158820 - DNA, 20 bp, Artificial sequence
  SiRNA target sequence
tttatgactaaaagtttaac

SEQ ID NO: 158821 - DNA, 20 bp, Artificial sequence
  SiRNA target sequence
ttatgactaaaagtttaacg

SEQ ID NO: 158822 - DNA, 20 bp, Artificial sequence
  SiRNA target sequence
tatgactaaaagtttaacga

SEQ ID NO: 158823 - DNA, 20 bp, Artificial sequence
  SiRNA target sequence
atgactaaaagtttaacgaa

SEQ ID NO: 158824 - DNA, 20 bp, Artificial sequence
  SiRNA target sequence
tgactaaaagtttaacgaat

SEQ ID NO: 158825 - DNA, 20 bp, Artificial sequence
  SiRNA target sequence
gactaaaagtttaacgaatt

SEQ ID NO: 158826 - DNA, 20 bp, Artificial sequence
  SiRNA target sequence
actaaaagtttaacgaattc

SEQ ID NO: 158827 - DNA, 20 bp, Artificial sequence
  SiRNA target sequence
ctaaaagtttaacgaattct

SEQ ID NO: 158828 - DNA, 20 bp, Artificial sequence
  SiRNA target sequence
taaaagtttaacgaattcta

SEQ ID NO: 158829 - DNA, 20 bp, Artificial sequence
  SiRNA target sequence
aaaagtttaacgaattctaa

SEQ ID NO: 158830 - DNA, 20 bp, Artificial sequence
  SiRNA target sequence
aaagtttaacgaattctaaa

SEQ ID NO: 158831 - DNA, 20 bp, Artificial sequence
  SiRNA target sequence
aagtttaacgaattctaaaa

SEQ ID NO: 158832 - DNA, 20 bp, Artificial sequence
  SiRNA target sequence
agtttaacgaattctaaaac

SEQ ID NO: 158833 - DNA, 20 bp, Artificial sequence
  SiRNA target sequence
gtttaacgaattctaaaact

SEQ ID NO: 158834 - DNA, 20 bp, Artificial sequence
  SiRNA target sequence
tttaacgaattctaaaactt

SEQ ID NO: 158835 - DNA, 20 bp, Artificial sequence
  SiRNA target sequence
ttaacgaattctaaaacttt

SEQ ID NO: 158836 - DNA, 20 bp, Artificial sequence
  SiRNA target sequence
taacgaattctaaaacttta

SEQ ID NO: 158837 - DNA, 20 bp, Artificial sequence
  SiRNA target sequence
aacgaattctaaaactttaa

SEQ ID NO: 158838 - DNA, 20 bp, Artificial sequence
  SiRNA target sequence
acgaattctaaaactttaaa

SEQ ID NO: 158839 - DNA, 20 bp, Artificial sequence
  SiRNA target sequence
cgaattctaaaactttaaat

SEQ ID NO: 158840 - DNA, 20 bp, Artificial sequence
  SiRNA target sequence
gaattctaaaactttaaatt

SEQ ID NO: 158841 - DNA, 20 bp, Artificial sequence
  SiRNA target sequence
aattctaaaactttaaattt

SEQ ID NO: 158842 - DNA, 20 bp, Artificial sequence
  SiRNA target sequence
attctaaaactttaaattta

SEQ ID NO: 158843 - DNA, 20 bp, Artificial sequence
  SiRNA target sequence
ttctaaaactttaaatttaa

SEQ ID NO: 158844 - DNA, 20 bp, Artificial sequence
  SiRNA target sequence
tctaaaactttaaatttaat

SEQ ID NO: 158845 - DNA, 20 bp, Artificial sequence
  SiRNA target sequence
ctaaaactttaaatttaatg

SEQ ID NO: 158846 - DNA, 20 bp, Artificial sequence
  SiRNA target sequence
taaaactttaaatttaatgt

SEQ ID NO: 158847 - DNA, 20 bp, Artificial sequence
  SiRNA target sequence
aaaactttaaatttaatgtc

SEQ ID NO: 158848 - DNA, 20 bp, Artificial sequence
  SiRNA target sequence
aaactttaaatttaatgtca

SEQ ID NO: 158849 - DNA, 20 bp, Artificial sequence
  SiRNA target sequence
aactttaaatttaatgtcaa

SEQ ID NO: 158850 - DNA, 20 bp, Artificial sequence
  SiRNA target sequence
actttaaatttaatgtcaag

SEQ ID NO: 158851 - DNA, 20 bp, Artificial sequence
  SiRNA target sequence
ctttaaatttaatgtcaagt

SEQ ID NO: 158852 - DNA, 20 bp, Artificial sequence
  SiRNA target sequence
tttaaatttaatgtcaagtg

SEQ ID NO: 158853 - DNA, 20 bp, Artificial sequence
  SiRNA target sequence
ttaaatttaatgtcaagtgt

SEQ ID NO: 158854 - DNA, 20 bp, Artificial sequence
  SiRNA target sequence
taaatttaatgtcaagtgta

SEQ ID NO: 158855 - DNA, 20 bp, Artificial sequence
  SiRNA target sequence
aaatttaatgtcaagtgtac

SEQ ID NO: 158856 - DNA, 20 bp, Artificial sequence
  SiRNA target sequence
aatttaatgtcaagtgtaca

SEQ ID NO: 158857 - DNA, 20 bp, Artificial sequence
  SiRNA target sequence
atttaatgtcaagtgtacaa

SEQ ID NO: 158858 - DNA, 20 bp, Artificial sequence
  SiRNA target sequence
tttaatgtcaagtgtacaat

SEQ ID NO: 158859 - DNA, 20 bp, Artificial sequence
  SiRNA target sequence
ttaatgtcaagtgtacaatc

SEQ ID NO: 158860 - DNA, 20 bp, Artificial sequence
  SiRNA target sequence
taatgtcaagtgtacaatca

SEQ ID NO: 158861 - DNA, 20 bp, Artificial sequence
  SiRNA target sequence
aatgtcaagtgtacaatcac

SEQ ID NO: 158862 - DNA, 20 bp, Artificial sequence
  SiRNA target sequence
atgtcaagtgtacaatcacc

SEQ ID NO: 158863 - DNA, 20 bp, Artificial sequence
  SiRNA target sequence
tgtcaagtgtacaatcacca

SEQ ID NO: 158864 - DNA, 20 bp, Artificial sequence
  SiRNA target sequence
gtcaagtgtacaatcaccag

SEQ ID NO: 158865 - DNA, 20 bp, Artificial sequence
  SiRNA target sequence
tcaagtgtacaatcaccagt

SEQ ID NO: 158866 - DNA, 20 bp, Artificial sequence
  SiRNA target sequence
caagtgtacaatcaccagtt

SEQ ID NO: 158867 - DNA, 20 bp, Artificial sequence
  SiRNA target sequence
aagtgtacaatcaccagtta

SEQ ID NO: 158868 - DNA, 20 bp, Artificial sequence
  SiRNA target sequence
agtgtacaatcaccagttat

SEQ ID NO: 158869 - DNA, 20 bp, Artificial sequence
  SiRNA target sequence
gtgtacaatcaccagttata

SEQ ID NO: 158870 - DNA, 20 bp, Artificial sequence
  SiRNA target sequence
tgtacaatcaccagttataa

SEQ ID NO: 158871 - DNA, 20 bp, Artificial sequence
  SiRNA target sequence
gtacaatcaccagttataaa

SEQ ID NO: 158872 - DNA, 20 bp, Artificial sequence
  SiRNA target sequence
tacaatcaccagttataaat

SEQ ID NO: 158873 - DNA, 20 bp, Artificial sequence
  SiRNA target sequence
acaatcaccagttataaata

SEQ ID NO: 158874 - DNA, 20 bp, Artificial sequence
  SiRNA target sequence
caatcaccagttataaatac

SEQ ID NO: 158875 - DNA, 20 bp, Artificial sequence
  SiRNA target sequence
aatcaccagttataaataca

SEQ ID NO: 158876 - DNA, 20 bp, Artificial sequence
  SiRNA target sequence
atcaccagttataaatacaa

SEQ ID NO: 158877 - DNA, 20 bp, Artificial sequence
  SiRNA target sequence
tcaccagttataaatacaaa

SEQ ID NO: 158878 - DNA, 20 bp, Artificial sequence
  SiRNA target sequence
caccagttataaatacaaaa

SEQ ID NO: 158879 - DNA, 20 bp, Artificial sequence
  SiRNA target sequence
accagttataaatacaaaaa

SEQ ID NO: 158880 - DNA, 20 bp, Artificial sequence
  SiRNA target sequence
ccagttataaatacaaaaaa

SEQ ID NO: 158881 - DNA, 20 bp, Artificial sequence
  SiRNA target sequence
cagttataaatacaaaaaaa

SEQ ID NO: 158882 - DNA, 20 bp, Artificial sequence
  SiRNA target sequence
agttataaatacaaaaaaaa

SEQ ID NO: 158883 - DNA, 20 bp, Artificial sequence
  SiRNA target sequence
gttataaatacaaaaaaaat

SEQ ID NO: 158884 - DNA, 20 bp, Artificial sequence
  SiRNA target sequence
ttataaatacaaaaaaaata

SEQ ID NO: 158885 - DNA, 20 bp, Artificial sequence
  SiRNA target sequence
tataaatacaaaaaaaatat

SEQ ID NO: 158886 - DNA, 20 bp, Artificial sequence
  SiRNA target sequence
ataaatacaaaaaaaatata

SEQ ID NO: 158887 - DNA, 20 bp, Artificial sequence
  SiRNA target sequence
taaatacaaaaaaaatatat

SEQ ID NO: 158888 - DNA, 20 bp, Artificial sequence
  SiRNA target sequence
aaatacaaaaaaaatatatc

SEQ ID NO: 158889 - DNA, 20 bp, Artificial sequence
  SiRNA target sequence
aatacaaaaaaaatatatct

SEQ ID NO: 158890 - DNA, 20 bp, Artificial sequence
  SiRNA target sequence
atacaaaaaaaatatatctt

SEQ ID NO: 158891 - DNA, 20 bp, Artificial sequence
  SiRNA target sequence
tacaaaaaaaatatatcttg

SEQ ID NO: 158892 - DNA, 20 bp, Artificial sequence
  SiRNA target sequence
acaaaaaaaatatatcttga

SEQ ID NO: 158893 - DNA, 20 bp, Artificial sequence
  SiRNA target sequence
caaaaaaaatatatcttgat

SEQ ID NO: 158894 - DNA, 20 bp, Artificial sequence
  SiRNA target sequence
aaaaaaaatatatcttgatg

SEQ ID NO: 158895 - DNA, 20 bp, Artificial sequence
  SiRNA target sequence
aaaaaaatatatcttgatgc

SEQ ID NO: 158896 - DNA, 20 bp, Artificial sequence
  SiRNA target sequence
aaaaaatatatcttgatgca

SEQ ID NO: 158897 - DNA, 20 bp, Artificial sequence
  SiRNA target sequence
aaaaatatatcttgatgcac

SEQ ID NO: 158898 - DNA, 20 bp, Artificial sequence
  SiRNA target sequence
aaaatatatcttgatgcaca

SEQ ID NO: 158899 - DNA, 20 bp, Artificial sequence
  SiRNA target sequence
aaatatatcttgatgcacaa

SEQ ID NO: 158900 - DNA, 20 bp, Artificial sequence
  SiRNA target sequence
aatatatcttgatgcacaag

SEQ ID NO: 158901 - DNA, 20 bp, Artificial sequence
  SiRNA target sequence
atatatcttgatgcacaagc

SEQ ID NO: 158902 - DNA, 20 bp, Artificial sequence
  SiRNA target sequence
tatatcttgatgcacaagcg

SEQ ID NO: 158903 - DNA, 20 bp, Artificial sequence
  SiRNA target sequence
atatcttgatgcacaagcga

SEQ ID NO: 158904 - DNA, 20 bp, Artificial sequence
  SiRNA target sequence
tatcttgatgcacaagcgac

SEQ ID NO: 158905 - DNA, 20 bp, Artificial sequence
  SiRNA target sequence
atcttgatgcacaagcgacc

SEQ ID NO: 158906 - DNA, 20 bp, Artificial sequence
  SiRNA target sequence
tcttgatgcacaagcgacca

SEQ ID NO: 158907 - DNA, 20 bp, Artificial sequence
  SiRNA target sequence
cttgatgcacaagcgaccaa

SEQ ID NO: 158908 - DNA, 20 bp, Artificial sequence
  SiRNA target sequence
ttgatgcacaagcgaccaag

SEQ ID NO: 158909 - DNA, 20 bp, Artificial sequence
  SiRNA target sequence
tgatgcacaagcgaccaagc

SEQ ID NO: 158910 - DNA, 20 bp, Artificial sequence
  SiRNA target sequence
gatgcacaagcgaccaagcc

SEQ ID NO: 158911 - DNA, 20 bp, Artificial sequence
  SiRNA target sequence
atgcacaagcgaccaagcct

SEQ ID NO: 158912 - DNA, 20 bp, Artificial sequence
  SiRNA target sequence
tgcacaagcgaccaagcctt

SEQ ID NO: 158913 - DNA, 20 bp, Artificial sequence
  SiRNA target sequence
gcacaagcgaccaagccttt

SEQ ID NO: 158914 - DNA, 20 bp, Artificial sequence
  SiRNA target sequence
cacaagcgaccaagccttta

SEQ ID NO: 158915 - DNA, 20 bp, Artificial sequence
  SiRNA target sequence
acaagcgaccaagcctttag

SEQ ID NO: 158916 - DNA, 20 bp, Artificial sequence
  SiRNA target sequence
caagcgaccaagcctttaga

SEQ ID NO: 158917 - DNA, 20 bp, Artificial sequence
  SiRNA target sequence
aagcgaccaagcctttagac

SEQ ID NO: 158918 - DNA, 20 bp, Artificial sequence
  SiRNA target sequence
agcgaccaagcctttagacc

SEQ ID NO: 158919 - DNA, 20 bp, Artificial sequence
  SiRNA target sequence
gcgaccaagcctttagaccc

SEQ ID NO: 158920 - DNA, 20 bp, Artificial sequence
  SiRNA target sequence
cgaccaagcctttagacccg

SEQ ID NO: 158921 - DNA, 20 bp, Artificial sequence
  SiRNA target sequence
gaccaagcctttagacccgc

SEQ ID NO: 158922 - DNA, 20 bp, Artificial sequence
  SiRNA target sequence
accaagcctttagacccgcg

SEQ ID NO: 158923 - DNA, 20 bp, Artificial sequence
  SiRNA target sequence
ccaagcctttagacccgcgt

SEQ ID NO: 158924 - DNA, 20 bp, Artificial sequence
  SiRNA target sequence
caagcctttagacccgcgtg

SEQ ID NO: 158925 - DNA, 20 bp, Artificial sequence
  SiRNA target sequence
aagcctttagacccgcgtgt

SEQ ID NO: 158926 - DNA, 20 bp, Artificial sequence
  SiRNA target sequence
agcctttagacccgcgtgtg

SEQ ID NO: 158927 - DNA, 20 bp, Artificial sequence
  SiRNA target sequence
gcctttagacccgcgtgtgc

SEQ ID NO: 158928 - DNA, 20 bp, Artificial sequence
  SiRNA target sequence
cctttagacccgcgtgtgct

SEQ ID NO: 158929 - DNA, 20 bp, Artificial sequence
  SiRNA target sequence
ctttagacccgcgtgtgctt

SEQ ID NO: 158930 - DNA, 20 bp, Artificial sequence
  SiRNA target sequence
tttagacccgcgtgtgcttg

SEQ ID NO: 158931 - DNA, 20 bp, Artificial sequence
  SiRNA target sequence
ttagacccgcgtgtgcttga

SEQ ID NO: 158932 - DNA, 20 bp, Artificial sequence
  SiRNA target sequence
tagacccgcgtgtgcttgat

SEQ ID NO: 158933 - DNA, 20 bp, Artificial sequence
  SiRNA target sequence
agacccgcgtgtgcttgatg

SEQ ID NO: 158934 - DNA, 20 bp, Artificial sequence
  SiRNA target sequence
gacccgcgtgtgcttgatgc

SEQ ID NO: 158935 - DNA, 20 bp, Artificial sequence
  SiRNA target sequence
acccgcgtgtgcttgatgca

SEQ ID NO: 158936 - DNA, 20 bp, Artificial sequence
  SiRNA target sequence
cccgcgtgtgcttgatgcaa

SEQ ID NO: 158937 - DNA, 20 bp, Artificial sequence
  SiRNA target sequence
ccgcgtgtgcttgatgcaat

SEQ ID NO: 158938 - DNA, 20 bp, Artificial sequence
  SiRNA target sequence
cgcgtgtgcttgatgcaatg

SEQ ID NO: 158939 - DNA, 20 bp, Artificial sequence
  SiRNA target sequence
gcgtgtgcttgatgcaatgc

SEQ ID NO: 158940 - DNA, 20 bp, Artificial sequence
  SiRNA target sequence
cgtgtgcttgatgcaatgct

SEQ ID NO: 158941 - DNA, 20 bp, Artificial sequence
  SiRNA target sequence
gtgtgcttgatgcaatgctt

SEQ ID NO: 158942 - DNA, 20 bp, Artificial sequence
  SiRNA target sequence
tgtgcttgatgcaatgcttc

SEQ ID NO: 158943 - DNA, 20 bp, Artificial sequence
  SiRNA target sequence
gtgcttgatgcaatgcttcc

SEQ ID NO: 158944 - DNA, 20 bp, Artificial sequence
  SiRNA target sequence
tgcttgatgcaatgcttcca

SEQ ID NO: 158945 - DNA, 20 bp, Artificial sequence
  SiRNA target sequence
gcttgatgcaatgcttccat

SEQ ID NO: 158946 - DNA, 20 bp, Artificial sequence
  SiRNA target sequence
cttgatgcaatgcttccata

SEQ ID NO: 158947 - DNA, 20 bp, Artificial sequence
  SiRNA target sequence
ttgatgcaatgcttccatac

SEQ ID NO: 158948 - DNA, 20 bp, Artificial sequence
  SiRNA target sequence
tgatgcaatgcttccatact

SEQ ID NO: 158949 - DNA, 20 bp, Artificial sequence
  SiRNA target sequence
gatgcaatgcttccatacta

SEQ ID NO: 158950 - DNA, 20 bp, Artificial sequence
  SiRNA target sequence
atgcaatgcttccatactat

SEQ ID NO: 158951 - DNA, 20 bp, Artificial sequence
  SiRNA target sequence
tgcaatgcttccatactata

SEQ ID NO: 158952 - DNA, 20 bp, Artificial sequence
  SiRNA target sequence
gcaatgcttccatactatac

SEQ ID NO: 158953 - DNA, 20 bp, Artificial sequence
  SiRNA target sequence
caatgcttccatactataca

SEQ ID NO: 158954 - DNA, 20 bp, Artificial sequence
  SiRNA target sequence
aatgcttccatactatacat

SEQ ID NO: 158955 - DNA, 20 bp, Artificial sequence
  SiRNA target sequence
atgcttccatactatacatc

SEQ ID NO: 158956 - DNA, 20 bp, Artificial sequence
  SiRNA target sequence
tgcttccatactatacatcc

SEQ ID NO: 158957 - DNA, 20 bp, Artificial sequence
  SiRNA target sequence
gcttccatactatacatcca

SEQ ID NO: 158958 - DNA, 20 bp, Artificial sequence
  SiRNA target sequence
cttccatactatacatccat

SEQ ID NO: 158959 - DNA, 20 bp, Artificial sequence
  SiRNA target sequence
ttccatactatacatccatt

SEQ ID NO: 158960 - DNA, 20 bp, Artificial sequence
  SiRNA target sequence
tccatactatacatccattt

SEQ ID NO: 158961 - DNA, 20 bp, Artificial sequence
  SiRNA target sequence
ccatactatacatccatttt

SEQ ID NO: 158962 - DNA, 20 bp, Artificial sequence
  SiRNA target sequence
catactatacatccattttt

SEQ ID NO: 158963 - DNA, 20 bp, Artificial sequence
  SiRNA target sequence
atactatacatccatttttg

SEQ ID NO: 158964 - DNA, 20 bp, Artificial sequence
  SiRNA target sequence
tactatacatccatttttgg

SEQ ID NO: 158965 - DNA, 20 bp, Artificial sequence
  SiRNA target sequence
actatacatccatttttgga

SEQ ID NO: 158966 - DNA, 20 bp, Artificial sequence
  SiRNA target sequence
ctatacatccatttttggaa

SEQ ID NO: 158967 - DNA, 20 bp, Artificial sequence
  SiRNA target sequence
tatacatccatttttggaaa

SEQ ID NO: 158968 - DNA, 20 bp, Artificial sequence
  SiRNA target sequence
atacatccatttttggaaat

SEQ ID NO: 158969 - DNA, 20 bp, Artificial sequence
  SiRNA target sequence
tacatccatttttggaaatc

SEQ ID NO: 158970 - DNA, 20 bp, Artificial sequence
  SiRNA target sequence
acatccatttttggaaatcc

SEQ ID NO: 158971 - DNA, 20 bp, Artificial sequence
  SiRNA target sequence
catccatttttggaaatcca

SEQ ID NO: 158972 - DNA, 20 bp, Artificial sequence
  SiRNA target sequence
atccatttttggaaatccac

SEQ ID NO: 158973 - DNA, 20 bp, Artificial sequence
  SiRNA target sequence
tccatttttggaaatccaca

SEQ ID NO: 158974 - DNA, 20 bp, Artificial sequence
  SiRNA target sequence
ccatttttggaaatccacat

SEQ ID NO: 158975 - DNA, 20 bp, Artificial sequence
  SiRNA target sequence
catttttggaaatccacatt

SEQ ID NO: 158976 - DNA, 20 bp, Artificial sequence
  SiRNA target sequence
atttttggaaatccacattc

SEQ ID NO: 158977 - DNA, 20 bp, Artificial sequence
  SiRNA target sequence
tttttggaaatccacattct

SEQ ID NO: 158978 - DNA, 20 bp, Artificial sequence
  SiRNA target sequence
ttttggaaatccacattctc

SEQ ID NO: 158979 - DNA, 20 bp, Artificial sequence
  SiRNA target sequence
tttggaaatccacattctcg

SEQ ID NO: 158980 - DNA, 20 bp, Artificial sequence
  SiRNA target sequence
ttggaaatccacattctcgc

SEQ ID NO: 158981 - DNA, 20 bp, Artificial sequence
  SiRNA target sequence
tggaaatccacattctcgca

SEQ ID NO: 158982 - DNA, 20 bp, Artificial sequence
  SiRNA target sequence
ggaaatccacattctcgcac

SEQ ID NO: 158983 - DNA, 20 bp, Artificial sequence
  SiRNA target sequence
gaaatccacattctcgcacg

SEQ ID NO: 158984 - DNA, 20 bp, Artificial sequence
  SiRNA target sequence
aaatccacattctcgcacgc

SEQ ID NO: 158985 - DNA, 20 bp, Artificial sequence
  SiRNA target sequence
aatccacattctcgcacgca

SEQ ID NO: 158986 - DNA, 20 bp, Artificial sequence
  SiRNA target sequence
atccacattctcgcacgcat

SEQ ID NO: 158987 - DNA, 20 bp, Artificial sequence
  SiRNA target sequence
tccacattctcgcacgcata

SEQ ID NO: 158988 - DNA, 20 bp, Artificial sequence
  SiRNA target sequence
ccacattctcgcacgcatac

SEQ ID NO: 158989 - DNA, 20 bp, Artificial sequence
  SiRNA target sequence
cacattctcgcacgcatacg

SEQ ID NO: 158990 - DNA, 20 bp, Artificial sequence
  SiRNA target sequence
acattctcgcacgcatacgt

SEQ ID NO: 158991 - DNA, 20 bp, Artificial sequence
  SiRNA target sequence
cattctcgcacgcatacgtt

SEQ ID NO: 158992 - DNA, 20 bp, Artificial sequence
  SiRNA target sequence
attctcgcacgcatacgttt

SEQ ID NO: 158993 - DNA, 20 bp, Artificial sequence
  SiRNA target sequence
ttctcgcacgcatacgtttg

SEQ ID NO: 158994 - DNA, 20 bp, Artificial sequence
  SiRNA target sequence
tctcgcacgcatacgtttgg

SEQ ID NO: 158995 - DNA, 20 bp, Artificial sequence
  SiRNA target sequence
ctcgcacgcatacgtttgga

SEQ ID NO: 158996 - DNA, 20 bp, Artificial sequence
  SiRNA target sequence
tcgcacgcatacgtttggat

SEQ ID NO: 158997 - DNA, 20 bp, Artificial sequence
  SiRNA target sequence
cgcacgcatacgtttggatg

SEQ ID NO: 158998 - DNA, 20 bp, Artificial sequence
  SiRNA target sequence
gcacgcatacgtttggatgg

SEQ ID NO: 158999 - DNA, 20 bp, Artificial sequence
  SiRNA target sequence
cacgcatacgtttggatgga

SEQ ID NO: 159000 - DNA, 20 bp, Artificial sequence
  SiRNA target sequence
acgcatacgtttggatggaa

SEQ ID NO: 159001 - DNA, 20 bp, Artificial sequence
  SiRNA target sequence
cgcatacgtttggatggaat

SEQ ID NO: 159002 - DNA, 20 bp, Artificial sequence
  SiRNA target sequence
gcatacgtttggatggaatg

SEQ ID NO: 159003 - DNA, 20 bp, Artificial sequence
  SiRNA target sequence
catacgtttggatggaatgc

SEQ ID NO: 159004 - DNA, 20 bp, Artificial sequence
  SiRNA target sequence
atacgtttggatggaatgca

SEQ ID NO: 159005 - DNA, 20 bp, Artificial sequence
  SiRNA target sequence
tacgtttggatggaatgcag

SEQ ID NO: 159006 - DNA, 20 bp, Artificial sequence
  SiRNA target sequence
acgtttggatggaatgcaga

SEQ ID NO: 159007 - DNA, 20 bp, Artificial sequence
  SiRNA target sequence
cgtttggatggaatgcagaa

SEQ ID NO: 159008 - DNA, 20 bp, Artificial sequence
  SiRNA target sequence
gtttggatggaatgcagaaa

SEQ ID NO: 159009 - DNA, 20 bp, Artificial sequence
  SiRNA target sequence
tttggatggaatgcagaaaa

SEQ ID NO: 159010 - DNA, 20 bp, Artificial sequence
  SiRNA target sequence
ttggatggaatgcagaaaaa

SEQ ID NO: 159011 - DNA, 20 bp, Artificial sequence
  SiRNA target sequence
tggatggaatgcagaaaaag

SEQ ID NO: 159012 - DNA, 20 bp, Artificial sequence
  SiRNA target sequence
ggatggaatgcagaaaaagg

SEQ ID NO: 159013 - DNA, 20 bp, Artificial sequence
  SiRNA target sequence
gatggaatgcagaaaaaggc

SEQ ID NO: 159014 - DNA, 20 bp, Artificial sequence
  SiRNA target sequence
atggaatgcagaaaaaggcg

SEQ ID NO: 159015 - DNA, 20 bp, Artificial sequence
  SiRNA target sequence
tggaatgcagaaaaaggcgt

SEQ ID NO: 159016 - DNA, 20 bp, Artificial sequence
  SiRNA target sequence
ggaatgcagaaaaaggcgta

SEQ ID NO: 159017 - DNA, 20 bp, Artificial sequence
  SiRNA target sequence
gaatgcagaaaaaggcgtag

SEQ ID NO: 159018 - DNA, 20 bp, Artificial sequence
  SiRNA target sequence
aatgcagaaaaaggcgtaga

SEQ ID NO: 159019 - DNA, 20 bp, Artificial sequence
  SiRNA target sequence
atgcagaaaaaggcgtagaa

SEQ ID NO: 159020 - DNA, 20 bp, Artificial sequence
  SiRNA target sequence
tgcagaaaaaggcgtagaaa

SEQ ID NO: 159021 - DNA, 20 bp, Artificial sequence
  SiRNA target sequence
gcagaaaaaggcgtagaaat

SEQ ID NO: 159022 - DNA, 20 bp, Artificial sequence
  SiRNA target sequence
cagaaaaaggcgtagaaatg

SEQ ID NO: 159023 - DNA, 20 bp, Artificial sequence
  SiRNA target sequence
agaaaaaggcgtagaaatgg

SEQ ID NO: 159024 - DNA, 20 bp, Artificial sequence
  SiRNA target sequence
gaaaaaggcgtagaaatggc

SEQ ID NO: 159025 - DNA, 20 bp, Artificial sequence
  SiRNA target sequence
aaaaaggcgtagaaatggct

SEQ ID NO: 159026 - DNA, 20 bp, Artificial sequence
  SiRNA target sequence
aaaaggcgtagaaatggctc

SEQ ID NO: 159027 - DNA, 20 bp, Artificial sequence
  SiRNA target sequence
aaaggcgtagaaatggctcg

SEQ ID NO: 159028 - DNA, 20 bp, Artificial sequence
  SiRNA target sequence
aaggcgtagaaatggctcga

SEQ ID NO: 159029 - DNA, 20 bp, Artificial sequence
  SiRNA target sequence
aggcgtagaaatggctcgaa

SEQ ID NO: 159030 - DNA, 20 bp, Artificial sequence
  SiRNA target sequence
ggcgtagaaatggctcgaaa

SEQ ID NO: 159031 - DNA, 20 bp, Artificial sequence
  SiRNA target sequence
gcgtagaaatggctcgaaag

SEQ ID NO: 159032 - DNA, 20 bp, Artificial sequence
  SiRNA target sequence
cgtagaaatggctcgaaagc

SEQ ID NO: 159033 - DNA, 20 bp, Artificial sequence
  SiRNA target sequence
gtagaaatggctcgaaagca

SEQ ID NO: 159034 - DNA, 20 bp, Artificial sequence
  SiRNA target sequence
tagaaatggctcgaaagcaa

SEQ ID NO: 159035 - DNA, 20 bp, Artificial sequence
  SiRNA target sequence
agaaatggctcgaaagcaag

SEQ ID NO: 159036 - DNA, 20 bp, Artificial sequence
  SiRNA target sequence
gaaatggctcgaaagcaagt

SEQ ID NO: 159037 - DNA, 20 bp, Artificial sequence
  SiRNA target sequence
aaatggctcgaaagcaagta

SEQ ID NO: 159038 - DNA, 20 bp, Artificial sequence
  SiRNA target sequence
aatggctcgaaagcaagtag

SEQ ID NO: 159039 - DNA, 20 bp, Artificial sequence
  SiRNA target sequence
atggctcgaaagcaagtagc

SEQ ID NO: 159040 - DNA, 20 bp, Artificial sequence
  SiRNA target sequence
tggctcgaaagcaagtagca

SEQ ID NO: 159041 - DNA, 20 bp, Artificial sequence
  SiRNA target sequence
ggctcgaaagcaagtagcag

SEQ ID NO: 159042 - DNA, 20 bp, Artificial sequence
  SiRNA target sequence
gctcgaaagcaagtagcaga

SEQ ID NO: 159043 - DNA, 20 bp, Artificial sequence
  SiRNA target sequence
ctcgaaagcaagtagcagat

SEQ ID NO: 159044 - DNA, 20 bp, Artificial sequence
  SiRNA target sequence
tcgaaagcaagtagcagatt

SEQ ID NO: 159045 - DNA, 20 bp, Artificial sequence
  SiRNA target sequence
cgaaagcaagtagcagattt

SEQ ID NO: 159046 - DNA, 20 bp, Artificial sequence
  SiRNA target sequence
gaaagcaagtagcagattta

SEQ ID NO: 159047 - DNA, 20 bp, Artificial sequence
  SiRNA target sequence
aaagcaagtagcagatttac

SEQ ID NO: 159048 - DNA, 20 bp, Artificial sequence
  SiRNA target sequence
aagcaagtagcagatttact

SEQ ID NO: 159049 - DNA, 20 bp, Artificial sequence
  SiRNA target sequence
agcaagtagcagatttactg

SEQ ID NO: 159050 - DNA, 20 bp, Artificial sequence
  SiRNA target sequence
gcaagtagcagatttactga

SEQ ID NO: 159051 - DNA, 20 bp, Artificial sequence
  SiRNA target sequence
caagtagcagatttactgaa

SEQ ID NO: 159052 - DNA, 20 bp, Artificial sequence
  SiRNA target sequence
aagtagcagatttactgaat

SEQ ID NO: 159053 - DNA, 20 bp, Artificial sequence
  SiRNA target sequence
agtagcagatttactgaatg

SEQ ID NO: 159054 - DNA, 20 bp, Artificial sequence
  SiRNA target sequence
gtagcagatttactgaatgc

SEQ ID NO: 159055 - DNA, 20 bp, Artificial sequence
  SiRNA target sequence
tagcagatttactgaatgcc

SEQ ID NO: 159056 - DNA, 20 bp, Artificial sequence
  SiRNA target sequence
agcagatttactgaatgcca

SEQ ID NO: 159057 - DNA, 20 bp, Artificial sequence
  SiRNA target sequence
gcagatttactgaatgccaa

SEQ ID NO: 159058 - DNA, 20 bp, Artificial sequence
  SiRNA target sequence
cagatttactgaatgccaat

SEQ ID NO: 159059 - DNA, 20 bp, Artificial sequence
  SiRNA target sequence
agatttactgaatgccaatg

SEQ ID NO: 159060 - DNA, 20 bp, Artificial sequence
  SiRNA target sequence
gatttactgaatgccaatga

SEQ ID NO: 159061 - DNA, 20 bp, Artificial sequence
  SiRNA target sequence
atttactgaatgccaatgaa

SEQ ID NO: 159062 - DNA, 20 bp, Artificial sequence
  SiRNA target sequence
tttactgaatgccaatgaaa

SEQ ID NO: 159063 - DNA, 20 bp, Artificial sequence
  SiRNA target sequence
ttactgaatgccaatgaaaa

SEQ ID NO: 159064 - DNA, 20 bp, Artificial sequence
  SiRNA target sequence
tactgaatgccaatgaaaaa

SEQ ID NO: 159065 - DNA, 20 bp, Artificial sequence
  SiRNA target sequence
actgaatgccaatgaaaaag

SEQ ID NO: 159066 - DNA, 20 bp, Artificial sequence
  SiRNA target sequence
ctgaatgccaatgaaaaaga

SEQ ID NO: 159067 - DNA, 20 bp, Artificial sequence
  SiRNA target sequence
tgaatgccaatgaaaaagaa

SEQ ID NO: 159068 - DNA, 20 bp, Artificial sequence
  SiRNA target sequence
gaatgccaatgaaaaagaaa

SEQ ID NO: 159069 - DNA, 20 bp, Artificial sequence
  SiRNA target sequence
aatgccaatgaaaaagaaat

SEQ ID NO: 159070 - DNA, 20 bp, Artificial sequence
  SiRNA target sequence
atgccaatgaaaaagaaatt

SEQ ID NO: 159071 - DNA, 20 bp, Artificial sequence
  SiRNA target sequence
tgccaatgaaaaagaaatta

SEQ ID NO: 159072 - DNA, 20 bp, Artificial sequence
  SiRNA target sequence
gccaatgaaaaagaaattat

SEQ ID NO: 159073 - DNA, 20 bp, Artificial sequence
  SiRNA target sequence
ccaatgaaaaagaaattatt

SEQ ID NO: 159074 - DNA, 20 bp, Artificial sequence
  SiRNA target sequence
caatgaaaaagaaattattt

SEQ ID NO: 159075 - DNA, 20 bp, Artificial sequence
  SiRNA target sequence
aatgaaaaagaaattatttt

SEQ ID NO: 159076 - DNA, 20 bp, Artificial sequence
  SiRNA target sequence
atgaaaaagaaattattttt

SEQ ID NO: 159077 - DNA, 20 bp, Artificial sequence
  SiRNA target sequence
tgaaaaagaaattattttta

SEQ ID NO: 159078 - DNA, 20 bp, Artificial sequence
  SiRNA target sequence
gaaaaagaaattatttttac

SEQ ID NO: 159079 - DNA, 20 bp, Artificial sequence
  SiRNA target sequence
aaaaagaaattatttttact

SEQ ID NO: 159080 - DNA, 20 bp, Artificial sequence
  SiRNA target sequence
aaaagaaattatttttacta

SEQ ID NO: 159081 - DNA, 20 bp, Artificial sequence
  SiRNA target sequence
aaagaaattatttttactag

SEQ ID NO: 159082 - DNA, 20 bp, Artificial sequence
  SiRNA target sequence
aagaaattatttttactagc

SEQ ID NO: 159083 - DNA, 20 bp, Artificial sequence
  SiRNA target sequence
agaaattatttttactagcg

SEQ ID NO: 159084 - DNA, 20 bp, Artificial sequence
  SiRNA target sequence
gaaattatttttactagcgg

SEQ ID NO: 159085 - DNA, 20 bp, Artificial sequence
  SiRNA target sequence
aaattatttttactagcggt

SEQ ID NO: 159086 - DNA, 20 bp, Artificial sequence
  SiRNA target sequence
aattatttttactagcggtg

SEQ ID NO: 159087 - DNA, 20 bp, Artificial sequence
  SiRNA target sequence
attatttttactagcggtgc

SEQ ID NO: 159088 - DNA, 20 bp, Artificial sequence
  SiRNA target sequence
ttatttttactagcggtgct

SEQ ID NO: 159089 - DNA, 20 bp, Artificial sequence
  SiRNA target sequence
tatttttactagcggtgcta

SEQ ID NO: 159090 - DNA, 20 bp, Artificial sequence
  SiRNA target sequence
atttttactagcggtgctac

SEQ ID NO: 159091 - DNA, 20 bp, Artificial sequence
  SiRNA target sequence
tttttactagcggtgctact

SEQ ID NO: 159092 - DNA, 20 bp, Artificial sequence
  SiRNA target sequence
ttttactagcggtgctactg

SEQ ID NO: 159093 - DNA, 20 bp, Artificial sequence
  SiRNA target sequence
tttactagcggtgctactga

SEQ ID NO: 159094 - DNA, 20 bp, Artificial sequence
  SiRNA target sequence
ttactagcggtgctactgag

SEQ ID NO: 159095 - DNA, 20 bp, Artificial sequence
  SiRNA target sequence
tactagcggtgctactgaga

SEQ ID NO: 159096 - DNA, 20 bp, Artificial sequence
  SiRNA target sequence
actagcggtgctactgagag

SEQ ID NO: 159097 - DNA, 20 bp, Artificial sequence
  SiRNA target sequence
ctagcggtgctactgagagt

SEQ ID NO: 159098 - DNA, 20 bp, Artificial sequence
  SiRNA target sequence
tagcggtgctactgagagta

SEQ ID NO: 159099 - DNA, 20 bp, Artificial sequence
  SiRNA target sequence
agcggtgctactgagagtaa

SEQ ID NO: 159100 - DNA, 20 bp, Artificial sequence
  SiRNA target sequence
gcggtgctactgagagtaac

SEQ ID NO: 159101 - DNA, 20 bp, Artificial sequence
  SiRNA target sequence
cggtgctactgagagtaaca

SEQ ID NO: 159102 - DNA, 20 bp, Artificial sequence
  SiRNA target sequence
ggtgctactgagagtaacaa

SEQ ID NO: 159103 - DNA, 20 bp, Artificial sequence
  SiRNA target sequence
gtgctactgagagtaacaac

SEQ ID NO: 159104 - DNA, 20 bp, Artificial sequence
  SiRNA target sequence
tgctactgagagtaacaacc

SEQ ID NO: 159105 - DNA, 20 bp, Artificial sequence
  SiRNA target sequence
gctactgagagtaacaacct

SEQ ID NO: 159106 - DNA, 20 bp, Artificial sequence
  SiRNA target sequence
ctactgagagtaacaacctt

SEQ ID NO: 159107 - DNA, 20 bp, Artificial sequence
  SiRNA target sequence
tactgagagtaacaaccttg

SEQ ID NO: 159108 - DNA, 20 bp, Artificial sequence
  SiRNA target sequence
actgagagtaacaaccttgc

SEQ ID NO: 159109 - DNA, 20 bp, Artificial sequence
  SiRNA target sequence
ctgagagtaacaaccttgca

SEQ ID NO: 159110 - DNA, 20 bp, Artificial sequence
  SiRNA target sequence
tgagagtaacaaccttgcac

SEQ ID NO: 159111 - DNA, 20 bp, Artificial sequence
  SiRNA target sequence
gagagtaacaaccttgcact

SEQ ID NO: 159112 - DNA, 20 bp, Artificial sequence
  SiRNA target sequence
agagtaacaaccttgcacta

SEQ ID NO: 159113 - DNA, 20 bp, Artificial sequence
  SiRNA target sequence
gagtaacaaccttgcactaa

SEQ ID NO: 159114 - DNA, 20 bp, Artificial sequence
  SiRNA target sequence
agtaacaaccttgcactaaa

SEQ ID NO: 159115 - DNA, 20 bp, Artificial sequence
  SiRNA target sequence
gtaacaaccttgcactaaag

SEQ ID NO: 159116 - DNA, 20 bp, Artificial sequence
  SiRNA target sequence
taacaaccttgcactaaagg

SEQ ID NO: 159117 - DNA, 20 bp, Artificial sequence
  SiRNA target sequence
aacaaccttgcactaaaggg

SEQ ID NO: 159118 - DNA, 20 bp, Artificial sequence
  SiRNA target sequence
acaaccttgcactaaagggt

SEQ ID NO: 159119 - DNA, 20 bp, Artificial sequence
  SiRNA target sequence
caaccttgcactaaagggtg

SEQ ID NO: 159120 - DNA, 20 bp, Artificial sequence
  SiRNA target sequence
aaccttgcactaaagggtgt

SEQ ID NO: 159121 - DNA, 20 bp, Artificial sequence
  SiRNA target sequence
accttgcactaaagggtgtc

SEQ ID NO: 159122 - DNA, 20 bp, Artificial sequence
  SiRNA target sequence
ccttgcactaaagggtgtct

SEQ ID NO: 159123 - DNA, 20 bp, Artificial sequence
  SiRNA target sequence
cttgcactaaagggtgtctt

SEQ ID NO: 159124 - DNA, 20 bp, Artificial sequence
  SiRNA target sequence
ttgcactaaagggtgtcttt

SEQ ID NO: 159125 - DNA, 20 bp, Artificial sequence
  SiRNA target sequence
tgcactaaagggtgtctttg

SEQ ID NO: 159126 - DNA, 20 bp, Artificial sequence
  SiRNA target sequence
gcactaaagggtgtctttgc

SEQ ID NO: 159127 - DNA, 20 bp, Artificial sequence
  SiRNA target sequence
cactaaagggtgtctttgca

SEQ ID NO: 159128 - DNA, 20 bp, Artificial sequence
  SiRNA target sequence
actaaagggtgtctttgcat

SEQ ID NO: 159129 - DNA, 20 bp, Artificial sequence
  SiRNA target sequence
ctaaagggtgtctttgcatt

SEQ ID NO: 159130 - DNA, 20 bp, Artificial sequence
  SiRNA target sequence
taaagggtgtctttgcattt

SEQ ID NO: 159131 - DNA, 20 bp, Artificial sequence
  SiRNA target sequence
aaagggtgtctttgcatttt

SEQ ID NO: 159132 - DNA, 20 bp, Artificial sequence
  SiRNA target sequence
aagggtgtctttgcattttt

SEQ ID NO: 159133 - DNA, 20 bp, Artificial sequence
  SiRNA target sequence
agggtgtctttgcattttta

SEQ ID NO: 159134 - DNA, 20 bp, Artificial sequence
  SiRNA target sequence
gggtgtctttgcatttttaa

SEQ ID NO: 159135 - DNA, 20 bp, Artificial sequence
  SiRNA target sequence
ggtgtctttgcatttttaaa

SEQ ID NO: 159136 - DNA, 20 bp, Artificial sequence
  SiRNA target sequence
gtgtctttgcatttttaaaa

SEQ ID NO: 159137 - DNA, 20 bp, Artificial sequence
  SiRNA target sequence
tgtctttgcatttttaaaaa

SEQ ID NO: 159138 - DNA, 20 bp, Artificial sequence
  SiRNA target sequence
gtctttgcatttttaaaaaa

SEQ ID NO: 159139 - DNA, 20 bp, Artificial sequence
  SiRNA target sequence
tctttgcatttttaaaaaaa

SEQ ID NO: 159140 - DNA, 20 bp, Artificial sequence
  SiRNA target sequence
ctttgcatttttaaaaaaag

SEQ ID NO: 159141 - DNA, 20 bp, Artificial sequence
  SiRNA target sequence
tttgcatttttaaaaaaaga

SEQ ID NO: 159142 - DNA, 20 bp, Artificial sequence
  SiRNA target sequence
ttgcatttttaaaaaaagac

SEQ ID NO: 159143 - DNA, 20 bp, Artificial sequence
  SiRNA target sequence
tgcatttttaaaaaaagaca

SEQ ID NO: 159144 - DNA, 20 bp, Artificial sequence
  SiRNA target sequence
gcatttttaaaaaaagacaa

SEQ ID NO: 159145 - DNA, 20 bp, Artificial sequence
  SiRNA target sequence
catttttaaaaaaagacaat

SEQ ID NO: 159146 - DNA, 20 bp, Artificial sequence
  SiRNA target sequence
atttttaaaaaaagacaata

SEQ ID NO: 159147 - DNA, 20 bp, Artificial sequence
  SiRNA target sequence
tttttaaaaaaagacaatag

SEQ ID NO: 159148 - DNA, 20 bp, Artificial sequence
  SiRNA target sequence
ttttaaaaaaagacaatagg

SEQ ID NO: 159149 - DNA, 20 bp, Artificial sequence
  SiRNA target sequence
tttaaaaaaagacaataggc

SEQ ID NO: 159150 - DNA, 20 bp, Artificial sequence
  SiRNA target sequence
ttaaaaaaagacaataggcc

SEQ ID NO: 159151 - DNA, 20 bp, Artificial sequence
  SiRNA target sequence
taaaaaaagacaataggcct

SEQ ID NO: 159152 - DNA, 20 bp, Artificial sequence
  SiRNA target sequence
aaaaaaagacaataggcctg

SEQ ID NO: 159153 - DNA, 20 bp, Artificial sequence
  SiRNA target sequence
aaaaaagacaataggcctgt

SEQ ID NO: 159154 - DNA, 20 bp, Artificial sequence
  SiRNA target sequence
aaaaagacaataggcctgtt

SEQ ID NO: 159155 - DNA, 20 bp, Artificial sequence
  SiRNA target sequence
aaaagacaataggcctgttc

SEQ ID NO: 159156 - DNA, 20 bp, Artificial sequence
  SiRNA target sequence
aaagacaataggcctgttca

SEQ ID NO: 159157 - DNA, 20 bp, Artificial sequence
  SiRNA target sequence
aagacaataggcctgttcat

SEQ ID NO: 159158 - DNA, 20 bp, Artificial sequence
  SiRNA target sequence
agacaataggcctgttcata

SEQ ID NO: 159159 - DNA, 20 bp, Artificial sequence
  SiRNA target sequence
gacaataggcctgttcatat

SEQ ID NO: 159160 - DNA, 20 bp, Artificial sequence
  SiRNA target sequence
acaataggcctgttcatatc

SEQ ID NO: 159161 - DNA, 20 bp, Artificial sequence
  SiRNA target sequence
caataggcctgttcatatca

SEQ ID NO: 159162 - DNA, 20 bp, Artificial sequence
  SiRNA target sequence
aataggcctgttcatatcat

SEQ ID NO: 159163 - DNA, 20 bp, Artificial sequence
  SiRNA target sequence
ataggcctgttcatatcatt

SEQ ID NO: 159164 - DNA, 20 bp, Artificial sequence
  SiRNA target sequence
taggcctgttcatatcatta

SEQ ID NO: 159165 - DNA, 20 bp, Artificial sequence
  SiRNA target sequence
aggcctgttcatatcattac

SEQ ID NO: 159166 - DNA, 20 bp, Artificial sequence
  SiRNA target sequence
ggcctgttcatatcattacc

SEQ ID NO: 159167 - DNA, 20 bp, Artificial sequence
  SiRNA target sequence
gcctgttcatatcattacca

SEQ ID NO: 159168 - DNA, 20 bp, Artificial sequence
  SiRNA target sequence
cctgttcatatcattaccac

SEQ ID NO: 159169 - DNA, 20 bp, Artificial sequence
  SiRNA target sequence
ctgttcatatcattaccaca

SEQ ID NO: 159170 - DNA, 20 bp, Artificial sequence
  SiRNA target sequence
tgttcatatcattaccacac

SEQ ID NO: 159171 - DNA, 20 bp, Artificial sequence
  SiRNA target sequence
gttcatatcattaccacaca

SEQ ID NO: 159172 - DNA, 20 bp, Artificial sequence
  SiRNA target sequence
ttcatatcattaccacacaa

SEQ ID NO: 159173 - DNA, 20 bp, Artificial sequence
  SiRNA target sequence
tcatatcattaccacacaaa

SEQ ID NO: 159174 - DNA, 20 bp, Artificial sequence
  SiRNA target sequence
catatcattaccacacaaat

SEQ ID NO: 159175 - DNA, 20 bp, Artificial sequence
  SiRNA target sequence
atatcattaccacacaaatt

SEQ ID NO: 159176 - DNA, 20 bp, Artificial sequence
  SiRNA target sequence
tatcattaccacacaaattg

SEQ ID NO: 159177 - DNA, 20 bp, Artificial sequence
  SiRNA target sequence
atcattaccacacaaattga

SEQ ID NO: 159178 - DNA, 20 bp, Artificial sequence
  SiRNA target sequence
tcattaccacacaaattgaa

SEQ ID NO: 159179 - DNA, 20 bp, Artificial sequence
  SiRNA target sequence
cattaccacacaaattgaac

SEQ ID NO: 159180 - DNA, 20 bp, Artificial sequence
  SiRNA target sequence
attaccacacaaattgaaca

SEQ ID NO: 159181 - DNA, 20 bp, Artificial sequence
  SiRNA target sequence
ttaccacacaaattgaacat

SEQ ID NO: 159182 - DNA, 20 bp, Artificial sequence
  SiRNA target sequence
taccacacaaattgaacata

SEQ ID NO: 159183 - DNA, 20 bp, Artificial sequence
  SiRNA target sequence
accacacaaattgaacataa

SEQ ID NO: 159184 - DNA, 20 bp, Artificial sequence
  SiRNA target sequence
ccacacaaattgaacataaa

SEQ ID NO: 159185 - DNA, 20 bp, Artificial sequence
  SiRNA target sequence
cacacaaattgaacataaat

SEQ ID NO: 159186 - DNA, 20 bp, Artificial sequence
  SiRNA target sequence
acacaaattgaacataaatg

SEQ ID NO: 159187 - DNA, 20 bp, Artificial sequence
  SiRNA target sequence
cacaaattgaacataaatgt

SEQ ID NO: 159188 - DNA, 20 bp, Artificial sequence
  SiRNA target sequence
acaaattgaacataaatgtg

SEQ ID NO: 159189 - DNA, 20 bp, Artificial sequence
  SiRNA target sequence
caaattgaacataaatgtgt

SEQ ID NO: 159190 - DNA, 20 bp, Artificial sequence
  SiRNA target sequence
aaattgaacataaatgtgta

SEQ ID NO: 159191 - DNA, 20 bp, Artificial sequence
  SiRNA target sequence
aattgaacataaatgtgtat

SEQ ID NO: 159192 - DNA, 20 bp, Artificial sequence
  SiRNA target sequence
attgaacataaatgtgtatt

SEQ ID NO: 159193 - DNA, 20 bp, Artificial sequence
  SiRNA target sequence
ttgaacataaatgtgtattg

SEQ ID NO: 159194 - DNA, 20 bp, Artificial sequence
  SiRNA target sequence
tgaacataaatgtgtattgg

SEQ ID NO: 159195 - DNA, 20 bp, Artificial sequence
  SiRNA target sequence
gaacataaatgtgtattgga

SEQ ID NO: 159196 - DNA, 20 bp, Artificial sequence
  SiRNA target sequence
aacataaatgtgtattggac

SEQ ID NO: 159197 - DNA, 20 bp, Artificial sequence
  SiRNA target sequence
acataaatgtgtattggaca

SEQ ID NO: 159198 - DNA, 20 bp, Artificial sequence
  SiRNA target sequence
cataaatgtgtattggacac

SEQ ID NO: 159199 - DNA, 20 bp, Artificial sequence
  SiRNA target sequence
ataaatgtgtattggacaca

SEQ ID NO: 159200 - DNA, 20 bp, Artificial sequence
  SiRNA target sequence
taaatgtgtattggacacat

SEQ ID NO: 159201 - DNA, 20 bp, Artificial sequence
  SiRNA target sequence
aaatgtgtattggacacatg

SEQ ID NO: 159202 - DNA, 20 bp, Artificial sequence
  SiRNA target sequence
aatgtgtattggacacatgt

SEQ ID NO: 159203 - DNA, 20 bp, Artificial sequence
  SiRNA target sequence
atgtgtattggacacatgta

SEQ ID NO: 159204 - DNA, 20 bp, Artificial sequence
  SiRNA target sequence
tgtgtattggacacatgtag

SEQ ID NO: 159205 - DNA, 20 bp, Artificial sequence
  SiRNA target sequence
gtgtattggacacatgtaga

SEQ ID NO: 159206 - DNA, 20 bp, Artificial sequence
  SiRNA target sequence
tgtattggacacatgtagaa

SEQ ID NO: 159207 - DNA, 20 bp, Artificial sequence
  SiRNA target sequence
gtattggacacatgtagaag

SEQ ID NO: 159208 - DNA, 20 bp, Artificial sequence
  SiRNA target sequence
tattggacacatgtagaaga

SEQ ID NO: 159209 - DNA, 20 bp, Artificial sequence
  SiRNA target sequence
attggacacatgtagaagat

SEQ ID NO: 159210 - DNA, 20 bp, Artificial sequence
  SiRNA target sequence
ttggacacatgtagaagatt

SEQ ID NO: 159211 - DNA, 20 bp, Artificial sequence
  SiRNA target sequence
tggacacatgtagaagatta

SEQ ID NO: 159212 - DNA, 20 bp, Artificial sequence
  SiRNA target sequence
ggacacatgtagaagattag

SEQ ID NO: 159213 - DNA, 20 bp, Artificial sequence
  SiRNA target sequence
gacacatgtagaagattaga

SEQ ID NO: 159214 - DNA, 20 bp, Artificial sequence
  SiRNA target sequence
acacatgtagaagattagaa

SEQ ID NO: 159215 - DNA, 20 bp, Artificial sequence
  SiRNA target sequence
cacatgtagaagattagaag

SEQ ID NO: 159216 - DNA, 20 bp, Artificial sequence
  SiRNA target sequence
acatgtagaagattagaaga

SEQ ID NO: 159217 - DNA, 20 bp, Artificial sequence
  SiRNA target sequence
catgtagaagattagaagaa

SEQ ID NO: 159218 - DNA, 20 bp, Artificial sequence
  SiRNA target sequence
atgtagaagattagaagaag

SEQ ID NO: 159219 - DNA, 20 bp, Artificial sequence
  SiRNA target sequence
tgtagaagattagaagaaga

SEQ ID NO: 159220 - DNA, 20 bp, Artificial sequence
  SiRNA target sequence
gtagaagattagaagaagaa

SEQ ID NO: 159221 - DNA, 20 bp, Artificial sequence
  SiRNA target sequence
tagaagattagaagaagaag

SEQ ID NO: 159222 - DNA, 20 bp, Artificial sequence
  SiRNA target sequence
agaagattagaagaagaagg

SEQ ID NO: 159223 - DNA, 20 bp, Artificial sequence
  SiRNA target sequence
gaagattagaagaagaagga

SEQ ID NO: 159224 - DNA, 20 bp, Artificial sequence
  SiRNA target sequence
aagattagaagaagaaggag

SEQ ID NO: 159225 - DNA, 20 bp, Artificial sequence
  SiRNA target sequence
agattagaagaagaaggagc

SEQ ID NO: 159226 - DNA, 20 bp, Artificial sequence
  SiRNA target sequence
gattagaagaagaaggagct

SEQ ID NO: 159227 - DNA, 20 bp, Artificial sequence
  SiRNA target sequence
attagaagaagaaggagcta

SEQ ID NO: 159228 - DNA, 20 bp, Artificial sequence
  SiRNA target sequence
ttagaagaagaaggagctac

SEQ ID NO: 159229 - DNA, 20 bp, Artificial sequence
  SiRNA target sequence
tagaagaagaaggagctaca

SEQ ID NO: 159230 - DNA, 20 bp, Artificial sequence
  SiRNA target sequence
agaagaagaaggagctacag

SEQ ID NO: 159231 - DNA, 20 bp, Artificial sequence
  SiRNA target sequence
gaagaagaaggagctacagt

SEQ ID NO: 159232 - DNA, 20 bp, Artificial sequence
  SiRNA target sequence
aagaagaaggagctacagtg

SEQ ID NO: 159233 - DNA, 20 bp, Artificial sequence
  SiRNA target sequence
agaagaaggagctacagtga

SEQ ID NO: 159234 - DNA, 20 bp, Artificial sequence
  SiRNA target sequence
gaagaaggagctacagtgac

SEQ ID NO: 159235 - DNA, 20 bp, Artificial sequence
  SiRNA target sequence
aagaaggagctacagtgact

SEQ ID NO: 159236 - DNA, 20 bp, Artificial sequence
  SiRNA target sequence
agaaggagctacagtgactt

SEQ ID NO: 159237 - DNA, 20 bp, Artificial sequence
  SiRNA target sequence
gaaggagctacagtgactta

SEQ ID NO: 159238 - DNA, 20 bp, Artificial sequence
  SiRNA target sequence
aaggagctacagtgacttat

SEQ ID NO: 159239 - DNA, 20 bp, Artificial sequence
  SiRNA target sequence
aggagctacagtgacttatt

SEQ ID NO: 159240 - DNA, 20 bp, Artificial sequence
  SiRNA target sequence
ggagctacagtgacttattt

SEQ ID NO: 159241 - DNA, 20 bp, Artificial sequence
  SiRNA target sequence
gagctacagtgacttatttg

SEQ ID NO: 159242 - DNA, 20 bp, Artificial sequence
  SiRNA target sequence
agctacagtgacttatttgc

SEQ ID NO: 159243 - DNA, 20 bp, Artificial sequence
  SiRNA target sequence
gctacagtgacttatttgcc

SEQ ID NO: 159244 - DNA, 20 bp, Artificial sequence
  SiRNA target sequence
ctacagtgacttatttgcct

SEQ ID NO: 159245 - DNA, 20 bp, Artificial sequence
  SiRNA target sequence
tacagtgacttatttgcctg

SEQ ID NO: 159246 - DNA, 20 bp, Artificial sequence
  SiRNA target sequence
acagtgacttatttgcctgt

SEQ ID NO: 159247 - DNA, 20 bp, Artificial sequence
  SiRNA target sequence
cagtgacttatttgcctgta

SEQ ID NO: 159248 - DNA, 20 bp, Artificial sequence
  SiRNA target sequence
agtgacttatttgcctgtag

SEQ ID NO: 159249 - DNA, 20 bp, Artificial sequence
  SiRNA target sequence
gtgacttatttgcctgtaga

SEQ ID NO: 159250 - DNA, 20 bp, Artificial sequence
  SiRNA target sequence
tgacttatttgcctgtagat

SEQ ID NO: 159251 - DNA, 20 bp, Artificial sequence
  SiRNA target sequence
gacttatttgcctgtagata

SEQ ID NO: 159252 - DNA, 20 bp, Artificial sequence
  SiRNA target sequence
acttatttgcctgtagataa

SEQ ID NO: 159253 - DNA, 20 bp, Artificial sequence
  SiRNA target sequence
cttatttgcctgtagataaa

SEQ ID NO: 159254 - DNA, 20 bp, Artificial sequence
  SiRNA target sequence
ttatttgcctgtagataaaa

SEQ ID NO: 159255 - DNA, 20 bp, Artificial sequence
  SiRNA target sequence
tatttgcctgtagataaaaa

SEQ ID NO: 159256 - DNA, 20 bp, Artificial sequence
  SiRNA target sequence
atttgcctgtagataaaaat

SEQ ID NO: 159257 - DNA, 20 bp, Artificial sequence
  SiRNA target sequence
tttgcctgtagataaaaatg

SEQ ID NO: 159258 - DNA, 20 bp, Artificial sequence
  SiRNA target sequence
ttgcctgtagataaaaatgg

SEQ ID NO: 159259 - DNA, 20 bp, Artificial sequence
  SiRNA target sequence
tgcctgtagataaaaatgga

SEQ ID NO: 159260 - DNA, 20 bp, Artificial sequence
  SiRNA target sequence
gcctgtagataaaaatggaa

SEQ ID NO: 159261 - DNA, 20 bp, Artificial sequence
  SiRNA target sequence
cctgtagataaaaatggaat

SEQ ID NO: 159262 - DNA, 20 bp, Artificial sequence
  SiRNA target sequence
ctgtagataaaaatggaata

SEQ ID NO: 159263 - DNA, 20 bp, Artificial sequence
  SiRNA target sequence
tgtagataaaaatggaatag

SEQ ID NO: 159264 - DNA, 20 bp, Artificial sequence
  SiRNA target sequence
gtagataaaaatggaatagt

SEQ ID NO: 159265 - DNA, 20 bp, Artificial sequence
  SiRNA target sequence
tagataaaaatggaatagta

SEQ ID NO: 159266 - DNA, 20 bp, Artificial sequence
  SiRNA target sequence
agataaaaatggaatagtag

SEQ ID NO: 159267 - DNA, 20 bp, Artificial sequence
  SiRNA target sequence
gataaaaatggaatagtaga

SEQ ID NO: 159268 - DNA, 20 bp, Artificial sequence
  SiRNA target sequence
ataaaaatggaatagtagat

SEQ ID NO: 159269 - DNA, 20 bp, Artificial sequence
  SiRNA target sequence
taaaaatggaatagtagatc

SEQ ID NO: 159270 - DNA, 20 bp, Artificial sequence
  SiRNA target sequence
aaaaatggaatagtagatcc

SEQ ID NO: 159271 - DNA, 20 bp, Artificial sequence
  SiRNA target sequence
aaaatggaatagtagatccg

SEQ ID NO: 159272 - DNA, 20 bp, Artificial sequence
  SiRNA target sequence
aaatggaatagtagatccgc

SEQ ID NO: 159273 - DNA, 20 bp, Artificial sequence
  SiRNA target sequence
aatggaatagtagatccgca

SEQ ID NO: 159274 - DNA, 20 bp, Artificial sequence
  SiRNA target sequence
atggaatagtagatccgcaa

SEQ ID NO: 159275 - DNA, 20 bp, Artificial sequence
  SiRNA target sequence
tggaatagtagatccgcaat

SEQ ID NO: 159276 - DNA, 20 bp, Artificial sequence
  SiRNA target sequence
ggaatagtagatccgcaatt

SEQ ID NO: 159277 - DNA, 20 bp, Artificial sequence
  SiRNA target sequence
gaatagtagatccgcaatta

SEQ ID NO: 159278 - DNA, 20 bp, Artificial sequence
  SiRNA target sequence
aatagtagatccgcaattaa

SEQ ID NO: 159279 - DNA, 20 bp, Artificial sequence
  SiRNA target sequence
atagtagatccgcaattaat

SEQ ID NO: 159280 - DNA, 20 bp, Artificial sequence
  SiRNA target sequence
tagtagatccgcaattaata

SEQ ID NO: 159281 - DNA, 20 bp, Artificial sequence
  SiRNA target sequence
agtagatccgcaattaataa

SEQ ID NO: 159282 - DNA, 20 bp, Artificial sequence
  SiRNA target sequence
gtagatccgcaattaataaa

SEQ ID NO: 159283 - DNA, 20 bp, Artificial sequence
  SiRNA target sequence
tagatccgcaattaataaaa

SEQ ID NO: 159284 - DNA, 20 bp, Artificial sequence
  SiRNA target sequence
agatccgcaattaataaaaa

SEQ ID NO: 159285 - DNA, 20 bp, Artificial sequence
  SiRNA target sequence
gatccgcaattaataaaaaa

SEQ ID NO: 159286 - DNA, 20 bp, Artificial sequence
  SiRNA target sequence
atccgcaattaataaaaaac

SEQ ID NO: 159287 - DNA, 20 bp, Artificial sequence
  SiRNA target sequence
tccgcaattaataaaaaaca

SEQ ID NO: 159288 - DNA, 20 bp, Artificial sequence
  SiRNA target sequence
ccgcaattaataaaaaacag

SEQ ID NO: 159289 - DNA, 20 bp, Artificial sequence
  SiRNA target sequence
cgcaattaataaaaaacagt

SEQ ID NO: 159290 - DNA, 20 bp, Artificial sequence
  SiRNA target sequence
gcaattaataaaaaacagta

SEQ ID NO: 159291 - DNA, 20 bp, Artificial sequence
  SiRNA target sequence
caattaataaaaaacagtat

SEQ ID NO: 159292 - DNA, 20 bp, Artificial sequence
  SiRNA target sequence
aattaataaaaaacagtatt

SEQ ID NO: 159293 - DNA, 20 bp, Artificial sequence
  SiRNA target sequence
attaataaaaaacagtatta

SEQ ID NO: 159294 - DNA, 20 bp, Artificial sequence
  SiRNA target sequence
ttaataaaaaacagtattac

SEQ ID NO: 159295 - DNA, 20 bp, Artificial sequence
  SiRNA target sequence
taataaaaaacagtattact

SEQ ID NO: 159296 - DNA, 20 bp, Artificial sequence
  SiRNA target sequence
aataaaaaacagtattacta

SEQ ID NO: 159297 - DNA, 20 bp, Artificial sequence
  SiRNA target sequence
ataaaaaacagtattactaa

SEQ ID NO: 159298 - DNA, 20 bp, Artificial sequence
  SiRNA target sequence
taaaaaacagtattactaaa

SEQ ID NO: 159299 - DNA, 20 bp, Artificial sequence
  SiRNA target sequence
aaaaaacagtattactaaag

SEQ ID NO: 159300 - DNA, 20 bp, Artificial sequence
  SiRNA target sequence
aaaaacagtattactaaaga

SEQ ID NO: 159301 - DNA, 20 bp, Artificial sequence
  SiRNA target sequence
aaaacagtattactaaagat

SEQ ID NO: 159302 - DNA, 20 bp, Artificial sequence
  SiRNA target sequence
aaacagtattactaaagata

SEQ ID NO: 159303 - DNA, 20 bp, Artificial sequence
  SiRNA target sequence
aacagtattactaaagatac

SEQ ID NO: 159304 - DNA, 20 bp, Artificial sequence
  SiRNA target sequence
acagtattactaaagatacc

SEQ ID NO: 159305 - DNA, 20 bp, Artificial sequence
  SiRNA target sequence
cagtattactaaagataccg

SEQ ID NO: 159306 - DNA, 20 bp, Artificial sequence
  SiRNA target sequence
agtattactaaagataccgc

SEQ ID NO: 159307 - DNA, 20 bp, Artificial sequence
  SiRNA target sequence
gtattactaaagataccgct

SEQ ID NO: 159308 - DNA, 20 bp, Artificial sequence
  SiRNA target sequence
tattactaaagataccgctt

SEQ ID NO: 159309 - DNA, 20 bp, Artificial sequence
  SiRNA target sequence
attactaaagataccgcttt

SEQ ID NO: 159310 - DNA, 20 bp, Artificial sequence
  SiRNA target sequence
ttactaaagataccgctttg

SEQ ID NO: 159311 - DNA, 20 bp, Artificial sequence
  SiRNA target sequence
tactaaagataccgctttgg

SEQ ID NO: 159312 - DNA, 20 bp, Artificial sequence
  SiRNA target sequence
actaaagataccgctttggt

SEQ ID NO: 159313 - DNA, 20 bp, Artificial sequence
  SiRNA target sequence
ctaaagataccgctttggtg

SEQ ID NO: 159314 - DNA, 20 bp, Artificial sequence
  SiRNA target sequence
taaagataccgctttggtgt

SEQ ID NO: 159315 - DNA, 20 bp, Artificial sequence
  SiRNA target sequence
aaagataccgctttggtgtc

SEQ ID NO: 159316 - DNA, 20 bp, Artificial sequence
  SiRNA target sequence
aagataccgctttggtgtct

SEQ ID NO: 159317 - DNA, 20 bp, Artificial sequence
  SiRNA target sequence
agataccgctttggtgtctg

SEQ ID NO: 159318 - DNA, 20 bp, Artificial sequence
  SiRNA target sequence
gataccgctttggtgtctgt

SEQ ID NO: 159319 - DNA, 20 bp, Artificial sequence
  SiRNA target sequence
ataccgctttggtgtctgtt

SEQ ID NO: 159320 - DNA, 20 bp, Artificial sequence
  SiRNA target sequence
taccgctttggtgtctgtta

SEQ ID NO: 159321 - DNA, 20 bp, Artificial sequence
  SiRNA target sequence
accgctttggtgtctgttat

SEQ ID NO: 159322 - DNA, 20 bp, Artificial sequence
  SiRNA target sequence
ccgctttggtgtctgttatg

SEQ ID NO: 159323 - DNA, 20 bp, Artificial sequence
  SiRNA target sequence
cgctttggtgtctgttatgg

SEQ ID NO: 159324 - DNA, 20 bp, Artificial sequence
  SiRNA target sequence
gctttggtgtctgttatggc

SEQ ID NO: 159325 - DNA, 20 bp, Artificial sequence
  SiRNA target sequence
ctttggtgtctgttatggct

SEQ ID NO: 159326 - DNA, 20 bp, Artificial sequence
  SiRNA target sequence
tttggtgtctgttatggctg

SEQ ID NO: 159327 - DNA, 20 bp, Artificial sequence
  SiRNA target sequence
ttggtgtctgttatggctgt

SEQ ID NO: 159328 - DNA, 20 bp, Artificial sequence
  SiRNA target sequence
tggtgtctgttatggctgtt

SEQ ID NO: 159329 - DNA, 20 bp, Artificial sequence
  SiRNA target sequence
ggtgtctgttatggctgtta

SEQ ID NO: 159330 - DNA, 20 bp, Artificial sequence
  SiRNA target sequence
gtgtctgttatggctgttaa

SEQ ID NO: 159331 - DNA, 20 bp, Artificial sequence
  SiRNA target sequence
tgtctgttatggctgttaac

SEQ ID NO: 159332 - DNA, 20 bp, Artificial sequence
  SiRNA target sequence
gtctgttatggctgttaaca

SEQ ID NO: 159333 - DNA, 20 bp, Artificial sequence
  SiRNA target sequence
tctgttatggctgttaacaa

SEQ ID NO: 159334 - DNA, 20 bp, Artificial sequence
  SiRNA target sequence
ctgttatggctgttaacaac

SEQ ID NO: 159335 - DNA, 20 bp, Artificial sequence
  SiRNA target sequence
tgttatggctgttaacaacg

SEQ ID NO: 159336 - DNA, 20 bp, Artificial sequence
  SiRNA target sequence
gttatggctgttaacaacga

SEQ ID NO: 159337 - DNA, 20 bp, Artificial sequence
  SiRNA target sequence
ttatggctgttaacaacgaa

SEQ ID NO: 159338 - DNA, 20 bp, Artificial sequence
  SiRNA target sequence
tatggctgttaacaacgaaa

SEQ ID NO: 159339 - DNA, 20 bp, Artificial sequence
  SiRNA target sequence
atggctgttaacaacgaaat

SEQ ID NO: 159340 - DNA, 20 bp, Artificial sequence
  SiRNA target sequence
tggctgttaacaacgaaatg

SEQ ID NO: 159341 - DNA, 20 bp, Artificial sequence
  SiRNA target sequence
ggctgttaacaacgaaatgg

SEQ ID NO: 159342 - DNA, 20 bp, Artificial sequence
  SiRNA target sequence
gctgttaacaacgaaatggg

SEQ ID NO: 159343 - DNA, 20 bp, Artificial sequence
  SiRNA target sequence
ctgttaacaacgaaatggga

SEQ ID NO: 159344 - DNA, 20 bp, Artificial sequence
  SiRNA target sequence
tgttaacaacgaaatgggag

SEQ ID NO: 159345 - DNA, 20 bp, Artificial sequence
  SiRNA target sequence
gttaacaacgaaatgggagc

SEQ ID NO: 159346 - DNA, 20 bp, Artificial sequence
  SiRNA target sequence
ttaacaacgaaatgggagca

SEQ ID NO: 159347 - DNA, 20 bp, Artificial sequence
  SiRNA target sequence
taacaacgaaatgggagcaa

SEQ ID NO: 159348 - DNA, 20 bp, Artificial sequence
  SiRNA target sequence
aacaacgaaatgggagcaat

SEQ ID NO: 159349 - DNA, 20 bp, Artificial sequence
  SiRNA target sequence
acaacgaaatgggagcaata

SEQ ID NO: 159350 - DNA, 20 bp, Artificial sequence
  SiRNA target sequence
caacgaaatgggagcaatac

SEQ ID NO: 159351 - DNA, 20 bp, Artificial sequence
  SiRNA target sequence
aacgaaatgggagcaataca

SEQ ID NO: 159352 - DNA, 20 bp, Artificial sequence
  SiRNA target sequence
acgaaatgggagcaatacaa

SEQ ID NO: 159353 - DNA, 20 bp, Artificial sequence
  SiRNA target sequence
cgaaatgggagcaatacaac

SEQ ID NO: 159354 - DNA, 20 bp, Artificial sequence
  SiRNA target sequence
gaaatgggagcaatacaacc

SEQ ID NO: 159355 - DNA, 20 bp, Artificial sequence
  SiRNA target sequence
aaatgggagcaatacaaccg

SEQ ID NO: 159356 - DNA, 20 bp, Artificial sequence
  SiRNA target sequence
aatgggagcaatacaaccgc

SEQ ID NO: 159357 - DNA, 20 bp, Artificial sequence
  SiRNA target sequence
atgggagcaatacaaccgct

SEQ ID NO: 159358 - DNA, 20 bp, Artificial sequence
  SiRNA target sequence
tgggagcaatacaaccgctt

SEQ ID NO: 159359 - DNA, 20 bp, Artificial sequence
  SiRNA target sequence
gggagcaatacaaccgctta

SEQ ID NO: 159360 - DNA, 20 bp, Artificial sequence
  SiRNA target sequence
ggagcaatacaaccgcttaa

SEQ ID NO: 159361 - DNA, 20 bp, Artificial sequence
  SiRNA target sequence
gagcaatacaaccgcttaaa

SEQ ID NO: 159362 - DNA, 20 bp, Artificial sequence
  SiRNA target sequence
agcaatacaaccgcttaaag

SEQ ID NO: 159363 - DNA, 20 bp, Artificial sequence
  SiRNA target sequence
gcaatacaaccgcttaaaga

SEQ ID NO: 159364 - DNA, 20 bp, Artificial sequence
  SiRNA target sequence
caatacaaccgcttaaagaa

SEQ ID NO: 159365 - DNA, 20 bp, Artificial sequence
  SiRNA target sequence
aatacaaccgcttaaagaaa

SEQ ID NO: 159366 - DNA, 20 bp, Artificial sequence
  SiRNA target sequence
atacaaccgcttaaagaaat

SEQ ID NO: 159367 - DNA, 20 bp, Artificial sequence
  SiRNA target sequence
tacaaccgcttaaagaaata

SEQ ID NO: 159368 - DNA, 20 bp, Artificial sequence
  SiRNA target sequence
acaaccgcttaaagaaatag

SEQ ID NO: 159369 - DNA, 20 bp, Artificial sequence
  SiRNA target sequence
caaccgcttaaagaaatagg

SEQ ID NO: 159370 - DNA, 20 bp, Artificial sequence
  SiRNA target sequence
aaccgcttaaagaaatagga

SEQ ID NO: 159371 - DNA, 20 bp, Artificial sequence
  SiRNA target sequence
accgcttaaagaaataggaa

SEQ ID NO: 159372 - DNA, 20 bp, Artificial sequence
  SiRNA target sequence
ccgcttaaagaaataggaag

SEQ ID NO: 159373 - DNA, 20 bp, Artificial sequence
  SiRNA target sequence
cgcttaaagaaataggaaga

SEQ ID NO: 159374 - DNA, 20 bp, Artificial sequence
  SiRNA target sequence
gcttaaagaaataggaagaa

SEQ ID NO: 159375 - DNA, 20 bp, Artificial sequence
  SiRNA target sequence
cttaaagaaataggaagaat

SEQ ID NO: 159376 - DNA, 20 bp, Artificial sequence
  SiRNA target sequence
ttaaagaaataggaagaata

SEQ ID NO: 159377 - DNA, 20 bp, Artificial sequence
  SiRNA target sequence
taaagaaataggaagaatat

SEQ ID NO: 159378 - DNA, 20 bp, Artificial sequence
  SiRNA target sequence
aaagaaataggaagaatatg

SEQ ID NO: 159379 - DNA, 20 bp, Artificial sequence
  SiRNA target sequence
aagaaataggaagaatatgt

SEQ ID NO: 159380 - DNA, 20 bp, Artificial sequence
  SiRNA target sequence
agaaataggaagaatatgta

SEQ ID NO: 159381 - DNA, 20 bp, Artificial sequence
  SiRNA target sequence
gaaataggaagaatatgtaa

SEQ ID NO: 159382 - DNA, 20 bp, Artificial sequence
  SiRNA target sequence
aaataggaagaatatgtaaa

SEQ ID NO: 159383 - DNA, 20 bp, Artificial sequence
  SiRNA target sequence
aataggaagaatatgtaaag

SEQ ID NO: 159384 - DNA, 20 bp, Artificial sequence
  SiRNA target sequence
ataggaagaatatgtaaaga

SEQ ID NO: 159385 - DNA, 20 bp, Artificial sequence
  SiRNA target sequence
taggaagaatatgtaaagaa

SEQ ID NO: 159386 - DNA, 20 bp, Artificial sequence
  SiRNA target sequence
aggaagaatatgtaaagaaa

SEQ ID NO: 159387 - DNA, 20 bp, Artificial sequence
  SiRNA target sequence
ggaagaatatgtaaagaaaa

SEQ ID NO: 159388 - DNA, 20 bp, Artificial sequence
  SiRNA target sequence
gaagaatatgtaaagaaaat

SEQ ID NO: 159389 - DNA, 20 bp, Artificial sequence
  SiRNA target sequence
aagaatatgtaaagaaaata

SEQ ID NO: 159390 - DNA, 20 bp, Artificial sequence
  SiRNA target sequence
agaatatgtaaagaaaataa

SEQ ID NO: 159391 - DNA, 20 bp, Artificial sequence
  SiRNA target sequence
gaatatgtaaagaaaataat

SEQ ID NO: 159392 - DNA, 20 bp, Artificial sequence
  SiRNA target sequence
aatatgtaaagaaaataata

SEQ ID NO: 159393 - DNA, 20 bp, Artificial sequence
  SiRNA target sequence
atatgtaaagaaaataatat

SEQ ID NO: 159394 - DNA, 20 bp, Artificial sequence
  SiRNA target sequence
tatgtaaagaaaataatatt

SEQ ID NO: 159395 - DNA, 20 bp, Artificial sequence
  SiRNA target sequence
atgtaaagaaaataatattt

SEQ ID NO: 159396 - DNA, 20 bp, Artificial sequence
  SiRNA target sequence
tgtaaagaaaataatatttt

SEQ ID NO: 159397 - DNA, 20 bp, Artificial sequence
  SiRNA target sequence
gtaaagaaaataatatttta

SEQ ID NO: 159398 - DNA, 20 bp, Artificial sequence
  SiRNA target sequence
taaagaaaataatattttat

SEQ ID NO: 159399 - DNA, 20 bp, Artificial sequence
  SiRNA target sequence
aaagaaaataatattttatt

SEQ ID NO: 159400 - DNA, 20 bp, Artificial sequence
  SiRNA target sequence
aagaaaataatattttattt

SEQ ID NO: 159401 - DNA, 20 bp, Artificial sequence
  SiRNA target sequence
agaaaataatattttatttc

SEQ ID NO: 159402 - DNA, 20 bp, Artificial sequence
  SiRNA target sequence
gaaaataatattttatttca

SEQ ID NO: 159403 - DNA, 20 bp, Artificial sequence
  SiRNA target sequence
aaaataatattttatttcac

SEQ ID NO: 159404 - DNA, 20 bp, Artificial sequence
  SiRNA target sequence
aaataatattttatttcaca

SEQ ID NO: 159405 - DNA, 20 bp, Artificial sequence
  SiRNA target sequence
aataatattttatttcacac

SEQ ID NO: 159406 - DNA, 20 bp, Artificial sequence
  SiRNA target sequence
ataatattttatttcacact

SEQ ID NO: 159407 - DNA, 20 bp, Artificial sequence
  SiRNA target sequence
taatattttatttcacactg

SEQ ID NO: 159408 - DNA, 20 bp, Artificial sequence
  SiRNA target sequence
aatattttatttcacactga

SEQ ID NO: 159409 - DNA, 20 bp, Artificial sequence
  SiRNA target sequence
atattttatttcacactgat

SEQ ID NO: 159410 - DNA, 20 bp, Artificial sequence
  SiRNA target sequence
tattttatttcacactgatg

SEQ ID NO: 159411 - DNA, 20 bp, Artificial sequence
  SiRNA target sequence
attttatttcacactgatgc

SEQ ID NO: 159412 - DNA, 20 bp, Artificial sequence
  SiRNA target sequence
ttttatttcacactgatgca

SEQ ID NO: 159413 - DNA, 20 bp, Artificial sequence
  SiRNA target sequence
tttatttcacactgatgcag

SEQ ID NO: 159414 - DNA, 20 bp, Artificial sequence
  SiRNA target sequence
ttatttcacactgatgcagc

SEQ ID NO: 159415 - DNA, 20 bp, Artificial sequence
  SiRNA target sequence
tatttcacactgatgcagca

SEQ ID NO: 159416 - DNA, 20 bp, Artificial sequence
  SiRNA target sequence
atttcacactgatgcagcac

SEQ ID NO: 159417 - DNA, 20 bp, Artificial sequence
  SiRNA target sequence
tttcacactgatgcagcaca

SEQ ID NO: 159418 - DNA, 20 bp, Artificial sequence
  SiRNA target sequence
ttcacactgatgcagcacaa

SEQ ID NO: 159419 - DNA, 20 bp, Artificial sequence
  SiRNA target sequence
tcacactgatgcagcacaag

SEQ ID NO: 159420 - DNA, 20 bp, Artificial sequence
  SiRNA target sequence
cacactgatgcagcacaagc

SEQ ID NO: 159421 - DNA, 20 bp, Artificial sequence
  SiRNA target sequence
acactgatgcagcacaagca

SEQ ID NO: 159422 - DNA, 20 bp, Artificial sequence
  SiRNA target sequence
cactgatgcagcacaagcag

SEQ ID NO: 159423 - DNA, 20 bp, Artificial sequence
  SiRNA target sequence
actgatgcagcacaagcagt

SEQ ID NO: 159424 - DNA, 20 bp, Artificial sequence
  SiRNA target sequence
ctgatgcagcacaagcagtt

SEQ ID NO: 159425 - DNA, 20 bp, Artificial sequence
  SiRNA target sequence
tgatgcagcacaagcagttg

SEQ ID NO: 159426 - DNA, 20 bp, Artificial sequence
  SiRNA target sequence
gatgcagcacaagcagttgg

SEQ ID NO: 159427 - DNA, 20 bp, Artificial sequence
  SiRNA target sequence
atgcagcacaagcagttggt

SEQ ID NO: 159428 - DNA, 20 bp, Artificial sequence
  SiRNA target sequence
tgcagcacaagcagttggta

SEQ ID NO: 159429 - DNA, 20 bp, Artificial sequence
  SiRNA target sequence
gcagcacaagcagttggtaa

SEQ ID NO: 159430 - DNA, 20 bp, Artificial sequence
  SiRNA target sequence
cagcacaagcagttggtaat

SEQ ID NO: 159431 - DNA, 20 bp, Artificial sequence
  SiRNA target sequence
agcacaagcagttggtaata

SEQ ID NO: 159432 - DNA, 20 bp, Artificial sequence
  SiRNA target sequence
gcacaagcagttggtaatat

SEQ ID NO: 159433 - DNA, 20 bp, Artificial sequence
  SiRNA target sequence
cacaagcagttggtaatata

SEQ ID NO: 159434 - DNA, 20 bp, Artificial sequence
  SiRNA target sequence
acaagcagttggtaatatag

SEQ ID NO: 159435 - DNA, 20 bp, Artificial sequence
  SiRNA target sequence
caagcagttggtaatataga

SEQ ID NO: 159436 - DNA, 20 bp, Artificial sequence
  SiRNA target sequence
aagcagttggtaatatagat

SEQ ID NO: 159437 - DNA, 20 bp, Artificial sequence
  SiRNA target sequence
agcagttggtaatatagata

SEQ ID NO: 159438 - DNA, 20 bp, Artificial sequence
  SiRNA target sequence
gcagttggtaatatagatat

SEQ ID NO: 159439 - DNA, 20 bp, Artificial sequence
  SiRNA target sequence
cagttggtaatatagatatt

SEQ ID NO: 159440 - DNA, 20 bp, Artificial sequence
  SiRNA target sequence
agttggtaatatagatattg

SEQ ID NO: 159441 - DNA, 20 bp, Artificial sequence
  SiRNA target sequence
gttggtaatatagatattga

SEQ ID NO: 159442 - DNA, 20 bp, Artificial sequence
  SiRNA target sequence
ttggtaatatagatattgat

SEQ ID NO: 159443 - DNA, 20 bp, Artificial sequence
  SiRNA target sequence
tggtaatatagatattgatg

SEQ ID NO: 159444 - DNA, 20 bp, Artificial sequence
  SiRNA target sequence
ggtaatatagatattgatgt

SEQ ID NO: 159445 - DNA, 20 bp, Artificial sequence
  SiRNA target sequence
gtaatatagatattgatgtc

SEQ ID NO: 159446 - DNA, 20 bp, Artificial sequence
  SiRNA target sequence
taatatagatattgatgtca

SEQ ID NO: 159447 - DNA, 20 bp, Artificial sequence
  SiRNA target sequence
aatatagatattgatgtcaa

SEQ ID NO: 159448 - DNA, 20 bp, Artificial sequence
  SiRNA target sequence
atatagatattgatgtcaat

SEQ ID NO: 159449 - DNA, 20 bp, Artificial sequence
  SiRNA target sequence
tatagatattgatgtcaatg

SEQ ID NO: 159450 - DNA, 20 bp, Artificial sequence
  SiRNA target sequence
atagatattgatgtcaatga

SEQ ID NO: 159451 - DNA, 20 bp, Artificial sequence
  SiRNA target sequence
tagatattgatgtcaatgat

SEQ ID NO: 159452 - DNA, 20 bp, Artificial sequence
  SiRNA target sequence
agatattgatgtcaatgata

SEQ ID NO: 159453 - DNA, 20 bp, Artificial sequence
  SiRNA target sequence
gatattgatgtcaatgatat

SEQ ID NO: 159454 - DNA, 20 bp, Artificial sequence
  SiRNA target sequence
atattgatgtcaatgatatg

SEQ ID NO: 159455 - DNA, 20 bp, Artificial sequence
  SiRNA target sequence
tattgatgtcaatgatatga

SEQ ID NO: 159456 - DNA, 20 bp, Artificial sequence
  SiRNA target sequence
attgatgtcaatgatatgaa

SEQ ID NO: 159457 - DNA, 20 bp, Artificial sequence
  SiRNA target sequence
ttgatgtcaatgatatgaat

SEQ ID NO: 159458 - DNA, 20 bp, Artificial sequence
  SiRNA target sequence
tgatgtcaatgatatgaata

SEQ ID NO: 159459 - DNA, 20 bp, Artificial sequence
  SiRNA target sequence
gatgtcaatgatatgaatat

SEQ ID NO: 159460 - DNA, 20 bp, Artificial sequence
  SiRNA target sequence
atgtcaatgatatgaatatt

SEQ ID NO: 159461 - DNA, 20 bp, Artificial sequence
  SiRNA target sequence
tgtcaatgatatgaatattg

SEQ ID NO: 159462 - DNA, 20 bp, Artificial sequence
  SiRNA target sequence
gtcaatgatatgaatattga

SEQ ID NO: 159463 - DNA, 20 bp, Artificial sequence
  SiRNA target sequence
tcaatgatatgaatattgat

SEQ ID NO: 159464 - DNA, 20 bp, Artificial sequence
  SiRNA target sequence
caatgatatgaatattgatt

SEQ ID NO: 159465 - DNA, 20 bp, Artificial sequence
  SiRNA target sequence
aatgatatgaatattgattt

SEQ ID NO: 159466 - DNA, 20 bp, Artificial sequence
  SiRNA target sequence
atgatatgaatattgattta

SEQ ID NO: 159467 - DNA, 20 bp, Artificial sequence
  SiRNA target sequence
tgatatgaatattgatttac

SEQ ID NO: 159468 - DNA, 20 bp, Artificial sequence
  SiRNA target sequence
gatatgaatattgatttact

SEQ ID NO: 159469 - DNA, 20 bp, Artificial sequence
  SiRNA target sequence
atatgaatattgatttacta

SEQ ID NO: 159470 - DNA, 20 bp, Artificial sequence
  SiRNA target sequence
tatgaatattgatttactaa

SEQ ID NO: 159471 - DNA, 20 bp, Artificial sequence
  SiRNA target sequence
atgaatattgatttactaag

SEQ ID NO: 159472 - DNA, 20 bp, Artificial sequence
  SiRNA target sequence
tgaatattgatttactaagt

SEQ ID NO: 159473 - DNA, 20 bp, Artificial sequence
  SiRNA target sequence
gaatattgatttactaagtt

SEQ ID NO: 159474 - DNA, 20 bp, Artificial sequence
  SiRNA target sequence
aatattgatttactaagttt

SEQ ID NO: 159475 - DNA, 20 bp, Artificial sequence
  SiRNA target sequence
atattgatttactaagttta

SEQ ID NO: 159476 - DNA, 20 bp, Artificial sequence
  SiRNA target sequence
tattgatttactaagtttat

SEQ ID NO: 159477 - DNA, 20 bp, Artificial sequence
  SiRNA target sequence
attgatttactaagtttatc

SEQ ID NO: 159478 - DNA, 20 bp, Artificial sequence
  SiRNA target sequence
ttgatttactaagtttatca

SEQ ID NO: 159479 - DNA, 20 bp, Artificial sequence
  SiRNA target sequence
tgatttactaagtttatcaa

SEQ ID NO: 159480 - DNA, 20 bp, Artificial sequence
  SiRNA target sequence
gatttactaagtttatcaag

SEQ ID NO: 159481 - DNA, 20 bp, Artificial sequence
  SiRNA target sequence
atttactaagtttatcaagt

SEQ ID NO: 159482 - DNA, 20 bp, Artificial sequence
  SiRNA target sequence
tttactaagtttatcaagtc

SEQ ID NO: 159483 - DNA, 20 bp, Artificial sequence
  SiRNA target sequence
ttactaagtttatcaagtca

SEQ ID NO: 159484 - DNA, 20 bp, Artificial sequence
  SiRNA target sequence
tactaagtttatcaagtcat

SEQ ID NO: 159485 - DNA, 20 bp, Artificial sequence
  SiRNA target sequence
actaagtttatcaagtcata

SEQ ID NO: 159486 - DNA, 20 bp, Artificial sequence
  SiRNA target sequence
ctaagtttatcaagtcataa

SEQ ID NO: 159487 - DNA, 20 bp, Artificial sequence
  SiRNA target sequence
taagtttatcaagtcataaa

SEQ ID NO: 159488 - DNA, 20 bp, Artificial sequence
  SiRNA target sequence
aagtttatcaagtcataaaa

SEQ ID NO: 159489 - DNA, 20 bp, Artificial sequence
  SiRNA target sequence
agtttatcaagtcataaaat

SEQ ID NO: 159490 - DNA, 20 bp, Artificial sequence
  SiRNA target sequence
gtttatcaagtcataaaatt

SEQ ID NO: 159491 - DNA, 20 bp, Artificial sequence
  SiRNA target sequence
tttatcaagtcataaaattt

SEQ ID NO: 159492 - DNA, 20 bp, Artificial sequence
  SiRNA target sequence
ttatcaagtcataaaattta

SEQ ID NO: 159493 - DNA, 20 bp, Artificial sequence
  SiRNA target sequence
tatcaagtcataaaatttat

SEQ ID NO: 159494 - DNA, 20 bp, Artificial sequence
  SiRNA target sequence
atcaagtcataaaatttatg

SEQ ID NO: 159495 - DNA, 20 bp, Artificial sequence
  SiRNA target sequence
tcaagtcataaaatttatgg

SEQ ID NO: 159496 - DNA, 20 bp, Artificial sequence
  SiRNA target sequence
caagtcataaaatttatggt

SEQ ID NO: 159497 - DNA, 20 bp, Artificial sequence
  SiRNA target sequence
aagtcataaaatttatggtc

SEQ ID NO: 159498 - DNA, 20 bp, Artificial sequence
  SiRNA target sequence
agtcataaaatttatggtcc

SEQ ID NO: 159499 - DNA, 20 bp, Artificial sequence
  SiRNA target sequence
gtcataaaatttatggtcca

SEQ ID NO: 159500 - DNA, 20 bp, Artificial sequence
  SiRNA target sequence
tcataaaatttatggtccaa

SEQ ID NO: 159501 - DNA, 20 bp, Artificial sequence
  SiRNA target sequence
cataaaatttatggtccaaa

SEQ ID NO: 159502 - DNA, 20 bp, Artificial sequence
  SiRNA target sequence
ataaaatttatggtccaaaa

SEQ ID NO: 159503 - DNA, 20 bp, Artificial sequence
  SiRNA target sequence
taaaatttatggtccaaaag

SEQ ID NO: 159504 - DNA, 20 bp, Artificial sequence
  SiRNA target sequence
aaaatttatggtccaaaagg

SEQ ID NO: 159505 - DNA, 20 bp, Artificial sequence
  SiRNA target sequence
aaatttatggtccaaaaggt

SEQ ID NO: 159506 - DNA, 20 bp, Artificial sequence
  SiRNA target sequence
aatttatggtccaaaaggtg

SEQ ID NO: 159507 - DNA, 20 bp, Artificial sequence
  SiRNA target sequence
atttatggtccaaaaggtgt

SEQ ID NO: 159508 - DNA, 20 bp, Artificial sequence
  SiRNA target sequence
tttatggtccaaaaggtgtt

SEQ ID NO: 159509 - DNA, 20 bp, Artificial sequence
  SiRNA target sequence
ttatggtccaaaaggtgttg

SEQ ID NO: 159510 - DNA, 20 bp, Artificial sequence
  SiRNA target sequence
tatggtccaaaaggtgttgg

SEQ ID NO: 159511 - DNA, 20 bp, Artificial sequence
  SiRNA target sequence
atggtccaaaaggtgttggt

SEQ ID NO: 159512 - DNA, 20 bp, Artificial sequence
  SiRNA target sequence
tggtccaaaaggtgttggtg

SEQ ID NO: 159513 - DNA, 20 bp, Artificial sequence
  SiRNA target sequence
ggtccaaaaggtgttggtgc

SEQ ID NO: 159514 - DNA, 20 bp, Artificial sequence
  SiRNA target sequence
gtccaaaaggtgttggtgcc

SEQ ID NO: 159515 - DNA, 20 bp, Artificial sequence
  SiRNA target sequence
tccaaaaggtgttggtgcct

SEQ ID NO: 159516 - DNA, 20 bp, Artificial sequence
  SiRNA target sequence
ccaaaaggtgttggtgcctt

SEQ ID NO: 159517 - DNA, 20 bp, Artificial sequence
  SiRNA target sequence
caaaaggtgttggtgcctta

SEQ ID NO: 159518 - DNA, 20 bp, Artificial sequence
  SiRNA target sequence
aaaaggtgttggtgccttat

SEQ ID NO: 159519 - DNA, 20 bp, Artificial sequence
  SiRNA target sequence
aaaggtgttggtgccttata

SEQ ID NO: 159520 - DNA, 20 bp, Artificial sequence
  SiRNA target sequence
aaggtgttggtgccttatac

SEQ ID NO: 159521 - DNA, 20 bp, Artificial sequence
  SiRNA target sequence
aggtgttggtgccttatacg

SEQ ID NO: 159522 - DNA, 20 bp, Artificial sequence
  SiRNA target sequence
ggtgttggtgccttatacgt

SEQ ID NO: 159523 - DNA, 20 bp, Artificial sequence
  SiRNA target sequence
gtgttggtgccttatacgtc

SEQ ID NO: 159524 - DNA, 20 bp, Artificial sequence
  SiRNA target sequence
tgttggtgccttatacgtca

SEQ ID NO: 159525 - DNA, 20 bp, Artificial sequence
  SiRNA target sequence
gttggtgccttatacgtcag

SEQ ID NO: 159526 - DNA, 20 bp, Artificial sequence
  SiRNA target sequence
ttggtgccttatacgtcaga

SEQ ID NO: 159527 - DNA, 20 bp, Artificial sequence
  SiRNA target sequence
tggtgccttatacgtcagaa

SEQ ID NO: 159528 - DNA, 20 bp, Artificial sequence
  SiRNA target sequence
ggtgccttatacgtcagaag

SEQ ID NO: 159529 - DNA, 20 bp, Artificial sequence
  SiRNA target sequence
gtgccttatacgtcagaaga

SEQ ID NO: 159530 - DNA, 20 bp, Artificial sequence
  SiRNA target sequence
tgccttatacgtcagaagaa

SEQ ID NO: 159531 - DNA, 20 bp, Artificial sequence
  SiRNA target sequence
gccttatacgtcagaagaag

SEQ ID NO: 159532 - DNA, 20 bp, Artificial sequence
  SiRNA target sequence
ccttatacgtcagaagaagg

SEQ ID NO: 159533 - DNA, 20 bp, Artificial sequence
  SiRNA target sequence
cttatacgtcagaagaaggc

SEQ ID NO: 159534 - DNA, 20 bp, Artificial sequence
  SiRNA target sequence
ttatacgtcagaagaaggcc

SEQ ID NO: 159535 - DNA, 20 bp, Artificial sequence
  SiRNA target sequence
tatacgtcagaagaaggcct

SEQ ID NO: 159536 - DNA, 20 bp, Artificial sequence
  SiRNA target sequence
atacgtcagaagaaggccta

SEQ ID NO: 159537 - DNA, 20 bp, Artificial sequence
  SiRNA target sequence
tacgtcagaagaaggcctag

SEQ ID NO: 159538 - DNA, 20 bp, Artificial sequence
  SiRNA target sequence
acgtcagaagaaggcctagg

SEQ ID NO: 159539 - DNA, 20 bp, Artificial sequence
  SiRNA target sequence
cgtcagaagaaggcctaggg

SEQ ID NO: 159540 - DNA, 20 bp, Artificial sequence
  SiRNA target sequence
gtcagaagaaggcctagggt

SEQ ID NO: 159541 - DNA, 20 bp, Artificial sequence
  SiRNA target sequence
tcagaagaaggcctagggtg

SEQ ID NO: 159542 - DNA, 20 bp, Artificial sequence
  SiRNA target sequence
cagaagaaggcctagggtga

SEQ ID NO: 159543 - DNA, 20 bp, Artificial sequence
  SiRNA target sequence
agaagaaggcctagggtgag

SEQ ID NO: 159544 - DNA, 20 bp, Artificial sequence
  SiRNA target sequence
gaagaaggcctagggtgaga

SEQ ID NO: 159545 - DNA, 20 bp, Artificial sequence
  SiRNA target sequence
aagaaggcctagggtgagaa

SEQ ID NO: 159546 - DNA, 20 bp, Artificial sequence
  SiRNA target sequence
agaaggcctagggtgagaat

SEQ ID NO: 159547 - DNA, 20 bp, Artificial sequence
  SiRNA target sequence
gaaggcctagggtgagaatg

SEQ ID NO: 159548 - DNA, 20 bp, Artificial sequence
  SiRNA target sequence
aaggcctagggtgagaatgt

SEQ ID NO: 159549 - DNA, 20 bp, Artificial sequence
  SiRNA target sequence
aggcctagggtgagaatgtt

SEQ ID NO: 159550 - DNA, 20 bp, Artificial sequence
  SiRNA target sequence
ggcctagggtgagaatgtta

SEQ ID NO: 159551 - DNA, 20 bp, Artificial sequence
  SiRNA target sequence
gcctagggtgagaatgttac

SEQ ID NO: 159552 - DNA, 20 bp, Artificial sequence
  SiRNA target sequence
cctagggtgagaatgttacc

SEQ ID NO: 159553 - DNA, 20 bp, Artificial sequence
  SiRNA target sequence
ctagggtgagaatgttacca

SEQ ID NO: 159554 - DNA, 20 bp, Artificial sequence
  SiRNA target sequence
tagggtgagaatgttaccac

SEQ ID NO: 159555 - DNA, 20 bp, Artificial sequence
  SiRNA target sequence
agggtgagaatgttaccact

SEQ ID NO: 159556 - DNA, 20 bp, Artificial sequence
  SiRNA target sequence
gggtgagaatgttaccactt

SEQ ID NO: 159557 - DNA, 20 bp, Artificial sequence
  SiRNA target sequence
ggtgagaatgttaccacttt

SEQ ID NO: 159558 - DNA, 20 bp, Artificial sequence
  SiRNA target sequence
gtgagaatgttaccactttt

SEQ ID NO: 159559 - DNA, 20 bp, Artificial sequence
  SiRNA target sequence
tgagaatgttaccacttttt

SEQ ID NO: 159560 - DNA, 20 bp, Artificial sequence
  SiRNA target sequence
gagaatgttaccacttttta

SEQ ID NO: 159561 - DNA, 20 bp, Artificial sequence
  SiRNA target sequence
agaatgttaccactttttaa

SEQ ID NO: 159562 - DNA, 20 bp, Artificial sequence
  SiRNA target sequence
gaatgttaccactttttaat

SEQ ID NO: 159563 - DNA, 20 bp, Artificial sequence
  SiRNA target sequence
aatgttaccactttttaatg

SEQ ID NO: 159564 - DNA, 20 bp, Artificial sequence
  SiRNA target sequence
atgttaccactttttaatgg

SEQ ID NO: 159565 - DNA, 20 bp, Artificial sequence
  SiRNA target sequence
tgttaccactttttaatggt

SEQ ID NO: 159566 - DNA, 20 bp, Artificial sequence
  SiRNA target sequence
gttaccactttttaatggtg

SEQ ID NO: 159567 - DNA, 20 bp, Artificial sequence
  SiRNA target sequence
ttaccactttttaatggtgg

SEQ ID NO: 159568 - DNA, 20 bp, Artificial sequence
  SiRNA target sequence
taccactttttaatggtggt

SEQ ID NO: 159569 - DNA, 20 bp, Artificial sequence
  SiRNA target sequence
accactttttaatggtggtg

SEQ ID NO: 159570 - DNA, 20 bp, Artificial sequence
  SiRNA target sequence
ccactttttaatggtggtgg

SEQ ID NO: 159571 - DNA, 20 bp, Artificial sequence
  SiRNA target sequence
cactttttaatggtggtgga

SEQ ID NO: 159572 - DNA, 20 bp, Artificial sequence
  SiRNA target sequence
actttttaatggtggtggac

SEQ ID NO: 159573 - DNA, 20 bp, Artificial sequence
  SiRNA target sequence
ctttttaatggtggtggaca

SEQ ID NO: 159574 - DNA, 20 bp, Artificial sequence
  SiRNA target sequence
tttttaatggtggtggacaa

SEQ ID NO: 159575 - DNA, 20 bp, Artificial sequence
  SiRNA target sequence
ttttaatggtggtggacaag

SEQ ID NO: 159576 - DNA, 20 bp, Artificial sequence
  SiRNA target sequence
tttaatggtggtggacaaga

SEQ ID NO: 159577 - DNA, 20 bp, Artificial sequence
  SiRNA target sequence
ttaatggtggtggacaagaa

SEQ ID NO: 159578 - DNA, 20 bp, Artificial sequence
  SiRNA target sequence
taatggtggtggacaagaaa

SEQ ID NO: 159579 - DNA, 20 bp, Artificial sequence
  SiRNA target sequence
aatggtggtggacaagaaag

SEQ ID NO: 159580 - DNA, 20 bp, Artificial sequence
  SiRNA target sequence
atggtggtggacaagaaaga

SEQ ID NO: 159581 - DNA, 20 bp, Artificial sequence
  SiRNA target sequence
tggtggtggacaagaaagag

SEQ ID NO: 159582 - DNA, 20 bp, Artificial sequence
  SiRNA target sequence
ggtggtggacaagaaagagg

SEQ ID NO: 159583 - DNA, 20 bp, Artificial sequence
  SiRNA target sequence
gtggtggacaagaaagagga

SEQ ID NO: 159584 - DNA, 20 bp, Artificial sequence
  SiRNA target sequence
tggtggacaagaaagaggat

SEQ ID NO: 159585 - DNA, 20 bp, Artificial sequence
  SiRNA target sequence
ggtggacaagaaagaggatt

SEQ ID NO: 159586 - DNA, 20 bp, Artificial sequence
  SiRNA target sequence
gtggacaagaaagaggatta

SEQ ID NO: 159587 - DNA, 20 bp, Artificial sequence
  SiRNA target sequence
tggacaagaaagaggattaa

SEQ ID NO: 159588 - DNA, 20 bp, Artificial sequence
  SiRNA target sequence
ggacaagaaagaggattaag

SEQ ID NO: 159589 - DNA, 20 bp, Artificial sequence
  SiRNA target sequence
gacaagaaagaggattaaga

SEQ ID NO: 159590 - DNA, 20 bp, Artificial sequence
  SiRNA target sequence
acaagaaagaggattaagaa

SEQ ID NO: 159591 - DNA, 20 bp, Artificial sequence
  SiRNA target sequence
caagaaagaggattaagaag

SEQ ID NO: 159592 - DNA, 20 bp, Artificial sequence
  SiRNA target sequence
aagaaagaggattaagaagt

SEQ ID NO: 159593 - DNA, 20 bp, Artificial sequence
  SiRNA target sequence
agaaagaggattaagaagtg

SEQ ID NO: 159594 - DNA, 20 bp, Artificial sequence
  SiRNA target sequence
gaaagaggattaagaagtgg

SEQ ID NO: 159595 - DNA, 20 bp, Artificial sequence
  SiRNA target sequence
aaagaggattaagaagtggg

SEQ ID NO: 159596 - DNA, 20 bp, Artificial sequence
  SiRNA target sequence
aagaggattaagaagtggga

SEQ ID NO: 159597 - DNA, 20 bp, Artificial sequence
  SiRNA target sequence
agaggattaagaagtgggac

SEQ ID NO: 159598 - DNA, 20 bp, Artificial sequence
  SiRNA target sequence
gaggattaagaagtgggaca

SEQ ID NO: 159599 - DNA, 20 bp, Artificial sequence
  SiRNA target sequence
aggattaagaagtgggacaa

SEQ ID NO: 159600 - DNA, 20 bp, Artificial sequence
  SiRNA target sequence
ggattaagaagtgggacaac

SEQ ID NO: 159601 - DNA, 20 bp, Artificial sequence
  SiRNA target sequence
gattaagaagtgggacaact

SEQ ID NO: 159602 - DNA, 20 bp, Artificial sequence
  SiRNA target sequence
attaagaagtgggacaactt

SEQ ID NO: 159603 - DNA, 20 bp, Artificial sequence
  SiRNA target sequence
ttaagaagtgggacaacttc

SEQ ID NO: 159604 - DNA, 20 bp, Artificial sequence
  SiRNA target sequence
taagaagtgggacaacttct

SEQ ID NO: 159605 - DNA, 20 bp, Artificial sequence
  SiRNA target sequence
aagaagtgggacaacttctc

SEQ ID NO: 159606 - DNA, 20 bp, Artificial sequence
  SiRNA target sequence
agaagtgggacaacttctcc

SEQ ID NO: 159607 - DNA, 20 bp, Artificial sequence
  SiRNA target sequence
gaagtgggacaacttctcca

SEQ ID NO: 159608 - DNA, 20 bp, Artificial sequence
  SiRNA target sequence
aagtgggacaacttctccac

SEQ ID NO: 159609 - DNA, 20 bp, Artificial sequence
  SiRNA target sequence
agtgggacaacttctccacc

SEQ ID NO: 159610 - DNA, 20 bp, Artificial sequence
  SiRNA target sequence
gtgggacaacttctccacct

SEQ ID NO: 159611 - DNA, 20 bp, Artificial sequence
  SiRNA target sequence
tgggacaacttctccacctt

SEQ ID NO: 159612 - DNA, 20 bp, Artificial sequence
  SiRNA target sequence
gggacaacttctccaccttt

SEQ ID NO: 159613 - DNA, 20 bp, Artificial sequence
  SiRNA target sequence
ggacaacttctccaccttta

SEQ ID NO: 159614 - DNA, 20 bp, Artificial sequence
  SiRNA target sequence
gacaacttctccacctttag

SEQ ID NO: 159615 - DNA, 20 bp, Artificial sequence
  SiRNA target sequence
acaacttctccacctttagt

SEQ ID NO: 159616 - DNA, 20 bp, Artificial sequence
  SiRNA target sequence
caacttctccacctttagtt

SEQ ID NO: 159617 - DNA, 20 bp, Artificial sequence
  SiRNA target sequence
aacttctccacctttagttg

SEQ ID NO: 159618 - DNA, 20 bp, Artificial sequence
  SiRNA target sequence
acttctccacctttagttgt

SEQ ID NO: 159619 - DNA, 20 bp, Artificial sequence
  SiRNA target sequence
cttctccacctttagttgtt

SEQ ID NO: 159620 - DNA, 20 bp, Artificial sequence
  SiRNA target sequence
ttctccacctttagttgttg

SEQ ID NO: 159621 - DNA, 20 bp, Artificial sequence
  SiRNA target sequence
tctccacctttagttgttgg

SEQ ID NO: 159622 - DNA, 20 bp, Artificial sequence
  SiRNA target sequence
ctccacctttagttgttgga

SEQ ID NO: 159623 - DNA, 20 bp, Artificial sequence
  SiRNA target sequence
tccacctttagttgttggat

SEQ ID NO: 159624 - DNA, 20 bp, Artificial sequence
  SiRNA target sequence
ccacctttagttgttggatt

SEQ ID NO: 159625 - DNA, 20 bp, Artificial sequence
  SiRNA target sequence
cacctttagttgttggatta

SEQ ID NO: 159626 - DNA, 20 bp, Artificial sequence
  SiRNA target sequence
acctttagttgttggattag

SEQ ID NO: 159627 - DNA, 20 bp, Artificial sequence
  SiRNA target sequence
cctttagttgttggattagg

SEQ ID NO: 159628 - DNA, 20 bp, Artificial sequence
  SiRNA target sequence
ctttagttgttggattaggc

SEQ ID NO: 159629 - DNA, 20 bp, Artificial sequence
  SiRNA target sequence
tttagttgttggattaggca

SEQ ID NO: 159630 - DNA, 20 bp, Artificial sequence
  SiRNA target sequence
ttagttgttggattaggcaa

SEQ ID NO: 159631 - DNA, 20 bp, Artificial sequence
  SiRNA target sequence
tagttgttggattaggcaaa

SEQ ID NO: 159632 - DNA, 20 bp, Artificial sequence
  SiRNA target sequence
agttgttggattaggcaaag

SEQ ID NO: 159633 - DNA, 20 bp, Artificial sequence
  SiRNA target sequence
gttgttggattaggcaaagc

SEQ ID NO: 159634 - DNA, 20 bp, Artificial sequence
  SiRNA target sequence
ttgttggattaggcaaagct

SEQ ID NO: 159635 - DNA, 20 bp, Artificial sequence
  SiRNA target sequence
tgttggattaggcaaagctg

SEQ ID NO: 159636 - DNA, 20 bp, Artificial sequence
  SiRNA target sequence
gttggattaggcaaagctgc

SEQ ID NO: 159637 - DNA, 20 bp, Artificial sequence
  SiRNA target sequence
ttggattaggcaaagctgct

SEQ ID NO: 159638 - DNA, 20 bp, Artificial sequence
  SiRNA target sequence
tggattaggcaaagctgctg

SEQ ID NO: 159639 - DNA, 20 bp, Artificial sequence
  SiRNA target sequence
ggattaggcaaagctgctga

SEQ ID NO: 159640 - DNA, 20 bp, Artificial sequence
  SiRNA target sequence
gattaggcaaagctgctgag

SEQ ID NO: 159641 - DNA, 20 bp, Artificial sequence
  SiRNA target sequence
attaggcaaagctgctgaga

SEQ ID NO: 159642 - DNA, 20 bp, Artificial sequence
  SiRNA target sequence
ttaggcaaagctgctgagat

SEQ ID NO: 159643 - DNA, 20 bp, Artificial sequence
  SiRNA target sequence
taggcaaagctgctgagata

SEQ ID NO: 159644 - DNA, 20 bp, Artificial sequence
  SiRNA target sequence
aggcaaagctgctgagatat

SEQ ID NO: 159645 - DNA, 20 bp, Artificial sequence
  SiRNA target sequence
ggcaaagctgctgagatatg

SEQ ID NO: 159646 - DNA, 20 bp, Artificial sequence
  SiRNA target sequence
gcaaagctgctgagatatgc

SEQ ID NO: 159647 - DNA, 20 bp, Artificial sequence
  SiRNA target sequence
caaagctgctgagatatgct

SEQ ID NO: 159648 - DNA, 20 bp, Artificial sequence
  SiRNA target sequence
aaagctgctgagatatgctc

SEQ ID NO: 159649 - DNA, 20 bp, Artificial sequence
  SiRNA target sequence
aagctgctgagatatgctct

SEQ ID NO: 159650 - DNA, 20 bp, Artificial sequence
  SiRNA target sequence
agctgctgagatatgctctc

SEQ ID NO: 159651 - DNA, 20 bp, Artificial sequence
  SiRNA target sequence
gctgctgagatatgctctca

SEQ ID NO: 159652 - DNA, 20 bp, Artificial sequence
  SiRNA target sequence
ctgctgagatatgctctcag

SEQ ID NO: 159653 - DNA, 20 bp, Artificial sequence
  SiRNA target sequence
tgctgagatatgctctcagg

SEQ ID NO: 159654 - DNA, 20 bp, Artificial sequence
  SiRNA target sequence
gctgagatatgctctcagga

SEQ ID NO: 159655 - DNA, 20 bp, Artificial sequence
  SiRNA target sequence
ctgagatatgctctcaggag

SEQ ID NO: 159656 - DNA, 20 bp, Artificial sequence
  SiRNA target sequence
tgagatatgctctcaggaga

SEQ ID NO: 159657 - DNA, 20 bp, Artificial sequence
  SiRNA target sequence
gagatatgctctcaggagat

SEQ ID NO: 159658 - DNA, 20 bp, Artificial sequence
  SiRNA target sequence
agatatgctctcaggagatg

SEQ ID NO: 159659 - DNA, 20 bp, Artificial sequence
  SiRNA target sequence
gatatgctctcaggagatgc

SEQ ID NO: 159660 - DNA, 20 bp, Artificial sequence
  SiRNA target sequence
atatgctctcaggagatgcg

SEQ ID NO: 159661 - DNA, 20 bp, Artificial sequence
  SiRNA target sequence
tatgctctcaggagatgcgt

SEQ ID NO: 159662 - DNA, 20 bp, Artificial sequence
  SiRNA target sequence
atgctctcaggagatgcgta

SEQ ID NO: 159663 - DNA, 20 bp, Artificial sequence
  SiRNA target sequence
tgctctcaggagatgcgtaa

SEQ ID NO: 159664 - DNA, 20 bp, Artificial sequence
  SiRNA target sequence
gctctcaggagatgcgtaag

SEQ ID NO: 159665 - DNA, 20 bp, Artificial sequence
  SiRNA target sequence
ctctcaggagatgcgtaagg

SEQ ID NO: 159666 - DNA, 20 bp, Artificial sequence
  SiRNA target sequence
tctcaggagatgcgtaagga

SEQ ID NO: 159667 - DNA, 20 bp, Artificial sequence
  SiRNA target sequence
ctcaggagatgcgtaaggac

SEQ ID NO: 159668 - DNA, 20 bp, Artificial sequence
  SiRNA target sequence
tcaggagatgcgtaaggact

SEQ ID NO: 159669 - DNA, 20 bp, Artificial sequence
  SiRNA target sequence
caggagatgcgtaaggacta

SEQ ID NO: 159670 - DNA, 20 bp, Artificial sequence
  SiRNA target sequence
aggagatgcgtaaggactat

SEQ ID NO: 159671 - DNA, 20 bp, Artificial sequence
  SiRNA target sequence
ggagatgcgtaaggactatg

SEQ ID NO: 159672 - DNA, 20 bp, Artificial sequence
  SiRNA target sequence
gagatgcgtaaggactatga

SEQ ID NO: 159673 - DNA, 20 bp, Artificial sequence
  SiRNA target sequence
agatgcgtaaggactatgaa

SEQ ID NO: 159674 - DNA, 20 bp, Artificial sequence
  SiRNA target sequence
gatgcgtaaggactatgaat

SEQ ID NO: 159675 - DNA, 20 bp, Artificial sequence
  SiRNA target sequence
atgcgtaaggactatgaata

SEQ ID NO: 159676 - DNA, 20 bp, Artificial sequence
  SiRNA target sequence
tgcgtaaggactatgaatat

SEQ ID NO: 159677 - DNA, 20 bp, Artificial sequence
  SiRNA target sequence
gcgtaaggactatgaatata

SEQ ID NO: 159678 - DNA, 20 bp, Artificial sequence
  SiRNA target sequence
cgtaaggactatgaatatat

SEQ ID NO: 159679 - DNA, 20 bp, Artificial sequence
  SiRNA target sequence
gtaaggactatgaatatata

SEQ ID NO: 159680 - DNA, 20 bp, Artificial sequence
  SiRNA target sequence
taaggactatgaatatatac

SEQ ID NO: 159681 - DNA, 20 bp, Artificial sequence
  SiRNA target sequence
aaggactatgaatatataca

SEQ ID NO: 159682 - DNA, 20 bp, Artificial sequence
  SiRNA target sequence
aggactatgaatatatacaa

SEQ ID NO: 159683 - DNA, 20 bp, Artificial sequence
  SiRNA target sequence
ggactatgaatatatacaaa

SEQ ID NO: 159684 - DNA, 20 bp, Artificial sequence
  SiRNA target sequence
gactatgaatatatacaaaa

SEQ ID NO: 159685 - DNA, 20 bp, Artificial sequence
  SiRNA target sequence
actatgaatatatacaaaaa

SEQ ID NO: 159686 - DNA, 20 bp, Artificial sequence
  SiRNA target sequence
ctatgaatatatacaaaaat

SEQ ID NO: 159687 - DNA, 20 bp, Artificial sequence
  SiRNA target sequence
tatgaatatatacaaaaatt

SEQ ID NO: 159688 - DNA, 20 bp, Artificial sequence
  SiRNA target sequence
atgaatatatacaaaaatta

SEQ ID NO: 159689 - DNA, 20 bp, Artificial sequence
  SiRNA target sequence
tgaatatatacaaaaattat

SEQ ID NO: 159690 - DNA, 20 bp, Artificial sequence
  SiRNA target sequence
gaatatatacaaaaattatc

SEQ ID NO: 159691 - DNA, 20 bp, Artificial sequence
  SiRNA target sequence
aatatatacaaaaattatcg

SEQ ID NO: 159692 - DNA, 20 bp, Artificial sequence
  SiRNA target sequence
atatatacaaaaattatcgg

SEQ ID NO: 159693 - DNA, 20 bp, Artificial sequence
  SiRNA target sequence
tatatacaaaaattatcgga

SEQ ID NO: 159694 - DNA, 20 bp, Artificial sequence
  SiRNA target sequence
atatacaaaaattatcggat

SEQ ID NO: 159695 - DNA, 20 bp, Artificial sequence
  SiRNA target sequence
tatacaaaaattatcggata

SEQ ID NO: 159696 - DNA, 20 bp, Artificial sequence
  SiRNA target sequence
atacaaaaattatcggataa

SEQ ID NO: 159697 - DNA, 20 bp, Artificial sequence
  SiRNA target sequence
tacaaaaattatcggataaa

SEQ ID NO: 159698 - DNA, 20 bp, Artificial sequence
  SiRNA target sequence
acaaaaattatcggataaac

SEQ ID NO: 159699 - DNA, 20 bp, Artificial sequence
  SiRNA target sequence
caaaaattatcggataaact

SEQ ID NO: 159700 - DNA, 20 bp, Artificial sequence
  SiRNA target sequence
aaaaattatcggataaacta

SEQ ID NO: 159701 - DNA, 20 bp, Artificial sequence
  SiRNA target sequence
aaaattatcggataaactaa

SEQ ID NO: 159702 - DNA, 20 bp, Artificial sequence
  SiRNA target sequence
aaattatcggataaactaaa

SEQ ID NO: 159703 - DNA, 20 bp, Artificial sequence
  SiRNA target sequence
aattatcggataaactaaaa

SEQ ID NO: 159704 - DNA, 20 bp, Artificial sequence
  SiRNA target sequence
attatcggataaactaaaaa

SEQ ID NO: 159705 - DNA, 20 bp, Artificial sequence
  SiRNA target sequence
ttatcggataaactaaaaaa

SEQ ID NO: 159706 - DNA, 20 bp, Artificial sequence
  SiRNA target sequence
tatcggataaactaaaaaat

SEQ ID NO: 159707 - DNA, 20 bp, Artificial sequence
  SiRNA target sequence
atcggataaactaaaaaatc

SEQ ID NO: 159708 - DNA, 20 bp, Artificial sequence
  SiRNA target sequence
tcggataaactaaaaaatcg

SEQ ID NO: 159709 - DNA, 20 bp, Artificial sequence
  SiRNA target sequence
cggataaactaaaaaatcgc

SEQ ID NO: 159710 - DNA, 20 bp, Artificial sequence
  SiRNA target sequence
ggataaactaaaaaatcgca

SEQ ID NO: 159711 - DNA, 20 bp, Artificial sequence
  SiRNA target sequence
gataaactaaaaaatcgcat

SEQ ID NO: 159712 - DNA, 20 bp, Artificial sequence
  SiRNA target sequence
ataaactaaaaaatcgcatc

SEQ ID NO: 159713 - DNA, 20 bp, Artificial sequence
  SiRNA target sequence
taaactaaaaaatcgcatca

SEQ ID NO: 159714 - DNA, 20 bp, Artificial sequence
  SiRNA target sequence
aaactaaaaaatcgcatcaa

SEQ ID NO: 159715 - DNA, 20 bp, Artificial sequence
  SiRNA target sequence
aactaaaaaatcgcatcaaa

SEQ ID NO: 159716 - DNA, 20 bp, Artificial sequence
  SiRNA target sequence
actaaaaaatcgcatcaaaa

SEQ ID NO: 159717 - DNA, 20 bp, Artificial sequence
  SiRNA target sequence
ctaaaaaatcgcatcaaaac

SEQ ID NO: 159718 - DNA, 20 bp, Artificial sequence
  SiRNA target sequence
taaaaaatcgcatcaaaacg

SEQ ID NO: 159719 - DNA, 20 bp, Artificial sequence
  SiRNA target sequence
aaaaaatcgcatcaaaacga

SEQ ID NO: 159720 - DNA, 20 bp, Artificial sequence
  SiRNA target sequence
aaaaatcgcatcaaaacgaa

SEQ ID NO: 159721 - DNA, 20 bp, Artificial sequence
  SiRNA target sequence
aaaatcgcatcaaaacgaat

SEQ ID NO: 159722 - DNA, 20 bp, Artificial sequence
  SiRNA target sequence
aaatcgcatcaaaacgaatg

SEQ ID NO: 159723 - DNA, 20 bp, Artificial sequence
  SiRNA target sequence
aatcgcatcaaaacgaatgt

SEQ ID NO: 159724 - DNA, 20 bp, Artificial sequence
  SiRNA target sequence
atcgcatcaaaacgaatgta

SEQ ID NO: 159725 - DNA, 20 bp, Artificial sequence
  SiRNA target sequence
tcgcatcaaaacgaatgtag

SEQ ID NO: 159726 - DNA, 20 bp, Artificial sequence
  SiRNA target sequence
cgcatcaaaacgaatgtaga

SEQ ID NO: 159727 - DNA, 20 bp, Artificial sequence
  SiRNA target sequence
gcatcaaaacgaatgtagaa

SEQ ID NO: 159728 - DNA, 20 bp, Artificial sequence
  SiRNA target sequence
catcaaaacgaatgtagaaa

SEQ ID NO: 159729 - DNA, 20 bp, Artificial sequence
  SiRNA target sequence
atcaaaacgaatgtagaaaa

SEQ ID NO: 159730 - DNA, 20 bp, Artificial sequence
  SiRNA target sequence
tcaaaacgaatgtagaaaat

SEQ ID NO: 159731 - DNA, 20 bp, Artificial sequence
  SiRNA target sequence
caaaacgaatgtagaaaatg

SEQ ID NO: 159732 - DNA, 20 bp, Artificial sequence
  SiRNA target sequence
aaaacgaatgtagaaaatgt

SEQ ID NO: 159733 - DNA, 20 bp, Artificial sequence
  SiRNA target sequence
aaacgaatgtagaaaatgtt

SEQ ID NO: 159734 - DNA, 20 bp, Artificial sequence
  SiRNA target sequence
aacgaatgtagaaaatgttg

SEQ ID NO: 159735 - DNA, 20 bp, Artificial sequence
  SiRNA target sequence
acgaatgtagaaaatgttgt

SEQ ID NO: 159736 - DNA, 20 bp, Artificial sequence
  SiRNA target sequence
cgaatgtagaaaatgttgtt

SEQ ID NO: 159737 - DNA, 20 bp, Artificial sequence
  SiRNA target sequence
gaatgtagaaaatgttgtta

SEQ ID NO: 159738 - DNA, 20 bp, Artificial sequence
  SiRNA target sequence
aatgtagaaaatgttgttat

SEQ ID NO: 159739 - DNA, 20 bp, Artificial sequence
  SiRNA target sequence
atgtagaaaatgttgttatt

SEQ ID NO: 159740 - DNA, 20 bp, Artificial sequence
  SiRNA target sequence
tgtagaaaatgttgttatta

SEQ ID NO: 159741 - DNA, 20 bp, Artificial sequence
  SiRNA target sequence
gtagaaaatgttgttattaa

SEQ ID NO: 159742 - DNA, 20 bp, Artificial sequence
  SiRNA target sequence
tagaaaatgttgttattaac

SEQ ID NO: 159743 - DNA, 20 bp, Artificial sequence
  SiRNA target sequence
agaaaatgttgttattaacg

SEQ ID NO: 159744 - DNA, 20 bp, Artificial sequence
  SiRNA target sequence
gaaaatgttgttattaacgg

SEQ ID NO: 159745 - DNA, 20 bp, Artificial sequence
  SiRNA target sequence
aaaatgttgttattaacggc

SEQ ID NO: 159746 - DNA, 20 bp, Artificial sequence
  SiRNA target sequence
aaatgttgttattaacggcg

SEQ ID NO: 159747 - DNA, 20 bp, Artificial sequence
  SiRNA target sequence
aatgttgttattaacggcga

SEQ ID NO: 159748 - DNA, 20 bp, Artificial sequence
  SiRNA target sequence
atgttgttattaacggcgat

SEQ ID NO: 159749 - DNA, 20 bp, Artificial sequence
  SiRNA target sequence
tgttgttattaacggcgatg

SEQ ID NO: 159750 - DNA, 20 bp, Artificial sequence
  SiRNA target sequence
gttgttattaacggcgatga

SEQ ID NO: 159751 - DNA, 20 bp, Artificial sequence
  SiRNA target sequence
ttgttattaacggcgatgat

SEQ ID NO: 159752 - DNA, 20 bp, Artificial sequence
  SiRNA target sequence
tgttattaacggcgatgatt

SEQ ID NO: 159753 - DNA, 20 bp, Artificial sequence
  SiRNA target sequence
gttattaacggcgatgattc

SEQ ID NO: 159754 - DNA, 20 bp, Artificial sequence
  SiRNA target sequence
ttattaacggcgatgattct

SEQ ID NO: 159755 - DNA, 20 bp, Artificial sequence
  SiRNA target sequence
tattaacggcgatgattcta

SEQ ID NO: 159756 - DNA, 20 bp, Artificial sequence
  SiRNA target sequence
attaacggcgatgattctaa

SEQ ID NO: 159757 - DNA, 20 bp, Artificial sequence
  SiRNA target sequence
ttaacggcgatgattctaag

SEQ ID NO: 159758 - DNA, 20 bp, Artificial sequence
  SiRNA target sequence
taacggcgatgattctaaga

SEQ ID NO: 159759 - DNA, 20 bp, Artificial sequence
  SiRNA target sequence
aacggcgatgattctaagac

SEQ ID NO: 159760 - DNA, 20 bp, Artificial sequence
  SiRNA target sequence
acggcgatgattctaagact

SEQ ID NO: 159761 - DNA, 20 bp, Artificial sequence
  SiRNA target sequence
cggcgatgattctaagactt

SEQ ID NO: 159762 - DNA, 20 bp, Artificial sequence
  SiRNA target sequence
ggcgatgattctaagacttt

SEQ ID NO: 159763 - DNA, 20 bp, Artificial sequence
  SiRNA target sequence
gcgatgattctaagactttt

SEQ ID NO: 159764 - DNA, 20 bp, Artificial sequence
  SiRNA target sequence
cgatgattctaagacttttc

SEQ ID NO: 159765 - DNA, 20 bp, Artificial sequence
  SiRNA target sequence
gatgattctaagacttttcc

SEQ ID NO: 159766 - DNA, 20 bp, Artificial sequence
  SiRNA target sequence
atgattctaagacttttcct

SEQ ID NO: 159767 - DNA, 20 bp, Artificial sequence
  SiRNA target sequence
tgattctaagacttttcctg

SEQ ID NO: 159768 - DNA, 20 bp, Artificial sequence
  SiRNA target sequence
gattctaagacttttcctgg

SEQ ID NO: 159769 - DNA, 20 bp, Artificial sequence
  SiRNA target sequence
attctaagacttttcctggc

SEQ ID NO: 159770 - DNA, 20 bp, Artificial sequence
  SiRNA target sequence
ttctaagacttttcctggct

SEQ ID NO: 159771 - DNA, 20 bp, Artificial sequence
  SiRNA target sequence
tctaagacttttcctggctg

SEQ ID NO: 159772 - DNA, 20 bp, Artificial sequence
  SiRNA target sequence
ctaagacttttcctggctgt

SEQ ID NO: 159773 - DNA, 20 bp, Artificial sequence
  SiRNA target sequence
taagacttttcctggctgtc

SEQ ID NO: 159774 - DNA, 20 bp, Artificial sequence
  SiRNA target sequence
aagacttttcctggctgtct

SEQ ID NO: 159775 - DNA, 20 bp, Artificial sequence
  SiRNA target sequence
agacttttcctggctgtctc

SEQ ID NO: 159776 - DNA, 20 bp, Artificial sequence
  SiRNA target sequence
gacttttcctggctgtctca

SEQ ID NO: 159777 - DNA, 20 bp, Artificial sequence
  SiRNA target sequence
acttttcctggctgtctcaa

SEQ ID NO: 159778 - DNA, 20 bp, Artificial sequence
  SiRNA target sequence
cttttcctggctgtctcaat

SEQ ID NO: 159779 - DNA, 20 bp, Artificial sequence
  SiRNA target sequence
ttttcctggctgtctcaata

SEQ ID NO: 159780 - DNA, 20 bp, Artificial sequence
  SiRNA target sequence
tttcctggctgtctcaatat

SEQ ID NO: 159781 - DNA, 20 bp, Artificial sequence
  SiRNA target sequence
ttcctggctgtctcaatatt

SEQ ID NO: 159782 - DNA, 20 bp, Artificial sequence
  SiRNA target sequence
tcctggctgtctcaatattt

SEQ ID NO: 159783 - DNA, 20 bp, Artificial sequence
  SiRNA target sequence
cctggctgtctcaatatttc

SEQ ID NO: 159784 - DNA, 20 bp, Artificial sequence
  SiRNA target sequence
ctggctgtctcaatatttct

SEQ ID NO: 159785 - DNA, 20 bp, Artificial sequence
  SiRNA target sequence
tggctgtctcaatatttctt

SEQ ID NO: 159786 - DNA, 20 bp, Artificial sequence
  SiRNA target sequence
ggctgtctcaatatttcttt

SEQ ID NO: 159787 - DNA, 20 bp, Artificial sequence
  SiRNA target sequence
gctgtctcaatatttctttt

SEQ ID NO: 159788 - DNA, 20 bp, Artificial sequence
  SiRNA target sequence
ctgtctcaatatttcttttc

SEQ ID NO: 159789 - DNA, 20 bp, Artificial sequence
  SiRNA target sequence
tgtctcaatatttcttttcc

SEQ ID NO: 159790 - DNA, 20 bp, Artificial sequence
  SiRNA target sequence
gtctcaatatttcttttcca

SEQ ID NO: 159791 - DNA, 20 bp, Artificial sequence
  SiRNA target sequence
tctcaatatttcttttccat

SEQ ID NO: 159792 - DNA, 20 bp, Artificial sequence
  SiRNA target sequence
ctcaatatttcttttccata

SEQ ID NO: 159793 - DNA, 20 bp, Artificial sequence
  SiRNA target sequence
tcaatatttcttttccatat

SEQ ID NO: 159794 - DNA, 20 bp, Artificial sequence
  SiRNA target sequence
caatatttcttttccatatg

SEQ ID NO: 159795 - DNA, 20 bp, Artificial sequence
  SiRNA target sequence
aatatttcttttccatatgt

SEQ ID NO: 159796 - DNA, 20 bp, Artificial sequence
  SiRNA target sequence
atatttcttttccatatgta

SEQ ID NO: 159797 - DNA, 20 bp, Artificial sequence
  SiRNA target sequence
tatttcttttccatatgtag

SEQ ID NO: 159798 - DNA, 20 bp, Artificial sequence
  SiRNA target sequence
atttcttttccatatgtaga

SEQ ID NO: 159799 - DNA, 20 bp, Artificial sequence
  SiRNA target sequence
tttcttttccatatgtagaa

SEQ ID NO: 159800 - DNA, 20 bp, Artificial sequence
  SiRNA target sequence
ttcttttccatatgtagaag

SEQ ID NO: 159801 - DNA, 20 bp, Artificial sequence
  SiRNA target sequence
tcttttccatatgtagaagg

SEQ ID NO: 159802 - DNA, 20 bp, Artificial sequence
  SiRNA target sequence
cttttccatatgtagaaggt

SEQ ID NO: 159803 - DNA, 20 bp, Artificial sequence
  SiRNA target sequence
ttttccatatgtagaaggtg

SEQ ID NO: 159804 - DNA, 20 bp, Artificial sequence
  SiRNA target sequence
tttccatatgtagaaggtga

SEQ ID NO: 159805 - DNA, 20 bp, Artificial sequence
  SiRNA target sequence
ttccatatgtagaaggtgaa

SEQ ID NO: 159806 - DNA, 20 bp, Artificial sequence
  SiRNA target sequence
tccatatgtagaaggtgaag

SEQ ID NO: 159807 - DNA, 20 bp, Artificial sequence
  SiRNA target sequence
ccatatgtagaaggtgaagg

SEQ ID NO: 159808 - DNA, 20 bp, Artificial sequence
  SiRNA target sequence
catatgtagaaggtgaaggg

SEQ ID NO: 159809 - DNA, 20 bp, Artificial sequence
  SiRNA target sequence
atatgtagaaggtgaagggc

SEQ ID NO: 159810 - DNA, 20 bp, Artificial sequence
  SiRNA target sequence
tatgtagaaggtgaagggct

SEQ ID NO: 159811 - DNA, 20 bp, Artificial sequence
  SiRNA target sequence
atgtagaaggtgaagggctt

SEQ ID NO: 159812 - DNA, 20 bp, Artificial sequence
  SiRNA target sequence
tgtagaaggtgaagggctta

SEQ ID NO: 159813 - DNA, 20 bp, Artificial sequence
  SiRNA target sequence
gtagaaggtgaagggcttat

SEQ ID NO: 159814 - DNA, 20 bp, Artificial sequence
  SiRNA target sequence
tagaaggtgaagggcttatg

SEQ ID NO: 159815 - DNA, 20 bp, Artificial sequence
  SiRNA target sequence
agaaggtgaagggcttatga

SEQ ID NO: 159816 - DNA, 20 bp, Artificial sequence
  SiRNA target sequence
gaaggtgaagggcttatgat

SEQ ID NO: 159817 - DNA, 20 bp, Artificial sequence
  SiRNA target sequence
aaggtgaagggcttatgatg

SEQ ID NO: 159818 - DNA, 20 bp, Artificial sequence
  SiRNA target sequence
aggtgaagggcttatgatga

SEQ ID NO: 159819 - DNA, 20 bp, Artificial sequence
  SiRNA target sequence
ggtgaagggcttatgatgaa

SEQ ID NO: 159820 - DNA, 20 bp, Artificial sequence
  SiRNA target sequence
gtgaagggcttatgatgaat

SEQ ID NO: 159821 - DNA, 20 bp, Artificial sequence
  SiRNA target sequence
tgaagggcttatgatgaata

SEQ ID NO: 159822 - DNA, 20 bp, Artificial sequence
  SiRNA target sequence
gaagggcttatgatgaatat

SEQ ID NO: 159823 - DNA, 20 bp, Artificial sequence
  SiRNA target sequence
aagggcttatgatgaatatt

SEQ ID NO: 159824 - DNA, 20 bp, Artificial sequence
  SiRNA target sequence
agggcttatgatgaatatta

SEQ ID NO: 159825 - DNA, 20 bp, Artificial sequence
  SiRNA target sequence
gggcttatgatgaatattaa

SEQ ID NO: 159826 - DNA, 20 bp, Artificial sequence
  SiRNA target sequence
ggcttatgatgaatattaag

SEQ ID NO: 159827 - DNA, 20 bp, Artificial sequence
  SiRNA target sequence
gcttatgatgaatattaagg

SEQ ID NO: 159828 - DNA, 20 bp, Artificial sequence
  SiRNA target sequence
cttatgatgaatattaagga

SEQ ID NO: 159829 - DNA, 20 bp, Artificial sequence
  SiRNA target sequence
ttatgatgaatattaaggat

SEQ ID NO: 159830 - DNA, 20 bp, Artificial sequence
  SiRNA target sequence
tatgatgaatattaaggata

SEQ ID NO: 159831 - DNA, 20 bp, Artificial sequence
  SiRNA target sequence
atgatgaatattaaggatat

SEQ ID NO: 159832 - DNA, 20 bp, Artificial sequence
  SiRNA target sequence
tgatgaatattaaggatatt

SEQ ID NO: 159833 - DNA, 20 bp, Artificial sequence
  SiRNA target sequence
gatgaatattaaggatattg

SEQ ID NO: 159834 - DNA, 20 bp, Artificial sequence
  SiRNA target sequence
atgaatattaaggatattgc

SEQ ID NO: 159835 - DNA, 20 bp, Artificial sequence
  SiRNA target sequence
tgaatattaaggatattgct

SEQ ID NO: 159836 - DNA, 20 bp, Artificial sequence
  SiRNA target sequence
gaatattaaggatattgctg

SEQ ID NO: 159837 - DNA, 20 bp, Artificial sequence
  SiRNA target sequence
aatattaaggatattgctgt

SEQ ID NO: 159838 - DNA, 20 bp, Artificial sequence
  SiRNA target sequence
atattaaggatattgctgtt

SEQ ID NO: 159839 - DNA, 20 bp, Artificial sequence
  SiRNA target sequence
tattaaggatattgctgtta

SEQ ID NO: 159840 - DNA, 20 bp, Artificial sequence
  SiRNA target sequence
attaaggatattgctgttag

SEQ ID NO: 159841 - DNA, 20 bp, Artificial sequence
  SiRNA target sequence
ttaaggatattgctgttagt

SEQ ID NO: 159842 - DNA, 20 bp, Artificial sequence
  SiRNA target sequence
taaggatattgctgttagta

SEQ ID NO: 159843 - DNA, 20 bp, Artificial sequence
  SiRNA target sequence
aaggatattgctgttagtag

SEQ ID NO: 159844 - DNA, 20 bp, Artificial sequence
  SiRNA target sequence
aggatattgctgttagtagt

SEQ ID NO: 159845 - DNA, 20 bp, Artificial sequence
  SiRNA target sequence
ggatattgctgttagtagtg

SEQ ID NO: 159846 - DNA, 20 bp, Artificial sequence
  SiRNA target sequence
gatattgctgttagtagtgg

SEQ ID NO: 159847 - DNA, 20 bp, Artificial sequence
  SiRNA target sequence
atattgctgttagtagtgga

SEQ ID NO: 159848 - DNA, 20 bp, Artificial sequence
  SiRNA target sequence
tattgctgttagtagtggaa

SEQ ID NO: 159849 - DNA, 20 bp, Artificial sequence
  SiRNA target sequence
attgctgttagtagtggaag

SEQ ID NO: 159850 - DNA, 20 bp, Artificial sequence
  SiRNA target sequence
ttgctgttagtagtggaagt

SEQ ID NO: 159851 - DNA, 20 bp, Artificial sequence
  SiRNA target sequence
tgctgttagtagtggaagtg

SEQ ID NO: 159852 - DNA, 20 bp, Artificial sequence
  SiRNA target sequence
gctgttagtagtggaagtgc

SEQ ID NO: 159853 - DNA, 20 bp, Artificial sequence
  SiRNA target sequence
ctgttagtagtggaagtgct

SEQ ID NO: 159854 - DNA, 20 bp, Artificial sequence
  SiRNA target sequence
tgttagtagtggaagtgctt

SEQ ID NO: 159855 - DNA, 20 bp, Artificial sequence
  SiRNA target sequence
gttagtagtggaagtgcttg

SEQ ID NO: 159856 - DNA, 20 bp, Artificial sequence
  SiRNA target sequence
ttagtagtggaagtgcttgc

SEQ ID NO: 159857 - DNA, 20 bp, Artificial sequence
  SiRNA target sequence
tagtagtggaagtgcttgca

SEQ ID NO: 159858 - DNA, 20 bp, Artificial sequence
  SiRNA target sequence
agtagtggaagtgcttgcac

SEQ ID NO: 159859 - DNA, 20 bp, Artificial sequence
  SiRNA target sequence
gtagtggaagtgcttgcact

SEQ ID NO: 159860 - DNA, 20 bp, Artificial sequence
  SiRNA target sequence
tagtggaagtgcttgcactt

SEQ ID NO: 159861 - DNA, 20 bp, Artificial sequence
  SiRNA target sequence
agtggaagtgcttgcacttc

SEQ ID NO: 159862 - DNA, 20 bp, Artificial sequence
  SiRNA target sequence
gtggaagtgcttgcacttca

SEQ ID NO: 159863 - DNA, 20 bp, Artificial sequence
  SiRNA target sequence
tggaagtgcttgcacttcat

SEQ ID NO: 159864 - DNA, 20 bp, Artificial sequence
  SiRNA target sequence
ggaagtgcttgcacttcatc

SEQ ID NO: 159865 - DNA, 20 bp, Artificial sequence
  SiRNA target sequence
gaagtgcttgcacttcatca

SEQ ID NO: 159866 - DNA, 20 bp, Artificial sequence
  SiRNA target sequence
aagtgcttgcacttcatcat

SEQ ID NO: 159867 - DNA, 20 bp, Artificial sequence
  SiRNA target sequence
agtgcttgcacttcatcatc

SEQ ID NO: 159868 - DNA, 20 bp, Artificial sequence
  SiRNA target sequence
gtgcttgcacttcatcatct

SEQ ID NO: 159869 - DNA, 20 bp, Artificial sequence
  SiRNA target sequence
tgcttgcacttcatcatctt

SEQ ID NO: 159870 - DNA, 20 bp, Artificial sequence
  SiRNA target sequence
gcttgcacttcatcatcttt

SEQ ID NO: 159871 - DNA, 20 bp, Artificial sequence
  SiRNA target sequence
cttgcacttcatcatcttta

SEQ ID NO: 159872 - DNA, 20 bp, Artificial sequence
  SiRNA target sequence
ttgcacttcatcatctttag

SEQ ID NO: 159873 - DNA, 20 bp, Artificial sequence
  SiRNA target sequence
tgcacttcatcatctttaga

SEQ ID NO: 159874 - DNA, 20 bp, Artificial sequence
  SiRNA target sequence
gcacttcatcatctttagaa

SEQ ID NO: 159875 - DNA, 20 bp, Artificial sequence
  SiRNA target sequence
cacttcatcatctttagaac

SEQ ID NO: 159876 - DNA, 20 bp, Artificial sequence
  SiRNA target sequence
acttcatcatctttagaacc

SEQ ID NO: 159877 - DNA, 20 bp, Artificial sequence
  SiRNA target sequence
cttcatcatctttagaaccc

SEQ ID NO: 159878 - DNA, 20 bp, Artificial sequence
  SiRNA target sequence
ttcatcatctttagaaccct

SEQ ID NO: 159879 - DNA, 20 bp, Artificial sequence
  SiRNA target sequence
tcatcatctttagaaccctc

SEQ ID NO: 159880 - DNA, 20 bp, Artificial sequence
  SiRNA target sequence
catcatctttagaaccctct

SEQ ID NO: 159881 - DNA, 20 bp, Artificial sequence
  SiRNA target sequence
atcatctttagaaccctctt

SEQ ID NO: 159882 - DNA, 20 bp, Artificial sequence
  SiRNA target sequence
tcatctttagaaccctctta

SEQ ID NO: 159883 - DNA, 20 bp, Artificial sequence
  SiRNA target sequence
catctttagaaccctcttat

SEQ ID NO: 159884 - DNA, 20 bp, Artificial sequence
  SiRNA target sequence
atctttagaaccctcttatg

SEQ ID NO: 159885 - DNA, 20 bp, Artificial sequence
  SiRNA target sequence
tctttagaaccctcttatgt

SEQ ID NO: 159886 - DNA, 20 bp, Artificial sequence
  SiRNA target sequence
ctttagaaccctcttatgtt

SEQ ID NO: 159887 - DNA, 20 bp, Artificial sequence
  SiRNA target sequence
tttagaaccctcttatgttt

SEQ ID NO: 159888 - DNA, 20 bp, Artificial sequence
  SiRNA target sequence
ttagaaccctcttatgtttt

SEQ ID NO: 159889 - DNA, 20 bp, Artificial sequence
  SiRNA target sequence
tagaaccctcttatgttttg

SEQ ID NO: 159890 - DNA, 20 bp, Artificial sequence
  SiRNA target sequence
agaaccctcttatgttttgc

SEQ ID NO: 159891 - DNA, 20 bp, Artificial sequence
  SiRNA target sequence
gaaccctcttatgttttgcg

SEQ ID NO: 159892 - DNA, 20 bp, Artificial sequence
  SiRNA target sequence
aaccctcttatgttttgcga

SEQ ID NO: 159893 - DNA, 20 bp, Artificial sequence
  SiRNA target sequence
accctcttatgttttgcgag

SEQ ID NO: 159894 - DNA, 20 bp, Artificial sequence
  SiRNA target sequence
ccctcttatgttttgcgagc

SEQ ID NO: 159895 - DNA, 20 bp, Artificial sequence
  SiRNA target sequence
cctcttatgttttgcgagct

SEQ ID NO: 159896 - DNA, 20 bp, Artificial sequence
  SiRNA target sequence
ctcttatgttttgcgagctt

SEQ ID NO: 159897 - DNA, 20 bp, Artificial sequence
  SiRNA target sequence
tcttatgttttgcgagcttt

SEQ ID NO: 159898 - DNA, 20 bp, Artificial sequence
  SiRNA target sequence
cttatgttttgcgagcttta

SEQ ID NO: 159899 - DNA, 20 bp, Artificial sequence
  SiRNA target sequence
ttatgttttgcgagctttag

SEQ ID NO: 159900 - DNA, 20 bp, Artificial sequence
  SiRNA target sequence
tatgttttgcgagctttagg

SEQ ID NO: 159901 - DNA, 20 bp, Artificial sequence
  SiRNA target sequence
atgttttgcgagctttaggc

SEQ ID NO: 159902 - DNA, 20 bp, Artificial sequence
  SiRNA target sequence
tgttttgcgagctttaggca

SEQ ID NO: 159903 - DNA, 20 bp, Artificial sequence
  SiRNA target sequence
gttttgcgagctttaggcaa

SEQ ID NO: 159904 - DNA, 20 bp, Artificial sequence
  SiRNA target sequence
ttttgcgagctttaggcaaa

SEQ ID NO: 159905 - DNA, 20 bp, Artificial sequence
  SiRNA target sequence
tttgcgagctttaggcaaaa

SEQ ID NO: 159906 - DNA, 20 bp, Artificial sequence
  SiRNA target sequence
ttgcgagctttaggcaaaaa

SEQ ID NO: 159907 - DNA, 20 bp, Artificial sequence
  SiRNA target sequence
tgcgagctttaggcaaaaat

SEQ ID NO: 159908 - DNA, 20 bp, Artificial sequence
  SiRNA target sequence
gcgagctttaggcaaaaatg

SEQ ID NO: 159909 - DNA, 20 bp, Artificial sequence
  SiRNA target sequence
cgagctttaggcaaaaatga

SEQ ID NO: 159910 - DNA, 20 bp, Artificial sequence
  SiRNA target sequence
gagctttaggcaaaaatgat

SEQ ID NO: 159911 - DNA, 20 bp, Artificial sequence
  SiRNA target sequence
agctttaggcaaaaatgatg

SEQ ID NO: 159912 - DNA, 20 bp, Artificial sequence
  SiRNA target sequence
gctttaggcaaaaatgatga

SEQ ID NO: 159913 - DNA, 20 bp, Artificial sequence
  SiRNA target sequence
ctttaggcaaaaatgatgat

SEQ ID NO: 159914 - DNA, 20 bp, Artificial sequence
  SiRNA target sequence
tttaggcaaaaatgatgatc

SEQ ID NO: 159915 - DNA, 20 bp, Artificial sequence
  SiRNA target sequence
ttaggcaaaaatgatgatct

SEQ ID NO: 159916 - DNA, 20 bp, Artificial sequence
  SiRNA target sequence
taggcaaaaatgatgatctt

SEQ ID NO: 159917 - DNA, 20 bp, Artificial sequence
  SiRNA target sequence
aggcaaaaatgatgatcttg

SEQ ID NO: 159918 - DNA, 20 bp, Artificial sequence
  SiRNA target sequence
ggcaaaaatgatgatcttgc

SEQ ID NO: 159919 - DNA, 20 bp, Artificial sequence
  SiRNA target sequence
gcaaaaatgatgatcttgcg

SEQ ID NO: 159920 - DNA, 20 bp, Artificial sequence
  SiRNA target sequence
caaaaatgatgatcttgcgc

SEQ ID NO: 159921 - DNA, 20 bp, Artificial sequence
  SiRNA target sequence
aaaaatgatgatcttgcgca

SEQ ID NO: 159922 - DNA, 20 bp, Artificial sequence
  SiRNA target sequence
aaaatgatgatcttgcgcat

SEQ ID NO: 159923 - DNA, 20 bp, Artificial sequence
  SiRNA target sequence
aaatgatgatcttgcgcatt

SEQ ID NO: 159924 - DNA, 20 bp, Artificial sequence
  SiRNA target sequence
aatgatgatcttgcgcattc

SEQ ID NO: 159925 - DNA, 20 bp, Artificial sequence
  SiRNA target sequence
atgatgatcttgcgcattct

SEQ ID NO: 159926 - DNA, 20 bp, Artificial sequence
  SiRNA target sequence
tgatgatcttgcgcattctt

SEQ ID NO: 159927 - DNA, 20 bp, Artificial sequence
  SiRNA target sequence
gatgatcttgcgcattcttc

SEQ ID NO: 159928 - DNA, 20 bp, Artificial sequence
  SiRNA target sequence
atgatcttgcgcattcttct

SEQ ID NO: 159929 - DNA, 20 bp, Artificial sequence
  SiRNA target sequence
tgatcttgcgcattcttcta

SEQ ID NO: 159930 - DNA, 20 bp, Artificial sequence
  SiRNA target sequence
gatcttgcgcattcttctat

SEQ ID NO: 159931 - DNA, 20 bp, Artificial sequence
  SiRNA target sequence
atcttgcgcattcttctata

SEQ ID NO: 159932 - DNA, 20 bp, Artificial sequence
  SiRNA target sequence
tcttgcgcattcttctataa

SEQ ID NO: 159933 - DNA, 20 bp, Artificial sequence
  SiRNA target sequence
cttgcgcattcttctataag

SEQ ID NO: 159934 - DNA, 20 bp, Artificial sequence
  SiRNA target sequence
ttgcgcattcttctataaga

SEQ ID NO: 159935 - DNA, 20 bp, Artificial sequence
  SiRNA target sequence
tgcgcattcttctataagat

SEQ ID NO: 159936 - DNA, 20 bp, Artificial sequence
  SiRNA target sequence
gcgcattcttctataagatt

SEQ ID NO: 159937 - DNA, 20 bp, Artificial sequence
  SiRNA target sequence
cgcattcttctataagattt

SEQ ID NO: 159938 - DNA, 20 bp, Artificial sequence
  SiRNA target sequence
gcattcttctataagatttg

SEQ ID NO: 159939 - DNA, 20 bp, Artificial sequence
  SiRNA target sequence
cattcttctataagatttgg

SEQ ID NO: 159940 - DNA, 20 bp, Artificial sequence
  SiRNA target sequence
attcttctataagatttgga

SEQ ID NO: 159941 - DNA, 20 bp, Artificial sequence
  SiRNA target sequence
ttcttctataagatttggaa

SEQ ID NO: 159942 - DNA, 20 bp, Artificial sequence
  SiRNA target sequence
tcttctataagatttggaat

SEQ ID NO: 159943 - DNA, 20 bp, Artificial sequence
  SiRNA target sequence
cttctataagatttggaata

SEQ ID NO: 159944 - DNA, 20 bp, Artificial sequence
  SiRNA target sequence
ttctataagatttggaataa

SEQ ID NO: 159945 - DNA, 20 bp, Artificial sequence
  SiRNA target sequence
tctataagatttggaataaa

SEQ ID NO: 159946 - DNA, 20 bp, Artificial sequence
  SiRNA target sequence
ctataagatttggaataaat

SEQ ID NO: 159947 - DNA, 20 bp, Artificial sequence
  SiRNA target sequence
tataagatttggaataaata

SEQ ID NO: 159948 - DNA, 20 bp, Artificial sequence
  SiRNA target sequence
ataagatttggaataaataa

SEQ ID NO: 159949 - DNA, 20 bp, Artificial sequence
  SiRNA target sequence
taagatttggaataaataag

SEQ ID NO: 159950 - DNA, 20 bp, Artificial sequence
  SiRNA target sequence
aagatttggaataaataagt

SEQ ID NO: 159951 - DNA, 20 bp, Artificial sequence
  SiRNA target sequence
agatttggaataaataagtt

SEQ ID NO: 159952 - DNA, 20 bp, Artificial sequence
  SiRNA target sequence
gatttggaataaataagttt

SEQ ID NO: 159953 - DNA, 20 bp, Artificial sequence
  SiRNA target sequence
atttggaataaataagttta

SEQ ID NO: 159954 - DNA, 20 bp, Artificial sequence
  SiRNA target sequence
tttggaataaataagtttac

SEQ ID NO: 159955 - DNA, 20 bp, Artificial sequence
  SiRNA target sequence
ttggaataaataagtttaca

SEQ ID NO: 159956 - DNA, 20 bp, Artificial sequence
  SiRNA target sequence
tggaataaataagtttacaa

SEQ ID NO: 159957 - DNA, 20 bp, Artificial sequence
  SiRNA target sequence
ggaataaataagtttacaac

SEQ ID NO: 159958 - DNA, 20 bp, Artificial sequence
  SiRNA target sequence
gaataaataagtttacaact

SEQ ID NO: 159959 - DNA, 20 bp, Artificial sequence
  SiRNA target sequence
aataaataagtttacaactg

SEQ ID NO: 159960 - DNA, 20 bp, Artificial sequence
  SiRNA target sequence
ataaataagtttacaactga

SEQ ID NO: 159961 - DNA, 20 bp, Artificial sequence
  SiRNA target sequence
taaataagtttacaactgaa

SEQ ID NO: 159962 - DNA, 20 bp, Artificial sequence
  SiRNA target sequence
aaataagtttacaactgaag

SEQ ID NO: 159963 - DNA, 20 bp, Artificial sequence
  SiRNA target sequence
aataagtttacaactgaaga

SEQ ID NO: 159964 - DNA, 20 bp, Artificial sequence
  SiRNA target sequence
ataagtttacaactgaagaa

SEQ ID NO: 159965 - DNA, 20 bp, Artificial sequence
  SiRNA target sequence
taagtttacaactgaagaag

SEQ ID NO: 159966 - DNA, 20 bp, Artificial sequence
  SiRNA target sequence
aagtttacaactgaagaaga

SEQ ID NO: 159967 - DNA, 20 bp, Artificial sequence
  SiRNA target sequence
agtttacaactgaagaagaa

SEQ ID NO: 159968 - DNA, 20 bp, Artificial sequence
  SiRNA target sequence
gtttacaactgaagaagaaa

SEQ ID NO: 159969 - DNA, 20 bp, Artificial sequence
  SiRNA target sequence
tttacaactgaagaagaaat

SEQ ID NO: 159970 - DNA, 20 bp, Artificial sequence
  SiRNA target sequence
ttacaactgaagaagaaatc

SEQ ID NO: 159971 - DNA, 20 bp, Artificial sequence
  SiRNA target sequence
tacaactgaagaagaaatca

SEQ ID NO: 159972 - DNA, 20 bp, Artificial sequence
  SiRNA target sequence
acaactgaagaagaaatcaa

SEQ ID NO: 159973 - DNA, 20 bp, Artificial sequence
  SiRNA target sequence
caactgaagaagaaatcaat

SEQ ID NO: 159974 - DNA, 20 bp, Artificial sequence
  SiRNA target sequence
aactgaagaagaaatcaata

SEQ ID NO: 159975 - DNA, 20 bp, Artificial sequence
  SiRNA target sequence
actgaagaagaaatcaataa

SEQ ID NO: 159976 - DNA, 20 bp, Artificial sequence
  SiRNA target sequence
ctgaagaagaaatcaataaa

SEQ ID NO: 159977 - DNA, 20 bp, Artificial sequence
  SiRNA target sequence
tgaagaagaaatcaataaag

SEQ ID NO: 159978 - DNA, 20 bp, Artificial sequence
  SiRNA target sequence
gaagaagaaatcaataaagt

SEQ ID NO: 159979 - DNA, 20 bp, Artificial sequence
  SiRNA target sequence
aagaagaaatcaataaagta

SEQ ID NO: 159980 - DNA, 20 bp, Artificial sequence
  SiRNA target sequence
agaagaaatcaataaagtat

SEQ ID NO: 159981 - DNA, 20 bp, Artificial sequence
  SiRNA target sequence
gaagaaatcaataaagtatc

SEQ ID NO: 159982 - DNA, 20 bp, Artificial sequence
  SiRNA target sequence
aagaaatcaataaagtatct

SEQ ID NO: 159983 - DNA, 20 bp, Artificial sequence
  SiRNA target sequence
agaaatcaataaagtatcta

SEQ ID NO: 159984 - DNA, 20 bp, Artificial sequence
  SiRNA target sequence
gaaatcaataaagtatctag

SEQ ID NO: 159985 - DNA, 20 bp, Artificial sequence
  SiRNA target sequence
aaatcaataaagtatctagt

SEQ ID NO: 159986 - DNA, 20 bp, Artificial sequence
  SiRNA target sequence
aatcaataaagtatctagtg

SEQ ID NO: 159987 - DNA, 20 bp, Artificial sequence
  SiRNA target sequence
atcaataaagtatctagtga

SEQ ID NO: 159988 - DNA, 20 bp, Artificial sequence
  SiRNA target sequence
tcaataaagtatctagtgat

SEQ ID NO: 159989 - DNA, 20 bp, Artificial sequence
  SiRNA target sequence
caataaagtatctagtgata

SEQ ID NO: 159990 - DNA, 20 bp, Artificial sequence
  SiRNA target sequence
aataaagtatctagtgatac

SEQ ID NO: 159991 - DNA, 20 bp, Artificial sequence
  SiRNA target sequence
ataaagtatctagtgataca

SEQ ID NO: 159992 - DNA, 20 bp, Artificial sequence
  SiRNA target sequence
taaagtatctagtgatacaa

SEQ ID NO: 159993 - DNA, 20 bp, Artificial sequence
  SiRNA target sequence
aaagtatctagtgatacaat

SEQ ID NO: 159994 - DNA, 20 bp, Artificial sequence
  SiRNA target sequence
aagtatctagtgatacaatt

SEQ ID NO: 159995 - DNA, 20 bp, Artificial sequence
  SiRNA target sequence
agtatctagtgatacaatta

SEQ ID NO: 159996 - DNA, 20 bp, Artificial sequence
  SiRNA target sequence
gtatctagtgatacaattaa

SEQ ID NO: 159997 - DNA, 20 bp, Artificial sequence
  SiRNA target sequence
tatctagtgatacaattaaa

SEQ ID NO: 159998 - DNA, 20 bp, Artificial sequence
  SiRNA target sequence
atctagtgatacaattaaag

SEQ ID NO: 159999 - DNA, 20 bp, Artificial sequence
  SiRNA target sequence
tctagtgatacaattaaagc

SEQ ID NO: 160000 - DNA, 20 bp, Artificial sequence
  SiRNA target sequence
ctagtgatacaattaaagct

SEQ ID NO: 160001 - DNA, 20 bp, Artificial sequence
  SiRNA target sequence
tagtgatacaattaaagctg

SEQ ID NO: 160002 - DNA, 20 bp, Artificial sequence
  SiRNA target sequence
agtgatacaattaaagctgt

SEQ ID NO: 160003 - DNA, 20 bp, Artificial sequence
  SiRNA target sequence
gtgatacaattaaagctgtt

SEQ ID NO: 160004 - DNA, 20 bp, Artificial sequence
  SiRNA target sequence
tgatacaattaaagctgtta

SEQ ID NO: 160005 - DNA, 20 bp, Artificial sequence
  SiRNA target sequence
gatacaattaaagctgttaa

SEQ ID NO: 160006 - DNA, 20 bp, Artificial sequence
  SiRNA target sequence
atacaattaaagctgttaat

SEQ ID NO: 160007 - DNA, 20 bp, Artificial sequence
  SiRNA target sequence
tacaattaaagctgttaata

SEQ ID NO: 160008 - DNA, 20 bp, Artificial sequence
  SiRNA target sequence
acaattaaagctgttaataa

SEQ ID NO: 160009 - DNA, 20 bp, Artificial sequence
  SiRNA target sequence
caattaaagctgttaataag

SEQ ID NO: 160010 - DNA, 20 bp, Artificial sequence
  SiRNA target sequence
aattaaagctgttaataagt

SEQ ID NO: 160011 - DNA, 20 bp, Artificial sequence
  SiRNA target sequence
attaaagctgttaataagtt

SEQ ID NO: 160012 - DNA, 20 bp, Artificial sequence
  SiRNA target sequence
ttaaagctgttaataagtta

SEQ ID NO: 160013 - DNA, 20 bp, Artificial sequence
  SiRNA target sequence
taaagctgttaataagttaa

SEQ ID NO: 160014 - DNA, 20 bp, Artificial sequence
  SiRNA target sequence
aaagctgttaataagttaag

SEQ ID NO: 160015 - DNA, 20 bp, Artificial sequence
  SiRNA target sequence
aagctgttaataagttaaga

SEQ ID NO: 160016 - DNA, 20 bp, Artificial sequence
  SiRNA target sequence
agctgttaataagttaagag

SEQ ID NO: 160017 - DNA, 20 bp, Artificial sequence
  SiRNA target sequence
gctgttaataagttaagaga

SEQ ID NO: 160018 - DNA, 20 bp, Artificial sequence
  SiRNA target sequence
ctgttaataagttaagagat

SEQ ID NO: 160019 - DNA, 20 bp, Artificial sequence
  SiRNA target sequence
tgttaataagttaagagata

SEQ ID NO: 160020 - DNA, 20 bp, Artificial sequence
  SiRNA target sequence
gttaataagttaagagatat

SEQ ID NO: 160021 - DNA, 20 bp, Artificial sequence
  SiRNA target sequence
ttaataagttaagagatatg

SEQ ID NO: 160022 - DNA, 20 bp, Artificial sequence
  SiRNA target sequence
taataagttaagagatatgt

SEQ ID NO: 160023 - DNA, 20 bp, Artificial sequence
  SiRNA target sequence
aataagttaagagatatgtc

SEQ ID NO: 160024 - DNA, 20 bp, Artificial sequence
  SiRNA target sequence
ataagttaagagatatgtct

SEQ ID NO: 160025 - DNA, 20 bp, Artificial sequence
  SiRNA target sequence
taagttaagagatatgtctc

SEQ ID NO: 160026 - DNA, 20 bp, Artificial sequence
  SiRNA target sequence
aagttaagagatatgtctcc

SEQ ID NO: 160027 - DNA, 20 bp, Artificial sequence
  SiRNA target sequence
agttaagagatatgtctcct

SEQ ID NO: 160028 - DNA, 20 bp, Artificial sequence
  SiRNA target sequence
gttaagagatatgtctcctt

SEQ ID NO: 160029 - DNA, 20 bp, Artificial sequence
  SiRNA target sequence
ttaagagatatgtctccttt

SEQ ID NO: 160030 - DNA, 20 bp, Artificial sequence
  SiRNA target sequence
taagagatatgtctccttta

SEQ ID NO: 160031 - DNA, 20 bp, Artificial sequence
  SiRNA target sequence
aagagatatgtctcctttat

SEQ ID NO: 160032 - DNA, 20 bp, Artificial sequence
  SiRNA target sequence
agagatatgtctcctttata

SEQ ID NO: 160033 - DNA, 20 bp, Artificial sequence
  SiRNA target sequence
gagatatgtctcctttatat

SEQ ID NO: 160034 - DNA, 20 bp, Artificial sequence
  SiRNA target sequence
agatatgtctcctttatatg

SEQ ID NO: 160035 - DNA, 20 bp, Artificial sequence
  SiRNA target sequence
gatatgtctcctttatatga

SEQ ID NO: 160036 - DNA, 20 bp, Artificial sequence
  SiRNA target sequence
atatgtctcctttatatgaa

SEQ ID NO: 160037 - DNA, 20 bp, Artificial sequence
  SiRNA target sequence
tatgtctcctttatatgaaa

SEQ ID NO: 160038 - DNA, 20 bp, Artificial sequence
  SiRNA target sequence
atgtctcctttatatgaaat

SEQ ID NO: 160039 - DNA, 20 bp, Artificial sequence
  SiRNA target sequence
tgtctcctttatatgaaatg

SEQ ID NO: 160040 - DNA, 20 bp, Artificial sequence
  SiRNA target sequence
gtctcctttatatgaaatgg

SEQ ID NO: 160041 - DNA, 20 bp, Artificial sequence
  SiRNA target sequence
tctcctttatatgaaatggt

SEQ ID NO: 160042 - DNA, 20 bp, Artificial sequence
  SiRNA target sequence
ctcctttatatgaaatggtc

SEQ ID NO: 160043 - DNA, 20 bp, Artificial sequence
  SiRNA target sequence
tcctttatatgaaatggtca

SEQ ID NO: 160044 - DNA, 20 bp, Artificial sequence
  SiRNA target sequence
cctttatatgaaatggtcaa

SEQ ID NO: 160045 - DNA, 20 bp, Artificial sequence
  SiRNA target sequence
ctttatatgaaatggtcaaa

SEQ ID NO: 160046 - DNA, 20 bp, Artificial sequence
  SiRNA target sequence
tttatatgaaatggtcaaag

SEQ ID NO: 160047 - DNA, 20 bp, Artificial sequence
  SiRNA target sequence
ttatatgaaatggtcaaaga

SEQ ID NO: 160048 - DNA, 20 bp, Artificial sequence
  SiRNA target sequence
tatatgaaatggtcaaagaa

SEQ ID NO: 160049 - DNA, 20 bp, Artificial sequence
  SiRNA target sequence
atatgaaatggtcaaagaag

SEQ ID NO: 160050 - DNA, 20 bp, Artificial sequence
  SiRNA target sequence
tatgaaatggtcaaagaagg

SEQ ID NO: 160051 - DNA, 20 bp, Artificial sequence
  SiRNA target sequence
atgaaatggtcaaagaaggg

SEQ ID NO: 160052 - DNA, 20 bp, Artificial sequence
  SiRNA target sequence
tgaaatggtcaaagaaggga

SEQ ID NO: 160053 - DNA, 20 bp, Artificial sequence
  SiRNA target sequence
gaaatggtcaaagaagggat

SEQ ID NO: 160054 - DNA, 20 bp, Artificial sequence
  SiRNA target sequence
aaatggtcaaagaagggata

SEQ ID NO: 160055 - DNA, 20 bp, Artificial sequence
  SiRNA target sequence
aatggtcaaagaagggatag

SEQ ID NO: 160056 - DNA, 20 bp, Artificial sequence
  SiRNA target sequence
atggtcaaagaagggataga

SEQ ID NO: 160057 - DNA, 20 bp, Artificial sequence
  SiRNA target sequence
tggtcaaagaagggatagat

SEQ ID NO: 160058 - DNA, 20 bp, Artificial sequence
  SiRNA target sequence
ggtcaaagaagggatagatt

SEQ ID NO: 160059 - DNA, 20 bp, Artificial sequence
  SiRNA target sequence
gtcaaagaagggatagattt

SEQ ID NO: 160060 - DNA, 20 bp, Artificial sequence
  SiRNA target sequence
tcaaagaagggatagattta

SEQ ID NO: 160061 - DNA, 20 bp, Artificial sequence
  SiRNA target sequence
caaagaagggatagatttag

SEQ ID NO: 160062 - DNA, 20 bp, Artificial sequence
  SiRNA target sequence
aaagaagggatagatttaga

SEQ ID NO: 160063 - DNA, 20 bp, Artificial sequence
  SiRNA target sequence
aagaagggatagatttagat

SEQ ID NO: 160064 - DNA, 20 bp, Artificial sequence
  SiRNA target sequence
agaagggatagatttagata

SEQ ID NO: 160065 - DNA, 20 bp, Artificial sequence
  SiRNA target sequence
gaagggatagatttagataa

SEQ ID NO: 160066 - DNA, 20 bp, Artificial sequence
  SiRNA target sequence
aagggatagatttagataaa

SEQ ID NO: 160067 - DNA, 20 bp, Artificial sequence
  SiRNA target sequence
agggatagatttagataaaa

SEQ ID NO: 160068 - DNA, 20 bp, Artificial sequence
  SiRNA target sequence
gggatagatttagataaaat

SEQ ID NO: 160069 - DNA, 20 bp, Artificial sequence
  SiRNA target sequence
ggatagatttagataaaatt

SEQ ID NO: 160070 - DNA, 20 bp, Artificial sequence
  SiRNA target sequence
gatagatttagataaaatta

SEQ ID NO: 160071 - DNA, 20 bp, Artificial sequence
  SiRNA target sequence
atagatttagataaaattaa

SEQ ID NO: 160072 - DNA, 20 bp, Artificial sequence
  SiRNA target sequence
tagatttagataaaattaat

SEQ ID NO: 160073 - DNA, 20 bp, Artificial sequence
  SiRNA target sequence
agatttagataaaattaatt

SEQ ID NO: 160074 - DNA, 20 bp, Artificial sequence
  SiRNA target sequence
gatttagataaaattaattg

SEQ ID NO: 160075 - DNA, 20 bp, Artificial sequence
  SiRNA target sequence
atttagataaaattaattgg

SEQ ID NO: 160076 - DNA, 20 bp, Artificial sequence
  SiRNA target sequence
tttagataaaattaattggt

SEQ ID NO: 160077 - DNA, 20 bp, Artificial sequence
  SiRNA target sequence
ttagataaaattaattggtc

SEQ ID NO: 160078 - DNA, 20 bp, Artificial sequence
  SiRNA target sequence
tagataaaattaattggtct

SEQ ID NO: 160079 - DNA, 20 bp, Artificial sequence
  SiRNA target sequence
agataaaattaattggtctg

SEQ ID NO: 160080 - DNA, 20 bp, Artificial sequence
  SiRNA target sequence
gataaaattaattggtctgc

SEQ ID NO: 160081 - DNA, 20 bp, Artificial sequence
  SiRNA target sequence
ataaaattaattggtctgct

SEQ ID NO: 160082 - DNA, 20 bp, Artificial sequence
  SiRNA target sequence
taaaattaattggtctgctt

SEQ ID NO: 160083 - DNA, 20 bp, Artificial sequence
  SiRNA target sequence
aaaattaattggtctgctta

SEQ ID NO: 160084 - DNA, 20 bp, Artificial sequence
  SiRNA target sequence
aaattaattggtctgcttaa

SEQ ID NO: 160085 - DNA, 21 bp, Artificial sequence
  SiRNA target sequence
atgttatttttttatagcccc

SEQ ID NO: 160086 - DNA, 21 bp, Artificial sequence
  SiRNA target sequence
tgttatttttttatagcccca

SEQ ID NO: 160087 - DNA, 21 bp, Artificial sequence
  SiRNA target sequence
gttatttttttatagccccat

SEQ ID NO: 160088 - DNA, 21 bp, Artificial sequence
  SiRNA target sequence
ttatttttttatagccccatt

SEQ ID NO: 160089 - DNA, 21 bp, Artificial sequence
  SiRNA target sequence
tatttttttatagccccattt

SEQ ID NO: 160090 - DNA, 21 bp, Artificial sequence
  SiRNA target sequence
atttttttatagccccatttt

SEQ ID NO: 160091 - DNA, 21 bp, Artificial sequence
  SiRNA target sequence
tttttttatagccccattttt

SEQ ID NO: 160092 - DNA, 21 bp, Artificial sequence
  SiRNA target sequence
ttttttatagccccattttta

SEQ ID NO: 160093 - DNA, 21 bp, Artificial sequence
  SiRNA target sequence
tttttatagccccatttttat

SEQ ID NO: 160094 - DNA, 21 bp, Artificial sequence
  SiRNA target sequence
ttttatagccccatttttatg

SEQ ID NO: 160095 - DNA, 21 bp, Artificial sequence
  SiRNA target sequence
tttatagccccatttttatga

SEQ ID NO: 160096 - DNA, 21 bp, Artificial sequence
  SiRNA target sequence
ttatagccccatttttatgac

SEQ ID NO: 160097 - DNA, 21 bp, Artificial sequence
  SiRNA target sequence
tatagccccatttttatgact

SEQ ID NO: 160098 - DNA, 21 bp, Artificial sequence
  SiRNA target sequence
atagccccatttttatgacta

SEQ ID NO: 160099 - DNA, 21 bp, Artificial sequence
  SiRNA target sequence
tagccccatttttatgactaa

SEQ ID NO: 160100 - DNA, 21 bp, Artificial sequence
  SiRNA target sequence
agccccatttttatgactaaa

SEQ ID NO: 160101 - DNA, 21 bp, Artificial sequence
  SiRNA target sequence
gccccatttttatgactaaaa

SEQ ID NO: 160102 - DNA, 21 bp, Artificial sequence
  SiRNA target sequence
ccccatttttatgactaaaag

SEQ ID NO: 160103 - DNA, 21 bp, Artificial sequence
  SiRNA target sequence
cccatttttatgactaaaagt

SEQ ID NO: 160104 - DNA, 21 bp, Artificial sequence
  SiRNA target sequence
ccatttttatgactaaaagtt

SEQ ID NO: 160105 - DNA, 21 bp, Artificial sequence
  SiRNA target sequence
catttttatgactaaaagttt

SEQ ID NO: 160106 - DNA, 21 bp, Artificial sequence
  SiRNA target sequence
atttttatgactaaaagttta

SEQ ID NO: 160107 - DNA, 21 bp, Artificial sequence
  SiRNA target sequence
tttttatgactaaaagtttaa

SEQ ID NO: 160108 - DNA, 21 bp, Artificial sequence
  SiRNA target sequence
ttttatgactaaaagtttaac

SEQ ID NO: 160109 - DNA, 21 bp, Artificial sequence
  SiRNA target sequence
tttatgactaaaagtttaacg

SEQ ID NO: 160110 - DNA, 21 bp, Artificial sequence
  SiRNA target sequence
ttatgactaaaagtttaacga

SEQ ID NO: 160111 - DNA, 21 bp, Artificial sequence
  SiRNA target sequence
tatgactaaaagtttaacgaa

SEQ ID NO: 160112 - DNA, 21 bp, Artificial sequence
  SiRNA target sequence
atgactaaaagtttaacgaat

SEQ ID NO: 160113 - DNA, 21 bp, Artificial sequence
  SiRNA target sequence
tgactaaaagtttaacgaatt

SEQ ID NO: 160114 - DNA, 21 bp, Artificial sequence
  SiRNA target sequence
gactaaaagtttaacgaattc

SEQ ID NO: 160115 - DNA, 21 bp, Artificial sequence
  SiRNA target sequence
actaaaagtttaacgaattct

SEQ ID NO: 160116 - DNA, 21 bp, Artificial sequence
  SiRNA target sequence
ctaaaagtttaacgaattcta

SEQ ID NO: 160117 - DNA, 21 bp, Artificial sequence
  SiRNA target sequence
taaaagtttaacgaattctaa

SEQ ID NO: 160118 - DNA, 21 bp, Artificial sequence
  SiRNA target sequence
aaaagtttaacgaattctaaa

SEQ ID NO: 160119 - DNA, 21 bp, Artificial sequence
  SiRNA target sequence
aaagtttaacgaattctaaaa

SEQ ID NO: 160120 - DNA, 21 bp, Artificial sequence
  SiRNA target sequence
aagtttaacgaattctaaaac

SEQ ID NO: 160121 - DNA, 21 bp, Artificial sequence
  SiRNA target sequence
agtttaacgaattctaaaact

SEQ ID NO: 160122 - DNA, 21 bp, Artificial sequence
  SiRNA target sequence
gtttaacgaattctaaaactt

SEQ ID NO: 160123 - DNA, 21 bp, Artificial sequence
  SiRNA target sequence
tttaacgaattctaaaacttt

SEQ ID NO: 160124 - DNA, 21 bp, Artificial sequence
  SiRNA target sequence
ttaacgaattctaaaacttta

SEQ ID NO: 160125 - DNA, 21 bp, Artificial sequence
  SiRNA target sequence
taacgaattctaaaactttaa

SEQ ID NO: 160126 - DNA, 21 bp, Artificial sequence
  SiRNA target sequence
aacgaattctaaaactttaaa

SEQ ID NO: 160127 - DNA, 21 bp, Artificial sequence
  SiRNA target sequence
acgaattctaaaactttaaat

SEQ ID NO: 160128 - DNA, 21 bp, Artificial sequence
  SiRNA target sequence
cgaattctaaaactttaaatt

SEQ ID NO: 160129 - DNA, 21 bp, Artificial sequence
  SiRNA target sequence
gaattctaaaactttaaattt

SEQ ID NO: 160130 - DNA, 21 bp, Artificial sequence
  SiRNA target sequence
aattctaaaactttaaattta

SEQ ID NO: 160131 - DNA, 21 bp, Artificial sequence
  SiRNA target sequence
attctaaaactttaaatttaa

SEQ ID NO: 160132 - DNA, 21 bp, Artificial sequence
  SiRNA target sequence
ttctaaaactttaaatttaat

SEQ ID NO: 160133 - DNA, 21 bp, Artificial sequence
  SiRNA target sequence
tctaaaactttaaatttaatg

SEQ ID NO: 160134 - DNA, 21 bp, Artificial sequence
  SiRNA target sequence
ctaaaactttaaatttaatgt

SEQ ID NO: 160135 - DNA, 21 bp, Artificial sequence
  SiRNA target sequence
taaaactttaaatttaatgtc

SEQ ID NO: 160136 - DNA, 21 bp, Artificial sequence
  SiRNA target sequence
aaaactttaaatttaatgtca

SEQ ID NO: 160137 - DNA, 21 bp, Artificial sequence
  SiRNA target sequence
aaactttaaatttaatgtcaa

SEQ ID NO: 160138 - DNA, 21 bp, Artificial sequence
  SiRNA target sequence
aactttaaatttaatgtcaag

SEQ ID NO: 160139 - DNA, 21 bp, Artificial sequence
  SiRNA target sequence
actttaaatttaatgtcaagt

SEQ ID NO: 160140 - DNA, 21 bp, Artificial sequence
  SiRNA target sequence
ctttaaatttaatgtcaagtg

SEQ ID NO: 160141 - DNA, 21 bp, Artificial sequence
  SiRNA target sequence
tttaaatttaatgtcaagtgt

SEQ ID NO: 160142 - DNA, 21 bp, Artificial sequence
  SiRNA target sequence
ttaaatttaatgtcaagtgta

SEQ ID NO: 160143 - DNA, 21 bp, Artificial sequence
  SiRNA target sequence
taaatttaatgtcaagtgtac

SEQ ID NO: 160144 - DNA, 21 bp, Artificial sequence
  SiRNA target sequence
aaatttaatgtcaagtgtaca

SEQ ID NO: 160145 - DNA, 21 bp, Artificial sequence
  SiRNA target sequence
aatttaatgtcaagtgtacaa

SEQ ID NO: 160146 - DNA, 21 bp, Artificial sequence
  SiRNA target sequence
atttaatgtcaagtgtacaat

SEQ ID NO: 160147 - DNA, 21 bp, Artificial sequence
  SiRNA target sequence
tttaatgtcaagtgtacaatc

SEQ ID NO: 160148 - DNA, 21 bp, Artificial sequence
  SiRNA target sequence
ttaatgtcaagtgtacaatca

SEQ ID NO: 160149 - DNA, 21 bp, Artificial sequence
  SiRNA target sequence
taatgtcaagtgtacaatcac

SEQ ID NO: 160150 - DNA, 21 bp, Artificial sequence
  SiRNA target sequence
aatgtcaagtgtacaatcacc

SEQ ID NO: 160151 - DNA, 21 bp, Artificial sequence
  SiRNA target sequence
atgtcaagtgtacaatcacca

SEQ ID NO: 160152 - DNA, 21 bp, Artificial sequence
  SiRNA target sequence
tgtcaagtgtacaatcaccag

SEQ ID NO: 160153 - DNA, 21 bp, Artificial sequence
  SiRNA target sequence
gtcaagtgtacaatcaccagt

SEQ ID NO: 160154 - DNA, 21 bp, Artificial sequence
  SiRNA target sequence
tcaagtgtacaatcaccagtt

SEQ ID NO: 160155 - DNA, 21 bp, Artificial sequence
  SiRNA target sequence
caagtgtacaatcaccagtta

SEQ ID NO: 160156 - DNA, 21 bp, Artificial sequence
  SiRNA target sequence
aagtgtacaatcaccagttat

SEQ ID NO: 160157 - DNA, 21 bp, Artificial sequence
  SiRNA target sequence
agtgtacaatcaccagttata

SEQ ID NO: 160158 - DNA, 21 bp, Artificial sequence
  SiRNA target sequence
gtgtacaatcaccagttataa

SEQ ID NO: 160159 - DNA, 21 bp, Artificial sequence
  SiRNA target sequence
tgtacaatcaccagttataaa

SEQ ID NO: 160160 - DNA, 21 bp, Artificial sequence
  SiRNA target sequence
gtacaatcaccagttataaat

SEQ ID NO: 160161 - DNA, 21 bp, Artificial sequence
  SiRNA target sequence
tacaatcaccagttataaata

SEQ ID NO: 160162 - DNA, 21 bp, Artificial sequence
  SiRNA target sequence
acaatcaccagttataaatac

SEQ ID NO: 160163 - DNA, 21 bp, Artificial sequence
  SiRNA target sequence
caatcaccagttataaataca

SEQ ID NO: 160164 - DNA, 21 bp, Artificial sequence
  SiRNA target sequence
aatcaccagttataaatacaa

SEQ ID NO: 160165 - DNA, 21 bp, Artificial sequence
  SiRNA target sequence
atcaccagttataaatacaaa

SEQ ID NO: 160166 - DNA, 21 bp, Artificial sequence
  SiRNA target sequence
tcaccagttataaatacaaaa

SEQ ID NO: 160167 - DNA, 21 bp, Artificial sequence
  SiRNA target sequence
caccagttataaatacaaaaa

SEQ ID NO: 160168 - DNA, 21 bp, Artificial sequence
  SiRNA target sequence
accagttataaatacaaaaaa

SEQ ID NO: 160169 - DNA, 21 bp, Artificial sequence
  SiRNA target sequence
ccagttataaatacaaaaaaa

SEQ ID NO: 160170 - DNA, 21 bp, Artificial sequence
  SiRNA target sequence
cagttataaatacaaaaaaaa

SEQ ID NO: 160171 - DNA, 21 bp, Artificial sequence
  SiRNA target sequence
agttataaatacaaaaaaaat

SEQ ID NO: 160172 - DNA, 21 bp, Artificial sequence
  SiRNA target sequence
gttataaatacaaaaaaaata

SEQ ID NO: 160173 - DNA, 21 bp, Artificial sequence
  SiRNA target sequence
ttataaatacaaaaaaaatat

SEQ ID NO: 160174 - DNA, 21 bp, Artificial sequence
  SiRNA target sequence
tataaatacaaaaaaaatata

SEQ ID NO: 160175 - DNA, 21 bp, Artificial sequence
  SiRNA target sequence
ataaatacaaaaaaaatatat

SEQ ID NO: 160176 - DNA, 21 bp, Artificial sequence
  SiRNA target sequence
taaatacaaaaaaaatatatc

SEQ ID NO: 160177 - DNA, 21 bp, Artificial sequence
  SiRNA target sequence
aaatacaaaaaaaatatatct

SEQ ID NO: 160178 - DNA, 21 bp, Artificial sequence
  SiRNA target sequence
aatacaaaaaaaatatatctt

SEQ ID NO: 160179 - DNA, 21 bp, Artificial sequence
  SiRNA target sequence
atacaaaaaaaatatatcttg

SEQ ID NO: 160180 - DNA, 21 bp, Artificial sequence
  SiRNA target sequence
tacaaaaaaaatatatcttga

SEQ ID NO: 160181 - DNA, 21 bp, Artificial sequence
  SiRNA target sequence
acaaaaaaaatatatcttgat

SEQ ID NO: 160182 - DNA, 21 bp, Artificial sequence
  SiRNA target sequence
caaaaaaaatatatcttgatg

SEQ ID NO: 160183 - DNA, 21 bp, Artificial sequence
  SiRNA target sequence
aaaaaaaatatatcttgatgc

SEQ ID NO: 160184 - DNA, 21 bp, Artificial sequence
  SiRNA target sequence
aaaaaaatatatcttgatgca

SEQ ID NO: 160185 - DNA, 21 bp, Artificial sequence
  SiRNA target sequence
aaaaaatatatcttgatgcac

SEQ ID NO: 160186 - DNA, 21 bp, Artificial sequence
  SiRNA target sequence
aaaaatatatcttgatgcaca

SEQ ID NO: 160187 - DNA, 21 bp, Artificial sequence
  SiRNA target sequence
aaaatatatcttgatgcacaa

SEQ ID NO: 160188 - DNA, 21 bp, Artificial sequence
  SiRNA target sequence
aaatatatcttgatgcacaag

SEQ ID NO: 160189 - DNA, 21 bp, Artificial sequence
  SiRNA target sequence
aatatatcttgatgcacaagc

SEQ ID NO: 160190 - DNA, 21 bp, Artificial sequence
  SiRNA target sequence
atatatcttgatgcacaagcg

SEQ ID NO: 160191 - DNA, 21 bp, Artificial sequence
  SiRNA target sequence
tatatcttgatgcacaagcga

SEQ ID NO: 160192 - DNA, 21 bp, Artificial sequence
  SiRNA target sequence
atatcttgatgcacaagcgac

SEQ ID NO: 160193 - DNA, 21 bp, Artificial sequence
  SiRNA target sequence
tatcttgatgcacaagcgacc

SEQ ID NO: 160194 - DNA, 21 bp, Artificial sequence
  SiRNA target sequence
atcttgatgcacaagcgacca

SEQ ID NO: 160195 - DNA, 21 bp, Artificial sequence
  SiRNA target sequence
tcttgatgcacaagcgaccaa

SEQ ID NO: 160196 - DNA, 21 bp, Artificial sequence
  SiRNA target sequence
cttgatgcacaagcgaccaag

SEQ ID NO: 160197 - DNA, 21 bp, Artificial sequence
  SiRNA target sequence
ttgatgcacaagcgaccaagc

SEQ ID NO: 160198 - DNA, 21 bp, Artificial sequence
  SiRNA target sequence
tgatgcacaagcgaccaagcc

SEQ ID NO: 160199 - DNA, 21 bp, Artificial sequence
  SiRNA target sequence
gatgcacaagcgaccaagcct

SEQ ID NO: 160200 - DNA, 21 bp, Artificial sequence
  SiRNA target sequence
atgcacaagcgaccaagcctt

SEQ ID NO: 160201 - DNA, 21 bp, Artificial sequence
  SiRNA target sequence
tgcacaagcgaccaagccttt

SEQ ID NO: 160202 - DNA, 21 bp, Artificial sequence
  SiRNA target sequence
gcacaagcgaccaagccttta

SEQ ID NO: 160203 - DNA, 21 bp, Artificial sequence
  SiRNA target sequence
cacaagcgaccaagcctttag

SEQ ID NO: 160204 - DNA, 21 bp, Artificial sequence
  SiRNA target sequence
acaagcgaccaagcctttaga

SEQ ID NO: 160205 - DNA, 21 bp, Artificial sequence
  SiRNA target sequence
caagcgaccaagcctttagac

SEQ ID NO: 160206 - DNA, 21 bp, Artificial sequence
  SiRNA target sequence
aagcgaccaagcctttagacc

SEQ ID NO: 160207 - DNA, 21 bp, Artificial sequence
  SiRNA target sequence
agcgaccaagcctttagaccc

SEQ ID NO: 160208 - DNA, 21 bp, Artificial sequence
  SiRNA target sequence
gcgaccaagcctttagacccg

SEQ ID NO: 160209 - DNA, 21 bp, Artificial sequence
  SiRNA target sequence
cgaccaagcctttagacccgc

SEQ ID NO: 160210 - DNA, 21 bp, Artificial sequence
  SiRNA target sequence
gaccaagcctttagacccgcg

SEQ ID NO: 160211 - DNA, 21 bp, Artificial sequence
  SiRNA target sequence
accaagcctttagacccgcgt

SEQ ID NO: 160212 - DNA, 21 bp, Artificial sequence
  SiRNA target sequence
ccaagcctttagacccgcgtg

SEQ ID NO: 160213 - DNA, 21 bp, Artificial sequence
  SiRNA target sequence
caagcctttagacccgcgtgt

SEQ ID NO: 160214 - DNA, 21 bp, Artificial sequence
  SiRNA target sequence
aagcctttagacccgcgtgtg

SEQ ID NO: 160215 - DNA, 21 bp, Artificial sequence
  SiRNA target sequence
agcctttagacccgcgtgtgc

SEQ ID NO: 160216 - DNA, 21 bp, Artificial sequence
  SiRNA target sequence
gcctttagacccgcgtgtgct

SEQ ID NO: 160217 - DNA, 21 bp, Artificial sequence
  SiRNA target sequence
cctttagacccgcgtgtgctt

SEQ ID NO: 160218 - DNA, 21 bp, Artificial sequence
  SiRNA target sequence
ctttagacccgcgtgtgcttg

SEQ ID NO: 160219 - DNA, 21 bp, Artificial sequence
  SiRNA target sequence
tttagacccgcgtgtgcttga

SEQ ID NO: 160220 - DNA, 21 bp, Artificial sequence
  SiRNA target sequence
ttagacccgcgtgtgcttgat

SEQ ID NO: 160221 - DNA, 21 bp, Artificial sequence
  SiRNA target sequence
tagacccgcgtgtgcttgatg

SEQ ID NO: 160222 - DNA, 21 bp, Artificial sequence
  SiRNA target sequence
agacccgcgtgtgcttgatgc

SEQ ID NO: 160223 - DNA, 21 bp, Artificial sequence
  SiRNA target sequence
gacccgcgtgtgcttgatgca

SEQ ID NO: 160224 - DNA, 21 bp, Artificial sequence
  SiRNA target sequence
acccgcgtgtgcttgatgcaa

SEQ ID NO: 160225 - DNA, 21 bp, Artificial sequence
  SiRNA target sequence
cccgcgtgtgcttgatgcaat

SEQ ID NO: 160226 - DNA, 21 bp, Artificial sequence
  SiRNA target sequence
ccgcgtgtgcttgatgcaatg

SEQ ID NO: 160227 - DNA, 21 bp, Artificial sequence
  SiRNA target sequence
cgcgtgtgcttgatgcaatgc

SEQ ID NO: 160228 - DNA, 21 bp, Artificial sequence
  SiRNA target sequence
gcgtgtgcttgatgcaatgct

SEQ ID NO: 160229 - DNA, 21 bp, Artificial sequence
  SiRNA target sequence
cgtgtgcttgatgcaatgctt

SEQ ID NO: 160230 - DNA, 21 bp, Artificial sequence
  SiRNA target sequence
gtgtgcttgatgcaatgcttc

SEQ ID NO: 160231 - DNA, 21 bp, Artificial sequence
  SiRNA target sequence
tgtgcttgatgcaatgcttcc

SEQ ID NO: 160232 - DNA, 21 bp, Artificial sequence
  SiRNA target sequence
gtgcttgatgcaatgcttcca

SEQ ID NO: 160233 - DNA, 21 bp, Artificial sequence
  SiRNA target sequence
tgcttgatgcaatgcttccat

SEQ ID NO: 160234 - DNA, 21 bp, Artificial sequence
  SiRNA target sequence
gcttgatgcaatgcttccata

SEQ ID NO: 160235 - DNA, 21 bp, Artificial sequence
  SiRNA target sequence
cttgatgcaatgcttccatac

SEQ ID NO: 160236 - DNA, 21 bp, Artificial sequence
  SiRNA target sequence
ttgatgcaatgcttccatact

SEQ ID NO: 160237 - DNA, 21 bp, Artificial sequence
  SiRNA target sequence
tgatgcaatgcttccatacta

SEQ ID NO: 160238 - DNA, 21 bp, Artificial sequence
  SiRNA target sequence
gatgcaatgcttccatactat

SEQ ID NO: 160239 - DNA, 21 bp, Artificial sequence
  SiRNA target sequence
atgcaatgcttccatactata

SEQ ID NO: 160240 - DNA, 21 bp, Artificial sequence
  SiRNA target sequence
tgcaatgcttccatactatac

SEQ ID NO: 160241 - DNA, 21 bp, Artificial sequence
  SiRNA target sequence
gcaatgcttccatactataca

SEQ ID NO: 160242 - DNA, 21 bp, Artificial sequence
  SiRNA target sequence
caatgcttccatactatacat

SEQ ID NO: 160243 - DNA, 21 bp, Artificial sequence
  SiRNA target sequence
aatgcttccatactatacatc

SEQ ID NO: 160244 - DNA, 21 bp, Artificial sequence
  SiRNA target sequence
atgcttccatactatacatcc

SEQ ID NO: 160245 - DNA, 21 bp, Artificial sequence
  SiRNA target sequence
tgcttccatactatacatcca

SEQ ID NO: 160246 - DNA, 21 bp, Artificial sequence
  SiRNA target sequence
gcttccatactatacatccat

SEQ ID NO: 160247 - DNA, 21 bp, Artificial sequence
  SiRNA target sequence
cttccatactatacatccatt

SEQ ID NO: 160248 - DNA, 21 bp, Artificial sequence
  SiRNA target sequence
ttccatactatacatccattt

SEQ ID NO: 160249 - DNA, 21 bp, Artificial sequence
  SiRNA target sequence
tccatactatacatccatttt

SEQ ID NO: 160250 - DNA, 21 bp, Artificial sequence
  SiRNA target sequence
ccatactatacatccattttt

SEQ ID NO: 160251 - DNA, 21 bp, Artificial sequence
  SiRNA target sequence
catactatacatccatttttg

SEQ ID NO: 160252 - DNA, 21 bp, Artificial sequence
  SiRNA target sequence
atactatacatccatttttgg

SEQ ID NO: 160253 - DNA, 21 bp, Artificial sequence
  SiRNA target sequence
tactatacatccatttttgga

SEQ ID NO: 160254 - DNA, 21 bp, Artificial sequence
  SiRNA target sequence
actatacatccatttttggaa

SEQ ID NO: 160255 - DNA, 21 bp, Artificial sequence
  SiRNA target sequence
ctatacatccatttttggaaa

SEQ ID NO: 160256 - DNA, 21 bp, Artificial sequence
  SiRNA target sequence
tatacatccatttttggaaat

SEQ ID NO: 160257 - DNA, 21 bp, Artificial sequence
  SiRNA target sequence
atacatccatttttggaaatc

SEQ ID NO: 160258 - DNA, 21 bp, Artificial sequence
  SiRNA target sequence
tacatccatttttggaaatcc

SEQ ID NO: 160259 - DNA, 21 bp, Artificial sequence
  SiRNA target sequence
acatccatttttggaaatcca

SEQ ID NO: 160260 - DNA, 21 bp, Artificial sequence
  SiRNA target sequence
catccatttttggaaatccac

SEQ ID NO: 160261 - DNA, 21 bp, Artificial sequence
  SiRNA target sequence
atccatttttggaaatccaca

SEQ ID NO: 160262 - DNA, 21 bp, Artificial sequence
  SiRNA target sequence
tccatttttggaaatccacat

SEQ ID NO: 160263 - DNA, 21 bp, Artificial sequence
  SiRNA target sequence
ccatttttggaaatccacatt

SEQ ID NO: 160264 - DNA, 21 bp, Artificial sequence
  SiRNA target sequence
catttttggaaatccacattc

SEQ ID NO: 160265 - DNA, 21 bp, Artificial sequence
  SiRNA target sequence
atttttggaaatccacattct

SEQ ID NO: 160266 - DNA, 21 bp, Artificial sequence
  SiRNA target sequence
tttttggaaatccacattctc

SEQ ID NO: 160267 - DNA, 21 bp, Artificial sequence
  SiRNA target sequence
ttttggaaatccacattctcg

SEQ ID NO: 160268 - DNA, 21 bp, Artificial sequence
  SiRNA target sequence
tttggaaatccacattctcgc

SEQ ID NO: 160269 - DNA, 21 bp, Artificial sequence
  SiRNA target sequence
ttggaaatccacattctcgca

SEQ ID NO: 160270 - DNA, 21 bp, Artificial sequence
  SiRNA target sequence
tggaaatccacattctcgcac

SEQ ID NO: 160271 - DNA, 21 bp, Artificial sequence
  SiRNA target sequence
ggaaatccacattctcgcacg

SEQ ID NO: 160272 - DNA, 21 bp, Artificial sequence
  SiRNA target sequence
gaaatccacattctcgcacgc

SEQ ID NO: 160273 - DNA, 21 bp, Artificial sequence
  SiRNA target sequence
aaatccacattctcgcacgca

SEQ ID NO: 160274 - DNA, 21 bp, Artificial sequence
  SiRNA target sequence
aatccacattctcgcacgcat

SEQ ID NO: 160275 - DNA, 21 bp, Artificial sequence
  SiRNA target sequence
atccacattctcgcacgcata

SEQ ID NO: 160276 - DNA, 21 bp, Artificial sequence
  SiRNA target sequence
tccacattctcgcacgcatac

SEQ ID NO: 160277 - DNA, 21 bp, Artificial sequence
  SiRNA target sequence
ccacattctcgcacgcatacg

SEQ ID NO: 160278 - DNA, 21 bp, Artificial sequence
  SiRNA target sequence
cacattctcgcacgcatacgt

SEQ ID NO: 160279 - DNA, 21 bp, Artificial sequence
  SiRNA target sequence
acattctcgcacgcatacgtt

SEQ ID NO: 160280 - DNA, 21 bp, Artificial sequence
  SiRNA target sequence
cattctcgcacgcatacgttt

SEQ ID NO: 160281 - DNA, 21 bp, Artificial sequence
  SiRNA target sequence
attctcgcacgcatacgtttg

SEQ ID NO: 160282 - DNA, 21 bp, Artificial sequence
  SiRNA target sequence
ttctcgcacgcatacgtttgg

SEQ ID NO: 160283 - DNA, 21 bp, Artificial sequence
  SiRNA target sequence
tctcgcacgcatacgtttgga

SEQ ID NO: 160284 - DNA, 21 bp, Artificial sequence
  SiRNA target sequence
ctcgcacgcatacgtttggat

SEQ ID NO: 160285 - DNA, 21 bp, Artificial sequence
  SiRNA target sequence
tcgcacgcatacgtttggatg

SEQ ID NO: 160286 - DNA, 21 bp, Artificial sequence
  SiRNA target sequence
cgcacgcatacgtttggatgg

SEQ ID NO: 160287 - DNA, 21 bp, Artificial sequence
  SiRNA target sequence
gcacgcatacgtttggatgga

SEQ ID NO: 160288 - DNA, 21 bp, Artificial sequence
  SiRNA target sequence
cacgcatacgtttggatggaa

SEQ ID NO: 160289 - DNA, 21 bp, Artificial sequence
  SiRNA target sequence
acgcatacgtttggatggaat

SEQ ID NO: 160290 - DNA, 21 bp, Artificial sequence
  SiRNA target sequence
cgcatacgtttggatggaatg

SEQ ID NO: 160291 - DNA, 21 bp, Artificial sequence
  SiRNA target sequence
gcatacgtttggatggaatgc

SEQ ID NO: 160292 - DNA, 21 bp, Artificial sequence
  SiRNA target sequence
catacgtttggatggaatgca

SEQ ID NO: 160293 - DNA, 21 bp, Artificial sequence
  SiRNA target sequence
atacgtttggatggaatgcag

SEQ ID NO: 160294 - DNA, 21 bp, Artificial sequence
  SiRNA target sequence
tacgtttggatggaatgcaga

SEQ ID NO: 160295 - DNA, 21 bp, Artificial sequence
  SiRNA target sequence
acgtttggatggaatgcagaa

SEQ ID NO: 160296 - DNA, 21 bp, Artificial sequence
  SiRNA target sequence
cgtttggatggaatgcagaaa

SEQ ID NO: 160297 - DNA, 21 bp, Artificial sequence
  SiRNA target sequence
gtttggatggaatgcagaaaa

SEQ ID NO: 160298 - DNA, 21 bp, Artificial sequence
  SiRNA target sequence
tttggatggaatgcagaaaaa

SEQ ID NO: 160299 - DNA, 21 bp, Artificial sequence
  SiRNA target sequence
ttggatggaatgcagaaaaag

SEQ ID NO: 160300 - DNA, 21 bp, Artificial sequence
  SiRNA target sequence
tggatggaatgcagaaaaagg

SEQ ID NO: 160301 - DNA, 21 bp, Artificial sequence
  SiRNA target sequence
ggatggaatgcagaaaaaggc

SEQ ID NO: 160302 - DNA, 21 bp, Artificial sequence
  SiRNA target sequence
gatggaatgcagaaaaaggcg

SEQ ID NO: 160303 - DNA, 21 bp, Artificial sequence
  SiRNA target sequence
atggaatgcagaaaaaggcgt

SEQ ID NO: 160304 - DNA, 21 bp, Artificial sequence
  SiRNA target sequence
tggaatgcagaaaaaggcgta

SEQ ID NO: 160305 - DNA, 21 bp, Artificial sequence
  SiRNA target sequence
ggaatgcagaaaaaggcgtag

SEQ ID NO: 160306 - DNA, 21 bp, Artificial sequence
  SiRNA target sequence
gaatgcagaaaaaggcgtaga

SEQ ID NO: 160307 - DNA, 21 bp, Artificial sequence
  SiRNA target sequence
aatgcagaaaaaggcgtagaa

SEQ ID NO: 160308 - DNA, 21 bp, Artificial sequence
  SiRNA target sequence
atgcagaaaaaggcgtagaaa

SEQ ID NO: 160309 - DNA, 21 bp, Artificial sequence
  SiRNA target sequence
tgcagaaaaaggcgtagaaat

SEQ ID NO: 160310 - DNA, 21 bp, Artificial sequence
  SiRNA target sequence
gcagaaaaaggcgtagaaatg

SEQ ID NO: 160311 - DNA, 21 bp, Artificial sequence
  SiRNA target sequence
cagaaaaaggcgtagaaatgg

SEQ ID NO: 160312 - DNA, 21 bp, Artificial sequence
  SiRNA target sequence
agaaaaaggcgtagaaatggc

SEQ ID NO: 160313 - DNA, 21 bp, Artificial sequence
  SiRNA target sequence
gaaaaaggcgtagaaatggct

SEQ ID NO: 160314 - DNA, 21 bp, Artificial sequence
  SiRNA target sequence
aaaaaggcgtagaaatggctc

SEQ ID NO: 160315 - DNA, 21 bp, Artificial sequence
  SiRNA target sequence
aaaaggcgtagaaatggctcg

SEQ ID NO: 160316 - DNA, 21 bp, Artificial sequence
  SiRNA target sequence
aaaggcgtagaaatggctcga

SEQ ID NO: 160317 - DNA, 21 bp, Artificial sequence
  SiRNA target sequence
aaggcgtagaaatggctcgaa

SEQ ID NO: 160318 - DNA, 21 bp, Artificial sequence
  SiRNA target sequence
aggcgtagaaatggctcgaaa

SEQ ID NO: 160319 - DNA, 21 bp, Artificial sequence
  SiRNA target sequence
ggcgtagaaatggctcgaaag

SEQ ID NO: 160320 - DNA, 21 bp, Artificial sequence
  SiRNA target sequence
gcgtagaaatggctcgaaagc

SEQ ID NO: 160321 - DNA, 21 bp, Artificial sequence
  SiRNA target sequence
cgtagaaatggctcgaaagca

SEQ ID NO: 160322 - DNA, 21 bp, Artificial sequence
  SiRNA target sequence
gtagaaatggctcgaaagcaa

SEQ ID NO: 160323 - DNA, 21 bp, Artificial sequence
  SiRNA target sequence
tagaaatggctcgaaagcaag

SEQ ID NO: 160324 - DNA, 21 bp, Artificial sequence
  SiRNA target sequence
agaaatggctcgaaagcaagt

SEQ ID NO: 160325 - DNA, 21 bp, Artificial sequence
  SiRNA target sequence
gaaatggctcgaaagcaagta

SEQ ID NO: 160326 - DNA, 21 bp, Artificial sequence
  SiRNA target sequence
aaatggctcgaaagcaagtag

SEQ ID NO: 160327 - DNA, 21 bp, Artificial sequence
  SiRNA target sequence
aatggctcgaaagcaagtagc

SEQ ID NO: 160328 - DNA, 21 bp, Artificial sequence
  SiRNA target sequence
atggctcgaaagcaagtagca

SEQ ID NO: 160329 - DNA, 21 bp, Artificial sequence
  SiRNA target sequence
tggctcgaaagcaagtagcag

SEQ ID NO: 160330 - DNA, 21 bp, Artificial sequence
  SiRNA target sequence
ggctcgaaagcaagtagcaga

SEQ ID NO: 160331 - DNA, 21 bp, Artificial sequence
  SiRNA target sequence
gctcgaaagcaagtagcagat

SEQ ID NO: 160332 - DNA, 21 bp, Artificial sequence
  SiRNA target sequence
ctcgaaagcaagtagcagatt

SEQ ID NO: 160333 - DNA, 21 bp, Artificial sequence
  SiRNA target sequence
tcgaaagcaagtagcagattt

SEQ ID NO: 160334 - DNA, 21 bp, Artificial sequence
  SiRNA target sequence
cgaaagcaagtagcagattta

SEQ ID NO: 160335 - DNA, 21 bp, Artificial sequence
  SiRNA target sequence
gaaagcaagtagcagatttac

SEQ ID NO: 160336 - DNA, 21 bp, Artificial sequence
  SiRNA target sequence
aaagcaagtagcagatttact

SEQ ID NO: 160337 - DNA, 21 bp, Artificial sequence
  SiRNA target sequence
aagcaagtagcagatttactg

SEQ ID NO: 160338 - DNA, 21 bp, Artificial sequence
  SiRNA target sequence
agcaagtagcagatttactga

SEQ ID NO: 160339 - DNA, 21 bp, Artificial sequence
  SiRNA target sequence
gcaagtagcagatttactgaa

SEQ ID NO: 160340 - DNA, 21 bp, Artificial sequence
  SiRNA target sequence
caagtagcagatttactgaat

SEQ ID NO: 160341 - DNA, 21 bp, Artificial sequence
  SiRNA target sequence
aagtagcagatttactgaatg

SEQ ID NO: 160342 - DNA, 21 bp, Artificial sequence
  SiRNA target sequence
agtagcagatttactgaatgc

SEQ ID NO: 160343 - DNA, 21 bp, Artificial sequence
  SiRNA target sequence
gtagcagatttactgaatgcc

SEQ ID NO: 160344 - DNA, 21 bp, Artificial sequence
  SiRNA target sequence
tagcagatttactgaatgcca

SEQ ID NO: 160345 - DNA, 21 bp, Artificial sequence
  SiRNA target sequence
agcagatttactgaatgccaa

SEQ ID NO: 160346 - DNA, 21 bp, Artificial sequence
  SiRNA target sequence
gcagatttactgaatgccaat

SEQ ID NO: 160347 - DNA, 21 bp, Artificial sequence
  SiRNA target sequence
cagatttactgaatgccaatg

SEQ ID NO: 160348 - DNA, 21 bp, Artificial sequence
  SiRNA target sequence
agatttactgaatgccaatga

SEQ ID NO: 160349 - DNA, 21 bp, Artificial sequence
  SiRNA target sequence
gatttactgaatgccaatgaa

SEQ ID NO: 160350 - DNA, 21 bp, Artificial sequence
  SiRNA target sequence
atttactgaatgccaatgaaa

SEQ ID NO: 160351 - DNA, 21 bp, Artificial sequence
  SiRNA target sequence
tttactgaatgccaatgaaaa

SEQ ID NO: 160352 - DNA, 21 bp, Artificial sequence
  SiRNA target sequence
ttactgaatgccaatgaaaaa

SEQ ID NO: 160353 - DNA, 21 bp, Artificial sequence
  SiRNA target sequence
tactgaatgccaatgaaaaag

SEQ ID NO: 160354 - DNA, 21 bp, Artificial sequence
  SiRNA target sequence
actgaatgccaatgaaaaaga

SEQ ID NO: 160355 - DNA, 21 bp, Artificial sequence
  SiRNA target sequence
ctgaatgccaatgaaaaagaa

SEQ ID NO: 160356 - DNA, 21 bp, Artificial sequence
  SiRNA target sequence
tgaatgccaatgaaaaagaaa

SEQ ID NO: 160357 - DNA, 21 bp, Artificial sequence
  SiRNA target sequence
gaatgccaatgaaaaagaaat

SEQ ID NO: 160358 - DNA, 21 bp, Artificial sequence
  SiRNA target sequence
aatgccaatgaaaaagaaatt

SEQ ID NO: 160359 - DNA, 21 bp, Artificial sequence
  SiRNA target sequence
atgccaatgaaaaagaaatta

SEQ ID NO: 160360 - DNA, 21 bp, Artificial sequence
  SiRNA target sequence
tgccaatgaaaaagaaattat

SEQ ID NO: 160361 - DNA, 21 bp, Artificial sequence
  SiRNA target sequence
gccaatgaaaaagaaattatt

SEQ ID NO: 160362 - DNA, 21 bp, Artificial sequence
  SiRNA target sequence
ccaatgaaaaagaaattattt

SEQ ID NO: 160363 - DNA, 21 bp, Artificial sequence
  SiRNA target sequence
caatgaaaaagaaattatttt

SEQ ID NO: 160364 - DNA, 21 bp, Artificial sequence
  SiRNA target sequence
aatgaaaaagaaattattttt

SEQ ID NO: 160365 - DNA, 21 bp, Artificial sequence
  SiRNA target sequence
atgaaaaagaaattattttta

SEQ ID NO: 160366 - DNA, 21 bp, Artificial sequence
  SiRNA target sequence
tgaaaaagaaattatttttac

SEQ ID NO: 160367 - DNA, 21 bp, Artificial sequence
  SiRNA target sequence
gaaaaagaaattatttttact

SEQ ID NO: 160368 - DNA, 21 bp, Artificial sequence
  SiRNA target sequence
aaaaagaaattatttttacta

SEQ ID NO: 160369 - DNA, 21 bp, Artificial sequence
  SiRNA target sequence
aaaagaaattatttttactag

SEQ ID NO: 160370 - DNA, 21 bp, Artificial sequence
  SiRNA target sequence
aaagaaattatttttactagc

SEQ ID NO: 160371 - DNA, 21 bp, Artificial sequence
  SiRNA target sequence
aagaaattatttttactagcg

SEQ ID NO: 160372 - DNA, 21 bp, Artificial sequence
  SiRNA target sequence
agaaattatttttactagcgg

SEQ ID NO: 160373 - DNA, 21 bp, Artificial sequence
  SiRNA target sequence
gaaattatttttactagcggt

SEQ ID NO: 160374 - DNA, 21 bp, Artificial sequence
  SiRNA target sequence
aaattatttttactagcggtg

SEQ ID NO: 160375 - DNA, 21 bp, Artificial sequence
  SiRNA target sequence
aattatttttactagcggtgc

SEQ ID NO: 160376 - DNA, 21 bp, Artificial sequence
  SiRNA target sequence
attatttttactagcggtgct

SEQ ID NO: 160377 - DNA, 21 bp, Artificial sequence
  SiRNA target sequence
ttatttttactagcggtgcta

SEQ ID NO: 160378 - DNA, 21 bp, Artificial sequence
  SiRNA target sequence
tatttttactagcggtgctac

SEQ ID NO: 160379 - DNA, 21 bp, Artificial sequence
  SiRNA target sequence
atttttactagcggtgctact

SEQ ID NO: 160380 - DNA, 21 bp, Artificial sequence
  SiRNA target sequence
tttttactagcggtgctactg

SEQ ID NO: 160381 - DNA, 21 bp, Artificial sequence
  SiRNA target sequence
ttttactagcggtgctactga

SEQ ID NO: 160382 - DNA, 21 bp, Artificial sequence
  SiRNA target sequence
tttactagcggtgctactgag

SEQ ID NO: 160383 - DNA, 21 bp, Artificial sequence
  SiRNA target sequence
ttactagcggtgctactgaga

SEQ ID NO: 160384 - DNA, 21 bp, Artificial sequence
  SiRNA target sequence
tactagcggtgctactgagag

SEQ ID NO: 160385 - DNA, 21 bp, Artificial sequence
  SiRNA target sequence
actagcggtgctactgagagt

SEQ ID NO: 160386 - DNA, 21 bp, Artificial sequence
  SiRNA target sequence
ctagcggtgctactgagagta

SEQ ID NO: 160387 - DNA, 21 bp, Artificial sequence
  SiRNA target sequence
tagcggtgctactgagagtaa

SEQ ID NO: 160388 - DNA, 21 bp, Artificial sequence
  SiRNA target sequence
agcggtgctactgagagtaac

SEQ ID NO: 160389 - DNA, 21 bp, Artificial sequence
  SiRNA target sequence
gcggtgctactgagagtaaca

SEQ ID NO: 160390 - DNA, 21 bp, Artificial sequence
  SiRNA target sequence
cggtgctactgagagtaacaa

SEQ ID NO: 160391 - DNA, 21 bp, Artificial sequence
  SiRNA target sequence
ggtgctactgagagtaacaac

SEQ ID NO: 160392 - DNA, 21 bp, Artificial sequence
  SiRNA target sequence
gtgctactgagagtaacaacc

SEQ ID NO: 160393 - DNA, 21 bp, Artificial sequence
  SiRNA target sequence
tgctactgagagtaacaacct

SEQ ID NO: 160394 - DNA, 21 bp, Artificial sequence
  SiRNA target sequence
gctactgagagtaacaacctt

SEQ ID NO: 160395 - DNA, 21 bp, Artificial sequence
  SiRNA target sequence
ctactgagagtaacaaccttg

SEQ ID NO: 160396 - DNA, 21 bp, Artificial sequence
  SiRNA target sequence
tactgagagtaacaaccttgc

SEQ ID NO: 160397 - DNA, 21 bp, Artificial sequence
  SiRNA target sequence
actgagagtaacaaccttgca

SEQ ID NO: 160398 - DNA, 21 bp, Artificial sequence
  SiRNA target sequence
ctgagagtaacaaccttgcac

SEQ ID NO: 160399 - DNA, 21 bp, Artificial sequence
  SiRNA target sequence
tgagagtaacaaccttgcact

SEQ ID NO: 160400 - DNA, 21 bp, Artificial sequence
  SiRNA target sequence
gagagtaacaaccttgcacta

SEQ ID NO: 160401 - DNA, 21 bp, Artificial sequence
  SiRNA target sequence
agagtaacaaccttgcactaa

SEQ ID NO: 160402 - DNA, 21 bp, Artificial sequence
  SiRNA target sequence
gagtaacaaccttgcactaaa

SEQ ID NO: 160403 - DNA, 21 bp, Artificial sequence
  SiRNA target sequence
agtaacaaccttgcactaaag

SEQ ID NO: 160404 - DNA, 21 bp, Artificial sequence
  SiRNA target sequence
gtaacaaccttgcactaaagg

SEQ ID NO: 160405 - DNA, 21 bp, Artificial sequence
  SiRNA target sequence
taacaaccttgcactaaaggg

SEQ ID NO: 160406 - DNA, 21 bp, Artificial sequence
  SiRNA target sequence
aacaaccttgcactaaagggt

SEQ ID NO: 160407 - DNA, 21 bp, Artificial sequence
  SiRNA target sequence
acaaccttgcactaaagggtg

SEQ ID NO: 160408 - DNA, 21 bp, Artificial sequence
  SiRNA target sequence
caaccttgcactaaagggtgt

SEQ ID NO: 160409 - DNA, 21 bp, Artificial sequence
  SiRNA target sequence
aaccttgcactaaagggtgtc

SEQ ID NO: 160410 - DNA, 21 bp, Artificial sequence
  SiRNA target sequence
accttgcactaaagggtgtct

SEQ ID NO: 160411 - DNA, 21 bp, Artificial sequence
  SiRNA target sequence
ccttgcactaaagggtgtctt

SEQ ID NO: 160412 - DNA, 21 bp, Artificial sequence
  SiRNA target sequence
cttgcactaaagggtgtcttt

SEQ ID NO: 160413 - DNA, 21 bp, Artificial sequence
  SiRNA target sequence
ttgcactaaagggtgtctttg

SEQ ID NO: 160414 - DNA, 21 bp, Artificial sequence
  SiRNA target sequence
tgcactaaagggtgtctttgc

SEQ ID NO: 160415 - DNA, 21 bp, Artificial sequence
  SiRNA target sequence
gcactaaagggtgtctttgca

SEQ ID NO: 160416 - DNA, 21 bp, Artificial sequence
  SiRNA target sequence
cactaaagggtgtctttgcat

SEQ ID NO: 160417 - DNA, 21 bp, Artificial sequence
  SiRNA target sequence
actaaagggtgtctttgcatt

SEQ ID NO: 160418 - DNA, 21 bp, Artificial sequence
  SiRNA target sequence
ctaaagggtgtctttgcattt

SEQ ID NO: 160419 - DNA, 21 bp, Artificial sequence
  SiRNA target sequence
taaagggtgtctttgcatttt

SEQ ID NO: 160420 - DNA, 21 bp, Artificial sequence
  SiRNA target sequence
aaagggtgtctttgcattttt

SEQ ID NO: 160421 - DNA, 21 bp, Artificial sequence
  SiRNA target sequence
aagggtgtctttgcattttta

SEQ ID NO: 160422 - DNA, 21 bp, Artificial sequence
  SiRNA target sequence
agggtgtctttgcatttttaa

SEQ ID NO: 160423 - DNA, 21 bp, Artificial sequence
  SiRNA target sequence
gggtgtctttgcatttttaaa

SEQ ID NO: 160424 - DNA, 21 bp, Artificial sequence
  SiRNA target sequence
ggtgtctttgcatttttaaaa

SEQ ID NO: 160425 - DNA, 21 bp, Artificial sequence
  SiRNA target sequence
gtgtctttgcatttttaaaaa

SEQ ID NO: 160426 - DNA, 21 bp, Artificial sequence
  SiRNA target sequence
tgtctttgcatttttaaaaaa

SEQ ID NO: 160427 - DNA, 21 bp, Artificial sequence
  SiRNA target sequence
gtctttgcatttttaaaaaaa

SEQ ID NO: 160428 - DNA, 21 bp, Artificial sequence
  SiRNA target sequence
tctttgcatttttaaaaaaag

SEQ ID NO: 160429 - DNA, 21 bp, Artificial sequence
  SiRNA target sequence
ctttgcatttttaaaaaaaga

SEQ ID NO: 160430 - DNA, 21 bp, Artificial sequence
  SiRNA target sequence
tttgcatttttaaaaaaagac

SEQ ID NO: 160431 - DNA, 21 bp, Artificial sequence
  SiRNA target sequence
ttgcatttttaaaaaaagaca

SEQ ID NO: 160432 - DNA, 21 bp, Artificial sequence
  SiRNA target sequence
tgcatttttaaaaaaagacaa

SEQ ID NO: 160433 - DNA, 21 bp, Artificial sequence
  SiRNA target sequence
gcatttttaaaaaaagacaat

SEQ ID NO: 160434 - DNA, 21 bp, Artificial sequence
  SiRNA target sequence
catttttaaaaaaagacaata

SEQ ID NO: 160435 - DNA, 21 bp, Artificial sequence
  SiRNA target sequence
atttttaaaaaaagacaatag

SEQ ID NO: 160436 - DNA, 21 bp, Artificial sequence
  SiRNA target sequence
tttttaaaaaaagacaatagg

SEQ ID NO: 160437 - DNA, 21 bp, Artificial sequence
  SiRNA target sequence
ttttaaaaaaagacaataggc

SEQ ID NO: 160438 - DNA, 21 bp, Artificial sequence
  SiRNA target sequence
tttaaaaaaagacaataggcc

SEQ ID NO: 160439 - DNA, 21 bp, Artificial sequence
  SiRNA target sequence
ttaaaaaaagacaataggcct

SEQ ID NO: 160440 - DNA, 21 bp, Artificial sequence
  SiRNA target sequence
taaaaaaagacaataggcctg

SEQ ID NO: 160441 - DNA, 21 bp, Artificial sequence
  SiRNA target sequence
aaaaaaagacaataggcctgt

SEQ ID NO: 160442 - DNA, 21 bp, Artificial sequence
  SiRNA target sequence
aaaaaagacaataggcctgtt

SEQ ID NO: 160443 - DNA, 21 bp, Artificial sequence
  SiRNA target sequence
aaaaagacaataggcctgttc

SEQ ID NO: 160444 - DNA, 21 bp, Artificial sequence
  SiRNA target sequence
aaaagacaataggcctgttca

SEQ ID NO: 160445 - DNA, 21 bp, Artificial sequence
  SiRNA target sequence
aaagacaataggcctgttcat

SEQ ID NO: 160446 - DNA, 21 bp, Artificial sequence
  SiRNA target sequence
aagacaataggcctgttcata

SEQ ID NO: 160447 - DNA, 21 bp, Artificial sequence
  SiRNA target sequence
agacaataggcctgttcatat

SEQ ID NO: 160448 - DNA, 21 bp, Artificial sequence
  SiRNA target sequence
gacaataggcctgttcatatc

SEQ ID NO: 160449 - DNA, 21 bp, Artificial sequence
  SiRNA target sequence
acaataggcctgttcatatca

SEQ ID NO: 160450 - DNA, 21 bp, Artificial sequence
  SiRNA target sequence
caataggcctgttcatatcat

SEQ ID NO: 160451 - DNA, 21 bp, Artificial sequence
  SiRNA target sequence
aataggcctgttcatatcatt

SEQ ID NO: 160452 - DNA, 21 bp, Artificial sequence
  SiRNA target sequence
ataggcctgttcatatcatta

SEQ ID NO: 160453 - DNA, 21 bp, Artificial sequence
  SiRNA target sequence
taggcctgttcatatcattac

SEQ ID NO: 160454 - DNA, 21 bp, Artificial sequence
  SiRNA target sequence
aggcctgttcatatcattacc

SEQ ID NO: 160455 - DNA, 21 bp, Artificial sequence
  SiRNA target sequence
ggcctgttcatatcattacca

SEQ ID NO: 160456 - DNA, 21 bp, Artificial sequence
  SiRNA target sequence
gcctgttcatatcattaccac

SEQ ID NO: 160457 - DNA, 21 bp, Artificial sequence
  SiRNA target sequence
cctgttcatatcattaccaca

SEQ ID NO: 160458 - DNA, 21 bp, Artificial sequence
  SiRNA target sequence
ctgttcatatcattaccacac

SEQ ID NO: 160459 - DNA, 21 bp, Artificial sequence
  SiRNA target sequence
tgttcatatcattaccacaca

SEQ ID NO: 160460 - DNA, 21 bp, Artificial sequence
  SiRNA target sequence
gttcatatcattaccacacaa

SEQ ID NO: 160461 - DNA, 21 bp, Artificial sequence
  SiRNA target sequence
ttcatatcattaccacacaaa

SEQ ID NO: 160462 - DNA, 21 bp, Artificial sequence
  SiRNA target sequence
tcatatcattaccacacaaat

SEQ ID NO: 160463 - DNA, 21 bp, Artificial sequence
  SiRNA target sequence
catatcattaccacacaaatt

SEQ ID NO: 160464 - DNA, 21 bp, Artificial sequence
  SiRNA target sequence
atatcattaccacacaaattg

SEQ ID NO: 160465 - DNA, 21 bp, Artificial sequence
  SiRNA target sequence
tatcattaccacacaaattga

SEQ ID NO: 160466 - DNA, 21 bp, Artificial sequence
  SiRNA target sequence
atcattaccacacaaattgaa

SEQ ID NO: 160467 - DNA, 21 bp, Artificial sequence
  SiRNA target sequence
tcattaccacacaaattgaac

SEQ ID NO: 160468 - DNA, 21 bp, Artificial sequence
  SiRNA target sequence
cattaccacacaaattgaaca

SEQ ID NO: 160469 - DNA, 21 bp, Artificial sequence
  SiRNA target sequence
attaccacacaaattgaacat

SEQ ID NO: 160470 - DNA, 21 bp, Artificial sequence
  SiRNA target sequence
ttaccacacaaattgaacata

SEQ ID NO: 160471 - DNA, 21 bp, Artificial sequence
  SiRNA target sequence
taccacacaaattgaacataa

SEQ ID NO: 160472 - DNA, 21 bp, Artificial sequence
  SiRNA target sequence
accacacaaattgaacataaa

SEQ ID NO: 160473 - DNA, 21 bp, Artificial sequence
  SiRNA target sequence
ccacacaaattgaacataaat

SEQ ID NO: 160474 - DNA, 21 bp, Artificial sequence
  SiRNA target sequence
cacacaaattgaacataaatg

SEQ ID NO: 160475 - DNA, 21 bp, Artificial sequence
  SiRNA target sequence
acacaaattgaacataaatgt

SEQ ID NO: 160476 - DNA, 21 bp, Artificial sequence
  SiRNA target sequence
cacaaattgaacataaatgtg

SEQ ID NO: 160477 - DNA, 21 bp, Artificial sequence
  SiRNA target sequence
acaaattgaacataaatgtgt

SEQ ID NO: 160478 - DNA, 21 bp, Artificial sequence
  SiRNA target sequence
caaattgaacataaatgtgta

SEQ ID NO: 160479 - DNA, 21 bp, Artificial sequence
  SiRNA target sequence
aaattgaacataaatgtgtat

SEQ ID NO: 160480 - DNA, 21 bp, Artificial sequence
  SiRNA target sequence
aattgaacataaatgtgtatt

SEQ ID NO: 160481 - DNA, 21 bp, Artificial sequence
  SiRNA target sequence
attgaacataaatgtgtattg

SEQ ID NO: 160482 - DNA, 21 bp, Artificial sequence
  SiRNA target sequence
ttgaacataaatgtgtattgg

SEQ ID NO: 160483 - DNA, 21 bp, Artificial sequence
  SiRNA target sequence
tgaacataaatgtgtattgga

SEQ ID NO: 160484 - DNA, 21 bp, Artificial sequence
  SiRNA target sequence
gaacataaatgtgtattggac

SEQ ID NO: 160485 - DNA, 21 bp, Artificial sequence
  SiRNA target sequence
aacataaatgtgtattggaca

SEQ ID NO: 160486 - DNA, 21 bp, Artificial sequence
  SiRNA target sequence
acataaatgtgtattggacac

SEQ ID NO: 160487 - DNA, 21 bp, Artificial sequence
  SiRNA target sequence
cataaatgtgtattggacaca

SEQ ID NO: 160488 - DNA, 21 bp, Artificial sequence
  SiRNA target sequence
ataaatgtgtattggacacat

SEQ ID NO: 160489 - DNA, 21 bp, Artificial sequence
  SiRNA target sequence
taaatgtgtattggacacatg

SEQ ID NO: 160490 - DNA, 21 bp, Artificial sequence
  SiRNA target sequence
aaatgtgtattggacacatgt

SEQ ID NO: 160491 - DNA, 21 bp, Artificial sequence
  SiRNA target sequence
aatgtgtattggacacatgta

SEQ ID NO: 160492 - DNA, 21 bp, Artificial sequence
  SiRNA target sequence
atgtgtattggacacatgtag

SEQ ID NO: 160493 - DNA, 21 bp, Artificial sequence
  SiRNA target sequence
tgtgtattggacacatgtaga

SEQ ID NO: 160494 - DNA, 21 bp, Artificial sequence
  SiRNA target sequence
gtgtattggacacatgtagaa

SEQ ID NO: 160495 - DNA, 21 bp, Artificial sequence
  SiRNA target sequence
tgtattggacacatgtagaag

SEQ ID NO: 160496 - DNA, 21 bp, Artificial sequence
  SiRNA target sequence
gtattggacacatgtagaaga

SEQ ID NO: 160497 - DNA, 21 bp, Artificial sequence
  SiRNA target sequence
tattggacacatgtagaagat

SEQ ID NO: 160498 - DNA, 21 bp, Artificial sequence
  SiRNA target sequence
attggacacatgtagaagatt

SEQ ID NO: 160499 - DNA, 21 bp, Artificial sequence
  SiRNA target sequence
ttggacacatgtagaagatta

SEQ ID NO: 160500 - DNA, 21 bp, Artificial sequence
  SiRNA target sequence
tggacacatgtagaagattag

SEQ ID NO: 160501 - DNA, 21 bp, Artificial sequence
  SiRNA target sequence
ggacacatgtagaagattaga

SEQ ID NO: 160502 - DNA, 21 bp, Artificial sequence
  SiRNA target sequence
gacacatgtagaagattagaa

SEQ ID NO: 160503 - DNA, 21 bp, Artificial sequence
  SiRNA target sequence
acacatgtagaagattagaag

SEQ ID NO: 160504 - DNA, 21 bp, Artificial sequence
  SiRNA target sequence
cacatgtagaagattagaaga

SEQ ID NO: 160505 - DNA, 21 bp, Artificial sequence
  SiRNA target sequence
acatgtagaagattagaagaa

SEQ ID NO: 160506 - DNA, 21 bp, Artificial sequence
  SiRNA target sequence
catgtagaagattagaagaag

SEQ ID NO: 160507 - DNA, 21 bp, Artificial sequence
  SiRNA target sequence
atgtagaagattagaagaaga

SEQ ID NO: 160508 - DNA, 21 bp, Artificial sequence
  SiRNA target sequence
tgtagaagattagaagaagaa

SEQ ID NO: 160509 - DNA, 21 bp, Artificial sequence
  SiRNA target sequence
gtagaagattagaagaagaag

SEQ ID NO: 160510 - DNA, 21 bp, Artificial sequence
  SiRNA target sequence
tagaagattagaagaagaagg

SEQ ID NO: 160511 - DNA, 21 bp, Artificial sequence
  SiRNA target sequence
agaagattagaagaagaagga

SEQ ID NO: 160512 - DNA, 21 bp, Artificial sequence
  SiRNA target sequence
gaagattagaagaagaaggag

SEQ ID NO: 160513 - DNA, 21 bp, Artificial sequence
  SiRNA target sequence
aagattagaagaagaaggagc

SEQ ID NO: 160514 - DNA, 21 bp, Artificial sequence
  SiRNA target sequence
agattagaagaagaaggagct

SEQ ID NO: 160515 - DNA, 21 bp, Artificial sequence
  SiRNA target sequence
gattagaagaagaaggagcta

SEQ ID NO: 160516 - DNA, 21 bp, Artificial sequence
  SiRNA target sequence
attagaagaagaaggagctac

SEQ ID NO: 160517 - DNA, 21 bp, Artificial sequence
  SiRNA target sequence
ttagaagaagaaggagctaca

SEQ ID NO: 160518 - DNA, 21 bp, Artificial sequence
  SiRNA target sequence
tagaagaagaaggagctacag

SEQ ID NO: 160519 - DNA, 21 bp, Artificial sequence
  SiRNA target sequence
agaagaagaaggagctacagt

SEQ ID NO: 160520 - DNA, 21 bp, Artificial sequence
  SiRNA target sequence
gaagaagaaggagctacagtg

SEQ ID NO: 160521 - DNA, 21 bp, Artificial sequence
  SiRNA target sequence
aagaagaaggagctacagtga

SEQ ID NO: 160522 - DNA, 21 bp, Artificial sequence
  SiRNA target sequence
agaagaaggagctacagtgac

SEQ ID NO: 160523 - DNA, 21 bp, Artificial sequence
  SiRNA target sequence
gaagaaggagctacagtgact

SEQ ID NO: 160524 - DNA, 21 bp, Artificial sequence
  SiRNA target sequence
aagaaggagctacagtgactt

SEQ ID NO: 160525 - DNA, 21 bp, Artificial sequence
  SiRNA target sequence
agaaggagctacagtgactta

SEQ ID NO: 160526 - DNA, 21 bp, Artificial sequence
  SiRNA target sequence
gaaggagctacagtgacttat

SEQ ID NO: 160527 - DNA, 21 bp, Artificial sequence
  SiRNA target sequence
aaggagctacagtgacttatt

SEQ ID NO: 160528 - DNA, 21 bp, Artificial sequence
  SiRNA target sequence
aggagctacagtgacttattt

SEQ ID NO: 160529 - DNA, 21 bp, Artificial sequence
  SiRNA target sequence
ggagctacagtgacttatttg

SEQ ID NO: 160530 - DNA, 21 bp, Artificial sequence
  SiRNA target sequence
gagctacagtgacttatttgc

SEQ ID NO: 160531 - DNA, 21 bp, Artificial sequence
  SiRNA target sequence
agctacagtgacttatttgcc

SEQ ID NO: 160532 - DNA, 21 bp, Artificial sequence
  SiRNA target sequence
gctacagtgacttatttgcct

SEQ ID NO: 160533 - DNA, 21 bp, Artificial sequence
  SiRNA target sequence
ctacagtgacttatttgcctg

SEQ ID NO: 160534 - DNA, 21 bp, Artificial sequence
  SiRNA target sequence
tacagtgacttatttgcctgt

SEQ ID NO: 160535 - DNA, 21 bp, Artificial sequence
  SiRNA target sequence
acagtgacttatttgcctgta

SEQ ID NO: 160536 - DNA, 21 bp, Artificial sequence
  SiRNA target sequence
cagtgacttatttgcctgtag

SEQ ID NO: 160537 - DNA, 21 bp, Artificial sequence
  SiRNA target sequence
agtgacttatttgcctgtaga

SEQ ID NO: 160538 - DNA, 21 bp, Artificial sequence
  SiRNA target sequence
gtgacttatttgcctgtagat

SEQ ID NO: 160539 - DNA, 21 bp, Artificial sequence
  SiRNA target sequence
tgacttatttgcctgtagata

SEQ ID NO: 160540 - DNA, 21 bp, Artificial sequence
  SiRNA target sequence
gacttatttgcctgtagataa

SEQ ID NO: 160541 - DNA, 21 bp, Artificial sequence
  SiRNA target sequence
acttatttgcctgtagataaa

SEQ ID NO: 160542 - DNA, 21 bp, Artificial sequence
  SiRNA target sequence
cttatttgcctgtagataaaa

SEQ ID NO: 160543 - DNA, 21 bp, Artificial sequence
  SiRNA target sequence
ttatttgcctgtagataaaaa

SEQ ID NO: 160544 - DNA, 21 bp, Artificial sequence
  SiRNA target sequence
tatttgcctgtagataaaaat

SEQ ID NO: 160545 - DNA, 21 bp, Artificial sequence
  SiRNA target sequence
atttgcctgtagataaaaatg

SEQ ID NO: 160546 - DNA, 21 bp, Artificial sequence
  SiRNA target sequence
tttgcctgtagataaaaatgg

SEQ ID NO: 160547 - DNA, 21 bp, Artificial sequence
  SiRNA target sequence
ttgcctgtagataaaaatgga

SEQ ID NO: 160548 - DNA, 21 bp, Artificial sequence
  SiRNA target sequence
tgcctgtagataaaaatggaa

SEQ ID NO: 160549 - DNA, 21 bp, Artificial sequence
  SiRNA target sequence
gcctgtagataaaaatggaat

SEQ ID NO: 160550 - DNA, 21 bp, Artificial sequence
  SiRNA target sequence
cctgtagataaaaatggaata

SEQ ID NO: 160551 - DNA, 21 bp, Artificial sequence
  SiRNA target sequence
ctgtagataaaaatggaatag

SEQ ID NO: 160552 - DNA, 21 bp, Artificial sequence
  SiRNA target sequence
tgtagataaaaatggaatagt

SEQ ID NO: 160553 - DNA, 21 bp, Artificial sequence
  SiRNA target sequence
gtagataaaaatggaatagta

SEQ ID NO: 160554 - DNA, 21 bp, Artificial sequence
  SiRNA target sequence
tagataaaaatggaatagtag

SEQ ID NO: 160555 - DNA, 21 bp, Artificial sequence
  SiRNA target sequence
agataaaaatggaatagtaga

SEQ ID NO: 160556 - DNA, 21 bp, Artificial sequence
  SiRNA target sequence
gataaaaatggaatagtagat

SEQ ID NO: 160557 - DNA, 21 bp, Artificial sequence
  SiRNA target sequence
ataaaaatggaatagtagatc

SEQ ID NO: 160558 - DNA, 21 bp, Artificial sequence
  SiRNA target sequence
taaaaatggaatagtagatcc

SEQ ID NO: 160559 - DNA, 21 bp, Artificial sequence
  SiRNA target sequence
aaaaatggaatagtagatccg

SEQ ID NO: 160560 - DNA, 21 bp, Artificial sequence
  SiRNA target sequence
aaaatggaatagtagatccgc

SEQ ID NO: 160561 - DNA, 21 bp, Artificial sequence
  SiRNA target sequence
aaatggaatagtagatccgca

SEQ ID NO: 160562 - DNA, 21 bp, Artificial sequence
  SiRNA target sequence
aatggaatagtagatccgcaa

SEQ ID NO: 160563 - DNA, 21 bp, Artificial sequence
  SiRNA target sequence
atggaatagtagatccgcaat

SEQ ID NO: 160564 - DNA, 21 bp, Artificial sequence
  SiRNA target sequence
tggaatagtagatccgcaatt

SEQ ID NO: 160565 - DNA, 21 bp, Artificial sequence
  SiRNA target sequence
ggaatagtagatccgcaatta

SEQ ID NO: 160566 - DNA, 21 bp, Artificial sequence
  SiRNA target sequence
gaatagtagatccgcaattaa

SEQ ID NO: 160567 - DNA, 21 bp, Artificial sequence
  SiRNA target sequence
aatagtagatccgcaattaat

SEQ ID NO: 160568 - DNA, 21 bp, Artificial sequence
  SiRNA target sequence
atagtagatccgcaattaata

SEQ ID NO: 160569 - DNA, 21 bp, Artificial sequence
  SiRNA target sequence
tagtagatccgcaattaataa

SEQ ID NO: 160570 - DNA, 21 bp, Artificial sequence
  SiRNA target sequence
agtagatccgcaattaataaa

SEQ ID NO: 160571 - DNA, 21 bp, Artificial sequence
  SiRNA target sequence
gtagatccgcaattaataaaa

SEQ ID NO: 160572 - DNA, 21 bp, Artificial sequence
  SiRNA target sequence
tagatccgcaattaataaaaa

SEQ ID NO: 160573 - DNA, 21 bp, Artificial sequence
  SiRNA target sequence
agatccgcaattaataaaaaa

SEQ ID NO: 160574 - DNA, 21 bp, Artificial sequence
  SiRNA target sequence
gatccgcaattaataaaaaac

SEQ ID NO: 160575 - DNA, 21 bp, Artificial sequence
  SiRNA target sequence
atccgcaattaataaaaaaca

SEQ ID NO: 160576 - DNA, 21 bp, Artificial sequence
  SiRNA target sequence
tccgcaattaataaaaaacag

SEQ ID NO: 160577 - DNA, 21 bp, Artificial sequence
  SiRNA target sequence
ccgcaattaataaaaaacagt

SEQ ID NO: 160578 - DNA, 21 bp, Artificial sequence
  SiRNA target sequence
cgcaattaataaaaaacagta

SEQ ID NO: 160579 - DNA, 21 bp, Artificial sequence
  SiRNA target sequence
gcaattaataaaaaacagtat

SEQ ID NO: 160580 - DNA, 21 bp, Artificial sequence
  SiRNA target sequence
caattaataaaaaacagtatt

SEQ ID NO: 160581 - DNA, 21 bp, Artificial sequence
  SiRNA target sequence
aattaataaaaaacagtatta

SEQ ID NO: 160582 - DNA, 21 bp, Artificial sequence
  SiRNA target sequence
attaataaaaaacagtattac

SEQ ID NO: 160583 - DNA, 21 bp, Artificial sequence
  SiRNA target sequence
ttaataaaaaacagtattact

SEQ ID NO: 160584 - DNA, 21 bp, Artificial sequence
  SiRNA target sequence
taataaaaaacagtattacta

SEQ ID NO: 160585 - DNA, 21 bp, Artificial sequence
  SiRNA target sequence
aataaaaaacagtattactaa

SEQ ID NO: 160586 - DNA, 21 bp, Artificial sequence
  SiRNA target sequence
ataaaaaacagtattactaaa

SEQ ID NO: 160587 - DNA, 21 bp, Artificial sequence
  SiRNA target sequence
taaaaaacagtattactaaag

SEQ ID NO: 160588 - DNA, 21 bp, Artificial sequence
  SiRNA target sequence
aaaaaacagtattactaaaga

SEQ ID NO: 160589 - DNA, 21 bp, Artificial sequence
  SiRNA target sequence
aaaaacagtattactaaagat

SEQ ID NO: 160590 - DNA, 21 bp, Artificial sequence
  SiRNA target sequence
aaaacagtattactaaagata

SEQ ID NO: 160591 - DNA, 21 bp, Artificial sequence
  SiRNA target sequence
aaacagtattactaaagatac

SEQ ID NO: 160592 - DNA, 21 bp, Artificial sequence
  SiRNA target sequence
aacagtattactaaagatacc

SEQ ID NO: 160593 - DNA, 21 bp, Artificial sequence
  SiRNA target sequence
acagtattactaaagataccg

SEQ ID NO: 160594 - DNA, 21 bp, Artificial sequence
  SiRNA target sequence
cagtattactaaagataccgc

SEQ ID NO: 160595 - DNA, 21 bp, Artificial sequence
  SiRNA target sequence
agtattactaaagataccgct

SEQ ID NO: 160596 - DNA, 21 bp, Artificial sequence
  SiRNA target sequence
gtattactaaagataccgctt

SEQ ID NO: 160597 - DNA, 21 bp, Artificial sequence
  SiRNA target sequence
tattactaaagataccgcttt

SEQ ID NO: 160598 - DNA, 21 bp, Artificial sequence
  SiRNA target sequence
attactaaagataccgctttg

SEQ ID NO: 160599 - DNA, 21 bp, Artificial sequence
  SiRNA target sequence
ttactaaagataccgctttgg

SEQ ID NO: 160600 - DNA, 21 bp, Artificial sequence
  SiRNA target sequence
tactaaagataccgctttggt

SEQ ID NO: 160601 - DNA, 21 bp, Artificial sequence
  SiRNA target sequence
actaaagataccgctttggtg

SEQ ID NO: 160602 - DNA, 21 bp, Artificial sequence
  SiRNA target sequence
ctaaagataccgctttggtgt

SEQ ID NO: 160603 - DNA, 21 bp, Artificial sequence
  SiRNA target sequence
taaagataccgctttggtgtc

SEQ ID NO: 160604 - DNA, 21 bp, Artificial sequence
  SiRNA target sequence
aaagataccgctttggtgtct

SEQ ID NO: 160605 - DNA, 21 bp, Artificial sequence
  SiRNA target sequence
aagataccgctttggtgtctg

SEQ ID NO: 160606 - DNA, 21 bp, Artificial sequence
  SiRNA target sequence
agataccgctttggtgtctgt

SEQ ID NO: 160607 - DNA, 21 bp, Artificial sequence
  SiRNA target sequence
gataccgctttggtgtctgtt

SEQ ID NO: 160608 - DNA, 21 bp, Artificial sequence
  SiRNA target sequence
ataccgctttggtgtctgtta

SEQ ID NO: 160609 - DNA, 21 bp, Artificial sequence
  SiRNA target sequence
taccgctttggtgtctgttat

SEQ ID NO: 160610 - DNA, 21 bp, Artificial sequence
  SiRNA target sequence
accgctttggtgtctgttatg

SEQ ID NO: 160611 - DNA, 21 bp, Artificial sequence
  SiRNA target sequence
ccgctttggtgtctgttatgg

SEQ ID NO: 160612 - DNA, 21 bp, Artificial sequence
  SiRNA target sequence
cgctttggtgtctgttatggc

SEQ ID NO: 160613 - DNA, 21 bp, Artificial sequence
  SiRNA target sequence
gctttggtgtctgttatggct

SEQ ID NO: 160614 - DNA, 21 bp, Artificial sequence
  SiRNA target sequence
ctttggtgtctgttatggctg

SEQ ID NO: 160615 - DNA, 21 bp, Artificial sequence
  SiRNA target sequence
tttggtgtctgttatggctgt

SEQ ID NO: 160616 - DNA, 21 bp, Artificial sequence
  SiRNA target sequence
ttggtgtctgttatggctgtt

SEQ ID NO: 160617 - DNA, 21 bp, Artificial sequence
  SiRNA target sequence
tggtgtctgttatggctgtta

SEQ ID NO: 160618 - DNA, 21 bp, Artificial sequence
  SiRNA target sequence
ggtgtctgttatggctgttaa

SEQ ID NO: 160619 - DNA, 21 bp, Artificial sequence
  SiRNA target sequence
gtgtctgttatggctgttaac

SEQ ID NO: 160620 - DNA, 21 bp, Artificial sequence
  SiRNA target sequence
tgtctgttatggctgttaaca

SEQ ID NO: 160621 - DNA, 21 bp, Artificial sequence
  SiRNA target sequence
gtctgttatggctgttaacaa

SEQ ID NO: 160622 - DNA, 21 bp, Artificial sequence
  SiRNA target sequence
tctgttatggctgttaacaac

SEQ ID NO: 160623 - DNA, 21 bp, Artificial sequence
  SiRNA target sequence
ctgttatggctgttaacaacg

SEQ ID NO: 160624 - DNA, 21 bp, Artificial sequence
  SiRNA target sequence
tgttatggctgttaacaacga

SEQ ID NO: 160625 - DNA, 21 bp, Artificial sequence
  SiRNA target sequence
gttatggctgttaacaacgaa

SEQ ID NO: 160626 - DNA, 21 bp, Artificial sequence
  SiRNA target sequence
ttatggctgttaacaacgaaa

SEQ ID NO: 160627 - DNA, 21 bp, Artificial sequence
  SiRNA target sequence
tatggctgttaacaacgaaat

SEQ ID NO: 160628 - DNA, 21 bp, Artificial sequence
  SiRNA target sequence
atggctgttaacaacgaaatg

SEQ ID NO: 160629 - DNA, 21 bp, Artificial sequence
  SiRNA target sequence
tggctgttaacaacgaaatgg

SEQ ID NO: 160630 - DNA, 21 bp, Artificial sequence
  SiRNA target sequence
ggctgttaacaacgaaatggg

SEQ ID NO: 160631 - DNA, 21 bp, Artificial sequence
  SiRNA target sequence
gctgttaacaacgaaatggga

SEQ ID NO: 160632 - DNA, 21 bp, Artificial sequence
  SiRNA target sequence
ctgttaacaacgaaatgggag

SEQ ID NO: 160633 - DNA, 21 bp, Artificial sequence
  SiRNA target sequence
tgttaacaacgaaatgggagc

SEQ ID NO: 160634 - DNA, 21 bp, Artificial sequence
  SiRNA target sequence
gttaacaacgaaatgggagca

SEQ ID NO: 160635 - DNA, 21 bp, Artificial sequence
  SiRNA target sequence
ttaacaacgaaatgggagcaa

SEQ ID NO: 160636 - DNA, 21 bp, Artificial sequence
  SiRNA target sequence
taacaacgaaatgggagcaat

SEQ ID NO: 160637 - DNA, 21 bp, Artificial sequence
  SiRNA target sequence
aacaacgaaatgggagcaata

SEQ ID NO: 160638 - DNA, 21 bp, Artificial sequence
  SiRNA target sequence
acaacgaaatgggagcaatac

SEQ ID NO: 160639 - DNA, 21 bp, Artificial sequence
  SiRNA target sequence
caacgaaatgggagcaataca

SEQ ID NO: 160640 - DNA, 21 bp, Artificial sequence
  SiRNA target sequence
aacgaaatgggagcaatacaa

SEQ ID NO: 160641 - DNA, 21 bp, Artificial sequence
  SiRNA target sequence
acgaaatgggagcaatacaac

SEQ ID NO: 160642 - DNA, 21 bp, Artificial sequence
  SiRNA target sequence
cgaaatgggagcaatacaacc

SEQ ID NO: 160643 - DNA, 21 bp, Artificial sequence
  SiRNA target sequence
gaaatgggagcaatacaaccg

SEQ ID NO: 160644 - DNA, 21 bp, Artificial sequence
  SiRNA target sequence
aaatgggagcaatacaaccgc

SEQ ID NO: 160645 - DNA, 21 bp, Artificial sequence
  SiRNA target sequence
aatgggagcaatacaaccgct

SEQ ID NO: 160646 - DNA, 21 bp, Artificial sequence
  SiRNA target sequence
atgggagcaatacaaccgctt

SEQ ID NO: 160647 - DNA, 21 bp, Artificial sequence
  SiRNA target sequence
tgggagcaatacaaccgctta

SEQ ID NO: 160648 - DNA, 21 bp, Artificial sequence
  SiRNA target sequence
gggagcaatacaaccgcttaa

SEQ ID NO: 160649 - DNA, 21 bp, Artificial sequence
  SiRNA target sequence
ggagcaatacaaccgcttaaa

SEQ ID NO: 160650 - DNA, 21 bp, Artificial sequence
  SiRNA target sequence
gagcaatacaaccgcttaaag

SEQ ID NO: 160651 - DNA, 21 bp, Artificial sequence
  SiRNA target sequence
agcaatacaaccgcttaaaga

SEQ ID NO: 160652 - DNA, 21 bp, Artificial sequence
  SiRNA target sequence
gcaatacaaccgcttaaagaa

SEQ ID NO: 160653 - DNA, 21 bp, Artificial sequence
  SiRNA target sequence
caatacaaccgcttaaagaaa

SEQ ID NO: 160654 - DNA, 21 bp, Artificial sequence
  SiRNA target sequence
aatacaaccgcttaaagaaat

SEQ ID NO: 160655 - DNA, 21 bp, Artificial sequence
  SiRNA target sequence
atacaaccgcttaaagaaata

SEQ ID NO: 160656 - DNA, 21 bp, Artificial sequence
  SiRNA target sequence
tacaaccgcttaaagaaatag

SEQ ID NO: 160657 - DNA, 21 bp, Artificial sequence
  SiRNA target sequence
acaaccgcttaaagaaatagg

SEQ ID NO: 160658 - DNA, 21 bp, Artificial sequence
  SiRNA target sequence
caaccgcttaaagaaatagga

SEQ ID NO: 160659 - DNA, 21 bp, Artificial sequence
  SiRNA target sequence
aaccgcttaaagaaataggaa

SEQ ID NO: 160660 - DNA, 21 bp, Artificial sequence
  SiRNA target sequence
accgcttaaagaaataggaag

SEQ ID NO: 160661 - DNA, 21 bp, Artificial sequence
  SiRNA target sequence
ccgcttaaagaaataggaaga

SEQ ID NO: 160662 - DNA, 21 bp, Artificial sequence
  SiRNA target sequence
cgcttaaagaaataggaagaa

SEQ ID NO: 160663 - DNA, 21 bp, Artificial sequence
  SiRNA target sequence
gcttaaagaaataggaagaat

SEQ ID NO: 160664 - DNA, 21 bp, Artificial sequence
  SiRNA target sequence
cttaaagaaataggaagaata

SEQ ID NO: 160665 - DNA, 21 bp, Artificial sequence
  SiRNA target sequence
ttaaagaaataggaagaatat

SEQ ID NO: 160666 - DNA, 21 bp, Artificial sequence
  SiRNA target sequence
taaagaaataggaagaatatg

SEQ ID NO: 160667 - DNA, 21 bp, Artificial sequence
  SiRNA target sequence
aaagaaataggaagaatatgt

SEQ ID NO: 160668 - DNA, 21 bp, Artificial sequence
  SiRNA target sequence
aagaaataggaagaatatgta

SEQ ID NO: 160669 - DNA, 21 bp, Artificial sequence
  SiRNA target sequence
agaaataggaagaatatgtaa

SEQ ID NO: 160670 - DNA, 21 bp, Artificial sequence
  SiRNA target sequence
gaaataggaagaatatgtaaa

SEQ ID NO: 160671 - DNA, 21 bp, Artificial sequence
  SiRNA target sequence
aaataggaagaatatgtaaag

SEQ ID NO: 160672 - DNA, 21 bp, Artificial sequence
  SiRNA target sequence
aataggaagaatatgtaaaga

SEQ ID NO: 160673 - DNA, 21 bp, Artificial sequence
  SiRNA target sequence
ataggaagaatatgtaaagaa

SEQ ID NO: 160674 - DNA, 21 bp, Artificial sequence
  SiRNA target sequence
taggaagaatatgtaaagaaa

SEQ ID NO: 160675 - DNA, 21 bp, Artificial sequence
  SiRNA target sequence
aggaagaatatgtaaagaaaa

SEQ ID NO: 160676 - DNA, 21 bp, Artificial sequence
  SiRNA target sequence
ggaagaatatgtaaagaaaat

SEQ ID NO: 160677 - DNA, 21 bp, Artificial sequence
  SiRNA target sequence
gaagaatatgtaaagaaaata

SEQ ID NO: 160678 - DNA, 21 bp, Artificial sequence
  SiRNA target sequence
aagaatatgtaaagaaaataa

SEQ ID NO: 160679 - DNA, 21 bp, Artificial sequence
  SiRNA target sequence
agaatatgtaaagaaaataat

SEQ ID NO: 160680 - DNA, 21 bp, Artificial sequence
  SiRNA target sequence
gaatatgtaaagaaaataata

SEQ ID NO: 160681 - DNA, 21 bp, Artificial sequence
  SiRNA target sequence
aatatgtaaagaaaataatat

SEQ ID NO: 160682 - DNA, 21 bp, Artificial sequence
  SiRNA target sequence
atatgtaaagaaaataatatt

SEQ ID NO: 160683 - DNA, 21 bp, Artificial sequence
  SiRNA target sequence
tatgtaaagaaaataatattt

SEQ ID NO: 160684 - DNA, 21 bp, Artificial sequence
  SiRNA target sequence
atgtaaagaaaataatatttt

SEQ ID NO: 160685 - DNA, 21 bp, Artificial sequence
  SiRNA target sequence
tgtaaagaaaataatatttta

SEQ ID NO: 160686 - DNA, 21 bp, Artificial sequence
  SiRNA target sequence
gtaaagaaaataatattttat

SEQ ID NO: 160687 - DNA, 21 bp, Artificial sequence
  SiRNA target sequence
taaagaaaataatattttatt

SEQ ID NO: 160688 - DNA, 21 bp, Artificial sequence
  SiRNA target sequence
aaagaaaataatattttattt

SEQ ID NO: 160689 - DNA, 21 bp, Artificial sequence
  SiRNA target sequence
aagaaaataatattttatttc

SEQ ID NO: 160690 - DNA, 21 bp, Artificial sequence
  SiRNA target sequence
agaaaataatattttatttca

SEQ ID NO: 160691 - DNA, 21 bp, Artificial sequence
  SiRNA target sequence
gaaaataatattttatttcac

SEQ ID NO: 160692 - DNA, 21 bp, Artificial sequence
  SiRNA target sequence
aaaataatattttatttcaca

SEQ ID NO: 160693 - DNA, 21 bp, Artificial sequence
  SiRNA target sequence
aaataatattttatttcacac

SEQ ID NO: 160694 - DNA, 21 bp, Artificial sequence
  SiRNA target sequence
aataatattttatttcacact

SEQ ID NO: 160695 - DNA, 21 bp, Artificial sequence
  SiRNA target sequence
ataatattttatttcacactg

SEQ ID NO: 160696 - DNA, 21 bp, Artificial sequence
  SiRNA target sequence
taatattttatttcacactga

SEQ ID NO: 160697 - DNA, 21 bp, Artificial sequence
  SiRNA target sequence
aatattttatttcacactgat

SEQ ID NO: 160698 - DNA, 21 bp, Artificial sequence
  SiRNA target sequence
atattttatttcacactgatg

SEQ ID NO: 160699 - DNA, 21 bp, Artificial sequence
  SiRNA target sequence
tattttatttcacactgatgc

SEQ ID NO: 160700 - DNA, 21 bp, Artificial sequence
  SiRNA target sequence
attttatttcacactgatgca

SEQ ID NO: 160701 - DNA, 21 bp, Artificial sequence
  SiRNA target sequence
ttttatttcacactgatgcag

SEQ ID NO: 160702 - DNA, 21 bp, Artificial sequence
  SiRNA target sequence
tttatttcacactgatgcagc

SEQ ID NO: 160703 - DNA, 21 bp, Artificial sequence
  SiRNA target sequence
ttatttcacactgatgcagca

SEQ ID NO: 160704 - DNA, 21 bp, Artificial sequence
  SiRNA target sequence
tatttcacactgatgcagcac

SEQ ID NO: 160705 - DNA, 21 bp, Artificial sequence
  SiRNA target sequence
atttcacactgatgcagcaca

SEQ ID NO: 160706 - DNA, 21 bp, Artificial sequence
  SiRNA target sequence
tttcacactgatgcagcacaa

SEQ ID NO: 160707 - DNA, 21 bp, Artificial sequence
  SiRNA target sequence
ttcacactgatgcagcacaag

SEQ ID NO: 160708 - DNA, 21 bp, Artificial sequence
  SiRNA target sequence
tcacactgatgcagcacaagc

SEQ ID NO: 160709 - DNA, 21 bp, Artificial sequence
  SiRNA target sequence
cacactgatgcagcacaagca

SEQ ID NO: 160710 - DNA, 21 bp, Artificial sequence
  SiRNA target sequence
acactgatgcagcacaagcag

SEQ ID NO: 160711 - DNA, 21 bp, Artificial sequence
  SiRNA target sequence
cactgatgcagcacaagcagt

SEQ ID NO: 160712 - DNA, 21 bp, Artificial sequence
  SiRNA target sequence
actgatgcagcacaagcagtt

SEQ ID NO: 160713 - DNA, 21 bp, Artificial sequence
  SiRNA target sequence
ctgatgcagcacaagcagttg

SEQ ID NO: 160714 - DNA, 21 bp, Artificial sequence
  SiRNA target sequence
tgatgcagcacaagcagttgg

SEQ ID NO: 160715 - DNA, 21 bp, Artificial sequence
  SiRNA target sequence
gatgcagcacaagcagttggt

SEQ ID NO: 160716 - DNA, 21 bp, Artificial sequence
  SiRNA target sequence
atgcagcacaagcagttggta

SEQ ID NO: 160717 - DNA, 21 bp, Artificial sequence
  SiRNA target sequence
tgcagcacaagcagttggtaa

SEQ ID NO: 160718 - DNA, 21 bp, Artificial sequence
  SiRNA target sequence
gcagcacaagcagttggtaat

SEQ ID NO: 160719 - DNA, 21 bp, Artificial sequence
  SiRNA target sequence
cagcacaagcagttggtaata

SEQ ID NO: 160720 - DNA, 21 bp, Artificial sequence
  SiRNA target sequence
agcacaagcagttggtaatat

SEQ ID NO: 160721 - DNA, 21 bp, Artificial sequence
  SiRNA target sequence
gcacaagcagttggtaatata

SEQ ID NO: 160722 - DNA, 21 bp, Artificial sequence
  SiRNA target sequence
cacaagcagttggtaatatag

SEQ ID NO: 160723 - DNA, 21 bp, Artificial sequence
  SiRNA target sequence
acaagcagttggtaatataga

SEQ ID NO: 160724 - DNA, 21 bp, Artificial sequence
  SiRNA target sequence
caagcagttggtaatatagat

SEQ ID NO: 160725 - DNA, 21 bp, Artificial sequence
  SiRNA target sequence
aagcagttggtaatatagata

SEQ ID NO: 160726 - DNA, 21 bp, Artificial sequence
  SiRNA target sequence
agcagttggtaatatagatat

SEQ ID NO: 160727 - DNA, 21 bp, Artificial sequence
  SiRNA target sequence
gcagttggtaatatagatatt

SEQ ID NO: 160728 - DNA, 21 bp, Artificial sequence
  SiRNA target sequence
cagttggtaatatagatattg

SEQ ID NO: 160729 - DNA, 21 bp, Artificial sequence
  SiRNA target sequence
agttggtaatatagatattga

SEQ ID NO: 160730 - DNA, 21 bp, Artificial sequence
  SiRNA target sequence
gttggtaatatagatattgat

SEQ ID NO: 160731 - DNA, 21 bp, Artificial sequence
  SiRNA target sequence
ttggtaatatagatattgatg

SEQ ID NO: 160732 - DNA, 21 bp, Artificial sequence
  SiRNA target sequence
tggtaatatagatattgatgt

SEQ ID NO: 160733 - DNA, 21 bp, Artificial sequence
  SiRNA target sequence
ggtaatatagatattgatgtc

SEQ ID NO: 160734 - DNA, 21 bp, Artificial sequence
  SiRNA target sequence
gtaatatagatattgatgtca

SEQ ID NO: 160735 - DNA, 21 bp, Artificial sequence
  SiRNA target sequence
taatatagatattgatgtcaa

SEQ ID NO: 160736 - DNA, 21 bp, Artificial sequence
  SiRNA target sequence
aatatagatattgatgtcaat

SEQ ID NO: 160737 - DNA, 21 bp, Artificial sequence
  SiRNA target sequence
atatagatattgatgtcaatg

SEQ ID NO: 160738 - DNA, 21 bp, Artificial sequence
  SiRNA target sequence
tatagatattgatgtcaatga

SEQ ID NO: 160739 - DNA, 21 bp, Artificial sequence
  SiRNA target sequence
atagatattgatgtcaatgat

SEQ ID NO: 160740 - DNA, 21 bp, Artificial sequence
  SiRNA target sequence
tagatattgatgtcaatgata

SEQ ID NO: 160741 - DNA, 21 bp, Artificial sequence
  SiRNA target sequence
agatattgatgtcaatgatat

SEQ ID NO: 160742 - DNA, 21 bp, Artificial sequence
  SiRNA target sequence
gatattgatgtcaatgatatg

SEQ ID NO: 160743 - DNA, 21 bp, Artificial sequence
  SiRNA target sequence
atattgatgtcaatgatatga

SEQ ID NO: 160744 - DNA, 21 bp, Artificial sequence
  SiRNA target sequence
tattgatgtcaatgatatgaa

SEQ ID NO: 160745 - DNA, 21 bp, Artificial sequence
  SiRNA target sequence
attgatgtcaatgatatgaat

SEQ ID NO: 160746 - DNA, 21 bp, Artificial sequence
  SiRNA target sequence
ttgatgtcaatgatatgaata

SEQ ID NO: 160747 - DNA, 21 bp, Artificial sequence
  SiRNA target sequence
tgatgtcaatgatatgaatat

SEQ ID NO: 160748 - DNA, 21 bp, Artificial sequence
  SiRNA target sequence
gatgtcaatgatatgaatatt

SEQ ID NO: 160749 - DNA, 21 bp, Artificial sequence
  SiRNA target sequence
atgtcaatgatatgaatattg

SEQ ID NO: 160750 - DNA, 21 bp, Artificial sequence
  SiRNA target sequence
tgtcaatgatatgaatattga

SEQ ID NO: 160751 - DNA, 21 bp, Artificial sequence
  SiRNA target sequence
gtcaatgatatgaatattgat

SEQ ID NO: 160752 - DNA, 21 bp, Artificial sequence
  SiRNA target sequence
tcaatgatatgaatattgatt

SEQ ID NO: 160753 - DNA, 21 bp, Artificial sequence
  SiRNA target sequence
caatgatatgaatattgattt

SEQ ID NO: 160754 - DNA, 21 bp, Artificial sequence
  SiRNA target sequence
aatgatatgaatattgattta

SEQ ID NO: 160755 - DNA, 21 bp, Artificial sequence
  SiRNA target sequence
atgatatgaatattgatttac

SEQ ID NO: 160756 - DNA, 21 bp, Artificial sequence
  SiRNA target sequence
tgatatgaatattgatttact

SEQ ID NO: 160757 - DNA, 21 bp, Artificial sequence
  SiRNA target sequence
gatatgaatattgatttacta

SEQ ID NO: 160758 - DNA, 21 bp, Artificial sequence
  SiRNA target sequence
atatgaatattgatttactaa

SEQ ID NO: 160759 - DNA, 21 bp, Artificial sequence
  SiRNA target sequence
tatgaatattgatttactaag

SEQ ID NO: 160760 - DNA, 21 bp, Artificial sequence
  SiRNA target sequence
atgaatattgatttactaagt

SEQ ID NO: 160761 - DNA, 21 bp, Artificial sequence
  SiRNA target sequence
tgaatattgatttactaagtt

SEQ ID NO: 160762 - DNA, 21 bp, Artificial sequence
  SiRNA target sequence
gaatattgatttactaagttt

SEQ ID NO: 160763 - DNA, 21 bp, Artificial sequence
  SiRNA target sequence
aatattgatttactaagttta

SEQ ID NO: 160764 - DNA, 21 bp, Artificial sequence
  SiRNA target sequence
atattgatttactaagtttat

SEQ ID NO: 160765 - DNA, 21 bp, Artificial sequence
  SiRNA target sequence
tattgatttactaagtttatc

SEQ ID NO: 160766 - DNA, 21 bp, Artificial sequence
  SiRNA target sequence
attgatttactaagtttatca

SEQ ID NO: 160767 - DNA, 21 bp, Artificial sequence
  SiRNA target sequence
ttgatttactaagtttatcaa

SEQ ID NO: 160768 - DNA, 21 bp, Artificial sequence
  SiRNA target sequence
tgatttactaagtttatcaag

SEQ ID NO: 160769 - DNA, 21 bp, Artificial sequence
  SiRNA target sequence
gatttactaagtttatcaagt

SEQ ID NO: 160770 - DNA, 21 bp, Artificial sequence
  SiRNA target sequence
atttactaagtttatcaagtc

SEQ ID NO: 160771 - DNA, 21 bp, Artificial sequence
  SiRNA target sequence
tttactaagtttatcaagtca

SEQ ID NO: 160772 - DNA, 21 bp, Artificial sequence
  SiRNA target sequence
ttactaagtttatcaagtcat

SEQ ID NO: 160773 - DNA, 21 bp, Artificial sequence
  SiRNA target sequence
tactaagtttatcaagtcata

SEQ ID NO: 160774 - DNA, 21 bp, Artificial sequence
  SiRNA target sequence
actaagtttatcaagtcataa

SEQ ID NO: 160775 - DNA, 21 bp, Artificial sequence
  SiRNA target sequence
ctaagtttatcaagtcataaa

SEQ ID NO: 160776 - DNA, 21 bp, Artificial sequence
  SiRNA target sequence
taagtttatcaagtcataaaa

SEQ ID NO: 160777 - DNA, 21 bp, Artificial sequence
  SiRNA target sequence
aagtttatcaagtcataaaat

SEQ ID NO: 160778 - DNA, 21 bp, Artificial sequence
  SiRNA target sequence
agtttatcaagtcataaaatt

SEQ ID NO: 160779 - DNA, 21 bp, Artificial sequence
  SiRNA target sequence
gtttatcaagtcataaaattt

SEQ ID NO: 160780 - DNA, 21 bp, Artificial sequence
  SiRNA target sequence
tttatcaagtcataaaattta

SEQ ID NO: 160781 - DNA, 21 bp, Artificial sequence
  SiRNA target sequence
ttatcaagtcataaaatttat

SEQ ID NO: 160782 - DNA, 21 bp, Artificial sequence
  SiRNA target sequence
tatcaagtcataaaatttatg

SEQ ID NO: 160783 - DNA, 21 bp, Artificial sequence
  SiRNA target sequence
atcaagtcataaaatttatgg

SEQ ID NO: 160784 - DNA, 21 bp, Artificial sequence
  SiRNA target sequence
tcaagtcataaaatttatggt

SEQ ID NO: 160785 - DNA, 21 bp, Artificial sequence
  SiRNA target sequence
caagtcataaaatttatggtc

SEQ ID NO: 160786 - DNA, 21 bp, Artificial sequence
  SiRNA target sequence
aagtcataaaatttatggtcc

SEQ ID NO: 160787 - DNA, 21 bp, Artificial sequence
  SiRNA target sequence
agtcataaaatttatggtcca

SEQ ID NO: 160788 - DNA, 21 bp, Artificial sequence
  SiRNA target sequence
gtcataaaatttatggtccaa

SEQ ID NO: 160789 - DNA, 21 bp, Artificial sequence
  SiRNA target sequence
tcataaaatttatggtccaaa

SEQ ID NO: 160790 - DNA, 21 bp, Artificial sequence
  SiRNA target sequence
cataaaatttatggtccaaaa

SEQ ID NO: 160791 - DNA, 21 bp, Artificial sequence
  SiRNA target sequence
ataaaatttatggtccaaaag

SEQ ID NO: 160792 - DNA, 21 bp, Artificial sequence
  SiRNA target sequence
taaaatttatggtccaaaagg

SEQ ID NO: 160793 - DNA, 21 bp, Artificial sequence
  SiRNA target sequence
aaaatttatggtccaaaaggt

SEQ ID NO: 160794 - DNA, 21 bp, Artificial sequence
  SiRNA target sequence
aaatttatggtccaaaaggtg

SEQ ID NO: 160795 - DNA, 21 bp, Artificial sequence
  SiRNA target sequence
aatttatggtccaaaaggtgt

SEQ ID NO: 160796 - DNA, 21 bp, Artificial sequence
  SiRNA target sequence
atttatggtccaaaaggtgtt

SEQ ID NO: 160797 - DNA, 21 bp, Artificial sequence
  SiRNA target sequence
tttatggtccaaaaggtgttg

SEQ ID NO: 160798 - DNA, 21 bp, Artificial sequence
  SiRNA target sequence
ttatggtccaaaaggtgttgg

SEQ ID NO: 160799 - DNA, 21 bp, Artificial sequence
  SiRNA target sequence
tatggtccaaaaggtgttggt

SEQ ID NO: 160800 - DNA, 21 bp, Artificial sequence
  SiRNA target sequence
atggtccaaaaggtgttggtg

SEQ ID NO: 160801 - DNA, 21 bp, Artificial sequence
  SiRNA target sequence
tggtccaaaaggtgttggtgc

SEQ ID NO: 160802 - DNA, 21 bp, Artificial sequence
  SiRNA target sequence
ggtccaaaaggtgttggtgcc

SEQ ID NO: 160803 - DNA, 21 bp, Artificial sequence
  SiRNA target sequence
gtccaaaaggtgttggtgcct

SEQ ID NO: 160804 - DNA, 21 bp, Artificial sequence
  SiRNA target sequence
tccaaaaggtgttggtgcctt

SEQ ID NO: 160805 - DNA, 21 bp, Artificial sequence
  SiRNA target sequence
ccaaaaggtgttggtgcctta

SEQ ID NO: 160806 - DNA, 21 bp, Artificial sequence
  SiRNA target sequence
caaaaggtgttggtgccttat

SEQ ID NO: 160807 - DNA, 21 bp, Artificial sequence
  SiRNA target sequence
aaaaggtgttggtgccttata

SEQ ID NO: 160808 - DNA, 21 bp, Artificial sequence
  SiRNA target sequence
aaaggtgttggtgccttatac

SEQ ID NO: 160809 - DNA, 21 bp, Artificial sequence
  SiRNA target sequence
aaggtgttggtgccttatacg

SEQ ID NO: 160810 - DNA, 21 bp, Artificial sequence
  SiRNA target sequence
aggtgttggtgccttatacgt

SEQ ID NO: 160811 - DNA, 21 bp, Artificial sequence
  SiRNA target sequence
ggtgttggtgccttatacgtc

SEQ ID NO: 160812 - DNA, 21 bp, Artificial sequence
  SiRNA target sequence
gtgttggtgccttatacgtca

SEQ ID NO: 160813 - DNA, 21 bp, Artificial sequence
  SiRNA target sequence
tgttggtgccttatacgtcag

SEQ ID NO: 160814 - DNA, 21 bp, Artificial sequence
  SiRNA target sequence
gttggtgccttatacgtcaga

SEQ ID NO: 160815 - DNA, 21 bp, Artificial sequence
  SiRNA target sequence
ttggtgccttatacgtcagaa

SEQ ID NO: 160816 - DNA, 21 bp, Artificial sequence
  SiRNA target sequence
tggtgccttatacgtcagaag

SEQ ID NO: 160817 - DNA, 21 bp, Artificial sequence
  SiRNA target sequence
ggtgccttatacgtcagaaga

SEQ ID NO: 160818 - DNA, 21 bp, Artificial sequence
  SiRNA target sequence
gtgccttatacgtcagaagaa

SEQ ID NO: 160819 - DNA, 21 bp, Artificial sequence
  SiRNA target sequence
tgccttatacgtcagaagaag

SEQ ID NO: 160820 - DNA, 21 bp, Artificial sequence
  SiRNA target sequence
gccttatacgtcagaagaagg

SEQ ID NO: 160821 - DNA, 21 bp, Artificial sequence
  SiRNA target sequence
ccttatacgtcagaagaaggc

SEQ ID NO: 160822 - DNA, 21 bp, Artificial sequence
  SiRNA target sequence
cttatacgtcagaagaaggcc

SEQ ID NO: 160823 - DNA, 21 bp, Artificial sequence
  SiRNA target sequence
ttatacgtcagaagaaggcct

SEQ ID NO: 160824 - DNA, 21 bp, Artificial sequence
  SiRNA target sequence
tatacgtcagaagaaggccta

SEQ ID NO: 160825 - DNA, 21 bp, Artificial sequence
  SiRNA target sequence
atacgtcagaagaaggcctag

SEQ ID NO: 160826 - DNA, 21 bp, Artificial sequence
  SiRNA target sequence
tacgtcagaagaaggcctagg

SEQ ID NO: 160827 - DNA, 21 bp, Artificial sequence
  SiRNA target sequence
acgtcagaagaaggcctaggg

SEQ ID NO: 160828 - DNA, 21 bp, Artificial sequence
  SiRNA target sequence
cgtcagaagaaggcctagggt

SEQ ID NO: 160829 - DNA, 21 bp, Artificial sequence
  SiRNA target sequence
gtcagaagaaggcctagggtg

SEQ ID NO: 160830 - DNA, 21 bp, Artificial sequence
  SiRNA target sequence
tcagaagaaggcctagggtga

SEQ ID NO: 160831 - DNA, 21 bp, Artificial sequence
  SiRNA target sequence
cagaagaaggcctagggtgag

SEQ ID NO: 160832 - DNA, 21 bp, Artificial sequence
  SiRNA target sequence
agaagaaggcctagggtgaga

SEQ ID NO: 160833 - DNA, 21 bp, Artificial sequence
  SiRNA target sequence
gaagaaggcctagggtgagaa

SEQ ID NO: 160834 - DNA, 21 bp, Artificial sequence
  SiRNA target sequence
aagaaggcctagggtgagaat

SEQ ID NO: 160835 - DNA, 21 bp, Artificial sequence
  SiRNA target sequence
agaaggcctagggtgagaatg

SEQ ID NO: 160836 - DNA, 21 bp, Artificial sequence
  SiRNA target sequence
gaaggcctagggtgagaatgt

SEQ ID NO: 160837 - DNA, 21 bp, Artificial sequence
  SiRNA target sequence
aaggcctagggtgagaatgtt

SEQ ID NO: 160838 - DNA, 21 bp, Artificial sequence
  SiRNA target sequence
aggcctagggtgagaatgtta

SEQ ID NO: 160839 - DNA, 21 bp, Artificial sequence
  SiRNA target sequence
ggcctagggtgagaatgttac

SEQ ID NO: 160840 - DNA, 21 bp, Artificial sequence
  SiRNA target sequence
gcctagggtgagaatgttacc

SEQ ID NO: 160841 - DNA, 21 bp, Artificial sequence
  SiRNA target sequence
cctagggtgagaatgttacca

SEQ ID NO: 160842 - DNA, 21 bp, Artificial sequence
  SiRNA target sequence
ctagggtgagaatgttaccac

SEQ ID NO: 160843 - DNA, 21 bp, Artificial sequence
  SiRNA target sequence
tagggtgagaatgttaccact

SEQ ID NO: 160844 - DNA, 21 bp, Artificial sequence
  SiRNA target sequence
agggtgagaatgttaccactt

SEQ ID NO: 160845 - DNA, 21 bp, Artificial sequence
  SiRNA target sequence
gggtgagaatgttaccacttt

SEQ ID NO: 160846 - DNA, 21 bp, Artificial sequence
  SiRNA target sequence
ggtgagaatgttaccactttt

SEQ ID NO: 160847 - DNA, 21 bp, Artificial sequence
  SiRNA target sequence
gtgagaatgttaccacttttt

SEQ ID NO: 160848 - DNA, 21 bp, Artificial sequence
  SiRNA target sequence
tgagaatgttaccacttttta

SEQ ID NO: 160849 - DNA, 21 bp, Artificial sequence
  SiRNA target sequence
gagaatgttaccactttttaa

SEQ ID NO: 160850 - DNA, 21 bp, Artificial sequence
  SiRNA target sequence
agaatgttaccactttttaat

SEQ ID NO: 160851 - DNA, 21 bp, Artificial sequence
  SiRNA target sequence
gaatgttaccactttttaatg

SEQ ID NO: 160852 - DNA, 21 bp, Artificial sequence
  SiRNA target sequence
aatgttaccactttttaatgg

SEQ ID NO: 160853 - DNA, 21 bp, Artificial sequence
  SiRNA target sequence
atgttaccactttttaatggt

SEQ ID NO: 160854 - DNA, 21 bp, Artificial sequence
  SiRNA target sequence
tgttaccactttttaatggtg

SEQ ID NO: 160855 - DNA, 21 bp, Artificial sequence
  SiRNA target sequence
gttaccactttttaatggtgg

SEQ ID NO: 160856 - DNA, 21 bp, Artificial sequence
  SiRNA target sequence
ttaccactttttaatggtggt

SEQ ID NO: 160857 - DNA, 21 bp, Artificial sequence
  SiRNA target sequence
taccactttttaatggtggtg

SEQ ID NO: 160858 - DNA, 21 bp, Artificial sequence
  SiRNA target sequence
accactttttaatggtggtgg

SEQ ID NO: 160859 - DNA, 21 bp, Artificial sequence
  SiRNA target sequence
ccactttttaatggtggtgga

SEQ ID NO: 160860 - DNA, 21 bp, Artificial sequence
  SiRNA target sequence
cactttttaatggtggtggac

SEQ ID NO: 160861 - DNA, 21 bp, Artificial sequence
  SiRNA target sequence
actttttaatggtggtggaca

SEQ ID NO: 160862 - DNA, 21 bp, Artificial sequence
  SiRNA target sequence
ctttttaatggtggtggacaa

SEQ ID NO: 160863 - DNA, 21 bp, Artificial sequence
  SiRNA target sequence
tttttaatggtggtggacaag

SEQ ID NO: 160864 - DNA, 21 bp, Artificial sequence
  SiRNA target sequence
ttttaatggtggtggacaaga

SEQ ID NO: 160865 - DNA, 21 bp, Artificial sequence
  SiRNA target sequence
tttaatggtggtggacaagaa

SEQ ID NO: 160866 - DNA, 21 bp, Artificial sequence
  SiRNA target sequence
ttaatggtggtggacaagaaa

SEQ ID NO: 160867 - DNA, 21 bp, Artificial sequence
  SiRNA target sequence
taatggtggtggacaagaaag

SEQ ID NO: 160868 - DNA, 21 bp, Artificial sequence
  SiRNA target sequence
aatggtggtggacaagaaaga

SEQ ID NO: 160869 - DNA, 21 bp, Artificial sequence
  SiRNA target sequence
atggtggtggacaagaaagag

SEQ ID NO: 160870 - DNA, 21 bp, Artificial sequence
  SiRNA target sequence
tggtggtggacaagaaagagg

SEQ ID NO: 160871 - DNA, 21 bp, Artificial sequence
  SiRNA target sequence
ggtggtggacaagaaagagga

SEQ ID NO: 160872 - DNA, 21 bp, Artificial sequence
  SiRNA target sequence
gtggtggacaagaaagaggat

SEQ ID NO: 160873 - DNA, 21 bp, Artificial sequence
  SiRNA target sequence
tggtggacaagaaagaggatt

SEQ ID NO: 160874 - DNA, 21 bp, Artificial sequence
  SiRNA target sequence
ggtggacaagaaagaggatta

SEQ ID NO: 160875 - DNA, 21 bp, Artificial sequence
  SiRNA target sequence
gtggacaagaaagaggattaa

SEQ ID NO: 160876 - DNA, 21 bp, Artificial sequence
  SiRNA target sequence
tggacaagaaagaggattaag

SEQ ID NO: 160877 - DNA, 21 bp, Artificial sequence
  SiRNA target sequence
ggacaagaaagaggattaaga

SEQ ID NO: 160878 - DNA, 21 bp, Artificial sequence
  SiRNA target sequence
gacaagaaagaggattaagaa

SEQ ID NO: 160879 - DNA, 21 bp, Artificial sequence
  SiRNA target sequence
acaagaaagaggattaagaag

SEQ ID NO: 160880 - DNA, 21 bp, Artificial sequence
  SiRNA target sequence
caagaaagaggattaagaagt

SEQ ID NO: 160881 - DNA, 21 bp, Artificial sequence
  SiRNA target sequence
aagaaagaggattaagaagtg

SEQ ID NO: 160882 - DNA, 21 bp, Artificial sequence
  SiRNA target sequence
agaaagaggattaagaagtgg

SEQ ID NO: 160883 - DNA, 21 bp, Artificial sequence
  SiRNA target sequence
gaaagaggattaagaagtggg

SEQ ID NO: 160884 - DNA, 21 bp, Artificial sequence
  SiRNA target sequence
aaagaggattaagaagtggga

SEQ ID NO: 160885 - DNA, 21 bp, Artificial sequence
  SiRNA target sequence
aagaggattaagaagtgggac

SEQ ID NO: 160886 - DNA, 21 bp, Artificial sequence
  SiRNA target sequence
agaggattaagaagtgggaca

SEQ ID NO: 160887 - DNA, 21 bp, Artificial sequence
  SiRNA target sequence
gaggattaagaagtgggacaa

SEQ ID NO: 160888 - DNA, 21 bp, Artificial sequence
  SiRNA target sequence
aggattaagaagtgggacaac

SEQ ID NO: 160889 - DNA, 21 bp, Artificial sequence
  SiRNA target sequence
ggattaagaagtgggacaact

SEQ ID NO: 160890 - DNA, 21 bp, Artificial sequence
  SiRNA target sequence
gattaagaagtgggacaactt

SEQ ID NO: 160891 - DNA, 21 bp, Artificial sequence
  SiRNA target sequence
attaagaagtgggacaacttc

SEQ ID NO: 160892 - DNA, 21 bp, Artificial sequence
  SiRNA target sequence
ttaagaagtgggacaacttct

SEQ ID NO: 160893 - DNA, 21 bp, Artificial sequence
  SiRNA target sequence
taagaagtgggacaacttctc

SEQ ID NO: 160894 - DNA, 21 bp, Artificial sequence
  SiRNA target sequence
aagaagtgggacaacttctcc

SEQ ID NO: 160895 - DNA, 21 bp, Artificial sequence
  SiRNA target sequence
agaagtgggacaacttctcca

SEQ ID NO: 160896 - DNA, 21 bp, Artificial sequence
  SiRNA target sequence
gaagtgggacaacttctccac

SEQ ID NO: 160897 - DNA, 21 bp, Artificial sequence
  SiRNA target sequence
aagtgggacaacttctccacc

SEQ ID NO: 160898 - DNA, 21 bp, Artificial sequence
  SiRNA target sequence
agtgggacaacttctccacct

SEQ ID NO: 160899 - DNA, 21 bp, Artificial sequence
  SiRNA target sequence
gtgggacaacttctccacctt

SEQ ID NO: 160900 - DNA, 21 bp, Artificial sequence
  SiRNA target sequence
tgggacaacttctccaccttt

SEQ ID NO: 160901 - DNA, 21 bp, Artificial sequence
  SiRNA target sequence
gggacaacttctccaccttta

SEQ ID NO: 160902 - DNA, 21 bp, Artificial sequence
  SiRNA target sequence
ggacaacttctccacctttag

SEQ ID NO: 160903 - DNA, 21 bp, Artificial sequence
  SiRNA target sequence
gacaacttctccacctttagt

SEQ ID NO: 160904 - DNA, 21 bp, Artificial sequence
  SiRNA target sequence
acaacttctccacctttagtt

SEQ ID NO: 160905 - DNA, 21 bp, Artificial sequence
  SiRNA target sequence
caacttctccacctttagttg

SEQ ID NO: 160906 - DNA, 21 bp, Artificial sequence
  SiRNA target sequence
aacttctccacctttagttgt

SEQ ID NO: 160907 - DNA, 21 bp, Artificial sequence
  SiRNA target sequence
acttctccacctttagttgtt

SEQ ID NO: 160908 - DNA, 21 bp, Artificial sequence
  SiRNA target sequence
cttctccacctttagttgttg

SEQ ID NO: 160909 - DNA, 21 bp, Artificial sequence
  SiRNA target sequence
ttctccacctttagttgttgg

SEQ ID NO: 160910 - DNA, 21 bp, Artificial sequence
  SiRNA target sequence
tctccacctttagttgttgga

SEQ ID NO: 160911 - DNA, 21 bp, Artificial sequence
  SiRNA target sequence
ctccacctttagttgttggat

SEQ ID NO: 160912 - DNA, 21 bp, Artificial sequence
  SiRNA target sequence
tccacctttagttgttggatt

SEQ ID NO: 160913 - DNA, 21 bp, Artificial sequence
  SiRNA target sequence
ccacctttagttgttggatta

SEQ ID NO: 160914 - DNA, 21 bp, Artificial sequence
  SiRNA target sequence
cacctttagttgttggattag

SEQ ID NO: 160915 - DNA, 21 bp, Artificial sequence
  SiRNA target sequence
acctttagttgttggattagg

SEQ ID NO: 160916 - DNA, 21 bp, Artificial sequence
  SiRNA target sequence
cctttagttgttggattaggc

SEQ ID NO: 160917 - DNA, 21 bp, Artificial sequence
  SiRNA target sequence
ctttagttgttggattaggca

SEQ ID NO: 160918 - DNA, 21 bp, Artificial sequence
  SiRNA target sequence
tttagttgttggattaggcaa

SEQ ID NO: 160919 - DNA, 21 bp, Artificial sequence
  SiRNA target sequence
ttagttgttggattaggcaaa

SEQ ID NO: 160920 - DNA, 21 bp, Artificial sequence
  SiRNA target sequence
tagttgttggattaggcaaag

SEQ ID NO: 160921 - DNA, 21 bp, Artificial sequence
  SiRNA target sequence
agttgttggattaggcaaagc

SEQ ID NO: 160922 - DNA, 21 bp, Artificial sequence
  SiRNA target sequence
gttgttggattaggcaaagct

SEQ ID NO: 160923 - DNA, 21 bp, Artificial sequence
  SiRNA target sequence
ttgttggattaggcaaagctg

SEQ ID NO: 160924 - DNA, 21 bp, Artificial sequence
  SiRNA target sequence
tgttggattaggcaaagctgc

SEQ ID NO: 160925 - DNA, 21 bp, Artificial sequence
  SiRNA target sequence
gttggattaggcaaagctgct

SEQ ID NO: 160926 - DNA, 21 bp, Artificial sequence
  SiRNA target sequence
ttggattaggcaaagctgctg

SEQ ID NO: 160927 - DNA, 21 bp, Artificial sequence
  SiRNA target sequence
tggattaggcaaagctgctga

SEQ ID NO: 160928 - DNA, 21 bp, Artificial sequence
  SiRNA target sequence
ggattaggcaaagctgctgag

SEQ ID NO: 160929 - DNA, 21 bp, Artificial sequence
  SiRNA target sequence
gattaggcaaagctgctgaga

SEQ ID NO: 160930 - DNA, 21 bp, Artificial sequence
  SiRNA target sequence
attaggcaaagctgctgagat

SEQ ID NO: 160931 - DNA, 21 bp, Artificial sequence
  SiRNA target sequence
ttaggcaaagctgctgagata

SEQ ID NO: 160932 - DNA, 21 bp, Artificial sequence
  SiRNA target sequence
taggcaaagctgctgagatat

SEQ ID NO: 160933 - DNA, 21 bp, Artificial sequence
  SiRNA target sequence
aggcaaagctgctgagatatg

SEQ ID NO: 160934 - DNA, 21 bp, Artificial sequence
  SiRNA target sequence
ggcaaagctgctgagatatgc

SEQ ID NO: 160935 - DNA, 21 bp, Artificial sequence
  SiRNA target sequence
gcaaagctgctgagatatgct

SEQ ID NO: 160936 - DNA, 21 bp, Artificial sequence
  SiRNA target sequence
caaagctgctgagatatgctc

SEQ ID NO: 160937 - DNA, 21 bp, Artificial sequence
  SiRNA target sequence
aaagctgctgagatatgctct

SEQ ID NO: 160938 - DNA, 21 bp, Artificial sequence
  SiRNA target sequence
aagctgctgagatatgctctc

SEQ ID NO: 160939 - DNA, 21 bp, Artificial sequence
  SiRNA target sequence
agctgctgagatatgctctca

SEQ ID NO: 160940 - DNA, 21 bp, Artificial sequence
  SiRNA target sequence
gctgctgagatatgctctcag

SEQ ID NO: 160941 - DNA, 21 bp, Artificial sequence
  SiRNA target sequence
ctgctgagatatgctctcagg

SEQ ID NO: 160942 - DNA, 21 bp, Artificial sequence
  SiRNA target sequence
tgctgagatatgctctcagga

SEQ ID NO: 160943 - DNA, 21 bp, Artificial sequence
  SiRNA target sequence
gctgagatatgctctcaggag

SEQ ID NO: 160944 - DNA, 21 bp, Artificial sequence
  SiRNA target sequence
ctgagatatgctctcaggaga

SEQ ID NO: 160945 - DNA, 21 bp, Artificial sequence
  SiRNA target sequence
tgagatatgctctcaggagat

SEQ ID NO: 160946 - DNA, 21 bp, Artificial sequence
  SiRNA target sequence
gagatatgctctcaggagatg

SEQ ID NO: 160947 - DNA, 21 bp, Artificial sequence
  SiRNA target sequence
agatatgctctcaggagatgc

SEQ ID NO: 160948 - DNA, 21 bp, Artificial sequence
  SiRNA target sequence
gatatgctctcaggagatgcg

SEQ ID NO: 160949 - DNA, 21 bp, Artificial sequence
  SiRNA target sequence
atatgctctcaggagatgcgt

SEQ ID NO: 160950 - DNA, 21 bp, Artificial sequence
  SiRNA target sequence
tatgctctcaggagatgcgta

SEQ ID NO: 160951 - DNA, 21 bp, Artificial sequence
  SiRNA target sequence
atgctctcaggagatgcgtaa

SEQ ID NO: 160952 - DNA, 21 bp, Artificial sequence
  SiRNA target sequence
tgctctcaggagatgcgtaag

SEQ ID NO: 160953 - DNA, 21 bp, Artificial sequence
  SiRNA target sequence
gctctcaggagatgcgtaagg

SEQ ID NO: 160954 - DNA, 21 bp, Artificial sequence
  SiRNA target sequence
ctctcaggagatgcgtaagga

SEQ ID NO: 160955 - DNA, 21 bp, Artificial sequence
  SiRNA target sequence
tctcaggagatgcgtaaggac

SEQ ID NO: 160956 - DNA, 21 bp, Artificial sequence
  SiRNA target sequence
ctcaggagatgcgtaaggact

SEQ ID NO: 160957 - DNA, 21 bp, Artificial sequence
  SiRNA target sequence
tcaggagatgcgtaaggacta

SEQ ID NO: 160958 - DNA, 21 bp, Artificial sequence
  SiRNA target sequence
caggagatgcgtaaggactat

SEQ ID NO: 160959 - DNA, 21 bp, Artificial sequence
  SiRNA target sequence
aggagatgcgtaaggactatg

SEQ ID NO: 160960 - DNA, 21 bp, Artificial sequence
  SiRNA target sequence
ggagatgcgtaaggactatga

SEQ ID NO: 160961 - DNA, 21 bp, Artificial sequence
  SiRNA target sequence
gagatgcgtaaggactatgaa

SEQ ID NO: 160962 - DNA, 21 bp, Artificial sequence
  SiRNA target sequence
agatgcgtaaggactatgaat

SEQ ID NO: 160963 - DNA, 21 bp, Artificial sequence
  SiRNA target sequence
gatgcgtaaggactatgaata

SEQ ID NO: 160964 - DNA, 21 bp, Artificial sequence
  SiRNA target sequence
atgcgtaaggactatgaatat

SEQ ID NO: 160965 - DNA, 21 bp, Artificial sequence
  SiRNA target sequence
tgcgtaaggactatgaatata

SEQ ID NO: 160966 - DNA, 21 bp, Artificial sequence
  SiRNA target sequence
gcgtaaggactatgaatatat

SEQ ID NO: 160967 - DNA, 21 bp, Artificial sequence
  SiRNA target sequence
cgtaaggactatgaatatata

SEQ ID NO: 160968 - DNA, 21 bp, Artificial sequence
  SiRNA target sequence
gtaaggactatgaatatatac

SEQ ID NO: 160969 - DNA, 21 bp, Artificial sequence
  SiRNA target sequence
taaggactatgaatatataca

SEQ ID NO: 160970 - DNA, 21 bp, Artificial sequence
  SiRNA target sequence
aaggactatgaatatatacaa

SEQ ID NO: 160971 - DNA, 21 bp, Artificial sequence
  SiRNA target sequence
aggactatgaatatatacaaa

SEQ ID NO: 160972 - DNA, 21 bp, Artificial sequence
  SiRNA target sequence
ggactatgaatatatacaaaa

SEQ ID NO: 160973 - DNA, 21 bp, Artificial sequence
  SiRNA target sequence
gactatgaatatatacaaaaa

SEQ ID NO: 160974 - DNA, 21 bp, Artificial sequence
  SiRNA target sequence
actatgaatatatacaaaaat

SEQ ID NO: 160975 - DNA, 21 bp, Artificial sequence
  SiRNA target sequence
ctatgaatatatacaaaaatt

SEQ ID NO: 160976 - DNA, 21 bp, Artificial sequence
  SiRNA target sequence
tatgaatatatacaaaaatta

SEQ ID NO: 160977 - DNA, 21 bp, Artificial sequence
  SiRNA target sequence
atgaatatatacaaaaattat

SEQ ID NO: 160978 - DNA, 21 bp, Artificial sequence
  SiRNA target sequence
tgaatatatacaaaaattatc

SEQ ID NO: 160979 - DNA, 21 bp, Artificial sequence
  SiRNA target sequence
gaatatatacaaaaattatcg

SEQ ID NO: 160980 - DNA, 21 bp, Artificial sequence
  SiRNA target sequence
aatatatacaaaaattatcgg

SEQ ID NO: 160981 - DNA, 21 bp, Artificial sequence
  SiRNA target sequence
atatatacaaaaattatcgga

SEQ ID NO: 160982 - DNA, 21 bp, Artificial sequence
  SiRNA target sequence
tatatacaaaaattatcggat

SEQ ID NO: 160983 - DNA, 21 bp, Artificial sequence
  SiRNA target sequence
atatacaaaaattatcggata

SEQ ID NO: 160984 - DNA, 21 bp, Artificial sequence
  SiRNA target sequence
tatacaaaaattatcggataa

SEQ ID NO: 160985 - DNA, 21 bp, Artificial sequence
  SiRNA target sequence
atacaaaaattatcggataaa

SEQ ID NO: 160986 - DNA, 21 bp, Artificial sequence
  SiRNA target sequence
tacaaaaattatcggataaac

SEQ ID NO: 160987 - DNA, 21 bp, Artificial sequence
  SiRNA target sequence
acaaaaattatcggataaact

SEQ ID NO: 160988 - DNA, 21 bp, Artificial sequence
  SiRNA target sequence
caaaaattatcggataaacta

SEQ ID NO: 160989 - DNA, 21 bp, Artificial sequence
  SiRNA target sequence
aaaaattatcggataaactaa

SEQ ID NO: 160990 - DNA, 21 bp, Artificial sequence
  SiRNA target sequence
aaaattatcggataaactaaa

SEQ ID NO: 160991 - DNA, 21 bp, Artificial sequence
  SiRNA target sequence
aaattatcggataaactaaaa

SEQ ID NO: 160992 - DNA, 21 bp, Artificial sequence
  SiRNA target sequence
aattatcggataaactaaaaa

SEQ ID NO: 160993 - DNA, 21 bp, Artificial sequence
  SiRNA target sequence
attatcggataaactaaaaaa

SEQ ID NO: 160994 - DNA, 21 bp, Artificial sequence
  SiRNA target sequence
ttatcggataaactaaaaaat

SEQ ID NO: 160995 - DNA, 21 bp, Artificial sequence
  SiRNA target sequence
tatcggataaactaaaaaatc

SEQ ID NO: 160996 - DNA, 21 bp, Artificial sequence
  SiRNA target sequence
atcggataaactaaaaaatcg

SEQ ID NO: 160997 - DNA, 21 bp, Artificial sequence
  SiRNA target sequence
tcggataaactaaaaaatcgc

SEQ ID NO: 160998 - DNA, 21 bp, Artificial sequence
  SiRNA target sequence
cggataaactaaaaaatcgca

SEQ ID NO: 160999 - DNA, 21 bp, Artificial sequence
  SiRNA target sequence
ggataaactaaaaaatcgcat

SEQ ID NO: 161000 - DNA, 21 bp, Artificial sequence
  SiRNA target sequence
gataaactaaaaaatcgcatc

SEQ ID NO: 161001 - DNA, 21 bp, Artificial sequence
  SiRNA target sequence
ataaactaaaaaatcgcatca

SEQ ID NO: 161002 - DNA, 21 bp, Artificial sequence
  SiRNA target sequence
taaactaaaaaatcgcatcaa

SEQ ID NO: 161003 - DNA, 21 bp, Artificial sequence
  SiRNA target sequence
aaactaaaaaatcgcatcaaa

SEQ ID NO: 161004 - DNA, 21 bp, Artificial sequence
  SiRNA target sequence
aactaaaaaatcgcatcaaaa

SEQ ID NO: 161005 - DNA, 21 bp, Artificial sequence
  SiRNA target sequence
actaaaaaatcgcatcaaaac

SEQ ID NO: 161006 - DNA, 21 bp, Artificial sequence
  SiRNA target sequence
ctaaaaaatcgcatcaaaacg

SEQ ID NO: 161007 - DNA, 21 bp, Artificial sequence
  SiRNA target sequence
taaaaaatcgcatcaaaacga

SEQ ID NO: 161008 - DNA, 21 bp, Artificial sequence
  SiRNA target sequence
aaaaaatcgcatcaaaacgaa

SEQ ID NO: 161009 - DNA, 21 bp, Artificial sequence
  SiRNA target sequence
aaaaatcgcatcaaaacgaat

SEQ ID NO: 161010 - DNA, 21 bp, Artificial sequence
  SiRNA target sequence
aaaatcgcatcaaaacgaatg

SEQ ID NO: 161011 - DNA, 21 bp, Artificial sequence
  SiRNA target sequence
aaatcgcatcaaaacgaatgt

SEQ ID NO: 161012 - DNA, 21 bp, Artificial sequence
  SiRNA target sequence
aatcgcatcaaaacgaatgta

SEQ ID NO: 161013 - DNA, 21 bp, Artificial sequence
  SiRNA target sequence
atcgcatcaaaacgaatgtag

SEQ ID NO: 161014 - DNA, 21 bp, Artificial sequence
  SiRNA target sequence
tcgcatcaaaacgaatgtaga

SEQ ID NO: 161015 - DNA, 21 bp, Artificial sequence
  SiRNA target sequence
cgcatcaaaacgaatgtagaa

SEQ ID NO: 161016 - DNA, 21 bp, Artificial sequence
  SiRNA target sequence
gcatcaaaacgaatgtagaaa

SEQ ID NO: 161017 - DNA, 21 bp, Artificial sequence
  SiRNA target sequence
catcaaaacgaatgtagaaaa

SEQ ID NO: 161018 - DNA, 21 bp, Artificial sequence
  SiRNA target sequence
atcaaaacgaatgtagaaaat

SEQ ID NO: 161019 - DNA, 21 bp, Artificial sequence
  SiRNA target sequence
tcaaaacgaatgtagaaaatg

SEQ ID NO: 161020 - DNA, 21 bp, Artificial sequence
  SiRNA target sequence
caaaacgaatgtagaaaatgt

SEQ ID NO: 161021 - DNA, 21 bp, Artificial sequence
  SiRNA target sequence
aaaacgaatgtagaaaatgtt

SEQ ID NO: 161022 - DNA, 21 bp, Artificial sequence
  SiRNA target sequence
aaacgaatgtagaaaatgttg

SEQ ID NO: 161023 - DNA, 21 bp, Artificial sequence
  SiRNA target sequence
aacgaatgtagaaaatgttgt

SEQ ID NO: 161024 - DNA, 21 bp, Artificial sequence
  SiRNA target sequence
acgaatgtagaaaatgttgtt

SEQ ID NO: 161025 - DNA, 21 bp, Artificial sequence
  SiRNA target sequence
cgaatgtagaaaatgttgtta

SEQ ID NO: 161026 - DNA, 21 bp, Artificial sequence
  SiRNA target sequence
gaatgtagaaaatgttgttat

SEQ ID NO: 161027 - DNA, 21 bp, Artificial sequence
  SiRNA target sequence
aatgtagaaaatgttgttatt

SEQ ID NO: 161028 - DNA, 21 bp, Artificial sequence
  SiRNA target sequence
atgtagaaaatgttgttatta

SEQ ID NO: 161029 - DNA, 21 bp, Artificial sequence
  SiRNA target sequence
tgtagaaaatgttgttattaa

SEQ ID NO: 161030 - DNA, 21 bp, Artificial sequence
  SiRNA target sequence
gtagaaaatgttgttattaac

SEQ ID NO: 161031 - DNA, 21 bp, Artificial sequence
  SiRNA target sequence
tagaaaatgttgttattaacg

SEQ ID NO: 161032 - DNA, 21 bp, Artificial sequence
  SiRNA target sequence
agaaaatgttgttattaacgg

SEQ ID NO: 161033 - DNA, 21 bp, Artificial sequence
  SiRNA target sequence
gaaaatgttgttattaacggc

SEQ ID NO: 161034 - DNA, 21 bp, Artificial sequence
  SiRNA target sequence
aaaatgttgttattaacggcg

SEQ ID NO: 161035 - DNA, 21 bp, Artificial sequence
  SiRNA target sequence
aaatgttgttattaacggcga

SEQ ID NO: 161036 - DNA, 21 bp, Artificial sequence
  SiRNA target sequence
aatgttgttattaacggcgat

SEQ ID NO: 161037 - DNA, 21 bp, Artificial sequence
  SiRNA target sequence
atgttgttattaacggcgatg

SEQ ID NO: 161038 - DNA, 21 bp, Artificial sequence
  SiRNA target sequence
tgttgttattaacggcgatga

SEQ ID NO: 161039 - DNA, 21 bp, Artificial sequence
  SiRNA target sequence
gttgttattaacggcgatgat

SEQ ID NO: 161040 - DNA, 21 bp, Artificial sequence
  SiRNA target sequence
ttgttattaacggcgatgatt

SEQ ID NO: 161041 - DNA, 21 bp, Artificial sequence
  SiRNA target sequence
tgttattaacggcgatgattc

SEQ ID NO: 161042 - DNA, 21 bp, Artificial sequence
  SiRNA target sequence
gttattaacggcgatgattct

SEQ ID NO: 161043 - DNA, 21 bp, Artificial sequence
  SiRNA target sequence
ttattaacggcgatgattcta

SEQ ID NO: 161044 - DNA, 21 bp, Artificial sequence
  SiRNA target sequence
tattaacggcgatgattctaa

SEQ ID NO: 161045 - DNA, 21 bp, Artificial sequence
  SiRNA target sequence
attaacggcgatgattctaag

SEQ ID NO: 161046 - DNA, 21 bp, Artificial sequence
  SiRNA target sequence
ttaacggcgatgattctaaga

SEQ ID NO: 161047 - DNA, 21 bp, Artificial sequence
  SiRNA target sequence
taacggcgatgattctaagac

SEQ ID NO: 161048 - DNA, 21 bp, Artificial sequence
  SiRNA target sequence
aacggcgatgattctaagact

SEQ ID NO: 161049 - DNA, 21 bp, Artificial sequence
  SiRNA target sequence
acggcgatgattctaagactt

SEQ ID NO: 161050 - DNA, 21 bp, Artificial sequence
  SiRNA target sequence
cggcgatgattctaagacttt

SEQ ID NO: 161051 - DNA, 21 bp, Artificial sequence
  SiRNA target sequence
ggcgatgattctaagactttt

SEQ ID NO: 161052 - DNA, 21 bp, Artificial sequence
  SiRNA target sequence
gcgatgattctaagacttttc

SEQ ID NO: 161053 - DNA, 21 bp, Artificial sequence
  SiRNA target sequence
cgatgattctaagacttttcc

SEQ ID NO: 161054 - DNA, 21 bp, Artificial sequence
  SiRNA target sequence
gatgattctaagacttttcct

SEQ ID NO: 161055 - DNA, 21 bp, Artificial sequence
  SiRNA target sequence
atgattctaagacttttcctg

SEQ ID NO: 161056 - DNA, 21 bp, Artificial sequence
  SiRNA target sequence
tgattctaagacttttcctgg

SEQ ID NO: 161057 - DNA, 21 bp, Artificial sequence
  SiRNA target sequence
gattctaagacttttcctggc

SEQ ID NO: 161058 - DNA, 21 bp, Artificial sequence
  SiRNA target sequence
attctaagacttttcctggct

SEQ ID NO: 161059 - DNA, 21 bp, Artificial sequence
  SiRNA target sequence
ttctaagacttttcctggctg

SEQ ID NO: 161060 - DNA, 21 bp, Artificial sequence
  SiRNA target sequence
tctaagacttttcctggctgt

SEQ ID NO: 161061 - DNA, 21 bp, Artificial sequence
  SiRNA target sequence
ctaagacttttcctggctgtc

SEQ ID NO: 161062 - DNA, 21 bp, Artificial sequence
  SiRNA target sequence
taagacttttcctggctgtct

SEQ ID NO: 161063 - DNA, 21 bp, Artificial sequence
  SiRNA target sequence
aagacttttcctggctgtctc

SEQ ID NO: 161064 - DNA, 21 bp, Artificial sequence
  SiRNA target sequence
agacttttcctggctgtctca

SEQ ID NO: 161065 - DNA, 21 bp, Artificial sequence
  SiRNA target sequence
gacttttcctggctgtctcaa

SEQ ID NO: 161066 - DNA, 21 bp, Artificial sequence
  SiRNA target sequence
acttttcctggctgtctcaat

SEQ ID NO: 161067 - DNA, 21 bp, Artificial sequence
  SiRNA target sequence
cttttcctggctgtctcaata

SEQ ID NO: 161068 - DNA, 21 bp, Artificial sequence
  SiRNA target sequence
ttttcctggctgtctcaatat

SEQ ID NO: 161069 - DNA, 21 bp, Artificial sequence
  SiRNA target sequence
tttcctggctgtctcaatatt

SEQ ID NO: 161070 - DNA, 21 bp, Artificial sequence
  SiRNA target sequence
ttcctggctgtctcaatattt

SEQ ID NO: 161071 - DNA, 21 bp, Artificial sequence
  SiRNA target sequence
tcctggctgtctcaatatttc

SEQ ID NO: 161072 - DNA, 21 bp, Artificial sequence
  SiRNA target sequence
cctggctgtctcaatatttct

SEQ ID NO: 161073 - DNA, 21 bp, Artificial sequence
  SiRNA target sequence
ctggctgtctcaatatttctt

SEQ ID NO: 161074 - DNA, 21 bp, Artificial sequence
  SiRNA target sequence
tggctgtctcaatatttcttt

SEQ ID NO: 161075 - DNA, 21 bp, Artificial sequence
  SiRNA target sequence
ggctgtctcaatatttctttt

SEQ ID NO: 161076 - DNA, 21 bp, Artificial sequence
  SiRNA target sequence
gctgtctcaatatttcttttc

SEQ ID NO: 161077 - DNA, 21 bp, Artificial sequence
  SiRNA target sequence
ctgtctcaatatttcttttcc

SEQ ID NO: 161078 - DNA, 21 bp, Artificial sequence
  SiRNA target sequence
tgtctcaatatttcttttcca

SEQ ID NO: 161079 - DNA, 21 bp, Artificial sequence
  SiRNA target sequence
gtctcaatatttcttttccat

SEQ ID NO: 161080 - DNA, 21 bp, Artificial sequence
  SiRNA target sequence
tctcaatatttcttttccata

SEQ ID NO: 161081 - DNA, 21 bp, Artificial sequence
  SiRNA target sequence
ctcaatatttcttttccatat

SEQ ID NO: 161082 - DNA, 21 bp, Artificial sequence
  SiRNA target sequence
tcaatatttcttttccatatg

SEQ ID NO: 161083 - DNA, 21 bp, Artificial sequence
  SiRNA target sequence
caatatttcttttccatatgt

SEQ ID NO: 161084 - DNA, 21 bp, Artificial sequence
  SiRNA target sequence
aatatttcttttccatatgta

SEQ ID NO: 161085 - DNA, 21 bp, Artificial sequence
  SiRNA target sequence
atatttcttttccatatgtag

SEQ ID NO: 161086 - DNA, 21 bp, Artificial sequence
  SiRNA target sequence
tatttcttttccatatgtaga

SEQ ID NO: 161087 - DNA, 21 bp, Artificial sequence
  SiRNA target sequence
atttcttttccatatgtagaa

SEQ ID NO: 161088 - DNA, 21 bp, Artificial sequence
  SiRNA target sequence
tttcttttccatatgtagaag

SEQ ID NO: 161089 - DNA, 21 bp, Artificial sequence
  SiRNA target sequence
ttcttttccatatgtagaagg

SEQ ID NO: 161090 - DNA, 21 bp, Artificial sequence
  SiRNA target sequence
tcttttccatatgtagaaggt

SEQ ID NO: 161091 - DNA, 21 bp, Artificial sequence
  SiRNA target sequence
cttttccatatgtagaaggtg

SEQ ID NO: 161092 - DNA, 21 bp, Artificial sequence
  SiRNA target sequence
ttttccatatgtagaaggtga

SEQ ID NO: 161093 - DNA, 21 bp, Artificial sequence
  SiRNA target sequence
tttccatatgtagaaggtgaa

SEQ ID NO: 161094 - DNA, 21 bp, Artificial sequence
  SiRNA target sequence
ttccatatgtagaaggtgaag

SEQ ID NO: 161095 - DNA, 21 bp, Artificial sequence
  SiRNA target sequence
tccatatgtagaaggtgaagg

SEQ ID NO: 161096 - DNA, 21 bp, Artificial sequence
  SiRNA target sequence
ccatatgtagaaggtgaaggg

SEQ ID NO: 161097 - DNA, 21 bp, Artificial sequence
  SiRNA target sequence
catatgtagaaggtgaagggc

SEQ ID NO: 161098 - DNA, 21 bp, Artificial sequence
  SiRNA target sequence
atatgtagaaggtgaagggct

SEQ ID NO: 161099 - DNA, 21 bp, Artificial sequence
  SiRNA target sequence
tatgtagaaggtgaagggctt

SEQ ID NO: 161100 - DNA, 21 bp, Artificial sequence
  SiRNA target sequence
atgtagaaggtgaagggctta

SEQ ID NO: 161101 - DNA, 21 bp, Artificial sequence
  SiRNA target sequence
tgtagaaggtgaagggcttat

SEQ ID NO: 161102 - DNA, 21 bp, Artificial sequence
  SiRNA target sequence
gtagaaggtgaagggcttatg

SEQ ID NO: 161103 - DNA, 21 bp, Artificial sequence
  SiRNA target sequence
tagaaggtgaagggcttatga

SEQ ID NO: 161104 - DNA, 21 bp, Artificial sequence
  SiRNA target sequence
agaaggtgaagggcttatgat

SEQ ID NO: 161105 - DNA, 21 bp, Artificial sequence
  SiRNA target sequence
gaaggtgaagggcttatgatg

SEQ ID NO: 161106 - DNA, 21 bp, Artificial sequence
  SiRNA target sequence
aaggtgaagggcttatgatga

SEQ ID NO: 161107 - DNA, 21 bp, Artificial sequence
  SiRNA target sequence
aggtgaagggcttatgatgaa

SEQ ID NO: 161108 - DNA, 21 bp, Artificial sequence
  SiRNA target sequence
ggtgaagggcttatgatgaat

SEQ ID NO: 161109 - DNA, 21 bp, Artificial sequence
  SiRNA target sequence
gtgaagggcttatgatgaata

SEQ ID NO: 161110 - DNA, 21 bp, Artificial sequence
  SiRNA target sequence
tgaagggcttatgatgaatat

SEQ ID NO: 161111 - DNA, 21 bp, Artificial sequence
  SiRNA target sequence
gaagggcttatgatgaatatt

SEQ ID NO: 161112 - DNA, 21 bp, Artificial sequence
  SiRNA target sequence
aagggcttatgatgaatatta

SEQ ID NO: 161113 - DNA, 21 bp, Artificial sequence
  SiRNA target sequence
agggcttatgatgaatattaa

SEQ ID NO: 161114 - DNA, 21 bp, Artificial sequence
  SiRNA target sequence
gggcttatgatgaatattaag

SEQ ID NO: 161115 - DNA, 21 bp, Artificial sequence
  SiRNA target sequence
ggcttatgatgaatattaagg

SEQ ID NO: 161116 - DNA, 21 bp, Artificial sequence
  SiRNA target sequence
gcttatgatgaatattaagga

SEQ ID NO: 161117 - DNA, 21 bp, Artificial sequence
  SiRNA target sequence
cttatgatgaatattaaggat

SEQ ID NO: 161118 - DNA, 21 bp, Artificial sequence
  SiRNA target sequence
ttatgatgaatattaaggata

SEQ ID NO: 161119 - DNA, 21 bp, Artificial sequence
  SiRNA target sequence
tatgatgaatattaaggatat

SEQ ID NO: 161120 - DNA, 21 bp, Artificial sequence
  SiRNA target sequence
atgatgaatattaaggatatt

SEQ ID NO: 161121 - DNA, 21 bp, Artificial sequence
  SiRNA target sequence
tgatgaatattaaggatattg

SEQ ID NO: 161122 - DNA, 21 bp, Artificial sequence
  SiRNA target sequence
gatgaatattaaggatattgc

SEQ ID NO: 161123 - DNA, 21 bp, Artificial sequence
  SiRNA target sequence
atgaatattaaggatattgct

SEQ ID NO: 161124 - DNA, 21 bp, Artificial sequence
  SiRNA target sequence
tgaatattaaggatattgctg

SEQ ID NO: 161125 - DNA, 21 bp, Artificial sequence
  SiRNA target sequence
gaatattaaggatattgctgt

SEQ ID NO: 161126 - DNA, 21 bp, Artificial sequence
  SiRNA target sequence
aatattaaggatattgctgtt

SEQ ID NO: 161127 - DNA, 21 bp, Artificial sequence
  SiRNA target sequence
atattaaggatattgctgtta

SEQ ID NO: 161128 - DNA, 21 bp, Artificial sequence
  SiRNA target sequence
tattaaggatattgctgttag

SEQ ID NO: 161129 - DNA, 21 bp, Artificial sequence
  SiRNA target sequence
attaaggatattgctgttagt

SEQ ID NO: 161130 - DNA, 21 bp, Artificial sequence
  SiRNA target sequence
ttaaggatattgctgttagta

SEQ ID NO: 161131 - DNA, 21 bp, Artificial sequence
  SiRNA target sequence
taaggatattgctgttagtag

SEQ ID NO: 161132 - DNA, 21 bp, Artificial sequence
  SiRNA target sequence
aaggatattgctgttagtagt

SEQ ID NO: 161133 - DNA, 21 bp, Artificial sequence
  SiRNA target sequence
aggatattgctgttagtagtg

SEQ ID NO: 161134 - DNA, 21 bp, Artificial sequence
  SiRNA target sequence
ggatattgctgttagtagtgg

SEQ ID NO: 161135 - DNA, 21 bp, Artificial sequence
  SiRNA target sequence
gatattgctgttagtagtgga

SEQ ID NO: 161136 - DNA, 21 bp, Artificial sequence
  SiRNA target sequence
atattgctgttagtagtggaa

SEQ ID NO: 161137 - DNA, 21 bp, Artificial sequence
  SiRNA target sequence
tattgctgttagtagtggaag

SEQ ID NO: 161138 - DNA, 21 bp, Artificial sequence
  SiRNA target sequence
attgctgttagtagtggaagt

SEQ ID NO: 161139 - DNA, 21 bp, Artificial sequence
  SiRNA target sequence
ttgctgttagtagtggaagtg

SEQ ID NO: 161140 - DNA, 21 bp, Artificial sequence
  SiRNA target sequence
tgctgttagtagtggaagtgc

SEQ ID NO: 161141 - DNA, 21 bp, Artificial sequence
  SiRNA target sequence
gctgttagtagtggaagtgct

SEQ ID NO: 161142 - DNA, 21 bp, Artificial sequence
  SiRNA target sequence
ctgttagtagtggaagtgctt

SEQ ID NO: 161143 - DNA, 21 bp, Artificial sequence
  SiRNA target sequence
tgttagtagtggaagtgcttg

SEQ ID NO: 161144 - DNA, 21 bp, Artificial sequence
  SiRNA target sequence
gttagtagtggaagtgcttgc

SEQ ID NO: 161145 - DNA, 21 bp, Artificial sequence
  SiRNA target sequence
ttagtagtggaagtgcttgca

SEQ ID NO: 161146 - DNA, 21 bp, Artificial sequence
  SiRNA target sequence
tagtagtggaagtgcttgcac

SEQ ID NO: 161147 - DNA, 21 bp, Artificial sequence
  SiRNA target sequence
agtagtggaagtgcttgcact

SEQ ID NO: 161148 - DNA, 21 bp, Artificial sequence
  SiRNA target sequence
gtagtggaagtgcttgcactt

SEQ ID NO: 161149 - DNA, 21 bp, Artificial sequence
  SiRNA target sequence
tagtggaagtgcttgcacttc

SEQ ID NO: 161150 - DNA, 21 bp, Artificial sequence
  SiRNA target sequence
agtggaagtgcttgcacttca

SEQ ID NO: 161151 - DNA, 21 bp, Artificial sequence
  SiRNA target sequence
gtggaagtgcttgcacttcat

SEQ ID NO: 161152 - DNA, 21 bp, Artificial sequence
  SiRNA target sequence
tggaagtgcttgcacttcatc

SEQ ID NO: 161153 - DNA, 21 bp, Artificial sequence
  SiRNA target sequence
ggaagtgcttgcacttcatca

SEQ ID NO: 161154 - DNA, 21 bp, Artificial sequence
  SiRNA target sequence
gaagtgcttgcacttcatcat

SEQ ID NO: 161155 - DNA, 21 bp, Artificial sequence
  SiRNA target sequence
aagtgcttgcacttcatcatc

SEQ ID NO: 161156 - DNA, 21 bp, Artificial sequence
  SiRNA target sequence
agtgcttgcacttcatcatct

SEQ ID NO: 161157 - DNA, 21 bp, Artificial sequence
  SiRNA target sequence
gtgcttgcacttcatcatctt

SEQ ID NO: 161158 - DNA, 21 bp, Artificial sequence
  SiRNA target sequence
tgcttgcacttcatcatcttt

SEQ ID NO: 161159 - DNA, 21 bp, Artificial sequence
  SiRNA target sequence
gcttgcacttcatcatcttta

SEQ ID NO: 161160 - DNA, 21 bp, Artificial sequence
  SiRNA target sequence
cttgcacttcatcatctttag

SEQ ID NO: 161161 - DNA, 21 bp, Artificial sequence
  SiRNA target sequence
ttgcacttcatcatctttaga

SEQ ID NO: 161162 - DNA, 21 bp, Artificial sequence
  SiRNA target sequence
tgcacttcatcatctttagaa

SEQ ID NO: 161163 - DNA, 21 bp, Artificial sequence
  SiRNA target sequence
gcacttcatcatctttagaac

SEQ ID NO: 161164 - DNA, 21 bp, Artificial sequence
  SiRNA target sequence
cacttcatcatctttagaacc

SEQ ID NO: 161165 - DNA, 21 bp, Artificial sequence
  SiRNA target sequence
acttcatcatctttagaaccc

SEQ ID NO: 161166 - DNA, 21 bp, Artificial sequence
  SiRNA target sequence
cttcatcatctttagaaccct

SEQ ID NO: 161167 - DNA, 21 bp, Artificial sequence
  SiRNA target sequence
ttcatcatctttagaaccctc

SEQ ID NO: 161168 - DNA, 21 bp, Artificial sequence
  SiRNA target sequence
tcatcatctttagaaccctct

SEQ ID NO: 161169 - DNA, 21 bp, Artificial sequence
  SiRNA target sequence
catcatctttagaaccctctt

SEQ ID NO: 161170 - DNA, 21 bp, Artificial sequence
  SiRNA target sequence
atcatctttagaaccctctta

SEQ ID NO: 161171 - DNA, 21 bp, Artificial sequence
  SiRNA target sequence
tcatctttagaaccctcttat

SEQ ID NO: 161172 - DNA, 21 bp, Artificial sequence
  SiRNA target sequence
catctttagaaccctcttatg

SEQ ID NO: 161173 - DNA, 21 bp, Artificial sequence
  SiRNA target sequence
atctttagaaccctcttatgt

SEQ ID NO: 161174 - DNA, 21 bp, Artificial sequence
  SiRNA target sequence
tctttagaaccctcttatgtt

SEQ ID NO: 161175 - DNA, 21 bp, Artificial sequence
  SiRNA target sequence
ctttagaaccctcttatgttt

SEQ ID NO: 161176 - DNA, 21 bp, Artificial sequence
  SiRNA target sequence
tttagaaccctcttatgtttt

SEQ ID NO: 161177 - DNA, 21 bp, Artificial sequence
  SiRNA target sequence
ttagaaccctcttatgttttg

SEQ ID NO: 161178 - DNA, 21 bp, Artificial sequence
  SiRNA target sequence
tagaaccctcttatgttttgc

SEQ ID NO: 161179 - DNA, 21 bp, Artificial sequence
  SiRNA target sequence
agaaccctcttatgttttgcg

SEQ ID NO: 161180 - DNA, 21 bp, Artificial sequence
  SiRNA target sequence
gaaccctcttatgttttgcga

SEQ ID NO: 161181 - DNA, 21 bp, Artificial sequence
  SiRNA target sequence
aaccctcttatgttttgcgag

SEQ ID NO: 161182 - DNA, 21 bp, Artificial sequence
  SiRNA target sequence
accctcttatgttttgcgagc

SEQ ID NO: 161183 - DNA, 21 bp, Artificial sequence
  SiRNA target sequence
ccctcttatgttttgcgagct

SEQ ID NO: 161184 - DNA, 21 bp, Artificial sequence
  SiRNA target sequence
cctcttatgttttgcgagctt

SEQ ID NO: 161185 - DNA, 21 bp, Artificial sequence
  SiRNA target sequence
ctcttatgttttgcgagcttt

SEQ ID NO: 161186 - DNA, 21 bp, Artificial sequence
  SiRNA target sequence
tcttatgttttgcgagcttta

SEQ ID NO: 161187 - DNA, 21 bp, Artificial sequence
  SiRNA target sequence
cttatgttttgcgagctttag

SEQ ID NO: 161188 - DNA, 21 bp, Artificial sequence
  SiRNA target sequence
ttatgttttgcgagctttagg

SEQ ID NO: 161189 - DNA, 21 bp, Artificial sequence
  SiRNA target sequence
tatgttttgcgagctttaggc

SEQ ID NO: 161190 - DNA, 21 bp, Artificial sequence
  SiRNA target sequence
atgttttgcgagctttaggca

SEQ ID NO: 161191 - DNA, 21 bp, Artificial sequence
  SiRNA target sequence
tgttttgcgagctttaggcaa

SEQ ID NO: 161192 - DNA, 21 bp, Artificial sequence
  SiRNA target sequence
gttttgcgagctttaggcaaa

SEQ ID NO: 161193 - DNA, 21 bp, Artificial sequence
  SiRNA target sequence
ttttgcgagctttaggcaaaa

SEQ ID NO: 161194 - DNA, 21 bp, Artificial sequence
  SiRNA target sequence
tttgcgagctttaggcaaaaa

SEQ ID NO: 161195 - DNA, 21 bp, Artificial sequence
  SiRNA target sequence
ttgcgagctttaggcaaaaat

SEQ ID NO: 161196 - DNA, 21 bp, Artificial sequence
  SiRNA target sequence
tgcgagctttaggcaaaaatg

SEQ ID NO: 161197 - DNA, 21 bp, Artificial sequence
  SiRNA target sequence
gcgagctttaggcaaaaatga

SEQ ID NO: 161198 - DNA, 21 bp, Artificial sequence
  SiRNA target sequence
cgagctttaggcaaaaatgat

SEQ ID NO: 161199 - DNA, 21 bp, Artificial sequence
  SiRNA target sequence
gagctttaggcaaaaatgatg

SEQ ID NO: 161200 - DNA, 21 bp, Artificial sequence
  SiRNA target sequence
agctttaggcaaaaatgatga

SEQ ID NO: 161201 - DNA, 21 bp, Artificial sequence
  SiRNA target sequence
gctttaggcaaaaatgatgat

SEQ ID NO: 161202 - DNA, 21 bp, Artificial sequence
  SiRNA target sequence
ctttaggcaaaaatgatgatc

SEQ ID NO: 161203 - DNA, 21 bp, Artificial sequence
  SiRNA target sequence
tttaggcaaaaatgatgatct

SEQ ID NO: 161204 - DNA, 21 bp, Artificial sequence
  SiRNA target sequence
ttaggcaaaaatgatgatctt

SEQ ID NO: 161205 - DNA, 21 bp, Artificial sequence
  SiRNA target sequence
taggcaaaaatgatgatcttg

SEQ ID NO: 161206 - DNA, 21 bp, Artificial sequence
  SiRNA target sequence
aggcaaaaatgatgatcttgc

SEQ ID NO: 161207 - DNA, 21 bp, Artificial sequence
  SiRNA target sequence
ggcaaaaatgatgatcttgcg

SEQ ID NO: 161208 - DNA, 21 bp, Artificial sequence
  SiRNA target sequence
gcaaaaatgatgatcttgcgc

SEQ ID NO: 161209 - DNA, 21 bp, Artificial sequence
  SiRNA target sequence
caaaaatgatgatcttgcgca

SEQ ID NO: 161210 - DNA, 21 bp, Artificial sequence
  SiRNA target sequence
aaaaatgatgatcttgcgcat

SEQ ID NO: 161211 - DNA, 21 bp, Artificial sequence
  SiRNA target sequence
aaaatgatgatcttgcgcatt

SEQ ID NO: 161212 - DNA, 21 bp, Artificial sequence
  SiRNA target sequence
aaatgatgatcttgcgcattc

SEQ ID NO: 161213 - DNA, 21 bp, Artificial sequence
  SiRNA target sequence
aatgatgatcttgcgcattct

SEQ ID NO: 161214 - DNA, 21 bp, Artificial sequence
  SiRNA target sequence
atgatgatcttgcgcattctt

SEQ ID NO: 161215 - DNA, 21 bp, Artificial sequence
  SiRNA target sequence
tgatgatcttgcgcattcttc

SEQ ID NO: 161216 - DNA, 21 bp, Artificial sequence
  SiRNA target sequence
gatgatcttgcgcattcttct

SEQ ID NO: 161217 - DNA, 21 bp, Artificial sequence
  SiRNA target sequence
atgatcttgcgcattcttcta

SEQ ID NO: 161218 - DNA, 21 bp, Artificial sequence
  SiRNA target sequence
tgatcttgcgcattcttctat

SEQ ID NO: 161219 - DNA, 21 bp, Artificial sequence
  SiRNA target sequence
gatcttgcgcattcttctata

SEQ ID NO: 161220 - DNA, 21 bp, Artificial sequence
  SiRNA target sequence
atcttgcgcattcttctataa

SEQ ID NO: 161221 - DNA, 21 bp, Artificial sequence
  SiRNA target sequence
tcttgcgcattcttctataag

SEQ ID NO: 161222 - DNA, 21 bp, Artificial sequence
  SiRNA target sequence
cttgcgcattcttctataaga

SEQ ID NO: 161223 - DNA, 21 bp, Artificial sequence
  SiRNA target sequence
ttgcgcattcttctataagat

SEQ ID NO: 161224 - DNA, 21 bp, Artificial sequence
  SiRNA target sequence
tgcgcattcttctataagatt

SEQ ID NO: 161225 - DNA, 21 bp, Artificial sequence
  SiRNA target sequence
gcgcattcttctataagattt

SEQ ID NO: 161226 - DNA, 21 bp, Artificial sequence
  SiRNA target sequence
cgcattcttctataagatttg

SEQ ID NO: 161227 - DNA, 21 bp, Artificial sequence
  SiRNA target sequence
gcattcttctataagatttgg

SEQ ID NO: 161228 - DNA, 21 bp, Artificial sequence
  SiRNA target sequence
cattcttctataagatttgga

SEQ ID NO: 161229 - DNA, 21 bp, Artificial sequence
  SiRNA target sequence
attcttctataagatttggaa

SEQ ID NO: 161230 - DNA, 21 bp, Artificial sequence
  SiRNA target sequence
ttcttctataagatttggaat

SEQ ID NO: 161231 - DNA, 21 bp, Artificial sequence
  SiRNA target sequence
tcttctataagatttggaata

SEQ ID NO: 161232 - DNA, 21 bp, Artificial sequence
  SiRNA target sequence
cttctataagatttggaataa

SEQ ID NO: 161233 - DNA, 21 bp, Artificial sequence
  SiRNA target sequence
ttctataagatttggaataaa

SEQ ID NO: 161234 - DNA, 21 bp, Artificial sequence
  SiRNA target sequence
tctataagatttggaataaat

SEQ ID NO: 161235 - DNA, 21 bp, Artificial sequence
  SiRNA target sequence
ctataagatttggaataaata

SEQ ID NO: 161236 - DNA, 21 bp, Artificial sequence
  SiRNA target sequence
tataagatttggaataaataa

SEQ ID NO: 161237 - DNA, 21 bp, Artificial sequence
  SiRNA target sequence
ataagatttggaataaataag

SEQ ID NO: 161238 - DNA, 21 bp, Artificial sequence
  SiRNA target sequence
taagatttggaataaataagt

SEQ ID NO: 161239 - DNA, 21 bp, Artificial sequence
  SiRNA target sequence
aagatttggaataaataagtt

SEQ ID NO: 161240 - DNA, 21 bp, Artificial sequence
  SiRNA target sequence
agatttggaataaataagttt

SEQ ID NO: 161241 - DNA, 21 bp, Artificial sequence
  SiRNA target sequence
gatttggaataaataagttta

SEQ ID NO: 161242 - DNA, 21 bp, Artificial sequence
  SiRNA target sequence
atttggaataaataagtttac

SEQ ID NO: 161243 - DNA, 21 bp, Artificial sequence
  SiRNA target sequence
tttggaataaataagtttaca

SEQ ID NO: 161244 - DNA, 21 bp, Artificial sequence
  SiRNA target sequence
ttggaataaataagtttacaa

SEQ ID NO: 161245 - DNA, 21 bp, Artificial sequence
  SiRNA target sequence
tggaataaataagtttacaac

SEQ ID NO: 161246 - DNA, 21 bp, Artificial sequence
  SiRNA target sequence
ggaataaataagtttacaact

SEQ ID NO: 161247 - DNA, 21 bp, Artificial sequence
  SiRNA target sequence
gaataaataagtttacaactg

SEQ ID NO: 161248 - DNA, 21 bp, Artificial sequence
  SiRNA target sequence
aataaataagtttacaactga

SEQ ID NO: 161249 - DNA, 21 bp, Artificial sequence
  SiRNA target sequence
ataaataagtttacaactgaa

SEQ ID NO: 161250 - DNA, 21 bp, Artificial sequence
  SiRNA target sequence
taaataagtttacaactgaag

SEQ ID NO: 161251 - DNA, 21 bp, Artificial sequence
  SiRNA target sequence
aaataagtttacaactgaaga

SEQ ID NO: 161252 - DNA, 21 bp, Artificial sequence
  SiRNA target sequence
aataagtttacaactgaagaa

SEQ ID NO: 161253 - DNA, 21 bp, Artificial sequence
  SiRNA target sequence
ataagtttacaactgaagaag

SEQ ID NO: 161254 - DNA, 21 bp, Artificial sequence
  SiRNA target sequence
taagtttacaactgaagaaga

SEQ ID NO: 161255 - DNA, 21 bp, Artificial sequence
  SiRNA target sequence
aagtttacaactgaagaagaa

SEQ ID NO: 161256 - DNA, 21 bp, Artificial sequence
  SiRNA target sequence
agtttacaactgaagaagaaa

SEQ ID NO: 161257 - DNA, 21 bp, Artificial sequence
  SiRNA target sequence
gtttacaactgaagaagaaat

SEQ ID NO: 161258 - DNA, 21 bp, Artificial sequence
  SiRNA target sequence
tttacaactgaagaagaaatc

SEQ ID NO: 161259 - DNA, 21 bp, Artificial sequence
  SiRNA target sequence
ttacaactgaagaagaaatca

SEQ ID NO: 161260 - DNA, 21 bp, Artificial sequence
  SiRNA target sequence
tacaactgaagaagaaatcaa

SEQ ID NO: 161261 - DNA, 21 bp, Artificial sequence
  SiRNA target sequence
acaactgaagaagaaatcaat

SEQ ID NO: 161262 - DNA, 21 bp, Artificial sequence
  SiRNA target sequence
caactgaagaagaaatcaata

SEQ ID NO: 161263 - DNA, 21 bp, Artificial sequence
  SiRNA target sequence
aactgaagaagaaatcaataa

SEQ ID NO: 161264 - DNA, 21 bp, Artificial sequence
  SiRNA target sequence
actgaagaagaaatcaataaa

SEQ ID NO: 161265 - DNA, 21 bp, Artificial sequence
  SiRNA target sequence
ctgaagaagaaatcaataaag

SEQ ID NO: 161266 - DNA, 21 bp, Artificial sequence
  SiRNA target sequence
tgaagaagaaatcaataaagt

SEQ ID NO: 161267 - DNA, 21 bp, Artificial sequence
  SiRNA target sequence
gaagaagaaatcaataaagta

SEQ ID NO: 161268 - DNA, 21 bp, Artificial sequence
  SiRNA target sequence
aagaagaaatcaataaagtat

SEQ ID NO: 161269 - DNA, 21 bp, Artificial sequence
  SiRNA target sequence
agaagaaatcaataaagtatc

SEQ ID NO: 161270 - DNA, 21 bp, Artificial sequence
  SiRNA target sequence
gaagaaatcaataaagtatct

SEQ ID NO: 161271 - DNA, 21 bp, Artificial sequence
  SiRNA target sequence
aagaaatcaataaagtatcta

SEQ ID NO: 161272 - DNA, 21 bp, Artificial sequence
  SiRNA target sequence
agaaatcaataaagtatctag

SEQ ID NO: 161273 - DNA, 21 bp, Artificial sequence
  SiRNA target sequence
gaaatcaataaagtatctagt

SEQ ID NO: 161274 - DNA, 21 bp, Artificial sequence
  SiRNA target sequence
aaatcaataaagtatctagtg

SEQ ID NO: 161275 - DNA, 21 bp, Artificial sequence
  SiRNA target sequence
aatcaataaagtatctagtga

SEQ ID NO: 161276 - DNA, 21 bp, Artificial sequence
  SiRNA target sequence
atcaataaagtatctagtgat

SEQ ID NO: 161277 - DNA, 21 bp, Artificial sequence
  SiRNA target sequence
tcaataaagtatctagtgata

SEQ ID NO: 161278 - DNA, 21 bp, Artificial sequence
  SiRNA target sequence
caataaagtatctagtgatac

SEQ ID NO: 161279 - DNA, 21 bp, Artificial sequence
  SiRNA target sequence
aataaagtatctagtgataca

SEQ ID NO: 161280 - DNA, 21 bp, Artificial sequence
  SiRNA target sequence
ataaagtatctagtgatacaa

SEQ ID NO: 161281 - DNA, 21 bp, Artificial sequence
  SiRNA target sequence
taaagtatctagtgatacaat

SEQ ID NO: 161282 - DNA, 21 bp, Artificial sequence
  SiRNA target sequence
aaagtatctagtgatacaatt

SEQ ID NO: 161283 - DNA, 21 bp, Artificial sequence
  SiRNA target sequence
aagtatctagtgatacaatta

SEQ ID NO: 161284 - DNA, 21 bp, Artificial sequence
  SiRNA target sequence
agtatctagtgatacaattaa

SEQ ID NO: 161285 - DNA, 21 bp, Artificial sequence
  SiRNA target sequence
gtatctagtgatacaattaaa

SEQ ID NO: 161286 - DNA, 21 bp, Artificial sequence
  SiRNA target sequence
tatctagtgatacaattaaag

SEQ ID NO: 161287 - DNA, 21 bp, Artificial sequence
  SiRNA target sequence
atctagtgatacaattaaagc

SEQ ID NO: 161288 - DNA, 21 bp, Artificial sequence
  SiRNA target sequence
tctagtgatacaattaaagct

SEQ ID NO: 161289 - DNA, 21 bp, Artificial sequence
  SiRNA target sequence
ctagtgatacaattaaagctg

SEQ ID NO: 161290 - DNA, 21 bp, Artificial sequence
  SiRNA target sequence
tagtgatacaattaaagctgt

SEQ ID NO: 161291 - DNA, 21 bp, Artificial sequence
  SiRNA target sequence
agtgatacaattaaagctgtt

SEQ ID NO: 161292 - DNA, 21 bp, Artificial sequence
  SiRNA target sequence
gtgatacaattaaagctgtta

SEQ ID NO: 161293 - DNA, 21 bp, Artificial sequence
  SiRNA target sequence
tgatacaattaaagctgttaa

SEQ ID NO: 161294 - DNA, 21 bp, Artificial sequence
  SiRNA target sequence
gatacaattaaagctgttaat

SEQ ID NO: 161295 - DNA, 21 bp, Artificial sequence
  SiRNA target sequence
atacaattaaagctgttaata

SEQ ID NO: 161296 - DNA, 21 bp, Artificial sequence
  SiRNA target sequence
tacaattaaagctgttaataa

SEQ ID NO: 161297 - DNA, 21 bp, Artificial sequence
  SiRNA target sequence
acaattaaagctgttaataag

SEQ ID NO: 161298 - DNA, 21 bp, Artificial sequence
  SiRNA target sequence
caattaaagctgttaataagt

SEQ ID NO: 161299 - DNA, 21 bp, Artificial sequence
  SiRNA target sequence
aattaaagctgttaataagtt

SEQ ID NO: 161300 - DNA, 21 bp, Artificial sequence
  SiRNA target sequence
attaaagctgttaataagtta

SEQ ID NO: 161301 - DNA, 21 bp, Artificial sequence
  SiRNA target sequence
ttaaagctgttaataagttaa

SEQ ID NO: 161302 - DNA, 21 bp, Artificial sequence
  SiRNA target sequence
taaagctgttaataagttaag

SEQ ID NO: 161303 - DNA, 21 bp, Artificial sequence
  SiRNA target sequence
aaagctgttaataagttaaga

SEQ ID NO: 161304 - DNA, 21 bp, Artificial sequence
  SiRNA target sequence
aagctgttaataagttaagag

SEQ ID NO: 161305 - DNA, 21 bp, Artificial sequence
  SiRNA target sequence
agctgttaataagttaagaga

SEQ ID NO: 161306 - DNA, 21 bp, Artificial sequence
  SiRNA target sequence
gctgttaataagttaagagat

SEQ ID NO: 161307 - DNA, 21 bp, Artificial sequence
  SiRNA target sequence
ctgttaataagttaagagata

SEQ ID NO: 161308 - DNA, 21 bp, Artificial sequence
  SiRNA target sequence
tgttaataagttaagagatat

SEQ ID NO: 161309 - DNA, 21 bp, Artificial sequence
  SiRNA target sequence
gttaataagttaagagatatg

SEQ ID NO: 161310 - DNA, 21 bp, Artificial sequence
  SiRNA target sequence
ttaataagttaagagatatgt

SEQ ID NO: 161311 - DNA, 21 bp, Artificial sequence
  SiRNA target sequence
taataagttaagagatatgtc

SEQ ID NO: 161312 - DNA, 21 bp, Artificial sequence
  SiRNA target sequence
aataagttaagagatatgtct

SEQ ID NO: 161313 - DNA, 21 bp, Artificial sequence
  SiRNA target sequence
ataagttaagagatatgtctc

SEQ ID NO: 161314 - DNA, 21 bp, Artificial sequence
  SiRNA target sequence
taagttaagagatatgtctcc

SEQ ID NO: 161315 - DNA, 21 bp, Artificial sequence
  SiRNA target sequence
aagttaagagatatgtctcct

SEQ ID NO: 161316 - DNA, 21 bp, Artificial sequence
  SiRNA target sequence
agttaagagatatgtctcctt

SEQ ID NO: 161317 - DNA, 21 bp, Artificial sequence
  SiRNA target sequence
gttaagagatatgtctccttt

SEQ ID NO: 161318 - DNA, 21 bp, Artificial sequence
  SiRNA target sequence
ttaagagatatgtctccttta

SEQ ID NO: 161319 - DNA, 21 bp, Artificial sequence
  SiRNA target sequence
taagagatatgtctcctttat

SEQ ID NO: 161320 - DNA, 21 bp, Artificial sequence
  SiRNA target sequence
aagagatatgtctcctttata

SEQ ID NO: 161321 - DNA, 21 bp, Artificial sequence
  SiRNA target sequence
agagatatgtctcctttatat

SEQ ID NO: 161322 - DNA, 21 bp, Artificial sequence
  SiRNA target sequence
gagatatgtctcctttatatg

SEQ ID NO: 161323 - DNA, 21 bp, Artificial sequence
  SiRNA target sequence
agatatgtctcctttatatga

SEQ ID NO: 161324 - DNA, 21 bp, Artificial sequence
  SiRNA target sequence
gatatgtctcctttatatgaa

SEQ ID NO: 161325 - DNA, 21 bp, Artificial sequence
  SiRNA target sequence
atatgtctcctttatatgaaa

SEQ ID NO: 161326 - DNA, 21 bp, Artificial sequence
  SiRNA target sequence
tatgtctcctttatatgaaat

SEQ ID NO: 161327 - DNA, 21 bp, Artificial sequence
  SiRNA target sequence
atgtctcctttatatgaaatg

SEQ ID NO: 161328 - DNA, 21 bp, Artificial sequence
  SiRNA target sequence
tgtctcctttatatgaaatgg

SEQ ID NO: 161329 - DNA, 21 bp, Artificial sequence
  SiRNA target sequence
gtctcctttatatgaaatggt

SEQ ID NO: 161330 - DNA, 21 bp, Artificial sequence
  SiRNA target sequence
tctcctttatatgaaatggtc

SEQ ID NO: 161331 - DNA, 21 bp, Artificial sequence
  SiRNA target sequence
ctcctttatatgaaatggtca

SEQ ID NO: 161332 - DNA, 21 bp, Artificial sequence
  SiRNA target sequence
tcctttatatgaaatggtcaa

SEQ ID NO: 161333 - DNA, 21 bp, Artificial sequence
  SiRNA target sequence
cctttatatgaaatggtcaaa

SEQ ID NO: 161334 - DNA, 21 bp, Artificial sequence
  SiRNA target sequence
ctttatatgaaatggtcaaag

SEQ ID NO: 161335 - DNA, 21 bp, Artificial sequence
  SiRNA target sequence
tttatatgaaatggtcaaaga

SEQ ID NO: 161336 - DNA, 21 bp, Artificial sequence
  SiRNA target sequence
ttatatgaaatggtcaaagaa

SEQ ID NO: 161337 - DNA, 21 bp, Artificial sequence
  SiRNA target sequence
tatatgaaatggtcaaagaag

SEQ ID NO: 161338 - DNA, 21 bp, Artificial sequence
  SiRNA target sequence
atatgaaatggtcaaagaagg

SEQ ID NO: 161339 - DNA, 21 bp, Artificial sequence
  SiRNA target sequence
tatgaaatggtcaaagaaggg

SEQ ID NO: 161340 - DNA, 21 bp, Artificial sequence
  SiRNA target sequence
atgaaatggtcaaagaaggga

SEQ ID NO: 161341 - DNA, 21 bp, Artificial sequence
  SiRNA target sequence
tgaaatggtcaaagaagggat

SEQ ID NO: 161342 - DNA, 21 bp, Artificial sequence
  SiRNA target sequence
gaaatggtcaaagaagggata

SEQ ID NO: 161343 - DNA, 21 bp, Artificial sequence
  SiRNA target sequence
aaatggtcaaagaagggatag

SEQ ID NO: 161344 - DNA, 21 bp, Artificial sequence
  SiRNA target sequence
aatggtcaaagaagggataga

SEQ ID NO: 161345 - DNA, 21 bp, Artificial sequence
  SiRNA target sequence
atggtcaaagaagggatagat

SEQ ID NO: 161346 - DNA, 21 bp, Artificial sequence
  SiRNA target sequence
tggtcaaagaagggatagatt

SEQ ID NO: 161347 - DNA, 21 bp, Artificial sequence
  SiRNA target sequence
ggtcaaagaagggatagattt

SEQ ID NO: 161348 - DNA, 21 bp, Artificial sequence
  SiRNA target sequence
gtcaaagaagggatagattta

SEQ ID NO: 161349 - DNA, 21 bp, Artificial sequence
  SiRNA target sequence
tcaaagaagggatagatttag

SEQ ID NO: 161350 - DNA, 21 bp, Artificial sequence
  SiRNA target sequence
caaagaagggatagatttaga

SEQ ID NO: 161351 - DNA, 21 bp, Artificial sequence
  SiRNA target sequence
aaagaagggatagatttagat

SEQ ID NO: 161352 - DNA, 21 bp, Artificial sequence
  SiRNA target sequence
aagaagggatagatttagata

SEQ ID NO: 161353 - DNA, 21 bp, Artificial sequence
  SiRNA target sequence
agaagggatagatttagataa

SEQ ID NO: 161354 - DNA, 21 bp, Artificial sequence
  SiRNA target sequence
gaagggatagatttagataaa

SEQ ID NO: 161355 - DNA, 21 bp, Artificial sequence
  SiRNA target sequence
aagggatagatttagataaaa

SEQ ID NO: 161356 - DNA, 21 bp, Artificial sequence
  SiRNA target sequence
agggatagatttagataaaat

SEQ ID NO: 161357 - DNA, 21 bp, Artificial sequence
  SiRNA target sequence
gggatagatttagataaaatt

SEQ ID NO: 161358 - DNA, 21 bp, Artificial sequence
  SiRNA target sequence
ggatagatttagataaaatta

SEQ ID NO: 161359 - DNA, 21 bp, Artificial sequence
  SiRNA target sequence
gatagatttagataaaattaa

SEQ ID NO: 161360 - DNA, 21 bp, Artificial sequence
  SiRNA target sequence
atagatttagataaaattaat

SEQ ID NO: 161361 - DNA, 21 bp, Artificial sequence
  SiRNA target sequence
tagatttagataaaattaatt

SEQ ID NO: 161362 - DNA, 21 bp, Artificial sequence
  SiRNA target sequence
agatttagataaaattaattg

SEQ ID NO: 161363 - DNA, 21 bp, Artificial sequence
  SiRNA target sequence
gatttagataaaattaattgg

SEQ ID NO: 161364 - DNA, 21 bp, Artificial sequence
  SiRNA target sequence
atttagataaaattaattggt

SEQ ID NO: 161365 - DNA, 21 bp, Artificial sequence
  SiRNA target sequence
tttagataaaattaattggtc

SEQ ID NO: 161366 - DNA, 21 bp, Artificial sequence
  SiRNA target sequence
ttagataaaattaattggtct

SEQ ID NO: 161367 - DNA, 21 bp, Artificial sequence
  SiRNA target sequence
tagataaaattaattggtctg

SEQ ID NO: 161368 - DNA, 21 bp, Artificial sequence
  SiRNA target sequence
agataaaattaattggtctgc

SEQ ID NO: 161369 - DNA, 21 bp, Artificial sequence
  SiRNA target sequence
gataaaattaattggtctgct

SEQ ID NO: 161370 - DNA, 21 bp, Artificial sequence
  SiRNA target sequence
ataaaattaattggtctgctt

SEQ ID NO: 161371 - DNA, 21 bp, Artificial sequence
  SiRNA target sequence
taaaattaattggtctgctta

SEQ ID NO: 161372 - DNA, 21 bp, Artificial sequence
  SiRNA target sequence
aaaattaattggtctgcttaa

SEQ ID NO: 161373 - DNA, 22 bp, Artificial sequence
  SiRNA target sequence
atgttatttttttatagcccca

SEQ ID NO: 161374 - DNA, 22 bp, Artificial sequence
  SiRNA target sequence
tgttatttttttatagccccat

SEQ ID NO: 161375 - DNA, 22 bp, Artificial sequence
  SiRNA target sequence
gttatttttttatagccccatt

SEQ ID NO: 161376 - DNA, 22 bp, Artificial sequence
  SiRNA target sequence
ttatttttttatagccccattt

SEQ ID NO: 161377 - DNA, 22 bp, Artificial sequence
  SiRNA target sequence
tatttttttatagccccatttt

SEQ ID NO: 161378 - DNA, 22 bp, Artificial sequence
  SiRNA target sequence
atttttttatagccccattttt

SEQ ID NO: 161379 - DNA, 22 bp, Artificial sequence
  SiRNA target sequence
tttttttatagccccattttta

SEQ ID NO: 161380 - DNA, 22 bp, Artificial sequence
  SiRNA target sequence
ttttttatagccccatttttat

SEQ ID NO: 161381 - DNA, 22 bp, Artificial sequence
  SiRNA target sequence
tttttatagccccatttttatg

SEQ ID NO: 161382 - DNA, 22 bp, Artificial sequence
  SiRNA target sequence
ttttatagccccatttttatga

SEQ ID NO: 161383 - DNA, 22 bp, Artificial sequence
  SiRNA target sequence
tttatagccccatttttatgac

SEQ ID NO: 161384 - DNA, 22 bp, Artificial sequence
  SiRNA target sequence
ttatagccccatttttatgact

SEQ ID NO: 161385 - DNA, 22 bp, Artificial sequence
  SiRNA target sequence
tatagccccatttttatgacta

SEQ ID NO: 161386 - DNA, 22 bp, Artificial sequence
  SiRNA target sequence
atagccccatttttatgactaa

SEQ ID NO: 161387 - DNA, 22 bp, Artificial sequence
  SiRNA target sequence
tagccccatttttatgactaaa

SEQ ID NO: 161388 - DNA, 22 bp, Artificial sequence
  SiRNA target sequence
agccccatttttatgactaaaa

SEQ ID NO: 161389 - DNA, 22 bp, Artificial sequence
  SiRNA target sequence
gccccatttttatgactaaaag

SEQ ID NO: 161390 - DNA, 22 bp, Artificial sequence
  SiRNA target sequence
ccccatttttatgactaaaagt

SEQ ID NO: 161391 - DNA, 22 bp, Artificial sequence
  SiRNA target sequence
cccatttttatgactaaaagtt

SEQ ID NO: 161392 - DNA, 22 bp, Artificial sequence
  SiRNA target sequence
ccatttttatgactaaaagttt

SEQ ID NO: 161393 - DNA, 22 bp, Artificial sequence
  SiRNA target sequence
catttttatgactaaaagttta

SEQ ID NO: 161394 - DNA, 22 bp, Artificial sequence
  SiRNA target sequence
atttttatgactaaaagtttaa

SEQ ID NO: 161395 - DNA, 22 bp, Artificial sequence
  SiRNA target sequence
tttttatgactaaaagtttaac

SEQ ID NO: 161396 - DNA, 22 bp, Artificial sequence
  SiRNA target sequence
ttttatgactaaaagtttaacg

SEQ ID NO: 161397 - DNA, 22 bp, Artificial sequence
  SiRNA target sequence
tttatgactaaaagtttaacga

SEQ ID NO: 161398 - DNA, 22 bp, Artificial sequence
  SiRNA target sequence
ttatgactaaaagtttaacgaa

SEQ ID NO: 161399 - DNA, 22 bp, Artificial sequence
  SiRNA target sequence
tatgactaaaagtttaacgaat

SEQ ID NO: 161400 - DNA, 22 bp, Artificial sequence
  SiRNA target sequence
atgactaaaagtttaacgaatt

SEQ ID NO: 161401 - DNA, 22 bp, Artificial sequence
  SiRNA target sequence
tgactaaaagtttaacgaattc

SEQ ID NO: 161402 - DNA, 22 bp, Artificial sequence
  SiRNA target sequence
gactaaaagtttaacgaattct

SEQ ID NO: 161403 - DNA, 22 bp, Artificial sequence
  SiRNA target sequence
actaaaagtttaacgaattcta

SEQ ID NO: 161404 - DNA, 22 bp, Artificial sequence
  SiRNA target sequence
ctaaaagtttaacgaattctaa

SEQ ID NO: 161405 - DNA, 22 bp, Artificial sequence
  SiRNA target sequence
taaaagtttaacgaattctaaa

SEQ ID NO: 161406 - DNA, 22 bp, Artificial sequence
  SiRNA target sequence
aaaagtttaacgaattctaaaa

SEQ ID NO: 161407 - DNA, 22 bp, Artificial sequence
  SiRNA target sequence
aaagtttaacgaattctaaaac

SEQ ID NO: 161408 - DNA, 22 bp, Artificial sequence
  SiRNA target sequence
aagtttaacgaattctaaaact

SEQ ID NO: 161409 - DNA, 22 bp, Artificial sequence
  SiRNA target sequence
agtttaacgaattctaaaactt

SEQ ID NO: 161410 - DNA, 22 bp, Artificial sequence
  SiRNA target sequence
gtttaacgaattctaaaacttt

SEQ ID NO: 161411 - DNA, 22 bp, Artificial sequence
  SiRNA target sequence
tttaacgaattctaaaacttta

SEQ ID NO: 161412 - DNA, 22 bp, Artificial sequence
  SiRNA target sequence
ttaacgaattctaaaactttaa

SEQ ID NO: 161413 - DNA, 22 bp, Artificial sequence
  SiRNA target sequence
taacgaattctaaaactttaaa

SEQ ID NO: 161414 - DNA, 22 bp, Artificial sequence
  SiRNA target sequence
aacgaattctaaaactttaaat

SEQ ID NO: 161415 - DNA, 22 bp, Artificial sequence
  SiRNA target sequence
acgaattctaaaactttaaatt

SEQ ID NO: 161416 - DNA, 22 bp, Artificial sequence
  SiRNA target sequence
cgaattctaaaactttaaattt

SEQ ID NO: 161417 - DNA, 22 bp, Artificial sequence
  SiRNA target sequence
gaattctaaaactttaaattta

SEQ ID NO: 161418 - DNA, 22 bp, Artificial sequence
  SiRNA target sequence
aattctaaaactttaaatttaa

SEQ ID NO: 161419 - DNA, 22 bp, Artificial sequence
  SiRNA target sequence
attctaaaactttaaatttaat

SEQ ID NO: 161420 - DNA, 22 bp, Artificial sequence
  SiRNA target sequence
ttctaaaactttaaatttaatg

SEQ ID NO: 161421 - DNA, 22 bp, Artificial sequence
  SiRNA target sequence
tctaaaactttaaatttaatgt

SEQ ID NO: 161422 - DNA, 22 bp, Artificial sequence
  SiRNA target sequence
ctaaaactttaaatttaatgtc

SEQ ID NO: 161423 - DNA, 22 bp, Artificial sequence
  SiRNA target sequence
taaaactttaaatttaatgtca

SEQ ID NO: 161424 - DNA, 22 bp, Artificial sequence
  SiRNA target sequence
aaaactttaaatttaatgtcaa

SEQ ID NO: 161425 - DNA, 22 bp, Artificial sequence
  SiRNA target sequence
aaactttaaatttaatgtcaag

SEQ ID NO: 161426 - DNA, 22 bp, Artificial sequence
  SiRNA target sequence
aactttaaatttaatgtcaagt

SEQ ID NO: 161427 - DNA, 22 bp, Artificial sequence
  SiRNA target sequence
actttaaatttaatgtcaagtg

SEQ ID NO: 161428 - DNA, 22 bp, Artificial sequence
  SiRNA target sequence
ctttaaatttaatgtcaagtgt

SEQ ID NO: 161429 - DNA, 22 bp, Artificial sequence
  SiRNA target sequence
tttaaatttaatgtcaagtgta

SEQ ID NO: 161430 - DNA, 22 bp, Artificial sequence
  SiRNA target sequence
ttaaatttaatgtcaagtgtac

SEQ ID NO: 161431 - DNA, 22 bp, Artificial sequence
  SiRNA target sequence
taaatttaatgtcaagtgtaca

SEQ ID NO: 161432 - DNA, 22 bp, Artificial sequence
  SiRNA target sequence
aaatttaatgtcaagtgtacaa

SEQ ID NO: 161433 - DNA, 22 bp, Artificial sequence
  SiRNA target sequence
aatttaatgtcaagtgtacaat

SEQ ID NO: 161434 - DNA, 22 bp, Artificial sequence
  SiRNA target sequence
atttaatgtcaagtgtacaatc

SEQ ID NO: 161435 - DNA, 22 bp, Artificial sequence
  SiRNA target sequence
tttaatgtcaagtgtacaatca

SEQ ID NO: 161436 - DNA, 22 bp, Artificial sequence
  SiRNA target sequence
ttaatgtcaagtgtacaatcac

SEQ ID NO: 161437 - DNA, 22 bp, Artificial sequence
  SiRNA target sequence
taatgtcaagtgtacaatcacc

SEQ ID NO: 161438 - DNA, 22 bp, Artificial sequence
  SiRNA target sequence
aatgtcaagtgtacaatcacca

SEQ ID NO: 161439 - DNA, 22 bp, Artificial sequence
  SiRNA target sequence
atgtcaagtgtacaatcaccag

SEQ ID NO: 161440 - DNA, 22 bp, Artificial sequence
  SiRNA target sequence
tgtcaagtgtacaatcaccagt

SEQ ID NO: 161441 - DNA, 22 bp, Artificial sequence
  SiRNA target sequence
gtcaagtgtacaatcaccagtt

SEQ ID NO: 161442 - DNA, 22 bp, Artificial sequence
  SiRNA target sequence
tcaagtgtacaatcaccagtta

SEQ ID NO: 161443 - DNA, 22 bp, Artificial sequence
  SiRNA target sequence
caagtgtacaatcaccagttat

SEQ ID NO: 161444 - DNA, 22 bp, Artificial sequence
  SiRNA target sequence
aagtgtacaatcaccagttata

SEQ ID NO: 161445 - DNA, 22 bp, Artificial sequence
  SiRNA target sequence
agtgtacaatcaccagttataa

SEQ ID NO: 161446 - DNA, 22 bp, Artificial sequence
  SiRNA target sequence
gtgtacaatcaccagttataaa

SEQ ID NO: 161447 - DNA, 22 bp, Artificial sequence
  SiRNA target sequence
tgtacaatcaccagttataaat

SEQ ID NO: 161448 - DNA, 22 bp, Artificial sequence
  SiRNA target sequence
gtacaatcaccagttataaata

SEQ ID NO: 161449 - DNA, 22 bp, Artificial sequence
  SiRNA target sequence
tacaatcaccagttataaatac

SEQ ID NO: 161450 - DNA, 22 bp, Artificial sequence
  SiRNA target sequence
acaatcaccagttataaataca

SEQ ID NO: 161451 - DNA, 22 bp, Artificial sequence
  SiRNA target sequence
caatcaccagttataaatacaa

SEQ ID NO: 161452 - DNA, 22 bp, Artificial sequence
  SiRNA target sequence
aatcaccagttataaatacaaa

SEQ ID NO: 161453 - DNA, 22 bp, Artificial sequence
  SiRNA target sequence
atcaccagttataaatacaaaa

SEQ ID NO: 161454 - DNA, 22 bp, Artificial sequence
  SiRNA target sequence
tcaccagttataaatacaaaaa

SEQ ID NO: 161455 - DNA, 22 bp, Artificial sequence
  SiRNA target sequence
caccagttataaatacaaaaaa

SEQ ID NO: 161456 - DNA, 22 bp, Artificial sequence
  SiRNA target sequence
accagttataaatacaaaaaaa

SEQ ID NO: 161457 - DNA, 22 bp, Artificial sequence
  SiRNA target sequence
ccagttataaatacaaaaaaaa

SEQ ID NO: 161458 - DNA, 22 bp, Artificial sequence
  SiRNA target sequence
cagttataaatacaaaaaaaat

SEQ ID NO: 161459 - DNA, 22 bp, Artificial sequence
  SiRNA target sequence
agttataaatacaaaaaaaata

SEQ ID NO: 161460 - DNA, 22 bp, Artificial sequence
  SiRNA target sequence
gttataaatacaaaaaaaatat

SEQ ID NO: 161461 - DNA, 22 bp, Artificial sequence
  SiRNA target sequence
ttataaatacaaaaaaaatata

SEQ ID NO: 161462 - DNA, 22 bp, Artificial sequence
  SiRNA target sequence
tataaatacaaaaaaaatatat

SEQ ID NO: 161463 - DNA, 22 bp, Artificial sequence
  SiRNA target sequence
ataaatacaaaaaaaatatatc

SEQ ID NO: 161464 - DNA, 22 bp, Artificial sequence
  SiRNA target sequence
taaatacaaaaaaaatatatct

SEQ ID NO: 161465 - DNA, 22 bp, Artificial sequence
  SiRNA target sequence
aaatacaaaaaaaatatatctt

SEQ ID NO: 161466 - DNA, 22 bp, Artificial sequence
  SiRNA target sequence
aatacaaaaaaaatatatcttg

SEQ ID NO: 161467 - DNA, 22 bp, Artificial sequence
  SiRNA target sequence
atacaaaaaaaatatatcttga

SEQ ID NO: 161468 - DNA, 22 bp, Artificial sequence
  SiRNA target sequence
tacaaaaaaaatatatcttgat

SEQ ID NO: 161469 - DNA, 22 bp, Artificial sequence
  SiRNA target sequence
acaaaaaaaatatatcttgatg

SEQ ID NO: 161470 - DNA, 22 bp, Artificial sequence
  SiRNA target sequence
caaaaaaaatatatcttgatgc

SEQ ID NO: 161471 - DNA, 22 bp, Artificial sequence
  SiRNA target sequence
aaaaaaaatatatcttgatgca

SEQ ID NO: 161472 - DNA, 22 bp, Artificial sequence
  SiRNA target sequence
aaaaaaatatatcttgatgcac

SEQ ID NO: 161473 - DNA, 22 bp, Artificial sequence
  SiRNA target sequence
aaaaaatatatcttgatgcaca

SEQ ID NO: 161474 - DNA, 22 bp, Artificial sequence
  SiRNA target sequence
aaaaatatatcttgatgcacaa

SEQ ID NO: 161475 - DNA, 22 bp, Artificial sequence
  SiRNA target sequence
aaaatatatcttgatgcacaag

SEQ ID NO: 161476 - DNA, 22 bp, Artificial sequence
  SiRNA target sequence
aaatatatcttgatgcacaagc

SEQ ID NO: 161477 - DNA, 22 bp, Artificial sequence
  SiRNA target sequence
aatatatcttgatgcacaagcg

SEQ ID NO: 161478 - DNA, 22 bp, Artificial sequence
  SiRNA target sequence
atatatcttgatgcacaagcga

SEQ ID NO: 161479 - DNA, 22 bp, Artificial sequence
  SiRNA target sequence
tatatcttgatgcacaagcgac

SEQ ID NO: 161480 - DNA, 22 bp, Artificial sequence
  SiRNA target sequence
atatcttgatgcacaagcgacc

SEQ ID NO: 161481 - DNA, 22 bp, Artificial sequence
  SiRNA target sequence
tatcttgatgcacaagcgacca

SEQ ID NO: 161482 - DNA, 22 bp, Artificial sequence
  SiRNA target sequence
atcttgatgcacaagcgaccaa

SEQ ID NO: 161483 - DNA, 22 bp, Artificial sequence
  SiRNA target sequence
tcttgatgcacaagcgaccaag

SEQ ID NO: 161484 - DNA, 22 bp, Artificial sequence
  SiRNA target sequence
cttgatgcacaagcgaccaagc

SEQ ID NO: 161485 - DNA, 22 bp, Artificial sequence
  SiRNA target sequence
ttgatgcacaagcgaccaagcc

SEQ ID NO: 161486 - DNA, 22 bp, Artificial sequence
  SiRNA target sequence
tgatgcacaagcgaccaagcct

SEQ ID NO: 161487 - DNA, 22 bp, Artificial sequence
  SiRNA target sequence
gatgcacaagcgaccaagcctt

SEQ ID NO: 161488 - DNA, 22 bp, Artificial sequence
  SiRNA target sequence
atgcacaagcgaccaagccttt

SEQ ID NO: 161489 - DNA, 22 bp, Artificial sequence
  SiRNA target sequence
tgcacaagcgaccaagccttta

SEQ ID NO: 161490 - DNA, 22 bp, Artificial sequence
  SiRNA target sequence
gcacaagcgaccaagcctttag

SEQ ID NO: 161491 - DNA, 22 bp, Artificial sequence
  SiRNA target sequence
cacaagcgaccaagcctttaga

SEQ ID NO: 161492 - DNA, 22 bp, Artificial sequence
  SiRNA target sequence
acaagcgaccaagcctttagac

SEQ ID NO: 161493 - DNA, 22 bp, Artificial sequence
  SiRNA target sequence
caagcgaccaagcctttagacc

SEQ ID NO: 161494 - DNA, 22 bp, Artificial sequence
  SiRNA target sequence
aagcgaccaagcctttagaccc

SEQ ID NO: 161495 - DNA, 22 bp, Artificial sequence
  SiRNA target sequence
agcgaccaagcctttagacccg

SEQ ID NO: 161496 - DNA, 22 bp, Artificial sequence
  SiRNA target sequence
gcgaccaagcctttagacccgc

SEQ ID NO: 161497 - DNA, 22 bp, Artificial sequence
  SiRNA target sequence
cgaccaagcctttagacccgcg

SEQ ID NO: 161498 - DNA, 22 bp, Artificial sequence
  SiRNA target sequence
gaccaagcctttagacccgcgt

SEQ ID NO: 161499 - DNA, 22 bp, Artificial sequence
  SiRNA target sequence
accaagcctttagacccgcgtg

SEQ ID NO: 161500 - DNA, 22 bp, Artificial sequence
  SiRNA target sequence
ccaagcctttagacccgcgtgt

SEQ ID NO: 161501 - DNA, 22 bp, Artificial sequence
  SiRNA target sequence
caagcctttagacccgcgtgtg

SEQ ID NO: 161502 - DNA, 22 bp, Artificial sequence
  SiRNA target sequence
aagcctttagacccgcgtgtgc

SEQ ID NO: 161503 - DNA, 22 bp, Artificial sequence
  SiRNA target sequence
agcctttagacccgcgtgtgct

SEQ ID NO: 161504 - DNA, 22 bp, Artificial sequence
  SiRNA target sequence
gcctttagacccgcgtgtgctt

SEQ ID NO: 161505 - DNA, 22 bp, Artificial sequence
  SiRNA target sequence
cctttagacccgcgtgtgcttg

SEQ ID NO: 161506 - DNA, 22 bp, Artificial sequence
  SiRNA target sequence
ctttagacccgcgtgtgcttga

SEQ ID NO: 161507 - DNA, 22 bp, Artificial sequence
  SiRNA target sequence
tttagacccgcgtgtgcttgat

SEQ ID NO: 161508 - DNA, 22 bp, Artificial sequence
  SiRNA target sequence
ttagacccgcgtgtgcttgatg

SEQ ID NO: 161509 - DNA, 22 bp, Artificial sequence
  SiRNA target sequence
tagacccgcgtgtgcttgatgc

SEQ ID NO: 161510 - DNA, 22 bp, Artificial sequence
  SiRNA target sequence
agacccgcgtgtgcttgatgca

SEQ ID NO: 161511 - DNA, 22 bp, Artificial sequence
  SiRNA target sequence
gacccgcgtgtgcttgatgcaa

SEQ ID NO: 161512 - DNA, 22 bp, Artificial sequence
  SiRNA target sequence
acccgcgtgtgcttgatgcaat

SEQ ID NO: 161513 - DNA, 22 bp, Artificial sequence
  SiRNA target sequence
cccgcgtgtgcttgatgcaatg

SEQ ID NO: 161514 - DNA, 22 bp, Artificial sequence
  SiRNA target sequence
ccgcgtgtgcttgatgcaatgc

SEQ ID NO: 161515 - DNA, 22 bp, Artificial sequence
  SiRNA target sequence
cgcgtgtgcttgatgcaatgct

SEQ ID NO: 161516 - DNA, 22 bp, Artificial sequence
  SiRNA target sequence
gcgtgtgcttgatgcaatgctt

SEQ ID NO: 161517 - DNA, 22 bp, Artificial sequence
  SiRNA target sequence
cgtgtgcttgatgcaatgcttc

SEQ ID NO: 161518 - DNA, 22 bp, Artificial sequence
  SiRNA target sequence
gtgtgcttgatgcaatgcttcc

SEQ ID NO: 161519 - DNA, 22 bp, Artificial sequence
  SiRNA target sequence
tgtgcttgatgcaatgcttcca

SEQ ID NO: 161520 - DNA, 22 bp, Artificial sequence
  SiRNA target sequence
gtgcttgatgcaatgcttccat

SEQ ID NO: 161521 - DNA, 22 bp, Artificial sequence
  SiRNA target sequence
tgcttgatgcaatgcttccata

SEQ ID NO: 161522 - DNA, 22 bp, Artificial sequence
  SiRNA target sequence
gcttgatgcaatgcttccatac

SEQ ID NO: 161523 - DNA, 22 bp, Artificial sequence
  SiRNA target sequence
cttgatgcaatgcttccatact

SEQ ID NO: 161524 - DNA, 22 bp, Artificial sequence
  SiRNA target sequence
ttgatgcaatgcttccatacta

SEQ ID NO: 161525 - DNA, 22 bp, Artificial sequence
  SiRNA target sequence
tgatgcaatgcttccatactat

SEQ ID NO: 161526 - DNA, 22 bp, Artificial sequence
  SiRNA target sequence
gatgcaatgcttccatactata

SEQ ID NO: 161527 - DNA, 22 bp, Artificial sequence
  SiRNA target sequence
atgcaatgcttccatactatac

SEQ ID NO: 161528 - DNA, 22 bp, Artificial sequence
  SiRNA target sequence
tgcaatgcttccatactataca

SEQ ID NO: 161529 - DNA, 22 bp, Artificial sequence
  SiRNA target sequence
gcaatgcttccatactatacat

SEQ ID NO: 161530 - DNA, 22 bp, Artificial sequence
  SiRNA target sequence
caatgcttccatactatacatc

SEQ ID NO: 161531 - DNA, 22 bp, Artificial sequence
  SiRNA target sequence
aatgcttccatactatacatcc

SEQ ID NO: 161532 - DNA, 22 bp, Artificial sequence
  SiRNA target sequence
atgcttccatactatacatcca

SEQ ID NO: 161533 - DNA, 22 bp, Artificial sequence
  SiRNA target sequence
tgcttccatactatacatccat

SEQ ID NO: 161534 - DNA, 22 bp, Artificial sequence
  SiRNA target sequence
gcttccatactatacatccatt

SEQ ID NO: 161535 - DNA, 22 bp, Artificial sequence
  SiRNA target sequence
cttccatactatacatccattt

SEQ ID NO: 161536 - DNA, 22 bp, Artificial sequence
  SiRNA target sequence
ttccatactatacatccatttt

SEQ ID NO: 161537 - DNA, 22 bp, Artificial sequence
  SiRNA target sequence
tccatactatacatccattttt

SEQ ID NO: 161538 - DNA, 22 bp, Artificial sequence
  SiRNA target sequence
ccatactatacatccatttttg

SEQ ID NO: 161539 - DNA, 22 bp, Artificial sequence
  SiRNA target sequence
catactatacatccatttttgg

SEQ ID NO: 161540 - DNA, 22 bp, Artificial sequence
  SiRNA target sequence
atactatacatccatttttgga

SEQ ID NO: 161541 - DNA, 22 bp, Artificial sequence
  SiRNA target sequence
tactatacatccatttttggaa

SEQ ID NO: 161542 - DNA, 22 bp, Artificial sequence
  SiRNA target sequence
actatacatccatttttggaaa

SEQ ID NO: 161543 - DNA, 22 bp, Artificial sequence
  SiRNA target sequence
ctatacatccatttttggaaat

SEQ ID NO: 161544 - DNA, 22 bp, Artificial sequence
  SiRNA target sequence
tatacatccatttttggaaatc

SEQ ID NO: 161545 - DNA, 22 bp, Artificial sequence
  SiRNA target sequence
atacatccatttttggaaatcc

SEQ ID NO: 161546 - DNA, 22 bp, Artificial sequence
  SiRNA target sequence
tacatccatttttggaaatcca

SEQ ID NO: 161547 - DNA, 22 bp, Artificial sequence
  SiRNA target sequence
acatccatttttggaaatccac

SEQ ID NO: 161548 - DNA, 22 bp, Artificial sequence
  SiRNA target sequence
catccatttttggaaatccaca

SEQ ID NO: 161549 - DNA, 22 bp, Artificial sequence
  SiRNA target sequence
atccatttttggaaatccacat

SEQ ID NO: 161550 - DNA, 22 bp, Artificial sequence
  SiRNA target sequence
tccatttttggaaatccacatt

SEQ ID NO: 161551 - DNA, 22 bp, Artificial sequence
  SiRNA target sequence
ccatttttggaaatccacattc

SEQ ID NO: 161552 - DNA, 22 bp, Artificial sequence
  SiRNA target sequence
catttttggaaatccacattct

SEQ ID NO: 161553 - DNA, 22 bp, Artificial sequence
  SiRNA target sequence
atttttggaaatccacattctc

SEQ ID NO: 161554 - DNA, 22 bp, Artificial sequence
  SiRNA target sequence
tttttggaaatccacattctcg

SEQ ID NO: 161555 - DNA, 22 bp, Artificial sequence
  SiRNA target sequence
ttttggaaatccacattctcgc

SEQ ID NO: 161556 - DNA, 22 bp, Artificial sequence
  SiRNA target sequence
tttggaaatccacattctcgca

SEQ ID NO: 161557 - DNA, 22 bp, Artificial sequence
  SiRNA target sequence
ttggaaatccacattctcgcac

SEQ ID NO: 161558 - DNA, 22 bp, Artificial sequence
  SiRNA target sequence
tggaaatccacattctcgcacg

SEQ ID NO: 161559 - DNA, 22 bp, Artificial sequence
  SiRNA target sequence
ggaaatccacattctcgcacgc

SEQ ID NO: 161560 - DNA, 22 bp, Artificial sequence
  SiRNA target sequence
gaaatccacattctcgcacgca

SEQ ID NO: 161561 - DNA, 22 bp, Artificial sequence
  SiRNA target sequence
aaatccacattctcgcacgcat

SEQ ID NO: 161562 - DNA, 22 bp, Artificial sequence
  SiRNA target sequence
aatccacattctcgcacgcata

SEQ ID NO: 161563 - DNA, 22 bp, Artificial sequence
  SiRNA target sequence
atccacattctcgcacgcatac

SEQ ID NO: 161564 - DNA, 22 bp, Artificial sequence
  SiRNA target sequence
tccacattctcgcacgcatacg

SEQ ID NO: 161565 - DNA, 22 bp, Artificial sequence
  SiRNA target sequence
ccacattctcgcacgcatacgt

SEQ ID NO: 161566 - DNA, 22 bp, Artificial sequence
  SiRNA target sequence
cacattctcgcacgcatacgtt

SEQ ID NO: 161567 - DNA, 22 bp, Artificial sequence
  SiRNA target sequence
acattctcgcacgcatacgttt

SEQ ID NO: 161568 - DNA, 22 bp, Artificial sequence
  SiRNA target sequence
cattctcgcacgcatacgtttg

SEQ ID NO: 161569 - DNA, 22 bp, Artificial sequence
  SiRNA target sequence
attctcgcacgcatacgtttgg

SEQ ID NO: 161570 - DNA, 22 bp, Artificial sequence
  SiRNA target sequence
ttctcgcacgcatacgtttgga

SEQ ID NO: 161571 - DNA, 22 bp, Artificial sequence
  SiRNA target sequence
tctcgcacgcatacgtttggat

SEQ ID NO: 161572 - DNA, 22 bp, Artificial sequence
  SiRNA target sequence
ctcgcacgcatacgtttggatg

SEQ ID NO: 161573 - DNA, 22 bp, Artificial sequence
  SiRNA target sequence
tcgcacgcatacgtttggatgg

SEQ ID NO: 161574 - DNA, 22 bp, Artificial sequence
  SiRNA target sequence
cgcacgcatacgtttggatgga

SEQ ID NO: 161575 - DNA, 22 bp, Artificial sequence
  SiRNA target sequence
gcacgcatacgtttggatggaa

SEQ ID NO: 161576 - DNA, 22 bp, Artificial sequence
  SiRNA target sequence
cacgcatacgtttggatggaat

SEQ ID NO: 161577 - DNA, 22 bp, Artificial sequence
  SiRNA target sequence
acgcatacgtttggatggaatg

SEQ ID NO: 161578 - DNA, 22 bp, Artificial sequence
  SiRNA target sequence
cgcatacgtttggatggaatgc

SEQ ID NO: 161579 - DNA, 22 bp, Artificial sequence
  SiRNA target sequence
gcatacgtttggatggaatgca

SEQ ID NO: 161580 - DNA, 22 bp, Artificial sequence
  SiRNA target sequence
catacgtttggatggaatgcag

SEQ ID NO: 161581 - DNA, 22 bp, Artificial sequence
  SiRNA target sequence
atacgtttggatggaatgcaga

SEQ ID NO: 161582 - DNA, 22 bp, Artificial sequence
  SiRNA target sequence
tacgtttggatggaatgcagaa

SEQ ID NO: 161583 - DNA, 22 bp, Artificial sequence
  SiRNA target sequence
acgtttggatggaatgcagaaa

SEQ ID NO: 161584 - DNA, 22 bp, Artificial sequence
  SiRNA target sequence
cgtttggatggaatgcagaaaa

SEQ ID NO: 161585 - DNA, 22 bp, Artificial sequence
  SiRNA target sequence
gtttggatggaatgcagaaaaa

SEQ ID NO: 161586 - DNA, 22 bp, Artificial sequence
  SiRNA target sequence
tttggatggaatgcagaaaaag

SEQ ID NO: 161587 - DNA, 22 bp, Artificial sequence
  SiRNA target sequence
ttggatggaatgcagaaaaagg

SEQ ID NO: 161588 - DNA, 22 bp, Artificial sequence
  SiRNA target sequence
tggatggaatgcagaaaaaggc

SEQ ID NO: 161589 - DNA, 22 bp, Artificial sequence
  SiRNA target sequence
ggatggaatgcagaaaaaggcg

SEQ ID NO: 161590 - DNA, 22 bp, Artificial sequence
  SiRNA target sequence
gatggaatgcagaaaaaggcgt

SEQ ID NO: 161591 - DNA, 22 bp, Artificial sequence
  SiRNA target sequence
atggaatgcagaaaaaggcgta

SEQ ID NO: 161592 - DNA, 22 bp, Artificial sequence
  SiRNA target sequence
tggaatgcagaaaaaggcgtag

SEQ ID NO: 161593 - DNA, 22 bp, Artificial sequence
  SiRNA target sequence
ggaatgcagaaaaaggcgtaga

SEQ ID NO: 161594 - DNA, 22 bp, Artificial sequence
  SiRNA target sequence
gaatgcagaaaaaggcgtagaa

SEQ ID NO: 161595 - DNA, 22 bp, Artificial sequence
  SiRNA target sequence
aatgcagaaaaaggcgtagaaa

SEQ ID NO: 161596 - DNA, 22 bp, Artificial sequence
  SiRNA target sequence
atgcagaaaaaggcgtagaaat

SEQ ID NO: 161597 - DNA, 22 bp, Artificial sequence
  SiRNA target sequence
tgcagaaaaaggcgtagaaatg

SEQ ID NO: 161598 - DNA, 22 bp, Artificial sequence
  SiRNA target sequence
gcagaaaaaggcgtagaaatgg

SEQ ID NO: 161599 - DNA, 22 bp, Artificial sequence
  SiRNA target sequence
cagaaaaaggcgtagaaatggc

SEQ ID NO: 161600 - DNA, 22 bp, Artificial sequence
  SiRNA target sequence
agaaaaaggcgtagaaatggct

SEQ ID NO: 161601 - DNA, 22 bp, Artificial sequence
  SiRNA target sequence
gaaaaaggcgtagaaatggctc

SEQ ID NO: 161602 - DNA, 22 bp, Artificial sequence
  SiRNA target sequence
aaaaaggcgtagaaatggctcg

SEQ ID NO: 161603 - DNA, 22 bp, Artificial sequence
  SiRNA target sequence
aaaaggcgtagaaatggctcga

SEQ ID NO: 161604 - DNA, 22 bp, Artificial sequence
  SiRNA target sequence
aaaggcgtagaaatggctcgaa

SEQ ID NO: 161605 - DNA, 22 bp, Artificial sequence
  SiRNA target sequence
aaggcgtagaaatggctcgaaa

SEQ ID NO: 161606 - DNA, 22 bp, Artificial sequence
  SiRNA target sequence
aggcgtagaaatggctcgaaag

SEQ ID NO: 161607 - DNA, 22 bp, Artificial sequence
  SiRNA target sequence
ggcgtagaaatggctcgaaagc

SEQ ID NO: 161608 - DNA, 22 bp, Artificial sequence
  SiRNA target sequence
gcgtagaaatggctcgaaagca

SEQ ID NO: 161609 - DNA, 22 bp, Artificial sequence
  SiRNA target sequence
cgtagaaatggctcgaaagcaa

SEQ ID NO: 161610 - DNA, 22 bp, Artificial sequence
  SiRNA target sequence
gtagaaatggctcgaaagcaag

SEQ ID NO: 161611 - DNA, 22 bp, Artificial sequence
  SiRNA target sequence
tagaaatggctcgaaagcaagt

SEQ ID NO: 161612 - DNA, 22 bp, Artificial sequence
  SiRNA target sequence
agaaatggctcgaaagcaagta

SEQ ID NO: 161613 - DNA, 22 bp, Artificial sequence
  SiRNA target sequence
gaaatggctcgaaagcaagtag

SEQ ID NO: 161614 - DNA, 22 bp, Artificial sequence
  SiRNA target sequence
aaatggctcgaaagcaagtagc

SEQ ID NO: 161615 - DNA, 22 bp, Artificial sequence
  SiRNA target sequence
aatggctcgaaagcaagtagca

SEQ ID NO: 161616 - DNA, 22 bp, Artificial sequence
  SiRNA target sequence
atggctcgaaagcaagtagcag

SEQ ID NO: 161617 - DNA, 22 bp, Artificial sequence
  SiRNA target sequence
tggctcgaaagcaagtagcaga

SEQ ID NO: 161618 - DNA, 22 bp, Artificial sequence
  SiRNA target sequence
ggctcgaaagcaagtagcagat

SEQ ID NO: 161619 - DNA, 22 bp, Artificial sequence
  SiRNA target sequence
gctcgaaagcaagtagcagatt

SEQ ID NO: 161620 - DNA, 22 bp, Artificial sequence
  SiRNA target sequence
ctcgaaagcaagtagcagattt

SEQ ID NO: 161621 - DNA, 22 bp, Artificial sequence
  SiRNA target sequence
tcgaaagcaagtagcagattta

SEQ ID NO: 161622 - DNA, 22 bp, Artificial sequence
  SiRNA target sequence
cgaaagcaagtagcagatttac

SEQ ID NO: 161623 - DNA, 22 bp, Artificial sequence
  SiRNA target sequence
gaaagcaagtagcagatttact

SEQ ID NO: 161624 - DNA, 22 bp, Artificial sequence
  SiRNA target sequence
aaagcaagtagcagatttactg

SEQ ID NO: 161625 - DNA, 22 bp, Artificial sequence
  SiRNA target sequence
aagcaagtagcagatttactga

SEQ ID NO: 161626 - DNA, 22 bp, Artificial sequence
  SiRNA target sequence
agcaagtagcagatttactgaa

SEQ ID NO: 161627 - DNA, 22 bp, Artificial sequence
  SiRNA target sequence
gcaagtagcagatttactgaat

SEQ ID NO: 161628 - DNA, 22 bp, Artificial sequence
  SiRNA target sequence
caagtagcagatttactgaatg

SEQ ID NO: 161629 - DNA, 22 bp, Artificial sequence
  SiRNA target sequence
aagtagcagatttactgaatgc

SEQ ID NO: 161630 - DNA, 22 bp, Artificial sequence
  SiRNA target sequence
agtagcagatttactgaatgcc

SEQ ID NO: 161631 - DNA, 22 bp, Artificial sequence
  SiRNA target sequence
gtagcagatttactgaatgcca

SEQ ID NO: 161632 - DNA, 22 bp, Artificial sequence
  SiRNA target sequence
tagcagatttactgaatgccaa

SEQ ID NO: 161633 - DNA, 22 bp, Artificial sequence
  SiRNA target sequence
agcagatttactgaatgccaat

SEQ ID NO: 161634 - DNA, 22 bp, Artificial sequence
  SiRNA target sequence
gcagatttactgaatgccaatg

SEQ ID NO: 161635 - DNA, 22 bp, Artificial sequence
  SiRNA target sequence
cagatttactgaatgccaatga

SEQ ID NO: 161636 - DNA, 22 bp, Artificial sequence
  SiRNA target sequence
agatttactgaatgccaatgaa

SEQ ID NO: 161637 - DNA, 22 bp, Artificial sequence
  SiRNA target sequence
gatttactgaatgccaatgaaa

SEQ ID NO: 161638 - DNA, 22 bp, Artificial sequence
  SiRNA target sequence
atttactgaatgccaatgaaaa

SEQ ID NO: 161639 - DNA, 22 bp, Artificial sequence
  SiRNA target sequence
tttactgaatgccaatgaaaaa

SEQ ID NO: 161640 - DNA, 22 bp, Artificial sequence
  SiRNA target sequence
ttactgaatgccaatgaaaaag

SEQ ID NO: 161641 - DNA, 22 bp, Artificial sequence
  SiRNA target sequence
tactgaatgccaatgaaaaaga

SEQ ID NO: 161642 - DNA, 22 bp, Artificial sequence
  SiRNA target sequence
actgaatgccaatgaaaaagaa

SEQ ID NO: 161643 - DNA, 22 bp, Artificial sequence
  SiRNA target sequence
ctgaatgccaatgaaaaagaaa

SEQ ID NO: 161644 - DNA, 22 bp, Artificial sequence
  SiRNA target sequence
tgaatgccaatgaaaaagaaat

SEQ ID NO: 161645 - DNA, 22 bp, Artificial sequence
  SiRNA target sequence
gaatgccaatgaaaaagaaatt

SEQ ID NO: 161646 - DNA, 22 bp, Artificial sequence
  SiRNA target sequence
aatgccaatgaaaaagaaatta

SEQ ID NO: 161647 - DNA, 22 bp, Artificial sequence
  SiRNA target sequence
atgccaatgaaaaagaaattat

SEQ ID NO: 161648 - DNA, 22 bp, Artificial sequence
  SiRNA target sequence
tgccaatgaaaaagaaattatt

SEQ ID NO: 161649 - DNA, 22 bp, Artificial sequence
  SiRNA target sequence
gccaatgaaaaagaaattattt

SEQ ID NO: 161650 - DNA, 22 bp, Artificial sequence
  SiRNA target sequence
ccaatgaaaaagaaattatttt

SEQ ID NO: 161651 - DNA, 22 bp, Artificial sequence
  SiRNA target sequence
caatgaaaaagaaattattttt

SEQ ID NO: 161652 - DNA, 22 bp, Artificial sequence
  SiRNA target sequence
aatgaaaaagaaattattttta

SEQ ID NO: 161653 - DNA, 22 bp, Artificial sequence
  SiRNA target sequence
atgaaaaagaaattatttttac

SEQ ID NO: 161654 - DNA, 22 bp, Artificial sequence
  SiRNA target sequence
tgaaaaagaaattatttttact

SEQ ID NO: 161655 - DNA, 22 bp, Artificial sequence
  SiRNA target sequence
gaaaaagaaattatttttacta

SEQ ID NO: 161656 - DNA, 22 bp, Artificial sequence
  SiRNA target sequence
aaaaagaaattatttttactag

SEQ ID NO: 161657 - DNA, 22 bp, Artificial sequence
  SiRNA target sequence
aaaagaaattatttttactagc

SEQ ID NO: 161658 - DNA, 22 bp, Artificial sequence
  SiRNA target sequence
aaagaaattatttttactagcg

SEQ ID NO: 161659 - DNA, 22 bp, Artificial sequence
  SiRNA target sequence
aagaaattatttttactagcgg

SEQ ID NO: 161660 - DNA, 22 bp, Artificial sequence
  SiRNA target sequence
agaaattatttttactagcggt

SEQ ID NO: 161661 - DNA, 22 bp, Artificial sequence
  SiRNA target sequence
gaaattatttttactagcggtg

SEQ ID NO: 161662 - DNA, 22 bp, Artificial sequence
  SiRNA target sequence
aaattatttttactagcggtgc

SEQ ID NO: 161663 - DNA, 22 bp, Artificial sequence
  SiRNA target sequence
aattatttttactagcggtgct

SEQ ID NO: 161664 - DNA, 22 bp, Artificial sequence
  SiRNA target sequence
attatttttactagcggtgcta

SEQ ID NO: 161665 - DNA, 22 bp, Artificial sequence
  SiRNA target sequence
ttatttttactagcggtgctac

SEQ ID NO: 161666 - DNA, 22 bp, Artificial sequence
  SiRNA target sequence
tatttttactagcggtgctact

SEQ ID NO: 161667 - DNA, 22 bp, Artificial sequence
  SiRNA target sequence
atttttactagcggtgctactg

SEQ ID NO: 161668 - DNA, 22 bp, Artificial sequence
  SiRNA target sequence
tttttactagcggtgctactga

SEQ ID NO: 161669 - DNA, 22 bp, Artificial sequence
  SiRNA target sequence
ttttactagcggtgctactgag

SEQ ID NO: 161670 - DNA, 22 bp, Artificial sequence
  SiRNA target sequence
tttactagcggtgctactgaga

SEQ ID NO: 161671 - DNA, 22 bp, Artificial sequence
  SiRNA target sequence
ttactagcggtgctactgagag

SEQ ID NO: 161672 - DNA, 22 bp, Artificial sequence
  SiRNA target sequence
tactagcggtgctactgagagt

SEQ ID NO: 161673 - DNA, 22 bp, Artificial sequence
  SiRNA target sequence
actagcggtgctactgagagta

SEQ ID NO: 161674 - DNA, 22 bp, Artificial sequence
  SiRNA target sequence
ctagcggtgctactgagagtaa

SEQ ID NO: 161675 - DNA, 22 bp, Artificial sequence
  SiRNA target sequence
tagcggtgctactgagagtaac

SEQ ID NO: 161676 - DNA, 22 bp, Artificial sequence
  SiRNA target sequence
agcggtgctactgagagtaaca

SEQ ID NO: 161677 - DNA, 22 bp, Artificial sequence
  SiRNA target sequence
gcggtgctactgagagtaacaa

SEQ ID NO: 161678 - DNA, 22 bp, Artificial sequence
  SiRNA target sequence
cggtgctactgagagtaacaac

SEQ ID NO: 161679 - DNA, 22 bp, Artificial sequence
  SiRNA target sequence
ggtgctactgagagtaacaacc

SEQ ID NO: 161680 - DNA, 22 bp, Artificial sequence
  SiRNA target sequence
gtgctactgagagtaacaacct

SEQ ID NO: 161681 - DNA, 22 bp, Artificial sequence
  SiRNA target sequence
tgctactgagagtaacaacctt

SEQ ID NO: 161682 - DNA, 22 bp, Artificial sequence
  SiRNA target sequence
gctactgagagtaacaaccttg

SEQ ID NO: 161683 - DNA, 22 bp, Artificial sequence
  SiRNA target sequence
ctactgagagtaacaaccttgc

SEQ ID NO: 161684 - DNA, 22 bp, Artificial sequence
  SiRNA target sequence
tactgagagtaacaaccttgca

SEQ ID NO: 161685 - DNA, 22 bp, Artificial sequence
  SiRNA target sequence
actgagagtaacaaccttgcac

SEQ ID NO: 161686 - DNA, 22 bp, Artificial sequence
  SiRNA target sequence
ctgagagtaacaaccttgcact

SEQ ID NO: 161687 - DNA, 22 bp, Artificial sequence
  SiRNA target sequence
tgagagtaacaaccttgcacta

SEQ ID NO: 161688 - DNA, 22 bp, Artificial sequence
  SiRNA target sequence
gagagtaacaaccttgcactaa

SEQ ID NO: 161689 - DNA, 22 bp, Artificial sequence
  SiRNA target sequence
agagtaacaaccttgcactaaa

SEQ ID NO: 161690 - DNA, 22 bp, Artificial sequence
  SiRNA target sequence
gagtaacaaccttgcactaaag

SEQ ID NO: 161691 - DNA, 22 bp, Artificial sequence
  SiRNA target sequence
agtaacaaccttgcactaaagg

SEQ ID NO: 161692 - DNA, 22 bp, Artificial sequence
  SiRNA target sequence
gtaacaaccttgcactaaaggg

SEQ ID NO: 161693 - DNA, 22 bp, Artificial sequence
  SiRNA target sequence
taacaaccttgcactaaagggt

SEQ ID NO: 161694 - DNA, 22 bp, Artificial sequence
  SiRNA target sequence
aacaaccttgcactaaagggtg

SEQ ID NO: 161695 - DNA, 22 bp, Artificial sequence
  SiRNA target sequence
acaaccttgcactaaagggtgt

SEQ ID NO: 161696 - DNA, 22 bp, Artificial sequence
  SiRNA target sequence
caaccttgcactaaagggtgtc

SEQ ID NO: 161697 - DNA, 22 bp, Artificial sequence
  SiRNA target sequence
aaccttgcactaaagggtgtct

SEQ ID NO: 161698 - DNA, 22 bp, Artificial sequence
  SiRNA target sequence
accttgcactaaagggtgtctt

SEQ ID NO: 161699 - DNA, 22 bp, Artificial sequence
  SiRNA target sequence
ccttgcactaaagggtgtcttt

SEQ ID NO: 161700 - DNA, 22 bp, Artificial sequence
  SiRNA target sequence
cttgcactaaagggtgtctttg

SEQ ID NO: 161701 - DNA, 22 bp, Artificial sequence
  SiRNA target sequence
ttgcactaaagggtgtctttgc

SEQ ID NO: 161702 - DNA, 22 bp, Artificial sequence
  SiRNA target sequence
tgcactaaagggtgtctttgca

SEQ ID NO: 161703 - DNA, 22 bp, Artificial sequence
  SiRNA target sequence
gcactaaagggtgtctttgcat

SEQ ID NO: 161704 - DNA, 22 bp, Artificial sequence
  SiRNA target sequence
cactaaagggtgtctttgcatt

SEQ ID NO: 161705 - DNA, 22 bp, Artificial sequence
  SiRNA target sequence
actaaagggtgtctttgcattt

SEQ ID NO: 161706 - DNA, 22 bp, Artificial sequence
  SiRNA target sequence
ctaaagggtgtctttgcatttt

SEQ ID NO: 161707 - DNA, 22 bp, Artificial sequence
  SiRNA target sequence
taaagggtgtctttgcattttt

SEQ ID NO: 161708 - DNA, 22 bp, Artificial sequence
  SiRNA target sequence
aaagggtgtctttgcattttta

SEQ ID NO: 161709 - DNA, 22 bp, Artificial sequence
  SiRNA target sequence
aagggtgtctttgcatttttaa

SEQ ID NO: 161710 - DNA, 22 bp, Artificial sequence
  SiRNA target sequence
agggtgtctttgcatttttaaa

SEQ ID NO: 161711 - DNA, 22 bp, Artificial sequence
  SiRNA target sequence
gggtgtctttgcatttttaaaa

SEQ ID NO: 161712 - DNA, 22 bp, Artificial sequence
  SiRNA target sequence
ggtgtctttgcatttttaaaaa

SEQ ID NO: 161713 - DNA, 22 bp, Artificial sequence
  SiRNA target sequence
gtgtctttgcatttttaaaaaa

SEQ ID NO: 161714 - DNA, 22 bp, Artificial sequence
  SiRNA target sequence
tgtctttgcatttttaaaaaaa

SEQ ID NO: 161715 - DNA, 22 bp, Artificial sequence
  SiRNA target sequence
gtctttgcatttttaaaaaaag

SEQ ID NO: 161716 - DNA, 22 bp, Artificial sequence
  SiRNA target sequence
tctttgcatttttaaaaaaaga

SEQ ID NO: 161717 - DNA, 22 bp, Artificial sequence
  SiRNA target sequence
ctttgcatttttaaaaaaagac

SEQ ID NO: 161718 - DNA, 22 bp, Artificial sequence
  SiRNA target sequence
tttgcatttttaaaaaaagaca

SEQ ID NO: 161719 - DNA, 22 bp, Artificial sequence
  SiRNA target sequence
ttgcatttttaaaaaaagacaa

SEQ ID NO: 161720 - DNA, 22 bp, Artificial sequence
  SiRNA target sequence
tgcatttttaaaaaaagacaat

SEQ ID NO: 161721 - DNA, 22 bp, Artificial sequence
  SiRNA target sequence
gcatttttaaaaaaagacaata

SEQ ID NO: 161722 - DNA, 22 bp, Artificial sequence
  SiRNA target sequence
catttttaaaaaaagacaatag

SEQ ID NO: 161723 - DNA, 22 bp, Artificial sequence
  SiRNA target sequence
atttttaaaaaaagacaatagg

SEQ ID NO: 161724 - DNA, 22 bp, Artificial sequence
  SiRNA target sequence
tttttaaaaaaagacaataggc

SEQ ID NO: 161725 - DNA, 22 bp, Artificial sequence
  SiRNA target sequence
ttttaaaaaaagacaataggcc

SEQ ID NO: 161726 - DNA, 22 bp, Artificial sequence
  SiRNA target sequence
tttaaaaaaagacaataggcct

SEQ ID NO: 161727 - DNA, 22 bp, Artificial sequence
  SiRNA target sequence
ttaaaaaaagacaataggcctg

SEQ ID NO: 161728 - DNA, 22 bp, Artificial sequence
  SiRNA target sequence
taaaaaaagacaataggcctgt

SEQ ID NO: 161729 - DNA, 22 bp, Artificial sequence
  SiRNA target sequence
aaaaaaagacaataggcctgtt

SEQ ID NO: 161730 - DNA, 22 bp, Artificial sequence
  SiRNA target sequence
aaaaaagacaataggcctgttc

SEQ ID NO: 161731 - DNA, 22 bp, Artificial sequence
  SiRNA target sequence
aaaaagacaataggcctgttca

SEQ ID NO: 161732 - DNA, 22 bp, Artificial sequence
  SiRNA target sequence
aaaagacaataggcctgttcat

SEQ ID NO: 161733 - DNA, 22 bp, Artificial sequence
  SiRNA target sequence
aaagacaataggcctgttcata

SEQ ID NO: 161734 - DNA, 22 bp, Artificial sequence
  SiRNA target sequence
aagacaataggcctgttcatat

SEQ ID NO: 161735 - DNA, 22 bp, Artificial sequence
  SiRNA target sequence
agacaataggcctgttcatatc

SEQ ID NO: 161736 - DNA, 22 bp, Artificial sequence
  SiRNA target sequence
gacaataggcctgttcatatca

SEQ ID NO: 161737 - DNA, 22 bp, Artificial sequence
  SiRNA target sequence
acaataggcctgttcatatcat

SEQ ID NO: 161738 - DNA, 22 bp, Artificial sequence
  SiRNA target sequence
caataggcctgttcatatcatt

SEQ ID NO: 161739 - DNA, 22 bp, Artificial sequence
  SiRNA target sequence
aataggcctgttcatatcatta

SEQ ID NO: 161740 - DNA, 22 bp, Artificial sequence
  SiRNA target sequence
ataggcctgttcatatcattac

SEQ ID NO: 161741 - DNA, 22 bp, Artificial sequence
  SiRNA target sequence
taggcctgttcatatcattacc

SEQ ID NO: 161742 - DNA, 22 bp, Artificial sequence
  SiRNA target sequence
aggcctgttcatatcattacca

SEQ ID NO: 161743 - DNA, 22 bp, Artificial sequence
  SiRNA target sequence
ggcctgttcatatcattaccac

SEQ ID NO: 161744 - DNA, 22 bp, Artificial sequence
  SiRNA target sequence
gcctgttcatatcattaccaca

SEQ ID NO: 161745 - DNA, 22 bp, Artificial sequence
  SiRNA target sequence
cctgttcatatcattaccacac

SEQ ID NO: 161746 - DNA, 22 bp, Artificial sequence
  SiRNA target sequence
ctgttcatatcattaccacaca

SEQ ID NO: 161747 - DNA, 22 bp, Artificial sequence
  SiRNA target sequence
tgttcatatcattaccacacaa

SEQ ID NO: 161748 - DNA, 22 bp, Artificial sequence
  SiRNA target sequence
gttcatatcattaccacacaaa

SEQ ID NO: 161749 - DNA, 22 bp, Artificial sequence
  SiRNA target sequence
ttcatatcattaccacacaaat

SEQ ID NO: 161750 - DNA, 22 bp, Artificial sequence
  SiRNA target sequence
tcatatcattaccacacaaatt

SEQ ID NO: 161751 - DNA, 22 bp, Artificial sequence
  SiRNA target sequence
catatcattaccacacaaattg

SEQ ID NO: 161752 - DNA, 22 bp, Artificial sequence
  SiRNA target sequence
atatcattaccacacaaattga

SEQ ID NO: 161753 - DNA, 22 bp, Artificial sequence
  SiRNA target sequence
tatcattaccacacaaattgaa

SEQ ID NO: 161754 - DNA, 22 bp, Artificial sequence
  SiRNA target sequence
atcattaccacacaaattgaac

SEQ ID NO: 161755 - DNA, 22 bp, Artificial sequence
  SiRNA target sequence
tcattaccacacaaattgaaca

SEQ ID NO: 161756 - DNA, 22 bp, Artificial sequence
  SiRNA target sequence
cattaccacacaaattgaacat

SEQ ID NO: 161757 - DNA, 22 bp, Artificial sequence
  SiRNA target sequence
attaccacacaaattgaacata

SEQ ID NO: 161758 - DNA, 22 bp, Artificial sequence
  SiRNA target sequence
ttaccacacaaattgaacataa

SEQ ID NO: 161759 - DNA, 22 bp, Artificial sequence
  SiRNA target sequence
taccacacaaattgaacataaa

SEQ ID NO: 161760 - DNA, 22 bp, Artificial sequence
  SiRNA target sequence
accacacaaattgaacataaat

SEQ ID NO: 161761 - DNA, 22 bp, Artificial sequence
  SiRNA target sequence
ccacacaaattgaacataaatg

SEQ ID NO: 161762 - DNA, 22 bp, Artificial sequence
  SiRNA target sequence
cacacaaattgaacataaatgt

SEQ ID NO: 161763 - DNA, 22 bp, Artificial sequence
  SiRNA target sequence
acacaaattgaacataaatgtg

SEQ ID NO: 161764 - DNA, 22 bp, Artificial sequence
  SiRNA target sequence
cacaaattgaacataaatgtgt

SEQ ID NO: 161765 - DNA, 22 bp, Artificial sequence
  SiRNA target sequence
acaaattgaacataaatgtgta

SEQ ID NO: 161766 - DNA, 22 bp, Artificial sequence
  SiRNA target sequence
caaattgaacataaatgtgtat

SEQ ID NO: 161767 - DNA, 22 bp, Artificial sequence
  SiRNA target sequence
aaattgaacataaatgtgtatt

SEQ ID NO: 161768 - DNA, 22 bp, Artificial sequence
  SiRNA target sequence
aattgaacataaatgtgtattg

SEQ ID NO: 161769 - DNA, 22 bp, Artificial sequence
  SiRNA target sequence
attgaacataaatgtgtattgg

SEQ ID NO: 161770 - DNA, 22 bp, Artificial sequence
  SiRNA target sequence
ttgaacataaatgtgtattgga

SEQ ID NO: 161771 - DNA, 22 bp, Artificial sequence
  SiRNA target sequence
tgaacataaatgtgtattggac

SEQ ID NO: 161772 - DNA, 22 bp, Artificial sequence
  SiRNA target sequence
gaacataaatgtgtattggaca

SEQ ID NO: 161773 - DNA, 22 bp, Artificial sequence
  SiRNA target sequence
aacataaatgtgtattggacac

SEQ ID NO: 161774 - DNA, 22 bp, Artificial sequence
  SiRNA target sequence
acataaatgtgtattggacaca

SEQ ID NO: 161775 - DNA, 22 bp, Artificial sequence
  SiRNA target sequence
cataaatgtgtattggacacat

SEQ ID NO: 161776 - DNA, 22 bp, Artificial sequence
  SiRNA target sequence
ataaatgtgtattggacacatg

SEQ ID NO: 161777 - DNA, 22 bp, Artificial sequence
  SiRNA target sequence
taaatgtgtattggacacatgt

SEQ ID NO: 161778 - DNA, 22 bp, Artificial sequence
  SiRNA target sequence
aaatgtgtattggacacatgta

SEQ ID NO: 161779 - DNA, 22 bp, Artificial sequence
  SiRNA target sequence
aatgtgtattggacacatgtag

SEQ ID NO: 161780 - DNA, 22 bp, Artificial sequence
  SiRNA target sequence
atgtgtattggacacatgtaga

SEQ ID NO: 161781 - DNA, 22 bp, Artificial sequence
  SiRNA target sequence
tgtgtattggacacatgtagaa

SEQ ID NO: 161782 - DNA, 22 bp, Artificial sequence
  SiRNA target sequence
gtgtattggacacatgtagaag

SEQ ID NO: 161783 - DNA, 22 bp, Artificial sequence
  SiRNA target sequence
tgtattggacacatgtagaaga

SEQ ID NO: 161784 - DNA, 22 bp, Artificial sequence
  SiRNA target sequence
gtattggacacatgtagaagat

SEQ ID NO: 161785 - DNA, 22 bp, Artificial sequence
  SiRNA target sequence
tattggacacatgtagaagatt

SEQ ID NO: 161786 - DNA, 22 bp, Artificial sequence
  SiRNA target sequence
attggacacatgtagaagatta

SEQ ID NO: 161787 - DNA, 22 bp, Artificial sequence
  SiRNA target sequence
ttggacacatgtagaagattag

SEQ ID NO: 161788 - DNA, 22 bp, Artificial sequence
  SiRNA target sequence
tggacacatgtagaagattaga

SEQ ID NO: 161789 - DNA, 22 bp, Artificial sequence
  SiRNA target sequence
ggacacatgtagaagattagaa

SEQ ID NO: 161790 - DNA, 22 bp, Artificial sequence
  SiRNA target sequence
gacacatgtagaagattagaag

SEQ ID NO: 161791 - DNA, 22 bp, Artificial sequence
  SiRNA target sequence
acacatgtagaagattagaaga

SEQ ID NO: 161792 - DNA, 22 bp, Artificial sequence
  SiRNA target sequence
cacatgtagaagattagaagaa

SEQ ID NO: 161793 - DNA, 22 bp, Artificial sequence
  SiRNA target sequence
acatgtagaagattagaagaag

SEQ ID NO: 161794 - DNA, 22 bp, Artificial sequence
  SiRNA target sequence
catgtagaagattagaagaaga

SEQ ID NO: 161795 - DNA, 22 bp, Artificial sequence
  SiRNA target sequence
atgtagaagattagaagaagaa

SEQ ID NO: 161796 - DNA, 22 bp, Artificial sequence
  SiRNA target sequence
tgtagaagattagaagaagaag

SEQ ID NO: 161797 - DNA, 22 bp, Artificial sequence
  SiRNA target sequence
gtagaagattagaagaagaagg

SEQ ID NO: 161798 - DNA, 22 bp, Artificial sequence
  SiRNA target sequence
tagaagattagaagaagaagga

SEQ ID NO: 161799 - DNA, 22 bp, Artificial sequence
  SiRNA target sequence
agaagattagaagaagaaggag

SEQ ID NO: 161800 - DNA, 22 bp, Artificial sequence
  SiRNA target sequence
gaagattagaagaagaaggagc

SEQ ID NO: 161801 - DNA, 22 bp, Artificial sequence
  SiRNA target sequence
aagattagaagaagaaggagct

SEQ ID NO: 161802 - DNA, 22 bp, Artificial sequence
  SiRNA target sequence
agattagaagaagaaggagcta

SEQ ID NO: 161803 - DNA, 22 bp, Artificial sequence
  SiRNA target sequence
gattagaagaagaaggagctac

SEQ ID NO: 161804 - DNA, 22 bp, Artificial sequence
  SiRNA target sequence
attagaagaagaaggagctaca

SEQ ID NO: 161805 - DNA, 22 bp, Artificial sequence
  SiRNA target sequence
ttagaagaagaaggagctacag

SEQ ID NO: 161806 - DNA, 22 bp, Artificial sequence
  SiRNA target sequence
tagaagaagaaggagctacagt

SEQ ID NO: 161807 - DNA, 22 bp, Artificial sequence
  SiRNA target sequence
agaagaagaaggagctacagtg

SEQ ID NO: 161808 - DNA, 22 bp, Artificial sequence
  SiRNA target sequence
gaagaagaaggagctacagtga

SEQ ID NO: 161809 - DNA, 22 bp, Artificial sequence
  SiRNA target sequence
aagaagaaggagctacagtgac

SEQ ID NO: 161810 - DNA, 22 bp, Artificial sequence
  SiRNA target sequence
agaagaaggagctacagtgact

SEQ ID NO: 161811 - DNA, 22 bp, Artificial sequence
  SiRNA target sequence
gaagaaggagctacagtgactt

SEQ ID NO: 161812 - DNA, 22 bp, Artificial sequence
  SiRNA target sequence
aagaaggagctacagtgactta

SEQ ID NO: 161813 - DNA, 22 bp, Artificial sequence
  SiRNA target sequence
agaaggagctacagtgacttat

SEQ ID NO: 161814 - DNA, 22 bp, Artificial sequence
  SiRNA target sequence
gaaggagctacagtgacttatt

SEQ ID NO: 161815 - DNA, 22 bp, Artificial sequence
  SiRNA target sequence
aaggagctacagtgacttattt

SEQ ID NO: 161816 - DNA, 22 bp, Artificial sequence
  SiRNA target sequence
aggagctacagtgacttatttg

SEQ ID NO: 161817 - DNA, 22 bp, Artificial sequence
  SiRNA target sequence
ggagctacagtgacttatttgc

SEQ ID NO: 161818 - DNA, 22 bp, Artificial sequence
  SiRNA target sequence
gagctacagtgacttatttgcc

SEQ ID NO: 161819 - DNA, 22 bp, Artificial sequence
  SiRNA target sequence
agctacagtgacttatttgcct

SEQ ID NO: 161820 - DNA, 22 bp, Artificial sequence
  SiRNA target sequence
gctacagtgacttatttgcctg

SEQ ID NO: 161821 - DNA, 22 bp, Artificial sequence
  SiRNA target sequence
ctacagtgacttatttgcctgt

SEQ ID NO: 161822 - DNA, 22 bp, Artificial sequence
  SiRNA target sequence
tacagtgacttatttgcctgta

SEQ ID NO: 161823 - DNA, 22 bp, Artificial sequence
  SiRNA target sequence
acagtgacttatttgcctgtag

SEQ ID NO: 161824 - DNA, 22 bp, Artificial sequence
  SiRNA target sequence
cagtgacttatttgcctgtaga

SEQ ID NO: 161825 - DNA, 22 bp, Artificial sequence
  SiRNA target sequence
agtgacttatttgcctgtagat

SEQ ID NO: 161826 - DNA, 22 bp, Artificial sequence
  SiRNA target sequence
gtgacttatttgcctgtagata

SEQ ID NO: 161827 - DNA, 22 bp, Artificial sequence
  SiRNA target sequence
tgacttatttgcctgtagataa

SEQ ID NO: 161828 - DNA, 22 bp, Artificial sequence
  SiRNA target sequence
gacttatttgcctgtagataaa

SEQ ID NO: 161829 - DNA, 22 bp, Artificial sequence
  SiRNA target sequence
acttatttgcctgtagataaaa

SEQ ID NO: 161830 - DNA, 22 bp, Artificial sequence
  SiRNA target sequence
cttatttgcctgtagataaaaa

SEQ ID NO: 161831 - DNA, 22 bp, Artificial sequence
  SiRNA target sequence
ttatttgcctgtagataaaaat

SEQ ID NO: 161832 - DNA, 22 bp, Artificial sequence
  SiRNA target sequence
tatttgcctgtagataaaaatg

SEQ ID NO: 161833 - DNA, 22 bp, Artificial sequence
  SiRNA target sequence
atttgcctgtagataaaaatgg

SEQ ID NO: 161834 - DNA, 22 bp, Artificial sequence
  SiRNA target sequence
tttgcctgtagataaaaatgga

SEQ ID NO: 161835 - DNA, 22 bp, Artificial sequence
  SiRNA target sequence
ttgcctgtagataaaaatggaa

SEQ ID NO: 161836 - DNA, 22 bp, Artificial sequence
  SiRNA target sequence
tgcctgtagataaaaatggaat

SEQ ID NO: 161837 - DNA, 22 bp, Artificial sequence
  SiRNA target sequence
gcctgtagataaaaatggaata

SEQ ID NO: 161838 - DNA, 22 bp, Artificial sequence
  SiRNA target sequence
cctgtagataaaaatggaatag

SEQ ID NO: 161839 - DNA, 22 bp, Artificial sequence
  SiRNA target sequence
ctgtagataaaaatggaatagt

SEQ ID NO: 161840 - DNA, 22 bp, Artificial sequence
  SiRNA target sequence
tgtagataaaaatggaatagta

SEQ ID NO: 161841 - DNA, 22 bp, Artificial sequence
  SiRNA target sequence
gtagataaaaatggaatagtag

SEQ ID NO: 161842 - DNA, 22 bp, Artificial sequence
  SiRNA target sequence
tagataaaaatggaatagtaga

SEQ ID NO: 161843 - DNA, 22 bp, Artificial sequence
  SiRNA target sequence
agataaaaatggaatagtagat

SEQ ID NO: 161844 - DNA, 22 bp, Artificial sequence
  SiRNA target sequence
gataaaaatggaatagtagatc

SEQ ID NO: 161845 - DNA, 22 bp, Artificial sequence
  SiRNA target sequence
ataaaaatggaatagtagatcc

SEQ ID NO: 161846 - DNA, 22 bp, Artificial sequence
  SiRNA target sequence
taaaaatggaatagtagatccg

SEQ ID NO: 161847 - DNA, 22 bp, Artificial sequence
  SiRNA target sequence
aaaaatggaatagtagatccgc

SEQ ID NO: 161848 - DNA, 22 bp, Artificial sequence
  SiRNA target sequence
aaaatggaatagtagatccgca

SEQ ID NO: 161849 - DNA, 22 bp, Artificial sequence
  SiRNA target sequence
aaatggaatagtagatccgcaa

SEQ ID NO: 161850 - DNA, 22 bp, Artificial sequence
  SiRNA target sequence
aatggaatagtagatccgcaat

SEQ ID NO: 161851 - DNA, 22 bp, Artificial sequence
  SiRNA target sequence
atggaatagtagatccgcaatt

SEQ ID NO: 161852 - DNA, 22 bp, Artificial sequence
  SiRNA target sequence
tggaatagtagatccgcaatta

SEQ ID NO: 161853 - DNA, 22 bp, Artificial sequence
  SiRNA target sequence
ggaatagtagatccgcaattaa

SEQ ID NO: 161854 - DNA, 22 bp, Artificial sequence
  SiRNA target sequence
gaatagtagatccgcaattaat

SEQ ID NO: 161855 - DNA, 22 bp, Artificial sequence
  SiRNA target sequence
aatagtagatccgcaattaata

SEQ ID NO: 161856 - DNA, 22 bp, Artificial sequence
  SiRNA target sequence
atagtagatccgcaattaataa

SEQ ID NO: 161857 - DNA, 22 bp, Artificial sequence
  SiRNA target sequence
tagtagatccgcaattaataaa

SEQ ID NO: 161858 - DNA, 22 bp, Artificial sequence
  SiRNA target sequence
agtagatccgcaattaataaaa

SEQ ID NO: 161859 - DNA, 22 bp, Artificial sequence
  SiRNA target sequence
gtagatccgcaattaataaaaa

SEQ ID NO: 161860 - DNA, 22 bp, Artificial sequence
  SiRNA target sequence
tagatccgcaattaataaaaaa

SEQ ID NO: 161861 - DNA, 22 bp, Artificial sequence
  SiRNA target sequence
agatccgcaattaataaaaaac

SEQ ID NO: 161862 - DNA, 22 bp, Artificial sequence
  SiRNA target sequence
gatccgcaattaataaaaaaca

SEQ ID NO: 161863 - DNA, 22 bp, Artificial sequence
  SiRNA target sequence
atccgcaattaataaaaaacag

SEQ ID NO: 161864 - DNA, 22 bp, Artificial sequence
  SiRNA target sequence
tccgcaattaataaaaaacagt

SEQ ID NO: 161865 - DNA, 22 bp, Artificial sequence
  SiRNA target sequence
ccgcaattaataaaaaacagta

SEQ ID NO: 161866 - DNA, 22 bp, Artificial sequence
  SiRNA target sequence
cgcaattaataaaaaacagtat

SEQ ID NO: 161867 - DNA, 22 bp, Artificial sequence
  SiRNA target sequence
gcaattaataaaaaacagtatt

SEQ ID NO: 161868 - DNA, 22 bp, Artificial sequence
  SiRNA target sequence
caattaataaaaaacagtatta

SEQ ID NO: 161869 - DNA, 22 bp, Artificial sequence
  SiRNA target sequence
aattaataaaaaacagtattac

SEQ ID NO: 161870 - DNA, 22 bp, Artificial sequence
  SiRNA target sequence
attaataaaaaacagtattact

SEQ ID NO: 161871 - DNA, 22 bp, Artificial sequence
  SiRNA target sequence
ttaataaaaaacagtattacta

SEQ ID NO: 161872 - DNA, 22 bp, Artificial sequence
  SiRNA target sequence
taataaaaaacagtattactaa

SEQ ID NO: 161873 - DNA, 22 bp, Artificial sequence
  SiRNA target sequence
aataaaaaacagtattactaaa

SEQ ID NO: 161874 - DNA, 22 bp, Artificial sequence
  SiRNA target sequence
ataaaaaacagtattactaaag

SEQ ID NO: 161875 - DNA, 22 bp, Artificial sequence
  SiRNA target sequence
taaaaaacagtattactaaaga

SEQ ID NO: 161876 - DNA, 22 bp, Artificial sequence
  SiRNA target sequence
aaaaaacagtattactaaagat

SEQ ID NO: 161877 - DNA, 22 bp, Artificial sequence
  SiRNA target sequence
aaaaacagtattactaaagata

SEQ ID NO: 161878 - DNA, 22 bp, Artificial sequence
  SiRNA target sequence
aaaacagtattactaaagatac

SEQ ID NO: 161879 - DNA, 22 bp, Artificial sequence
  SiRNA target sequence
aaacagtattactaaagatacc

SEQ ID NO: 161880 - DNA, 22 bp, Artificial sequence
  SiRNA target sequence
aacagtattactaaagataccg

SEQ ID NO: 161881 - DNA, 22 bp, Artificial sequence
  SiRNA target sequence
acagtattactaaagataccgc

SEQ ID NO: 161882 - DNA, 22 bp, Artificial sequence
  SiRNA target sequence
cagtattactaaagataccgct

SEQ ID NO: 161883 - DNA, 22 bp, Artificial sequence
  SiRNA target sequence
agtattactaaagataccgctt

SEQ ID NO: 161884 - DNA, 22 bp, Artificial sequence
  SiRNA target sequence
gtattactaaagataccgcttt

SEQ ID NO: 161885 - DNA, 22 bp, Artificial sequence
  SiRNA target sequence
tattactaaagataccgctttg

SEQ ID NO: 161886 - DNA, 22 bp, Artificial sequence
  SiRNA target sequence
attactaaagataccgctttgg

SEQ ID NO: 161887 - DNA, 22 bp, Artificial sequence
  SiRNA target sequence
ttactaaagataccgctttggt

SEQ ID NO: 161888 - DNA, 22 bp, Artificial sequence
  SiRNA target sequence
tactaaagataccgctttggtg

SEQ ID NO: 161889 - DNA, 22 bp, Artificial sequence
  SiRNA target sequence
actaaagataccgctttggtgt

SEQ ID NO: 161890 - DNA, 22 bp, Artificial sequence
  SiRNA target sequence
ctaaagataccgctttggtgtc

SEQ ID NO: 161891 - DNA, 22 bp, Artificial sequence
  SiRNA target sequence
taaagataccgctttggtgtct

SEQ ID NO: 161892 - DNA, 22 bp, Artificial sequence
  SiRNA target sequence
aaagataccgctttggtgtctg

SEQ ID NO: 161893 - DNA, 22 bp, Artificial sequence
  SiRNA target sequence
aagataccgctttggtgtctgt

SEQ ID NO: 161894 - DNA, 22 bp, Artificial sequence
  SiRNA target sequence
agataccgctttggtgtctgtt

SEQ ID NO: 161895 - DNA, 22 bp, Artificial sequence
  SiRNA target sequence
gataccgctttggtgtctgtta

SEQ ID NO: 161896 - DNA, 22 bp, Artificial sequence
  SiRNA target sequence
ataccgctttggtgtctgttat

SEQ ID NO: 161897 - DNA, 22 bp, Artificial sequence
  SiRNA target sequence
taccgctttggtgtctgttatg

SEQ ID NO: 161898 - DNA, 22 bp, Artificial sequence
  SiRNA target sequence
accgctttggtgtctgttatgg

SEQ ID NO: 161899 - DNA, 22 bp, Artificial sequence
  SiRNA target sequence
ccgctttggtgtctgttatggc

SEQ ID NO: 161900 - DNA, 22 bp, Artificial sequence
  SiRNA target sequence
cgctttggtgtctgttatggct

SEQ ID NO: 161901 - DNA, 22 bp, Artificial sequence
  SiRNA target sequence
gctttggtgtctgttatggctg

SEQ ID NO: 161902 - DNA, 22 bp, Artificial sequence
  SiRNA target sequence
ctttggtgtctgttatggctgt

SEQ ID NO: 161903 - DNA, 22 bp, Artificial sequence
  SiRNA target sequence
tttggtgtctgttatggctgtt

SEQ ID NO: 161904 - DNA, 22 bp, Artificial sequence
  SiRNA target sequence
ttggtgtctgttatggctgtta

SEQ ID NO: 161905 - DNA, 22 bp, Artificial sequence
  SiRNA target sequence
tggtgtctgttatggctgttaa

SEQ ID NO: 161906 - DNA, 22 bp, Artificial sequence
  SiRNA target sequence
ggtgtctgttatggctgttaac

SEQ ID NO: 161907 - DNA, 22 bp, Artificial sequence
  SiRNA target sequence
gtgtctgttatggctgttaaca

SEQ ID NO: 161908 - DNA, 22 bp, Artificial sequence
  SiRNA target sequence
tgtctgttatggctgttaacaa

SEQ ID NO: 161909 - DNA, 22 bp, Artificial sequence
  SiRNA target sequence
gtctgttatggctgttaacaac

SEQ ID NO: 161910 - DNA, 22 bp, Artificial sequence
  SiRNA target sequence
tctgttatggctgttaacaacg

SEQ ID NO: 161911 - DNA, 22 bp, Artificial sequence
  SiRNA target sequence
ctgttatggctgttaacaacga

SEQ ID NO: 161912 - DNA, 22 bp, Artificial sequence
  SiRNA target sequence
tgttatggctgttaacaacgaa

SEQ ID NO: 161913 - DNA, 22 bp, Artificial sequence
  SiRNA target sequence
gttatggctgttaacaacgaaa

SEQ ID NO: 161914 - DNA, 22 bp, Artificial sequence
  SiRNA target sequence
ttatggctgttaacaacgaaat

SEQ ID NO: 161915 - DNA, 22 bp, Artificial sequence
  SiRNA target sequence
tatggctgttaacaacgaaatg

SEQ ID NO: 161916 - DNA, 22 bp, Artificial sequence
  SiRNA target sequence
atggctgttaacaacgaaatgg

SEQ ID NO: 161917 - DNA, 22 bp, Artificial sequence
  SiRNA target sequence
tggctgttaacaacgaaatggg

SEQ ID NO: 161918 - DNA, 22 bp, Artificial sequence
  SiRNA target sequence
ggctgttaacaacgaaatggga

SEQ ID NO: 161919 - DNA, 22 bp, Artificial sequence
  SiRNA target sequence
gctgttaacaacgaaatgggag

SEQ ID NO: 161920 - DNA, 22 bp, Artificial sequence
  SiRNA target sequence
ctgttaacaacgaaatgggagc

SEQ ID NO: 161921 - DNA, 22 bp, Artificial sequence
  SiRNA target sequence
tgttaacaacgaaatgggagca

SEQ ID NO: 161922 - DNA, 22 bp, Artificial sequence
  SiRNA target sequence
gttaacaacgaaatgggagcaa

SEQ ID NO: 161923 - DNA, 22 bp, Artificial sequence
  SiRNA target sequence
ttaacaacgaaatgggagcaat

SEQ ID NO: 161924 - DNA, 22 bp, Artificial sequence
  SiRNA target sequence
taacaacgaaatgggagcaata

SEQ ID NO: 161925 - DNA, 22 bp, Artificial sequence
  SiRNA target sequence
aacaacgaaatgggagcaatac

SEQ ID NO: 161926 - DNA, 22 bp, Artificial sequence
  SiRNA target sequence
acaacgaaatgggagcaataca

SEQ ID NO: 161927 - DNA, 22 bp, Artificial sequence
  SiRNA target sequence
caacgaaatgggagcaatacaa

SEQ ID NO: 161928 - DNA, 22 bp, Artificial sequence
  SiRNA target sequence
aacgaaatgggagcaatacaac

SEQ ID NO: 161929 - DNA, 22 bp, Artificial sequence
  SiRNA target sequence
acgaaatgggagcaatacaacc

SEQ ID NO: 161930 - DNA, 22 bp, Artificial sequence
  SiRNA target sequence
cgaaatgggagcaatacaaccg

SEQ ID NO: 161931 - DNA, 22 bp, Artificial sequence
  SiRNA target sequence
gaaatgggagcaatacaaccgc

SEQ ID NO: 161932 - DNA, 22 bp, Artificial sequence
  SiRNA target sequence
aaatgggagcaatacaaccgct

SEQ ID NO: 161933 - DNA, 22 bp, Artificial sequence
  SiRNA target sequence
aatgggagcaatacaaccgctt

SEQ ID NO: 161934 - DNA, 22 bp, Artificial sequence
  SiRNA target sequence
atgggagcaatacaaccgctta

SEQ ID NO: 161935 - DNA, 22 bp, Artificial sequence
  SiRNA target sequence
tgggagcaatacaaccgcttaa

SEQ ID NO: 161936 - DNA, 22 bp, Artificial sequence
  SiRNA target sequence
gggagcaatacaaccgcttaaa

SEQ ID NO: 161937 - DNA, 22 bp, Artificial sequence
  SiRNA target sequence
ggagcaatacaaccgcttaaag

SEQ ID NO: 161938 - DNA, 22 bp, Artificial sequence
  SiRNA target sequence
gagcaatacaaccgcttaaaga

SEQ ID NO: 161939 - DNA, 22 bp, Artificial sequence
  SiRNA target sequence
agcaatacaaccgcttaaagaa

SEQ ID NO: 161940 - DNA, 22 bp, Artificial sequence
  SiRNA target sequence
gcaatacaaccgcttaaagaaa

SEQ ID NO: 161941 - DNA, 22 bp, Artificial sequence
  SiRNA target sequence
caatacaaccgcttaaagaaat

SEQ ID NO: 161942 - DNA, 22 bp, Artificial sequence
  SiRNA target sequence
aatacaaccgcttaaagaaata

SEQ ID NO: 161943 - DNA, 22 bp, Artificial sequence
  SiRNA target sequence
atacaaccgcttaaagaaatag

SEQ ID NO: 161944 - DNA, 22 bp, Artificial sequence
  SiRNA target sequence
tacaaccgcttaaagaaatagg

SEQ ID NO: 161945 - DNA, 22 bp, Artificial sequence
  SiRNA target sequence
acaaccgcttaaagaaatagga

SEQ ID NO: 161946 - DNA, 22 bp, Artificial sequence
  SiRNA target sequence
caaccgcttaaagaaataggaa

SEQ ID NO: 161947 - DNA, 22 bp, Artificial sequence
  SiRNA target sequence
aaccgcttaaagaaataggaag

SEQ ID NO: 161948 - DNA, 22 bp, Artificial sequence
  SiRNA target sequence
accgcttaaagaaataggaaga

SEQ ID NO: 161949 - DNA, 22 bp, Artificial sequence
  SiRNA target sequence
ccgcttaaagaaataggaagaa

SEQ ID NO: 161950 - DNA, 22 bp, Artificial sequence
  SiRNA target sequence
cgcttaaagaaataggaagaat

SEQ ID NO: 161951 - DNA, 22 bp, Artificial sequence
  SiRNA target sequence
gcttaaagaaataggaagaata

SEQ ID NO: 161952 - DNA, 22 bp, Artificial sequence
  SiRNA target sequence
cttaaagaaataggaagaatat

SEQ ID NO: 161953 - DNA, 22 bp, Artificial sequence
  SiRNA target sequence
ttaaagaaataggaagaatatg

SEQ ID NO: 161954 - DNA, 22 bp, Artificial sequence
  SiRNA target sequence
taaagaaataggaagaatatgt

SEQ ID NO: 161955 - DNA, 22 bp, Artificial sequence
  SiRNA target sequence
aaagaaataggaagaatatgta

SEQ ID NO: 161956 - DNA, 22 bp, Artificial sequence
  SiRNA target sequence
aagaaataggaagaatatgtaa

SEQ ID NO: 161957 - DNA, 22 bp, Artificial sequence
  SiRNA target sequence
agaaataggaagaatatgtaaa

SEQ ID NO: 161958 - DNA, 22 bp, Artificial sequence
  SiRNA target sequence
gaaataggaagaatatgtaaag

SEQ ID NO: 161959 - DNA, 22 bp, Artificial sequence
  SiRNA target sequence
aaataggaagaatatgtaaaga

SEQ ID NO: 161960 - DNA, 22 bp, Artificial sequence
  SiRNA target sequence
aataggaagaatatgtaaagaa

SEQ ID NO: 161961 - DNA, 22 bp, Artificial sequence
  SiRNA target sequence
ataggaagaatatgtaaagaaa

SEQ ID NO: 161962 - DNA, 22 bp, Artificial sequence
  SiRNA target sequence
taggaagaatatgtaaagaaaa

SEQ ID NO: 161963 - DNA, 22 bp, Artificial sequence
  SiRNA target sequence
aggaagaatatgtaaagaaaat

SEQ ID NO: 161964 - DNA, 22 bp, Artificial sequence
  SiRNA target sequence
ggaagaatatgtaaagaaaata

SEQ ID NO: 161965 - DNA, 22 bp, Artificial sequence
  SiRNA target sequence
gaagaatatgtaaagaaaataa

SEQ ID NO: 161966 - DNA, 22 bp, Artificial sequence
  SiRNA target sequence
aagaatatgtaaagaaaataat

SEQ ID NO: 161967 - DNA, 22 bp, Artificial sequence
  SiRNA target sequence
agaatatgtaaagaaaataata

SEQ ID NO: 161968 - DNA, 22 bp, Artificial sequence
  SiRNA target sequence
gaatatgtaaagaaaataatat

SEQ ID NO: 161969 - DNA, 22 bp, Artificial sequence
  SiRNA target sequence
aatatgtaaagaaaataatatt

SEQ ID NO: 161970 - DNA, 22 bp, Artificial sequence
  SiRNA target sequence
atatgtaaagaaaataatattt

SEQ ID NO: 161971 - DNA, 22 bp, Artificial sequence
  SiRNA target sequence
tatgtaaagaaaataatatttt

SEQ ID NO: 161972 - DNA, 22 bp, Artificial sequence
  SiRNA target sequence
atgtaaagaaaataatatttta

SEQ ID NO: 161973 - DNA, 22 bp, Artificial sequence
  SiRNA target sequence
tgtaaagaaaataatattttat

SEQ ID NO: 161974 - DNA, 22 bp, Artificial sequence
  SiRNA target sequence
gtaaagaaaataatattttatt

SEQ ID NO: 161975 - DNA, 22 bp, Artificial sequence
  SiRNA target sequence
taaagaaaataatattttattt

SEQ ID NO: 161976 - DNA, 22 bp, Artificial sequence
  SiRNA target sequence
aaagaaaataatattttatttc

SEQ ID NO: 161977 - DNA, 22 bp, Artificial sequence
  SiRNA target sequence
aagaaaataatattttatttca

SEQ ID NO: 161978 - DNA, 22 bp, Artificial sequence
  SiRNA target sequence
agaaaataatattttatttcac

SEQ ID NO: 161979 - DNA, 22 bp, Artificial sequence
  SiRNA target sequence
gaaaataatattttatttcaca

SEQ ID NO: 161980 - DNA, 22 bp, Artificial sequence
  SiRNA target sequence
aaaataatattttatttcacac

SEQ ID NO: 161981 - DNA, 22 bp, Artificial sequence
  SiRNA target sequence
aaataatattttatttcacact

SEQ ID NO: 161982 - DNA, 22 bp, Artificial sequence
  SiRNA target sequence
aataatattttatttcacactg

SEQ ID NO: 161983 - DNA, 22 bp, Artificial sequence
  SiRNA target sequence
ataatattttatttcacactga

SEQ ID NO: 161984 - DNA, 22 bp, Artificial sequence
  SiRNA target sequence
taatattttatttcacactgat

SEQ ID NO: 161985 - DNA, 22 bp, Artificial sequence
  SiRNA target sequence
aatattttatttcacactgatg

SEQ ID NO: 161986 - DNA, 22 bp, Artificial sequence
  SiRNA target sequence
atattttatttcacactgatgc

SEQ ID NO: 161987 - DNA, 22 bp, Artificial sequence
  SiRNA target sequence
tattttatttcacactgatgca

SEQ ID NO: 161988 - DNA, 22 bp, Artificial sequence
  SiRNA target sequence
attttatttcacactgatgcag

SEQ ID NO: 161989 - DNA, 22 bp, Artificial sequence
  SiRNA target sequence
ttttatttcacactgatgcagc

SEQ ID NO: 161990 - DNA, 22 bp, Artificial sequence
  SiRNA target sequence
tttatttcacactgatgcagca

SEQ ID NO: 161991 - DNA, 22 bp, Artificial sequence
  SiRNA target sequence
ttatttcacactgatgcagcac

SEQ ID NO: 161992 - DNA, 22 bp, Artificial sequence
  SiRNA target sequence
tatttcacactgatgcagcaca

SEQ ID NO: 161993 - DNA, 22 bp, Artificial sequence
  SiRNA target sequence
atttcacactgatgcagcacaa

SEQ ID NO: 161994 - DNA, 22 bp, Artificial sequence
  SiRNA target sequence
tttcacactgatgcagcacaag

SEQ ID NO: 161995 - DNA, 22 bp, Artificial sequence
  SiRNA target sequence
ttcacactgatgcagcacaagc

SEQ ID NO: 161996 - DNA, 22 bp, Artificial sequence
  SiRNA target sequence
tcacactgatgcagcacaagca

SEQ ID NO: 161997 - DNA, 22 bp, Artificial sequence
  SiRNA target sequence
cacactgatgcagcacaagcag

SEQ ID NO: 161998 - DNA, 22 bp, Artificial sequence
  SiRNA target sequence
acactgatgcagcacaagcagt

SEQ ID NO: 161999 - DNA, 22 bp, Artificial sequence
  SiRNA target sequence
cactgatgcagcacaagcagtt

SEQ ID NO: 162000 - DNA, 22 bp, Artificial sequence
  SiRNA target sequence
actgatgcagcacaagcagttg

SEQ ID NO: 162001 - DNA, 22 bp, Artificial sequence
  SiRNA target sequence
ctgatgcagcacaagcagttgg

SEQ ID NO: 162002 - DNA, 22 bp, Artificial sequence
  SiRNA target sequence
tgatgcagcacaagcagttggt

SEQ ID NO: 162003 - DNA, 22 bp, Artificial sequence
  SiRNA target sequence
gatgcagcacaagcagttggta

SEQ ID NO: 162004 - DNA, 22 bp, Artificial sequence
  SiRNA target sequence
atgcagcacaagcagttggtaa

SEQ ID NO: 162005 - DNA, 22 bp, Artificial sequence
  SiRNA target sequence
tgcagcacaagcagttggtaat

SEQ ID NO: 162006 - DNA, 22 bp, Artificial sequence
  SiRNA target sequence
gcagcacaagcagttggtaata

SEQ ID NO: 162007 - DNA, 22 bp, Artificial sequence
  SiRNA target sequence
cagcacaagcagttggtaatat

SEQ ID NO: 162008 - DNA, 22 bp, Artificial sequence
  SiRNA target sequence
agcacaagcagttggtaatata

SEQ ID NO: 162009 - DNA, 22 bp, Artificial sequence
  SiRNA target sequence
gcacaagcagttggtaatatag

SEQ ID NO: 162010 - DNA, 22 bp, Artificial sequence
  SiRNA target sequence
cacaagcagttggtaatataga

SEQ ID NO: 162011 - DNA, 22 bp, Artificial sequence
  SiRNA target sequence
acaagcagttggtaatatagat

SEQ ID NO: 162012 - DNA, 22 bp, Artificial sequence
  SiRNA target sequence
caagcagttggtaatatagata

SEQ ID NO: 162013 - DNA, 22 bp, Artificial sequence
  SiRNA target sequence
aagcagttggtaatatagatat

SEQ ID NO: 162014 - DNA, 22 bp, Artificial sequence
  SiRNA target sequence
agcagttggtaatatagatatt

SEQ ID NO: 162015 - DNA, 22 bp, Artificial sequence
  SiRNA target sequence
gcagttggtaatatagatattg

SEQ ID NO: 162016 - DNA, 22 bp, Artificial sequence
  SiRNA target sequence
cagttggtaatatagatattga

SEQ ID NO: 162017 - DNA, 22 bp, Artificial sequence
  SiRNA target sequence
agttggtaatatagatattgat

SEQ ID NO: 162018 - DNA, 22 bp, Artificial sequence
  SiRNA target sequence
gttggtaatatagatattgatg

SEQ ID NO: 162019 - DNA, 22 bp, Artificial sequence
  SiRNA target sequence
ttggtaatatagatattgatgt

SEQ ID NO: 162020 - DNA, 22 bp, Artificial sequence
  SiRNA target sequence
tggtaatatagatattgatgtc

SEQ ID NO: 162021 - DNA, 22 bp, Artificial sequence
  SiRNA target sequence
ggtaatatagatattgatgtca

SEQ ID NO: 162022 - DNA, 22 bp, Artificial sequence
  SiRNA target sequence
gtaatatagatattgatgtcaa

SEQ ID NO: 162023 - DNA, 22 bp, Artificial sequence
  SiRNA target sequence
taatatagatattgatgtcaat

SEQ ID NO: 162024 - DNA, 22 bp, Artificial sequence
  SiRNA target sequence
aatatagatattgatgtcaatg

SEQ ID NO: 162025 - DNA, 22 bp, Artificial sequence
  SiRNA target sequence
atatagatattgatgtcaatga

SEQ ID NO: 162026 - DNA, 22 bp, Artificial sequence
  SiRNA target sequence
tatagatattgatgtcaatgat

SEQ ID NO: 162027 - DNA, 22 bp, Artificial sequence
  SiRNA target sequence
atagatattgatgtcaatgata

SEQ ID NO: 162028 - DNA, 22 bp, Artificial sequence
  SiRNA target sequence
tagatattgatgtcaatgatat

SEQ ID NO: 162029 - DNA, 22 bp, Artificial sequence
  SiRNA target sequence
agatattgatgtcaatgatatg

SEQ ID NO: 162030 - DNA, 22 bp, Artificial sequence
  SiRNA target sequence
gatattgatgtcaatgatatga

SEQ ID NO: 162031 - DNA, 22 bp, Artificial sequence
  SiRNA target sequence
atattgatgtcaatgatatgaa

SEQ ID NO: 162032 - DNA, 22 bp, Artificial sequence
  SiRNA target sequence
tattgatgtcaatgatatgaat

SEQ ID NO: 162033 - DNA, 22 bp, Artificial sequence
  SiRNA target sequence
attgatgtcaatgatatgaata

SEQ ID NO: 162034 - DNA, 22 bp, Artificial sequence
  SiRNA target sequence
ttgatgtcaatgatatgaatat

SEQ ID NO: 162035 - DNA, 22 bp, Artificial sequence
  SiRNA target sequence
tgatgtcaatgatatgaatatt

SEQ ID NO: 162036 - DNA, 22 bp, Artificial sequence
  SiRNA target sequence
gatgtcaatgatatgaatattg

SEQ ID NO: 162037 - DNA, 22 bp, Artificial sequence
  SiRNA target sequence
atgtcaatgatatgaatattga

SEQ ID NO: 162038 - DNA, 22 bp, Artificial sequence
  SiRNA target sequence
tgtcaatgatatgaatattgat

SEQ ID NO: 162039 - DNA, 22 bp, Artificial sequence
  SiRNA target sequence
gtcaatgatatgaatattgatt

SEQ ID NO: 162040 - DNA, 22 bp, Artificial sequence
  SiRNA target sequence
tcaatgatatgaatattgattt

SEQ ID NO: 162041 - DNA, 22 bp, Artificial sequence
  SiRNA target sequence
caatgatatgaatattgattta

SEQ ID NO: 162042 - DNA, 22 bp, Artificial sequence
  SiRNA target sequence
aatgatatgaatattgatttac

SEQ ID NO: 162043 - DNA, 22 bp, Artificial sequence
  SiRNA target sequence
atgatatgaatattgatttact

SEQ ID NO: 162044 - DNA, 22 bp, Artificial sequence
  SiRNA target sequence
tgatatgaatattgatttacta

SEQ ID NO: 162045 - DNA, 22 bp, Artificial sequence
  SiRNA target sequence
gatatgaatattgatttactaa

SEQ ID NO: 162046 - DNA, 22 bp, Artificial sequence
  SiRNA target sequence
atatgaatattgatttactaag

SEQ ID NO: 162047 - DNA, 22 bp, Artificial sequence
  SiRNA target sequence
tatgaatattgatttactaagt

SEQ ID NO: 162048 - DNA, 22 bp, Artificial sequence
  SiRNA target sequence
atgaatattgatttactaagtt

SEQ ID NO: 162049 - DNA, 22 bp, Artificial sequence
  SiRNA target sequence
tgaatattgatttactaagttt

SEQ ID NO: 162050 - DNA, 22 bp, Artificial sequence
  SiRNA target sequence
gaatattgatttactaagttta

SEQ ID NO: 162051 - DNA, 22 bp, Artificial sequence
  SiRNA target sequence
aatattgatttactaagtttat

SEQ ID NO: 162052 - DNA, 22 bp, Artificial sequence
  SiRNA target sequence
atattgatttactaagtttatc

SEQ ID NO: 162053 - DNA, 22 bp, Artificial sequence
  SiRNA target sequence
tattgatttactaagtttatca

SEQ ID NO: 162054 - DNA, 22 bp, Artificial sequence
  SiRNA target sequence
attgatttactaagtttatcaa

SEQ ID NO: 162055 - DNA, 22 bp, Artificial sequence
  SiRNA target sequence
ttgatttactaagtttatcaag

SEQ ID NO: 162056 - DNA, 22 bp, Artificial sequence
  SiRNA target sequence
tgatttactaagtttatcaagt

SEQ ID NO: 162057 - DNA, 22 bp, Artificial sequence
  SiRNA target sequence
gatttactaagtttatcaagtc

SEQ ID NO: 162058 - DNA, 22 bp, Artificial sequence
  SiRNA target sequence
atttactaagtttatcaagtca

SEQ ID NO: 162059 - DNA, 22 bp, Artificial sequence
  SiRNA target sequence
tttactaagtttatcaagtcat

SEQ ID NO: 162060 - DNA, 22 bp, Artificial sequence
  SiRNA target sequence
ttactaagtttatcaagtcata

SEQ ID NO: 162061 - DNA, 22 bp, Artificial sequence
  SiRNA target sequence
tactaagtttatcaagtcataa

SEQ ID NO: 162062 - DNA, 22 bp, Artificial sequence
  SiRNA target sequence
actaagtttatcaagtcataaa

SEQ ID NO: 162063 - DNA, 22 bp, Artificial sequence
  SiRNA target sequence
ctaagtttatcaagtcataaaa

SEQ ID NO: 162064 - DNA, 22 bp, Artificial sequence
  SiRNA target sequence
taagtttatcaagtcataaaat

SEQ ID NO: 162065 - DNA, 22 bp, Artificial sequence
  SiRNA target sequence
aagtttatcaagtcataaaatt

SEQ ID NO: 162066 - DNA, 22 bp, Artificial sequence
  SiRNA target sequence
agtttatcaagtcataaaattt

SEQ ID NO: 162067 - DNA, 22 bp, Artificial sequence
  SiRNA target sequence
gtttatcaagtcataaaattta

SEQ ID NO: 162068 - DNA, 22 bp, Artificial sequence
  SiRNA target sequence
tttatcaagtcataaaatttat

SEQ ID NO: 162069 - DNA, 22 bp, Artificial sequence
  SiRNA target sequence
ttatcaagtcataaaatttatg

SEQ ID NO: 162070 - DNA, 22 bp, Artificial sequence
  SiRNA target sequence
tatcaagtcataaaatttatgg

SEQ ID NO: 162071 - DNA, 22 bp, Artificial sequence
  SiRNA target sequence
atcaagtcataaaatttatggt

SEQ ID NO: 162072 - DNA, 22 bp, Artificial sequence
  SiRNA target sequence
tcaagtcataaaatttatggtc

SEQ ID NO: 162073 - DNA, 22 bp, Artificial sequence
  SiRNA target sequence
caagtcataaaatttatggtcc

SEQ ID NO: 162074 - DNA, 22 bp, Artificial sequence
  SiRNA target sequence
aagtcataaaatttatggtcca

SEQ ID NO: 162075 - DNA, 22 bp, Artificial sequence
  SiRNA target sequence
agtcataaaatttatggtccaa

SEQ ID NO: 162076 - DNA, 22 bp, Artificial sequence
  SiRNA target sequence
gtcataaaatttatggtccaaa

SEQ ID NO: 162077 - DNA, 22 bp, Artificial sequence
  SiRNA target sequence
tcataaaatttatggtccaaaa

SEQ ID NO: 162078 - DNA, 22 bp, Artificial sequence
  SiRNA target sequence
cataaaatttatggtccaaaag

SEQ ID NO: 162079 - DNA, 22 bp, Artificial sequence
  SiRNA target sequence
ataaaatttatggtccaaaagg

SEQ ID NO: 162080 - DNA, 22 bp, Artificial sequence
  SiRNA target sequence
taaaatttatggtccaaaaggt

SEQ ID NO: 162081 - DNA, 22 bp, Artificial sequence
  SiRNA target sequence
aaaatttatggtccaaaaggtg

SEQ ID NO: 162082 - DNA, 22 bp, Artificial sequence
  SiRNA target sequence
aaatttatggtccaaaaggtgt

SEQ ID NO: 162083 - DNA, 22 bp, Artificial sequence
  SiRNA target sequence
aatttatggtccaaaaggtgtt

SEQ ID NO: 162084 - DNA, 22 bp, Artificial sequence
  SiRNA target sequence
atttatggtccaaaaggtgttg

SEQ ID NO: 162085 - DNA, 22 bp, Artificial sequence
  SiRNA target sequence
tttatggtccaaaaggtgttgg

SEQ ID NO: 162086 - DNA, 22 bp, Artificial sequence
  SiRNA target sequence
ttatggtccaaaaggtgttggt

SEQ ID NO: 162087 - DNA, 22 bp, Artificial sequence
  SiRNA target sequence
tatggtccaaaaggtgttggtg

SEQ ID NO: 162088 - DNA, 22 bp, Artificial sequence
  SiRNA target sequence
atggtccaaaaggtgttggtgc

SEQ ID NO: 162089 - DNA, 22 bp, Artificial sequence
  SiRNA target sequence
tggtccaaaaggtgttggtgcc

SEQ ID NO: 162090 - DNA, 22 bp, Artificial sequence
  SiRNA target sequence
ggtccaaaaggtgttggtgcct

SEQ ID NO: 162091 - DNA, 22 bp, Artificial sequence
  SiRNA target sequence
gtccaaaaggtgttggtgcctt

SEQ ID NO: 162092 - DNA, 22 bp, Artificial sequence
  SiRNA target sequence
tccaaaaggtgttggtgcctta

SEQ ID NO: 162093 - DNA, 22 bp, Artificial sequence
  SiRNA target sequence
ccaaaaggtgttggtgccttat

SEQ ID NO: 162094 - DNA, 22 bp, Artificial sequence
  SiRNA target sequence
caaaaggtgttggtgccttata

SEQ ID NO: 162095 - DNA, 22 bp, Artificial sequence
  SiRNA target sequence
aaaaggtgttggtgccttatac

SEQ ID NO: 162096 - DNA, 22 bp, Artificial sequence
  SiRNA target sequence
aaaggtgttggtgccttatacg

SEQ ID NO: 162097 - DNA, 22 bp, Artificial sequence
  SiRNA target sequence
aaggtgttggtgccttatacgt

SEQ ID NO: 162098 - DNA, 22 bp, Artificial sequence
  SiRNA target sequence
aggtgttggtgccttatacgtc

SEQ ID NO: 162099 - DNA, 22 bp, Artificial sequence
  SiRNA target sequence
ggtgttggtgccttatacgtca

SEQ ID NO: 162100 - DNA, 22 bp, Artificial sequence
  SiRNA target sequence
gtgttggtgccttatacgtcag

SEQ ID NO: 162101 - DNA, 22 bp, Artificial sequence
  SiRNA target sequence
tgttggtgccttatacgtcaga

SEQ ID NO: 162102 - DNA, 22 bp, Artificial sequence
  SiRNA target sequence
gttggtgccttatacgtcagaa

SEQ ID NO: 162103 - DNA, 22 bp, Artificial sequence
  SiRNA target sequence
ttggtgccttatacgtcagaag

SEQ ID NO: 162104 - DNA, 22 bp, Artificial sequence
  SiRNA target sequence
tggtgccttatacgtcagaaga

SEQ ID NO: 162105 - DNA, 22 bp, Artificial sequence
  SiRNA target sequence
ggtgccttatacgtcagaagaa

SEQ ID NO: 162106 - DNA, 22 bp, Artificial sequence
  SiRNA target sequence
gtgccttatacgtcagaagaag

SEQ ID NO: 162107 - DNA, 22 bp, Artificial sequence
  SiRNA target sequence
tgccttatacgtcagaagaagg

SEQ ID NO: 162108 - DNA, 22 bp, Artificial sequence
  SiRNA target sequence
gccttatacgtcagaagaaggc

SEQ ID NO: 162109 - DNA, 22 bp, Artificial sequence
  SiRNA target sequence
ccttatacgtcagaagaaggcc

SEQ ID NO: 162110 - DNA, 22 bp, Artificial sequence
  SiRNA target sequence
cttatacgtcagaagaaggcct

SEQ ID NO: 162111 - DNA, 22 bp, Artificial sequence
  SiRNA target sequence
ttatacgtcagaagaaggccta

SEQ ID NO: 162112 - DNA, 22 bp, Artificial sequence
  SiRNA target sequence
tatacgtcagaagaaggcctag

SEQ ID NO: 162113 - DNA, 22 bp, Artificial sequence
  SiRNA target sequence
atacgtcagaagaaggcctagg

SEQ ID NO: 162114 - DNA, 22 bp, Artificial sequence
  SiRNA target sequence
tacgtcagaagaaggcctaggg

SEQ ID NO: 162115 - DNA, 22 bp, Artificial sequence
  SiRNA target sequence
acgtcagaagaaggcctagggt

SEQ ID NO: 162116 - DNA, 22 bp, Artificial sequence
  SiRNA target sequence
cgtcagaagaaggcctagggtg

SEQ ID NO: 162117 - DNA, 22 bp, Artificial sequence
  SiRNA target sequence
gtcagaagaaggcctagggtga

SEQ ID NO: 162118 - DNA, 22 bp, Artificial sequence
  SiRNA target sequence
tcagaagaaggcctagggtgag

SEQ ID NO: 162119 - DNA, 22 bp, Artificial sequence
  SiRNA target sequence
cagaagaaggcctagggtgaga

SEQ ID NO: 162120 - DNA, 22 bp, Artificial sequence
  SiRNA target sequence
agaagaaggcctagggtgagaa

SEQ ID NO: 162121 - DNA, 22 bp, Artificial sequence
  SiRNA target sequence
gaagaaggcctagggtgagaat

SEQ ID NO: 162122 - DNA, 22 bp, Artificial sequence
  SiRNA target sequence
aagaaggcctagggtgagaatg

SEQ ID NO: 162123 - DNA, 22 bp, Artificial sequence
  SiRNA target sequence
agaaggcctagggtgagaatgt

SEQ ID NO: 162124 - DNA, 22 bp, Artificial sequence
  SiRNA target sequence
gaaggcctagggtgagaatgtt

SEQ ID NO: 162125 - DNA, 22 bp, Artificial sequence
  SiRNA target sequence
aaggcctagggtgagaatgtta

SEQ ID NO: 162126 - DNA, 22 bp, Artificial sequence
  SiRNA target sequence
aggcctagggtgagaatgttac

SEQ ID NO: 162127 - DNA, 22 bp, Artificial sequence
  SiRNA target sequence
ggcctagggtgagaatgttacc

SEQ ID NO: 162128 - DNA, 22 bp, Artificial sequence
  SiRNA target sequence
gcctagggtgagaatgttacca

SEQ ID NO: 162129 - DNA, 22 bp, Artificial sequence
  SiRNA target sequence
cctagggtgagaatgttaccac

SEQ ID NO: 162130 - DNA, 22 bp, Artificial sequence
  SiRNA target sequence
ctagggtgagaatgttaccact

SEQ ID NO: 162131 - DNA, 22 bp, Artificial sequence
  SiRNA target sequence
tagggtgagaatgttaccactt

SEQ ID NO: 162132 - DNA, 22 bp, Artificial sequence
  SiRNA target sequence
agggtgagaatgttaccacttt

SEQ ID NO: 162133 - DNA, 22 bp, Artificial sequence
  SiRNA target sequence
gggtgagaatgttaccactttt

SEQ ID NO: 162134 - DNA, 22 bp, Artificial sequence
  SiRNA target sequence
ggtgagaatgttaccacttttt

SEQ ID NO: 162135 - DNA, 22 bp, Artificial sequence
  SiRNA target sequence
gtgagaatgttaccacttttta

SEQ ID NO: 162136 - DNA, 22 bp, Artificial sequence
  SiRNA target sequence
tgagaatgttaccactttttaa

SEQ ID NO: 162137 - DNA, 22 bp, Artificial sequence
  SiRNA target sequence
gagaatgttaccactttttaat

SEQ ID NO: 162138 - DNA, 22 bp, Artificial sequence
  SiRNA target sequence
agaatgttaccactttttaatg

SEQ ID NO: 162139 - DNA, 22 bp, Artificial sequence
  SiRNA target sequence
gaatgttaccactttttaatgg

SEQ ID NO: 162140 - DNA, 22 bp, Artificial sequence
  SiRNA target sequence
aatgttaccactttttaatggt

SEQ ID NO: 162141 - DNA, 22 bp, Artificial sequence
  SiRNA target sequence
atgttaccactttttaatggtg

SEQ ID NO: 162142 - DNA, 22 bp, Artificial sequence
  SiRNA target sequence
tgttaccactttttaatggtgg

SEQ ID NO: 162143 - DNA, 22 bp, Artificial sequence
  SiRNA target sequence
gttaccactttttaatggtggt

SEQ ID NO: 162144 - DNA, 22 bp, Artificial sequence
  SiRNA target sequence
ttaccactttttaatggtggtg

SEQ ID NO: 162145 - DNA, 22 bp, Artificial sequence
  SiRNA target sequence
taccactttttaatggtggtgg

SEQ ID NO: 162146 - DNA, 22 bp, Artificial sequence
  SiRNA target sequence
accactttttaatggtggtgga

SEQ ID NO: 162147 - DNA, 22 bp, Artificial sequence
  SiRNA target sequence
ccactttttaatggtggtggac

SEQ ID NO: 162148 - DNA, 22 bp, Artificial sequence
  SiRNA target sequence
cactttttaatggtggtggaca

SEQ ID NO: 162149 - DNA, 22 bp, Artificial sequence
  SiRNA target sequence
actttttaatggtggtggacaa

SEQ ID NO: 162150 - DNA, 22 bp, Artificial sequence
  SiRNA target sequence
ctttttaatggtggtggacaag

SEQ ID NO: 162151 - DNA, 22 bp, Artificial sequence
  SiRNA target sequence
tttttaatggtggtggacaaga

SEQ ID NO: 162152 - DNA, 22 bp, Artificial sequence
  SiRNA target sequence
ttttaatggtggtggacaagaa

SEQ ID NO: 162153 - DNA, 22 bp, Artificial sequence
  SiRNA target sequence
tttaatggtggtggacaagaaa

SEQ ID NO: 162154 - DNA, 22 bp, Artificial sequence
  SiRNA target sequence
ttaatggtggtggacaagaaag

SEQ ID NO: 162155 - DNA, 22 bp, Artificial sequence
  SiRNA target sequence
taatggtggtggacaagaaaga

SEQ ID NO: 162156 - DNA, 22 bp, Artificial sequence
  SiRNA target sequence
aatggtggtggacaagaaagag

SEQ ID NO: 162157 - DNA, 22 bp, Artificial sequence
  SiRNA target sequence
atggtggtggacaagaaagagg

SEQ ID NO: 162158 - DNA, 22 bp, Artificial sequence
  SiRNA target sequence
tggtggtggacaagaaagagga

SEQ ID NO: 162159 - DNA, 22 bp, Artificial sequence
  SiRNA target sequence
ggtggtggacaagaaagaggat

SEQ ID NO: 162160 - DNA, 22 bp, Artificial sequence
  SiRNA target sequence
gtggtggacaagaaagaggatt

SEQ ID NO: 162161 - DNA, 22 bp, Artificial sequence
  SiRNA target sequence
tggtggacaagaaagaggatta

SEQ ID NO: 162162 - DNA, 22 bp, Artificial sequence
  SiRNA target sequence
ggtggacaagaaagaggattaa

SEQ ID NO: 162163 - DNA, 22 bp, Artificial sequence
  SiRNA target sequence
gtggacaagaaagaggattaag

SEQ ID NO: 162164 - DNA, 22 bp, Artificial sequence
  SiRNA target sequence
tggacaagaaagaggattaaga

SEQ ID NO: 162165 - DNA, 22 bp, Artificial sequence
  SiRNA target sequence
ggacaagaaagaggattaagaa

SEQ ID NO: 162166 - DNA, 22 bp, Artificial sequence
  SiRNA target sequence
gacaagaaagaggattaagaag

SEQ ID NO: 162167 - DNA, 22 bp, Artificial sequence
  SiRNA target sequence
acaagaaagaggattaagaagt

SEQ ID NO: 162168 - DNA, 22 bp, Artificial sequence
  SiRNA target sequence
caagaaagaggattaagaagtg

SEQ ID NO: 162169 - DNA, 22 bp, Artificial sequence
  SiRNA target sequence
aagaaagaggattaagaagtgg

SEQ ID NO: 162170 - DNA, 22 bp, Artificial sequence
  SiRNA target sequence
agaaagaggattaagaagtggg

SEQ ID NO: 162171 - DNA, 22 bp, Artificial sequence
  SiRNA target sequence
gaaagaggattaagaagtggga

SEQ ID NO: 162172 - DNA, 22 bp, Artificial sequence
  SiRNA target sequence
aaagaggattaagaagtgggac

SEQ ID NO: 162173 - DNA, 22 bp, Artificial sequence
  SiRNA target sequence
aagaggattaagaagtgggaca

SEQ ID NO: 162174 - DNA, 22 bp, Artificial sequence
  SiRNA target sequence
agaggattaagaagtgggacaa

SEQ ID NO: 162175 - DNA, 22 bp, Artificial sequence
  SiRNA target sequence
gaggattaagaagtgggacaac

SEQ ID NO: 162176 - DNA, 22 bp, Artificial sequence
  SiRNA target sequence
aggattaagaagtgggacaact

SEQ ID NO: 162177 - DNA, 22 bp, Artificial sequence
  SiRNA target sequence
ggattaagaagtgggacaactt

SEQ ID NO: 162178 - DNA, 22 bp, Artificial sequence
  SiRNA target sequence
gattaagaagtgggacaacttc

SEQ ID NO: 162179 - DNA, 22 bp, Artificial sequence
  SiRNA target sequence
attaagaagtgggacaacttct

SEQ ID NO: 162180 - DNA, 22 bp, Artificial sequence
  SiRNA target sequence
ttaagaagtgggacaacttctc

SEQ ID NO: 162181 - DNA, 22 bp, Artificial sequence
  SiRNA target sequence
taagaagtgggacaacttctcc

SEQ ID NO: 162182 - DNA, 22 bp, Artificial sequence
  SiRNA target sequence
aagaagtgggacaacttctcca

SEQ ID NO: 162183 - DNA, 22 bp, Artificial sequence
  SiRNA target sequence
agaagtgggacaacttctccac

SEQ ID NO: 162184 - DNA, 22 bp, Artificial sequence
  SiRNA target sequence
gaagtgggacaacttctccacc

SEQ ID NO: 162185 - DNA, 22 bp, Artificial sequence
  SiRNA target sequence
aagtgggacaacttctccacct

SEQ ID NO: 162186 - DNA, 22 bp, Artificial sequence
  SiRNA target sequence
agtgggacaacttctccacctt

SEQ ID NO: 162187 - DNA, 22 bp, Artificial sequence
  SiRNA target sequence
gtgggacaacttctccaccttt

SEQ ID NO: 162188 - DNA, 22 bp, Artificial sequence
  SiRNA target sequence
tgggacaacttctccaccttta

SEQ ID NO: 162189 - DNA, 22 bp, Artificial sequence
  SiRNA target sequence
gggacaacttctccacctttag

SEQ ID NO: 162190 - DNA, 22 bp, Artificial sequence
  SiRNA target sequence
ggacaacttctccacctttagt

SEQ ID NO: 162191 - DNA, 22 bp, Artificial sequence
  SiRNA target sequence
gacaacttctccacctttagtt

SEQ ID NO: 162192 - DNA, 22 bp, Artificial sequence
  SiRNA target sequence
acaacttctccacctttagttg

SEQ ID NO: 162193 - DNA, 22 bp, Artificial sequence
  SiRNA target sequence
caacttctccacctttagttgt

SEQ ID NO: 162194 - DNA, 22 bp, Artificial sequence
  SiRNA target sequence
aacttctccacctttagttgtt

SEQ ID NO: 162195 - DNA, 22 bp, Artificial sequence
  SiRNA target sequence
acttctccacctttagttgttg

SEQ ID NO: 162196 - DNA, 22 bp, Artificial sequence
  SiRNA target sequence
cttctccacctttagttgttgg

SEQ ID NO: 162197 - DNA, 22 bp, Artificial sequence
  SiRNA target sequence
ttctccacctttagttgttgga

SEQ ID NO: 162198 - DNA, 22 bp, Artificial sequence
  SiRNA target sequence
tctccacctttagttgttggat

SEQ ID NO: 162199 - DNA, 22 bp, Artificial sequence
  SiRNA target sequence
ctccacctttagttgttggatt

SEQ ID NO: 162200 - DNA, 22 bp, Artificial sequence
  SiRNA target sequence
tccacctttagttgttggatta

SEQ ID NO: 162201 - DNA, 22 bp, Artificial sequence
  SiRNA target sequence
ccacctttagttgttggattag

SEQ ID NO: 162202 - DNA, 22 bp, Artificial sequence
  SiRNA target sequence
cacctttagttgttggattagg

SEQ ID NO: 162203 - DNA, 22 bp, Artificial sequence
  SiRNA target sequence
acctttagttgttggattaggc

SEQ ID NO: 162204 - DNA, 22 bp, Artificial sequence
  SiRNA target sequence
cctttagttgttggattaggca

SEQ ID NO: 162205 - DNA, 22 bp, Artificial sequence
  SiRNA target sequence
ctttagttgttggattaggcaa

SEQ ID NO: 162206 - DNA, 22 bp, Artificial sequence
  SiRNA target sequence
tttagttgttggattaggcaaa

SEQ ID NO: 162207 - DNA, 22 bp, Artificial sequence
  SiRNA target sequence
ttagttgttggattaggcaaag

SEQ ID NO: 162208 - DNA, 22 bp, Artificial sequence
  SiRNA target sequence
tagttgttggattaggcaaagc

SEQ ID NO: 162209 - DNA, 22 bp, Artificial sequence
  SiRNA target sequence
agttgttggattaggcaaagct

SEQ ID NO: 162210 - DNA, 22 bp, Artificial sequence
  SiRNA target sequence
gttgttggattaggcaaagctg

SEQ ID NO: 162211 - DNA, 22 bp, Artificial sequence
  SiRNA target sequence
ttgttggattaggcaaagctgc

SEQ ID NO: 162212 - DNA, 22 bp, Artificial sequence
  SiRNA target sequence
tgttggattaggcaaagctgct

SEQ ID NO: 162213 - DNA, 22 bp, Artificial sequence
  SiRNA target sequence
gttggattaggcaaagctgctg

SEQ ID NO: 162214 - DNA, 22 bp, Artificial sequence
  SiRNA target sequence
ttggattaggcaaagctgctga

SEQ ID NO: 162215 - DNA, 22 bp, Artificial sequence
  SiRNA target sequence
tggattaggcaaagctgctgag

SEQ ID NO: 162216 - DNA, 22 bp, Artificial sequence
  SiRNA target sequence
ggattaggcaaagctgctgaga

SEQ ID NO: 162217 - DNA, 22 bp, Artificial sequence
  SiRNA target sequence
gattaggcaaagctgctgagat

SEQ ID NO: 162218 - DNA, 22 bp, Artificial sequence
  SiRNA target sequence
attaggcaaagctgctgagata

SEQ ID NO: 162219 - DNA, 22 bp, Artificial sequence
  SiRNA target sequence
ttaggcaaagctgctgagatat

SEQ ID NO: 162220 - DNA, 22 bp, Artificial sequence
  SiRNA target sequence
taggcaaagctgctgagatatg

SEQ ID NO: 162221 - DNA, 22 bp, Artificial sequence
  SiRNA target sequence
aggcaaagctgctgagatatgc

SEQ ID NO: 162222 - DNA, 22 bp, Artificial sequence
  SiRNA target sequence
ggcaaagctgctgagatatgct

SEQ ID NO: 162223 - DNA, 22 bp, Artificial sequence
  SiRNA target sequence
gcaaagctgctgagatatgctc

SEQ ID NO: 162224 - DNA, 22 bp, Artificial sequence
  SiRNA target sequence
caaagctgctgagatatgctct

SEQ ID NO: 162225 - DNA, 22 bp, Artificial sequence
  SiRNA target sequence
aaagctgctgagatatgctctc

SEQ ID NO: 162226 - DNA, 22 bp, Artificial sequence
  SiRNA target sequence
aagctgctgagatatgctctca

SEQ ID NO: 162227 - DNA, 22 bp, Artificial sequence
  SiRNA target sequence
agctgctgagatatgctctcag

SEQ ID NO: 162228 - DNA, 22 bp, Artificial sequence
  SiRNA target sequence
gctgctgagatatgctctcagg

SEQ ID NO: 162229 - DNA, 22 bp, Artificial sequence
  SiRNA target sequence
ctgctgagatatgctctcagga

SEQ ID NO: 162230 - DNA, 22 bp, Artificial sequence
  SiRNA target sequence
tgctgagatatgctctcaggag

SEQ ID NO: 162231 - DNA, 22 bp, Artificial sequence
  SiRNA target sequence
gctgagatatgctctcaggaga

SEQ ID NO: 162232 - DNA, 22 bp, Artificial sequence
  SiRNA target sequence
ctgagatatgctctcaggagat

SEQ ID NO: 162233 - DNA, 22 bp, Artificial sequence
  SiRNA target sequence
tgagatatgctctcaggagatg

SEQ ID NO: 162234 - DNA, 22 bp, Artificial sequence
  SiRNA target sequence
gagatatgctctcaggagatgc

SEQ ID NO: 162235 - DNA, 22 bp, Artificial sequence
  SiRNA target sequence
agatatgctctcaggagatgcg

SEQ ID NO: 162236 - DNA, 22 bp, Artificial sequence
  SiRNA target sequence
gatatgctctcaggagatgcgt

SEQ ID NO: 162237 - DNA, 22 bp, Artificial sequence
  SiRNA target sequence
atatgctctcaggagatgcgta

SEQ ID NO: 162238 - DNA, 22 bp, Artificial sequence
  SiRNA target sequence
tatgctctcaggagatgcgtaa

SEQ ID NO: 162239 - DNA, 22 bp, Artificial sequence
  SiRNA target sequence
atgctctcaggagatgcgtaag

SEQ ID NO: 162240 - DNA, 22 bp, Artificial sequence
  SiRNA target sequence
tgctctcaggagatgcgtaagg

SEQ ID NO: 162241 - DNA, 22 bp, Artificial sequence
  SiRNA target sequence
gctctcaggagatgcgtaagga

SEQ ID NO: 162242 - DNA, 22 bp, Artificial sequence
  SiRNA target sequence
ctctcaggagatgcgtaaggac

SEQ ID NO: 162243 - DNA, 22 bp, Artificial sequence
  SiRNA target sequence
tctcaggagatgcgtaaggact

SEQ ID NO: 162244 - DNA, 22 bp, Artificial sequence
  SiRNA target sequence
ctcaggagatgcgtaaggacta

SEQ ID NO: 162245 - DNA, 22 bp, Artificial sequence
  SiRNA target sequence
tcaggagatgcgtaaggactat

SEQ ID NO: 162246 - DNA, 22 bp, Artificial sequence
  SiRNA target sequence
caggagatgcgtaaggactatg

SEQ ID NO: 162247 - DNA, 22 bp, Artificial sequence
  SiRNA target sequence
aggagatgcgtaaggactatga

SEQ ID NO: 162248 - DNA, 22 bp, Artificial sequence
  SiRNA target sequence
ggagatgcgtaaggactatgaa

SEQ ID NO: 162249 - DNA, 22 bp, Artificial sequence
  SiRNA target sequence
gagatgcgtaaggactatgaat

SEQ ID NO: 162250 - DNA, 22 bp, Artificial sequence
  SiRNA target sequence
agatgcgtaaggactatgaata

SEQ ID NO: 162251 - DNA, 22 bp, Artificial sequence
  SiRNA target sequence
gatgcgtaaggactatgaatat

SEQ ID NO: 162252 - DNA, 22 bp, Artificial sequence
  SiRNA target sequence
atgcgtaaggactatgaatata

SEQ ID NO: 162253 - DNA, 22 bp, Artificial sequence
  SiRNA target sequence
tgcgtaaggactatgaatatat

SEQ ID NO: 162254 - DNA, 22 bp, Artificial sequence
  SiRNA target sequence
gcgtaaggactatgaatatata

SEQ ID NO: 162255 - DNA, 22 bp, Artificial sequence
  SiRNA target sequence
cgtaaggactatgaatatatac

SEQ ID NO: 162256 - DNA, 22 bp, Artificial sequence
  SiRNA target sequence
gtaaggactatgaatatataca

SEQ ID NO: 162257 - DNA, 22 bp, Artificial sequence
  SiRNA target sequence
taaggactatgaatatatacaa

SEQ ID NO: 162258 - DNA, 22 bp, Artificial sequence
  SiRNA target sequence
aaggactatgaatatatacaaa

SEQ ID NO: 162259 - DNA, 22 bp, Artificial sequence
  SiRNA target sequence
aggactatgaatatatacaaaa

SEQ ID NO: 162260 - DNA, 22 bp, Artificial sequence
  SiRNA target sequence
ggactatgaatatatacaaaaa

SEQ ID NO: 162261 - DNA, 22 bp, Artificial sequence
  SiRNA target sequence
gactatgaatatatacaaaaat

SEQ ID NO: 162262 - DNA, 22 bp, Artificial sequence
  SiRNA target sequence
actatgaatatatacaaaaatt

SEQ ID NO: 162263 - DNA, 22 bp, Artificial sequence
  SiRNA target sequence
ctatgaatatatacaaaaatta

SEQ ID NO: 162264 - DNA, 22 bp, Artificial sequence
  SiRNA target sequence
tatgaatatatacaaaaattat

SEQ ID NO: 162265 - DNA, 22 bp, Artificial sequence
  SiRNA target sequence
atgaatatatacaaaaattatc

SEQ ID NO: 162266 - DNA, 22 bp, Artificial sequence
  SiRNA target sequence
tgaatatatacaaaaattatcg

SEQ ID NO: 162267 - DNA, 22 bp, Artificial sequence
  SiRNA target sequence
gaatatatacaaaaattatcgg

SEQ ID NO: 162268 - DNA, 22 bp, Artificial sequence
  SiRNA target sequence
aatatatacaaaaattatcgga

SEQ ID NO: 162269 - DNA, 22 bp, Artificial sequence
  SiRNA target sequence
atatatacaaaaattatcggat

SEQ ID NO: 162270 - DNA, 22 bp, Artificial sequence
  SiRNA target sequence
tatatacaaaaattatcggata

SEQ ID NO: 162271 - DNA, 22 bp, Artificial sequence
  SiRNA target sequence
atatacaaaaattatcggataa

SEQ ID NO: 162272 - DNA, 22 bp, Artificial sequence
  SiRNA target sequence
tatacaaaaattatcggataaa

SEQ ID NO: 162273 - DNA, 22 bp, Artificial sequence
  SiRNA target sequence
atacaaaaattatcggataaac

SEQ ID NO: 162274 - DNA, 22 bp, Artificial sequence
  SiRNA target sequence
tacaaaaattatcggataaact

SEQ ID NO: 162275 - DNA, 22 bp, Artificial sequence
  SiRNA target sequence
acaaaaattatcggataaacta

SEQ ID NO: 162276 - DNA, 22 bp, Artificial sequence
  SiRNA target sequence
caaaaattatcggataaactaa

SEQ ID NO: 162277 - DNA, 22 bp, Artificial sequence
  SiRNA target sequence
aaaaattatcggataaactaaa

SEQ ID NO: 162278 - DNA, 22 bp, Artificial sequence
  SiRNA target sequence
aaaattatcggataaactaaaa

SEQ ID NO: 162279 - DNA, 22 bp, Artificial sequence
  SiRNA target sequence
aaattatcggataaactaaaaa

SEQ ID NO: 162280 - DNA, 22 bp, Artificial sequence
  SiRNA target sequence
aattatcggataaactaaaaaa

SEQ ID NO: 162281 - DNA, 22 bp, Artificial sequence
  SiRNA target sequence
attatcggataaactaaaaaat

SEQ ID NO: 162282 - DNA, 22 bp, Artificial sequence
  SiRNA target sequence
ttatcggataaactaaaaaatc

SEQ ID NO: 162283 - DNA, 22 bp, Artificial sequence
  SiRNA target sequence
tatcggataaactaaaaaatcg

SEQ ID NO: 162284 - DNA, 22 bp, Artificial sequence
  SiRNA target sequence
atcggataaactaaaaaatcgc

SEQ ID NO: 162285 - DNA, 22 bp, Artificial sequence
  SiRNA target sequence
tcggataaactaaaaaatcgca

SEQ ID NO: 162286 - DNA, 22 bp, Artificial sequence
  SiRNA target sequence
cggataaactaaaaaatcgcat

SEQ ID NO: 162287 - DNA, 22 bp, Artificial sequence
  SiRNA target sequence
ggataaactaaaaaatcgcatc

SEQ ID NO: 162288 - DNA, 22 bp, Artificial sequence
  SiRNA target sequence
gataaactaaaaaatcgcatca

SEQ ID NO: 162289 - DNA, 22 bp, Artificial sequence
  SiRNA target sequence
ataaactaaaaaatcgcatcaa

SEQ ID NO: 162290 - DNA, 22 bp, Artificial sequence
  SiRNA target sequence
taaactaaaaaatcgcatcaaa

SEQ ID NO: 162291 - DNA, 22 bp, Artificial sequence
  SiRNA target sequence
aaactaaaaaatcgcatcaaaa

SEQ ID NO: 162292 - DNA, 22 bp, Artificial sequence
  SiRNA target sequence
aactaaaaaatcgcatcaaaac

SEQ ID NO: 162293 - DNA, 22 bp, Artificial sequence
  SiRNA target sequence
actaaaaaatcgcatcaaaacg

SEQ ID NO: 162294 - DNA, 22 bp, Artificial sequence
  SiRNA target sequence
ctaaaaaatcgcatcaaaacga

SEQ ID NO: 162295 - DNA, 22 bp, Artificial sequence
  SiRNA target sequence
taaaaaatcgcatcaaaacgaa

SEQ ID NO: 162296 - DNA, 22 bp, Artificial sequence
  SiRNA target sequence
aaaaaatcgcatcaaaacgaat

SEQ ID NO: 162297 - DNA, 22 bp, Artificial sequence
  SiRNA target sequence
aaaaatcgcatcaaaacgaatg

SEQ ID NO: 162298 - DNA, 22 bp, Artificial sequence
  SiRNA target sequence
aaaatcgcatcaaaacgaatgt

SEQ ID NO: 162299 - DNA, 22 bp, Artificial sequence
  SiRNA target sequence
aaatcgcatcaaaacgaatgta

SEQ ID NO: 162300 - DNA, 22 bp, Artificial sequence
  SiRNA target sequence
aatcgcatcaaaacgaatgtag

SEQ ID NO: 162301 - DNA, 22 bp, Artificial sequence
  SiRNA target sequence
atcgcatcaaaacgaatgtaga

SEQ ID NO: 162302 - DNA, 22 bp, Artificial sequence
  SiRNA target sequence
tcgcatcaaaacgaatgtagaa

SEQ ID NO: 162303 - DNA, 22 bp, Artificial sequence
  SiRNA target sequence
cgcatcaaaacgaatgtagaaa

SEQ ID NO: 162304 - DNA, 22 bp, Artificial sequence
  SiRNA target sequence
gcatcaaaacgaatgtagaaaa

SEQ ID NO: 162305 - DNA, 22 bp, Artificial sequence
  SiRNA target sequence
catcaaaacgaatgtagaaaat

SEQ ID NO: 162306 - DNA, 22 bp, Artificial sequence
  SiRNA target sequence
atcaaaacgaatgtagaaaatg

SEQ ID NO: 162307 - DNA, 22 bp, Artificial sequence
  SiRNA target sequence
tcaaaacgaatgtagaaaatgt

SEQ ID NO: 162308 - DNA, 22 bp, Artificial sequence
  SiRNA target sequence
caaaacgaatgtagaaaatgtt

SEQ ID NO: 162309 - DNA, 22 bp, Artificial sequence
  SiRNA target sequence
aaaacgaatgtagaaaatgttg

SEQ ID NO: 162310 - DNA, 22 bp, Artificial sequence
  SiRNA target sequence
aaacgaatgtagaaaatgttgt

SEQ ID NO: 162311 - DNA, 22 bp, Artificial sequence
  SiRNA target sequence
aacgaatgtagaaaatgttgtt

SEQ ID NO: 162312 - DNA, 22 bp, Artificial sequence
  SiRNA target sequence
acgaatgtagaaaatgttgtta

SEQ ID NO: 162313 - DNA, 22 bp, Artificial sequence
  SiRNA target sequence
cgaatgtagaaaatgttgttat

SEQ ID NO: 162314 - DNA, 22 bp, Artificial sequence
  SiRNA target sequence
gaatgtagaaaatgttgttatt

SEQ ID NO: 162315 - DNA, 22 bp, Artificial sequence
  SiRNA target sequence
aatgtagaaaatgttgttatta

SEQ ID NO: 162316 - DNA, 22 bp, Artificial sequence
  SiRNA target sequence
atgtagaaaatgttgttattaa

SEQ ID NO: 162317 - DNA, 22 bp, Artificial sequence
  SiRNA target sequence
tgtagaaaatgttgttattaac

SEQ ID NO: 162318 - DNA, 22 bp, Artificial sequence
  SiRNA target sequence
gtagaaaatgttgttattaacg

SEQ ID NO: 162319 - DNA, 22 bp, Artificial sequence
  SiRNA target sequence
tagaaaatgttgttattaacgg

SEQ ID NO: 162320 - DNA, 22 bp, Artificial sequence
  SiRNA target sequence
agaaaatgttgttattaacggc

SEQ ID NO: 162321 - DNA, 22 bp, Artificial sequence
  SiRNA target sequence
gaaaatgttgttattaacggcg

SEQ ID NO: 162322 - DNA, 22 bp, Artificial sequence
  SiRNA target sequence
aaaatgttgttattaacggcga

SEQ ID NO: 162323 - DNA, 22 bp, Artificial sequence
  SiRNA target sequence
aaatgttgttattaacggcgat

SEQ ID NO: 162324 - DNA, 22 bp, Artificial sequence
  SiRNA target sequence
aatgttgttattaacggcgatg

SEQ ID NO: 162325 - DNA, 22 bp, Artificial sequence
  SiRNA target sequence
atgttgttattaacggcgatga

SEQ ID NO: 162326 - DNA, 22 bp, Artificial sequence
  SiRNA target sequence
tgttgttattaacggcgatgat

SEQ ID NO: 162327 - DNA, 22 bp, Artificial sequence
  SiRNA target sequence
gttgttattaacggcgatgatt

SEQ ID NO: 162328 - DNA, 22 bp, Artificial sequence
  SiRNA target sequence
ttgttattaacggcgatgattc

SEQ ID NO: 162329 - DNA, 22 bp, Artificial sequence
  SiRNA target sequence
tgttattaacggcgatgattct

SEQ ID NO: 162330 - DNA, 22 bp, Artificial sequence
  SiRNA target sequence
gttattaacggcgatgattcta

SEQ ID NO: 162331 - DNA, 22 bp, Artificial sequence
  SiRNA target sequence
ttattaacggcgatgattctaa

SEQ ID NO: 162332 - DNA, 22 bp, Artificial sequence
  SiRNA target sequence
tattaacggcgatgattctaag

SEQ ID NO: 162333 - DNA, 22 bp, Artificial sequence
  SiRNA target sequence
attaacggcgatgattctaaga

SEQ ID NO: 162334 - DNA, 22 bp, Artificial sequence
  SiRNA target sequence
ttaacggcgatgattctaagac

SEQ ID NO: 162335 - DNA, 22 bp, Artificial sequence
  SiRNA target sequence
taacggcgatgattctaagact

SEQ ID NO: 162336 - DNA, 22 bp, Artificial sequence
  SiRNA target sequence
aacggcgatgattctaagactt

SEQ ID NO: 162337 - DNA, 22 bp, Artificial sequence
  SiRNA target sequence
acggcgatgattctaagacttt

SEQ ID NO: 162338 - DNA, 22 bp, Artificial sequence
  SiRNA target sequence
cggcgatgattctaagactttt

SEQ ID NO: 162339 - DNA, 22 bp, Artificial sequence
  SiRNA target sequence
ggcgatgattctaagacttttc

SEQ ID NO: 162340 - DNA, 22 bp, Artificial sequence
  SiRNA target sequence
gcgatgattctaagacttttcc

SEQ ID NO: 162341 - DNA, 22 bp, Artificial sequence
  SiRNA target sequence
cgatgattctaagacttttcct

SEQ ID NO: 162342 - DNA, 22 bp, Artificial sequence
  SiRNA target sequence
gatgattctaagacttttcctg

SEQ ID NO: 162343 - DNA, 22 bp, Artificial sequence
  SiRNA target sequence
atgattctaagacttttcctgg

SEQ ID NO: 162344 - DNA, 22 bp, Artificial sequence
  SiRNA target sequence
tgattctaagacttttcctggc

SEQ ID NO: 162345 - DNA, 22 bp, Artificial sequence
  SiRNA target sequence
gattctaagacttttcctggct

SEQ ID NO: 162346 - DNA, 22 bp, Artificial sequence
  SiRNA target sequence
attctaagacttttcctggctg

SEQ ID NO: 162347 - DNA, 22 bp, Artificial sequence
  SiRNA target sequence
ttctaagacttttcctggctgt

SEQ ID NO: 162348 - DNA, 22 bp, Artificial sequence
  SiRNA target sequence
tctaagacttttcctggctgtc

SEQ ID NO: 162349 - DNA, 22 bp, Artificial sequence
  SiRNA target sequence
ctaagacttttcctggctgtct

SEQ ID NO: 162350 - DNA, 22 bp, Artificial sequence
  SiRNA target sequence
taagacttttcctggctgtctc

SEQ ID NO: 162351 - DNA, 22 bp, Artificial sequence
  SiRNA target sequence
aagacttttcctggctgtctca

SEQ ID NO: 162352 - DNA, 22 bp, Artificial sequence
  SiRNA target sequence
agacttttcctggctgtctcaa

SEQ ID NO: 162353 - DNA, 22 bp, Artificial sequence
  SiRNA target sequence
gacttttcctggctgtctcaat

SEQ ID NO: 162354 - DNA, 22 bp, Artificial sequence
  SiRNA target sequence
acttttcctggctgtctcaata

SEQ ID NO: 162355 - DNA, 22 bp, Artificial sequence
  SiRNA target sequence
cttttcctggctgtctcaatat

SEQ ID NO: 162356 - DNA, 22 bp, Artificial sequence
  SiRNA target sequence
ttttcctggctgtctcaatatt

SEQ ID NO: 162357 - DNA, 22 bp, Artificial sequence
  SiRNA target sequence
tttcctggctgtctcaatattt

SEQ ID NO: 162358 - DNA, 22 bp, Artificial sequence
  SiRNA target sequence
ttcctggctgtctcaatatttc

SEQ ID NO: 162359 - DNA, 22 bp, Artificial sequence
  SiRNA target sequence
tcctggctgtctcaatatttct

SEQ ID NO: 162360 - DNA, 22 bp, Artificial sequence
  SiRNA target sequence
cctggctgtctcaatatttctt

SEQ ID NO: 162361 - DNA, 22 bp, Artificial sequence
  SiRNA target sequence
ctggctgtctcaatatttcttt

SEQ ID NO: 162362 - DNA, 22 bp, Artificial sequence
  SiRNA target sequence
tggctgtctcaatatttctttt

SEQ ID NO: 162363 - DNA, 22 bp, Artificial sequence
  SiRNA target sequence
ggctgtctcaatatttcttttc

SEQ ID NO: 162364 - DNA, 22 bp, Artificial sequence
  SiRNA target sequence
gctgtctcaatatttcttttcc

SEQ ID NO: 162365 - DNA, 22 bp, Artificial sequence
  SiRNA target sequence
ctgtctcaatatttcttttcca

SEQ ID NO: 162366 - DNA, 22 bp, Artificial sequence
  SiRNA target sequence
tgtctcaatatttcttttccat

SEQ ID NO: 162367 - DNA, 22 bp, Artificial sequence
  SiRNA target sequence
gtctcaatatttcttttccata

SEQ ID NO: 162368 - DNA, 22 bp, Artificial sequence
  SiRNA target sequence
tctcaatatttcttttccatat

SEQ ID NO: 162369 - DNA, 22 bp, Artificial sequence
  SiRNA target sequence
ctcaatatttcttttccatatg

SEQ ID NO: 162370 - DNA, 22 bp, Artificial sequence
  SiRNA target sequence
tcaatatttcttttccatatgt

SEQ ID NO: 162371 - DNA, 22 bp, Artificial sequence
  SiRNA target sequence
caatatttcttttccatatgta

SEQ ID NO: 162372 - DNA, 22 bp, Artificial sequence
  SiRNA target sequence
aatatttcttttccatatgtag

SEQ ID NO: 162373 - DNA, 22 bp, Artificial sequence
  SiRNA target sequence
atatttcttttccatatgtaga

SEQ ID NO: 162374 - DNA, 22 bp, Artificial sequence
  SiRNA target sequence
tatttcttttccatatgtagaa

SEQ ID NO: 162375 - DNA, 22 bp, Artificial sequence
  SiRNA target sequence
atttcttttccatatgtagaag

SEQ ID NO: 162376 - DNA, 22 bp, Artificial sequence
  SiRNA target sequence
tttcttttccatatgtagaagg

SEQ ID NO: 162377 - DNA, 22 bp, Artificial sequence
  SiRNA target sequence
ttcttttccatatgtagaaggt

SEQ ID NO: 162378 - DNA, 22 bp, Artificial sequence
  SiRNA target sequence
tcttttccatatgtagaaggtg

SEQ ID NO: 162379 - DNA, 22 bp, Artificial sequence
  SiRNA target sequence
cttttccatatgtagaaggtga

SEQ ID NO: 162380 - DNA, 22 bp, Artificial sequence
  SiRNA target sequence
ttttccatatgtagaaggtgaa

SEQ ID NO: 162381 - DNA, 22 bp, Artificial sequence
  SiRNA target sequence
tttccatatgtagaaggtgaag

SEQ ID NO: 162382 - DNA, 22 bp, Artificial sequence
  SiRNA target sequence
ttccatatgtagaaggtgaagg

SEQ ID NO: 162383 - DNA, 22 bp, Artificial sequence
  SiRNA target sequence
tccatatgtagaaggtgaaggg

SEQ ID NO: 162384 - DNA, 22 bp, Artificial sequence
  SiRNA target sequence
ccatatgtagaaggtgaagggc

SEQ ID NO: 162385 - DNA, 22 bp, Artificial sequence
  SiRNA target sequence
catatgtagaaggtgaagggct

SEQ ID NO: 162386 - DNA, 22 bp, Artificial sequence
  SiRNA target sequence
atatgtagaaggtgaagggctt

SEQ ID NO: 162387 - DNA, 22 bp, Artificial sequence
  SiRNA target sequence
tatgtagaaggtgaagggctta

SEQ ID NO: 162388 - DNA, 22 bp, Artificial sequence
  SiRNA target sequence
atgtagaaggtgaagggcttat

SEQ ID NO: 162389 - DNA, 22 bp, Artificial sequence
  SiRNA target sequence
tgtagaaggtgaagggcttatg

SEQ ID NO: 162390 - DNA, 22 bp, Artificial sequence
  SiRNA target sequence
gtagaaggtgaagggcttatga

SEQ ID NO: 162391 - DNA, 22 bp, Artificial sequence
  SiRNA target sequence
tagaaggtgaagggcttatgat

SEQ ID NO: 162392 - DNA, 22 bp, Artificial sequence
  SiRNA target sequence
agaaggtgaagggcttatgatg

SEQ ID NO: 162393 - DNA, 22 bp, Artificial sequence
  SiRNA target sequence
gaaggtgaagggcttatgatga

SEQ ID NO: 162394 - DNA, 22 bp, Artificial sequence
  SiRNA target sequence
aaggtgaagggcttatgatgaa

SEQ ID NO: 162395 - DNA, 22 bp, Artificial sequence
  SiRNA target sequence
aggtgaagggcttatgatgaat

SEQ ID NO: 162396 - DNA, 22 bp, Artificial sequence
  SiRNA target sequence
ggtgaagggcttatgatgaata

SEQ ID NO: 162397 - DNA, 22 bp, Artificial sequence
  SiRNA target sequence
gtgaagggcttatgatgaatat

SEQ ID NO: 162398 - DNA, 22 bp, Artificial sequence
  SiRNA target sequence
tgaagggcttatgatgaatatt

SEQ ID NO: 162399 - DNA, 22 bp, Artificial sequence
  SiRNA target sequence
gaagggcttatgatgaatatta

SEQ ID NO: 162400 - DNA, 22 bp, Artificial sequence
  SiRNA target sequence
aagggcttatgatgaatattaa

SEQ ID NO: 162401 - DNA, 22 bp, Artificial sequence
  SiRNA target sequence
agggcttatgatgaatattaag

SEQ ID NO: 162402 - DNA, 22 bp, Artificial sequence
  SiRNA target sequence
gggcttatgatgaatattaagg

SEQ ID NO: 162403 - DNA, 22 bp, Artificial sequence
  SiRNA target sequence
ggcttatgatgaatattaagga

SEQ ID NO: 162404 - DNA, 22 bp, Artificial sequence
  SiRNA target sequence
gcttatgatgaatattaaggat

SEQ ID NO: 162405 - DNA, 22 bp, Artificial sequence
  SiRNA target sequence
cttatgatgaatattaaggata

SEQ ID NO: 162406 - DNA, 22 bp, Artificial sequence
  SiRNA target sequence
ttatgatgaatattaaggatat

SEQ ID NO: 162407 - DNA, 22 bp, Artificial sequence
  SiRNA target sequence
tatgatgaatattaaggatatt

SEQ ID NO: 162408 - DNA, 22 bp, Artificial sequence
  SiRNA target sequence
atgatgaatattaaggatattg

SEQ ID NO: 162409 - DNA, 22 bp, Artificial sequence
  SiRNA target sequence
tgatgaatattaaggatattgc

SEQ ID NO: 162410 - DNA, 22 bp, Artificial sequence
  SiRNA target sequence
gatgaatattaaggatattgct

SEQ ID NO: 162411 - DNA, 22 bp, Artificial sequence
  SiRNA target sequence
atgaatattaaggatattgctg

SEQ ID NO: 162412 - DNA, 22 bp, Artificial sequence
  SiRNA target sequence
tgaatattaaggatattgctgt

SEQ ID NO: 162413 - DNA, 22 bp, Artificial sequence
  SiRNA target sequence
gaatattaaggatattgctgtt

SEQ ID NO: 162414 - DNA, 22 bp, Artificial sequence
  SiRNA target sequence
aatattaaggatattgctgtta

SEQ ID NO: 162415 - DNA, 22 bp, Artificial sequence
  SiRNA target sequence
atattaaggatattgctgttag

SEQ ID NO: 162416 - DNA, 22 bp, Artificial sequence
  SiRNA target sequence
tattaaggatattgctgttagt

SEQ ID NO: 162417 - DNA, 22 bp, Artificial sequence
  SiRNA target sequence
attaaggatattgctgttagta

SEQ ID NO: 162418 - DNA, 22 bp, Artificial sequence
  SiRNA target sequence
ttaaggatattgctgttagtag

SEQ ID NO: 162419 - DNA, 22 bp, Artificial sequence
  SiRNA target sequence
taaggatattgctgttagtagt

SEQ ID NO: 162420 - DNA, 22 bp, Artificial sequence
  SiRNA target sequence
aaggatattgctgttagtagtg

SEQ ID NO: 162421 - DNA, 22 bp, Artificial sequence
  SiRNA target sequence
aggatattgctgttagtagtgg

SEQ ID NO: 162422 - DNA, 22 bp, Artificial sequence
  SiRNA target sequence
ggatattgctgttagtagtgga

SEQ ID NO: 162423 - DNA, 22 bp, Artificial sequence
  SiRNA target sequence
gatattgctgttagtagtggaa

SEQ ID NO: 162424 - DNA, 22 bp, Artificial sequence
  SiRNA target sequence
atattgctgttagtagtggaag

SEQ ID NO: 162425 - DNA, 22 bp, Artificial sequence
  SiRNA target sequence
tattgctgttagtagtggaagt

SEQ ID NO: 162426 - DNA, 22 bp, Artificial sequence
  SiRNA target sequence
attgctgttagtagtggaagtg

SEQ ID NO: 162427 - DNA, 22 bp, Artificial sequence
  SiRNA target sequence
ttgctgttagtagtggaagtgc

SEQ ID NO: 162428 - DNA, 22 bp, Artificial sequence
  SiRNA target sequence
tgctgttagtagtggaagtgct

SEQ ID NO: 162429 - DNA, 22 bp, Artificial sequence
  SiRNA target sequence
gctgttagtagtggaagtgctt

SEQ ID NO: 162430 - DNA, 22 bp, Artificial sequence
  SiRNA target sequence
ctgttagtagtggaagtgcttg

SEQ ID NO: 162431 - DNA, 22 bp, Artificial sequence
  SiRNA target sequence
tgttagtagtggaagtgcttgc

SEQ ID NO: 162432 - DNA, 22 bp, Artificial sequence
  SiRNA target sequence
gttagtagtggaagtgcttgca

SEQ ID NO: 162433 - DNA, 22 bp, Artificial sequence
  SiRNA target sequence
ttagtagtggaagtgcttgcac

SEQ ID NO: 162434 - DNA, 22 bp, Artificial sequence
  SiRNA target sequence
tagtagtggaagtgcttgcact

SEQ ID NO: 162435 - DNA, 22 bp, Artificial sequence
  SiRNA target sequence
agtagtggaagtgcttgcactt

SEQ ID NO: 162436 - DNA, 22 bp, Artificial sequence
  SiRNA target sequence
gtagtggaagtgcttgcacttc

SEQ ID NO: 162437 - DNA, 22 bp, Artificial sequence
  SiRNA target sequence
tagtggaagtgcttgcacttca

SEQ ID NO: 162438 - DNA, 22 bp, Artificial sequence
  SiRNA target sequence
agtggaagtgcttgcacttcat

SEQ ID NO: 162439 - DNA, 22 bp, Artificial sequence
  SiRNA target sequence
gtggaagtgcttgcacttcatc

SEQ ID NO: 162440 - DNA, 22 bp, Artificial sequence
  SiRNA target sequence
tggaagtgcttgcacttcatca

SEQ ID NO: 162441 - DNA, 22 bp, Artificial sequence
  SiRNA target sequence
ggaagtgcttgcacttcatcat

SEQ ID NO: 162442 - DNA, 22 bp, Artificial sequence
  SiRNA target sequence
gaagtgcttgcacttcatcatc

SEQ ID NO: 162443 - DNA, 22 bp, Artificial sequence
  SiRNA target sequence
aagtgcttgcacttcatcatct

SEQ ID NO: 162444 - DNA, 22 bp, Artificial sequence
  SiRNA target sequence
agtgcttgcacttcatcatctt

SEQ ID NO: 162445 - DNA, 22 bp, Artificial sequence
  SiRNA target sequence
gtgcttgcacttcatcatcttt

SEQ ID NO: 162446 - DNA, 22 bp, Artificial sequence
  SiRNA target sequence
tgcttgcacttcatcatcttta

SEQ ID NO: 162447 - DNA, 22 bp, Artificial sequence
  SiRNA target sequence
gcttgcacttcatcatctttag

SEQ ID NO: 162448 - DNA, 22 bp, Artificial sequence
  SiRNA target sequence
cttgcacttcatcatctttaga

SEQ ID NO: 162449 - DNA, 22 bp, Artificial sequence
  SiRNA target sequence
ttgcacttcatcatctttagaa

SEQ ID NO: 162450 - DNA, 22 bp, Artificial sequence
  SiRNA target sequence
tgcacttcatcatctttagaac

SEQ ID NO: 162451 - DNA, 22 bp, Artificial sequence
  SiRNA target sequence
gcacttcatcatctttagaacc

SEQ ID NO: 162452 - DNA, 22 bp, Artificial sequence
  SiRNA target sequence
cacttcatcatctttagaaccc

SEQ ID NO: 162453 - DNA, 22 bp, Artificial sequence
  SiRNA target sequence
acttcatcatctttagaaccct

SEQ ID NO: 162454 - DNA, 22 bp, Artificial sequence
  SiRNA target sequence
cttcatcatctttagaaccctc

SEQ ID NO: 162455 - DNA, 22 bp, Artificial sequence
  SiRNA target sequence
ttcatcatctttagaaccctct

SEQ ID NO: 162456 - DNA, 22 bp, Artificial sequence
  SiRNA target sequence
tcatcatctttagaaccctctt

SEQ ID NO: 162457 - DNA, 22 bp, Artificial sequence
  SiRNA target sequence
catcatctttagaaccctctta

SEQ ID NO: 162458 - DNA, 22 bp, Artificial sequence
  SiRNA target sequence
atcatctttagaaccctcttat

SEQ ID NO: 162459 - DNA, 22 bp, Artificial sequence
  SiRNA target sequence
tcatctttagaaccctcttatg

SEQ ID NO: 162460 - DNA, 22 bp, Artificial sequence
  SiRNA target sequence
catctttagaaccctcttatgt

SEQ ID NO: 162461 - DNA, 22 bp, Artificial sequence
  SiRNA target sequence
atctttagaaccctcttatgtt

SEQ ID NO: 162462 - DNA, 22 bp, Artificial sequence
  SiRNA target sequence
tctttagaaccctcttatgttt

SEQ ID NO: 162463 - DNA, 22 bp, Artificial sequence
  SiRNA target sequence
ctttagaaccctcttatgtttt

SEQ ID NO: 162464 - DNA, 22 bp, Artificial sequence
  SiRNA target sequence
tttagaaccctcttatgttttg

SEQ ID NO: 162465 - DNA, 22 bp, Artificial sequence
  SiRNA target sequence
ttagaaccctcttatgttttgc

SEQ ID NO: 162466 - DNA, 22 bp, Artificial sequence
  SiRNA target sequence
tagaaccctcttatgttttgcg

SEQ ID NO: 162467 - DNA, 22 bp, Artificial sequence
  SiRNA target sequence
agaaccctcttatgttttgcga

SEQ ID NO: 162468 - DNA, 22 bp, Artificial sequence
  SiRNA target sequence
gaaccctcttatgttttgcgag

SEQ ID NO: 162469 - DNA, 22 bp, Artificial sequence
  SiRNA target sequence
aaccctcttatgttttgcgagc

SEQ ID NO: 162470 - DNA, 22 bp, Artificial sequence
  SiRNA target sequence
accctcttatgttttgcgagct

SEQ ID NO: 162471 - DNA, 22 bp, Artificial sequence
  SiRNA target sequence
ccctcttatgttttgcgagctt

SEQ ID NO: 162472 - DNA, 22 bp, Artificial sequence
  SiRNA target sequence
cctcttatgttttgcgagcttt

SEQ ID NO: 162473 - DNA, 22 bp, Artificial sequence
  SiRNA target sequence
ctcttatgttttgcgagcttta

SEQ ID NO: 162474 - DNA, 22 bp, Artificial sequence
  SiRNA target sequence
tcttatgttttgcgagctttag

SEQ ID NO: 162475 - DNA, 22 bp, Artificial sequence
  SiRNA target sequence
cttatgttttgcgagctttagg

SEQ ID NO: 162476 - DNA, 22 bp, Artificial sequence
  SiRNA target sequence
ttatgttttgcgagctttaggc

SEQ ID NO: 162477 - DNA, 22 bp, Artificial sequence
  SiRNA target sequence
tatgttttgcgagctttaggca

SEQ ID NO: 162478 - DNA, 22 bp, Artificial sequence
  SiRNA target sequence
atgttttgcgagctttaggcaa

SEQ ID NO: 162479 - DNA, 22 bp, Artificial sequence
  SiRNA target sequence
tgttttgcgagctttaggcaaa

SEQ ID NO: 162480 - DNA, 22 bp, Artificial sequence
  SiRNA target sequence
gttttgcgagctttaggcaaaa

SEQ ID NO: 162481 - DNA, 22 bp, Artificial sequence
  SiRNA target sequence
ttttgcgagctttaggcaaaaa

SEQ ID NO: 162482 - DNA, 22 bp, Artificial sequence
  SiRNA target sequence
tttgcgagctttaggcaaaaat

SEQ ID NO: 162483 - DNA, 22 bp, Artificial sequence
  SiRNA target sequence
ttgcgagctttaggcaaaaatg

SEQ ID NO: 162484 - DNA, 22 bp, Artificial sequence
  SiRNA target sequence
tgcgagctttaggcaaaaatga

SEQ ID NO: 162485 - DNA, 22 bp, Artificial sequence
  SiRNA target sequence
gcgagctttaggcaaaaatgat

SEQ ID NO: 162486 - DNA, 22 bp, Artificial sequence
  SiRNA target sequence
cgagctttaggcaaaaatgatg

SEQ ID NO: 162487 - DNA, 22 bp, Artificial sequence
  SiRNA target sequence
gagctttaggcaaaaatgatga

SEQ ID NO: 162488 - DNA, 22 bp, Artificial sequence
  SiRNA target sequence
agctttaggcaaaaatgatgat

SEQ ID NO: 162489 - DNA, 22 bp, Artificial sequence
  SiRNA target sequence
gctttaggcaaaaatgatgatc

SEQ ID NO: 162490 - DNA, 22 bp, Artificial sequence
  SiRNA target sequence
ctttaggcaaaaatgatgatct

SEQ ID NO: 162491 - DNA, 22 bp, Artificial sequence
  SiRNA target sequence
tttaggcaaaaatgatgatctt

SEQ ID NO: 162492 - DNA, 22 bp, Artificial sequence
  SiRNA target sequence
ttaggcaaaaatgatgatcttg

SEQ ID NO: 162493 - DNA, 22 bp, Artificial sequence
  SiRNA target sequence
taggcaaaaatgatgatcttgc

SEQ ID NO: 162494 - DNA, 22 bp, Artificial sequence
  SiRNA target sequence
aggcaaaaatgatgatcttgcg

SEQ ID NO: 162495 - DNA, 22 bp, Artificial sequence
  SiRNA target sequence
ggcaaaaatgatgatcttgcgc

SEQ ID NO: 162496 - DNA, 22 bp, Artificial sequence
  SiRNA target sequence
gcaaaaatgatgatcttgcgca

SEQ ID NO: 162497 - DNA, 22 bp, Artificial sequence
  SiRNA target sequence
caaaaatgatgatcttgcgcat

SEQ ID NO: 162498 - DNA, 22 bp, Artificial sequence
  SiRNA target sequence
aaaaatgatgatcttgcgcatt

SEQ ID NO: 162499 - DNA, 22 bp, Artificial sequence
  SiRNA target sequence
aaaatgatgatcttgcgcattc

SEQ ID NO: 162500 - DNA, 22 bp, Artificial sequence
  SiRNA target sequence
aaatgatgatcttgcgcattct

SEQ ID NO: 162501 - DNA, 22 bp, Artificial sequence
  SiRNA target sequence
aatgatgatcttgcgcattctt

SEQ ID NO: 162502 - DNA, 22 bp, Artificial sequence
  SiRNA target sequence
atgatgatcttgcgcattcttc

SEQ ID NO: 162503 - DNA, 22 bp, Artificial sequence
  SiRNA target sequence
tgatgatcttgcgcattcttct

SEQ ID NO: 162504 - DNA, 22 bp, Artificial sequence
  SiRNA target sequence
gatgatcttgcgcattcttcta

SEQ ID NO: 162505 - DNA, 22 bp, Artificial sequence
  SiRNA target sequence
atgatcttgcgcattcttctat

SEQ ID NO: 162506 - DNA, 22 bp, Artificial sequence
  SiRNA target sequence
tgatcttgcgcattcttctata

SEQ ID NO: 162507 - DNA, 22 bp, Artificial sequence
  SiRNA target sequence
gatcttgcgcattcttctataa

SEQ ID NO: 162508 - DNA, 22 bp, Artificial sequence
  SiRNA target sequence
atcttgcgcattcttctataag

SEQ ID NO: 162509 - DNA, 22 bp, Artificial sequence
  SiRNA target sequence
tcttgcgcattcttctataaga

SEQ ID NO: 162510 - DNA, 22 bp, Artificial sequence
  SiRNA target sequence
cttgcgcattcttctataagat

SEQ ID NO: 162511 - DNA, 22 bp, Artificial sequence
  SiRNA target sequence
ttgcgcattcttctataagatt

SEQ ID NO: 162512 - DNA, 22 bp, Artificial sequence
  SiRNA target sequence
tgcgcattcttctataagattt

SEQ ID NO: 162513 - DNA, 22 bp, Artificial sequence
  SiRNA target sequence
gcgcattcttctataagatttg

SEQ ID NO: 162514 - DNA, 22 bp, Artificial sequence
  SiRNA target sequence
cgcattcttctataagatttgg

SEQ ID NO: 162515 - DNA, 22 bp, Artificial sequence
  SiRNA target sequence
gcattcttctataagatttgga

SEQ ID NO: 162516 - DNA, 22 bp, Artificial sequence
  SiRNA target sequence
cattcttctataagatttggaa

SEQ ID NO: 162517 - DNA, 22 bp, Artificial sequence
  SiRNA target sequence
attcttctataagatttggaat

SEQ ID NO: 162518 - DNA, 22 bp, Artificial sequence
  SiRNA target sequence
ttcttctataagatttggaata

SEQ ID NO: 162519 - DNA, 22 bp, Artificial sequence
  SiRNA target sequence
tcttctataagatttggaataa

SEQ ID NO: 162520 - DNA, 22 bp, Artificial sequence
  SiRNA target sequence
cttctataagatttggaataaa

SEQ ID NO: 162521 - DNA, 22 bp, Artificial sequence
  SiRNA target sequence
ttctataagatttggaataaat

SEQ ID NO: 162522 - DNA, 22 bp, Artificial sequence
  SiRNA target sequence
tctataagatttggaataaata

SEQ ID NO: 162523 - DNA, 22 bp, Artificial sequence
  SiRNA target sequence
ctataagatttggaataaataa

SEQ ID NO: 162524 - DNA, 22 bp, Artificial sequence
  SiRNA target sequence
tataagatttggaataaataag

SEQ ID NO: 162525 - DNA, 22 bp, Artificial sequence
  SiRNA target sequence
ataagatttggaataaataagt

SEQ ID NO: 162526 - DNA, 22 bp, Artificial sequence
  SiRNA target sequence
taagatttggaataaataagtt

SEQ ID NO: 162527 - DNA, 22 bp, Artificial sequence
  SiRNA target sequence
aagatttggaataaataagttt

SEQ ID NO: 162528 - DNA, 22 bp, Artificial sequence
  SiRNA target sequence
agatttggaataaataagttta

SEQ ID NO: 162529 - DNA, 22 bp, Artificial sequence
  SiRNA target sequence
gatttggaataaataagtttac

SEQ ID NO: 162530 - DNA, 22 bp, Artificial sequence
  SiRNA target sequence
atttggaataaataagtttaca

SEQ ID NO: 162531 - DNA, 22 bp, Artificial sequence
  SiRNA target sequence
tttggaataaataagtttacaa

SEQ ID NO: 162532 - DNA, 22 bp, Artificial sequence
  SiRNA target sequence
ttggaataaataagtttacaac

SEQ ID NO: 162533 - DNA, 22 bp, Artificial sequence
  SiRNA target sequence
tggaataaataagtttacaact

SEQ ID NO: 162534 - DNA, 22 bp, Artificial sequence
  SiRNA target sequence
ggaataaataagtttacaactg

SEQ ID NO: 162535 - DNA, 22 bp, Artificial sequence
  SiRNA target sequence
gaataaataagtttacaactga

SEQ ID NO: 162536 - DNA, 22 bp, Artificial sequence
  SiRNA target sequence
aataaataagtttacaactgaa

SEQ ID NO: 162537 - DNA, 22 bp, Artificial sequence
  SiRNA target sequence
ataaataagtttacaactgaag

SEQ ID NO: 162538 - DNA, 22 bp, Artificial sequence
  SiRNA target sequence
taaataagtttacaactgaaga

SEQ ID NO: 162539 - DNA, 22 bp, Artificial sequence
  SiRNA target sequence
aaataagtttacaactgaagaa

SEQ ID NO: 162540 - DNA, 22 bp, Artificial sequence
  SiRNA target sequence
aataagtttacaactgaagaag

SEQ ID NO: 162541 - DNA, 22 bp, Artificial sequence
  SiRNA target sequence
ataagtttacaactgaagaaga

SEQ ID NO: 162542 - DNA, 22 bp, Artificial sequence
  SiRNA target sequence
taagtttacaactgaagaagaa

SEQ ID NO: 162543 - DNA, 22 bp, Artificial sequence
  SiRNA target sequence
aagtttacaactgaagaagaaa

SEQ ID NO: 162544 - DNA, 22 bp, Artificial sequence
  SiRNA target sequence
agtttacaactgaagaagaaat

SEQ ID NO: 162545 - DNA, 22 bp, Artificial sequence
  SiRNA target sequence
gtttacaactgaagaagaaatc

SEQ ID NO: 162546 - DNA, 22 bp, Artificial sequence
  SiRNA target sequence
tttacaactgaagaagaaatca

SEQ ID NO: 162547 - DNA, 22 bp, Artificial sequence
  SiRNA target sequence
ttacaactgaagaagaaatcaa

SEQ ID NO: 162548 - DNA, 22 bp, Artificial sequence
  SiRNA target sequence
tacaactgaagaagaaatcaat

SEQ ID NO: 162549 - DNA, 22 bp, Artificial sequence
  SiRNA target sequence
acaactgaagaagaaatcaata

SEQ ID NO: 162550 - DNA, 22 bp, Artificial sequence
  SiRNA target sequence
caactgaagaagaaatcaataa

SEQ ID NO: 162551 - DNA, 22 bp, Artificial sequence
  SiRNA target sequence
aactgaagaagaaatcaataaa

SEQ ID NO: 162552 - DNA, 22 bp, Artificial sequence
  SiRNA target sequence
actgaagaagaaatcaataaag

SEQ ID NO: 162553 - DNA, 22 bp, Artificial sequence
  SiRNA target sequence
ctgaagaagaaatcaataaagt

SEQ ID NO: 162554 - DNA, 22 bp, Artificial sequence
  SiRNA target sequence
tgaagaagaaatcaataaagta

SEQ ID NO: 162555 - DNA, 22 bp, Artificial sequence
  SiRNA target sequence
gaagaagaaatcaataaagtat

SEQ ID NO: 162556 - DNA, 22 bp, Artificial sequence
  SiRNA target sequence
aagaagaaatcaataaagtatc

SEQ ID NO: 162557 - DNA, 22 bp, Artificial sequence
  SiRNA target sequence
agaagaaatcaataaagtatct

SEQ ID NO: 162558 - DNA, 22 bp, Artificial sequence
  SiRNA target sequence
gaagaaatcaataaagtatcta

SEQ ID NO: 162559 - DNA, 22 bp, Artificial sequence
  SiRNA target sequence
aagaaatcaataaagtatctag

SEQ ID NO: 162560 - DNA, 22 bp, Artificial sequence
  SiRNA target sequence
agaaatcaataaagtatctagt

SEQ ID NO: 162561 - DNA, 22 bp, Artificial sequence
  SiRNA target sequence
gaaatcaataaagtatctagtg

SEQ ID NO: 162562 - DNA, 22 bp, Artificial sequence
  SiRNA target sequence
aaatcaataaagtatctagtga

SEQ ID NO: 162563 - DNA, 22 bp, Artificial sequence
  SiRNA target sequence
aatcaataaagtatctagtgat

SEQ ID NO: 162564 - DNA, 22 bp, Artificial sequence
  SiRNA target sequence
atcaataaagtatctagtgata

SEQ ID NO: 162565 - DNA, 22 bp, Artificial sequence
  SiRNA target sequence
tcaataaagtatctagtgatac

SEQ ID NO: 162566 - DNA, 22 bp, Artificial sequence
  SiRNA target sequence
caataaagtatctagtgataca

SEQ ID NO: 162567 - DNA, 22 bp, Artificial sequence
  SiRNA target sequence
aataaagtatctagtgatacaa

SEQ ID NO: 162568 - DNA, 22 bp, Artificial sequence
  SiRNA target sequence
ataaagtatctagtgatacaat

SEQ ID NO: 162569 - DNA, 22 bp, Artificial sequence
  SiRNA target sequence
taaagtatctagtgatacaatt

SEQ ID NO: 162570 - DNA, 22 bp, Artificial sequence
  SiRNA target sequence
aaagtatctagtgatacaatta

SEQ ID NO: 162571 - DNA, 22 bp, Artificial sequence
  SiRNA target sequence
aagtatctagtgatacaattaa

SEQ ID NO: 162572 - DNA, 22 bp, Artificial sequence
  SiRNA target sequence
agtatctagtgatacaattaaa

SEQ ID NO: 162573 - DNA, 22 bp, Artificial sequence
  SiRNA target sequence
gtatctagtgatacaattaaag

SEQ ID NO: 162574 - DNA, 22 bp, Artificial sequence
  SiRNA target sequence
tatctagtgatacaattaaagc

SEQ ID NO: 162575 - DNA, 22 bp, Artificial sequence
  SiRNA target sequence
atctagtgatacaattaaagct

SEQ ID NO: 162576 - DNA, 22 bp, Artificial sequence
  SiRNA target sequence
tctagtgatacaattaaagctg

SEQ ID NO: 162577 - DNA, 22 bp, Artificial sequence
  SiRNA target sequence
ctagtgatacaattaaagctgt

SEQ ID NO: 162578 - DNA, 22 bp, Artificial sequence
  SiRNA target sequence
tagtgatacaattaaagctgtt

SEQ ID NO: 162579 - DNA, 22 bp, Artificial sequence
  SiRNA target sequence
agtgatacaattaaagctgtta

SEQ ID NO: 162580 - DNA, 22 bp, Artificial sequence
  SiRNA target sequence
gtgatacaattaaagctgttaa

SEQ ID NO: 162581 - DNA, 22 bp, Artificial sequence
  SiRNA target sequence
tgatacaattaaagctgttaat

SEQ ID NO: 162582 - DNA, 22 bp, Artificial sequence
  SiRNA target sequence
gatacaattaaagctgttaata

SEQ ID NO: 162583 - DNA, 22 bp, Artificial sequence
  SiRNA target sequence
atacaattaaagctgttaataa

SEQ ID NO: 162584 - DNA, 22 bp, Artificial sequence
  SiRNA target sequence
tacaattaaagctgttaataag

SEQ ID NO: 162585 - DNA, 22 bp, Artificial sequence
  SiRNA target sequence
acaattaaagctgttaataagt

SEQ ID NO: 162586 - DNA, 22 bp, Artificial sequence
  SiRNA target sequence
caattaaagctgttaataagtt

SEQ ID NO: 162587 - DNA, 22 bp, Artificial sequence
  SiRNA target sequence
aattaaagctgttaataagtta

SEQ ID NO: 162588 - DNA, 22 bp, Artificial sequence
  SiRNA target sequence
attaaagctgttaataagttaa

SEQ ID NO: 162589 - DNA, 22 bp, Artificial sequence
  SiRNA target sequence
ttaaagctgttaataagttaag

SEQ ID NO: 162590 - DNA, 22 bp, Artificial sequence
  SiRNA target sequence
taaagctgttaataagttaaga

SEQ ID NO: 162591 - DNA, 22 bp, Artificial sequence
  SiRNA target sequence
aaagctgttaataagttaagag

SEQ ID NO: 162592 - DNA, 22 bp, Artificial sequence
  SiRNA target sequence
aagctgttaataagttaagaga

SEQ ID NO: 162593 - DNA, 22 bp, Artificial sequence
  SiRNA target sequence
agctgttaataagttaagagat

SEQ ID NO: 162594 - DNA, 22 bp, Artificial sequence
  SiRNA target sequence
gctgttaataagttaagagata

SEQ ID NO: 162595 - DNA, 22 bp, Artificial sequence
  SiRNA target sequence
ctgttaataagttaagagatat

SEQ ID NO: 162596 - DNA, 22 bp, Artificial sequence
  SiRNA target sequence
tgttaataagttaagagatatg

SEQ ID NO: 162597 - DNA, 22 bp, Artificial sequence
  SiRNA target sequence
gttaataagttaagagatatgt

SEQ ID NO: 162598 - DNA, 22 bp, Artificial sequence
  SiRNA target sequence
ttaataagttaagagatatgtc

SEQ ID NO: 162599 - DNA, 22 bp, Artificial sequence
  SiRNA target sequence
taataagttaagagatatgtct

SEQ ID NO: 162600 - DNA, 22 bp, Artificial sequence
  SiRNA target sequence
aataagttaagagatatgtctc

SEQ ID NO: 162601 - DNA, 22 bp, Artificial sequence
  SiRNA target sequence
ataagttaagagatatgtctcc

SEQ ID NO: 162602 - DNA, 22 bp, Artificial sequence
  SiRNA target sequence
taagttaagagatatgtctcct

SEQ ID NO: 162603 - DNA, 22 bp, Artificial sequence
  SiRNA target sequence
aagttaagagatatgtctcctt

SEQ ID NO: 162604 - DNA, 22 bp, Artificial sequence
  SiRNA target sequence
agttaagagatatgtctccttt

SEQ ID NO: 162605 - DNA, 22 bp, Artificial sequence
  SiRNA target sequence
gttaagagatatgtctccttta

SEQ ID NO: 162606 - DNA, 22 bp, Artificial sequence
  SiRNA target sequence
ttaagagatatgtctcctttat

SEQ ID NO: 162607 - DNA, 22 bp, Artificial sequence
  SiRNA target sequence
taagagatatgtctcctttata

SEQ ID NO: 162608 - DNA, 22 bp, Artificial sequence
  SiRNA target sequence
aagagatatgtctcctttatat

SEQ ID NO: 162609 - DNA, 22 bp, Artificial sequence
  SiRNA target sequence
agagatatgtctcctttatatg

SEQ ID NO: 162610 - DNA, 22 bp, Artificial sequence
  SiRNA target sequence
gagatatgtctcctttatatga

SEQ ID NO: 162611 - DNA, 22 bp, Artificial sequence
  SiRNA target sequence
agatatgtctcctttatatgaa

SEQ ID NO: 162612 - DNA, 22 bp, Artificial sequence
  SiRNA target sequence
gatatgtctcctttatatgaaa

SEQ ID NO: 162613 - DNA, 22 bp, Artificial sequence
  SiRNA target sequence
atatgtctcctttatatgaaat

SEQ ID NO: 162614 - DNA, 22 bp, Artificial sequence
  SiRNA target sequence
tatgtctcctttatatgaaatg

SEQ ID NO: 162615 - DNA, 22 bp, Artificial sequence
  SiRNA target sequence
atgtctcctttatatgaaatgg

SEQ ID NO: 162616 - DNA, 22 bp, Artificial sequence
  SiRNA target sequence
tgtctcctttatatgaaatggt

SEQ ID NO: 162617 - DNA, 22 bp, Artificial sequence
  SiRNA target sequence
gtctcctttatatgaaatggtc

SEQ ID NO: 162618 - DNA, 22 bp, Artificial sequence
  SiRNA target sequence
tctcctttatatgaaatggtca

SEQ ID NO: 162619 - DNA, 22 bp, Artificial sequence
  SiRNA target sequence
ctcctttatatgaaatggtcaa

SEQ ID NO: 162620 - DNA, 22 bp, Artificial sequence
  SiRNA target sequence
tcctttatatgaaatggtcaaa

SEQ ID NO: 162621 - DNA, 22 bp, Artificial sequence
  SiRNA target sequence
cctttatatgaaatggtcaaag

SEQ ID NO: 162622 - DNA, 22 bp, Artificial sequence
  SiRNA target sequence
ctttatatgaaatggtcaaaga

SEQ ID NO: 162623 - DNA, 22 bp, Artificial sequence
  SiRNA target sequence
tttatatgaaatggtcaaagaa

SEQ ID NO: 162624 - DNA, 22 bp, Artificial sequence
  SiRNA target sequence
ttatatgaaatggtcaaagaag

SEQ ID NO: 162625 - DNA, 22 bp, Artificial sequence
  SiRNA target sequence
tatatgaaatggtcaaagaagg

SEQ ID NO: 162626 - DNA, 22 bp, Artificial sequence
  SiRNA target sequence
atatgaaatggtcaaagaaggg

SEQ ID NO: 162627 - DNA, 22 bp, Artificial sequence
  SiRNA target sequence
tatgaaatggtcaaagaaggga

SEQ ID NO: 162628 - DNA, 22 bp, Artificial sequence
  SiRNA target sequence
atgaaatggtcaaagaagggat

SEQ ID NO: 162629 - DNA, 22 bp, Artificial sequence
  SiRNA target sequence
tgaaatggtcaaagaagggata

SEQ ID NO: 162630 - DNA, 22 bp, Artificial sequence
  SiRNA target sequence
gaaatggtcaaagaagggatag

SEQ ID NO: 162631 - DNA, 22 bp, Artificial sequence
  SiRNA target sequence
aaatggtcaaagaagggataga

SEQ ID NO: 162632 - DNA, 22 bp, Artificial sequence
  SiRNA target sequence
aatggtcaaagaagggatagat

SEQ ID NO: 162633 - DNA, 22 bp, Artificial sequence
  SiRNA target sequence
atggtcaaagaagggatagatt

SEQ ID NO: 162634 - DNA, 22 bp, Artificial sequence
  SiRNA target sequence
tggtcaaagaagggatagattt

SEQ ID NO: 162635 - DNA, 22 bp, Artificial sequence
  SiRNA target sequence
ggtcaaagaagggatagattta

SEQ ID NO: 162636 - DNA, 22 bp, Artificial sequence
  SiRNA target sequence
gtcaaagaagggatagatttag

SEQ ID NO: 162637 - DNA, 22 bp, Artificial sequence
  SiRNA target sequence
tcaaagaagggatagatttaga

SEQ ID NO: 162638 - DNA, 22 bp, Artificial sequence
  SiRNA target sequence
caaagaagggatagatttagat

SEQ ID NO: 162639 - DNA, 22 bp, Artificial sequence
  SiRNA target sequence
aaagaagggatagatttagata

SEQ ID NO: 162640 - DNA, 22 bp, Artificial sequence
  SiRNA target sequence
aagaagggatagatttagataa

SEQ ID NO: 162641 - DNA, 22 bp, Artificial sequence
  SiRNA target sequence
agaagggatagatttagataaa

SEQ ID NO: 162642 - DNA, 22 bp, Artificial sequence
  SiRNA target sequence
gaagggatagatttagataaaa

SEQ ID NO: 162643 - DNA, 22 bp, Artificial sequence
  SiRNA target sequence
aagggatagatttagataaaat

SEQ ID NO: 162644 - DNA, 22 bp, Artificial sequence
  SiRNA target sequence
agggatagatttagataaaatt

SEQ ID NO: 162645 - DNA, 22 bp, Artificial sequence
  SiRNA target sequence
gggatagatttagataaaatta

SEQ ID NO: 162646 - DNA, 22 bp, Artificial sequence
  SiRNA target sequence
ggatagatttagataaaattaa

SEQ ID NO: 162647 - DNA, 22 bp, Artificial sequence
  SiRNA target sequence
gatagatttagataaaattaat

SEQ ID NO: 162648 - DNA, 22 bp, Artificial sequence
  SiRNA target sequence
atagatttagataaaattaatt

SEQ ID NO: 162649 - DNA, 22 bp, Artificial sequence
  SiRNA target sequence
tagatttagataaaattaattg

SEQ ID NO: 162650 - DNA, 22 bp, Artificial sequence
  SiRNA target sequence
agatttagataaaattaattgg

SEQ ID NO: 162651 - DNA, 22 bp, Artificial sequence
  SiRNA target sequence
gatttagataaaattaattggt

SEQ ID NO: 162652 - DNA, 22 bp, Artificial sequence
  SiRNA target sequence
atttagataaaattaattggtc

SEQ ID NO: 162653 - DNA, 22 bp, Artificial sequence
  SiRNA target sequence
tttagataaaattaattggtct

SEQ ID NO: 162654 - DNA, 22 bp, Artificial sequence
  SiRNA target sequence
ttagataaaattaattggtctg

SEQ ID NO: 162655 - DNA, 22 bp, Artificial sequence
  SiRNA target sequence
tagataaaattaattggtctgc

SEQ ID NO: 162656 - DNA, 22 bp, Artificial sequence
  SiRNA target sequence
agataaaattaattggtctgct

SEQ ID NO: 162657 - DNA, 22 bp, Artificial sequence
  SiRNA target sequence
gataaaattaattggtctgctt

SEQ ID NO: 162658 - DNA, 22 bp, Artificial sequence
  SiRNA target sequence
ataaaattaattggtctgctta

SEQ ID NO: 162659 - DNA, 22 bp, Artificial sequence
  SiRNA target sequence
taaaattaattggtctgcttaa

SEQ ID NO: 162660 - DNA, 23 bp, Artificial sequence
  SiRNA target sequence
atgttatttttttatagccccat

SEQ ID NO: 162661 - DNA, 23 bp, Artificial sequence
  SiRNA target sequence
tgttatttttttatagccccatt

SEQ ID NO: 162662 - DNA, 23 bp, Artificial sequence
  SiRNA target sequence
gttatttttttatagccccattt

SEQ ID NO: 162663 - DNA, 23 bp, Artificial sequence
  SiRNA target sequence
ttatttttttatagccccatttt

SEQ ID NO: 162664 - DNA, 23 bp, Artificial sequence
  SiRNA target sequence
tatttttttatagccccattttt

SEQ ID NO: 162665 - DNA, 23 bp, Artificial sequence
  SiRNA target sequence
atttttttatagccccattttta

SEQ ID NO: 162666 - DNA, 23 bp, Artificial sequence
  SiRNA target sequence
tttttttatagccccatttttat

SEQ ID NO: 162667 - DNA, 23 bp, Artificial sequence
  SiRNA target sequence
ttttttatagccccatttttatg

SEQ ID NO: 162668 - DNA, 23 bp, Artificial sequence
  SiRNA target sequence
tttttatagccccatttttatga

SEQ ID NO: 162669 - DNA, 23 bp, Artificial sequence
  SiRNA target sequence
ttttatagccccatttttatgac

SEQ ID NO: 162670 - DNA, 23 bp, Artificial sequence
  SiRNA target sequence
tttatagccccatttttatgact

SEQ ID NO: 162671 - DNA, 23 bp, Artificial sequence
  SiRNA target sequence
ttatagccccatttttatgacta

SEQ ID NO: 162672 - DNA, 23 bp, Artificial sequence
  SiRNA target sequence
tatagccccatttttatgactaa

SEQ ID NO: 162673 - DNA, 23 bp, Artificial sequence
  SiRNA target sequence
atagccccatttttatgactaaa

SEQ ID NO: 162674 - DNA, 23 bp, Artificial sequence
  SiRNA target sequence
tagccccatttttatgactaaaa

SEQ ID NO: 162675 - DNA, 23 bp, Artificial sequence
  SiRNA target sequence
agccccatttttatgactaaaag

SEQ ID NO: 162676 - DNA, 23 bp, Artificial sequence
  SiRNA target sequence
gccccatttttatgactaaaagt

SEQ ID NO: 162677 - DNA, 23 bp, Artificial sequence
  SiRNA target sequence
ccccatttttatgactaaaagtt

SEQ ID NO: 162678 - DNA, 23 bp, Artificial sequence
  SiRNA target sequence
cccatttttatgactaaaagttt

SEQ ID NO: 162679 - DNA, 23 bp, Artificial sequence
  SiRNA target sequence
ccatttttatgactaaaagttta

SEQ ID NO: 162680 - DNA, 23 bp, Artificial sequence
  SiRNA target sequence
catttttatgactaaaagtttaa

SEQ ID NO: 162681 - DNA, 23 bp, Artificial sequence
  SiRNA target sequence
atttttatgactaaaagtttaac

SEQ ID NO: 162682 - DNA, 23 bp, Artificial sequence
  SiRNA target sequence
tttttatgactaaaagtttaacg

SEQ ID NO: 162683 - DNA, 23 bp, Artificial sequence
  SiRNA target sequence
ttttatgactaaaagtttaacga

SEQ ID NO: 162684 - DNA, 23 bp, Artificial sequence
  SiRNA target sequence
tttatgactaaaagtttaacgaa

SEQ ID NO: 162685 - DNA, 23 bp, Artificial sequence
  SiRNA target sequence
ttatgactaaaagtttaacgaat

SEQ ID NO: 162686 - DNA, 23 bp, Artificial sequence
  SiRNA target sequence
tatgactaaaagtttaacgaatt

SEQ ID NO: 162687 - DNA, 23 bp, Artificial sequence
  SiRNA target sequence
atgactaaaagtttaacgaattc

SEQ ID NO: 162688 - DNA, 23 bp, Artificial sequence
  SiRNA target sequence
tgactaaaagtttaacgaattct

SEQ ID NO: 162689 - DNA, 23 bp, Artificial sequence
  SiRNA target sequence
gactaaaagtttaacgaattcta

SEQ ID NO: 162690 - DNA, 23 bp, Artificial sequence
  SiRNA target sequence
actaaaagtttaacgaattctaa

SEQ ID NO: 162691 - DNA, 23 bp, Artificial sequence
  SiRNA target sequence
ctaaaagtttaacgaattctaaa

SEQ ID NO: 162692 - DNA, 23 bp, Artificial sequence
  SiRNA target sequence
taaaagtttaacgaattctaaaa

SEQ ID NO: 162693 - DNA, 23 bp, Artificial sequence
  SiRNA target sequence
aaaagtttaacgaattctaaaac

SEQ ID NO: 162694 - DNA, 23 bp, Artificial sequence
  SiRNA target sequence
aaagtttaacgaattctaaaact

SEQ ID NO: 162695 - DNA, 23 bp, Artificial sequence
  SiRNA target sequence
aagtttaacgaattctaaaactt

SEQ ID NO: 162696 - DNA, 23 bp, Artificial sequence
  SiRNA target sequence
agtttaacgaattctaaaacttt

SEQ ID NO: 162697 - DNA, 23 bp, Artificial sequence
  SiRNA target sequence
gtttaacgaattctaaaacttta

SEQ ID NO: 162698 - DNA, 23 bp, Artificial sequence
  SiRNA target sequence
tttaacgaattctaaaactttaa

SEQ ID NO: 162699 - DNA, 23 bp, Artificial sequence
  SiRNA target sequence
ttaacgaattctaaaactttaaa

SEQ ID NO: 162700 - DNA, 23 bp, Artificial sequence
  SiRNA target sequence
taacgaattctaaaactttaaat

SEQ ID NO: 162701 - DNA, 23 bp, Artificial sequence
  SiRNA target sequence
aacgaattctaaaactttaaatt

SEQ ID NO: 162702 - DNA, 23 bp, Artificial sequence
  SiRNA target sequence
acgaattctaaaactttaaattt

SEQ ID NO: 162703 - DNA, 23 bp, Artificial sequence
  SiRNA target sequence
cgaattctaaaactttaaattta

SEQ ID NO: 162704 - DNA, 23 bp, Artificial sequence
  SiRNA target sequence
gaattctaaaactttaaatttaa

SEQ ID NO: 162705 - DNA, 23 bp, Artificial sequence
  SiRNA target sequence
aattctaaaactttaaatttaat

SEQ ID NO: 162706 - DNA, 23 bp, Artificial sequence
  SiRNA target sequence
attctaaaactttaaatttaatg

SEQ ID NO: 162707 - DNA, 23 bp, Artificial sequence
  SiRNA target sequence
ttctaaaactttaaatttaatgt

SEQ ID NO: 162708 - DNA, 23 bp, Artificial sequence
  SiRNA target sequence
tctaaaactttaaatttaatgtc

SEQ ID NO: 162709 - DNA, 23 bp, Artificial sequence
  SiRNA target sequence
ctaaaactttaaatttaatgtca

SEQ ID NO: 162710 - DNA, 23 bp, Artificial sequence
  SiRNA target sequence
taaaactttaaatttaatgtcaa

SEQ ID NO: 162711 - DNA, 23 bp, Artificial sequence
  SiRNA target sequence
aaaactttaaatttaatgtcaag

SEQ ID NO: 162712 - DNA, 23 bp, Artificial sequence
  SiRNA target sequence
aaactttaaatttaatgtcaagt

SEQ ID NO: 162713 - DNA, 23 bp, Artificial sequence
  SiRNA target sequence
aactttaaatttaatgtcaagtg

SEQ ID NO: 162714 - DNA, 23 bp, Artificial sequence
  SiRNA target sequence
actttaaatttaatgtcaagtgt

SEQ ID NO: 162715 - DNA, 23 bp, Artificial sequence
  SiRNA target sequence
ctttaaatttaatgtcaagtgta

SEQ ID NO: 162716 - DNA, 23 bp, Artificial sequence
  SiRNA target sequence
tttaaatttaatgtcaagtgtac

SEQ ID NO: 162717 - DNA, 23 bp, Artificial sequence
  SiRNA target sequence
ttaaatttaatgtcaagtgtaca

SEQ ID NO: 162718 - DNA, 23 bp, Artificial sequence
  SiRNA target sequence
taaatttaatgtcaagtgtacaa

SEQ ID NO: 162719 - DNA, 23 bp, Artificial sequence
  SiRNA target sequence
aaatttaatgtcaagtgtacaat

SEQ ID NO: 162720 - DNA, 23 bp, Artificial sequence
  SiRNA target sequence
aatttaatgtcaagtgtacaatc

SEQ ID NO: 162721 - DNA, 23 bp, Artificial sequence
  SiRNA target sequence
atttaatgtcaagtgtacaatca

SEQ ID NO: 162722 - DNA, 23 bp, Artificial sequence
  SiRNA target sequence
tttaatgtcaagtgtacaatcac

SEQ ID NO: 162723 - DNA, 23 bp, Artificial sequence
  SiRNA target sequence
ttaatgtcaagtgtacaatcacc

SEQ ID NO: 162724 - DNA, 23 bp, Artificial sequence
  SiRNA target sequence
taatgtcaagtgtacaatcacca

SEQ ID NO: 162725 - DNA, 23 bp, Artificial sequence
  SiRNA target sequence
aatgtcaagtgtacaatcaccag

SEQ ID NO: 162726 - DNA, 23 bp, Artificial sequence
  SiRNA target sequence
atgtcaagtgtacaatcaccagt

SEQ ID NO: 162727 - DNA, 23 bp, Artificial sequence
  SiRNA target sequence
tgtcaagtgtacaatcaccagtt

SEQ ID NO: 162728 - DNA, 23 bp, Artificial sequence
  SiRNA target sequence
gtcaagtgtacaatcaccagtta

SEQ ID NO: 162729 - DNA, 23 bp, Artificial sequence
  SiRNA target sequence
tcaagtgtacaatcaccagttat

SEQ ID NO: 162730 - DNA, 23 bp, Artificial sequence
  SiRNA target sequence
caagtgtacaatcaccagttata

SEQ ID NO: 162731 - DNA, 23 bp, Artificial sequence
  SiRNA target sequence
aagtgtacaatcaccagttataa

SEQ ID NO: 162732 - DNA, 23 bp, Artificial sequence
  SiRNA target sequence
agtgtacaatcaccagttataaa

SEQ ID NO: 162733 - DNA, 23 bp, Artificial sequence
  SiRNA target sequence
gtgtacaatcaccagttataaat

SEQ ID NO: 162734 - DNA, 23 bp, Artificial sequence
  SiRNA target sequence
tgtacaatcaccagttataaata

SEQ ID NO: 162735 - DNA, 23 bp, Artificial sequence
  SiRNA target sequence
gtacaatcaccagttataaatac

SEQ ID NO: 162736 - DNA, 23 bp, Artificial sequence
  SiRNA target sequence
tacaatcaccagttataaataca

SEQ ID NO: 162737 - DNA, 23 bp, Artificial sequence
  SiRNA target sequence
acaatcaccagttataaatacaa

SEQ ID NO: 162738 - DNA, 23 bp, Artificial sequence
  SiRNA target sequence
caatcaccagttataaatacaaa

SEQ ID NO: 162739 - DNA, 23 bp, Artificial sequence
  SiRNA target sequence
aatcaccagttataaatacaaaa

SEQ ID NO: 162740 - DNA, 23 bp, Artificial sequence
  SiRNA target sequence
atcaccagttataaatacaaaaa

SEQ ID NO: 162741 - DNA, 23 bp, Artificial sequence
  SiRNA target sequence
tcaccagttataaatacaaaaaa

SEQ ID NO: 162742 - DNA, 23 bp, Artificial sequence
  SiRNA target sequence
caccagttataaatacaaaaaaa

SEQ ID NO: 162743 - DNA, 23 bp, Artificial sequence
  SiRNA target sequence
accagttataaatacaaaaaaaa

SEQ ID NO: 162744 - DNA, 23 bp, Artificial sequence
  SiRNA target sequence
ccagttataaatacaaaaaaaat

SEQ ID NO: 162745 - DNA, 23 bp, Artificial sequence
  SiRNA target sequence
cagttataaatacaaaaaaaata

SEQ ID NO: 162746 - DNA, 23 bp, Artificial sequence
  SiRNA target sequence
agttataaatacaaaaaaaatat

SEQ ID NO: 162747 - DNA, 23 bp, Artificial sequence
  SiRNA target sequence
gttataaatacaaaaaaaatata

SEQ ID NO: 162748 - DNA, 23 bp, Artificial sequence
  SiRNA target sequence
ttataaatacaaaaaaaatatat

SEQ ID NO: 162749 - DNA, 23 bp, Artificial sequence
  SiRNA target sequence
tataaatacaaaaaaaatatatc

SEQ ID NO: 162750 - DNA, 23 bp, Artificial sequence
  SiRNA target sequence
ataaatacaaaaaaaatatatct

SEQ ID NO: 162751 - DNA, 23 bp, Artificial sequence
  SiRNA target sequence
taaatacaaaaaaaatatatctt

SEQ ID NO: 162752 - DNA, 23 bp, Artificial sequence
  SiRNA target sequence
aaatacaaaaaaaatatatcttg

SEQ ID NO: 162753 - DNA, 23 bp, Artificial sequence
  SiRNA target sequence
aatacaaaaaaaatatatcttga

SEQ ID NO: 162754 - DNA, 23 bp, Artificial sequence
  SiRNA target sequence
atacaaaaaaaatatatcttgat

SEQ ID NO: 162755 - DNA, 23 bp, Artificial sequence
  SiRNA target sequence
tacaaaaaaaatatatcttgatg

SEQ ID NO: 162756 - DNA, 23 bp, Artificial sequence
  SiRNA target sequence
acaaaaaaaatatatcttgatgc

SEQ ID NO: 162757 - DNA, 23 bp, Artificial sequence
  SiRNA target sequence
caaaaaaaatatatcttgatgca

SEQ ID NO: 162758 - DNA, 23 bp, Artificial sequence
  SiRNA target sequence
aaaaaaaatatatcttgatgcac

SEQ ID NO: 162759 - DNA, 23 bp, Artificial sequence
  SiRNA target sequence
aaaaaaatatatcttgatgcaca

SEQ ID NO: 162760 - DNA, 23 bp, Artificial sequence
  SiRNA target sequence
aaaaaatatatcttgatgcacaa

SEQ ID NO: 162761 - DNA, 23 bp, Artificial sequence
  SiRNA target sequence
aaaaatatatcttgatgcacaag

SEQ ID NO: 162762 - DNA, 23 bp, Artificial sequence
  SiRNA target sequence
aaaatatatcttgatgcacaagc

SEQ ID NO: 162763 - DNA, 23 bp, Artificial sequence
  SiRNA target sequence
aaatatatcttgatgcacaagcg

SEQ ID NO: 162764 - DNA, 23 bp, Artificial sequence
  SiRNA target sequence
aatatatcttgatgcacaagcga

SEQ ID NO: 162765 - DNA, 23 bp, Artificial sequence
  SiRNA target sequence
atatatcttgatgcacaagcgac

SEQ ID NO: 162766 - DNA, 23 bp, Artificial sequence
  SiRNA target sequence
tatatcttgatgcacaagcgacc

SEQ ID NO: 162767 - DNA, 23 bp, Artificial sequence
  SiRNA target sequence
atatcttgatgcacaagcgacca

SEQ ID NO: 162768 - DNA, 23 bp, Artificial sequence
  SiRNA target sequence
tatcttgatgcacaagcgaccaa

SEQ ID NO: 162769 - DNA, 23 bp, Artificial sequence
  SiRNA target sequence
atcttgatgcacaagcgaccaag

SEQ ID NO: 162770 - DNA, 23 bp, Artificial sequence
  SiRNA target sequence
tcttgatgcacaagcgaccaagc

SEQ ID NO: 162771 - DNA, 23 bp, Artificial sequence
  SiRNA target sequence
cttgatgcacaagcgaccaagcc

SEQ ID NO: 162772 - DNA, 23 bp, Artificial sequence
  SiRNA target sequence
ttgatgcacaagcgaccaagcct

SEQ ID NO: 162773 - DNA, 23 bp, Artificial sequence
  SiRNA target sequence
tgatgcacaagcgaccaagcctt

SEQ ID NO: 162774 - DNA, 23 bp, Artificial sequence
  SiRNA target sequence
gatgcacaagcgaccaagccttt

SEQ ID NO: 162775 - DNA, 23 bp, Artificial sequence
  SiRNA target sequence
atgcacaagcgaccaagccttta

SEQ ID NO: 162776 - DNA, 23 bp, Artificial sequence
  SiRNA target sequence
tgcacaagcgaccaagcctttag

SEQ ID NO: 162777 - DNA, 23 bp, Artificial sequence
  SiRNA target sequence
gcacaagcgaccaagcctttaga

SEQ ID NO: 162778 - DNA, 23 bp, Artificial sequence
  SiRNA target sequence
cacaagcgaccaagcctttagac

SEQ ID NO: 162779 - DNA, 23 bp, Artificial sequence
  SiRNA target sequence
acaagcgaccaagcctttagacc

SEQ ID NO: 162780 - DNA, 23 bp, Artificial sequence
  SiRNA target sequence
caagcgaccaagcctttagaccc

SEQ ID NO: 162781 - DNA, 23 bp, Artificial sequence
  SiRNA target sequence
aagcgaccaagcctttagacccg

SEQ ID NO: 162782 - DNA, 23 bp, Artificial sequence
  SiRNA target sequence
agcgaccaagcctttagacccgc

SEQ ID NO: 162783 - DNA, 23 bp, Artificial sequence
  SiRNA target sequence
gcgaccaagcctttagacccgcg

SEQ ID NO: 162784 - DNA, 23 bp, Artificial sequence
  SiRNA target sequence
cgaccaagcctttagacccgcgt

SEQ ID NO: 162785 - DNA, 23 bp, Artificial sequence
  SiRNA target sequence
gaccaagcctttagacccgcgtg

SEQ ID NO: 162786 - DNA, 23 bp, Artificial sequence
  SiRNA target sequence
accaagcctttagacccgcgtgt

SEQ ID NO: 162787 - DNA, 23 bp, Artificial sequence
  SiRNA target sequence
ccaagcctttagacccgcgtgtg

SEQ ID NO: 162788 - DNA, 23 bp, Artificial sequence
  SiRNA target sequence
caagcctttagacccgcgtgtgc

SEQ ID NO: 162789 - DNA, 23 bp, Artificial sequence
  SiRNA target sequence
aagcctttagacccgcgtgtgct

SEQ ID NO: 162790 - DNA, 23 bp, Artificial sequence
  SiRNA target sequence
agcctttagacccgcgtgtgctt

SEQ ID NO: 162791 - DNA, 23 bp, Artificial sequence
  SiRNA target sequence
gcctttagacccgcgtgtgcttg

SEQ ID NO: 162792 - DNA, 23 bp, Artificial sequence
  SiRNA target sequence
cctttagacccgcgtgtgcttga

SEQ ID NO: 162793 - DNA, 23 bp, Artificial sequence
  SiRNA target sequence
ctttagacccgcgtgtgcttgat

SEQ ID NO: 162794 - DNA, 23 bp, Artificial sequence
  SiRNA target sequence
tttagacccgcgtgtgcttgatg

SEQ ID NO: 162795 - DNA, 23 bp, Artificial sequence
  SiRNA target sequence
ttagacccgcgtgtgcttgatgc

SEQ ID NO: 162796 - DNA, 23 bp, Artificial sequence
  SiRNA target sequence
tagacccgcgtgtgcttgatgca

SEQ ID NO: 162797 - DNA, 23 bp, Artificial sequence
  SiRNA target sequence
agacccgcgtgtgcttgatgcaa

SEQ ID NO: 162798 - DNA, 23 bp, Artificial sequence
  SiRNA target sequence
gacccgcgtgtgcttgatgcaat

SEQ ID NO: 162799 - DNA, 23 bp, Artificial sequence
  SiRNA target sequence
acccgcgtgtgcttgatgcaatg

SEQ ID NO: 162800 - DNA, 23 bp, Artificial sequence
  SiRNA target sequence
cccgcgtgtgcttgatgcaatgc

SEQ ID NO: 162801 - DNA, 23 bp, Artificial sequence
  SiRNA target sequence
ccgcgtgtgcttgatgcaatgct

SEQ ID NO: 162802 - DNA, 23 bp, Artificial sequence
  SiRNA target sequence
cgcgtgtgcttgatgcaatgctt

SEQ ID NO: 162803 - DNA, 23 bp, Artificial sequence
  SiRNA target sequence
gcgtgtgcttgatgcaatgcttc

SEQ ID NO: 162804 - DNA, 23 bp, Artificial sequence
  SiRNA target sequence
cgtgtgcttgatgcaatgcttcc

SEQ ID NO: 162805 - DNA, 23 bp, Artificial sequence
  SiRNA target sequence
gtgtgcttgatgcaatgcttcca

SEQ ID NO: 162806 - DNA, 23 bp, Artificial sequence
  SiRNA target sequence
tgtgcttgatgcaatgcttccat

SEQ ID NO: 162807 - DNA, 23 bp, Artificial sequence
  SiRNA target sequence
gtgcttgatgcaatgcttccata

SEQ ID NO: 162808 - DNA, 23 bp, Artificial sequence
  SiRNA target sequence
tgcttgatgcaatgcttccatac

SEQ ID NO: 162809 - DNA, 23 bp, Artificial sequence
  SiRNA target sequence
gcttgatgcaatgcttccatact

SEQ ID NO: 162810 - DNA, 23 bp, Artificial sequence
  SiRNA target sequence
cttgatgcaatgcttccatacta

SEQ ID NO: 162811 - DNA, 23 bp, Artificial sequence
  SiRNA target sequence
ttgatgcaatgcttccatactat

SEQ ID NO: 162812 - DNA, 23 bp, Artificial sequence
  SiRNA target sequence
tgatgcaatgcttccatactata

SEQ ID NO: 162813 - DNA, 23 bp, Artificial sequence
  SiRNA target sequence
gatgcaatgcttccatactatac

SEQ ID NO: 162814 - DNA, 23 bp, Artificial sequence
  SiRNA target sequence
atgcaatgcttccatactataca

SEQ ID NO: 162815 - DNA, 23 bp, Artificial sequence
  SiRNA target sequence
tgcaatgcttccatactatacat

SEQ ID NO: 162816 - DNA, 23 bp, Artificial sequence
  SiRNA target sequence
gcaatgcttccatactatacatc

SEQ ID NO: 162817 - DNA, 23 bp, Artificial sequence
  SiRNA target sequence
caatgcttccatactatacatcc

SEQ ID NO: 162818 - DNA, 23 bp, Artificial sequence
  SiRNA target sequence
aatgcttccatactatacatcca

SEQ ID NO: 162819 - DNA, 23 bp, Artificial sequence
  SiRNA target sequence
atgcttccatactatacatccat

SEQ ID NO: 162820 - DNA, 23 bp, Artificial sequence
  SiRNA target sequence
tgcttccatactatacatccatt

SEQ ID NO: 162821 - DNA, 23 bp, Artificial sequence
  SiRNA target sequence
gcttccatactatacatccattt

SEQ ID NO: 162822 - DNA, 23 bp, Artificial sequence
  SiRNA target sequence
cttccatactatacatccatttt

SEQ ID NO: 162823 - DNA, 23 bp, Artificial sequence
  SiRNA target sequence
ttccatactatacatccattttt

SEQ ID NO: 162824 - DNA, 23 bp, Artificial sequence
  SiRNA target sequence
tccatactatacatccatttttg

SEQ ID NO: 162825 - DNA, 23 bp, Artificial sequence
  SiRNA target sequence
ccatactatacatccatttttgg

SEQ ID NO: 162826 - DNA, 23 bp, Artificial sequence
  SiRNA target sequence
catactatacatccatttttgga

SEQ ID NO: 162827 - DNA, 23 bp, Artificial sequence
  SiRNA target sequence
atactatacatccatttttggaa

SEQ ID NO: 162828 - DNA, 23 bp, Artificial sequence
  SiRNA target sequence
tactatacatccatttttggaaa

SEQ ID NO: 162829 - DNA, 23 bp, Artificial sequence
  SiRNA target sequence
actatacatccatttttggaaat

SEQ ID NO: 162830 - DNA, 23 bp, Artificial sequence
  SiRNA target sequence
ctatacatccatttttggaaatc

SEQ ID NO: 162831 - DNA, 23 bp, Artificial sequence
  SiRNA target sequence
tatacatccatttttggaaatcc

SEQ ID NO: 162832 - DNA, 23 bp, Artificial sequence
  SiRNA target sequence
atacatccatttttggaaatcca

SEQ ID NO: 162833 - DNA, 23 bp, Artificial sequence
  SiRNA target sequence
tacatccatttttggaaatccac

SEQ ID NO: 162834 - DNA, 23 bp, Artificial sequence
  SiRNA target sequence
acatccatttttggaaatccaca

SEQ ID NO: 162835 - DNA, 23 bp, Artificial sequence
  SiRNA target sequence
catccatttttggaaatccacat

SEQ ID NO: 162836 - DNA, 23 bp, Artificial sequence
  SiRNA target sequence
atccatttttggaaatccacatt

SEQ ID NO: 162837 - DNA, 23 bp, Artificial sequence
  SiRNA target sequence
tccatttttggaaatccacattc

SEQ ID NO: 162838 - DNA, 23 bp, Artificial sequence
  SiRNA target sequence
ccatttttggaaatccacattct

SEQ ID NO: 162839 - DNA, 23 bp, Artificial sequence
  SiRNA target sequence
catttttggaaatccacattctc

SEQ ID NO: 162840 - DNA, 23 bp, Artificial sequence
  SiRNA target sequence
atttttggaaatccacattctcg

SEQ ID NO: 162841 - DNA, 23 bp, Artificial sequence
  SiRNA target sequence
tttttggaaatccacattctcgc

SEQ ID NO: 162842 - DNA, 23 bp, Artificial sequence
  SiRNA target sequence
ttttggaaatccacattctcgca

SEQ ID NO: 162843 - DNA, 23 bp, Artificial sequence
  SiRNA target sequence
tttggaaatccacattctcgcac

SEQ ID NO: 162844 - DNA, 23 bp, Artificial sequence
  SiRNA target sequence
ttggaaatccacattctcgcacg

SEQ ID NO: 162845 - DNA, 23 bp, Artificial sequence
  SiRNA target sequence
tggaaatccacattctcgcacgc

SEQ ID NO: 162846 - DNA, 23 bp, Artificial sequence
  SiRNA target sequence
ggaaatccacattctcgcacgca

SEQ ID NO: 162847 - DNA, 23 bp, Artificial sequence
  SiRNA target sequence
gaaatccacattctcgcacgcat

SEQ ID NO: 162848 - DNA, 23 bp, Artificial sequence
  SiRNA target sequence
aaatccacattctcgcacgcata

SEQ ID NO: 162849 - DNA, 23 bp, Artificial sequence
  SiRNA target sequence
aatccacattctcgcacgcatac

SEQ ID NO: 162850 - DNA, 23 bp, Artificial sequence
  SiRNA target sequence
atccacattctcgcacgcatacg

SEQ ID NO: 162851 - DNA, 23 bp, Artificial sequence
  SiRNA target sequence
tccacattctcgcacgcatacgt

SEQ ID NO: 162852 - DNA, 23 bp, Artificial sequence
  SiRNA target sequence
ccacattctcgcacgcatacgtt

SEQ ID NO: 162853 - DNA, 23 bp, Artificial sequence
  SiRNA target sequence
cacattctcgcacgcatacgttt

SEQ ID NO: 162854 - DNA, 23 bp, Artificial sequence
  SiRNA target sequence
acattctcgcacgcatacgtttg

SEQ ID NO: 162855 - DNA, 23 bp, Artificial sequence
  SiRNA target sequence
cattctcgcacgcatacgtttgg

SEQ ID NO: 162856 - DNA, 23 bp, Artificial sequence
  SiRNA target sequence
attctcgcacgcatacgtttgga

SEQ ID NO: 162857 - DNA, 23 bp, Artificial sequence
  SiRNA target sequence
ttctcgcacgcatacgtttggat

SEQ ID NO: 162858 - DNA, 23 bp, Artificial sequence
  SiRNA target sequence
tctcgcacgcatacgtttggatg

SEQ ID NO: 162859 - DNA, 23 bp, Artificial sequence
  SiRNA target sequence
ctcgcacgcatacgtttggatgg

SEQ ID NO: 162860 - DNA, 23 bp, Artificial sequence
  SiRNA target sequence
tcgcacgcatacgtttggatgga

SEQ ID NO: 162861 - DNA, 23 bp, Artificial sequence
  SiRNA target sequence
cgcacgcatacgtttggatggaa

SEQ ID NO: 162862 - DNA, 23 bp, Artificial sequence
  SiRNA target sequence
gcacgcatacgtttggatggaat

SEQ ID NO: 162863 - DNA, 23 bp, Artificial sequence
  SiRNA target sequence
cacgcatacgtttggatggaatg

SEQ ID NO: 162864 - DNA, 23 bp, Artificial sequence
  SiRNA target sequence
acgcatacgtttggatggaatgc

SEQ ID NO: 162865 - DNA, 23 bp, Artificial sequence
  SiRNA target sequence
cgcatacgtttggatggaatgca

SEQ ID NO: 162866 - DNA, 23 bp, Artificial sequence
  SiRNA target sequence
gcatacgtttggatggaatgcag

SEQ ID NO: 162867 - DNA, 23 bp, Artificial sequence
  SiRNA target sequence
catacgtttggatggaatgcaga

SEQ ID NO: 162868 - DNA, 23 bp, Artificial sequence
  SiRNA target sequence
atacgtttggatggaatgcagaa

SEQ ID NO: 162869 - DNA, 23 bp, Artificial sequence
  SiRNA target sequence
tacgtttggatggaatgcagaaa

SEQ ID NO: 162870 - DNA, 23 bp, Artificial sequence
  SiRNA target sequence
acgtttggatggaatgcagaaaa

SEQ ID NO: 162871 - DNA, 23 bp, Artificial sequence
  SiRNA target sequence
cgtttggatggaatgcagaaaaa

SEQ ID NO: 162872 - DNA, 23 bp, Artificial sequence
  SiRNA target sequence
gtttggatggaatgcagaaaaag

SEQ ID NO: 162873 - DNA, 23 bp, Artificial sequence
  SiRNA target sequence
tttggatggaatgcagaaaaagg

SEQ ID NO: 162874 - DNA, 23 bp, Artificial sequence
  SiRNA target sequence
ttggatggaatgcagaaaaaggc

SEQ ID NO: 162875 - DNA, 23 bp, Artificial sequence
  SiRNA target sequence
tggatggaatgcagaaaaaggcg

SEQ ID NO: 162876 - DNA, 23 bp, Artificial sequence
  SiRNA target sequence
ggatggaatgcagaaaaaggcgt

SEQ ID NO: 162877 - DNA, 23 bp, Artificial sequence
  SiRNA target sequence
gatggaatgcagaaaaaggcgta

SEQ ID NO: 162878 - DNA, 23 bp, Artificial sequence
  SiRNA target sequence
atggaatgcagaaaaaggcgtag

SEQ ID NO: 162879 - DNA, 23 bp, Artificial sequence
  SiRNA target sequence
tggaatgcagaaaaaggcgtaga

SEQ ID NO: 162880 - DNA, 23 bp, Artificial sequence
  SiRNA target sequence
ggaatgcagaaaaaggcgtagaa

SEQ ID NO: 162881 - DNA, 23 bp, Artificial sequence
  SiRNA target sequence
gaatgcagaaaaaggcgtagaaa

SEQ ID NO: 162882 - DNA, 23 bp, Artificial sequence
  SiRNA target sequence
aatgcagaaaaaggcgtagaaat

SEQ ID NO: 162883 - DNA, 23 bp, Artificial sequence
  SiRNA target sequence
atgcagaaaaaggcgtagaaatg

SEQ ID NO: 162884 - DNA, 23 bp, Artificial sequence
  SiRNA target sequence
tgcagaaaaaggcgtagaaatgg

SEQ ID NO: 162885 - DNA, 23 bp, Artificial sequence
  SiRNA target sequence
gcagaaaaaggcgtagaaatggc

SEQ ID NO: 162886 - DNA, 23 bp, Artificial sequence
  SiRNA target sequence
cagaaaaaggcgtagaaatggct

SEQ ID NO: 162887 - DNA, 23 bp, Artificial sequence
  SiRNA target sequence
agaaaaaggcgtagaaatggctc

SEQ ID NO: 162888 - DNA, 23 bp, Artificial sequence
  SiRNA target sequence
gaaaaaggcgtagaaatggctcg

SEQ ID NO: 162889 - DNA, 23 bp, Artificial sequence
  SiRNA target sequence
aaaaaggcgtagaaatggctcga

SEQ ID NO: 162890 - DNA, 23 bp, Artificial sequence
  SiRNA target sequence
aaaaggcgtagaaatggctcgaa

SEQ ID NO: 162891 - DNA, 23 bp, Artificial sequence
  SiRNA target sequence
aaaggcgtagaaatggctcgaaa

SEQ ID NO: 162892 - DNA, 23 bp, Artificial sequence
  SiRNA target sequence
aaggcgtagaaatggctcgaaag

SEQ ID NO: 162893 - DNA, 23 bp, Artificial sequence
  SiRNA target sequence
aggcgtagaaatggctcgaaagc

SEQ ID NO: 162894 - DNA, 23 bp, Artificial sequence
  SiRNA target sequence
ggcgtagaaatggctcgaaagca

SEQ ID NO: 162895 - DNA, 23 bp, Artificial sequence
  SiRNA target sequence
gcgtagaaatggctcgaaagcaa

SEQ ID NO: 162896 - DNA, 23 bp, Artificial sequence
  SiRNA target sequence
cgtagaaatggctcgaaagcaag

SEQ ID NO: 162897 - DNA, 23 bp, Artificial sequence
  SiRNA target sequence
gtagaaatggctcgaaagcaagt

SEQ ID NO: 162898 - DNA, 23 bp, Artificial sequence
  SiRNA target sequence
tagaaatggctcgaaagcaagta

SEQ ID NO: 162899 - DNA, 23 bp, Artificial sequence
  SiRNA target sequence
agaaatggctcgaaagcaagtag

SEQ ID NO: 162900 - DNA, 23 bp, Artificial sequence
  SiRNA target sequence
gaaatggctcgaaagcaagtagc

SEQ ID NO: 162901 - DNA, 23 bp, Artificial sequence
  SiRNA target sequence
aaatggctcgaaagcaagtagca

SEQ ID NO: 162902 - DNA, 23 bp, Artificial sequence
  SiRNA target sequence
aatggctcgaaagcaagtagcag

SEQ ID NO: 162903 - DNA, 23 bp, Artificial sequence
  SiRNA target sequence
atggctcgaaagcaagtagcaga

SEQ ID NO: 162904 - DNA, 23 bp, Artificial sequence
  SiRNA target sequence
tggctcgaaagcaagtagcagat

SEQ ID NO: 162905 - DNA, 23 bp, Artificial sequence
  SiRNA target sequence
ggctcgaaagcaagtagcagatt

SEQ ID NO: 162906 - DNA, 23 bp, Artificial sequence
  SiRNA target sequence
gctcgaaagcaagtagcagattt

SEQ ID NO: 162907 - DNA, 23 bp, Artificial sequence
  SiRNA target sequence
ctcgaaagcaagtagcagattta

SEQ ID NO: 162908 - DNA, 23 bp, Artificial sequence
  SiRNA target sequence
tcgaaagcaagtagcagatttac

SEQ ID NO: 162909 - DNA, 23 bp, Artificial sequence
  SiRNA target sequence
cgaaagcaagtagcagatttact

SEQ ID NO: 162910 - DNA, 23 bp, Artificial sequence
  SiRNA target sequence
gaaagcaagtagcagatttactg

SEQ ID NO: 162911 - DNA, 23 bp, Artificial sequence
  SiRNA target sequence
aaagcaagtagcagatttactga

SEQ ID NO: 162912 - DNA, 23 bp, Artificial sequence
  SiRNA target sequence
aagcaagtagcagatttactgaa

SEQ ID NO: 162913 - DNA, 23 bp, Artificial sequence
  SiRNA target sequence
agcaagtagcagatttactgaat

SEQ ID NO: 162914 - DNA, 23 bp, Artificial sequence
  SiRNA target sequence
gcaagtagcagatttactgaatg

SEQ ID NO: 162915 - DNA, 23 bp, Artificial sequence
  SiRNA target sequence
caagtagcagatttactgaatgc

SEQ ID NO: 162916 - DNA, 23 bp, Artificial sequence
  SiRNA target sequence
aagtagcagatttactgaatgcc

SEQ ID NO: 162917 - DNA, 23 bp, Artificial sequence
  SiRNA target sequence
agtagcagatttactgaatgcca

SEQ ID NO: 162918 - DNA, 23 bp, Artificial sequence
  SiRNA target sequence
gtagcagatttactgaatgccaa

SEQ ID NO: 162919 - DNA, 23 bp, Artificial sequence
  SiRNA target sequence
tagcagatttactgaatgccaat

SEQ ID NO: 162920 - DNA, 23 bp, Artificial sequence
  SiRNA target sequence
agcagatttactgaatgccaatg

SEQ ID NO: 162921 - DNA, 23 bp, Artificial sequence
  SiRNA target sequence
gcagatttactgaatgccaatga

SEQ ID NO: 162922 - DNA, 23 bp, Artificial sequence
  SiRNA target sequence
cagatttactgaatgccaatgaa

SEQ ID NO: 162923 - DNA, 23 bp, Artificial sequence
  SiRNA target sequence
agatttactgaatgccaatgaaa

SEQ ID NO: 162924 - DNA, 23 bp, Artificial sequence
  SiRNA target sequence
gatttactgaatgccaatgaaaa

SEQ ID NO: 162925 - DNA, 23 bp, Artificial sequence
  SiRNA target sequence
atttactgaatgccaatgaaaaa

SEQ ID NO: 162926 - DNA, 23 bp, Artificial sequence
  SiRNA target sequence
tttactgaatgccaatgaaaaag

SEQ ID NO: 162927 - DNA, 23 bp, Artificial sequence
  SiRNA target sequence
ttactgaatgccaatgaaaaaga

SEQ ID NO: 162928 - DNA, 23 bp, Artificial sequence
  SiRNA target sequence
tactgaatgccaatgaaaaagaa

SEQ ID NO: 162929 - DNA, 23 bp, Artificial sequence
  SiRNA target sequence
actgaatgccaatgaaaaagaaa

SEQ ID NO: 162930 - DNA, 23 bp, Artificial sequence
  SiRNA target sequence
ctgaatgccaatgaaaaagaaat

SEQ ID NO: 162931 - DNA, 23 bp, Artificial sequence
  SiRNA target sequence
tgaatgccaatgaaaaagaaatt

SEQ ID NO: 162932 - DNA, 23 bp, Artificial sequence
  SiRNA target sequence
gaatgccaatgaaaaagaaatta

SEQ ID NO: 162933 - DNA, 23 bp, Artificial sequence
  SiRNA target sequence
aatgccaatgaaaaagaaattat

SEQ ID NO: 162934 - DNA, 23 bp, Artificial sequence
  SiRNA target sequence
atgccaatgaaaaagaaattatt

SEQ ID NO: 162935 - DNA, 23 bp, Artificial sequence
  SiRNA target sequence
tgccaatgaaaaagaaattattt

SEQ ID NO: 162936 - DNA, 23 bp, Artificial sequence
  SiRNA target sequence
gccaatgaaaaagaaattatttt

SEQ ID NO: 162937 - DNA, 23 bp, Artificial sequence
  SiRNA target sequence
ccaatgaaaaagaaattattttt

SEQ ID NO: 162938 - DNA, 23 bp, Artificial sequence
  SiRNA target sequence
caatgaaaaagaaattattttta

SEQ ID NO: 162939 - DNA, 23 bp, Artificial sequence
  SiRNA target sequence
aatgaaaaagaaattatttttac

SEQ ID NO: 162940 - DNA, 23 bp, Artificial sequence
  SiRNA target sequence
atgaaaaagaaattatttttact

SEQ ID NO: 162941 - DNA, 23 bp, Artificial sequence
  SiRNA target sequence
tgaaaaagaaattatttttacta

SEQ ID NO: 162942 - DNA, 23 bp, Artificial sequence
  SiRNA target sequence
gaaaaagaaattatttttactag

SEQ ID NO: 162943 - DNA, 23 bp, Artificial sequence
  SiRNA target sequence
aaaaagaaattatttttactagc

SEQ ID NO: 162944 - DNA, 23 bp, Artificial sequence
  SiRNA target sequence
aaaagaaattatttttactagcg

SEQ ID NO: 162945 - DNA, 23 bp, Artificial sequence
  SiRNA target sequence
aaagaaattatttttactagcgg

SEQ ID NO: 162946 - DNA, 23 bp, Artificial sequence
  SiRNA target sequence
aagaaattatttttactagcggt

SEQ ID NO: 162947 - DNA, 23 bp, Artificial sequence
  SiRNA target sequence
agaaattatttttactagcggtg

SEQ ID NO: 162948 - DNA, 23 bp, Artificial sequence
  SiRNA target sequence
gaaattatttttactagcggtgc

SEQ ID NO: 162949 - DNA, 23 bp, Artificial sequence
  SiRNA target sequence
aaattatttttactagcggtgct

SEQ ID NO: 162950 - DNA, 23 bp, Artificial sequence
  SiRNA target sequence
aattatttttactagcggtgcta

SEQ ID NO: 162951 - DNA, 23 bp, Artificial sequence
  SiRNA target sequence
attatttttactagcggtgctac

SEQ ID NO: 162952 - DNA, 23 bp, Artificial sequence
  SiRNA target sequence
ttatttttactagcggtgctact

SEQ ID NO: 162953 - DNA, 23 bp, Artificial sequence
  SiRNA target sequence
tatttttactagcggtgctactg

SEQ ID NO: 162954 - DNA, 23 bp, Artificial sequence
  SiRNA target sequence
atttttactagcggtgctactga

SEQ ID NO: 162955 - DNA, 23 bp, Artificial sequence
  SiRNA target sequence
tttttactagcggtgctactgag

SEQ ID NO: 162956 - DNA, 23 bp, Artificial sequence
  SiRNA target sequence
ttttactagcggtgctactgaga

SEQ ID NO: 162957 - DNA, 23 bp, Artificial sequence
  SiRNA target sequence
tttactagcggtgctactgagag

SEQ ID NO: 162958 - DNA, 23 bp, Artificial sequence
  SiRNA target sequence
ttactagcggtgctactgagagt

SEQ ID NO: 162959 - DNA, 23 bp, Artificial sequence
  SiRNA target sequence
tactagcggtgctactgagagta

SEQ ID NO: 162960 - DNA, 23 bp, Artificial sequence
  SiRNA target sequence
actagcggtgctactgagagtaa

SEQ ID NO: 162961 - DNA, 23 bp, Artificial sequence
  SiRNA target sequence
ctagcggtgctactgagagtaac

SEQ ID NO: 162962 - DNA, 23 bp, Artificial sequence
  SiRNA target sequence
tagcggtgctactgagagtaaca

SEQ ID NO: 162963 - DNA, 23 bp, Artificial sequence
  SiRNA target sequence
agcggtgctactgagagtaacaa

SEQ ID NO: 162964 - DNA, 23 bp, Artificial sequence
  SiRNA target sequence
gcggtgctactgagagtaacaac

SEQ ID NO: 162965 - DNA, 23 bp, Artificial sequence
  SiRNA target sequence
cggtgctactgagagtaacaacc

SEQ ID NO: 162966 - DNA, 23 bp, Artificial sequence
  SiRNA target sequence
ggtgctactgagagtaacaacct

SEQ ID NO: 162967 - DNA, 23 bp, Artificial sequence
  SiRNA target sequence
gtgctactgagagtaacaacctt

SEQ ID NO: 162968 - DNA, 23 bp, Artificial sequence
  SiRNA target sequence
tgctactgagagtaacaaccttg

SEQ ID NO: 162969 - DNA, 23 bp, Artificial sequence
  SiRNA target sequence
gctactgagagtaacaaccttgc

SEQ ID NO: 162970 - DNA, 23 bp, Artificial sequence
  SiRNA target sequence
ctactgagagtaacaaccttgca

SEQ ID NO: 162971 - DNA, 23 bp, Artificial sequence
  SiRNA target sequence
tactgagagtaacaaccttgcac

SEQ ID NO: 162972 - DNA, 23 bp, Artificial sequence
  SiRNA target sequence
actgagagtaacaaccttgcact

SEQ ID NO: 162973 - DNA, 23 bp, Artificial sequence
  SiRNA target sequence
ctgagagtaacaaccttgcacta

SEQ ID NO: 162974 - DNA, 23 bp, Artificial sequence
  SiRNA target sequence
tgagagtaacaaccttgcactaa

SEQ ID NO: 162975 - DNA, 23 bp, Artificial sequence
  SiRNA target sequence
gagagtaacaaccttgcactaaa

SEQ ID NO: 162976 - DNA, 23 bp, Artificial sequence
  SiRNA target sequence
agagtaacaaccttgcactaaag

SEQ ID NO: 162977 - DNA, 23 bp, Artificial sequence
  SiRNA target sequence
gagtaacaaccttgcactaaagg

SEQ ID NO: 162978 - DNA, 23 bp, Artificial sequence
  SiRNA target sequence
agtaacaaccttgcactaaaggg

SEQ ID NO: 162979 - DNA, 23 bp, Artificial sequence
  SiRNA target sequence
gtaacaaccttgcactaaagggt

SEQ ID NO: 162980 - DNA, 23 bp, Artificial sequence
  SiRNA target sequence
taacaaccttgcactaaagggtg

SEQ ID NO: 162981 - DNA, 23 bp, Artificial sequence
  SiRNA target sequence
aacaaccttgcactaaagggtgt

SEQ ID NO: 162982 - DNA, 23 bp, Artificial sequence
  SiRNA target sequence
acaaccttgcactaaagggtgtc

SEQ ID NO: 162983 - DNA, 23 bp, Artificial sequence
  SiRNA target sequence
caaccttgcactaaagggtgtct

SEQ ID NO: 162984 - DNA, 23 bp, Artificial sequence
  SiRNA target sequence
aaccttgcactaaagggtgtctt

SEQ ID NO: 162985 - DNA, 23 bp, Artificial sequence
  SiRNA target sequence
accttgcactaaagggtgtcttt

SEQ ID NO: 162986 - DNA, 23 bp, Artificial sequence
  SiRNA target sequence
ccttgcactaaagggtgtctttg

SEQ ID NO: 162987 - DNA, 23 bp, Artificial sequence
  SiRNA target sequence
cttgcactaaagggtgtctttgc

SEQ ID NO: 162988 - DNA, 23 bp, Artificial sequence
  SiRNA target sequence
ttgcactaaagggtgtctttgca

SEQ ID NO: 162989 - DNA, 23 bp, Artificial sequence
  SiRNA target sequence
tgcactaaagggtgtctttgcat

SEQ ID NO: 162990 - DNA, 23 bp, Artificial sequence
  SiRNA target sequence
gcactaaagggtgtctttgcatt

SEQ ID NO: 162991 - DNA, 23 bp, Artificial sequence
  SiRNA target sequence
cactaaagggtgtctttgcattt

SEQ ID NO: 162992 - DNA, 23 bp, Artificial sequence
  SiRNA target sequence
actaaagggtgtctttgcatttt

SEQ ID NO: 162993 - DNA, 23 bp, Artificial sequence
  SiRNA target sequence
ctaaagggtgtctttgcattttt

SEQ ID NO: 162994 - DNA, 23 bp, Artificial sequence
  SiRNA target sequence
taaagggtgtctttgcattttta

SEQ ID NO: 162995 - DNA, 23 bp, Artificial sequence
  SiRNA target sequence
aaagggtgtctttgcatttttaa

SEQ ID NO: 162996 - DNA, 23 bp, Artificial sequence
  SiRNA target sequence
aagggtgtctttgcatttttaaa

SEQ ID NO: 162997 - DNA, 23 bp, Artificial sequence
  SiRNA target sequence
agggtgtctttgcatttttaaaa

SEQ ID NO: 162998 - DNA, 23 bp, Artificial sequence
  SiRNA target sequence
gggtgtctttgcatttttaaaaa

SEQ ID NO: 162999 - DNA, 23 bp, Artificial sequence
  SiRNA target sequence
ggtgtctttgcatttttaaaaaa

SEQ ID NO: 163000 - DNA, 23 bp, Artificial sequence
  SiRNA target sequence
gtgtctttgcatttttaaaaaaa

SEQ ID NO: 163001 - DNA, 23 bp, Artificial sequence
  SiRNA target sequence
tgtctttgcatttttaaaaaaag

SEQ ID NO: 163002 - DNA, 23 bp, Artificial sequence
  SiRNA target sequence
gtctttgcatttttaaaaaaaga

SEQ ID NO: 163003 - DNA, 23 bp, Artificial sequence
  SiRNA target sequence
tctttgcatttttaaaaaaagac

SEQ ID NO: 163004 - DNA, 23 bp, Artificial sequence
  SiRNA target sequence
ctttgcatttttaaaaaaagaca

SEQ ID NO: 163005 - DNA, 23 bp, Artificial sequence
  SiRNA target sequence
tttgcatttttaaaaaaagacaa

SEQ ID NO: 163006 - DNA, 23 bp, Artificial sequence
  SiRNA target sequence
ttgcatttttaaaaaaagacaat

SEQ ID NO: 163007 - DNA, 23 bp, Artificial sequence
  SiRNA target sequence
tgcatttttaaaaaaagacaata

SEQ ID NO: 163008 - DNA, 23 bp, Artificial sequence
  SiRNA target sequence
gcatttttaaaaaaagacaatag

SEQ ID NO: 163009 - DNA, 23 bp, Artificial sequence
  SiRNA target sequence
catttttaaaaaaagacaatagg

SEQ ID NO: 163010 - DNA, 23 bp, Artificial sequence
  SiRNA target sequence
atttttaaaaaaagacaataggc

SEQ ID NO: 163011 - DNA, 23 bp, Artificial sequence
  SiRNA target sequence
tttttaaaaaaagacaataggcc

SEQ ID NO: 163012 - DNA, 23 bp, Artificial sequence
  SiRNA target sequence
ttttaaaaaaagacaataggcct

SEQ ID NO: 163013 - DNA, 23 bp, Artificial sequence
  SiRNA target sequence
tttaaaaaaagacaataggcctg

SEQ ID NO: 163014 - DNA, 23 bp, Artificial sequence
  SiRNA target sequence
ttaaaaaaagacaataggcctgt

SEQ ID NO: 163015 - DNA, 23 bp, Artificial sequence
  SiRNA target sequence
taaaaaaagacaataggcctgtt

SEQ ID NO: 163016 - DNA, 23 bp, Artificial sequence
  SiRNA target sequence
aaaaaaagacaataggcctgttc

SEQ ID NO: 163017 - DNA, 23 bp, Artificial sequence
  SiRNA target sequence
aaaaaagacaataggcctgttca

SEQ ID NO: 163018 - DNA, 23 bp, Artificial sequence
  SiRNA target sequence
aaaaagacaataggcctgttcat

SEQ ID NO: 163019 - DNA, 23 bp, Artificial sequence
  SiRNA target sequence
aaaagacaataggcctgttcata

SEQ ID NO: 163020 - DNA, 23 bp, Artificial sequence
  SiRNA target sequence
aaagacaataggcctgttcatat

SEQ ID NO: 163021 - DNA, 23 bp, Artificial sequence
  SiRNA target sequence
aagacaataggcctgttcatatc

SEQ ID NO: 163022 - DNA, 23 bp, Artificial sequence
  SiRNA target sequence
agacaataggcctgttcatatca

SEQ ID NO: 163023 - DNA, 23 bp, Artificial sequence
  SiRNA target sequence
gacaataggcctgttcatatcat

SEQ ID NO: 163024 - DNA, 23 bp, Artificial sequence
  SiRNA target sequence
acaataggcctgttcatatcatt

SEQ ID NO: 163025 - DNA, 23 bp, Artificial sequence
  SiRNA target sequence
caataggcctgttcatatcatta

SEQ ID NO: 163026 - DNA, 23 bp, Artificial sequence
  SiRNA target sequence
aataggcctgttcatatcattac

SEQ ID NO: 163027 - DNA, 23 bp, Artificial sequence
  SiRNA target sequence
ataggcctgttcatatcattacc

SEQ ID NO: 163028 - DNA, 23 bp, Artificial sequence
  SiRNA target sequence
taggcctgttcatatcattacca

SEQ ID NO: 163029 - DNA, 23 bp, Artificial sequence
  SiRNA target sequence
aggcctgttcatatcattaccac

SEQ ID NO: 163030 - DNA, 23 bp, Artificial sequence
  SiRNA target sequence
ggcctgttcatatcattaccaca

SEQ ID NO: 163031 - DNA, 23 bp, Artificial sequence
  SiRNA target sequence
gcctgttcatatcattaccacac

SEQ ID NO: 163032 - DNA, 23 bp, Artificial sequence
  SiRNA target sequence
cctgttcatatcattaccacaca

SEQ ID NO: 163033 - DNA, 23 bp, Artificial sequence
  SiRNA target sequence
ctgttcatatcattaccacacaa

SEQ ID NO: 163034 - DNA, 23 bp, Artificial sequence
  SiRNA target sequence
tgttcatatcattaccacacaaa

SEQ ID NO: 163035 - DNA, 23 bp, Artificial sequence
  SiRNA target sequence
gttcatatcattaccacacaaat

SEQ ID NO: 163036 - DNA, 23 bp, Artificial sequence
  SiRNA target sequence
ttcatatcattaccacacaaatt

SEQ ID NO: 163037 - DNA, 23 bp, Artificial sequence
  SiRNA target sequence
tcatatcattaccacacaaattg

SEQ ID NO: 163038 - DNA, 23 bp, Artificial sequence
  SiRNA target sequence
catatcattaccacacaaattga

SEQ ID NO: 163039 - DNA, 23 bp, Artificial sequence
  SiRNA target sequence
atatcattaccacacaaattgaa

SEQ ID NO: 163040 - DNA, 23 bp, Artificial sequence
  SiRNA target sequence
tatcattaccacacaaattgaac

SEQ ID NO: 163041 - DNA, 23 bp, Artificial sequence
  SiRNA target sequence
atcattaccacacaaattgaaca

SEQ ID NO: 163042 - DNA, 23 bp, Artificial sequence
  SiRNA target sequence
tcattaccacacaaattgaacat

SEQ ID NO: 163043 - DNA, 23 bp, Artificial sequence
  SiRNA target sequence
cattaccacacaaattgaacata

SEQ ID NO: 163044 - DNA, 23 bp, Artificial sequence
  SiRNA target sequence
attaccacacaaattgaacataa

SEQ ID NO: 163045 - DNA, 23 bp, Artificial sequence
  SiRNA target sequence
ttaccacacaaattgaacataaa

SEQ ID NO: 163046 - DNA, 23 bp, Artificial sequence
  SiRNA target sequence
taccacacaaattgaacataaat

SEQ ID NO: 163047 - DNA, 23 bp, Artificial sequence
  SiRNA target sequence
accacacaaattgaacataaatg

SEQ ID NO: 163048 - DNA, 23 bp, Artificial sequence
  SiRNA target sequence
ccacacaaattgaacataaatgt

SEQ ID NO: 163049 - DNA, 23 bp, Artificial sequence
  SiRNA target sequence
cacacaaattgaacataaatgtg

SEQ ID NO: 163050 - DNA, 23 bp, Artificial sequence
  SiRNA target sequence
acacaaattgaacataaatgtgt

SEQ ID NO: 163051 - DNA, 23 bp, Artificial sequence
  SiRNA target sequence
cacaaattgaacataaatgtgta

SEQ ID NO: 163052 - DNA, 23 bp, Artificial sequence
  SiRNA target sequence
acaaattgaacataaatgtgtat

SEQ ID NO: 163053 - DNA, 23 bp, Artificial sequence
  SiRNA target sequence
caaattgaacataaatgtgtatt

SEQ ID NO: 163054 - DNA, 23 bp, Artificial sequence
  SiRNA target sequence
aaattgaacataaatgtgtattg

SEQ ID NO: 163055 - DNA, 23 bp, Artificial sequence
  SiRNA target sequence
aattgaacataaatgtgtattgg

SEQ ID NO: 163056 - DNA, 23 bp, Artificial sequence
  SiRNA target sequence
attgaacataaatgtgtattgga

SEQ ID NO: 163057 - DNA, 23 bp, Artificial sequence
  SiRNA target sequence
ttgaacataaatgtgtattggac

SEQ ID NO: 163058 - DNA, 23 bp, Artificial sequence
  SiRNA target sequence
tgaacataaatgtgtattggaca

SEQ ID NO: 163059 - DNA, 23 bp, Artificial sequence
  SiRNA target sequence
gaacataaatgtgtattggacac

SEQ ID NO: 163060 - DNA, 23 bp, Artificial sequence
  SiRNA target sequence
aacataaatgtgtattggacaca

SEQ ID NO: 163061 - DNA, 23 bp, Artificial sequence
  SiRNA target sequence
acataaatgtgtattggacacat

SEQ ID NO: 163062 - DNA, 23 bp, Artificial sequence
  SiRNA target sequence
cataaatgtgtattggacacatg

SEQ ID NO: 163063 - DNA, 23 bp, Artificial sequence
  SiRNA target sequence
ataaatgtgtattggacacatgt

SEQ ID NO: 163064 - DNA, 23 bp, Artificial sequence
  SiRNA target sequence
taaatgtgtattggacacatgta

SEQ ID NO: 163065 - DNA, 23 bp, Artificial sequence
  SiRNA target sequence
aaatgtgtattggacacatgtag

SEQ ID NO: 163066 - DNA, 23 bp, Artificial sequence
  SiRNA target sequence
aatgtgtattggacacatgtaga

SEQ ID NO: 163067 - DNA, 23 bp, Artificial sequence
  SiRNA target sequence
atgtgtattggacacatgtagaa

SEQ ID NO: 163068 - DNA, 23 bp, Artificial sequence
  SiRNA target sequence
tgtgtattggacacatgtagaag

SEQ ID NO: 163069 - DNA, 23 bp, Artificial sequence
  SiRNA target sequence
gtgtattggacacatgtagaaga

SEQ ID NO: 163070 - DNA, 23 bp, Artificial sequence
  SiRNA target sequence
tgtattggacacatgtagaagat

SEQ ID NO: 163071 - DNA, 23 bp, Artificial sequence
  SiRNA target sequence
gtattggacacatgtagaagatt

SEQ ID NO: 163072 - DNA, 23 bp, Artificial sequence
  SiRNA target sequence
tattggacacatgtagaagatta

SEQ ID NO: 163073 - DNA, 23 bp, Artificial sequence
  SiRNA target sequence
attggacacatgtagaagattag

SEQ ID NO: 163074 - DNA, 23 bp, Artificial sequence
  SiRNA target sequence
ttggacacatgtagaagattaga

SEQ ID NO: 163075 - DNA, 23 bp, Artificial sequence
  SiRNA target sequence
tggacacatgtagaagattagaa

SEQ ID NO: 163076 - DNA, 23 bp, Artificial sequence
  SiRNA target sequence
ggacacatgtagaagattagaag

SEQ ID NO: 163077 - DNA, 23 bp, Artificial sequence
  SiRNA target sequence
gacacatgtagaagattagaaga

SEQ ID NO: 163078 - DNA, 23 bp, Artificial sequence
  SiRNA target sequence
acacatgtagaagattagaagaa

SEQ ID NO: 163079 - DNA, 23 bp, Artificial sequence
  SiRNA target sequence
cacatgtagaagattagaagaag

SEQ ID NO: 163080 - DNA, 23 bp, Artificial sequence
  SiRNA target sequence
acatgtagaagattagaagaaga

SEQ ID NO: 163081 - DNA, 23 bp, Artificial sequence
  SiRNA target sequence
catgtagaagattagaagaagaa

SEQ ID NO: 163082 - DNA, 23 bp, Artificial sequence
  SiRNA target sequence
atgtagaagattagaagaagaag

SEQ ID NO: 163083 - DNA, 23 bp, Artificial sequence
  SiRNA target sequence
tgtagaagattagaagaagaagg

SEQ ID NO: 163084 - DNA, 23 bp, Artificial sequence
  SiRNA target sequence
gtagaagattagaagaagaagga

SEQ ID NO: 163085 - DNA, 23 bp, Artificial sequence
  SiRNA target sequence
tagaagattagaagaagaaggag

SEQ ID NO: 163086 - DNA, 23 bp, Artificial sequence
  SiRNA target sequence
agaagattagaagaagaaggagc

SEQ ID NO: 163087 - DNA, 23 bp, Artificial sequence
  SiRNA target sequence
gaagattagaagaagaaggagct

SEQ ID NO: 163088 - DNA, 23 bp, Artificial sequence
  SiRNA target sequence
aagattagaagaagaaggagcta

SEQ ID NO: 163089 - DNA, 23 bp, Artificial sequence
  SiRNA target sequence
agattagaagaagaaggagctac

SEQ ID NO: 163090 - DNA, 23 bp, Artificial sequence
  SiRNA target sequence
gattagaagaagaaggagctaca

SEQ ID NO: 163091 - DNA, 23 bp, Artificial sequence
  SiRNA target sequence
attagaagaagaaggagctacag

SEQ ID NO: 163092 - DNA, 23 bp, Artificial sequence
  SiRNA target sequence
ttagaagaagaaggagctacagt

SEQ ID NO: 163093 - DNA, 23 bp, Artificial sequence
  SiRNA target sequence
tagaagaagaaggagctacagtg

SEQ ID NO: 163094 - DNA, 23 bp, Artificial sequence
  SiRNA target sequence
agaagaagaaggagctacagtga

SEQ ID NO: 163095 - DNA, 23 bp, Artificial sequence
  SiRNA target sequence
gaagaagaaggagctacagtgac

SEQ ID NO: 163096 - DNA, 23 bp, Artificial sequence
  SiRNA target sequence
aagaagaaggagctacagtgact

SEQ ID NO: 163097 - DNA, 23 bp, Artificial sequence
  SiRNA target sequence
agaagaaggagctacagtgactt

SEQ ID NO: 163098 - DNA, 23 bp, Artificial sequence
  SiRNA target sequence
gaagaaggagctacagtgactta

SEQ ID NO: 163099 - DNA, 23 bp, Artificial sequence
  SiRNA target sequence
aagaaggagctacagtgacttat

SEQ ID NO: 163100 - DNA, 23 bp, Artificial sequence
  SiRNA target sequence
agaaggagctacagtgacttatt

SEQ ID NO: 163101 - DNA, 23 bp, Artificial sequence
  SiRNA target sequence
gaaggagctacagtgacttattt

SEQ ID NO: 163102 - DNA, 23 bp, Artificial sequence
  SiRNA target sequence
aaggagctacagtgacttatttg

SEQ ID NO: 163103 - DNA, 23 bp, Artificial sequence
  SiRNA target sequence
aggagctacagtgacttatttgc

SEQ ID NO: 163104 - DNA, 23 bp, Artificial sequence
  SiRNA target sequence
ggagctacagtgacttatttgcc

SEQ ID NO: 163105 - DNA, 23 bp, Artificial sequence
  SiRNA target sequence
gagctacagtgacttatttgcct

SEQ ID NO: 163106 - DNA, 23 bp, Artificial sequence
  SiRNA target sequence
agctacagtgacttatttgcctg

SEQ ID NO: 163107 - DNA, 23 bp, Artificial sequence
  SiRNA target sequence
gctacagtgacttatttgcctgt

SEQ ID NO: 163108 - DNA, 23 bp, Artificial sequence
  SiRNA target sequence
ctacagtgacttatttgcctgta

SEQ ID NO: 163109 - DNA, 23 bp, Artificial sequence
  SiRNA target sequence
tacagtgacttatttgcctgtag

SEQ ID NO: 163110 - DNA, 23 bp, Artificial sequence
  SiRNA target sequence
acagtgacttatttgcctgtaga

SEQ ID NO: 163111 - DNA, 23 bp, Artificial sequence
  SiRNA target sequence
cagtgacttatttgcctgtagat

SEQ ID NO: 163112 - DNA, 23 bp, Artificial sequence
  SiRNA target sequence
agtgacttatttgcctgtagata

SEQ ID NO: 163113 - DNA, 23 bp, Artificial sequence
  SiRNA target sequence
gtgacttatttgcctgtagataa

SEQ ID NO: 163114 - DNA, 23 bp, Artificial sequence
  SiRNA target sequence
tgacttatttgcctgtagataaa

SEQ ID NO: 163115 - DNA, 23 bp, Artificial sequence
  SiRNA target sequence
gacttatttgcctgtagataaaa

SEQ ID NO: 163116 - DNA, 23 bp, Artificial sequence
  SiRNA target sequence
acttatttgcctgtagataaaaa

SEQ ID NO: 163117 - DNA, 23 bp, Artificial sequence
  SiRNA target sequence
cttatttgcctgtagataaaaat

SEQ ID NO: 163118 - DNA, 23 bp, Artificial sequence
  SiRNA target sequence
ttatttgcctgtagataaaaatg

SEQ ID NO: 163119 - DNA, 23 bp, Artificial sequence
  SiRNA target sequence
tatttgcctgtagataaaaatgg

SEQ ID NO: 163120 - DNA, 23 bp, Artificial sequence
  SiRNA target sequence
atttgcctgtagataaaaatgga

SEQ ID NO: 163121 - DNA, 23 bp, Artificial sequence
  SiRNA target sequence
tttgcctgtagataaaaatggaa

SEQ ID NO: 163122 - DNA, 23 bp, Artificial sequence
  SiRNA target sequence
ttgcctgtagataaaaatggaat

SEQ ID NO: 163123 - DNA, 23 bp, Artificial sequence
  SiRNA target sequence
tgcctgtagataaaaatggaata

SEQ ID NO: 163124 - DNA, 23 bp, Artificial sequence
  SiRNA target sequence
gcctgtagataaaaatggaatag

SEQ ID NO: 163125 - DNA, 23 bp, Artificial sequence
  SiRNA target sequence
cctgtagataaaaatggaatagt

SEQ ID NO: 163126 - DNA, 23 bp, Artificial sequence
  SiRNA target sequence
ctgtagataaaaatggaatagta

SEQ ID NO: 163127 - DNA, 23 bp, Artificial sequence
  SiRNA target sequence
tgtagataaaaatggaatagtag

SEQ ID NO: 163128 - DNA, 23 bp, Artificial sequence
  SiRNA target sequence
gtagataaaaatggaatagtaga

SEQ ID NO: 163129 - DNA, 23 bp, Artificial sequence
  SiRNA target sequence
tagataaaaatggaatagtagat

SEQ ID NO: 163130 - DNA, 23 bp, Artificial sequence
  SiRNA target sequence
agataaaaatggaatagtagatc

SEQ ID NO: 163131 - DNA, 23 bp, Artificial sequence
  SiRNA target sequence
gataaaaatggaatagtagatcc

SEQ ID NO: 163132 - DNA, 23 bp, Artificial sequence
  SiRNA target sequence
ataaaaatggaatagtagatccg

SEQ ID NO: 163133 - DNA, 23 bp, Artificial sequence
  SiRNA target sequence
taaaaatggaatagtagatccgc

SEQ ID NO: 163134 - DNA, 23 bp, Artificial sequence
  SiRNA target sequence
aaaaatggaatagtagatccgca

SEQ ID NO: 163135 - DNA, 23 bp, Artificial sequence
  SiRNA target sequence
aaaatggaatagtagatccgcaa

SEQ ID NO: 163136 - DNA, 23 bp, Artificial sequence
  SiRNA target sequence
aaatggaatagtagatccgcaat

SEQ ID NO: 163137 - DNA, 23 bp, Artificial sequence
  SiRNA target sequence
aatggaatagtagatccgcaatt

SEQ ID NO: 163138 - DNA, 23 bp, Artificial sequence
  SiRNA target sequence
atggaatagtagatccgcaatta

SEQ ID NO: 163139 - DNA, 23 bp, Artificial sequence
  SiRNA target sequence
tggaatagtagatccgcaattaa

SEQ ID NO: 163140 - DNA, 23 bp, Artificial sequence
  SiRNA target sequence
ggaatagtagatccgcaattaat

SEQ ID NO: 163141 - DNA, 23 bp, Artificial sequence
  SiRNA target sequence
gaatagtagatccgcaattaata

SEQ ID NO: 163142 - DNA, 23 bp, Artificial sequence
  SiRNA target sequence
aatagtagatccgcaattaataa

SEQ ID NO: 163143 - DNA, 23 bp, Artificial sequence
  SiRNA target sequence
atagtagatccgcaattaataaa

SEQ ID NO: 163144 - DNA, 23 bp, Artificial sequence
  SiRNA target sequence
tagtagatccgcaattaataaaa

SEQ ID NO: 163145 - DNA, 23 bp, Artificial sequence
  SiRNA target sequence
agtagatccgcaattaataaaaa

SEQ ID NO: 163146 - DNA, 23 bp, Artificial sequence
  SiRNA target sequence
gtagatccgcaattaataaaaaa

SEQ ID NO: 163147 - DNA, 23 bp, Artificial sequence
  SiRNA target sequence
tagatccgcaattaataaaaaac

SEQ ID NO: 163148 - DNA, 23 bp, Artificial sequence
  SiRNA target sequence
agatccgcaattaataaaaaaca

SEQ ID NO: 163149 - DNA, 23 bp, Artificial sequence
  SiRNA target sequence
gatccgcaattaataaaaaacag

SEQ ID NO: 163150 - DNA, 23 bp, Artificial sequence
  SiRNA target sequence
atccgcaattaataaaaaacagt

SEQ ID NO: 163151 - DNA, 23 bp, Artificial sequence
  SiRNA target sequence
tccgcaattaataaaaaacagta

SEQ ID NO: 163152 - DNA, 23 bp, Artificial sequence
  SiRNA target sequence
ccgcaattaataaaaaacagtat

SEQ ID NO: 163153 - DNA, 23 bp, Artificial sequence
  SiRNA target sequence
cgcaattaataaaaaacagtatt

SEQ ID NO: 163154 - DNA, 23 bp, Artificial sequence
  SiRNA target sequence
gcaattaataaaaaacagtatta

SEQ ID NO: 163155 - DNA, 23 bp, Artificial sequence
  SiRNA target sequence
caattaataaaaaacagtattac

SEQ ID NO: 163156 - DNA, 23 bp, Artificial sequence
  SiRNA target sequence
aattaataaaaaacagtattact

SEQ ID NO: 163157 - DNA, 23 bp, Artificial sequence
  SiRNA target sequence
attaataaaaaacagtattacta

SEQ ID NO: 163158 - DNA, 23 bp, Artificial sequence
  SiRNA target sequence
ttaataaaaaacagtattactaa

SEQ ID NO: 163159 - DNA, 23 bp, Artificial sequence
  SiRNA target sequence
taataaaaaacagtattactaaa

SEQ ID NO: 163160 - DNA, 23 bp, Artificial sequence
  SiRNA target sequence
aataaaaaacagtattactaaag

SEQ ID NO: 163161 - DNA, 23 bp, Artificial sequence
  SiRNA target sequence
ataaaaaacagtattactaaaga

SEQ ID NO: 163162 - DNA, 23 bp, Artificial sequence
  SiRNA target sequence
taaaaaacagtattactaaagat

SEQ ID NO: 163163 - DNA, 23 bp, Artificial sequence
  SiRNA target sequence
aaaaaacagtattactaaagata

SEQ ID NO: 163164 - DNA, 23 bp, Artificial sequence
  SiRNA target sequence
aaaaacagtattactaaagatac

SEQ ID NO: 163165 - DNA, 23 bp, Artificial sequence
  SiRNA target sequence
aaaacagtattactaaagatacc

SEQ ID NO: 163166 - DNA, 23 bp, Artificial sequence
  SiRNA target sequence
aaacagtattactaaagataccg

SEQ ID NO: 163167 - DNA, 23 bp, Artificial sequence
  SiRNA target sequence
aacagtattactaaagataccgc

SEQ ID NO: 163168 - DNA, 23 bp, Artificial sequence
  SiRNA target sequence
acagtattactaaagataccgct

SEQ ID NO: 163169 - DNA, 23 bp, Artificial sequence
  SiRNA target sequence
cagtattactaaagataccgctt

SEQ ID NO: 163170 - DNA, 23 bp, Artificial sequence
  SiRNA target sequence
agtattactaaagataccgcttt

SEQ ID NO: 163171 - DNA, 23 bp, Artificial sequence
  SiRNA target sequence
gtattactaaagataccgctttg

SEQ ID NO: 163172 - DNA, 23 bp, Artificial sequence
  SiRNA target sequence
tattactaaagataccgctttgg

SEQ ID NO: 163173 - DNA, 23 bp, Artificial sequence
  SiRNA target sequence
attactaaagataccgctttggt

SEQ ID NO: 163174 - DNA, 23 bp, Artificial sequence
  SiRNA target sequence
ttactaaagataccgctttggtg

SEQ ID NO: 163175 - DNA, 23 bp, Artificial sequence
  SiRNA target sequence
tactaaagataccgctttggtgt

SEQ ID NO: 163176 - DNA, 23 bp, Artificial sequence
  SiRNA target sequence
actaaagataccgctttggtgtc

SEQ ID NO: 163177 - DNA, 23 bp, Artificial sequence
  SiRNA target sequence
ctaaagataccgctttggtgtct

SEQ ID NO: 163178 - DNA, 23 bp, Artificial sequence
  SiRNA target sequence
taaagataccgctttggtgtctg

SEQ ID NO: 163179 - DNA, 23 bp, Artificial sequence
  SiRNA target sequence
aaagataccgctttggtgtctgt

SEQ ID NO: 163180 - DNA, 23 bp, Artificial sequence
  SiRNA target sequence
aagataccgctttggtgtctgtt

SEQ ID NO: 163181 - DNA, 23 bp, Artificial sequence
  SiRNA target sequence
agataccgctttggtgtctgtta

SEQ ID NO: 163182 - DNA, 23 bp, Artificial sequence
  SiRNA target sequence
gataccgctttggtgtctgttat

SEQ ID NO: 163183 - DNA, 23 bp, Artificial sequence
  SiRNA target sequence
ataccgctttggtgtctgttatg

SEQ ID NO: 163184 - DNA, 23 bp, Artificial sequence
  SiRNA target sequence
taccgctttggtgtctgttatgg

SEQ ID NO: 163185 - DNA, 23 bp, Artificial sequence
  SiRNA target sequence
accgctttggtgtctgttatggc

SEQ ID NO: 163186 - DNA, 23 bp, Artificial sequence
  SiRNA target sequence
ccgctttggtgtctgttatggct

SEQ ID NO: 163187 - DNA, 23 bp, Artificial sequence
  SiRNA target sequence
cgctttggtgtctgttatggctg

SEQ ID NO: 163188 - DNA, 23 bp, Artificial sequence
  SiRNA target sequence
gctttggtgtctgttatggctgt

SEQ ID NO: 163189 - DNA, 23 bp, Artificial sequence
  SiRNA target sequence
ctttggtgtctgttatggctgtt

SEQ ID NO: 163190 - DNA, 23 bp, Artificial sequence
  SiRNA target sequence
tttggtgtctgttatggctgtta

SEQ ID NO: 163191 - DNA, 23 bp, Artificial sequence
  SiRNA target sequence
ttggtgtctgttatggctgttaa

SEQ ID NO: 163192 - DNA, 23 bp, Artificial sequence
  SiRNA target sequence
tggtgtctgttatggctgttaac

SEQ ID NO: 163193 - DNA, 23 bp, Artificial sequence
  SiRNA target sequence
ggtgtctgttatggctgttaaca

SEQ ID NO: 163194 - DNA, 23 bp, Artificial sequence
  SiRNA target sequence
gtgtctgttatggctgttaacaa

SEQ ID NO: 163195 - DNA, 23 bp, Artificial sequence
  SiRNA target sequence
tgtctgttatggctgttaacaac

SEQ ID NO: 163196 - DNA, 23 bp, Artificial sequence
  SiRNA target sequence
gtctgttatggctgttaacaacg

SEQ ID NO: 163197 - DNA, 23 bp, Artificial sequence
  SiRNA target sequence
tctgttatggctgttaacaacga

SEQ ID NO: 163198 - DNA, 23 bp, Artificial sequence
  SiRNA target sequence
ctgttatggctgttaacaacgaa

SEQ ID NO: 163199 - DNA, 23 bp, Artificial sequence
  SiRNA target sequence
tgttatggctgttaacaacgaaa

SEQ ID NO: 163200 - DNA, 23 bp, Artificial sequence
  SiRNA target sequence
gttatggctgttaacaacgaaat

SEQ ID NO: 163201 - DNA, 23 bp, Artificial sequence
  SiRNA target sequence
ttatggctgttaacaacgaaatg

SEQ ID NO: 163202 - DNA, 23 bp, Artificial sequence
  SiRNA target sequence
tatggctgttaacaacgaaatgg

SEQ ID NO: 163203 - DNA, 23 bp, Artificial sequence
  SiRNA target sequence
atggctgttaacaacgaaatggg

SEQ ID NO: 163204 - DNA, 23 bp, Artificial sequence
  SiRNA target sequence
tggctgttaacaacgaaatggga

SEQ ID NO: 163205 - DNA, 23 bp, Artificial sequence
  SiRNA target sequence
ggctgttaacaacgaaatgggag

SEQ ID NO: 163206 - DNA, 23 bp, Artificial sequence
  SiRNA target sequence
gctgttaacaacgaaatgggagc

SEQ ID NO: 163207 - DNA, 23 bp, Artificial sequence
  SiRNA target sequence
ctgttaacaacgaaatgggagca

SEQ ID NO: 163208 - DNA, 23 bp, Artificial sequence
  SiRNA target sequence
tgttaacaacgaaatgggagcaa

SEQ ID NO: 163209 - DNA, 23 bp, Artificial sequence
  SiRNA target sequence
gttaacaacgaaatgggagcaat

SEQ ID NO: 163210 - DNA, 23 bp, Artificial sequence
  SiRNA target sequence
ttaacaacgaaatgggagcaata

SEQ ID NO: 163211 - DNA, 23 bp, Artificial sequence
  SiRNA target sequence
taacaacgaaatgggagcaatac

SEQ ID NO: 163212 - DNA, 23 bp, Artificial sequence
  SiRNA target sequence
aacaacgaaatgggagcaataca

SEQ ID NO: 163213 - DNA, 23 bp, Artificial sequence
  SiRNA target sequence
acaacgaaatgggagcaatacaa

SEQ ID NO: 163214 - DNA, 23 bp, Artificial sequence
  SiRNA target sequence
caacgaaatgggagcaatacaac

SEQ ID NO: 163215 - DNA, 23 bp, Artificial sequence
  SiRNA target sequence
aacgaaatgggagcaatacaacc

SEQ ID NO: 163216 - DNA, 23 bp, Artificial sequence
  SiRNA target sequence
acgaaatgggagcaatacaaccg

SEQ ID NO: 163217 - DNA, 23 bp, Artificial sequence
  SiRNA target sequence
cgaaatgggagcaatacaaccgc

SEQ ID NO: 163218 - DNA, 23 bp, Artificial sequence
  SiRNA target sequence
gaaatgggagcaatacaaccgct

SEQ ID NO: 163219 - DNA, 23 bp, Artificial sequence
  SiRNA target sequence
aaatgggagcaatacaaccgctt

SEQ ID NO: 163220 - DNA, 23 bp, Artificial sequence
  SiRNA target sequence
aatgggagcaatacaaccgctta

SEQ ID NO: 163221 - DNA, 23 bp, Artificial sequence
  SiRNA target sequence
atgggagcaatacaaccgcttaa

SEQ ID NO: 163222 - DNA, 23 bp, Artificial sequence
  SiRNA target sequence
tgggagcaatacaaccgcttaaa

SEQ ID NO: 163223 - DNA, 23 bp, Artificial sequence
  SiRNA target sequence
gggagcaatacaaccgcttaaag

SEQ ID NO: 163224 - DNA, 23 bp, Artificial sequence
  SiRNA target sequence
ggagcaatacaaccgcttaaaga

SEQ ID NO: 163225 - DNA, 23 bp, Artificial sequence
  SiRNA target sequence
gagcaatacaaccgcttaaagaa

SEQ ID NO: 163226 - DNA, 23 bp, Artificial sequence
  SiRNA target sequence
agcaatacaaccgcttaaagaaa

SEQ ID NO: 163227 - DNA, 23 bp, Artificial sequence
  SiRNA target sequence
gcaatacaaccgcttaaagaaat

SEQ ID NO: 163228 - DNA, 23 bp, Artificial sequence
  SiRNA target sequence
caatacaaccgcttaaagaaata

SEQ ID NO: 163229 - DNA, 23 bp, Artificial sequence
  SiRNA target sequence
aatacaaccgcttaaagaaatag

SEQ ID NO: 163230 - DNA, 23 bp, Artificial sequence
  SiRNA target sequence
atacaaccgcttaaagaaatagg

SEQ ID NO: 163231 - DNA, 23 bp, Artificial sequence
  SiRNA target sequence
tacaaccgcttaaagaaatagga

SEQ ID NO: 163232 - DNA, 23 bp, Artificial sequence
  SiRNA target sequence
acaaccgcttaaagaaataggaa

SEQ ID NO: 163233 - DNA, 23 bp, Artificial sequence
  SiRNA target sequence
caaccgcttaaagaaataggaag

SEQ ID NO: 163234 - DNA, 23 bp, Artificial sequence
  SiRNA target sequence
aaccgcttaaagaaataggaaga

SEQ ID NO: 163235 - DNA, 23 bp, Artificial sequence
  SiRNA target sequence
accgcttaaagaaataggaagaa

SEQ ID NO: 163236 - DNA, 23 bp, Artificial sequence
  SiRNA target sequence
ccgcttaaagaaataggaagaat

SEQ ID NO: 163237 - DNA, 23 bp, Artificial sequence
  SiRNA target sequence
cgcttaaagaaataggaagaata

SEQ ID NO: 163238 - DNA, 23 bp, Artificial sequence
  SiRNA target sequence
gcttaaagaaataggaagaatat

SEQ ID NO: 163239 - DNA, 23 bp, Artificial sequence
  SiRNA target sequence
cttaaagaaataggaagaatatg

SEQ ID NO: 163240 - DNA, 23 bp, Artificial sequence
  SiRNA target sequence
ttaaagaaataggaagaatatgt

SEQ ID NO: 163241 - DNA, 23 bp, Artificial sequence
  SiRNA target sequence
taaagaaataggaagaatatgta

SEQ ID NO: 163242 - DNA, 23 bp, Artificial sequence
  SiRNA target sequence
aaagaaataggaagaatatgtaa

SEQ ID NO: 163243 - DNA, 23 bp, Artificial sequence
  SiRNA target sequence
aagaaataggaagaatatgtaaa

SEQ ID NO: 163244 - DNA, 23 bp, Artificial sequence
  SiRNA target sequence
agaaataggaagaatatgtaaag

SEQ ID NO: 163245 - DNA, 23 bp, Artificial sequence
  SiRNA target sequence
gaaataggaagaatatgtaaaga

SEQ ID NO: 163246 - DNA, 23 bp, Artificial sequence
  SiRNA target sequence
aaataggaagaatatgtaaagaa

SEQ ID NO: 163247 - DNA, 23 bp, Artificial sequence
  SiRNA target sequence
aataggaagaatatgtaaagaaa

SEQ ID NO: 163248 - DNA, 23 bp, Artificial sequence
  SiRNA target sequence
ataggaagaatatgtaaagaaaa

SEQ ID NO: 163249 - DNA, 23 bp, Artificial sequence
  SiRNA target sequence
taggaagaatatgtaaagaaaat

SEQ ID NO: 163250 - DNA, 23 bp, Artificial sequence
  SiRNA target sequence
aggaagaatatgtaaagaaaata

SEQ ID NO: 163251 - DNA, 23 bp, Artificial sequence
  SiRNA target sequence
ggaagaatatgtaaagaaaataa

SEQ ID NO: 163252 - DNA, 23 bp, Artificial sequence
  SiRNA target sequence
gaagaatatgtaaagaaaataat

SEQ ID NO: 163253 - DNA, 23 bp, Artificial sequence
  SiRNA target sequence
aagaatatgtaaagaaaataata

SEQ ID NO: 163254 - DNA, 23 bp, Artificial sequence
  SiRNA target sequence
agaatatgtaaagaaaataatat

SEQ ID NO: 163255 - DNA, 23 bp, Artificial sequence
  SiRNA target sequence
gaatatgtaaagaaaataatatt

SEQ ID NO: 163256 - DNA, 23 bp, Artificial sequence
  SiRNA target sequence
aatatgtaaagaaaataatattt

SEQ ID NO: 163257 - DNA, 23 bp, Artificial sequence
  SiRNA target sequence
atatgtaaagaaaataatatttt

SEQ ID NO: 163258 - DNA, 23 bp, Artificial sequence
  SiRNA target sequence
tatgtaaagaaaataatatttta

SEQ ID NO: 163259 - DNA, 23 bp, Artificial sequence
  SiRNA target sequence
atgtaaagaaaataatattttat

SEQ ID NO: 163260 - DNA, 23 bp, Artificial sequence
  SiRNA target sequence
tgtaaagaaaataatattttatt

SEQ ID NO: 163261 - DNA, 23 bp, Artificial sequence
  SiRNA target sequence
gtaaagaaaataatattttattt

SEQ ID NO: 163262 - DNA, 23 bp, Artificial sequence
  SiRNA target sequence
taaagaaaataatattttatttc

SEQ ID NO: 163263 - DNA, 23 bp, Artificial sequence
  SiRNA target sequence
aaagaaaataatattttatttca

SEQ ID NO: 163264 - DNA, 23 bp, Artificial sequence
  SiRNA target sequence
aagaaaataatattttatttcac

SEQ ID NO: 163265 - DNA, 23 bp, Artificial sequence
  SiRNA target sequence
agaaaataatattttatttcaca

SEQ ID NO: 163266 - DNA, 23 bp, Artificial sequence
  SiRNA target sequence
gaaaataatattttatttcacac

SEQ ID NO: 163267 - DNA, 23 bp, Artificial sequence
  SiRNA target sequence
aaaataatattttatttcacact

SEQ ID NO: 163268 - DNA, 23 bp, Artificial sequence
  SiRNA target sequence
aaataatattttatttcacactg

SEQ ID NO: 163269 - DNA, 23 bp, Artificial sequence
  SiRNA target sequence
aataatattttatttcacactga

SEQ ID NO: 163270 - DNA, 23 bp, Artificial sequence
  SiRNA target sequence
ataatattttatttcacactgat

SEQ ID NO: 163271 - DNA, 23 bp, Artificial sequence
  SiRNA target sequence
taatattttatttcacactgatg

SEQ ID NO: 163272 - DNA, 23 bp, Artificial sequence
  SiRNA target sequence
aatattttatttcacactgatgc

SEQ ID NO: 163273 - DNA, 23 bp, Artificial sequence
  SiRNA target sequence
atattttatttcacactgatgca

SEQ ID NO: 163274 - DNA, 23 bp, Artificial sequence
  SiRNA target sequence
tattttatttcacactgatgcag

SEQ ID NO: 163275 - DNA, 23 bp, Artificial sequence
  SiRNA target sequence
attttatttcacactgatgcagc

SEQ ID NO: 163276 - DNA, 23 bp, Artificial sequence
  SiRNA target sequence
ttttatttcacactgatgcagca

SEQ ID NO: 163277 - DNA, 23 bp, Artificial sequence
  SiRNA target sequence
tttatttcacactgatgcagcac

SEQ ID NO: 163278 - DNA, 23 bp, Artificial sequence
  SiRNA target sequence
ttatttcacactgatgcagcaca

SEQ ID NO: 163279 - DNA, 23 bp, Artificial sequence
  SiRNA target sequence
tatttcacactgatgcagcacaa

SEQ ID NO: 163280 - DNA, 23 bp, Artificial sequence
  SiRNA target sequence
atttcacactgatgcagcacaag

SEQ ID NO: 163281 - DNA, 23 bp, Artificial sequence
  SiRNA target sequence
tttcacactgatgcagcacaagc

SEQ ID NO: 163282 - DNA, 23 bp, Artificial sequence
  SiRNA target sequence
ttcacactgatgcagcacaagca

SEQ ID NO: 163283 - DNA, 23 bp, Artificial sequence
  SiRNA target sequence
tcacactgatgcagcacaagcag

SEQ ID NO: 163284 - DNA, 23 bp, Artificial sequence
  SiRNA target sequence
cacactgatgcagcacaagcagt

SEQ ID NO: 163285 - DNA, 23 bp, Artificial sequence
  SiRNA target sequence
acactgatgcagcacaagcagtt

SEQ ID NO: 163286 - DNA, 23 bp, Artificial sequence
  SiRNA target sequence
cactgatgcagcacaagcagttg

SEQ ID NO: 163287 - DNA, 23 bp, Artificial sequence
  SiRNA target sequence
actgatgcagcacaagcagttgg

SEQ ID NO: 163288 - DNA, 23 bp, Artificial sequence
  SiRNA target sequence
ctgatgcagcacaagcagttggt

SEQ ID NO: 163289 - DNA, 23 bp, Artificial sequence
  SiRNA target sequence
tgatgcagcacaagcagttggta

SEQ ID NO: 163290 - DNA, 23 bp, Artificial sequence
  SiRNA target sequence
gatgcagcacaagcagttggtaa

SEQ ID NO: 163291 - DNA, 23 bp, Artificial sequence
  SiRNA target sequence
atgcagcacaagcagttggtaat

SEQ ID NO: 163292 - DNA, 23 bp, Artificial sequence
  SiRNA target sequence
tgcagcacaagcagttggtaata

SEQ ID NO: 163293 - DNA, 23 bp, Artificial sequence
  SiRNA target sequence
gcagcacaagcagttggtaatat

SEQ ID NO: 163294 - DNA, 23 bp, Artificial sequence
  SiRNA target sequence
cagcacaagcagttggtaatata

SEQ ID NO: 163295 - DNA, 23 bp, Artificial sequence
  SiRNA target sequence
agcacaagcagttggtaatatag

SEQ ID NO: 163296 - DNA, 23 bp, Artificial sequence
  SiRNA target sequence
gcacaagcagttggtaatataga

SEQ ID NO: 163297 - DNA, 23 bp, Artificial sequence
  SiRNA target sequence
cacaagcagttggtaatatagat

SEQ ID NO: 163298 - DNA, 23 bp, Artificial sequence
  SiRNA target sequence
acaagcagttggtaatatagata

SEQ ID NO: 163299 - DNA, 23 bp, Artificial sequence
  SiRNA target sequence
caagcagttggtaatatagatat

SEQ ID NO: 163300 - DNA, 23 bp, Artificial sequence
  SiRNA target sequence
aagcagttggtaatatagatatt

SEQ ID NO: 163301 - DNA, 23 bp, Artificial sequence
  SiRNA target sequence
agcagttggtaatatagatattg

SEQ ID NO: 163302 - DNA, 23 bp, Artificial sequence
  SiRNA target sequence
gcagttggtaatatagatattga

SEQ ID NO: 163303 - DNA, 23 bp, Artificial sequence
  SiRNA target sequence
cagttggtaatatagatattgat

SEQ ID NO: 163304 - DNA, 23 bp, Artificial sequence
  SiRNA target sequence
agttggtaatatagatattgatg

SEQ ID NO: 163305 - DNA, 23 bp, Artificial sequence
  SiRNA target sequence
gttggtaatatagatattgatgt

SEQ ID NO: 163306 - DNA, 23 bp, Artificial sequence
  SiRNA target sequence
ttggtaatatagatattgatgtc

SEQ ID NO: 163307 - DNA, 23 bp, Artificial sequence
  SiRNA target sequence
tggtaatatagatattgatgtca

SEQ ID NO: 163308 - DNA, 23 bp, Artificial sequence
  SiRNA target sequence
ggtaatatagatattgatgtcaa

SEQ ID NO: 163309 - DNA, 23 bp, Artificial sequence
  SiRNA target sequence
gtaatatagatattgatgtcaat

SEQ ID NO: 163310 - DNA, 23 bp, Artificial sequence
  SiRNA target sequence
taatatagatattgatgtcaatg

SEQ ID NO: 163311 - DNA, 23 bp, Artificial sequence
  SiRNA target sequence
aatatagatattgatgtcaatga

SEQ ID NO: 163312 - DNA, 23 bp, Artificial sequence
  SiRNA target sequence
atatagatattgatgtcaatgat

SEQ ID NO: 163313 - DNA, 23 bp, Artificial sequence
  SiRNA target sequence
tatagatattgatgtcaatgata

SEQ ID NO: 163314 - DNA, 23 bp, Artificial sequence
  SiRNA target sequence
atagatattgatgtcaatgatat

SEQ ID NO: 163315 - DNA, 23 bp, Artificial sequence
  SiRNA target sequence
tagatattgatgtcaatgatatg

SEQ ID NO: 163316 - DNA, 23 bp, Artificial sequence
  SiRNA target sequence
agatattgatgtcaatgatatga

SEQ ID NO: 163317 - DNA, 23 bp, Artificial sequence
  SiRNA target sequence
gatattgatgtcaatgatatgaa

SEQ ID NO: 163318 - DNA, 23 bp, Artificial sequence
  SiRNA target sequence
atattgatgtcaatgatatgaat

SEQ ID NO: 163319 - DNA, 23 bp, Artificial sequence
  SiRNA target sequence
tattgatgtcaatgatatgaata

SEQ ID NO: 163320 - DNA, 23 bp, Artificial sequence
  SiRNA target sequence
attgatgtcaatgatatgaatat

SEQ ID NO: 163321 - DNA, 23 bp, Artificial sequence
  SiRNA target sequence
ttgatgtcaatgatatgaatatt

SEQ ID NO: 163322 - DNA, 23 bp, Artificial sequence
  SiRNA target sequence
tgatgtcaatgatatgaatattg

SEQ ID NO: 163323 - DNA, 23 bp, Artificial sequence
  SiRNA target sequence
gatgtcaatgatatgaatattga

SEQ ID NO: 163324 - DNA, 23 bp, Artificial sequence
  SiRNA target sequence
atgtcaatgatatgaatattgat

SEQ ID NO: 163325 - DNA, 23 bp, Artificial sequence
  SiRNA target sequence
tgtcaatgatatgaatattgatt

SEQ ID NO: 163326 - DNA, 23 bp, Artificial sequence
  SiRNA target sequence
gtcaatgatatgaatattgattt

SEQ ID NO: 163327 - DNA, 23 bp, Artificial sequence
  SiRNA target sequence
tcaatgatatgaatattgattta

SEQ ID NO: 163328 - DNA, 23 bp, Artificial sequence
  SiRNA target sequence
caatgatatgaatattgatttac

SEQ ID NO: 163329 - DNA, 23 bp, Artificial sequence
  SiRNA target sequence
aatgatatgaatattgatttact

SEQ ID NO: 163330 - DNA, 23 bp, Artificial sequence
  SiRNA target sequence
atgatatgaatattgatttacta

SEQ ID NO: 163331 - DNA, 23 bp, Artificial sequence
  SiRNA target sequence
tgatatgaatattgatttactaa

SEQ ID NO: 163332 - DNA, 23 bp, Artificial sequence
  SiRNA target sequence
gatatgaatattgatttactaag

SEQ ID NO: 163333 - DNA, 23 bp, Artificial sequence
  SiRNA target sequence
atatgaatattgatttactaagt

SEQ ID NO: 163334 - DNA, 23 bp, Artificial sequence
  SiRNA target sequence
tatgaatattgatttactaagtt

SEQ ID NO: 163335 - DNA, 23 bp, Artificial sequence
  SiRNA target sequence
atgaatattgatttactaagttt

SEQ ID NO: 163336 - DNA, 23 bp, Artificial sequence
  SiRNA target sequence
tgaatattgatttactaagttta

SEQ ID NO: 163337 - DNA, 23 bp, Artificial sequence
  SiRNA target sequence
gaatattgatttactaagtttat

SEQ ID NO: 163338 - DNA, 23 bp, Artificial sequence
  SiRNA target sequence
aatattgatttactaagtttatc

SEQ ID NO: 163339 - DNA, 23 bp, Artificial sequence
  SiRNA target sequence
atattgatttactaagtttatca

SEQ ID NO: 163340 - DNA, 23 bp, Artificial sequence
  SiRNA target sequence
tattgatttactaagtttatcaa

SEQ ID NO: 163341 - DNA, 23 bp, Artificial sequence
  SiRNA target sequence
attgatttactaagtttatcaag

SEQ ID NO: 163342 - DNA, 23 bp, Artificial sequence
  SiRNA target sequence
ttgatttactaagtttatcaagt

SEQ ID NO: 163343 - DNA, 23 bp, Artificial sequence
  SiRNA target sequence
tgatttactaagtttatcaagtc
